(19) United States
(12) Patent Application Publication
(10) Pub. No.: US 2012/0005773 A1
(43) Pub. Date: Jan. 5, 2012

(54) TRANSGENIC PLANTS WITH ENHANCED AGRONOMIC TRAITS

(76) Inventors: Eric D. Aasen, Woodland, CA (US); Mark Scott Abad, Webster Groves, MO (US); Edwards Allen, O'Fallon, MO (US); Thandoni Rao Ambika, Karnataka (IN); Veena S. Anil, Bangalore (IN); Alice Clara Augustine, Karnataka (IN); Stephanie L. Back, St. Louis, MO (US); Pranesh Badami, Bangalore (IN); Amarjit Basra, Chesterfield, MO (US); Kraig L. Brustad, Saunderstown, RI (US); Molian Deng, Gover, MO (US); Todd Dezwaan, Apex, NC (US); Charles Dietrich, Chesterfield, MO (US); Stephen M. Duff, St. Louis, MO (US); Karen K. Gabbert, St. Louis, MO (US); Steve He, St. Louis, MO (US); Bill L. Hendrix, West Sacramento, CA (US); Hongwu Jia, Creve Coeur, MO (US); Vidya Kammaradi Ramanath Bhat, Karnataka (IN); Hongwu Jia, Creve Coeur, MO (US); Vidya Kammaradi Ramanath Bhat, Karnataka (IN); Balasulojini Karunanandaa, Creve Coeur, MO (US); Kevin R. Kosola, Wildwood, MO (US); Kempagangaiah Krishnamurthy, Karnataka (IN); Ganesh Kumar, Chesterfield, MO (US); Saritha V. Kuriakose, Kerela (IN); Shantala Lakkanna, Bangalore (IN); Mark E. Leibman, St. Louis, MO (US); Linda Lutfiyya, St. Louis, MO (US); Savitha Madappa, Karnataka (IN); Sivalinganna Manjunath, Chesterfield, MO (US); Robert J. Meister, St. Peters, MO (US); Bellur Narasimba Prasad, Bangalore (IN); Sasha Preuss, Webster Groves, MO (US); Qungang Qi, Chesterfield, MO (US); Dhanalakshmi Ramachandra, Bangalore (IN); S. Sangeetha, Karnataka (IN); Scott Saracco, St. Louis, MO (US); Chitresh Sharma, Himachal Pradesh (IN); Vijay K. Sharma, Wildwood, MO (US); Rajani Monnanda Somaiah, St. Louis, MO (US); Padmini Sudarshana, Bangalore (IN); Rebecca L. Thompson-Mize, St. Charles, MO (US); Srikanth Venkatachalayya, Karnataka (IN); Tyamagondlu V. Venkatesh, St. Louis, MO (US); Huai Wang, Chesterfield, MO (US); Jingrui Wu, Johnston, IA (US); Xiaoyun Wu, Chesterfield, MO (US); Xiaofeng Sean Yang, Chesterfield, MO (US); Qin Zeng, Maryland Heights, MO (US); Jianmin Zhao, St. Louis, MO (US)

(21) Appl. No.: 12/998,243

(22) PCT Filed: Sep. 30, 2009
(86) PCT No.: PCT/US2009/058908

§ 371 Date: Sep. 16, 2011

Related U.S. Application Data
(60) Provisional application No. 61/101,722, filed on Oct. 1, 2008.
(60) Provisional application No. 61/139,164, filed on Dec. 19, 2008.
(60) Provisional application No. 61/148,438, filed on Jan. 30, 2009.
(60) Provisional application No. 61/155,950, filed on Feb. 27, 2009.
(60) Provisional application No. 61/164,664, filed on Mar. 30, 2009.
(60) Provisional application No. 61/182,785, filed on Jun. 1, 2009.
(60) Provisional application No. 61/226,953, filed on Jul. 20, 2009.

(51) Int. Cl. A01H 1/02; C12N 15/63; A01G 7/00; A01H 5/00; A01H 5/10; A23L 1/20; C12N 15/29; C12N 5/10

(52) U.S. Cl. 800/275; 536/23.6; 435/320.1; 435/419; 435/418; 800/298; 800/320.1; 800/312; 800/314; 800/306; 800/320.3; 800/320.2; 426/634; 47/58.1 SE

(57) ABSTRACT

This invention provides transgenic plant cells with recombinant DNA for expression of proteins that are useful for imparting enhanced agronomic trait(s) to transgenic crop plants. This invention also provides transgenic plants and progeny seed comprising the transgenic plant cells where the plants are selected for having an enhanced trait selected from the group of traits consisting of enhanced water use efficiency, enhanced cold tolerance, increased yield, enhanced nitrogen use efficiency, enhanced seed protein and enhanced seed oil. Also disclosed are methods for manufacturing transgenic seed and plants with enhanced trait.

### CROSS REFERENCE TO RELATED APPLICATIONS

[0001] This application claims benefit under 35 USC §119(e) of U.S. provisional application Ser. Nos. 61/101,722, filed Oct. 1, 2008, 61/139,164, filed Dec. 19, 2008, 61/148,438, filed Jan. 30, 2009, 61/155,950, filed Feb. 23, 2009, 61/164,664, filed Mar. 30, 2009, 61/182,785, filed Jun. 1, 2009 and 61/226,953, filed Jul. 20, 2009, each of which is incorporated herein by reference in its entirety.

### INCORPORATION OF SEQUENCE LISTING

[0002] The sequence listing file named “56202_B_seq_listing.txt”, which is 138,581,829 bytes (measured in MS-WINDOWS) which was electronically filed on a CD-ROM which was created on Sep. 28, 2009 is incorporated herein by reference.

### FIELD OF THE INVENTION

[0003] Disclosed herein are recombinant DNA useful for providing enhanced traits to transgenic plants, seeds, pollen, plant cells and plant nuclei of such transgenic plants, methods of making and using such recombinant DNA, plants, seeds, pollen, plant cells and plant nuclei. Also disclosed are methods of producing hybrid corn seed comprising such recombinant DNA.

All genetic resources disclosed herein were directly obtained from sources that are currently common to the United States; the ancestral sources of each specific genetic material is unknown.

### SUMMARY OF THE INVENTION

[0004] An aspect of this invention provides recombinant DNA constructs comprising polynucleotides characterized by an encoded protein having amino acids representing a protein family domain module as described in Table 10. Another aspect of this invention provides recombinant DNA constructs comprising polynucleotides characterized by an encoded protein with an amino acid sequence that is at least 90% identical to a corresponding consensus sequence defined in table 8. Yet another aspect of this invention provides recombinant DNA constructs comprising polynucleotides characterized by reference to SEQ ID NO:1-307 and the cognate proteins with amino acid sequences having reference to SEQ ID NO:308-614. The recombinant DNA constructs are useful for providing enhanced traits when stably integrated into the chromosomes and expressed in the nuclei of transgenic plants cells. In some aspects of the invention the recombinant DNA constructs, when expressed in a plant cell, provide for expression of cognate proteins. In those aspects of the invention, the recombinant DNA constructs for expressing cognate proteins are characterized by cognate amino acid sequences having a sequence selected from SEQ ID NOs: 308, 310, 312-315, 317-323, 325-343, 345, 347-349, 352-354, 356, 358-359, 366-372, 374-383, 389-392, 394, 396, 401-403, 405-412, 414, 417-424, 427-453, 455-473, 475, 488-501, 503-517, 519-531, 533-540, 542-543, and 546-614; having at least 90% identity over at least 90% of the length of a sequence selected from the group consisting of SEQ ID NOs: 308, 310, 312-315, 317-323, 325-343, 345, 347-349, 352-354, 356, 358-359, 366-372, 374-383, 389-392, 394, 396, 401-403, 405-412, 414, 417-424, 427-453, 455-473, 475, 488-501, 503-517, 519-531, 533-540, 542-543, and 546-614 or that are homologous to a sequence selected from the group consisting of SEQ ID NOs: 308, 310, 312-315, 317-323, 325-343, 345, 347-349, 352-354, 356, 358-359, 366-372, 374-383, 389-392, 394, 396, 401-403, 405-412, 414, 417-424, 427-453, 455-473, 475, 488-501, 503-517, 519-531, 533-540, 542-543, and 546-614.

[0005] In other aspects of the invention the recombinant DNA constructs provide for suppression of a native protein. In those other aspects of the invention the recombinant DNA constructs are characterized as being constructed with sense-oriented and anti-sense-oriented polynucleotides, e.g. polynucleotides derived from genes having SEQ ID NOs: 2, 4, 9, 17, 37, 39, 43-44, 48, 50, 53-58, 66, 77-81, 86, 88, 90-93, 97, 106, 108-109, 118-119, 147, 167, 169-180, 195, 211, 225, 234, or 237-238 or homologous genes. When the recombinant DNA construct is expressed in corn plants, the endogenous protein is a corn protein with an amino acid sequence of SEQ ID NO:316, 344, 346, 350-351, 355, 357, 360-365, 384-388, 393, 397-400, 404, 413, 415-416, 425-426, 474, 476-487, 502, 532, 541, or 544-545 or the corn homolog of SEQ ID NOs:309, 311, 324, 373, 395, 454, or 518; when the recombinant DNA construct is expressed in soybean plants, the endogenous protein is a soybean protein with an amino acid sequence of SEQ ID NO: 309, 324, 373, 395, 518 or is a soybean homolog of SEQ ID NOs: 311, 316, 344, 346, 350-351, 355, 357, 360-365, 384-388, 393, 397-400, 404, 413, 415-416, 425-426, 454, 474, 476-487, 502, 532, 541, or 544-545; and when the recombinant DNA construct is expressed in a plant other than a corn or a soybean plant, the endogenous protein is the other plant's endogenous protein that has an amino acid sequence homologous to SEQ ID NO: 309, 311, 316, 324, 344, 346, 350-351, 355, 357, 360-365, 373, 384-388, 393, 395, 397-400, 404, 413, 415-416, 425-426, 454, 474, 476-487, 502, 518, 532, 541, or 544-545.

[0006] In practical aspects of this invention the recombinant DNA constructs of the invention are stably integrated into the chromosome of a plant cell nucleus.

[0007] This invention also provides transgenic plant cells comprising the stably integrated recombinant DNA constructs of the invention, transgenic plants and seeds comprising a plurality of such transgenic plant cells and transgenic pollen of such plants. Such transgenic plants are selected from a population of transgenic plants regenerated from plant cells transformed with recombinant DNA constructs by screening transgenic plants for an enhanced trait as compared to control plants. The enhanced trait is one or more of enhanced water use efficiency, enhanced cold tolerance, increased yield, enhanced nitrogen use efficiency, enhanced seed protein and enhanced seed oil.

[0008] In another aspect of the invention the plant cells, plants, seeds, and pollen further comprise DNA expressing a protein that provides tolerance from exposure to an herbicide applied at levels that are lethal to a wild type plant cell.

[0009] This invention also provides methods for manufacturing non-natural, transgenic seed that can be used to produce a crop of transgenic plants with an enhanced trait resulting from expression of a stably-integrated recombinant DNA construct. More specifically, the method comprises (a) screening a population of plants for an enhanced trait and a recombinant DNA construct, where individual plants in the population can exhibit the trait at a level less than, essentially the same as or greater than the level that the trait is exhibited in control plants, (b) selecting from the population one or more plants that exhibit the trait at a level greater than the level that said trait is exhibited in control plants, (c) collecting seed from a selected plant, (d) verifying that the recombinant DNA is stably integrated in said selected plants, (e) analyzing tissue of a selected plant to determine the production or suppression of a protein having the function of a protein encoded by nucleotides in a sequence of one of SEQ ID NOs:1-307. In one aspect of the invention, the plants in the population further comprise DNA expressing a protein that provides tolerance to exposure to a herbicide applied at levels that are lethal to wild type plant cells and the selecting is affected by treating the population with the herbicide, e.g. a glyphosate, dicamba, or glufosinate compound. In another aspect of the invention the plants are selected by identifying plants with the enhanced trait. The methods are especially useful for manufacturing corn, soybean, cotton, canola, alfalfa, wheat, rice, sugarcane or sugar beet seed.

[0010] Another aspect of the invention provides a method of producing hybrid corn seed comprising acquiring hybrid corn seed from a herbicide tolerant corn plant which also has stably-integrated, recombinant DNA construct comprising a promoter that is (a) functional in plant cells and (b) is operably linked to DNA that encodes or suppresses a protein having the function of a protein encoded by nucleotides in a sequence of one of SEQ ID NOs:1-307. The methods further comprise producing corn plants from said hybrid corn seed, wherein a fraction of the plants produced from said hybrid corn seed is homozygous for said recombinant DNA, a fraction of the plants produced from said hybrid corn seed is hemizygous for said recombinant DNA, and a fraction of the plants produced from said hybrid corn seed has none of said recombinant DNA; selecting corn plants which are homozygous and hemizygous for said recombinant DNA by treating with an herbicide; collecting seed from herbicide-treated-surviving corn plants and planting said seed to produce further progeny corn plants; repeating the selecting and collecting steps at least once to produce an inbred corn line; and crossing the inbred corn line with a second corn line to produce hybrid seed.

[0011] Another aspect of the invention provides a method of selecting a plant comprising plant cells of the invention by using an immunoreactive antibody to detect the presence or absence of protein expressed or suppressed by recombinant DNA in seed or plant tissue. Yet another aspect of the invention provides anti-counterfeit milled seed having, as an indication of origin, plant cells of this invention.

[0012] Still other aspects of this invention relate to transgenic plants with enhanced water use efficiency or enhanced nitrogen use efficiency. For instance, this invention provides methods of growing a corn, cotton, soybean, or canola crop without irrigation water comprising planting seed having plant cells of the invention which are selected for enhanced water use efficiency. Alternatively methods comprise applying reduced irrigation water, e.g. providing up to 300 millimeters of ground water during the production of a corn crop. This invention also provides methods of growing a corn, cotton, soybean or canola crop without added nitrogen fertilizer comprising planting seed having plant cells of the invention which are selected for enhanced nitrogen use efficiency.

### DETAILED DESCRIPTION OF THE INVENTION

[0013] In the attached sequence listing:

[0014] SEQ ID NO:1-307 are nucleotide sequences of the coding strand of DNA for “genes” used in the recombinant DNA imparting an enhanced trait in plant cells, i.e. each represents a coding sequence for a protein;

[0015] SEQ ID NO: 308-614 are amino acid sequences of the cognate protein of the “genes” with nucleotide coding sequences 1-307;

[0016] SEQ ID NO: 615-36442 are amino acid sequences of homologous proteins;

[0017] SEQ ID NO: 36443 is a nucleotide sequence of a base plasmid vector useful for corn transformation;

[0018] SEQ ID NO: 36444 is a nucleotide sequence of a base plasmid vector useful for soybean and canola transformation;

[0019] SEQ ID NO: 36445 is a nucleotide sequence of a base plasmid vector useful for cotton transformation;

[0020] SEQ ID NO: 36446 is a nucleotide sequence of a base plasmid vector useful for co-transformation to produce gene stacks in corn;

[0021] SEQ ID NO: 36447-36478 are consensus amino acid sequences. Table 8 lists the protein SEQ ID NOs and their corresponding consensus SEQ ID NOs.

[0022] As used herein a “plant cell” means a plant cell that is transformed with stably-integrated, non-natural, recombinant DNA, e.g. by Agrobacterium-mediated transformation or by bombardment using microparticles coated with recombinant DNA or other means. A plant cell of this invention can be an originally-transformed plant cell that exists as a microorganism or as a progeny plant cell that is regenerated into differentiated tissue, e.g. into a transgenic plant with stably-integrated, non-natural recombinant DNA, or seed or pollen derived from a progeny transgenic plant.

[0023] As used herein a “transgenic plant” means a plant whose genome has been altered by the stable integration of recombinant DNA. A transgenic plant includes a plant regenerated from an originally-transformed plant cell and progeny transgenic plants from later generations or crosses of a transformed plant.

[0024] As used herein “recombinant DNA” means DNA which has been a genetically engineered and constructed outside of a cell including DNA containing naturally occurring DNA or cDNA or synthetic DNA.

[0025] As used herein “consensus sequence” means an artificial sequence of amino acids in a conserved region of an alignment of amino acid sequences of homologous proteins, e.g. as determined by a CLUSTALW alignment of amino acid sequence of homolog proteins.

[0026] As used herein a “homolog” means a protein in a group of proteins that perform the same biological function, e.g. proteins that belong to the same Pfam protein family and that provide a common enhanced trait in transgenic plants of this invention. Homologs are expressed by homologous genes. With reference to homologous genes, homologs include orthologs, i.e. genes expressed in different species that evolved from a common ancestral genes by speciation and encode proteins retain the same function, but do not include paralogs, i.e. genes that are related by duplication but have evolved to encode proteins with different functions. Homologous genes include naturally occurring alleles and artificially-created variants. Degeneracy of the genetic code provides the possibility to substitute at least one base of the protein encoding sequence of a gene with a different base without causing the amino acid sequence of the polypeptide produced from the gene to be changed. When optimally aligned, homolog proteins have at least 60% identity, 65% identity, 70% identity, 75% identity, 80%, identity, 85% identity, 90% identity, 95, 96, 97, 98, or 99% identity over the full length of a protein identified as being associated with imparting an enhanced trait when expressed in plant cells. In one aspect of the invention homolog proteins have an amino acid sequence that has at least 90% identity to a consensus amino acid sequence of proteins and homologs disclosed herein.

[0027] Homologs are identified by comparison of amino acid sequence, e.g. manually or by use of a computer-based tool using known homology-based search algorithms such as the suite of BLAST programs available from NCBI. A local sequence alignment program, e.g. BLAST, can be used to search a database of sequences to find similar sequences, and the summary Expectation value (E-value) used to measure the sequence base similarity. Because a protein hit with the best E-value for a particular organism may not necessarily be an ortholog, i.e. have the same function, or be the only ortholog, a reciprocal query is used to filter hit sequences with significant E-values for ortholog identification. The reciprocal query entails search of the significant hits against a database of amino acid sequences from the base organism that are similar to the sequence of the query protein. A hit can be identified as an ortholog, when the reciprocal query's best hit is the query protein itself or a protein encoded by a duplicated gene after speciation. A further aspect of the homologs encoded by DNA useful in the transgenic plants of the invention are those proteins that differ from a disclosed protein as the result of deletion or insertion of one or more amino acids in a native sequence.

[0028] Percent identity describes the extent to which the sequences of DNA or protein segments are invariant in an alignment of sequences, for example nucleotide sequences or amino acid sequences. An alignment of sequences is created by manually aligning two sequences, e.g. a stated sequence, as provided herein, as a reference, and another sequence, to produce the highest number of matching elements, e.g. individual nucleotides or amino acids, while allowing for the introduction of gaps into either sequence. An “identity fraction” for a sequence aligned with a reference sequence is the number of matching elements, divided by the full length of the reference sequence, not including gaps introduced by the alignment process into the reference sequence. “Percent identity” (“% identity”) as used herein is the identity fraction times 100.

[0029] “Pfam” is a large collection of multiple sequence alignments and hidden Markov models covering many common protein families, e.g. Pfam version 19.0 (December 2005) contains alignments and models for 8183 protein families and is based on the Swissprot 47.0 and SP-TrEMBL 30.0 protein sequence databases. See S. R. Eddy, “Profile Hidden Markov Models”, Bioinformatics 14:755-763, 1998. The Pfam database is currently maintained and updated by the Pfam Consortium. The alignments represent some evolutionary conserved structure that has implications for the proteids function. Profile hidden Markov models (profile HMMs) built from the protein family alignments are useful for automatically recognizing that a new protein belongs to an existing protein family even if the homology by alignment appears to be low.

[0030] Protein domains are identified by querying the amino acid sequence of a protein against Hidden Markov Models which characterize protein family domains (“Pfam domains”) using HMMER software, which is available from the Pfam Consortium. The HMMER software is also disclosed in patent application publication US 2008/0148432 A1 incorporated herein by reference. A protein domain meeting the gathering cutoff for the alignment of a particular Pfam domain is considered to contain the Pfam domain.

[0031] A “Pfam domain module” is a representation of Pfam domains in a protein, in order from N terminus to C terminus. In a Pfam domain module individual Pfam domains are separated by double colons “::”. The order and copy number of the Pfam domains from N to C terminus are attributes of a Pfam domain module. Although the copy number of repetitive domains is important, varying copy number often enables a similar function. Thus, a Pfam domain module with multiple copies of a domain should define an equivalent Pfam domain module with variance in the number of multiple copies. A Pfam domain module is not specific for distance between adjacent domains, but contemplates natural distances and variations in distance that provide equivalent function. The Pfam database contains both narrowly- and broadly-defined domains, leading to identification of overlapping domains on some proteins. A Pfam domain module is characterized by non-overlapping domains. Where there is overlap, the domain having a function that is more closely associated with the function of the protein (based on the E value of the Pfam match) is selected.

[0032] Once one DNA is identified as encoding a protein which imparts an enhanced trait when expressed in transgenic plants, other DNA encoding proteins with the same Pfam domain module are identified by querying the amino acid sequence of protein encoded by candidate DNA against the Hidden Markov Models which characterizes the Pfam domains using HMMER software. Candidate proteins meeting the same Pfam domain module are in the protein family and have cognate DNA that is useful in constructing recombinant DNA for the use in the plant cells of this invention. Hidden Markov Model databases for use with HMMER software in identifying DNA expressing protein with a common Pfam domain module for recombinant DNA in the plant cells of this invention are available from the Pfam Consortium (ftp.sanger.ac.uk/pub/databases/Pfam/) and are incorporated herein by reference.

[0033] The HMMER software and Pfam databases (version 23.0) were used to identify known domains in the proteins corresponding to amino acid sequence of SEQ ID NOs: 308-310, 312-313, 315, 317-332, 334-343, 345, 347-364, 366-372, 374, 382, 387-403, 406-412, 414-425, 427-448, 450-460, 462-465, 467-477, 479-482, 484-487, 493-511, 513-539, 542, 545-558, 560-578, 580-582, 584-598, 600-602, 604-608, 612-614. All DNA encoding proteins that have scores higher than the gathering cutoff disclosed in Table 11 by Pfam analysis disclosed herein can be used in recombinant DNA of the plant cells of this invention, e.g. for selecting transgenic plants having enhanced agronomic traits. The relevant Pfams modules for use in this invention, as more specifically disclosed below, are PHD::SET, CBFB_NFYA, 2-Hacid_dh_C, 60KD_IMP, A_thal_{—}3526, AA_kinase, AA_kinase::NAD_binding_{—}3::Homoserine_dh, AA_permease, Aa_trans, ABC_membrane::ABC_tran, ABC_tran, Acetate_kinase, Acid_phosphat_B, Acyl-ACP_TE, AlaDh_PNT_N::AlaDh_PNT_C, Amino_oxidase, Aminotran_{—}1_{—}2 Aminotran_{—}5, Ammonium_transp, Ank::Ank::Ank::Ank::Ank::Ank::Ank::Ank, AP2, Arginase, Arginosuc_synth, AsnA, Asp, Asp_decarbox, ATP-sulfurylase, Auxin_inducible, BCCT, BPD_transp_{—}2, BTB, bZIP_{—}1, bZIP_{—}1::MethyltransfD12, bZIP_{—}2, bZIP_{—}2::bZIP_{—}1, C4dic_mal_tran, CBFB_NFYA, CCT, Clp_N::Clp_N::AAA::AAA_{—}2::ClpB_D2-small, cNMP_binding::Crp, CSD, DEAD::Helicase_C, DEAD_{—}2::DUF1227, Dehydrin Dimerisation::Methyltransf_{—}2, DSPc, DUF1292, DUF506, DUF640, DUF647, DUF828::PH_{—}2, eIF-5a, eRF1_{—}1::eRF1_{—}2::eRF1_{—}3, FAD_binding_{—}3::FHA, FAD_binding_{—}4::ALO, FAD_binding_{—}4::Lact-deh-memb, F-box::Tub, Fe-ADH, Form_Nir_trans, FTCD_N, Gal_Lectin, GATase_{—}2::Asn_synthase, GATase_{—}2::Glu_syn_centrat:Glu_synthase::GXGXG, GDPD, GH3, Gln-synt_N::Gln-synt_C, Globin::FAD_binding_{—}6::NAD_binding_{—}1, Glt_symporter, Glutaredoxin, Glutaredoxin::Glutaredoxin::Glutaredoxin, Glyco_transf_{—}20::Trehalose_PPase, GTP1_OBG::MMR_HSR1::DUF1967, HLH, HMG_box Homeobox::HALZ, Homeobox:: START, HR_lesion, HSP20, HSP70, LIM, LIM::LIM, LisH::WD40::WD40::WD40::WD40::WD40::WD40::WD40 LRR_{—}1::LRR_{—}1::LRR_{—}1::LRR_{—}1::Pkinase_Tyr, LRRNT_{—}2::LRR_{—}1::LRR_{—}1::LRR_{—}1::LRR_{—}1::LRR_{—}1::LRR_{—}1::LRR_{—}1::LRR_{—}1::LRR_{—}1::L RR_{—}1::LRR_{—}1::LRR_{—}1::LRR_{—}1::Pkinase, LRRNT_{—}2::LRR_{—}1::Pkinase_Tyr, LysM, MBD, MethyltransfD 12. MIT::AAA::Vps4_C, Mito_carr::Mito_carr::Mito_carr, MMR_HSR1::KH_{—}2, Monooxygenase_B, Myb_DNA-binding::Myb_DNA-binding, NAD_binding_{—}1, NAD_binding_{—}2, NAM, Ndr, NIR_SIR_ferr::NIR_SIR::NIR_SIR_ferr, Nitroreductase, NUDIX, OKR_DC_{—}1::OKR_DC_{—}1_C, OPT, p450, PAS_{—}2::GAF::Phytochrome::PAS::PAS::HisKA::HATPase_c, PBP, Peptidase_C2::Calpain_III, Peptidase_{—}510, peroxidase, Pkinase, Pkinase::NAF, PLAC8, PMEI, PDX::Homeobox, PP2C, PTA_PTB, PTR2 RCC1::RCC1::RCC1, Response_reg::Myb_DNA-binding, Ribosomal_L21p, RolB_RolC::Amino_oxidase, RRM_{—}1, RRM_{—}1::RRM_{—}1, RRM_{—}1::zf-CCHC RWP-RK::PB1, SBP, SBP_bac_{—}3, Sina, SIS::CBS, SOUL, SPRY, SRF-TF, SRF-TF::K-box, SSF, Ssl1::C1_{—}4, Sulfate_transp::STAS, Thg1::Thg1 Thiolase_N::Thiolase_C, Thioredoxin::Glutaredoxin::Glutaredoxin::Glutaredoxin, TPP_enzyme_N::TPP_enzyme_M::TPP_enzyme_C Transaldolase, tRNA_synt_{—}1c_R1::tRNA_synt_{—}1c_R2::tRNA-synt_{—}1c::tRNA-synt_{—}1c_C, ubiquitin, U-box, Usp, WD40::WD40, WRKY, WRKY::WRKY zf-B_box, zf-B_box::MethyltransfD12, zf-B_box::zf-B_box::CCT, zf-C3HC4, zf-CCCH, zf-CCHC::Plus-3, and zf-D of for which databases are included in the appended computer listing.

[0034] As used herein “promoter” means regulatory DNA for initializing transcription. A “plant promoter” is a promoter capable of initiating transcription in plant cells whether or not its origin is a plant cell, e.g. is it well known that Agrobacterium promoters are functional in plant cells. Thus, plant promoters include promoter DNA obtained from plants, plant viruses and bacteria such as Agrobacterium and Bradyrhizobium bacteria. Examples of promoters under developmental control include promoters that preferentially initiate transcription in certain tissues, such as leaves, roots, or seeds. Such promoters are referred to as “tissue preferred”. Promoters that initiate transcription only in certain tissues are referred to as “tissue specific”. A “cell type” specific promoter primarily drives expression in certain cell types in one or more organs, for example, vascular cells in roots or leaves. An “inducible” or “repressible” promoter is a promoter which is under environmental control. Examples of environmental conditions that may effect transcription by inducible promoters include anaerobic conditions, or certain chemicals, or the presence of light. Tissue specific, tissue preferred, cell type specific, and inducible promoters constitute the class of “non-constitutive” promoters. A “constitutive” promoter is a promoter which is active under most conditions.

[0035] As used herein “operably linked” means the association of two or more DNA fragments in a recombinant DNA construct so that the function of one, e.g. protein-encoding DNA, is controlled by the other, e.g. a promoter.

[0036] As used herein “expressed” means produced, e.g. a protein is expressed in a plant cell when its cognate DNA is transcribed to mRNA that is translated to the protein.

[0037] As used herein “suppressed” means decreased, e.g. a protein is suppressed in a plant cell when there is a decrease in the amount and/or activity of the protein in the plant cell. The presence or activity of the protein can be decreased by any amount up to and including a total loss of protein expression and/or activity.

[0038] As used herein a “control plant” means a plant that does not contain the recombinant DNA that imparts an enhanced trait. A control plant is used to identify and select a transgenic plant that has an enhanced trait. A suitable control plant can be a non-transgenic plant of the parental line used to generate a transgenic plant, i.e. devoid of recombinant DNA. A suitable control plant may in some cases be a progeny of a hemizygous transgenic plant line that does not contain the recombinant DNA, known as a negative segregant.

[0039] As used herein an “enhanced trait” means a characteristic of a transgenic plant that includes, but is not limited to, an enhance agronomic trait characterized by enhanced plant morphology, physiology, growth and development, yield, nutritional enhancement, disease or pest resistance, or environmental or chemical tolerance. In more specific aspects of this invention enhanced trait is selected from group of enhanced traits consisting of enhanced water use efficiency, enhanced cold tolerance, increased yield, enhanced nitrogen use efficiency, enhanced seed protein and enhanced seed oil. In an important aspect of the invention the enhanced trait is enhanced yield including increased yield under non-stress conditions and increased yield under environmental stress conditions. Stress conditions may include, for example, drought, shade, fungal disease, viral disease, bacterial disease, insect infestation, nematode infestation, cold temperature exposure, heat exposure, osmotic stress, reduced nitrogen nutrient availability, reduced phosphorus nutrient availability and high plant density. “Yield” can be affected by many properties including without limitation, plant height, pod number, pod position on the plant, number of internodes, incidence of pod shatter, grain size, efficiency of nodulation and nitrogen fixation, efficiency of nutrient assimilation, resistance to biotic and abiotic stress, carbon assimilation, plant architecture, resistance to lodging, percent seed germination, seedling vigor, and juvenile traits. Yield can also be affected by efficiency of germination (including germination in stressed conditions), growth rate (including growth rate in stressed conditions), ear number, seed number per ear, seed size, composition of seed (starch, oil, protein) and characteristics of seed fill.

[0040] Increased yield of a transgenic plant of the present invention can be measured in a number of ways, including test weight, seed number per plant, seed weight, seed number per unit area (i.e. seeds, or weight of seeds, per acre), bushels per acre, tons per acre, or kilo per hectare. For example, corn yield may be measured as production of shelled corn kernels per unit of production area, for example in bushels per acre or metric tons per hectare, often reported on a moisture adjusted basis, for example at 15.5 percent moisture. Increased yield may result from improved utilization of key biochemical compounds, such as nitrogen, phosphorous and carbohydrate, or from improved responses to environmental stresses, such as cold, heat, drought, salt, and attack by pests or pathogens. Recombinant DNA used in this invention can also be used to provide plants having improved growth and development, and ultimately increased yield, as the result of modified expression of plant growth regulators or modification of cell cycle or photosynthesis pathways. Also of interest is the generation of transgenic plants that demonstrate enhanced yield with respect to a seed component that may or may not correspond to an increase in overall plant yield. Such properties include enhancements in seed oil, seed molecules such as protein and starch, oil components as may be manifest by an alterations in the ratios of seed components.

[0041] Recombinant DNA constructs are assembled using methods well known to persons of ordinary skill in the art and typically comprise a promoter operably linked to DNA, the expression of which provides the enhanced agronomic trait. Other construct components may include additional regulatory elements, such as 5′ leaders and introns for enhancing transcription, 3′ untranslated regions (such as polyadenylation signals and sites), DNA for transit or signal peptides.

[0042] Numerous promoters that are active in plant cells have been described in the literature. These include promoters present in plant genomes as well as promoters from other sources, including nopaline synthase (NOS) promoter and octopine synthase (OCS) promoters carried on tumor-inducing plasmids of Agrobacterium tumefaciens and the CaMV35S promoters from the cauliflower mosaic virus as disclosed in U.S. Pat. Nos. 5,164,316 and 5,322,938. Useful promoters derived from plant genes are found in U.S. Pat. No. 5,641,876 which discloses a rice actin promoter, U.S. Pat. No. 7,151,204 which discloses a maize chloroplast aldolase promoter and a maize aldolase (FDA) promoter, and US Patent Application Publication 2003/0131377 A1 which discloses a maize nicotianamine synthase promoter. These and numerous other promoters that function in plant cells are known to those skilled in the art and available for use in recombinant polynucleotides of the present invention to provide for expression of desired genes in transgenic plant cells.

[0043] Furthermore, the promoters may be altered to contain multiple “enhancer sequences” to assist in elevating gene expression. Such enhancers are known in the art. By including an enhancer sequence with such constructs, the expression of the selected protein may be enhanced. These enhancers often are found 5′ to the start of transcription in a promoter that functions in eukaryotic cells, but can often be inserted upstream (5′) or downstream (3′) to the coding sequence. In some instances, these 5′ enhancing elements are introns. Particularly useful as enhancers are the 5′ introns of the rice actin 1 (see U.S. Pat. No. 5,641,876) and rice actin 2 genes, the maize alcohol dehydrogenase gene intron, the maize heat shock protein 70 gene intron (U.S. Pat. No. 5,593,874) and the maize shrunken 1 gene. See also US Patent Application Publication 2002/0192813A1 which discloses 5′, 3′ and intron elements useful in the design of effective plant expression vectors.

[0044] In other aspects of the invention, sufficient expression in plant seed tissues is desired to affect improvements in seed composition. Exemplary promoters for use for seed composition modification include promoters from seed genes such as napin as disclosed in U.S. Pat. No. 5,420,034, maize L3 oleosin as disclosed in U.S. Pat. No. 6,433,252), zein Z27 as disclosed by Russell et al. (1997) Transgenic Res. 6(2):157-166), globulin 1 as disclosed by Belanger et al (1991) Genetics 129:863-872), glutelin 1 as disclosed by Russell (1997) supra), and peroxiredoxin antioxidant (Per1) as disclosed by Stacy et al. (1996) Plant Mol. Biol. 31(6):1205-1216.

[0045] Recombinant DNA constructs useful in this invention will also generally include a 3′ element that typically contains a polyadenylation signal and site. Well-known 3′ elements include those from Agrobacterium tumefaciens genes such as nos 3′, tml 3′, tmr 3′, tms 3′, ocs 3′, tr7 3′, for example disclosed in U.S. Pat. No. 6,090,627; 3′ elements from plant genes such as wheat (Triticum aesevitum) heat shock protein 17 (Hsp17 3′), a wheat ubiquitin gene, a wheat fructose-1,6-biphosphatase gene, a rice glutelin gene, a rice lactate dehydrogenase gene and a rice beta-tubulin gene, all of which are disclosed in US Patent Application Publication 2002/0192813 A1; and the pea (Pisum sativum) ribulose biphosphate carboxylase gene (rbs 3′), and 3′ elements from the genes within the host plant.

[0046] Constructs and vectors may also include a transit peptide for targeting of a gene to a plant organelle, particularly to a chloroplast, leucoplast or other plastid organelle. For descriptions of the use of chloroplast transit peptides see U.S. Pat. No. 5,188,642 and U.S. Pat. No. 5,728,925. For description of the transit peptide region of an Arabidopsis EPSPS gene useful in the present invention, see Klee, H. J. et al (MGG (1987) 210:437-442).

[0047] Recombinant DNA constructs for gene suppression can be designed for any of a number the well-known methods for suppressing transcription of a gene, the accumulation of the mRNA corresponding to that gene or preventing translation of the transcript into protein. Posttranscriptional gene suppression can be practically effected by transcription of RNA that forms double-stranded RNA (dsRNA) having homology to mRNA produced from a gene targeted for suppression.

[0048] Gene suppression can also be achieved by insertion mutations created by transposable elements may also prevent gene function. For example, in many dicot plants, transformation with the T-DNA of Agrobacterium may be readily achieved and large numbers of transformants can be rapidly obtained. Also, some species have lines with active transposable elements that can efficiently be used for the generation of large numbers of insertion mutations, while some other species lack such options. Mutant plants produced by Agrobacterium or transposon mutagenesis and having altered expression of a polypeptide of interest can be identified using the polynucleotides of the present invention. For example, a large population of mutated plants may be screened with polynucleotides encoding the polypeptide of interest to detect mutated plants having an insertion in the gene encoding the polypeptide of interest.

[0049] Transgenic plants may comprise a stack of one or more polynucleotides disclosed herein resulting in the production or suppression of multiple polypeptide sequences. Transgenic plants comprising stacks of polynucleotide sequences can be obtained by either or both of traditional breeding methods or through genetic engineering methods. These methods include, but are not limited to, breeding individual lines each comprising a polynucleotide of interest, transforming a transgenic plant comprising a gene disclosed herein with a subsequent gene, and co-transformation of genes into a single plant cell. Co-transformation of genes can be carried out using single transformation vectors comprising multiple genes or genes carried separately on multiple vectors.

[0050] Transgenic plants comprising or derived from plant cells of this invention transformed with recombinant DNA can be further enhanced with stacked traits, e.g. a crop plant having an enhanced trait resulting from expression of DNA disclosed herein in combination with herbicide and/or pest resistance traits. For example, genes of the current invention can be stacked with other traits of agronomic interest, such as a trait providing herbicide resistance, or insect resistance, such as using a gene from Bacillus thuringensis to provide resistance against lepidopteran, coliopteran, homopteran, hemiopteran, and other insects. Herbicides for which transgenic plant tolerance has been demonstrated and the method of the present invention can be applied include, but are not limited to, glyphosate, dicamba, glufosinate, sulfonylurea, bromoxynil and norflurazon herbicides. Polynucleotide molecules encoding proteins involved in herbicide tolerance are well-known in the art and include, but are not limited to, a polynucleotide molecule encoding 5-enolpyruvylshikimate-3-phosphate synthase (EPSPS) disclosed in U.S. Pat. Nos. 5,094,945; 5,627,061; 5,633,435 and 6,040,497 for imparting glyphosate tolerance; polynucleotide molecules encoding a glyphosate oxidoreductase (GOX) disclosed in U.S. Pat. No. 5,463,175 and a glyphosate-N-acetyl transferase (GAT) disclosed in US Patent Application Publication 2003/0083480 A1 also for imparting glyphosate tolerance; dicamba monooxygenase disclosed in US Patent Application Publication 2003/0135879 A1 for imparting dicamba tolerance; a polynucleotide molecule encoding bromoxynil nitrilase (Bxn) disclosed in U.S. Pat. No. 4,810,648 for imparting bromoxynil tolerance; a polynucleotide molecule encoding phytoene desaturase (crtl) described in Misawa et al, (1993) Plant J. 4:833-840 and in Misawa et al, (1994) Plant J. 6:481-489 for norflurazon tolerance; a polynucleotide molecule encoding acetohydroxyacid synthase (AHAS, aka ALS) described in Sathasiivan et al. (1990) Nucl. Acids Res. 18:2188-2193 for imparting tolerance to sulfonylurea herbicides; polynucleotide molecules known as bar genes disclosed in DeBlock, et al. (1987) EMBO J. 6:2513-2519 for imparting glufosinate and bialaphos tolerance; polynucleotide molecules disclosed in US Patent Application Publication 2003/010609 A1 for imparting N-amino methyl phosphonic acid tolerance; polynucleotide molecules disclosed in U.S. Pat. No. 6,107,549 for impartinig pyridine herbicide resistance; molecules and methods for imparting tolerance to multiple herbicides such as glyphosate, atrazine, ALS inhibitors, isoxoflutole and glufosinate herbicides are disclosed in U.S. Pat. No. 6,376,754 and US Patent Application Publication 2002/0112260. Molecules and methods for imparting insect/nematode/virus resistance are disclosed in U.S. Pat. Nos. 5,250,515; 5,880,275; 6,506,599; 5,986,175 and US Patent Application Publication 2003/0150017 A1.

### Plant Cell Transformation Methods

[0051] Numerous methods for transforming chromosomes in a plant cell nucleus with recombinant DNA are known in the art and are used in methods of preparing a transgenic plant cell nucleus cell, and plant. Two effective methods for such transformation are Agrobacterium-mediated transformation and microprojectile bombardment. Microprojectile bombardment methods are illustrated in U.S. Pat. Nos. 5,015,580 (soybean); 5,550,318 (corn); 5,538,880 (corn); 5,914,451 (soybean); 6,160,208 (corn); 6,399,861 (corn); 6,153,812 (wheat) and 6,365,807 (rice) and Agrobacterium-mediated transformation is described in U.S. Pat. Nos. 5,159,135 (cotton); 5,824,877 (soybean); 5,463,174 (canola); 5,591,616 (corn); 5,846,797 (cotton); 6,384,301 (soybean), 7,026,528 (wheat) and 6,329,571 (rice), US Patent Application Publication 2004/0087030 A1 (cotton), and US Patent Application Publication 2001/0042257 A1 (sugar beet), all of which are incorporated herein by reference for enabling the production of transgenic plants. Transformation of plant material is practiced in tissue culture on a nutrient media, i.e. a mixture of nutrients that will allow cells to grow in vitro. Recipient cell targets include, but are not limited to, meristem cells, hypocotyls, calli, immature embryos and gametic cells such as microspores, pollen, sperm and egg cells. Callus may be initiated from tissue sources including, but not limited to, immature embryos, hypocotyls, seedling apical meristems, microspores and the like. Cells containing a transgenic nucleus are grown into transgenic plants.

[0052] In addition to direct transformation of a plant material with a recombinant DNA, a transgenic plant cell nucleus can be prepared by crossing a first plant having cells with a transgenic nucleus with recombinant DNA with a second plant lacking the transgenic nucleus. For example, recombinant DNA can be introduced into a nucleus from a first plant line that is amenable to transformation to transgenic nucleus in cells that are grown into a transgenic plant which can be crossed with a second plant line to introgress the recombinant DNA into the second plant line. A transgenic plant with recombinant DNA providing an enhanced trait, e.g. enhanced yield, can be crossed with transgenic plant line having other recombinant DNA that confers another trait, for example herbicide resistance or pest resistance, to produce progeny plants having recombinant DNA that confers both traits. Typically, in such breeding for combining traits the transgenic plant donating the additional trait is a male line and the transgenic plant carrying the base traits is the female line. The progeny of this cross will segregate such that some of the plants will carry the DNA for both parental traits and some will carry DNA for one parental trait; such plants can be identified by markers associated with parental recombinant DNA, e.g. marker identification by analysis for recombinant DNA or, in the case where a selectable marker is linked to the recombinant, by application of the selecting agent such as a herbicide for use with a herbicide tolerance marker, or by selection for the enhanced trait. Progeny plants carrying DNA for both parental traits can be crossed back into the female parent line multiple times, for example usually 6 to 8 generations, to produce a progeny plant with substantially the same genotype as one original transgenic parental line but for the recombinant DNA of the other transgenic parental line

[0053] In the practice of transformation DNA is typically introduced into only a small percentage of target plant cells in any one transformation experiment. Marker genes are used to provide an efficient system for identification of those cells that are stably transformed by receiving and integrating a recombinant DNA molecule into their genomes. Preferred marker genes provide selective markers which confer resistance to a selective agent, such as an antibiotic or a herbicide. Any of the herbicides to which plants of this invention may be resistant are useful agents for selective markers. Potentially transformed cells are exposed to the selective agent. In the population of surviving cells will be those cells where, generally, the resistance-conferring gene is integrated and expressed at sufficient levels to permit cell survival. Cells may be tested further to confirm stable integration of the exogenous DNA. Commonly used selective marker genes include those conferring resistance to antibiotics such as kanamycin and paromomycin (nptII), hygromycin B (aph IV), spectinomycin (aadA) and gentamycin (aac3 and aacC4) or resistance to herbicides such as glufosinate (bar or pat), dicamba (DMO) and glyphosate (aroA or EPSPS). Examples of such selectable markers are illustrated in U.S. Pat. Nos. 5,550,318; 5,633,435; 5,780,708 and 6,118,047. Markers which provide an ability to visually screen transformants can also be employed, for example, a gene expressing a colored or fluorescent protein such as a luciferase or green fluorescent protein (GFP) or a gene expressing a beta-glucuronidase or uidA gene (GUS) for which various chromogenic substrates are known.

[0054] Plant cells that survive exposure to the selective agent, or plant cells that have been scored positive in a screening assay, may be cultured in regeneration media and allowed to mature into plants. Developing plantlets regenerated from transformed plant cells can be transferred to plant growth mix, and hardened off, for example, in an environmentally controlled chamber at about 85% relative humidity, 600 ppm CO₂, and 25-250 microeinsteins m⁻² s⁻¹ of light, prior to transfer to a greenhouse or growth chamber for maturation. Plants are regenerated from about 6 weeks to 10 months after a transformant is identified, depending on the initial tissue, and plant species. Plants may be pollinated using conventional plant breeding methods known to those of skill in the art and seed produced, for example self-pollination is commonly used with transgenic corn. The regenerated transformed plant or its progeny seed or plants can be tested for expression of the recombinant DNA and selected for the presence of enhanced agronomic trait.

### Transgenic Plants and Seeds

[0055] Transgenic plants derived from transgenic plant cells having a transgenic nucleus of this invention are grown to generate transgenic plants having an enhanced trait as compared to a control plant and produce transgenic seed and haploid pollen of this invention. Such plants with enhanced traits are identified by selection of transformed plants or progeny seed for the enhanced trait. For efficiency a selection method is designed to evaluate multiple transgenic plants (events) comprising the recombinant DNA, for example multiple plants from 2 to 20 or more transgenic events. Transgenic plants grown from transgenic seed provided herein demonstrate improved agronomic traits that contribute to increased yield or other trait that provides increased plant value, including, for example, improved seed quality. Of particular interest are plants having enhanced water use efficiency, enhanced cold tolerance, increased yield, enhanced nitrogen use efficiency, enhanced seed protein and enhanced seed oil.

Table 1 provides a list of protein encoding DNA (“genes”) that are useful as recombinant DNA for production of transgenic plants with enhanced agronomic trait, the elements of Table 1 are described by reference to: “PEP SEQ ID NO” identifies an amino acid sequence from SEQ ID NO: 308 to 614.
“NUC SEQ ID NO” identifies a DNA sequence from SEQ ID NO:1 to 307.
“Gene ID” refers to an arbitrary identifier.
“Gene Name” denotes a common name for the protein encoded by the recombinant DNA preceded by the abbreviated genus and species as fully defined in the sequence listing. The + or − preceding the gene name indicates whether the protein is expressed (+) or suppressed (−) in plants to provide an enhanced trait.

TABLE 1

| NUC | PEP | | |
|---|---|---|---|
| SEQ | SEQ | | |
| ID | ID | | |
| NO | NO | Gene ID | Gene Name |
| 1 | 308 | 1174936:1 | +Os.AlaAT |
| 2 | 309 | Mnom000960 | −Gm.G1543 like 1 |
| 3 | 310 | Mnom001103 | +Gm.Hyh |
| 4 | 311 | 1194741:1 | −Gh.IDA-like 1:3:1 |
| 5 | 312 | Mnom001209 | +Zm.SCPL21 |
| 6 | 313 | Mnom001263 | +Zm.Tga1 |
| 7 | 314 | Mnom001273 | +Zm.A1ZM023275_at_Adenosine |
| | | | 5′-phosphosulfate reductase 8 |
| 8 | 315 | Mnom001274 | +Zm.A1ZM056190_at_B0806H07.1 |
| | | | protein |
| 9 | 316 | Mnom001282 | −Zm.A1ZM009253_at_Hypothetical |
| | | | protein OJ1254_E07.2-1 |
| 10 | 317 | 1174117:1 | +Ss.CGPG7432_hypothetical |
| | | | protein S\|\|1109 |
| 11 | 318 | 1174129:1 | +Xn.CGPG6757_Aspartate |
| | | | Aminotransferase |
| 12 | 319 | 1169877:1 | +Cg.D-lactate |
| | | | dehydrogenase |
| | | | (EC:1.1.1.28) |
| 13 | 320 | Mnom001350 | +Ns.glycerol |
| | | | dehydrogenase (NADP+) |
| | | | (EC:1.1.1.72) |
| 14 | 321 | PHE0015383 | +Bs.AldA (L-ALANINE |
| | | | DEHYDROGENASE) |
| | | | (EC:1.4.1.1) |
| 15 | 322 | Mnom001361 | +Mt.Thiolase |
| 16 | 323 | Mnom001363 | +Gh.Thiolase |
| 17 | 324 | Mnom001367 | −Gm.Soul |
| 18 | 325 | Mnom001370 | +Gm.X. bovienii spartate |
| | | | kinase_T359I |
| 19 | 326 | Mnom001372 | +Gm.X.nematophila AK_T359I |
| 20 | 327 | Mnom001373 | +Ec. metL AK-HSDS |
| 21 | 328 | 1186474:1 | +Gm.PIL-B |
| 22 | 329 | PHE0024821 | +Gm.PIL-B |
| 23 | 330 | 1184139:1 | +At.PIF4 |
| 24 | 331 | PHE0003348 | +At.PIF4 |
| 25 | 332 | 1181794:1 | +Gm.PICOT |
| 26 | 333 | 1185540:1 | +Ag.PRS |
| 27 | 334 | 1184141:1 | +At.CaMK4/At.CRK3 |
| 28 | 335 | 1183499:1 | +At.GLN1; 1 |
| 29 | 336 | 1184141:1 | +At.CaMK4/At.CRK3 |
| 30 | 337 | 1183676:1 | +Gm.Myc:Dam |
| 31 | 338 | Mnom001401 | +Gm.At.Hy5:Myc:Dam |
| 32 | 339 | 1184600:1 | +Gm.At.G1988:Myc:DAM |
| 33 | 340 | Mnom001436 | +Rp.indole-3-pyruvate |
| | | | decarboxylase |
| 34 | 341 | Mnom001439 | +At.tryptophane |
| | | | monooxygenase |
| 35 | 342 | Mnom001440 | +Pf.tryptophane |
| | | | monooxygenase |
| 36 | 343 | Mnom001453 | +Ta.Fd Nitrite reductase |
| 37 | 344 | 1181413:1 | −Zm.14-3-3 corn homolog |
| | | | (Chi) |
| 38 | 345 | Mnom001471 | +Zm.PMH1 |
| 39 | 346 | 1193022:1 | −Zm.NAC6-like |
| 40 | 347 | Mnom001521 | +Gm.ERL2 |
| 41 | 348 | 1168947:1 | +At.G1543-native-delta |
| | | | 1-21 |
| 42 | 349 | 1170457:1 | +At.G1543 Kozak Variant |
| | | | (aa 1-4, changed MIKL to |
| | | | MASS) |
| 43 | 350 | PHE0001187 | −Zm.spa1-like |
| 44 | 351 | Mnom001594 | −Zm.SLAC1 |
| 45 | 352 | 1171516:1 | +St.Pox1 |
| 46 | 353 | PHE0022652 | +St.Pox1 |
| 47 | 354 | Mnom001612 | +Zm.HOS15 |
| 48 | 355 | Mnom001615 | −Zm.ABI5 |
| 49 | 356 | Mnom001618 | +Le.SlGalLDH |
| 50 | 357 | Mnom001628 | −Zm.NAC-like |
| 51 | 358 | Mnom001629 | +Zm.NFD1 |
| 52 | 359 | Mnom001636 | +Zm.POZ domain protein |
| 53 | 360 | Mnom001641 | −Zm.Putative nodule |
| | | | inception protein |
| 54 | 361 | Mnom001642 | −Zm.ammonium |
| | | | transporter |
| 55 | 362 | Mnom001643 | −Zm.POZ domain protein |
| 56 | 363 | Mnom001644 | −Zm.isp4, oligopeptide |
| | | | transport |
| 57 | 364 | Mnom001645 | −Zm.unknown |
| 58 | 365 | Mnom001647 | −Zm.RAD-like |
| 59 | 366 | Mnom001651 | +Pp.Formiminotransferase |
| | | | cyclodeaminase |
| 60 | 367 | Mnom001652 | +Zm.Formiminotransferase |
| | | | cyclodeaminase |
| 61 | 368 | Mnom001653 | +Cr.Na/glucose |
| | | | cotransporter |
| 62 | 369 | Mnom001661 | +Cr.Cysteine sulfinate |
| | | | desulfinase/cysteine |
| | | | desulfurase, NifS |
| 63 | 370 | 1194860:1 | +Cr.Cysteine desulfurase |
| | | | (seleno-cysteine lyase) |
| 64 | 371 | Mnom001665 | +Ne.ammonium |
| | | | monooxygenase subunit A |
| 65 | 372 | 1180851:1 | +PMEI1 |
| 66 | 373 | Mnom001747 | −Gm.MBD6 Soy homolog |
| 67 | 374 | 1170440:1 | +Gm.Col9 |
| | | | MRT3847_269613C |
| 68 | 375 | 1174098:1 | +GITI.PHD_SET |
| 69 | 376 | 1183497:1 | +Gm.G2512-like_AP2 |
| | | | domain transcriptional |
| | | | regulator |
| 70 | 377 | 1188159:1 | +Gm.G565-like_bZIP |
| | | | domain transcriptional |
| | | | regulator |
| 71 | 378 | 1170356:1 | +Gm.G2113-like_AP2 |
| | | | domain transcriptional |
| | | | regulator |
| 72 | 379 | 1170348:1 | +Gm.CGPG3920_expressed |
| | | | protein |
| 73 | 380 | 1170352:1 | +Gm.CGPG7836_ethylene |
| | | | responsive element |
| | | | binding factor_G1005-like |
| 74 | 381 | 1170996:1 | +At.Hsp101 |
| 75 | 382 | 1170342:1 | +At.PEL1 |
| 76 | 383 | 1170354:1 | +Gm.Unknown G1988 |
| | | | soybean heat induced |
| | | | gene |
| 77 | 384 | PHE0024001 | −Zm.phosphoglucomutase |
| 78 | 385 | 1190095:1 | −Zm.phosphoglucomutase |
| 79 | 386 | Mnom001839 | −Zm.ATHB16 HD-Zip I |
| | | | transcription factor |
| 80 | 387 | Mnom001840 | −Zm.SOMNUS CCCH-type |
| | | | zinc finger protein |
| 81 | 388 | Mnom001841 | −Zm.zinc finger protein 10 |
| 82 | 389 | 1174488:1 | +Zm.basic helix-loop-helix |
| | | | (bHLH) family protein |
| | | | (AT5G50915-like) |
| 83 | 390 | Mnom001851 | +At.Arginosuccinate |
| | | | synthase |
| 84 | 391 | Mnom001869 | +Zm.Glutaredoxin domain |
| | | | containing protein |
| 85 | 392 | 1175917:1 | +Ec.AsnA |
| 86 | 393 | Mnom001877 | −Zm.FNR |
| 87 | 394 | Mnom001880 | +Ss.ntcA |
| 88 | 395 | Mnom001900 | −Gm.FW2.2 like, PLAC8 |
| 89 | 396 | Mnom001903 | +Mt.MTP_Ac160241 |
| 90 | 397 | Mnom001915 | −Zm.MYB74 |
| 91 | 398 | Mnom001921 | −Zm.ASA1 |
| 92 | 399 | Mnom001922 | −Zm.WRKY72 |
| 93 | 400 | Mnom001925 | −Zm.CND41 homolog |
| 94 | 401 | Mnom001930 | +Cr.Glutamine synthetase |
| | | | (GLN4) |
| 95 | 402 | Mnom001933 | +Cr.Ferredoxin-dependent |
| | | | glutamate synthase (GSF1) |
| 96 | 403 | Mnom001936 | +Cr.nitrite transporter |
| | | | NAR1 |
| 97 | 404 | Mnom001937 | −Zm.Initiator-binding |
| | | | protein; IBP2 |
| 98 | 405 | 1173274:1 | +At.Rif1 (Resistant to |
| | | | inhibition by FSM) |
| 99 | 406 | 1175406:1 | +At.Glyoxylate |
| | | | Reductase 2 |
| 100 | 407 | 1178997:1 | +At.Glyoxylate |
| | | | Reductase 1 |
| 101 | 408 | 1194803:1 | +Cr.CPYC type (GRX1) |
| 102 | 409 | 1194791:1 | +Cr.CGFS type (GRX3) |
| 103 | 410 | 1178100:1 | +At.wt G1543 |
| 104 | 411 | 1184554:1 | +At.G1543 (R138, 142A) |
| 105 | 412 | 1178103:1 | +At.G1543 NNO |
| 106 | 413 | 1170936:1 | −Zm.TAA1 |
| 107 | 414 | Mnom001989 | +Zm.Ghd7-2 |
| 108 | 415 | Mnom001991 | −Zm.MBD6 |
| 109 | 416 | Mnom001992 | −Zm.MBD10 |
| 110 | 417 | 1175891:1 | +Zm.CGPG9187_Putative |
| | | | aurora-related kinase |
| 111 | 418 | 1174476:1 | +At.CGPG4567_Hypothetical |
| | | | protein AT4g11250 |
| 112 | 419 | 1181001:1 | +At.CGPG3781_MADS-box |
| | | | protein-like |
| 113 | 420 | 1158841:1 | +Pd.PHE0017217_SCF5A8 |
| 114 | 421 | 1178370:1 | +At.HDG11 |
| 115 | 422 | 1178370:1 | +At.HDG11 |
| 116 | 423 | PHE0024161 | +At.HDG11 |
| 117 | 424 | PHE0024161 | +At.HDG11 |
| 118 | 425 | Mnom002088 | −Zm.Arginase (EC 3.5.3.1) |
| 119 | 426 | 1195680:1 | −Zm.KINB1 |
| 120 | 427 | Mnom002104 | +Gm.Nuclear factor Y |
| | | | NFYA5 |
| 121 | 428 | Mnom002105 | +Gm.Nuclear factor Y |
| | | | NFYA5 |
| 122 | 429 | Mnom002106 | +Gm.Nuclear factor Y |
| | | | NFYA5 |
| 123 | 430 | Mnom002107 | +Gm.Nuclear factor Y |
| | | | NFYA5 |
| 124 | 431 | Mnom002108 | +Gm.Nuclear factor Y |
| | | | NFYA5 |
| 125 | 432 | Mnom002115 | +At.phyB |
| 126 | 433 | 1176524:1 | +Gm.CGPG5320_HMG1/ |
| | | | 2-like protein |
| 127 | 434 | 1183504:1 | +Zm.SPRY |
| 128 | 435 | 1183504:1 | +Zm.SPRY |
| 129 | 436 | 1180104:1 | +Zm.RRM1 |
| 130 | 437 | 1180104:1 | +Zm.RRM1 |
| 131 | 438 | 1182647:1 | +Zm.RRM2 |
| 132 | 439 | 1182647:1 | +Zm.RRM2 |
| 133 | 440 | 1182645:1 | +Zm.RRM3 |
| 134 | 441 | 1182645:1 | +Zm.RRM3 |
| 135 | 442 | 1182640:1 | +Zm.KH2/ERA-like |
| 136 | 443 | 1182640:1 | +Zm.KH2/ERA-like |
| 137 | 444 | 1182640:1 | +Zm.KH2/ERA-like |
| 138 | 445 | 1180839:1 | +Os.BIRF1 |
| | | | (Benzathiodiazole induced |
| | | | ring finger protein 1) |
| 139 | 446 | PHE0024283 | +Os.BIRF1 |
| | | | (Benzathiodiazole induced |
| | | | ring finger protein 1) |
| 140 | 447 | PHE0024283 | +Os.BIRF1 |
| | | | (Benzathiodiazole induced |
| | | | ring finger protein 1) |
| 141 | 448 | 1180839:1 | +Os.BIRF1 |
| | | | (Benzathiodiazole induced |
| | | | ring finger protein 1) |
| 142 | 449 | Mnom002224 | +Zm.CTR2 |
| 143 | 450 | 1188219:1 | +Rs.glyoxylate reductase |
| 144 | 451 | 1187645:1 | +Bh.alanine dehydrogenase |
| 145 | 452 | 1187645:1 | +Bh.alanine dehydrogenase |
| 146 | 453 | 1147250:1 | +Zm.PHE0010151_glutaminyl-tRNA |
| | | | synthetase |
| 147 | 454 | PHE0024437 | −Bn.MAX1 |
| 148 | 455 | PHE0019867 | +At.GLN1; 1 |
| 149 | 456 | 1185568:1 | +At.HYH (HY5 Homolog) |
| | | | S24A mutant |
| 150 | 457 | PHE0024430 | +At.HYH (HY5 Homolog) |
| 151 | 458 | 1184541:1 | +Ss.high-affinity |
| | | | branched-chain amino |
| | | | acid transport protein; |
| | | | BraE |
| 152 | 459 | 1195300:1 | +Ss.high-affinity |
| | | | branched-chain amino |
| | | | acid transport protein; |
| | | | BraE |
| 153 | 460 | 1183470:1 | +Ss.aspartate |
| | | | 1-decarboxylase |
| 154 | 461 | 1183502:1 | +Ss.Bifunctional |
| | | | imidazoleglycerol- |
| | | | phosphate dehydratase; |
| | | | histidinol-phosphatase |
| 155 | 462 | 1184961:1 | +Ss.Glutamate permease |
| 156 | 463 | PHE0024436 | +Ss.Glutamate permease |
| 157 | 464 | 1184550:1 | +Ss.glutamine ABC |
| | | | transporter |
| 158 | 465 | PHE0024437 | +Ss.glutamine ABC |
| | | | transporter |
| 159 | 466 | Mnom002329 | +Ns.Nitrite/Nitrate |
| | | | permease |
| 160 | 467 | 1183533:1 | +Ss.alanine |
| | | | dehydrogenase |
| 161 | 468 | 1181792:1 | +Cg.PHE0007792_nitroreductase |
| 162 | 469 | Mnom002337 | +Zm.Putative acid |
| | | | phosphatase |
| 163 | 470 | 1183509:1 | +At.HYH (HY5 Homolog) |
| 164 | 471 | 1194207:1 | +Bn.SUM2 |
| 165 | 472 | 1184951:1 | +At.da1-1 |
| 166 | 473 | 1184947:1 | +Zm.da1-1 |
| 167 | 474 | Mnom002354 | −Zm.BB |
| 168 | 475 | Mnom002372 | +Zm.Putative |
| | | | UVB-resistance |
| | | | protein UVR8 |
| 169 | 476 | Mnom002381 | −Zm.Putative sulfate |
| | | | transporter |
| 170 | 477 | Mnom002382 | −Zm.Putative |
| | | | UVB-resistance |
| | | | protein UVR8 |
| 171 | 478 | Mnom002383 | −Zm.Putative transfactor |
| 172 | 479 | Mnom002384 | −Zm.Putative trehalose-6- |
| | | | phosphate synthase |
| 173 | 480 | Mnom002385 | −Zm.Putative |
| | | | polypyrimidine tract- |
| | | | binding protein homolog |
| 174 | 481 | Mnom002387 | −Zm.Putative aspartic |
| | | | proteinase nepenthesin I |
| 175 | 482 | Mnom002388 | −Zm.Os08g0542700 protein |
| 176 | 483 | Mnom002389 | −Zm.unknown protein |
| 177 | 484 | Mnom002390 | −Zm.Dual-specificity |
| | | | protein-like phosphatase 3 |
| 178 | 485 | Mnom002391 | −Zm.Hypothetical protein |
| 179 | 486 | Mnom002404 | −Zm.PUB22/23-like protein1 |
| 180 | 487 | Mnom002405 | −Zm.PUB22/23-like protein2 |
| 181 | 488 | Mnom002408 | +At.CLV3 |
| 182 | 489 | Mnom002410 | +At.mCLV3 |
| 183 | 490 | 1183506:1 | +At.CLE-like AT5G59305.1 |
| | | | precursor |
| 184 | 491 | 1183506:1 | +At.CLE-like AT5G59305.1 |
| | | | precursor |
| 185 | 492 | Mnom002414 | +At.CLE-like AT5G59305.1 |
| | | | mature |
| 186 | 493 | Mnom002426 | +Gh.Skd1 (DQ444282) |
| 187 | 494 | 1163080:1 | +At.ERF1 |
| 188 | 495 | 1179434:1 | +Zm.homolog Basic |
| | | | Transcription Factor 2 |
| | | | (CGPG1840) |
| 189 | 496 | Mnom002481 | +Zm.ATH1-1 |
| 190 | 497 | 1187102:1 | +Zm.ATH1-2 |
| 191 | 498 | 1186139:1 | +Zm.ZRP4 |
| 192 | 499 | Mnom002490 | +Zm.LSH1 |
| 193 | 500 | Mnom002494 | +Zm.Putative cytochrome |
| | | | P450 |
| 194 | 501 | 1183523:1 | +At.NRT1.5 (nitrate |
| | | | transporter 1.5) |
| 195 | 502 | Mnom002497 | −Zm.homolog of CIPK8 |
| | | | (Calcineurin B-like (CBL)- |
| | | | interacting protein kinase 8) |
| 196 | 503 | 1184967:1 | +Zm.RINUE8 |
| 197 | 504 | 1188565:1 | +At.phyA |
| 198 | 505 | Mnom002520 | +At.phyA Y242H |
| 199 | 506 | 1184536:1 | +At.phyA F389A |
| 200 | 507 | PHE0024283 | +Os.BIRF1 |
| | | | (Benzathiodiazole induced |
| | | | ring finger protein 1) |
| 201 | 508 | PHE0024283 | +Os.BIRF1 |
| | | | (Benzathiodiazole induced |
| | | | ring finger protein 1) |
| 202 | 509 | 1181806:1 | +Ec. cspG - D63344 |
| 203 | 510 | 1181808:1 | +At.PHE0007559_OXI1 |
| | | | (OXIDATIVE SIGNAL- |
| | | | INDUCIBLE1) |
| 204 | 511 | 1183495:1 | +Zm.PHE0007208_Putative |
| | | | polysialic acid capsule |
| | | | expression protein |
| 205 | 512 | PHE0007541 | +Zm.PHE0007541_A1ZM008639_at |
| 206 | 513 | 1181787:1 | +Dh.PHE0007554_BCCT |
| | | | transporter |
| 207 | 514 | 1181764:1 | +Ta.PHE0007755_Td25a |
| 208 | 515 | 1181792:1 | +Cg.PHE0007792_nitroreductase |
| 209 | 516 | 1181783:1 | +At.PHE0009197_PF02519- |
| | | | Auxin_inducible-9 |
| 210 | 517 | 1184534:1 | +At.TZP, At5g43630 |
| 211 | 518 | Mnom002555 | −Gm.PUB22/PUB23 like |
| 212 | 519 | 1181848:1 | +Os.bZIP23(Basic leucine |
| | | | zipper 23) |
| 213 | 520 | 1185549:1 | +At.ZEP (Zeaxanthin |
| | | | epoxidase) |
| 214 | 521 | 1184133:1 | +Gm.Transcription factor |
| | | | LIM |
| 215 | 522 | 1181771:1 | +Gm.Putative pollen |
| | | | specific protein |
| 216 | 523 | Mnom002564 | +Gm.unknown protein |
| | | | contain domains similar to |
| | | | protein serine/threonine |
| | | | kinase |
| 217 | 524 | Mnom002565 | +Gm.MADS-box protein |
| 218 | 525 | 1181802:1 | +Gm.Seven in absentia |
| | | | protein family putative |
| 219 | 526 | 1183468:1 | +At.bHLH047 |
| 220 | 527 | Mnom002582 | +At.MYB114 |
| 221 | 528 | Mnom002603 | +At.G2930 |
| 222 | 529 | Mnom002604 | +At.G2784 |
| 223 | 530 | 1087245:1 | +At.G154 MADS-box |
| | | | protein |
| 224 | 531 | Mnom002645 | +At.Twin Sister of FT (TSF) |
| | | | protein |
| 225 | 532 | Mnom002652 | −Zm.homolog of |
| | | | Arabidopsis peptide |
| | | | transporter 5(PTR5) |
| 226 | 533 | Mnom002653 | +At.Transport protein |
| | | | associated with antigen |
| | | | processing2 (TAP2)/ |
| | | | Aluminium sensitive1 |
| | | | (ALS1) |
| 227 | 534 | Mnom002662 | +Cc.Asparagine |
| | | | synthetase codon |
| | | | optimized |
| 228 | 535 | Mnom002667 | +Cr.Acetate kinase |
| 229 | 536 | Mnom002668 | +Cr.phosphate |
| | | | acetyltransferase |
| 230 | 537 | Mnom002669 | +Cr.Lysine decarboxylase |
| 231 | 538 | 1066582:1 | +At.Aromatic and neutral |
| | | | amino acid transporter 1 |
| | | | (ANT1) |
| 232 | 539 | PHE0009168 | +Le.PHE0009168_JERF3 |
| | | | (Jasmonate and ethylene |
| | | | responsive factor 3) |
| 233 | 540 | Mnom002676 | +Gm.CHI |
| 234 | 541 | Mnom002706 | −Zm.RAA1 |
| 235 | 542 | Mnom002708 | +Zm.Albino3 |
| 236 | 543 | 1186548:1 | +At.LPA2 (Low PSII |
| | | | Accumulation2) |
| 237 | 544 | Mnom002714 | −Zm.Lew1 (leaf wilting1) |
| 238 | 545 | Mnom002716 | −Zm.eIF-5A |
| 239 | 546 | 1190083:1 | +Vf.Amino acid permease |
| | | | 1 (AAP1) |
| 240 | 547 | Mnom002721 | +Gm.G1481 a homolog of |
| | | | AtG1481 |
| 241 | 548 | PHE0024832 | +At.Nitrate Transporter |
| | | | 1.5 |
| 242 | 549 | 1190115:1 | +Pp.HB4 |
| 243 | 550 | 1187139:1 | +At.HB1 |
| 244 | 551 | 1187139:1 | +At.HB1 |
| 245 | 552 | 1187139:1 | +At.HB1 |
| 246 | 553 | 1188214:1 | +Zm.PP2C |
| 247 | 554 | 1189232:1 | +Zm.PP2C |
| 248 | 555 | Mnom002750 | +Zm.PP2C |
| 249 | 556 | 1188212:1 | +Os.PP2C |
| 250 | 557 | PHE0006743 | +At.CGPG151 putative |
| | | | two-component response |
| | | | regulator protein |
| 251 | 558 | PHE0004397 | +Os.G3848 |
| 252 | 559 | PHE0006386 | +At.CGPG1137 expressed |
| | | | protein |
| 253 | 560 | 1187105:1 | +Zm.tubby 4 |
| 254 | 561 | Mnom002784 | +At.Cationic amino acid |
| | | | transporter1 (CAT1) |
| 255 | 562 | 1194701:1 | +At.Cationic amino acid |
| | | | transporter6 (CAT6) |
| 256 | 563 | 1194425:1 | +Cr.fructose 6 phosphate |
| | | | aldolase |
| 257 | 564 | PHE0025040 | +Cr.Acetate kinase |
| 258 | 565 | PHE0025042 | +Cr.Lysine decarboxylase |
| 259 | 566 | 1190117:1 | +At.galactose-binding |
| | | | lectin family protein |
| 260 | 567 | 1190127:1 | +At.zinc finger (C3HC4- |
| | | | type RING finger) family |
| | | | protein |
| 261 | 568 | 1191292:1 | +At.putative amino acid |
| | | | transport protein |
| 262 | 569 | 1190123:1 | +At.zinc finger (C3HC4- |
| | | | type RING finger) |
| | | | family protein |
| 263 | 570 | 1194201:1 | +At.lesion inducing |
| | | | protein-related |
| 264 | 571 | PHE0025430 | +Ta.DNA binding with one |
| | | | finger (TaDOF1) |
| 265 | 572 | 1187623:1 | +Ta.DNA binding with one |
| | | | finger (TaDOF1) |
| 266 | 573 | 1191310:1 | +Ta.DNA binding with one |
| | | | finger (TaDOF1) |
| 267 | 574 | Mnom002849 | +Bn.G1988 homologue |
| 268 | 575 | PHE0025389 | +At.phyA S602A |
| 269 | 576 | 1192540:1 | +At.phyA S602A |
| 270 | 577 | 1192540:1 | +At.phyA S602A |
| 271 | 578 | Mnom002860 | +At.ammonium |
| | | | transporter At Amt1; 5 |
| 272 | 579 | Mnom002864 | +At.TF At5g56860 |
| 273 | 580 | Mnom002882 | +At.Gene 5160 |
| 274 | 581 | Mnom002886 | +At.RUS1 |
| 275 | 582 | Mnom002887 | +Sl.TERF1 (Tomato |
| | | | ethylene response factor |
| | | | 1) |
| 276 | 583 | 1195225:1 | +Ca.Pathogen-induced |
| | | | membrane protein 1 |
| 277 | 584 | Mnom002889 | +Zm.DEK1 (Defective |
| | | | Kernel 1) |
| 278 | 585 | Mnom002891 | +Gm.BiPD(Endoplasmic |
| | | | reticulum HSC70-cognate |
| | | | binding protein) |
| 279 | 586 | 1191787:1 | +Ta.W55a |
| 280 | 587 | 1194731:1 | +At.WRKY25 |
| 281 | 588 | Mnom002895 | +At.WRKY33 |
| 282 | 589 | Mnom002896 | +Ps.Sym37 |
| 283 | 590 | Mnom002898 | +Mt.DMI2 |
| 284 | 591 | Mnom002899 | +Pv.NAS2 (asparagines |
| | | | synthetase 2) |
| 285 | 592 | 1187621:1 | +Os.Gene 179_MonNom |
| 286 | 593 | 1187788:1 | +Vv.Gene 197 |
| 287 | 594 | 1194056:1 | +Os.CGFS type |
| | | | glutaredoxin |
| | | | (mitochondrial form) |
| 288 | 595 | Mnom002995 | +Os.Multidomian |
| | | | Monothiol glutaredoxin |
| 289 | 596 | 1194054:1 | +At.Monothiol |
| | | | glutaredoxin |
| 290 | 597 | Mnom003001 | +At.GTPase ObgE family |
| 291 | 598 | Mnom003035 | +At.RGE1(RETARDED |
| | | | GROWTH OF EMBRYO1) |
| 292 | 599 | 1192245:1 | +Zm.Hypothetical protein |
| | | | specific to corn |
| | | | endosperm |
| 293 | 600 | 1194063:1 | +At.leucine-rich repeat |
| | | | family protein |
| 294 | 601 | PHE0021991 | +At.1g03190 (AtXPD) |
| 295 | 602 | 1193217:1 | +At.CoAse3(Coenzyme A |
| | | | pyrophosphatase 3) |
| 296 | 603 | Mnom003125 | +At.MRB1 (Membrane |
| | | | Related Bigger 1) |
| 297 | 604 | 1194048:1 | +Ca.RZFP1 (RING Zinc |
| | | | Finger Protein 1) |
| 298 | 605 | Mnom003151 | +Gm.G154 homologue3 |
| 299 | 606 | Mnom003152 | +Gh.G154 homologue |
| 300 | 607 | Mnom003153 | +Gm.AT1G47670 - LYS/HIS |
| | | | TRANSPORTER 7 |
| 301 | 608 | Mnom003154 | +Gm.AT5G23810 - AAP7 |
| 302 | 609 | Mnom003157 | +Gm.GXGXG domain |
| | | | containing protein |
| 303 | 610 | Mnom003158 | +Gm.DUF_domain |
| | | | containing protein |
| 304 | 611 | Mnom003159 | +Gm.AT5G65660 - |
| | | | hydroxyproline-rich |
| | | | glycoprotein family |
| | | | protein |
| 305 | 612 | Mnom003178 | +Le.AIM1(Abscisic acid- |
| | | | induced myb1) |
| 306 | 613 | Mnom003189 | +Ta.Wheat hemoglobin |
| | | | HMP reductase fusion |
| 307 | 614 | Mnom003190 | +Pp.Flavohemoglobin |
| | | | (codon optimized) |

Selection Methods for Transgenic Plants with Enhanced Agronomic Trait

[0056] Within a population of transgenic plants each regenerated from a plant cell having a nucleus with recombinant DNA many plants that survive to fertile transgenic plants that produce seeds and progeny plants will not exhibit an enhanced agronomic trait. Selection from the population is necessary to identify one or more transgenic plant cells having a transgenic nucleus that can provide plants with the enhanced trait. Transgenic plants having enhanced traits are selected from populations of plants regenerated or derived from plant cells transformed as described herein by evaluating the plants in a variety of assays to detect an enhanced trait, e.g. enhanced water use efficiency, enhanced cold tolerance, increased yield, enhanced nitrogen use efficiency, enhanced seed protein and enhanced seed oil. These assays also may take many forms including, but not limited to, direct screening for the trait in a greenhouse or field trial or by screening for a surrogate trait. Such analyses can be directed to detecting changes in the chemical composition, biomass, physiological properties, morphology of the plant. Changes in chemical compositions such as nutritional composition of grain can be detected by analysis of the seed composition and content of protein, free amino acids, oil, free fatty acids, starch or tocopherols. Changes in biomass characteristics can be made on greenhouse or field grown plants and can include plant height, stem diameter, root and shoot dry weights; and, for corn plants, ear length and diameter. Changes in physiological properties can be identified by evaluating responses to stress conditions, for example assays using imposed stress conditions such as water deficit, nitrogen deficiency, cold growing conditions, pathogen or insect attack or light deficiency, or increased plant density. Changes in morphology can be measured by visual observation of tendency of a transformed plant with an enhanced agronomic trait to also appear to be a normal plant as compared to changes toward bushy, taller, thicker, narrower leaves, striped leaves, knotted trait, chlorosis, albino, anthocyanin production, or altered tassels, ears or roots. Other selection properties include days to pollen shed, days to silking, leaf extension rate, chlorophyll content, leaf temperature, stand, seedling vigor, internode length, plant height, leaf number, leaf area, tittering, brace roots, stay green, stalk lodging, root lodging, plant health, barreness/prolificacy, green snap, and pest resistance. In addition, phenotypic characteristics of harvested grain may be evaluated, including number of kernels per row on the ear, number of rows of kernels on the ear, kernel abortion, kernel weight, kernel size, kernel density and physical grain quality.

[0057] Assays for screening for a desired trait are readily designed by those practicing in the art. The following illustrates useful screening assays for corn traits using hybrid corn plants. The assays can be readily adapted for screening other plants such as canola, cotton and soybean either as hybrids or inbreds.

[0058] Transgenic corn plants having nitrogen use efficiency are identified by screening in fields with three levels of nitrogen (N) fertilizer being applied, e.g. low level (0 N), medium level (80 lb/ac) and high level (180 lb/ac). Plants with enhanced nitrogen use efficiency provide higher yield as compared to control plants.

[0059] Transgenic corn plants having enhanced yield are identified by screening using progeny of the transgenic plants over multiple locations with plants grown under optimal production management practices and maximum weed and pest control. A useful target for improved yield is a 5% to 10% increase in yield as compared to yield produced by plants grown from seed for a control plant. Selection methods may be applied in multiple and diverse geographic locations, for example up to 16 or more locations, over one or more planting seasons, for example at least two planting seasons, to statistically distinguish yield improvement from natural environmental effects.

[0060] Transgenic corn plants having enhanced water use efficiency are identified by screening plants in an assay where water is withheld for a period to induce stress followed by watering to revive the plants. For example, a useful selection process imposes 3 drought/re-water cycles on plants over a total period of 15 days after an initial stress free growth period of 11 days. Each cycle consists of 5 days, with no water being applied for the first four days and a water quenching on the 5th day of the cycle. The primary phenotypes analyzed by the selection method are the changes in plant growth rate as determined by height and biomass during a vegetative drought treatment.

[0061] Transgenic corn plants having enhanced cold tolerance are identified by screening plants in a cold germination assay and/or a cold tolerance field trial. In a cold germination assay trays of transgenic and control seeds are placed in a growth chamber at 9.7° C. for 24 days (no light). Seeds having higher germination rates as compared to the control are identified as having enhanced cold tolerance. In a cold tolerance field trial plants with enhanced cold tolerance are identified from field planting at an earlier date than conventional Spring planting for the field location. For example, seeds are planted into the ground around two weeks before local farmers begin to plant corn so that a significant cold stress is exerted onto the crop, named as cold treatment. Seeds also are planted under local optimal planting conditions such that the crop has little or no exposure to cold condition, named as normal treatment. At each location, seeds are planted under both cold and normal conditions preferably with multiple repetitions per treatment.

[0062] Transgenic corn plants having seeds with increased protein and/or oil levels are identified by analyzing progeny seed for protein and/or oil. Near-infrared transmittance spectrometry is a non-destructive, high-throughput method that is useful to determine the composition of a bulk seed sample for properties listed in table 2.

TABLE 2

| | |
|---|---|
| Typical sample(s): | Whole grain corn and soybean seeds |
| Typical analytical range: | Corn - moisture 5-15%, oil 5-20%, |
| | protein 5-30%, starch 50-75%, and density |
| | 1.0-1.3%. |
| | Soybean - moisture 5-15%, oil 15-25%, |
| | and protein 35-50%. |

[0063] Although the plant cells and methods of this invention can be applied to any plant cell, plant, seed or pollen, e.g. any fruit, vegetable, grass, tree or ornamental plant, the various aspects of the invention are preferably applied to corn, soybean, cotton, canola, alfalfa, wheat, rice, sugarcane, and sugar beet plants. In many cases the invention is applied to corn plants that are inherently resistant to disease from the Mal de R10Cuarto virus or the Puccina sorghi fungus or both.

[0064] The following examples are included to demonstrate aspects of the invention, those of skill in the art should, in light of the present disclosure, appreciate that many changes can be made in the specific aspects which are disclosed and still obtain a like or similar results without departing from the spirit and scope of the invention.

### Example 1

### Plant Expression Constructs

[0065] This example illustrates the construction of plasmids for transferring recombinant DNA into a plant cell nucleus that can be regenerated into transgenic plants.

### A. Plant Expression Constructs for Corn Transformation

[0066] A base corn transformation vector pMON93039, as set forth in SEQ ID NO:36443, illustrated in Table 3, is fabricated for use in preparing recombinant DNA for Agrobacterium-mediated transformation into corn tissue.

TABLE 3

| | | | Coordinates of |
|---|---|---|---|
| Function | Name | Annotation | SEQ ID NO: 36443 |
| Agrobacterium | B-AGRtu.right border | Agro right border sequence, | 11364-11720 |
| T-DNA transfer | | essential for transfer of T-DNA. | |
| Gene of interest | E-Os.Act1 | Upstream promoter region of the | 19-775 |
| expression | | rice actin 1 gene | |
| cassette | E-CaMV.35S.2xA1- | Duplicated35S A1-B3 domain | 788-1120 |
| | B3 | without TATA box | |
| | P-Os.Act1 | Promoter region of the rice actin 1 | 1125-1204 |
| | | gene | |
| | L-Ta.Lhcb1 | 5′ untranslated leader of wheat | 1210-1270 |
| | | major chlorophyll a/b binding | |
| | | protein | |
| | I-Os.Act1 | First intron and flanking UTR exon | 1287-1766 |
| | | sequences from the rice actin 1 | |
| | | gene | |
| | T-St.Pis4 | 3′ non-translated region of the | 1838-2780 |
| | | potato proteinase inhibitor II gene | |
| | | which functions to direct | |
| | | polyadenylation of the mRNA | |
| Plant selectable | P-Os.Act1 | Promoter from the rice actin 1 gene | 2830-3670 |
| marker | L-Os.Act1 | First exon of the rice actin 1 gene | 3671-3750 |
| expression | I-Os.Act1 | First intron and flanking UTR exon | 3751-4228 |
| cassette | | sequences from the rice actin 1 | |
| | | gene | |
| | TS-At.ShkG-CTP2 | Transit peptide region of | 4238-4465 |
| | | Arabidopsis EPSPS | |
| | CR-AGRtu.aroA- | Coding region for bacterial strain | 4466-5833 |
| | CP4.nat | CP4 native aroA gene. | |
| | T-AGRtu.nos | A 3′ non-translated region of the | 5849-6101 |
| | | nopaline synthase gene of | |
| | | Agrobacterium tumefaciens Ti | |
| | | plasmid which functions to direct | |
| | | polyadenylation of the mRNA. | |
| Agrobacterium | B-AGRtu.left border | Agro left border sequence, essential | 6168-6609 |
| T-DNA transfer | | for transfer of T-DNA. | |
| Maintenance in | OR-Ec.oriV-RK2 | The vegetative origin of replication | 6696-7092 |
| E. coli | | from plasmid RK2. | |
| | CR-Ec.rop | Coding region for repressor of | 8601-8792 |
| | | primer from the ColE1 plasmid. | |
| | | Expression of this gene product | |
| | | interferes with primer binding at the | |
| | | origin of replication, keeping | |
| | | plasmid copy number low. | |
| | OR-Ec.ori-ColE1 | The minimal origin of replication | 9220-9808 |
| | | from the E. coli plasmid ColE1. | |
| | P-Ec.aadA-SPC/STR | Promoter for Tn7 | 10339-10380 |
| | | adenylyltransferase (AAD(3″)) | |
| | CR-Ec.aadA- | Coding region for Tn7 | 10381-11169 |
| | SPC/STR | adenylyltransferase (AAD(3″)) | |
| | | conferring spectinomycin and | |
| | | streptomycin resistance. | |
| | T-Ec.aadA-SPC/STR | 3′ UTR from the Tn7 | 11170-11227 |
| | | adenylyltransferase (AAD(3″)) | |
| | | gene of E. coli. | |

[0067] To construct transformation vectors for expressing a protein identified in Table 1, primers for PCR amplification of the protein coding nucleotides are designed at or near the start and stop codons of the coding sequence, in order to eliminate most of the 5′ and 3′ untranslated regions. The protein coding nucleotides are inserted into the base vector in the gene of interest expression cassette at an insertion site, i.e. between the intron element (coordinates 1287-1766) and the polyadenylation element (coordinates 1838-2780).

[0068] To construct transformation vectors for suppressing a protein identified in Table 1, the amplified protein coding nucleotides are assembled in a sense and antisense arrangement and inserted into the base vector at the insertion site in the gene of interest expression cassette to provide transcribed RNA that will form a double-stranded RNA for RNA interference suppression of the protein. More specifically, the sense and anti-sense DNA is derived from an endogenous corn gene that expresses a corn protein with an amino acid sequence of SEQ ID NO: 316, 344, 346, 350-351, 355, 357, 360-365, 384-388, 393, 397-400, 404, 413, 415-416, 425-426, 474, 476-487, 502, 532, 541, or 544-545 or the corn homolog of SEQ ID NOs:309, 311, 324, 373, 395, 454, or 518.

### B. Plant Expression Constructs for Soy and Canola Transformation

[0069] Vectors for use in transformation of soybean and canola tissue are prepared having the elements of expression vector pMON82053 (SEQ ID NO: 36444) as shown in Table 4 below.

TABLE 4

| | | | Coordinates of |
|---|---|---|---|
| Function | Name | Annotation | SEQ ID NO: 36444 |
| Agrobacterium T- | B-AGRtu.left border | Agro left border sequence, essential for | 6144-6585 |
| DNA transfer | | transfer of T-DNA. | |
| Plant selectable | P-At.Act7 | Promoter from the Arabidopsis actin 7 gene | 6624-7861 |
| marker expression | L-At.Act7 | 5′UTR of Arabidopsis Act7 gene | |
| cassette | I-At.Act7 | Intron from the Arabidopsis actin7 gene | |
| | TS-At.ShkG-CTP2 | Transit peptide region of Arabidopsis | 7864-8091 |
| | | EPSPS | |
| | CR-AGRtu.aroA- | Synthetic CP4 coding region with dicot | 8092-9459 |
| | CP4.nno_At | preferred codon usage. | |
| | T-AGRtu.nos | A 3′ non-translated region of the nopaline | 9466-9718 |
| | | synthase gene of Agrobacterium | |
| | | tumefaciens Ti plasmid which functions to | |
| | | direct polyadenylation of the mRNA. | |
| Gene of interest | P-CaMV.35S-enh | Promoter for 35S RNA from CaMV | 1-613 |
| expression cassette | | containing a duplication of the −90 to −350 | |
| | | region. | |
| | T-Gb.E6-3b | 3′ untranslated region from the fiber protein | 688-1002 |
| | | E6 gene of sea-island cotton. | |
| Agrobacterium T- | B-AGRtu.right | Agro right border sequence, essential for | 1033-1389 |
| DNA transfer | border | transfer of T-DNA. | |
| Maintenance in E. coli | OR-Ec.oriV-RK2 | The vegetative origin of replication from | 5661-6057 |
| | | plasmid RK2. | |
| | CR-Ec.rop | Coding region for repressor of primer from | 3961-4152 |
| | | the ColE1 plasmid. Expression of this gene | |
| | | product interferes with primer binding at the | |
| | | origin of replication, keeping plasmid copy | |
| | | number low. | |
| | OR-Ec.ori-ColE1 | The minimal origin of replication from the | 2945-3533 |
| | | E. coli plasmid ColE1. | |
| | P-Ec.aadA-SPC/STR | Promoter for Tn7 adenylyltransferase | 2373-2414 |
| | | (AAD(3″)) | |
| | CR-Ec.aadA- | Coding region for Tn7 adenylyltransferase | 1584-2372 |
| | SPC/STR | (AAD(3″)) conferring spectinomycin and | |
| | | streptomycin resistance. | |
| | T-Ec.aadA-SPC/STR | 3′ UTR from the Tn7 adenylyltransferase | 1526-1583 |
| | | (AAD(3″)) gene of E. coli. | |

[0070] To construct transformation vectors for expressing a protein identified in Table 1, primers for PCR amplification of the protein coding nucleotides are designed at or near the start and stop codons of the coding sequence, in order to eliminate most of the 5′ and 3′ untranslated regions. The protein coding nucleotides are inserted into the base vector in the gene of interest expression cassette at an insertion site, i.e. between the promoter element (coordinates 1-613) and the polyadenylation element (coordinates 688-1002).

[0071] To construct transformation vectors for suppressing a protein identified in Table 1, the amplified protein coding nucleotides are assembled in a sense and antisense arrangement and inserted into the base vector at the insertion site in the gene of interest expression cassette to provide transcribed RNA that will form a double-stranded RNA for RNA interference suppression of the protein. More specifically, for soybean the sense and anti-sense DNA is derived from an endogenous soybean gene that expresses a soybean protein with an amino acid sequence of SEQ ID NOs: 309, 324, 373, 395, 518 or is a soybean homolog of SEQ ID NOs: 311, 316, 344, 346, 350-351, 355, 357, 360-365, 384-388, 393, 397-400, 404, 413, 415-416, 425-426, 454, 474, 476-487, 502, 532, 541, or 544-545, and for canola the sense and anti-sense DNA is derived from an endogenous canola gene that encodes the canola homolog of SEQ ID NOs: 309, 311, 316, 324, 344, 346, 350-351, 355, 357, 360-365, 373, 384-388, 393, 395, 397-400, 404, 413, 415-416, 425-426, 454, 474, 476-487, 502, 518, 532, 541, or 544-545.

### C. Cotton Transformation Vector

[0072] Plasmids for use in transformation of cotton tissue are prepared with elements of expression vector pMON99053 (SEQ ID NO: 36445) as shown in Table 5 below.

TABLE 5

| | | | Coordinates of |
|---|---|---|---|
| | | | SEQ ID NO: |
| Function | Name | Annotation | 36445 |
| Agrobacterium T- | B-AGRtu.right border | Agro right border sequence, essential for | 1-357 |
| DNA transfer | | transfer of T-DNA. | |
| Gene of interest | Exp-CaMV.35S- | Enhanced version of the 35S RNA | 388-1091 |
| expression | enh + Ph.DnaK | promoter from CaMV plus the petunia | |
| cassette | | hsp70 5′ untranslated region | |
| | T-Ps.RbcS2-E9 | The 3′ non-translated region of the pea | 1165-1797 |
| | | RbcS2 gene which functions to direct | |
| | | polyadenylation of the mRNA. | |
| Plant selectable | Exp-CaMV.35S | Promoter and 5′ untranslated region from | 1828-2151 |
| marker expression | | the 35S RNA of CaMV | |
| cassette | CR-Ec.nptII-Tn5 | Coding region for neomycin | 2185-2979 |
| | | phosphotransferase gene from transposon | |
| | | Tn5 which confers resistance to neomycin | |
| | | and kanamycin. | |
| | T-AGRtu.nos | A 3′ non-translated region of the nopaline | 3011-3263 |
| | | synthase gene of Agrobacterium | |
| | | tumefaciens Ti plasmid which functions to | |
| | | direct polyadenylation of the mRNA. | |
| Agrobacterium T- | B-AGRtu.left border | Agro left border sequence, essential for | 3309-3750 |
| DNA transfer | | transfer of T-DNA. | |
| Maintenance in E. coli | OR-Ec.oriV-RK2 | The vegetative origin of replication from | 3837-4233 |
| | | plasmid RK2. | |
| | CR-Ec.rop | Coding region for repressor of primer from | 5742-5933 |
| | | the ColE1 plasmid. Expression of this | |
| | | gene product interferes with primer | |
| | | binding at the origin of replication, | |
| | | keeping plasmid copy number low. | |
| | OR-Ec.ori-ColE1 | The minimal origin of replication from the | 6361-6949 |
| | | E. coli plasmid ColE1. | |
| | P-Ec.aadA-SPC/STR | Promoter for Tn7 adenylyltransferase | 7480-7521 |
| | | (AAD(3″)) | |
| | CR-Ec.aadA-SPC/STR | Coding region for Tn7 adenylyltransferase | 7522-8310 |
| | | (AAD(3″)) conferring spectinomycin and | |
| | | streptomycin resistance. | |
| | T-Ec.aadA-SPC/STR | 3′ UTR from the Tn7 adenylyltransferase | 8311-8368 |
| | | (AAD(3″)) gene of E. coli. | |

[0073] To construct transformation vectors for expressing a protein identified in Table 1, primers for PCR amplification of the protein coding nucleotides are designed at or near the start and stop codons of the coding sequence, in order to eliminate most of the 5′ and 3′ untranslated regions. The protein coding nucleotides are inserted into the base vector in the gene of interest expression cassette at an insertion site, i.e. between the promoter element (coordinates 388-1091) and the polyadenylation element (coordinates 1165-1797).

[0074] To construct transformation vectors for suppressing a protein identified in Table 1, the amplified protein coding nucleotides are assembled in a sense and antisense arrangement and inserted into the base vector at the insertion site in the gene of interest expression cassette to provide transcribed RNA that will form a double-stranded RNA for RNA interference suppression of the protein. More specifically, the sense and anti-sense DNA is derived from an endogenous cotton gene that encodes the cotton homolog of SEQ ID NO: 309, 311, 316, 324, 344, 346, 350-351, 355, 357, 360-365, 373, 384-388, 393, 395, 397-400, 404, 413, 415-416, 425-426, 454, 474, 476-487, 502, 518, 532, 541, or 544-545.

### D. Plant Expression Constructs for Gene Stacking in Corn.

[0075] A base corn transformation vector pMON96782, as set forth in SEQ ID NO: 36446, illustrated in Table 6, is fabricated for use in preparing recombinant DNA for Agrobacterium-mediated transformation into corn tissue.

TABLE 6

| | | | Coordinates of |
|---|---|---|---|
| Function | Name | Annotation | SEQ ID NO: 36446 |
| Agrobacterium | B-AGRtu.right border | Agro right border sequence, | 1-357 |
| T-DNA transfer | | essential for transfer of T-DNA. | |
| Gene of interest | P-Os.Act1 | Promoter region of the rice actin 1 | 403-1243 |
| expression | | gene | |
| cassette 1 | L-Os.Act1 | 5′ untranslated leader of rice actin 1 | 1244-1323 |
| | | gene | |
| | I-Os.Act1 | First intron and flanking UTR exon | 1324-1801 |
| | | sequences from the rice actin 1 | |
| | | gene | |
| | T-Ta.Hsp17 | 3′ un-translated region of wheat low | 1834-2043 |
| | | molecular weight heat shock | |
| | | protein gene | |
| Gene of interest | E-Os.Act1 | Upstream Promoter region of rice | 2136-2892 |
| expression | | actin 1 | |
| cassette 2 | E-CaMV.35S.2xA1- | 35S A1-B3 Domain | 2905-2937 |
| | B3 | | |
| | P-Os.Act1 | Promoter from rice actin gene | 3242-3321 |
| | L-Ta.Lhcb1 | 5′ untranslated leader from wheat | 3327-3387 |
| | | chlorophyll protein | |
| | I-Os.Act1 | Intron and 5′ untranslated region | 3404-3883 |
| | | from rice actin 1 gene | |
| | T-AGRtu.tr7 | 3′ untranslated region from | 3918-4425 |
| | | “transcript 7” of Agrobacterium | |
| Plant selectable | P.Os.TubA | Promoter of alpha-tubulin gene of | 4452-5650 |
| marker | | rice | |
| expression | L.Os.TubA | 5′ untranslated region of an alpha | 5651-5736 |
| cassette | | tubulin from rice | |
| | I.Os.TubA | Intron 1 of an alpha tubulin from | 5737-6632 |
| | | rice. | |
| | Ts.Ta.waxy.nno_Zm | Chloroplast transit peptide from | 6637-6846 |
| | | wheat starch synthase | |
| | Cr.AGRtu.aroA- | CP4 EPSPS gene | 6847-8214 |
| | CP4.nno_Zm | | |
| | T.Os.TubA | 3′ untranslated region of alpha | 8219-8800 |
| | | tubulin from rice | |
| Agrobacterium | B-AGRtu.left border | Left border sequence for T-DNA | 8828-9269 |
| T-DNA transfer | | transfer | |
| Maintenance in | OR-Ec.oriV-RK2 | Origin of replication from the E. coli | 9356-9752 |
| E. coli | | plasmid RK2. | |
| | Cr-Ec.rop | Coding region for repressor of | 11261-11452 |
| | | primer from ColE1 plasmid | |
| | OR-Ec.ori-ColE1 | Minimum origin of replication from | 11880-12468 |
| | | E. coli colE1 plasmid. | |
| | P-Ec.aadA-SPC/STR | Promoter for Tn7 | 12999-13040 |
| | | adenylyltransferase gene | |
| | CR-Ec.aadA- | Coding region for Tn7 | 13041-13829 |
| | SPC/STR | adenylyltransferase gene | |
| | T-Ec.aadA-SPC/STR | 3′ untranslated region from Tn7 | 13830-13887 |
| | | adenylyltransferase gene | |

[0076] Primers for PCR amplification of protein coding nucleotides of the genes of interest are designed at or near the start and stop codons of the coding sequence, in order to eliminate most of the 5′ and 3′ untranslated regions. Protein coding regions of genes encoding a first and second protein of interest are amplified. The amplified region from the first gene of interest is cloned between nucleotides 1801 and 1834 of the base vector and the amplified region from the second gene of interest is cloned between nucleotides 3883 and 3918 of the base vector.

### Example 2

### Corn Transformation

[0077] This example illustrates transformation methods useful in producing a transgenic nucleus in a corn plant cell, and the plants, seeds and pollen produced from a transgenic cell with such a nucleus having an enhanced trait, i.e. enhanced water use efficiency, enhanced cold tolerance, increased yield, enhanced nitrogen use efficiency, enhanced seed protein and enhanced seed oil. A plasmid vector is prepared by cloning the DNA of SEQ ID NO:1 into the gene of interest expression cassette in the base vector for use in corn transformation of corn tissue provided in Example 1, Table 3.

[0078] For Agrobacterium-mediated transformation of corn embryo cells corn plants of a readily transformable line are grown in the greenhouse and ears are harvested when the embryos are 1.5 to 2.0 mm in length. Ears are surface sterilized by spraying or soaking the ears in 80% ethanol, followed by air drying Immature embryos are isolated from individual kernels on surface sterilized ears. Prior to inoculation of maize cells, Agrobacterium cells are grown overnight at room temperature Immature maize embryo cells are inoculated with Agrobacterium shortly after excision, and incubated at room temperature with Agrobacterium for 5-20 minutes. Immature embryo plant cells are then co-cultured with Agrobacterium for 1 to 3 days at 23° C. in the dark. Co-cultured embryos are transferred to selection media and cultured for approximately two weeks to allow embryogenic callus to develop. Embryogenic callus is transferred to culture medium containing 100 mg/L paromomycin and subcultured at about two week intervals. Transformed plant cells are recovered 6 to 8 weeks after initiation of selection.

[0079] For Agrobacterium-mediated transformation of maize callus immature embryos are cultured for approximately 8-21 days after excision to allow callus to develop. Callus is then incubated for about 30 minutes at room temperature with the Agrobacterium suspension, followed by removal of the liquid by aspiration. The callus and Agrobacterium are co-cultured without selection for 3-6 days followed by selection on paromomycin for approximately 6 weeks, with biweekly transfers to fresh media. Paromomycin resistant calli are identified about 6-8 weeks after initiation of selection.

[0080] To regenerate transgenic corn plants a callus of transgenic plant cells resulting from transformation and selection is placed on media to initiate shoot development into plantlets which are transferred to potting soil for initial growth in a growth chamber at 26° C. followed by a mist bench before transplanting to 5 inch pots where plants are grown to maturity. The regenerated plants are self-fertilized and seed is harvested for use in one or more methods to select seeds, seedlings or progeny second generation transgenic plants (R2 plants) or hybrids, e.g. by selecting transgenic plants exhibiting an enhanced trait as compared to a control plant.

[0081] The above process is repeated to produce multiple events of transgenic corn plant cells that are transformed with recombinant DNA from each of the genes identified in Table 1. Events are designed to produce in the transgenic cells one of the proteins identified in Table 1, except the proteins of SEQ ID NOs: 316, 344, 346, 350-351, 355, 357, 360-365, 384-388, 393, 397-400, 404, 413, 415-416, 425-426, 474, 476-487, 502, 532, 541, and 544-545, and the corn homolog of SEQ ID NOs: 309, 311, 324, 373, 395, 454, and 518 which are suppressed. Progeny transgenic plants and seed of the transformed plant cells are screened for enhanced water use efficiency, enhanced cold tolerance, increased yield, enhanced nitrogen use efficiency, enhanced seed protein and enhanced seed oil. From each group of multiple events of transgenic plants with a specific recombinant DNA from Table 1 the event that produces the greatest enhancement in yield, water use efficiency, nitrogen use efficiency, enhanced cold tolerance, enhanced seed protein and enhanced seed oil is identified and progeny seed is selected for commercial development.

### Example 3

### Soybean Transformation

[0082] This example illustrates plant transformation useful in producing a transgenic nucleus in a soybean plant cell, and the plants, seeds and pollen produced from a transgenic cell with such a nucleus having an enhanced trait, i.e. enhanced water use efficiency, enhanced cold tolerance, increased yield, enhanced nitrogen use efficiency, enhanced seed protein and enhanced seed oil.

[0083] For Agrobacterium mediated transformation, soybean seeds are imbided overnight and the meristem explants excised. The explants are placed in a wounding vessel. Soybean explants and induced Agrobacterium cells from a strain containing plasmid DNA with the gene of interest cassette and a plant selectable marker cassette are mixed no later than 14 hours from the time of initiation of seed imbibition, and wounded using sonication. Following wounding, explants are placed in co-culture for 2-5 days at which point they are transferred to selection media for 6-8 weeks to allow selection and growth of transgenic shoots. Resistant shoots are harvested approximately 6-8 weeks and placed into selective rooting media for 2-3 weeks. Shoots producing roots are transferred to the greenhouse and potted in soil. Shoots that remain healthy on selection, but do not produce roots are transferred to non-selective rooting media for an additional two weeks. Roots from any shoots that produce roots off selection are tested for expression of the plant selectable marker before they are transferred to the greenhouse and potted in soil.

[0084] The above process is repeated to produce multiple events of transgenic soybean plant cells that are transformed with recombinant DNA from each of the genes identified in Table 1. Events are designed to produce in the transgenic cells one of the proteins identified in Table 1, except the proteins of SEQ ID NOs: 309, 324, 373, 395, and 518 and the soybean homologs of SEQ ID NOs: 311, 316, 344, 346, 350-351, 355, 357, 360-365, 384-388, 393, 397-400, 404, 413, 415-416, 425-426, 454, 474, 476-487, 502, 532, 541, and 544-545, which are suppressed. Progeny transgenic plants and seed of the transformed plant cells are screened for enhanced water use efficiency, enhanced cold tolerance, increased yield, enhanced seed protein and enhanced seed oil. From each group of multiple events of transgenic plants with a specific recombinant DNA from Table 1 the event that produces the greatest enhancement in yield, water use efficiency, nitrogen use efficiency, enhanced cold tolerance, enhanced seed protein and enhanced seed oil is identified and progeny seed is selected for commercial development.

### Example 4

### Cotton Transgenic Plants with Enhanced Agronomic Traits

[0085] This example illustrates plant transformation useful in producing a transgenic nucleus in a cotton plant cell, and the plants, seeds and pollen produced from a transgenic cell with such a nucleus having an enhanced trait, i.e. enhanced water use efficiency, increased yield, enhanced nitrogen use efficiency and enhanced seed oil.

[0086] Transgenic cotton plants containing each recombinant DNA having a sequence of SEQ ID NO: 1 through SEQ ID NO: 307 are obtained by transforming with recombinant DNA from each of the genes identified in Table 1 using Agrobacterium-mediated transformation. The above process is repeated to produce multiple events of transgenic cotton plant cells that are transformed with recombinant DNA from each of the genes identified in Table 1. Events are designed to produce in the transgenic cells one of the proteins identified in Table 1, except the cotton homologs of the proteins of SEQ ID NOs: 309, 311, 316, 324, 344, 346, 350-351, 355, 357, 360-365, 373, 384-388, 393, 395, 397-400, 404, 413, 415-416, 425-426, 454, 474, 476-487, 502, 518, 532, 541, and 544-545 which are suppressed.

[0087] From each group of multiple events of transgenic plants with a specific recombinant DNA from Table 1 the event that produces the greatest enhancement in yield, water use efficiency, nitrogen use efficiency, enhanced cold tolerance, enhanced seed protein and enhanced seed oil is identified and progeny seed is selected for commercial development.

[0088] Progeny transgenic plants are selected from a population of transgenic cotton events under specified growing conditions and are compared with control cotton plants. Control cotton plants are substantially the same cotton genotype but without the recombinant DNA, for example, either a parental cotton plant of the same genotype that was not transformed with the identical recombinant DNA or a negative isoline of the transformed plant. Additionally, a commercial cotton cultivar adapted to the geographical region and cultivation conditions, i.e. cotton variety ST474, cotton variety FM 958, and cotton variety Siam L-23, are used to compare the relative performance of the transgenic cotton plants containing the recombinant DNA.

[0089] Transgenic cotton plants with enhanced yield and water use efficiency are identified by growing under variable water conditions. Specific conditions for cotton include growing a first set of transgenic and control plants under “wet” conditions, i.e. irrigated in the range of 85 to 100 percent of evapotranspiration to provide leaf water potential of −14 to −18 bars, and growing a second set of transgenic and control plants under “dry” conditions, i.e. irrigated in the range of 40 to 60 percent of evapotranspiration to provide a leaf water potential of −21 to −25 bars. Pest control, such as weed and insect control is applied equally to both wet and dry treatments as needed. Data gathered during the trial includes weather records throughout the growing season including detailed records of rainfall; soil characterization information; any herbicide or insecticide applications; any gross agronomic differences observed such as leaf morphology, branching habit, leaf color, time to flowering, and fruiting pattern; plant height at various points during the trial; stand density; node and fruit number including node above white flower and node above crack boll measurements; and visual wilt scoring. Cotton boll samples are taken and analyzed for lint fraction and fiber quality. The cotton is harvested at the normal harvest timeframe for the trial area. Enhanced water use efficiency is indicated by increased yield, improved relative water content, enhanced leaf water potential, increased biomass, enhanced leaf extension rates, and improved fiber parameters.

### Example 5

### Canola Transformation

[0090] This example illustrates plant transformation useful in producing the transgenic canola plants of this invention and the production and identification of transgenic seed for transgenic canola having enhanced water use efficiency, enhanced cold tolerance, increased yield, enhanced nitrogen use efficiency, enhanced seed protein and enhanced seed oil.

[0091] Tissues from in vitro grown canola seedlings are prepared and inoculated with overnight-grown Agrobacterium cells containing plasmid DNA with the gene of interest cassette and a plant selectable marker cassette. Following co-cultivation with Agrobacterium, the infected tissues are allowed to grow on selection to promote growth of transgenic shoots, followed by growth of roots from the transgenic shoots. The selected plantlets are then transferred to the greenhouse and potted in soil. Molecular characterizations are performed to confirm the presence of the gene of interest, and its expression in transgenic plants and progenies. Progeny transgenic plants are selected from a population of transgenic canola events under specified growing conditions and are compared with control canola plants. Control canola plants are substantially the same canola genotype but without the recombinant DNA, for example, either a parental canola plant of the same genotype that is not transformed with the identical recombinant DNA or a negative isoline of the transformed plant.

[0092] Transgenic canola plant cells are transformed with each of the recombinant DNA identified in Table 1. The above process is repeated to produce multiple events of transgenic canola plant cells that are transformed with recombinant DNA from each of the genes identified in Table 1. Events are designed to produce in the transgenic cells one of the proteins identified in Table 1, except the canola homologs of the proteins of SEQ ID NOs: 309, 311, 316, 324, 344, 346, 350-351, 355, 357, 360-365, 373, 384-388, 393, 395, 397-400, 404, 413, 415-416, 425-426, 454, 474, 476-487, 502, 518, 532, 541, and 544-545 which are suppressed. Progeny transgenic plants and seed of the transformed plant cells are screened for enhanced water use efficiency, enhanced cold tolerance, increased yield, enhanced seed protein and enhanced seed oil. From each group of multiple events of transgenic plants with a specific recombinant DNA from Table 1 the event that produces the greatest enhancement in yield, water use efficiency, nitrogen use efficiency, enhanced cold tolerance, enhanced seed protein and enhanced seed oil is identified and progeny seed is selected for commercial development.

### Example 6

### Homolog Identification

[0093] This example illustrates the identification of homologs of proteins encoded by the DNA identified in Table 1 which is used to provide transgenic seed and plants having enhanced agronomic traits. From the sequence of the homologs, homologous DNA sequence can be identified for preparing additional transgenic seeds and plants of this invention with enhanced agronomic traits.

[0094] An “All Protein Database” was constructed of known protein sequences using a proprietary sequence database and the National Center for Biotechnology Information (NCBI) non-redundant amino acid database (nr.aa). For each organism from which a polynucleotide sequence provided herein was obtained, an “Organism Protein Database” was constructed of known protein sequences of the organism; it is a subset of the All Protein Database based on the NCBI taxonomy ID for the organism.

[0095] The All Protein Database was queried using amino acid sequences provided herein as SEQ ID NO: 308 through SEQ ID NO: 614 using NCBI “blastp” program with E-value cutoff of 1e-8. Up to 1000 top hits were kept, and separated by organism names. For each organism other than that of the query sequence, a list was kept for hits from the query organism itself with a more significant E-value than the best hit of the organism. The list contains likely duplicated genes of the polynucleotides provided herein, and is referred to as the Core List. Another list was kept for all the hits from each organism, sorted by E-value, and referred to as the Hit List.

[0096] The Organism Protein Database was queried using polypeptide sequences provided herein as SEQ ID NO: 308 through SEQ ID NO: 614 using NCBI “blastp” program with E-value cutoff of 1e-4. Up to 1000 top hits were kept. A BLAST searchable database was constructed based on these hits, and is referred to as “SubDB”. SubDB is queried with each sequence in the Hit List using NCBI “blastp” program with E-value cutoff of 1e-8. The hit with the best E-value was compared with the Core List from the corresponding organism. The hit is deemed a likely ortholog if it belongs to the Core List, otherwise it is deemed not a likely ortholog and there is no further search of sequences in the Hit List for the same organism. For proteins of table 1 having an identified Pfam domain module, homology to reported homologs was further confirmed by searching the respective identified homologs for conservation of the Pfam domain module identified in the protein from table 1. Homologs from a large number of distinct organisms were identified and are reported below in table 7 with the SEQ ID NO of the DNA sequence corresponding to original protein query sequence and the identified homologs as [SEQ ID NO]: [Homolog SEQ ID N0s].

TABLE 7
Protein Sequences and their Homologs

1: 636 819 1097 1350 1889 1995 2165 2787 2937 3028 3574 3736 3793 3928 4331 4566 4851 5066 5207 5357
5398 5663 5664 6013 6476 6570 6701 6787 6959 7007 7057 7258 7401 7447 8148 8257 8679 8816 8900 8924
9039 9090 9392 9851 10181 10329 10383 10613 10783 10976 11004 11066 11131 11286 11480 11647 11722
11765 11832 12171 12412 12447 12798 12834 12898 12940 13177 13451 13570 13719 13950 14299 14438
14548 14592 14935 15659 15902 16223 16224 16225 16226 16227 16228 16274 16317 16550 16814 16848
17067 17087 17201 17262 17352 17689 18175 18176 18185 18519 18676 18855 18874 19060 19276 19656
19751 19922 20349 20723 21061 21081 21283 21397 21735 21976 22091 22248 22532 22808 23081 23178
23387 23483 23707 23922 23947 24001 24337 24585 24850 25090 25237 25290 25466 25663 25684 25788
25908 26445 26583 26823 27032 27073 27318 27324 27326 28043 28105 28199 28277 28306 28415 28508
28742 28774 29005 29247 29511 29652 30073 30230 30408 30456 30761 30816 30999 31063 31352 31385
31512 31559 31695 31898 32035 32178 32232 32337 32385 32394 32445 32691 32878 33131 33247 33249
33364 33479 34197 34394 34855 35042 35135 35209 35494 35573 35615 35629 35765 35871 35940 36015
36023 36173
2: 898 1260 1265 1375 1421 1533 1551 2768 3382 3404 3669 4434 5153 5179 5688 7146 7374 7885 8499
9364 11279 13414 13415 13416 13417 13418 13419 13420 13421 13422 16455 16779 16780 16781 16782
16783 18179 18180 18532 19184 19230 19766 20402 20438 21437 22781 23681 27774 27990 27999 28285
33033 34259 35255 35282 35285 35288 35289 36420
3: 456 457 470 712 881 1142 1361 2336 2631 2853 2989 3462 3491 3834 3927 4028 4048 4060 4127 4140
4160 4191 4241 4250 4302 5192 5679 5712 5811 5914 7872 7874 9042 9469 13359 13901 13913 16134
16173 17389 17790 17866 18577 18938 19220 19851 20421 20992 22719 23039 23691 24702 27436 27600
29693 31156 33797 36004
4: 344 385 4194
5: 741 1095 1126 1282 1869 2005 2063 2201 2860 3039 3267 3269 3340 3524 4426 6056 7596 8593 9054
9182 9183 9360 9694 9714 10214 11228 11363 11572 12507 13329 13330 13331 13332 13333 13334 13335
13347 13348 13349 13350 13351 13352 13425 13973 14651 15098 15291 15709 17686 17750 18147 18555
18750 18786 18813 19370 19457 19479 19838 19839 20150 20152 20184 20693 21241 21595 21596 22542
22643 22644 22645 22646 22798 23714 25078 25487 26417 26441 26498 26499 26500 27004 27025 28214
29144 30518 30709 30758 31167 31344 31394 31692 31734 32109 32138 32578 32959 33935 36167 36426
6: 775 1376 1383 1619 1972 2004 2037 2825 2866 4396 6439 9718 11312 11422 12356 12359 12365 12381
12402 12407 12443 12450 12455 12467 12468 12470 12472 12495 12498 12500 12501 16180 17480 17889
17895 18236 18975 19053 19298 19392 19761 19783 20005 20053 21580 21704 22589 22648 30963 30964
31241 31242 31243 31244 31245 31246 31247 31248 31249 31250 31251 33709 36349
7: 653 714 763 991 1289 2076 2340 2710 2905 3406 7933 11367 13848 15284 17753 19310 19456 19919
22778 31068 36330
8: 648 691 832 889 950 1035 1049 1085 1555 1747 1952 2074 2235 3471 4715 7929 9413 10227 10570 11271
13763 13766 13911 15477 17962 18934 18990 18991 20092 21463 22102 22819 25479 26945 28548 32656
33989 36086 36325
9: 1767 2508 2758 2873 2995 3173 3272 3961 5849 13687 13715 17896 18662 22881
10: 12216 13118 14734 14862 15330 17937 17977 18728 22144 22171 25713 30281 31805 33005
11: 733 1167 1803 1947 2134 2187 2226 2258 2325 2473 2532 3031 3165 3758 3934 3971 4005 4310 4453
4496 4523 4677 4710 4788 4797 4806 4827 4846 4847 4902 4910 4916 4942 4963 4971 5030 5063 5175 5235
5259 5269 5307 5446 5448 5512 5525 5543 5576 5639 5651 5654 5695 5848 5957 5967 5972 5994 6049 6098
6115 6126 6145 6172 6203 6209 6210 6211 6231 6234 6270 6287 6288 6289 6294 6295 6296 6301 6314 6330
6343 6377 6602 6607 6631 6661 6671 6696 6725 7028 7208 7233 7283 7428 7627 7655 7691 7695 7721 7899
8093 8095 8098 8121 8254 8278 8289 8307 8326 8352 8384 8523 8649 8664 8684 8737 8741 8750 8775 8778
8799 8800 8831 8835 8907 8946 8953 9003 9004 9013 9153 9161 9288 9340 9345 9518 9553 9559 9574 9678
9702 9719 9766 9792 9919 9922 10063 10084 10101 10113 10209 10298 10304 10312 10349 10440 10442
10486 10497 10509 10628 10646 10654 10721 10754 10773 10776 10840 10857 10861 10876 10882 10899
11004 11025 11041 11051 11072 11096 11110 11194 11255 11258 11450 11504 11527 11553 11597 11599
11603 11685 11734 11737 11825 11938 12012 12036 12056 12069 12073 12077 12080 12112 12136 12156
12161 12171 12187 12233 12250 12269 12291 12318 12405 12521 12522 12541 12561 12576 12615 12623
12649 12666 12683 12698 12728 12740 12850 12921 13038 13108 13184 13442 13465 13511 13546 13620
13718 13743 13786 13815 13860 13863 13868 13921 13981 13992 14021 14160 14167 14171 14180 14194
14255 14470 14632 14681 14688 14730 14749 14809 14819 14846 14882 14925 14933 14943 14976 14977
14983 15012 15031 15089 15090 15129 15139 15144 15168 15199 15327 15329 15335 15511 15527 15537
15698 15758 15772 15886 15910 15978 16079 16149 16158 16210 16267 16359 16363 16368 16371 16519
16557 16571 16633 16656 16674 16712 16720 16734 16736 16752 16875 17052 17064 17079 17105 17141
17146 17150 17186 17203 17225 17247 17402 17443 17452 17453 17454 17455 17456 17479 17508 17512
17536 17587 17592 17715 17894 17908 17922 17958 17997 18095 18102 18116 18126 18153 18258 18336
18338 18367 18383 18412 18421 18429 18452 18455 18469 18493 18502 18661 18676 18736 18762 18777
18784 18913 19019 19093 19105 19153 19465 19619 19699 19700 19733 19741 19894 20086 20089 20168
20172 20189 20213 20230 20256 20295 20307 20308 20379 20394 20556 20558 20590 20591 20611 20637
20638 20729 20741 20750 20752 20764 20772 20869 20874 20888 20962 20978 21024 21073 21252 21287
21374 21426 21623 21678 21684 21763 21779 21818 21852 22027 22032 22034 22094 22125 22164 22205
22224 22253 22301 22307 22320 22337 22359 22378 22389 22420 22435 22450 22486 22519 22627 22652
22818 22890 22891 22895 22966 23069 23075 23102 23161 23176 23253 23298 23356 23408 23424 23442
23541 23542 23547 23554 23592 23619 23736 23779 23780 23811 23815 23824 23833 23838 23851 23879
23907 23934 23942 23958 24097 24101 24106 24125 24137 24145 24369 24376 24450 24479 24495 24558
24612 24638 24651 24698 24850 24899 25020 25090 25149 25154 25189 25200 25208 25218 25237 25258
25265 25271 25290 25303 25309 25337 25358 25361 25407 25584 25612 25629 25647 25648 25732 25741
26255 26339 26407 26445 26552 26694 26717 26723 26858 26880 26891 27003 27069 27124 27213 27324
27331 27374 27377 27379 27409 27493 27526 27546 27558 27567 27606 27626 27649 27650 27660 27695
27698 27707 27802 27866 27889 27912 27959 28049 28068 28113 28132 28174 28269 28377 28443 28478
28679 28719 28801 28856 28866 28881 28906 28914 29014 29022 29033 29106 29139 29160 29168 29242
29266 29285 29316 29337 29339 29404 29408 29454 29538 29566 29575 29598 29713 29716 29735 29739
29767 29773 29789 29793 29809 29826 29933 29935 29949 29968 30016 30057 30102 30125 30141 30162
30173 30188 30226 30230 30234 30277 30309 30368 30408 30429 30456 30472 30489 30540 30551 30561
30563 30609 30638 30639 30654 30683 30792 30793 30866 30878 30884 30904 30924 30967 31063 31134
31215 31216 31219 31375 31482 31490 31602 31733 31810 32008 32013 32023 32049 32051 32055 32234
32346 32358 32381 32398 32422 32462 32494 32521 32529 32653 32664 32669 32722 32753 32762 32772
32776 32789 32798 32855 32875 32889 32986 33002 33059 33119 33146 33152 33197 33219 33286 33300
33316 33329 33351 33442 33460 33486 33526 33621 33643 33663 33690 33697 33699 33772 33845 33846
33847 33848 33849 33850 33929 33930 33947 34024 34031 34038 34063 34085 34161 34164 34199 34216
34238 34251 34286 34288 34317 34334 34348 34399 34545 34598 34688 34697 34778 34808 34832 34879
34895 34900 34936 34972 34996 35057 35083 35111 35181 35229 35263 35268 35362 35377 35428 35470
35671 35679 35704 35708 35720 35733 35738 35770 35806 35842 35865 35892 35946 35949 36060 36083
36102 36124 36180 36206 36250 36267 36275 36398
12: 3551 4778 5210 5604 7474 8618 9196 10382 11155 11645 12560 12587 12810 12835 13066 13172 13568
13630 14570 15055 15890 16081 16563 17858 18083 18323 18839 20636 21261 21978 22393 23236 23580
24043 24809 25035 25102 25138 25306 25786 26437 27283 28010 28108 28725 29361 29646 29878 30100
30657 31040 31866 32676 34201 35216 35792
13: 4912 5245 5316 5329 6070 6515 6660 7632 7661 7690 7728 7864 8199 8295 8840 8957 8999 9165 9520
10348 10398 10414 10433 10463 10996 11052 11091 11132 11174 11457 11488 11625 11824 12140 12165
12225 12277 12548 12565 12715 12851 12866 12922 12930 12937 13095 13545 13595 13619 13647 13657
13778 13983 14473 14643 14733 14788 14801 15116 15379 15490 15541 15697 16023 16275 16387 16414
16443 16659 17092 17113 17899 17965 18161 18274 18275 18398 18438 18731 18765 19738 19755 20260
20850 20912 21251 21770 21778 22001 22022 22077 22099 22172 22267 22368 22461 23199 23240 23252
23609 23765 23993 24126 24132 24152 24664 25024 25343 25362 25404 25715 25803 25839 25961 26610
26670 27096 27557 27617 27641 27796 28079 28087 28101 28802 28841 28848 28965 29889 29907 30283
30294 30329 30335 30546 31591 31792 31986 32520 32522 32536 32619 32737 32965 33281 33532 33778
33832 34013 34236 34673 34791 34998 35123 35245 35604 35728
14: 451 452 467 2486 2567 4431 4518 4563 4590 4660 4684 4686 4727 4786 4809 4862 4864 5005 5019 5036
5055 5141 5201 5266 5284 5313 5324 5355 5371 5387 5479 5538 5551 5573 5609 5908 6074 6079 6132 6156
6173 6204 6233 6341 6360 6361 6497 6558 6568 6592 6620 6689 6733 6742 6747 6806 6874 6875 6916 7019
7069 7123 7128 7157 7177 7239 7457 7473 7636 7664 7680 7684 7731 8166 8224 8235 8299 8419 8506 8609
8637 8730 8771 8797 8869 9241 9325 9524 9529 9610 9759 9814 9830 9849 9912 9931 9972 9992 9999
10052 10334 10363 10467 10667 10677 10700 10738 10772 10782 10813 10850 10885 10894 10975 11031
11154 11460 11528 11569 11636 11704 11752 11766 11886 11930 11934 12016 12050 12201 12210 12211
12222 12323 12331 12352 12471 12530 12555 12586 12639 12691 12759 12763 12843 12916 13061 13076
13083 13145 13176 13195 13211 13429 13557 13625 13759 13967 14169 14281 14304 14359 14360 14402
14481 14512 14564 14634 14709 14715 14726 14826 14855 14864 14957 14979 15057 15207 15228 15342
15370 15517 15914 15936 15969 16069 16293 16441 16575 16593 16692 16718 16823 16851 16861 17036
17102 17228 17337 17351 17418 17421 17516 17582 17583 17727 17728 17912 17931 17966 17987 17988
18082 18106 18125 18309 18358 18363 18391 18476 18484 18707 18732 18843 18885 19620 19666 19703
19759 20284 20560 20573 20596 20602 20626 20696 20883 20911 20966 21004 21160 21210 21671 21753
21802 21987 22121 22145 22177 22180 22238 22278 22303 22326 22332 22341 22382 22416 22463 22504
22526 23086 23138 23263 23434 23481 23488 23520 23536 23588 23631 23760 24003 24041 24091 24304
24323 24392 24433 24490 24523 24549 24559 24647 24717 24761 24796 24797 24819 24827 24828 24829
24879 24915 25003 25007 25029 25033 25176 25231 25346 25368 25372 25396 25398 25492 25520 25747
25775 25827 25907 26249 26301 26359 26396 26571 26582 26738 26779 26785 26830 27074 27273 27355
27368 27369 27382 27398 27471 27495 27553 27621 27676 27751 27769 27772 27963 27968 28061 28092
28483 28502 28538 28555 28601 28602 28623 28696 28738 28806 28882 28901 28947 28994 29118 29119
29177 29272 29298 29401 29431 29456 29464 29547 29548 29582 29609 29637 29645 29660 29745 29813
29835 29883 29963 29980 29989 30054 30068 30155 30195 30256 30292 30332 30643 30876 30991 31019
31049 31161 31530 31809 31812 31840 31841 31842 31843 32072 32174 32238 32289 32377 32433 32443
32458 32501 32540 32564 32565 32567 32568 32621 32631 32639 32646 32673 32706 32872 32967 32999
33082 33185 33195 33293 33332 33381 33417 33456 33537 33540 33572 33635 33782 33833 34086 34104
34109 34131 34169 34247 34258 34287 34304 34308 34322 34423 34476 34512 34544 34615 34677 34685
34714 34716 34765 34781 34794 34796 34813 34826 34881 34942 34953 34979 35002 35046 35100 35103
35113 35121 35136 35142 35182 35395 35400 35427 35489 35496 35525 35526 35527 35546 35552 35572
35694 35829 35849 35955 35978 36111 36129 36187 36224 36289 36367 36383
15: 323 793 812 880 904 916 1016 1377 1453 1492 1516 1626 1764 1790 1791 1949 1950 2042 2154 2458
2616 2703 2819 2877 2911 2914 2948 3015 3134 3154 3260 3261 3270 3297 3303 3329 3365 3451 3852 3855
3915 4116 4129 4142 4167 4207 4246 4279 4370 4393 4460 4471 4500 4505 4547 4583 4595 4611 4612 4613
4616 4617 4663 4670 4673 4675 4811 4824 4858 4955 4983 5001 5003 5006 5009 5015 5018 5020 5025 5028
5029 5031 5032 5044 5046 5057 5071 5078 5108 5232 5335 5364 5382 5406 5441 5465 5477 5558 5585 5589
5599 5632 5676 5840 5906 5939 5948 5952 5961 5982 6164 6167 6176 6207 6363 6365 6537 6538 6555 6579
6608 6676 6680 6690 6692 6697 6703 6714 6722 6724 6755 6758 6770 6775 6779 6819 6913 6970 6979 7021
7034 7043 7045 7060 7114 7117 7135 7166 7173 7183 7206 7222 7225 7261 7266 7272 7305 7405 7406 7407
7413 7429 7432 7455 7456 7586 7853 7854 7863 8128 8139 8161 8169 8181 8182 8185 8186 8226 8229 8230
8252 8261 8268 8319 8348 8418 8492 8513 8542 8608 8610 8628 8631 8658 8677 8680 8696 8756 8764 8828
8844 8848 8849 8850 8899 8901 8974 9118 9121 9140 9145 9179 9192 9226 9227 9234 9235 9258 9465 9575
9595 9614 9615 9623 9624 9751 9769 9772 9778 9780 9805 9808 9813 9835 9920 9924 9991 10020 10056
10115 10154 10362 10364 10366 10371 10396 10444 10449 10450 10489 10505 10510 10515 10552 10553
10566 10599 10610 10617 10621 10632 10678 10733 10799 10824 10841 10853 10878 10880 10901 10905
10986 11026 11092 11106 11129 11203 11231 11385 11531 11537 11567 11694 11700 11705 11709 11715
11747 11784 11794 11801 11806 11810 11812 11816 11817 11828 11923 11942 11947 11948 11966 11997
12019 12081 12125 12213 12263 12271 12280 12303 12305 12404 12559 12625 12641 12657 12663 12725
12732 12733 12750 12774 12809 12885 12924 12947 13019 13036 13051 13088 13126 13130 13147 13214
13215 13258 13259 13343 13455 13457 13461 13474 13506 13509 13581 13640 13692 13748 13946 14012
14195 14253 14256 14264 14267 14286 14392 14430 14589 14787 14800 14821 14831 14885 14907 14917
14921 14939 14940 14949 15024 15062 15151 15162 15221 15244 15245 15248 15249 15252 15417 15470
15476 15480 15484 15679 15893 15894 15900 15927 15937 16057 16147 16198 16249 16263 16273 16320
16477 16527 16532 16533 16548 16552 16610 16660 16723 16838 16879 17022 17031 17072 17089 17093
17164 17172 17184 17224 17234 17245 17332 17367 17406 17408 17437 17438 17439 17440 17539 17658
17709 17711 17721 17755 17959 18151 18159 18198 18211 18218 18361 18439 18490 18516 18522 18769
18866 18869 18918 19129 19194 19350 19485 19494 19623 19640 19654 19984 20147 20248 20294 20300
20414 20473 20534 20579 20628 20635 20718 20721 20728 20739 20753 20815 20816 20819 20834 20845
20860 20862 20892 20898 20899 20907 20998 21000 21031 21052 21059 21063 21124 21141 21173 21174
21175 21176 21177 21178 21179 21180 21181 21182 21183 21217 21673 21717 21728 21872 21874 21875
22002 22039 22045 22069 22089 22225 22242 22250 22259 22330 22336 22357 22383 22390 22401 22437
22527 22534 22547 22754 22861 22892 22923 22946 22959 23018 23089 23100 23120 23144 23183 23202
23237 23268 23374 23388 23392 23393 23404 23411 23422 23435 23436 23437 23458 23492 23496 23508
23515 23544 23548 23597 23655 23759 23933 23960 23963 23971 23990 24037 24046 24048 24066 24133
24302 24335 24351 24389 24396 24480 24498 24503 24528 24569 24582 24639 24654 24659 24714 24733
24963 25131 25134 25168 25175 25199 25217 25230 25234 25248 25256 25264 25278 25280 25284 25298
25307 25446 25485 25523 25526 25527 25650 25670 25755 25831 25834 25838 26020 26186 26201 26202
26212 26217 26240 26286 26392 26418 26439 26492 26545 26548 26549 26566 26567 26569 26578 26615
26697 26722 26730 26735 26894 26898 26993 27047 27240 27247 27292 27340 27344 27346 27348 27387
27477 27478 27550 27696 27709 27742 27765 27813 27945 27949 27951 28014 28029 28034 28036 28037
28047 28082 28201 28246 28273 28286 28310 28347 28395 28432 28438 28519 28655 28691 28757 28795
28796 28798 28816 28818 28885 28894 28905 28913 28969 28970 29130 29151 29217 29218 29224 29227
29246 29249 29250 29276 29289 29310 29311 29313 29327 29436 29437 29452 29458 29483 29498 29512
29559 29611 29617 29622 29683 29736 29819 29823 29825 29828 29893 29938 29944 29948 29965 29972
29977 29982 29995 30041 30046 30055 30078 30080 30084 30126 30154 30157 30168 30208 30237 30252
30308 30314 30370 30377 30578 30580 30581 30695 30696 30733 30787 30845 30860 30868 30899 30900
31141 31252 31407 31481 31505 31508 31519 31551 31552 31553 31554 31577 31687 31693 31719 31737
31844 31856 31879 31907 31967 32000 32006 32010 32018 32037 32056 32115 32120 32124 32170 32264
32269 32292 32334 32341 32364 32365 32416 32420 32435 32453 32500 32503 32506 32516 32561 32605
32618 32622 32636 32648 32655 32679 32680 32681 32687 32938 32943 32948 32952 33016 33099 33106
33117 33127 33133 33196 33211 33216 33221 33236 33237 33288 33306 33311 33319 33326 33337 33349
33372 33375 33379 33380 33382 33390 33451 33476 33477 33481 33501 33502 33578 33588 33589 33593
33611 33804 33873 33990 34025 34052 34069 34073 34082 34111 34150 34170 34173 34175 34178 34203
34218 34220 34265 34266 34293 34303 34316 34326 34351 34353 34400 34402 34468 34469 34487 34508
34520 34540 34616 34626 34636 34702 34704 34708 34711 34721 34825 34847 34859 34876 34950 34967
35036 35050 35068 35099 35119 35130 35189 35193 35195 35227 35230 35242 35392 35402 35406 35421
35431 35434 35440 35452 35453 35501 35518 35548 35551 35700 35791 35813 35817 35827 35830 35835
35844 35847 35873 35874 35875 35919 35925 35938 35972 35974 36078 36085 36109 36110 36139 36151
36185 36205 36208 36270 36279 36357 36370 36376 36417 36425
16: 322 793 812 880 904 916 1016 1377 1453 1492 1516 1626 1764 1790 1791 1949 1950 2042 2154 2616
2703 2819 2877 2911 2914 2948 3015 3134 3154 3260 3261 3270 3297 3303 3329 3365 3451 3852 3855 3915
4116 4129 4142 4167 4207 4246 4279 4370 4393 4460 4471 4500 4505 4524 4547 4583 4595 4611 4613 4616
4617 4663 4670 4673 4675 4811 4824 4858 4955 4983 5001 5003 5006 5009 5015 5018 5020 5028 5029 5031
5032 5044 5057 5071 5108 5232 5335 5364 5382 5406 5441 5465 5477 5558 5585 5589 5599 5632 5676 5840
5906 5939 5948 5952 5961 5982 6031 6164 6167 6176 6207 6363 6365 6537 6538 6555 6579 6608 6676 6680
6692 6697 6703 6714 6722 6724 6755 6758 6767 6770 6775 6779 6819 6913 6970 6979 7021 7034 7043 7045
7060 7114 7117 7135 7166 7173 7183 7206 7222 7225 7261 7266 7272 7305 7405 7406 7407 7413 7429 7432
7455 7456 7586 7853 7854 7863 8128 8139 8161 8169 8181 8182 8185 8186 8226 8229 8230 8252 8261 8268
8319 8348 8418 8492 8513 8542 8559 8608 8610 8628 8631 8658 8677 8680 8696 8720 8756 8764 8828 8848
8849 8850 8899 8901 8974 9118 9121 9140 9145 9179 9192 9193 9194 9226 9227 9234 9235 9258 9465 9575
9595 9614 9615 9623 9624 9751 9769 9772 9778 9780 9805 9808 9813 9835 9914 9920 9924 9991 10020
10056 10115 10154 10362 10364 10366 10371 10396 10416 10444 10449 10450 10454 10489 10505 10510
10515 10552 10553 10566 10599 10610 10617 10632 10678 10733 10799 10824 10841 10853 10878 10880
10901 10905 10986 11026 11092 11106 11129 11203 11231 11385 11531 11537 11567 11694 11700 11705
11709 11715 11747 11784 11794 11801 11806 11810 11812 11816 11817 11828 11923 11942 11947 11948
11966 11997 12019 12081 12125 12213 12263 12271 12280 12303 12305 12404 12434 12559 12625 12641
12663 12725 12730 12732 12733 12750 12774 12809 12885 12924 12934 12947 13019 13036 13051 13088
13126 13130 13147 13214 13215 13258 13259 13343 13455 13457 13461 13474 13506 13509 13581 13590
13640 13692 13748 13946 14012 14195 14256 14264 14267 14286 14392 14430 14589 14787 14800 14821
14831 14885 14907 14917 14921 14939 14940 14949 15024 15062 15151 15162 15221 15244 15245 15248
15249 15252 15417 15470 15476 15480 15484 15679 15893 15894 15900 15927 15937 16057 16147 16198
16249 16263 16273 16320 16477 16527 16532 16533 16548 16552 16596 16610 16660 16723 16838 16879
17022 17031 17072 17089 17093 17164 17172 17184 17224 17234 17245 17332 17367 17408 17440 17539
17658 17709 17711 17721 17755 17959 18151 18159 18198 18211 18218 18361 18439 18490 18516 18522
18769 18866 18869 18918 19129 19350 19485 19494 19623 19640 19654 19984 20147 20248 20294 20300
20414 20473 20534 20579 20628 20635 20718 20721 20728 20739 20815 20816 20819 20834 20845 20860
20862 20892 20898 20899 20907 20998 21000 21031 21052 21063 21124 21141 21155 21173 21178 21217
21673 21717 21728 21872 21874 21875 22002 22039 22045 22069 22089 22207 22225 22242 22250 22259
22330 22336 22357 22383 22390 22401 22437 22527 22534 22547 22754 22861 22892 22923 22946 22959
23018 23089 23100 23120 23144 23183 23202 23237 23268 23374 23388 23392 23393 23404 23411 23422
23435 23436 23437 23458 23492 23496 23508 23515 23544 23548 23597 23598 23655 23759 23933 23960
23963 23971 23990 24037 24046 24048 24066 24133 24302 24335 24351 24389 24396 24480 24498 24503
24528 24569 24582 24639 24654 24659 24714 24733 24963 25131 25134 25168 25175 25199 25217 25230
25234 25248 25256 25264 25278 25280 25284 25298 25307 25446 25485 25523 25527 25549 25650 25670
25755 25831 25834 25838 26020 26186 26201 26202 26212 26217 26240 26286 26392 26418 26439 26492
26545 26548 26549 26566 26567 26569 26578 26615 26697 26722 26730 26735 26894 26898 26993 27015
27047 27240 27247 27292 27340 27344 27346 27348 27387 27477 27478 27550 27696 27709 27742 27765
27813 27945 27951 28014 28029 28032 28034 28036 28037 28047 28073 28082 28163 28201 28246 28273
28286 28310 28347 28395 28432 28519 28655 28691 28757 28795 28796 28798 28816 28818 28885 28894
28905 28913 28969 28970 29130 29151 29217 29218 29224 29227 29246 29249 29250 29276 29289 29310
29311 29313 29327 29436 29437 29452 29458 29471 29483 29512 29559 29611 29617 29622 29683 29736
29819 29823 29825 29828 29893 29938 29944 29948 29965 29972 29977 29982 29995 30041 30046 30055
30078 30080 30084 30126 30154 30157 30168 30208 30252 30308 30314 30370 30377 30580 30581 30695
30696 30733 30787 30845 30860 30868 30899 30900 31141 31252 31407 31481 31505 31508 31519 31577
31687 31693 31719 31737 31844 31856 31879 31907 31967 32000 32006 32010 32018 32056 32115 32120
32124 32170 32264 32269 32292 32334 32341 32364 32365 32416 32420 32435 32453 32500 32503 32506
32516 32561 32605 32618 32622 32636 32648 32655 32679 32680 32681 32685 32687 32938 32943 32948
32952 32954 33016 33099 33106 33117 33127 33196 33211 33216 33221 33236 33237 33280 33288 33306
33311 33319 33326 33337 33349 33372 33375 33379 33380 33382 33390 33451 33476 33477 33481 33501
33502 33578 33588 33589 33593 33611 33804 33873 33990 34025 34052 34069 34073 34082 34111 34150
34170 34173 34175 34178 34203 34218 34220 34265 34266 34293 34303 34316 34326 34351 34353 34400
34468 34469 34487 34508 34520 34540 34616 34626 34702 34708 34711 34721 34825 34847 34859 34950
34967 35036 35050 35068 35099 35119 35130 35189 35193 35195 35227 35230 35242 35392 35402 35406
35421 35431 35434 35440 35452 35453 35501 35518 35548 35551 35700 35791 35813 35817 35827 35830
35835 35844 35847 35873 35874 35875 35901 35919 35925 35938 35974 36078 36085 36109 36110 36139
36151 36185 36205 36208 36270 36279 36357 36370 36376 36417 36425
17: 1716 1932 2155 2504 2792 2832 2969 3152 3606 3896 4029 4150 4278 4288 4303 6431 9439 11428
12366 16161 18992 19782 20155 20403 21107 21405 22832 22907 22972
18: 326 640 685 986 987 1562 3256 4450 4631 4636 4653 4744 4815 4881 4903 5050 5224 5233 5337 5414
5456 5511 5584 5698 5911 6040 6158 6223 6232 6284 6450 6505 6606 6665 6718 6789 6911 7038 7093 7127
7158 7274 7295 7425 7479 7641 7669 7736 7773 8106 8259 8303 8325 8336 8526 8586 8681 8754 8873 8939
8945 9008 9074 9154 9212 9228 9307 9622 9781 9797 9811 9938 9966 10005 10017 10068 10098 10205
10297 10417 10484 10579 10705 10736 10741 10762 10830 10847 10872 10886 10893 10919 10938 10997
11011 11030 11082 11160 11179 11469 11490 11506 11522 11565 11587 11589 11590 11591 11593 11677
11699 11762 11829 11845 11857 11925 12049 12054 12072 12111 12141 12166 12228 12268 12292 12319
12320 12448 12549 12591 12604 12633 12702 12731 12793 12821 12863 12936 13116 13163 13188 13242
13243 13244 13245 13246 13247 13326 13493 13531 13607 13660 13731 13749 13824 13933 13948 14014
14030 14094 14175 14246 14444 14454 14489 14529 14541 14547 14583 14653 14695 14770 14790 14869
14934 15022 15140 15172 15323 15372 15489 15677 15889 15992 16074 16323 16555 16630 16652 16678
16737 17193 17254 17380 17417 17493 17565 17573 17731 17777 17811 17832 17907 17978 18016 18071
18089 18101 18143 18279 18339 18397 18414 18485 18497 18679 18726 18775 18879 19010 19366 19657
19739 20183 20205 20237 20243 20621 20682 20685 20758 20871 20876 21035 21083 21139 21273 21304
21342 21370 21444 21675 21756 21784 21808 21855 21868 22005 22064 22115 22198 22240 22277 22308
22428 22446 22525 22618 23122 23293 23420 23449 23507 23620 23622 23724 23778 23792 23828 23845
23878 23906 23949 24024 24090 24121 24303 24414 24454 24477 24580 24616 24636 24820 24838 24903
24959 24995 25165 25229 25350 25476 25500 25576 25601 25616 25692 25696 25805 25941 26204 26347
26389 26395 26540 26718 26862 26878 26928 26991 27068 27263 27338 27383 27517 27548 27551 27568
27615 27625 27630 27638 27644 27658 27692 27736 27755 27807 27854 27877 27934 27960 27962 28023
28123 28173 28283 28315 28421 28499 28530 28694 28754 28803 28805 28844 28859 28876 28916 28932
28999 29019 29021 29128 29185 29258 29391 29446 29531 29557 29590 29664 29730 29770 29791 29817
29909 29921 29937 29974 30009 30031 30118 30200 30263 30352 30358 30413 30426 30464 30484 30490
30510 30555 30571 30610 30633 30675 30770 30791 30801 30827 30852 30917 30978 31041 31209 31217
31360 31456 31510 31772 31808 31920 31965 32040 32096 32193 32229 32273 32371 32390 32406 32448
32482 32545 32672 32734 32801 32883 33001 33135 33169 33302 33307 33356 33484 33583 33639 33696
33789 33829 33946 34022 34028 34059 34189 34257 34311 34429 34499 34538 34594 34738 34770 34839
34880 34912 35059 35095 35158 35188 35396 35442 35497 35587 35652 35736 35753 35881 35948 36044
36106 36212 36403 36429
19: 325 640 685 986 987 1562 3256 3841 3847 4003 4068 4286 4450 4492 4511 4522 4546 4548 4631 4636
4653 4815 4881 4903 5050 5191 5224 5233 5288 5308 5337 5414 5456 5511 5584 5698 5911 6040 6092 6158
6223 6232 6284 6450 6505 6606 6665 6718 6789 6911 7038 7093 7127 7158 7274 7295 7425 7479 7641 7669
7676 7736 7773 8106 8143 8259 8303 8325 8336 8526 8586 8681 8754 8873 8939 8945 9007 9008 9074 9154
9212 9228 9303 9307 9501 9622 9781 9797 9811 9938 9966 10068 10093 10098 10205 10297 10417 10484
10579 10705 10736 10741 10762 10830 10847 10872 10886 10893 10919 10938 10997 11011 11030 11082
11160 11179 11313 11427 11469 11490 11506 11522 11565 11587 11589 11590 11591 11593 11677 11699
11762 11829 11845 11857 11925 12049 12054 12072 12111 12141 12166 12228 12268 12292 12319 12320
12448 12549 12591 12604 12633 12660 12702 12731 12793 12821 12863 13041 13116 13163 13188 13242
13243 13244 13245 13246 13247 13326 13493 13531 13607 13660 13731 13749 13824 13933 13948 14014
14030 14094 14175 14246 14444 14454 14489 14529 14541 14547 14583 14653 14695 14707 14770 14790
14869 14934 15022 15140 15172 15264 15323 15372 15489 15533 15549 15677 15889 15992 16016 16037
16074 16323 16555 16630 16652 16678 16737 16832 17051 17193 17254 17380 17417 17493 17565 17573
17601 17602 17603 17731 17777 17811 17832 17907 17978 18016 18071 18089 18101 18143 18279 18339
18397 18414 18485 18497 18570 18587 18679 18726 18775 18879 19010 19366 19657 19739 19781 20007
20161 20167 20183 20205 20237 20243 20621 20682 20685 20758 20871 20876 20942 21035 21083 21090
21095 21139 21273 21304 21342 21370 21444 21675 21756 21784 21808 21855 21868 22005 22064 22115
22198 22240 22277 22308 22428 22446 22525 22618 23122 23160 23220 23293 23420 23449 23507 23620
23622 23666 23699 23724 23778 23792 23828 23845 23878 23906 23949 24024 24090 24121 24303 24370
24414 24454 24477 24513 24580 24616 24636 24820 24838 24903 24959 24995 25036 25109 25165 25229
25350 25354 25389 25476 25500 25576 25601 25616 25692 25696 25722 25805 25941 26204 26347 26389
26395 26400 26540 26715 26718 26862 26878 26928 26991 27068 27089 27263 27287 27338 27383 27466
27517 27548 27551 27568 27615 27625 27630 27638 27644 27658 27692 27736 27755 27807 27854 27877
27934 27960 27962 28023 28123 28173 28283 28315 28421 28499 28530 28694 28754 28803 28805 28844
28859 28876 28916 28932 28999 29019 29021 29128 29185 29258 29357 29391 29446 29531 29557 29590
29664 29730 29770 29791 29817 29909 29921 29937 29974 30009 30031 30118 30200 30263 30352 30358
30413 30426 30464 30484 30490 30510 30555 30571 30610 30611 30633 30675 30770 30791 30801 30827
30852 30893 30917 30978 31041 31078 31209 31217 31360 31456 31510 31772 31808 31846 31920 31965
32040 32096 32193 32229 32273 32371 32390 32406 32448 32482 32545 32672 32734 32801 32883 33001
33135 33169 33302 33307 33356 33484 33514 33583 33639 33696 33789 33829 33946 34022 34028 34059
34189 34257 34311 34429 34499 34538 34594 34609 34653 34738 34770 34839 34880 34912 35013 35059
35095 35158 35188 35396 35442 35497 35587 35652 35736 35753 35881 35948 36044 36106 36212 36403
36429
20: 1444 3299 4511 4548 4744 4838 5186 5224 5288 5308 5375 5385 5556 5627 6092 6174 6311 6450 6588
6606 6647 6649 6665 6812 6928 7022 7172 7295 7676 8422 8945 9095 9154 9501 9797 9908 9909 10017
10135 10309 10413 10498 10688 10741 10769 10886 10893 10919 10938 10985 11011 11048 11185 11506
11674 11699 11733 11783 11845 12054 12109 12111 12411 12461 12532 12599 12633 12793 12867 12936
13041 13159 13212 13531 13596 13656 13731 13749 13933 13948 14398 14541 14547 14583 14619 14636
14637 14638 14639 14640 14641 14743 15172 15489 15674 15962 16308 16352 16376 16402 16652 16759
16835 17129 17152 17382 17565 17597 17601 17602 17603 17687 17955 18143 18205 18286 18339 18381
18414 18876 20563 20677 20871 21083 21125 21163 21273 21758 22012 22078 22115 22434 23290 23348
23461 23699 23828 24027 24096 24303 24352 24414 24477 24513 24586 24636 24959 24995 25036 25109
25354 25576 25811 25861 25951 26400 26718 26878 26974 27089 27287 27289 27315 27338 27466 27548
27625 27638 27658 27692 27736 27755 27934 27989 28127 28202 28217 28345 28412 28488 28532 28630
28714 28803 28859 28916 28932 29001 29019 29021 29128 29169 29357 29557 29590 29623 29817 29906
30025 30358 30556 30705 30827 31004 31102 31126 31209 31217 31378 31456 31707 31778 31846 31881
32106 32280 32572 32747 32760 33302 33307 33514 33946 34022 34028 34534 34627 34653 34949 34975
35013 35053 35154 35383 35385 35396 35442 35458 35596 35736 36044
21: 329 672 1271 1349 1648 1894 2345 2728 2729 3215 3423 3521 3774 4123 4263 5686 5777 6442 9126
13871 13878 13907 13994 17507 17765 17845 18562 18754 21092 21106 21604 22614 22650 23750 26807
29621 30298 30962 34748
22: 328 672 1271 1349 1894 2345 2728 2729 3215 3423 3521 3774 4123 4263 5686 5777 6442 9126 13871
13878 13907 13994 17507 17765 17845 18562 18754 21092 21106 21604 22614 22650 23750 26807 29621
30298 30962 34748
23: 1271 1349 1779 1904 2396 2479 3473 4171 4489 6442 9126 9127 9128 11335 11729 13871 13878 13907
13994 15798 17829 18529 18602 18754 19017 19097 19976 20396 22735 24706 25079 30962
24: 1271 1349 1779 1904 2396 2479 3473 4171 4489 6442 9126 9127 9128 11335 11729 13871 13878 13907
13994 15798 17829 18529 18602 18754 19017 19097 19976 20396 22735 24706 25079 30962
25: 595 836 837 943 962 1191 1392 1579 2461 2477 2727 2836 3226 4061 4080 4120 4184 4238 4256 4301
4521 4784 5220 5241 5350 5438 5500 6039 6595 6836 6938 6962 7012 7091 7113 7238 7419 7494 7634 7663
7742 7900 8221 8271 8297 8544 8567 8726 9091 9215 9282 9603 9696 9825 9873 10019 10180 10186 10207
10267 10370 10436 10625 10701 10794 10795 10796 10918 10977 11149 11237 11440 11459 11566 11596
11637 11871 12047 12178 12509 12580 12699 12844 13160 13314 13501 13558 13841 13899 13966 14429
14472 14577 14962 15040 15072 15402 15678 15701 15919 16700 16824 16987 17191 17252 17355 17564
17656 17720 18249 18307 18795 18917 19081 19320 19632 19953 19954 20440 20714 20818 21306 21683
21742 21983 22252 22356 22442 22514 22710 23101 23362 23482 23698 23734 23742 23968 24016 24576
24729 24953 24984 25116 25139 25196 25345 25536 25744 25780 25847 26710 26742 26992 27033 27150
27211 27276 27306 28022 28090 28158 28198 28204 28220 28239 28338 28396 28462 28739 28993 29146
29352 29393 29415 29571 29651 29714 29911 30017 30124 30180 30216 30734 30848 30873 30961 30992
31033 31351 31363 31406 31516 31724 31759 31859 31891 32046 32132 32188 32221 32230 32271 32380
32393 32472 32710 32898 32920 33142 33182 33246 33252 33256 33365 33678 33762 33780 34058 34291
34350 34514 34726 34889 34907 35024 35138 35221 35511 35570 35626 35746 35991 36133 36181
26: 617 854 1058 1192 1342 1416 1435 1733 1910 1942 1980 2036 2054 2136 2352 2399 2400 2448 2476
2492 2499 2547 2570 2651 2869 2885 3112 3171 3460 3582 3851 3981 4023 4177 4287 4456 4532 4552 4618
4651 4696 4726 4800 4868 4970 5076 5139 5216 5239 5297 5372 5435 5461 5554 5603 6072 6146 6200 6235
6252 6281 6306 6370 6524 6525 6553 6603 6776 6927 6944 6964 7040 7083 7137 7164 7230 7309 7421 7630
7659 7688 7847 7936 8037 8060 8118 8222 8293 8356 8426 8543 8582 8698 8747 8806 9041 9078 9105 9110
9171 9207 9289 9331 9473 9522 9558 9789 9846 9905 9956 10061 10206 10217 10244 10291 10305 10375
10482 10556 10644 10689 10767 10797 10842 10852 10949 10978 11012 11027 11083 11097 11104 11115
11153 11178 11320 11337 11455 11485 11633 11701 11741 11768 11781 11870 11958 12090 12119 12135
12151 12160 12207 12258 12288 12308 12398 12543 12583 12603 12686 12724 12892 13065 13113 13173
13191 13534 13535 13561 13671 13676 13827 13861 13891 13958 13998 14058 14142 14183 14262 14367
14450 14509 14538 14630 14650 14669 14727 14777 14878 14919 15029 15078 15079 15080 15081 15082
15155 15250 15353 15421 15473 15637 15664 15699 15752 15979 16021 16043 16082 16222 16270 16325
16342 16416 16531 16636 16647 16673 16757 16808 17026 17047 17148 17166 17229 17373 17504 17561
17591 17708 17785 17928 17930 17994 18010 18105 18156 18311 18353 18368 18409 18472 18492 18508
18575 18689 18719 18759 18827 18892 18951 19327 19354 19416 19495 19613 19712 19732 19744 19800
20026 20169 20186 20234 20289 20362 20553 20613 20706 20837 20847 20961 20970 21026 21053 21076
21131 21147 21232 21365 21476 21661 21693 21754 21762 21776 21792 21793 21794 21795 21877 21926
21939 21988 22127 22179 22220 22275 22345 22418 22456 22529 22784 22800 22801 22951 23088 23156
23210 23261 23324 23351 23446 23451 23593 23652 23695 23741 23755 23816 23842 23871 23936 23998
24063 24087 24144 24153 24315 24357 24402 24412 24425 24520 24575 24662 24663 24774 24822 24849
24873 24896 24954 25001 25026 25055 25098 25114 25178 25204 25341 25364 25406 25548 25572 25599
25633 25704 25711 25774 25844 25949 25973 26019 26256 26332 26510 26519 26554 26672 26675 26704
26741 26773 26780 26792 26821 26997 27005 27027 27040 27118 27241 27279 27291 27307 27328 27359
27361 27448 27452 27473 27513 27538 27633 27685 27798 27855 27890 28054 28091 28144 28145 28168
28182 28216 28233 28266 28281 28289 28305 28317 28329 28358 28390 28397 28446 28464 28482 28511
28515 28546 28567 28650 28733 28760 28822 28828 28839 28997 29112 29158 29181 29225 29342 29422
29442 29500 29580 29657 29766 29780 29788 29799 29858 29881 29922 29996 30039 30050 30115 30204
30223 30284 30310 30315 30319 30372 30440 30457 30485 30494 30522 30562 30651 30762 30764 30775
30777 30875 30887 30918 30923 30985 31035 31129 31220 31221 31361 31371 31379 31399 31444 31484
31572 31696 31712 31745 31799 31862 31874 31877 31913 31927 31970 32087 32121 32154 32167 32220
32254 32408 32473 32491 32538 32651 32735 32740 32787 32870 32887 32984 33009 33056 33150 33175
33314 33333 33504 33530 33603 33641 33674 33776 33799 33840 33876 34003 34006 34057 34128 34193
34230 34237 34360 34419 34464 34505 34561 34585 34586 34587 34588 34589 34590 34613 34629 34675
34706 34789 34798 34887 34904 34931 35000 35060 35086 35134 35226 35270 35384 35413 35520 35684
35757 35845 35921 36037 36054 36081 36190 36293 36306 36355 36405
27: 1233 2200 2321 2633 3114 3208 3558 3572 3730 3763 3809 4009 4368 6383 6468 6940 6968 7316 8411
8595 8597 8598 8599 8600 8847 8876 8950 8978 9097 9442 9663 10168 10537 10539 10780 10867 11206
11207 11208 12363 12369 12393 12397 12464 12473 12508 12974 12993 13120 13363 14220 14411 14550
14772 15006 15007 15008 15009 15010 15083 15188 15287 15399 15694 16117 16132 16259 16260 16489
16490 18642 18814 18826 18830 18862 18865 18872 18873 18878 18884 18887 18888 18889 18896 18899
18906 18907 18909 18919 19028 19363 20032 20040 20924 21109 21645 22831 23325 24755 24970 24975
25665 25666 25890 26295 26923 26949 26966 26967 26972 27108 27198 27260 27671 28152 28188 28378
28445 28767 28768 29388 29845 30766 30774 30972 30973 31400 31557 31671 31704 31710 32145 32153
32209 32210 32308 32309 32598 33760 33808 33812 34383 35064 35065 35368 35997 36353
28: 401 4474 4856 4885 5515 6148 6880 6897 7356 7360 7365 8124 8729 9065 9073 9143 9587 10054 10456
10818 10819 10820 10821 10934 10935 11543 11731 11732 11792 11905 11906 11907 11909 11911 11912
11913 11967 11968 11969 11970 11971 11972 11973 11974 11975 11976 11977 11978 11979 11980 11982
11983 11984 11987 11988 11989 11990 11991 11993 11994 12236 12259 12385 12386 12388 12465 12600
12790 13035 13315 14123 14313 14315 14317 14319 14323 14325 14326 14431 14663 14690 14834 15074
15279 15487 15488 15582 15600 15692 15743 15783 15785 15786 15789 15790 15791 16005 16493 16494
16787 16788 16789 17040 17450 17459 17543 17544 17545 17546 17547 18231 18232 18233 18234 18268
18269 18270 18271 18272 18475 18911 20157 20159 20327 20333 20339 20578 20649 20686 20688 20689
20793 20794 20795 20947 21184 21185 21186 21187 21188 21189 21830 21831 23058 23059 23060 23061
23062 23146 23332 23553 23886 24294 24387 24805 24897 25706 25707 25924 26028 26032 26034 26035
26052 26055 26084 26104 26250 26289 26526 26612 26619 26620 26621 26622 26623 26624 26625 26626
26627 26628 26629 26630 26631 26632 26633 26634 26635 26636 26637 26638 26641 26642 26643 26644
26646 26647 26648 26650 26651 26652 26985 27100 27153 27154 27155 27156 27157 27158 27159 27160
27161 27162 27163 27164 27165 27166 27168 27169 27170 27171 27172 27302 27414 27442 27443 27444
27445 27446 27821 27829 27995 28184 28253 28365 28448 28587 28588 28589 29150 29765 30218 30392
30686 30694 31166 31257 31285 31286 31287 31288 31289 31290 31409 31410 31535 31536 31537 31538
31539 31540 31541 31542 31543 31544 31545 31546 31547 31548 31549 31550 31596 31667 31718 31957
31958 32123 32955 33069 33070 33810 34116 34844 34959 35280 35544 36001 36002 36234
29: 1233 2200 2321 2633 3114 3208 3558 3572 3730 3763 3809 4009 4368 6383 6468 6940 6968 7316 8411
8595 8597 8598 8599 8600 8847 8876 8950 8978 9097 9442 9663 10168 10537 10539 10780 10867 11206
11207 11208 12363 12369 12393 12397 12464 12473 12508 12974 12993 13120 13363 14220 14411 14550
14772 15006 15007 15008 15009 15010 15083 15188 15287 15399 15694 16117 16132 16259 16260 16489
16490 18642 18814 18826 18830 18862 18865 18872 18873 18878 18884 18887 18888 18889 18896 18899
18906 18907 18909 18919 19028 19363 20032 20040 20924 21109 21645 22831 23325 24755 24970 24975
25665 25666 25890 26295 26923 26949 26966 26967 26972 27108 27198 27260 27671 28152 28188 28378
28445 28767 28768 29388 29845 30766 30774 30972 30973 31400 31557 31671 31704 31710 32145 32153
32209 32210 32308 32309 32598 33760 33808 33812 34383 35064 35065 35368 35997 36353
30: 338 339 4338 4454 4666 4714 5221 5273 5377 5383 6511 6590 6610 6885 6992 7023 7307 7335 7336
7337 7467 8108 8116 8198 8370 8376 8417 8721 8832 8960 9156 9197 9641 9666 9973 10081 10157 10288
10405 10709 10911 10956 10983 11049 11666 11926 12096 12200 12202 12684 12701 12875 12914 13044
13086 13168 13317 13533 13552 13592 13605 13609 13639 14308 14492 14566 14714 14742 14838 15091
15293 15336 15419 15552 15558 15771 16219 16237 16645 16834 16885 17211 17213 17349 17929 17985
18194 18328 18720 18721 18761 20197 20249 21268 21719 21720 21771 21955 22013 22090 22122 22152
22170 23255 23284 23311 23463 23761 24025 24834 24875 24985 25524 25639 25736 25754 25796 25859
25998 26122 26410 26520 26818 26825 27065 27425 27481 27681 27992 28099 28124 28732 29007 29023
29114 29133 29340 29445 29529 29545 29581 29625 29865 29892 29898 30026 30291 30452 30530 30950
31005 31140 31672 31791 31848 31928 32272 32990 33166 33173 33224 33226 33320 33607 33807 33834
33851 34033 34535 34591 35052 35156 35417 35594 35782 35958 35960 35968 36158 36256 36396
31: 337 339 982 1313 1510 2295 2336 2440 2631 2853 2989 3491 3834 3927 4048 4060 4127 4140 4160 4191
4241 4302 4338 4454 4666 4714 5221 5273 5377 5383 5679 5712 5811 5899 5900 5914 6447 6485 6511 6590
6610 6885 6907 6992 7023 7307 7335 7336 7337 7467 7872 7874 8108 8116 8198 8370 8376 8417 8721 8832
8960 9156 9197 9457 9641 9666 9973 10081 10157 10288 10405 10709 10911 10956 10983 11049 11666
11926 12096 12200 12202 12227 12684 12701 12875 12914 13044 13086 13168 13317 13359 13533 13552
13592 13605 13609 13639 13901 13913 14308 14492 14566 14714 14742 14838 15091 15293 15336 15419
15552 15558 15771 16173 16469 16645 16834 16885 16892 17211 17213 17349 17389 17471 17790 17866
17929 17985 18194 18328 18577 18720 18721 18761 19128 19441 20197 20249 20421 20992 21268 21409
21479 21642 21719 21720 21771 21955 22013 22090 22122 22152 22170 22654 23039 23255 23284 23311
23313 23463 23691 23761 24025 24834 24875 24985 25491 25524 25639 25736 25754 25796 25859 25998
26122 26410 26520 26818 26825 27065 27425 27436 27600 27681 27992 28099 28124 28732 29007 29023
29114 29133 29340 29445 29529 29545 29581 29625 29693 29806 29865 29892 29898 30026 30291 30452
30530 30950 31005 31140 31156 31672 31774 31791 31848 31928 32272 32990 33166 33173 33224 33226
33320 33607 33807 33834 33851 34033 34535 34591 35052 35156 35417 35594 35782 35958 35960 35968
36158 36256 36396
32: 337 338 574 725 1386 2240 2304 2609 2881 3222 4338 4454 4666 4714 5221 5273 5377 5383 5709 6463
6511 6590 6610 6885 6992 7023 7307 7335 7336 7337 7467 7922 8108 8116 8198 8370 8376 8417 8721 8832
8960 9156 9197 9641 9666 9973 10081 10157 10288 10405 10709 10911 10956 10983 11049 11666 11926
12096 12200 12202 12684 12701 12875 12914 13044 13086 13168 13317 13533 13552 13592 13605 13609
13639 14308 14492 14566 14714 14742 14838 15091 15293 15336 15419 15552 15558 15771 16645 16834
16885 17211 17213 17349 17929 17985 18194 18328 18720 18721 18761 20197 20249 21268 21644 21719
21720 21771 21955 22013 22090 22122 22152 22170 23255 23284 23311 23463 23761 24025 24834 24875
24985 25524 25639 25736 25754 25796 25859 25998 26122 26410 26520 26818 26825 27065 27425 27681
27992 28099 28124 28732 29007 29023 29114 29133 29340 29445 29529 29545 29581 29625 29865 29892
29898 30026 30291 30452 30530 30950 31005 31140 31672 31791 31848 31928 32272 32990 33166 33173
33224 33226 33320 33607 33807 33834 33851 34033 34535 34591 35052 35156 35417 35594 35782 35958
35960 35968 36158 36256 36396
33: 784 964 973 974 1033 1256 1300 1330 1332 1697 1719 1723 1785 1914 2057 2205 2207 2394 2436 2539
2558 2663 2679 2838 2858 2887 2960 3130 3420 3508 3636 3790 3818 3864 3990 3991 4033 4126 4187 4190
4245 4272 4333 4342 4407 4409 4468 4469 4519 4586 4593 4599 4619 4681 4688 4722 4723 4770 4789 4999
5037 5056 5075 5090 5121 5135 5176 5254 5260 5291 5319 5336 5352 5396 5415 5495 5557 5597 5602 5641
5645 5648 5650 5678 5747 5790 5828 5932 5963 5970 5986 5997 6099 6110 6114 6182 6227 6228 6229 6241
6254 6268 6269 6307 6331 6548 6549 6556 6572 6604 6651 6700 6741 6751 6752 6777 6788 6798 6810 6813
6884 6926 6933 7024 7073 7132 7155 7198 7241 7275 7338 7344 7345 7346 7347 7482 7580 7625 7653 7683
7719 7794 7795 7796 7797 7859 7871 7956 7976 8117 8119 8168 8172 8187 8243 8262 8287 8330 8410 8494
8525 8591 8629 8651 8685 8738 8772 8788 8915 8916 8941 8989 9015 9172 9184 9244 9276 9297 9305 9342
9410 9509 9511 9547 9554 9561 9649 9650 9680 9685 9734 9810 9845 9895 9899 9900 9978 10055 10097
10099 10121 10122 10123 10134 10136 10172 10177 10276 10289 10292 10311 10337 10372 10386 10409
10459 10513 10551 10588 10636 10645 10651 10655 10704 10715 10792 10908 10942 10960 10998 11020
11037 11045 11086 11087 11089 11162 11172 11187 11188 11220 11227 11387 11401 11448 11535 11586
11669 11672 11702 11754 11757 11758 11786 11807 11808 11877 11888 11897 11899 11902 11944 12088
12099 12107 12115 12132 12142 12167 12174 12182 12194 12256 12295 12302 12506 12523 12540 12575
12605 12669 12708 12745 12800 12812 12832 12858 12869 12872 12906 12911 12932 12933 12941 12942
12943 12983 12989 12991 12992 12993 12994 12995 12999 13024 13032 13064 13089 13090 13179 13213
13253 13460 13464 13472 13505 13510 13522 13523 13538 13573 13591 13601 13613 13633 13651 13654
13688 13773 13793 13794 13795 13820 13854 13999 14000 14002 14024 14121 14245 14273 14284 14399
14400 14419 14511 14513 14520 14521 14522 14528 14553 14554 14555 14556 14557 14616 14757 14762
14769 14773 14785 14818 14835 14866 14877 14910 14912 14944 14999 15000 15003 15034 15225 15238
15251 15305 15320 15343 15348 15373 15439 15440 15441 15442 15443 15444 15445 15446 15447 15448
15449 15450 15451 15452 15453 15454 15455 15456 15457 15458 15459 15460 15461 15462 15463 15464
15465 15466 15467 15495 15496 15531 15662 15683 15706 15718 15734 15766 15885 15899 15956 15957
16027 16030 16089 16128 16191 16245 16296 16298 16302 16306 16314 16331 16348 16357 16367 16388
16406 16439 16472 16521 16558 16569 16588 16632 16681 16715 16843 17075 17084 17114 17149 17154
17161 17200 17221 17334 17335 17356 17405 17458 17486 17531 17552 17553 17703 17738 17904 17918
17943 17961 17999 18002 18092 18096 18100 18122 18203 18238 18247 18308 18345 18355 18379 18389
18396 18443 18444 18537 18596 18714 18724 18771 19079 19117 19262 19263 19391 19418 19504 19505
19506 19507 19508 19509 19510 19511 19598 19608 19672 19697 19719 19864 19903 19948 20113 20185
20212 20270 20309 20316 20317 20319 20387 20557 20592 20610 20676 20719 20771 20887 20896 20913
20960 21021 21047 21049 21050 21066 21068 21088 21098 21126 21151 21153 21166 21169 21203 21204
21205 21206 21207 21220 21270 21272 21296 21298 21333 21410 21609 21687 21712 21733 21764 21812
21864 21886 21968 22040 22076 22084 22095 22120 22147 22162 22204 22210 22232 22273 22276 22344
22369 22371 22391 22415 22422 22464 22468 22479 22490 22499 22522 22590 22637 22638 22752 22835
23070 23072 23151 23187 23194 23200 23229 23233 23288 23322 23367 23375 23423 23582 23584 23650
23685 23700 23822 23862 23872 23905 23921 23935 23992 24052 24053 24054 24055 24070 24094 24116
24131 24330 24347 24381 24440 24455 24463 24466 24509 24532 24602 24607 24617 24625 24720 24777
24798 24821 24841 24917 24968 24977 24979 25016 25047 25144 25183 25205 25207 25269 25273 25335
25369 25414 25458 25493 25542 25553 25581 25701 25702 25703 25724 25738 25742 25798 25911 25914
25915 25930 25953 26008 26114 26188 26214 26228 26244 26276 26287 26315 26351 26438 26486 26505
26517 26518 26551 26573 26609 26614 26689 26828 26853 26863 26871 26920 26931 26960 26969 26979
26986 26995 27058 27064 27112 27130 27207 27229 27297 27304 27314 27332 27335 27351 27492 27511
27528 27561 27562 27579 27580 27581 27582 27583 27584 27585 27651 27652 27674 27693 27700 27745
27760 27763 27771 27801 27812 27824 27837 27887 27899 27906 27935 27948 28062 28085 28117 28120
28121 28126 28140 28153 28195 28205 28225 28251 28262 28302 28327 28364 28416 28420 28492 28540
28611 28643 28652 28697 28707 28710 28715 28737 28780 28800 28891 28923 28925 28931 28937 28995
29008 29025 29090 29123 29189 29231 29241 29321 29338 29363 29426 29480 29491 29502 29551 29584
29628 29703 29707 29746 29787 29803 29831 29856 29857 29869 29875 29904 29926 29962 30029 30071
30088 30095 30105 30110 30111 30197 30240 30245 30273 30356 30364 30414 30437 30566 30652 30653
30706 30847 30880 31045 31075 31076 31077 31119 31120 31348 31354 31367 31384 31387 31419 31434
31435 31483 31555 31556 31588 31729 31731 31767 31782 31785 31820 31931 31961 31990 32012 32025
32054 32128 32183 32249 32260 32262 32335 32437 32456 32496 32558 32573 32608 32668 32682 32717
32736 32742 32750 32792 32891 32923 32924 32931 32991 33008 33114 33140 33151 33289 33310 33322
33373 33444 33487 33498 33523 33573 33620 33642 33645 33670 33680 33703 33770 33824 33868 33878
33975 33976 33977 33978 33979 33980 33981 33982 33983 33984 33985 33986 33987 33988 34042 34043
34053 34056 34090 34160 34167 34210 34245 34355 34393 34412 34478 34484 34493 34537 34549 34624
34652 34664 34690 34720 34724 34782 34802 34818 34846 34873 34952 34982 35011 35018 35034 35102
35163 35212 35235 35430 35463 35555 35568 35592 35622 35659 35710 35717 35724 35788 35819 35826
35831 35860 35863 35869 35944 35947 36036 36101 36112 36114 36191 36214 36277 36348 36363 36371
36372 36373 36374 36394 36402
34: 342 4708 5034 5156 5419 6539 7341 8635 8858 8859 10313 13433 14254 15794 17033 18390 20776
20777 21807 21842 21931 23134 23344 23928 24395 24459 24619 26867 27670 27820 27901 28928 31152
31266 31452 31492 31525 31600 32062 32359 33157 35838
35: 341 4711 4713 5034 5156 5249 6539 7341 8635 8858 8859 10087 10313 12712 13433 14254 15550 15794
17033 18390 20776 20777 21842 22114 23134 23344 23928 24395 26057 27186 27670 27777 27778 27820
28331 29096 29476 31152 31153 31266 31492 31525 32359 33157 35838
36: 1144 1860 1896 1915 1997 2391 2438 2523 2752 2870 3495 3723 4159 4299 4607 4652 4833 4869 4922
4938 4951 4987 4998 5125 5246 5298 5449 5539 5588 5620 5687 5734 5962 5985 6043 6088 6135 6368 6691
6698 6794 6844 7058 7097 7145 7175 7202 7226 7709 7738 8127 8133 8178 8260 8344 8380 8381 8535 8615
8673 8691 8752 8929 9238 9266 9536 9585 9613 9673 9674 9675 9822 9882 9897 10102 10242 10429 10458
10479 10598 10615 10635 10752 10810 11039 11714 11723 11826 11884 12000 12009 12053 12068 12226
12229 12424 12529 12734 12772 13110 13458 13482 13513 14043 14061 14270 14497 14508 14693 14731
14841 14942 14952 15035 15046 15123 15170 15239 15242 15340 15391 15409 15571 15911 16108 16129
16301 16361 16378 16379 16382 16454 16545 16565 16598 16773 17082 17107 17108 17143 17158 17404
17710 17740 17766 17806 17925 17969 18144 18145 18220 18462 18584 18716 18844 19308 19631 19816
20221 20227 20303 20478 20479 20480 20481 20482 20483 20484 20485 20486 20487 20488 20489 20490
20491 20492 20493 20494 20495 20496 20497 20498 20499 20500 20501 20502 20503 20504 20505 20506
20507 20508 20509 20510 20511 20512 20513 20514 20515 20516 20517 20518 20519 20520 20521 20522
20523 20524 20525 20526 20600 20705 20735 20949 20950 21010 21020 21130 21495 21843 21903 22151
22194 22212 22302 22317 22438 22503 22706 23026 23073 23193 23211 23394 23426 23518 23560 23956
23974 24340 24447 24609 24767 24768 24783 24872 24877 25182 25197 25262 25385 25424 25535 25592
25656 25657 25717 25876 26239 26251 26362 26374 26521 26560 26564 26855 26940 26941 26942 26963
27343 27416 27431 27432 27433 27702 27933 28004 28008 28059 28590 28935 29026 29234 29244 29253
29309 29322 29407 29462 29729 29733 29822 30044 30193 30260 30290 30656 30837 31223 31225 31500
31523 31665 31796 32015 32027 32081 32186 32369 32372 32451 32509 32547 32609 32703 32755 32770
32778 32992 33012 33088 33111 33123 33170 33232 33233 33234 33235 33472 33494 33548 33598 33610
33881 34039 34081 34179 34186 34292 34342 34408 34472 34569 34570 34597 34657 34727 34756 34875
34974 35007 35074 35197 35253 35444 35507 35723 35772 35805 35810 35853 35945 36020 36125 36223
36233 36269 36400 36431
37: 311 385
38: 732 1187 1222 2716 2766 3147 4169 4515 4582 4614 4758 4785 4793 4867 5081 5087 5088 5100 5208
5271 5310 5374 5386 5418 5458 5464 5514 5548 5601 5608 5984 6024 6069 6379 6510 6587 6616 6677 6688
6757 6763 6768 6867 7014 7168 7212 7213 7223 7240 7260 7287 7438 7633 7662 7687 7727 8160 8211 8223
8296 8496 8511 8532 8547 8694 8727 9059 9203 9237 9259 9519 9693 9749 9763 9796 9832 9854 9859 9877
9954 10001 10003 10095 10302 10307 10308 10571 10614 10679 10798 10815 11458 11562 11713 11745
11782 11818 11903 11952 12044 12337 12432 12581 12658 12894 12919 13045 13112 13128 13357 13450
13549 14187 14266 14287 14385 14474 14567 14602 14623 14624 14626 14768 14848 14879 14923 14928
14948 15222 15246 15255 15365 15479 15518 15907 15908 16024 16086 16093 16182 16236 16389 16535
16554 16560 16858 17054 17058 17066 17070 17216 17381 17589 17946 18086 18183 18366 18739 18851
19130 19424 20228 20296 20433 20722 20774 20780 20932 20969 21009 21016 21019 21111 21133 21144
21254 21279 21280 21388 21695 21757 21883 21993 22006 22050 22057 22061 22067 22129 22200 22226
22227 22298 22312 22328 22331 22334 22395 22433 22459 22524 22540 23020 23142 23165 23169 23181
23254 23386 23484 23517 23570 23638 23946 24035 24355 24361 24363 24574 24578 24793 24799 24851
24999 25023 25344 25365 25403 25528 25556 25598 25619 25682 25730 25769 25824 25833 25946 25950
26221 26235 26247 26266 26333 26406 26577 26822 26826 26990 27092 27259 27322 27372 27680 27744
27886 27905 27973 28318 28490 28495 28615 28628 28713 28724 28804 28982 29161 29178 29230 29239
29257 29425 29494 29497 29608 29811 29888 29925 30011 30014 30019 30053 30056 30069 30085 30215
30236 30445 30620 30640 31013 31039 31124 31154 31232 31513 31780 31849 31918 32036 32060 32065
32107 32187 32237 32261 32263 32288 32300 32343 32348 32360 32461 32481 32493 32505 32535 32647
32658 32666 32667 32784 32884 32939 32975 32983 33132 33155 33160 33164 33198 33483 33489 33499
33533 33779 34070 34089 34158 34162 34187 34255 34314 34337 34382 34397 34405 34446 34483 34490
34532 34553 34628 34672 34696 34728 34747 34779 34969 34997 35198 35205 35217 35275 35517 35636
35706 35735 35768 35769 35861 35880 35897 35963 36088 36122 36123
39: 426 946
40: 761 821 978 1165 2748 2749 2816 3174 3561 3822 4144 4247 7326 8364 8365 8366 8861 8862 9122 9733
11408 13752 13758 13862 13953 13963 14127 16775 17809 17859 18634 18748 18785 18799 19284 19401
20045 20444 21091 21631 21827 22579 23219 23713 24157 24158 25649 25909 27451 28836 32951 34582
34857
41: 309 411 898 905 915 1533 1595 1792 2768 3382 3404 3669 4434 5153 5688 6982 7146 7374 7885 9364
10152 10153 11279 15067 16455 16779 16780 16781 16782 16783 18532 19184 19230 19766 20402 21437
22781 24696 25892 26049 27990 33033 34259 35288 35289 36420
42: 309 348 410 411 412 630 898 905 915 1533 1595 1792 2768 3382 3404 3669 4434 5153 5688 6982 7146
7374 7885 9364 10152 10153 11279 15067 16455 16779 16780 16781 16782 16783 18532 19184 19230
19766 20402 21437 22781 24696 25892 26049 27990 33033 34259 35288 35289 36420
43: 762 1070 1190 1272 1505 1924 2220 4883 5276 5689 6016 6047 6906 6947 6976 9448 10058 10194
11275 13784 13851 14391 14392 15431 15638 15639 15640 15641 15642 15643 15644 15645 15646 15647
15648 15685 15686 16312 17056 17771 18566 19255 19343 19527 19971 20097 21418 22878 24160 24742
25052 25867 26091 26288 26489 26595 27761 28272 28299 28387 30624 30753 31744 31903 32119 32941
33063 33064 34566 36008 36422
44: 1671 2465 3294 5450 5774 6626 7964 8053 10369 10714 11634 12842 12915 13048 13556 13626 13764
13780 13897 15202 15975 19324 19790 21532 22559 23091 23262 23566 24522 24842 25250 25589 26597
28971 29367 29373 29612 29882 31853 32615 32701 35206 35411
45: 977 1038 1039 1148 1382 1602 1639 1690 1709 1732 1793 1844 1856 1946 2035 2047 2144 2145 2151
2152 2199 2209 2261 2280 2283 2300 2316 2318 2341 2361 2364 2383 2389 2405 2435 2469 2530 2602 2648
2659 2664 2670 2705 2731 2735 2776 2780 2786 2933 2986 3020 3024 3025 3057 3103 3132 3150 3157 3179
3181 3201 3280 3309 3313 3341 3485 3511 3519 3529 3571 3673 3804 3805 3833 3932 3992 3993 4032 4096
4221 4483 5285 5286 5287 5290 5685 5716 5717 5718 5719 5751 5805 5806 5823 5824 5825 5826 5855 5864
6405 6410 6424 6437 6483 6646 7882 7896 7902 7924 7925 7926 7988 7989 7999 8000 8059 8389 8390 8391
8912 9441 9724 9898 10159 10236 10268 11263 11398 11399 11407 11901 12024 12025 12997 13104 13776
14238 14994 14995 14996 15077 15298 15299 15493 15505 15520 15737 15738 15739 15740 15741 16001
16045 16168 16187 16190 16457 16507 16614 16701 17136 17482 17762 17820 17844 17880 17881 17882
18171 18172 18523 18560 18608 18615 18653 18782 18926 18927 18932 19118 19162 19183 19192 19317
19318 19332 19333 19347 19348 19421 19422 19423 19463 19497 19596 19785 19786 19861 19862 19906
19907 19908 19974 19975 19990 20079 20080 20081 20082 20346 20351 20447 21331 21357 21378 21381
21382 21383 21384 21401 21413 21414 21432 21455 21456 21457 21480 21506 21507 21508 21557 21564
21582 21654 21655 21656 21710 21911 21941 21943 22474 22561 22562 22563 22564 22696 22718 22729
22740 22743 22744 22745 22746 22747 22846 22847 22937 22941 22975 22989 22997 22999 23000 23009
23037 23607 23711 23712 23866 23867 23868 24159 24854 25103 25104 25456 25457 25472 25885 25886
25887 26184 26185 26411 27456 27757 27758 28002 28136 28137 28834 28835 29153 29433 29674 29690
29751 29752 29753 29754 29755 29756 30400 30534 30535 30536 30583 30839 31064 31065 31066 31142
31178 31277 31411 31436 31578 31579 31580 31581 31871 32593 32594 32913 32914 32915 33034 34921
35302 35535 36228 36239 36421
46: 977 1038 1039 1148 1382 1602 1639 1690 1709 1732 1793 1844 1856 1946 2035 2047 2144 2145 2151
2152 2199 2209 2261 2280 2283 2300 2316 2318 2341 2361 2364 2383 2389 2405 2435 2469 2530 2602 2648
2659 2664 2670 2705 2731 2735 2776 2780 2786 2933 2986 3020 3024 3025 3057 3103 3132 3150 3157 3179
3181 3201 3280 3309 3313 3341 3485 3511 3519 3529 3571 3673 3804 3805 3833 3932 3992 3993 4032 4096
4221 4483 5285 5286 5287 5290 5685 5716 5717 5718 5719 5751 5805 5806 5823 5824 5825 5826 5855 5864
6405 6410 6424 6437 6483 6646 7882 7896 7902 7924 7925 7926 7988 7989 7999 8000 8059 8389 8390 8391
8912 9441 9724 9898 10159 10236 10268 11263 11398 11399 11407 11901 12024 12025 12997 13104 13776
14238 14994 14995 14996 15077 15298 15299 15493 15505 15520 15737 15738 15739 15740 15741 16001
16045 16168 16187 16190 16457 16507 16614 16701 17136 17482 17762 17820 17844 17880 17881 17882
18171 18172 18523 18560 18608 18615 18653 18782 18926 18927 18932 19118 19162 19183 19192 19317
19318 19332 19333 19347 19348 19421 19422 19423 19463 19497 19596 19785 19786 19861 19862 19906
19907 19908 19974 19975 19990 20079 20080 20081 20082 20346 20351 20447 21331 21357 21378 21381
21382 21383 21384 21401 21413 21414 21432 21455 21456 21457 21480 21506 21507 21508 21557 21564
21582 21654 21655 21656 21710 21911 21941 21943 22474 22561 22562 22563 22564 22696 22718 22729
22740 22743 22744 22745 22746 22747 22846 22847 22937 22941 22975 22989 22997 22999 23000 23009
23037 23607 23711 23712 23866 23867 23868 24159 24854 25103 25104 25456 25457 25472 25885 25886
25887 26184 26185 26411 27456 27757 27758 28002 28136 28137 28834 28835 29153 29433 29674 29690
29751 29752 29753 29754 29755 29756 30400 30534 30535 30536 30583 30839 31064 31065 31066 31142
31178 31277 31411 31436 31578 31579 31580 31581 31871 32593 32594 32913 32914 32915 33034 34921
35302 35535 36228 36239 36421
47: 847 874 1056 1405 1721 1857 1873 1977 1978 2077 2496 2730 3014 3244 3458 4438 4499 4520 4879
5815 6048 6366 7764 7765 7766 7767 7768 7769 7770 8572 9077 9113 9419 9452 10167 10218 11251 11252
11346 11347 12429 12960 14034 14174 14176 14237 15631 15985 17874 18646 18704 18819 19090 19256
19527 19897 19898 20574 21541 22772 23157 23568 24160 25478 25686 26275 26282 26309 26435 26501
26989 27104 27754 28138 28190 28258 28454 30401 30743 31060 31224 31342 31935 32095 32471 34066
34595 34820
48: 1195 1211 1244 1485 1528 1574 1684 2268 2574 2963 2975 3097 3127 3468 5113 5694 6534 8877 9135
9190 11352 13667 16174 16496 17477 17600 17776 18568 18696 19114 19190 20373 21425 31775 35992
35993 35994 35995 35996 36227
49: 782 1561 1934 1936 2192 2257 2271 2393 2446 2700 2953 3957 3959 4405 5080 5110 5703 5856 5866
5977 6006 6019 6465 6923 6994 7054 7506 8794 9466 10141 10216 10662 10804 11365 11500 12525 12736
13025 13251 13804 13805 13919 14038 14244 14410 14611 14763 14797 14840 15234 15304 15314 15363
15695 16189 16456 16719 17077 17083 17435 17468 17739 17744 17747 18012 18337 18432 18781 18841
19408 19587 19706 19754 19916 20338 20471 20587 20872 21120 21145 21161 21353 22239 22348 22498
22852 23191 23304 23335 24339 24344 24427 24437 24590 24598 25501 26187 26298 26836 26844 27018
27270 27415 27731 27750 27835 27916 27928 27997 28162 28237 28295 28389 28467 28944 28952 28959
29493 29530 30244 30718 31391 31440 31532 31683 31899 32009 32029 32090 32510 32933 33014 33073
33110 33277 33437 33440 34596 35990 36128 36197
50: 1046 1074 1712 2251 4422 5157 5665 5666 5667 6545 7675 7784 8018 10526 13837 14070 14097 14116
19294 19832 22811 30631 31410 33883 33884 33885 33936
51: 621 958 1220 1646 2101 2241 3051 4562 4826 4843 5267 5304 5444 5504 5544 5583 5915 6077 6165
6247 6292 6494 6634 6653 6656 6989 7095 7276 7417 7497 7498 7499 7666 7733 8088 8247 8320 8541 8762
8807 9209 9224 9527 9546 9804 9833 9881 9907 10079 10401 10473 10641 10735 10892 10932 10955 11009
11085 11113 11140 11238 11466 11661 11867 11918 12020 12048 12061 12153 12329 12367 12400 12557
12721 12819 12890 12902 12904 13586 13682 13757 13962 14540 14696 14816 14839 14961 15018 15150
15387 15754 15857 16044 16208 16240 16676 16728 16802 17167 17230 17399 17490 17725 17934 18113
18182 18369 18416 18489 18506 18699 18894 19376 19610 19718 20132 20137 20464 20632 20808 20831
20882 21034 21286 21629 21707 21837 22134 22189 22218 22365 22454 22476 22516 22711 23110 23318
23510 23629 23749 23836 23930 24111 24129 24406 24489 24565 24867 25031 25042 25106 25142 25480
25496 25710 26117 26195 26373 26696 26705 26748 26767 26888 27363 27502 27661 27850 27874 28057
28647 28693 28711 28788 28875 29173 29275 29758 29864 29895 29961 30033 30184 30363 30396 30477
30637 30804 30855 30896 30910 30930 30976 31053 31202 31478 31794 32059 32311 32468 32542 32709
32727 32881 32953 32979 33036 33212 33299 33452 33538 33608 33649 33671 33786 33858 34014 34065
34215 34283 34346 34409 34477 34662 34705 34886 34941 34981 35094 35114 35214 35379 35451 35618
35781 35900 35915 36058 36132 36217 36388
52: 634 644 1346 1724 1911 1912 2420 2421 2929 2974 3107 3346 4395 5829 13866 13908 14076 17883
18654 18971 20099 21581 21936 22871 34584 34852
53: 620 645 689 765 780 897 969 1145 1486 1500 1745 1877 2369 2846 3375 9356 9431 11305 11423 17897
18663 19013 19102 19193 19206 19207 19208 19368 19409 19585 19810 20066 21039 21040 21041 21042
21934 22575 22796 24722 25100 26488 28472 31422
54: 1198 2135 2339 2826 4820 5022 5314 5552 5614 5615 5616 5953 6032 6163 6226 6282 6373 6542 6914
6956 7194 7292 7370 7376 7624 7856 7954 8193 8427 8428 8502 8556 8837 9115 9715 10128 10129 10200
10474 10749 11043 11062 11093 11175 11341 11342 11614 12120 12284 12681 12737 13702 13735 13744
13850 13952 14077 14102 14178 14369 14389 14448 14449 14833 15227 15504 15636 15693 15704 15770
16095 16297 16463 16492 17160 17220 17425 17706 18295 18487 18751 18987 19137 19429 19748 19889
19890 19891 20199 20239 20474 20631 20680 20827 20935 21343 21862 21891 21893 22072 22475 22755
23106 24123 24781 25054 25585 25622 25800 26269 26305 26810 26914 26973 27012 27200 27201 27218
27230 27373 27720 27784 27809 28146 28171 28176 28223 28243 28244 28322 28353 28357 28381 28388
28398 28441 28456 28458 28534 28535 28563 28957 29692 29697 29810 30048 30186 30520 30691 30704
30782 30882 31164 31368 31396 31413 31449 31674 31676 31690 31756 31878 31880 31936 31943 32222
32290 32306 32397 32414 32868 33057 33199 35531 35727 35910 36258
55: 634 644 1346 1724 1911 1912 2420 2421 2929 2974 3107 3346 4395 5829 13866 13908 14076 17883
18654 18971 20099 21581 21936 22871 34584 34852
56: 746 849 856 1030 1031 1266 1367 1461 1523 1992 2086 2247 2299 2505 2594 2665 2709 4295 5796 5797
6945 6963 8579 8592 9069 9082 9087 9098 9102 9108 9111 9114 10189 10208 10273 11402 11404 11415
13918 14364 14374 14375 14412 14443 14452 15109 15665 15715 16321 16327 16339 16458 16887 17855
18014 19048 19051 19267 19789 19841 20041 21054 21648 22658 22708 22830 24719 26272 26290 26977
26978 26987 27030 27232 27233 27234 27258 27262 27269 27290 27296 27305 28247 28249 28250 28311
28321 28341 28380 28382 28391 28393 28394 28405 28407 28409 28411 28437 28439 28452 28453 28457
28459 28465 28569 28570 30702 30712 30741 30751 30755 31319 31374 31416 31651 31743 31750 31760
31763 31766 31875 31908 31910 31939 31940 31942 31944 31966 32112 32129 32134 32137 32151 33815
34643 34644 34645 34646 34647 35295
57: 961 1158 1364 1424 1746 1881 1987 2020 2091 2174 2175 2176 2236 2249 2293 2362 2366 3203 3206
4038 4044 5691 6474 7771 7888 9391 9422 11353 13664 15269 16171 17849 18625 19080 19297 19321
19335 19390 19455 19972 20090 20127 21420 21626 22555 22699 22964 22981 30623 34743
58: 2444 3083 3094 3096 3696 4203 5817 6866 7994 18922 21080 21613 29761
59: 367 1159 1294 1840 2015 2099 2313 2488 2542 2579 2707 2715 2763 2823 2925 2940 2964 3170 3229
3507 3771 3808 4069 4104 4271 4366 4388 5753 6038 6359 7947 8820 8910 10105 10114 11000 11135
11371 11372 12419 12679 14093 14526 15270 16172 16203 16213 16277 16648 16721 17137 18163 18239
18427 18633 18859 19329 19330 19334 19980 19981 20268 20411 21352 21647 22700 22701 22901 23008
23789 24099 25562 26591 26753 27806 28522 28644 28819 29193 30312 31136 33298 33928 35669 36265
60: 366 1159 1294 1840 2763 3229 3771 4104 6038 6359 8820 8910 10105 10114 11000 11135 12419 12679
14093 14526 15270 16203 16213 16277 16648 16721 18163 18427 18859 19330 19981 20268 21647 22701
23008 23789 24099 25562 26753 27806 28522 28644 28819 29193 30312 31136 33298 33928 35669 36265
61: 4462 4615 4689 4923 5023 5058 5061 5204 5206 5261 5264 5312 5331 5380 5532 5619 5622 5631 5633
5634 6054 6080 6171 6664 6748 7087 7161 7214 7229 7444 7459 8184 8518 8621 8687 8843 9160 9332 9333
9334 9335 9336 9337 9799 9871 9883 9955 9985 10359 10404 10418 10567 10684 10695 10706 10777 10891
11193 11201 11493 11511 11541 11601 11611 11632 12123 12127 12283 12285 12336 12608 12616 12621
12659 12807 12877 12895 12929 13053 13141 13589 13645 14485 14575 14753 14807 14997 15076 15114
15482 16087 16350 16354 16561 17071 17122 17138 18001 18019 18181 18201 18313 18333 18672 18673
18753 20198 20584 20702 20856 20886 20902 21119 21281 21884 21929 21999 22036 22105 22111 22167
22260 22327 22485 23051 23071 23082 23139 23190 23239 23260 23383 23429 23495 23498 23575 23637
23773 24051 24354 24379 24397 24439 24444 24471 24474 24530 24600 24605 24630 24632 24815 24888
24964 24987 24989 25171 25242 25293 25681 25832 25836 25947 26335 26388 26846 26851 26872 26874
27060 27061 27077 27175 27272 27320 27396 27474 27488 27722 27732 27733 27738 27800 27841 27898
27908 27909 27926 27972 28035 28067 28075 28125 28598 28749 28810 28864 28897 28898 28920 28938
28943 28983 29004 29093 29094 29201 29238 29291 29478 29619 29638 29666 29719 29981 29992 30328
30342 30467 30619 31023 31788 31857 32192 32255 32616 33021 33423 33430 33490 33565 33606 33627
33660 34118 34176 34233 34241 34511 34542 34611 34814 34829 34831 34990 35026 35039 35159 35172
35492 35561 35598 35692 35702 35719 35804 35812 35859 36201 36247
62: 739 1054 1563 1824 2541 2576 2581 2661 3077 3516 4195 4414 4437 4557 4561 4585 4637 4659 4753
4795 4874 4908 4928 4930 4960 4968 5089 5140 5203 5253 5275 5278 5293 5294 5351 5395 5440 5518 5572
5621 5624 5941 6012 6084 6097 6138 6253 6255 6316 6324 6613 6627 6628 6683 6791 6802 6894 6895 6952
7003 7009 7065 7126 7191 7199 7228 7256 7257 7433 7477 7615 7618 7628 7648 7657 7705 7715 7725 8097
8103 8125 8132 8163 8218 8273 8282 8291 8313 8324 8375 8376 8377 8378 8533 8573 8614 8630 8683 8713
8714 8715 8716 8717 8724 8777 8905 8906 8928 8938 8940 9021 9047 9217 9264 9283 9350 9514 9533 9582
9604 9757 9803 9827 9828 9861 9876 9901 9933 9968 10073 10075 10078 10082 10118 10131 10310 10327
10389 10435 10507 10601 10629 10690 10728 10729 10757 10760 10814 10835 10864 10865 10897 10923
10928 10962 11014 11021 11080 11098 11112 11114 11158 11246 11331 11443 11453 11520 11560 11561
11584 11653 11683 11755 11785 11793 11830 11924 11949 12042 12043 12074 12084 12145 12150 12177
12215 12224 12254 12274 12327 12333 12534 12570 12578 12631 12636 12744 12829 13071 13105 13152
13185 13320 13441 13459 13577 13636 13754 13761 13801 13831 13955 13956 13970 14005 14017 14172
14191 14196 14260 14285 14305 14401 14476 14479 14537 14549 14578 14610 14697 14711 14713 14717
14718 14723 14751 14752 14753 14754 14755 14756 14757 14758 14759 14760 14813 14814 14849 14858
14861 14930 14970 15039 15135 15143 15158 15224 15331 15356 15390 15668 15809 15888 15986 16010
16050 16083 16088 16138 16195 16269 16343 16362 16377 16380 16556 16580 16584 16620 16646 16683
16687 16713 16741 16753 16763 16807 17018 17039 17074 17104 17144 17333 17342 17383 17420 17423
17457 17569 17595 17733 17734 17905 17913 17941 17951 17952 17970 17971 18025 18026 18087 18132
18155 18302 18310 18371 18373 18378 18411 18465 18505 18507 18691 18698 18712 18760 18780 18820
18838 19151 19616 19694 19745 19747 20050 20146 20162 20204 20209 20216 20232 20252 20254 20281
20299 20306 20390 20603 20727 20765 20800 20813 20880 20885 20939 20945 20979 21118 21152 21276
21290 21732 21774 21777 21819 21820 21821 21859 21861 21879 21885 21956 21972 22010 22055 22100
22109 22119 22132 22133 22154 22160 22174 22261 22287 22291 22311 22412 22440 22444 22489 22521
22858 23111 23145 23186 23355 23395 23417 23454 23521 23556 23627 23633 23705 23775 23781 23843
23847 23875 23903 23926 23941 23961 23995 24122 24143 24305 24307 24348 24353 24388 24410 24486
24487 24493 24527 24550 24644 24645 24650 24728 24735 24782 24811 24837 24898 24906 24913 24949
24991 25011 25019 25119 25162 25224 25328 25339 25357 25381 25409 25419 25502 25605 25620 25621
25751 25765 25791 25793 25809 25843 25952 26016 26219 26259 26304 26354 26364 26369 26404 26405
26574 26686 26687 26713 26716 26725 26733 26752 26885 26886 26930 26933 26970 27301 27337 27404
27460 27464 27497 27552 27555 27563 27619 27629 27653 27655 27703 27704 27842 27859 27883 27922
27940 27965 27970 28028 28103 28109 28133 28160 28242 28360 28379 28408 28477 28487 28513 28514
28543 28545 28572 28641 28686 28687 28734 28746 28794 28811 28872 28873 28878 28908 28910 28911
28940 29002 29127 29202 29259 29305 29314 29364 29370 29394 29395 29399 29492 29556 29589 29632
29771 29781 29816 29914 29915 29958 29959 29967 29999 30020 30086 30087 30106 30107 30123 30231
30276 30287 30345 30346 30367 30416 30443 30453 30474 30475 30525 30572 30617 30658 30659 30744
30790 30799 30836 30841 30885 30886 30907 30908 30922 30926 30927 30934 30982 31038 31206 31212
31426 31460 31472 31489 31506 31705 31800 31811 31815 31850 31895 32033 32050 32148 32194 32207
32247 32284 32344 32354 32434 32438 32439 32495 32532 32553 32566 32671 32724 32725 32756 32768
32774 32785 32886 32949 32950 32960 32971 33007 33010 33015 33037 33053 33060 33129 33147 33190
33191 33305 33428 33436 33485 33527 33543 33567 33569 33653 33765 33774 33860 33861 34011 34032
34061 34084 34202 34221 34277 34344 34421 34474 34518 34552 34559 34617 34625 34638 34660 34669
34732 34733 34761 34783 34811 34824 34882 34884 34888 34898 34902 34916 34935 34962 34991 35012
35032 35040 35085 35125 35234 35267 35394 35441 35498 35579 35614 35642 35650 35668 35677 35714
35718 35762 35763 35800 35801 35882 35939 36022 36065 36066 36104 36156 36210 36249 36252 36268
36390
63: 680 700 1755 1849 2137 2269 3141 3178 3251 3332 3401 4244 4267 4537 4596 4602 4638 4735 4794
4850 5099 5136 5195 5281 5299 5356 5399 5433 5442 5487 5492 5501 5505 5508 5517 5567 5653 6015 6082
6137 6215 6242 6308 6380 6388 6489 6569 6652 6655 6759 6771 6815 7064 7179 7443 7617 7646 7678 7713
8175 8231 8270 8281 8331 8360 8725 8739 8796 8845 8996 9001 9006 9019 9149 9155 9163 9177 9205 9225
9265 9270 9284 9450 9531 9583 9589 9592 9605 9736 9784 9800 9815 9852 9904 10247 10321 10373 10434
10485 10506 10531 10560 10710 10745 10800 10884 10900 10903 10933 10953 11005 11008 11042 11060
11095 11107 11184 11441 11452 11530 11598 11638 11706 11735 11736 11743 11796 11841 11860 11937
12011 12093 12144 12183 12197 12198 12289 12314 12533 12568 12640 12656 12695 12743 12845 13111
13180 13560 13623 13830 13872 14033 14079 14280 14496 14539 14543 14625 14672 14677 14724 14820
14822 14857 15038 15053 15054 15058 15165 15175 15231 15375 15497 15525 15535 15539 15918 15974
16018 16094 16215 16216 16264 16364 16395 16415 16621 16627 16641 16675 16686 16761 17037 17120
17147 17195 17256 17488 17732 17901 17973 17995 18110 18187 18296 18357 18417 18420 18431 18466
18477 18498 18729 18774 19160 19473 19617 19673 19692 19735 20105 20244 20451 20595 20604 20749
20801 20812 20891 20968 20993 21003 21007 21015 21114 21259 21292 21688 21765 21890 21982 22019
22033 22042 22123 22188 22217 22294 22400 22455 22457 22536 22762 22945 23121 23140 23264 23323
23543 23557 23599 23615 23727 23767 23770 23834 23874 23904 24059 24103 24146 24162 24311 24391
24405 24441 24456 24497 24568 24603 24653 24679 24770 24911 24955 25009 25115 25194 25227 25327
25374 25395 25560 25641 25714 25781 25956 26189 26220 26555 26690 26720 26758 26848 26864 26893
27070 27325 27364 27461 27505 27727 27795 27803 27860 27882 27897 28086 28089 28493 28537 28580
28740 28764 28809 28884 28939 29113 29164 29260 29335 29427 29484 29544 29722 29768 29841 29971
29975 29984 30103 30185 30227 30254 30293 30369 30435 30438 30495 30544 30557 30636 30850 31121
31200 31817 32028 32216 32389 32511 32551 32749 32775 32791 32921 32970 33189 33358 33541 33632
33676 33763 33866 34088 34099 34155 34227 34278 34343 34386 34422 34463 34485 34506 34517 34606
34683 34695 34767 34835 34934 34977 35084 35273 35382 35499 35619 35696 35722 35839 35976 36209
36238 36391
64: 4475 7743 7744 7745 7746 7747 7748 7749 7750 7751 7752 7753 7754 7755 7756 7757 7758 8130 15292
15959 16515 21803 22539 23299 24561 27662 27663 29400 31148 31168 32386 32480 33992 33993 35367
65: 616 624 632 659 674 692 694 695 717 718 751 755 756 776 778 814 816 817 860 864 872 896 934 935
1023 1029 1047 1048 1072 1079 1092 1124 1200 1203 1215 1239 1280 1293 1327 1343 1356 1357 1358 1362
1374 1389 1404 1434 1440 1451 1457 1476 1478 1487 1495 1512 1615 1677 1737 1768 1798 1878 1884 1893
1895 1900 1938 1943 1979 2018 2028 2033 2052 2061 2079 2083 2098 2119 2142 2172 2173 2222 2337 2363
2623 2626 2653 3011 3125 3359 3362 3415 3444 3656 3657 3658 3737 3752 3765 3786 3832 3839 3877 3917
3923 3925 3929 3946 4001 4066 4114 4145 4146 4237 4337 4443 4720 4736 4891 5122 5170 5748 5760 5827
5832 6192 6266 6267 6387 6422 6427 6464 6466 6499 6828 6832 6854 7138 7609 7785 7897 7898 7901 8001
8064 8067 8070 9142 9370 9417 9482 10146 10229 10245 11285 11321 11322 11357 11388 11389 11392
11395 11400 11433 12704 13356 13576 15275 15277 15326 15404 15651 15652 15653 15654 16039 16125
16136 16872 17500 17503 17527 17532 17638 17643 17693 17869 18548 18605 18960 19026 19033 19034
19035 19036 19061 19062 19065 19066 19068 19186 19221 19229 19265 19277 19278 19279 19280 19285
19301 19304 19311 19319 19358 19365 19379 19380 19385 19396 19397 19398 19399 19400 19414 19439
19445 19484 19488 19490 19768 19794 19795 19796 19797 19850 19880 19920 19921 19956 19957 19958
20001 20002 20037 20043 20060 20110 20114 20115 20116 20117 20118 20119 20120 20340 20410 20417
20431 20796 21322 21323 21356 21385 21400 21430 21502 21537 21543 21666 21705 22478 22556 22557
22558 22581 22582 22583 22584 22596 22600 22601 22612 22613 22675 22676 22677 22678 22679 22680
22683 22756 22757 22806 22813 22829 22867 22868 22902 22915 22928 22929 22992 24064 24115 24168
24942 27139 29386 29620 30391 31107 31143 31144 31181 31441 31589 31605 33811 34592 34848 35532
36324
66: 1045 1819 1960 7774 7775 19202 19869 22869 22938
67: 388 697 833 1644 2386 2442 2611 2618 2880 3058 3227 3557 3750 4192 4235 4401 4459 5802 6453 7921
7986 9940 11242 11384 13775 13811 14075 15797 17661 17802 18582 19031 19369 19983 20133 20134
20404 21489 21651 22769 35370 35371 35372 35373 35374 35375
68: 699 1121 1778 2376 2377 2604 2688 3398 3416 3500 3509 3897 4156 4363 4501 5668 5684 6007 6374
7458 8500 8548 8607 8648 9043 9051 9277 9598 11181 11861 12387 12502 13008 14067 14671 14966 15781
15923 16518 17194 17255 17763 17769 18561 18565 19729 20265 21404 21417 22759 23117 25135 25257
25308 25475 26243 27264 28777 29286 29524 29525 30132 30133 30134 30135 30851 32215 32714 33357
33441 34182 35816 35837 35908 35981 36137 36266
69: 494 582 637 866 1080 1184 1381 1627 1759 2673 2719 2726 2865 3050 3120 3279 3352 3369 3970 4375
5816 5903 8045 8074 8142 8985 9498 10143 10248 10586 10941 11998 12454 13342 13554 14889 15759
16295 17678 17835 18266 18952 20337 20957 21231 21311 21367 21371 21390 21514 23041 23228 24741
25451 25971 25977 25979 25981 25983 26936 28837 30395 33957 33996 35369
70: 698 851 1163 1531 1880 2243 2445 2687 2897 3360 3383 3461 3501 3502 3533 3555 3563 3564 3569
4013 4369 4466 5193 5739 5839 5851 7937 8009 8010 8038 9712 10241 11248 11302 15201 15810 17392
17681 18659 18948 19074 19212 19807 20070 20422 21104 21328 21364 21376 21578 22572 22620 23043
25462 26663 26808 27187 29861
71: 1057 1071 1104 1344 1378 1580 1585 1586 1748 2058 2094 2194 2692 2772 2896 2907 2936 3149 3186
3205 3249 3357 3787 3933 5420 6020 6184 6406 6871 7304 8055 8491 8985 9195 9415 9459 9651 10550
10879 11038 13960 13969 14221 14222 14223 15295 16470 17614 18260 18623 19254 19342 19584 19973
20098 20337 20647 21423 21533 21625 22862 23803 24686 24966 25818 25972 25986 26430 26495 26496
29743 29747 29804 30136 30385 30388 31103 31237 31238 31239 31463 31597 31776 34437 34438 34439
34440 34441 34442 34443
72: 676 807 903 1274 1373 2096 2395 2654 2855 3535 3719 4079 5913 7781 7782 11417 12401 17868 19132
19425 19915 20372 21449 21665 22865 26664 29387 31115 32853
73: 719 1133 1278 1341 1388 1449 1642 1854 1973 1998 2223 2723 2922 2942 2978 3064 3098 3148 3211
3522 3541 3620 4062 4251 4398 5706 5711 5814 6020 6406 6871 7967 8063 8491 8985 9195 10550 10879
11038 13707 13714 13767 13915 13930 13960 13969 13995 14120 14657 16470 18260 18533 18970 20093
20337 20393 20452 21478 22842 22965 23803 24686 25818 25972 25977 25981 25983 26430 29748 29862
30388 30390 30395 31103 31238 31597 31776 32803 33793 34448 35537
74: 1216 1429 1524 2073 2180 2225 3063 3184 3351 3820 4233 4446 4733 4746 4772 4773 4774 4775 4873
5070 5093 5369 5472 5490 5496 5503 5506 5905 6026 6206 6273 6428 6507 6593 6654 6921 7017 7018 7094
7131 7209 7249 7293 7323 7446 7478 7626 7654 7720 7852 8212 8244 8245 8288 8405 8430 8531 8583 8655
8678 8809 8961 8962 8986 9208 9414 9510 9534 9721 9735 9802 9929 9957 9959 10004 10182 10392 10536
10639 10671 10719 10739 10768 10785 10836 10926 10945 10961 10988 11006 11022 11090 11159 11222
11223 11449 11479 11486 11502 11693 11763 11776 11843 11850 11854 11896 12034 12176 12179 12317
12452 12579 12689 12923 13143 13151 13435 13477 13532 13616 14104 14297 14368 14608 14936 14975
15001 15212 15676 15735 15751 15901 15963 15989 15991 16013 16026 16107 16220 16332 16338 16525
16549 16665 16684 16806 16815 16817 16867 17374 17416 17489 17572 17574 17599 17850 18088 18212
18513 18545 18681 18773 18778 18808 18831 19359 19638 19662 19731 19756 19757 20064 20163 20196
20226 20298 20465 20645 20708 20782 21062 21233 21282 21419 21627 21680 21708 21709 21749 21772
21781 21961 21995 22003 22004 22044 22088 22343 22448 22501 22509 22639 22985 23021 23112 23162
23277 23317 23346 23455 23491 23618 23738 23880 23908 23915 23932 23954 23981 23994 24007 24044
24113 24167 24291 24413 24587 24681 24695 24736 24773 24817 24824 24831 24904 24986 25021 25040
25111 25155 25201 25219 25267 25287 25336 25517 25545 25568 25588 25614 25625 25655 25760 25767
25804 25829 25842 25967 26056 26071 26192 26313 26384 26493 26508 26522 26678 26706 26770 26791
26937 27002 27029 27095 27098 27127 27188 27191 27205 27327 27403 27428 27429 27465 27683 27868
27892 27958 27986 27988 28154 28206 28263 28276 28292 28330 28340 28442 28455 28497 28556 28561
28577 28634 28681 28706 29175 29204 29248 29279 29287 29293 29304 29312 29320 29375 29396 29441
29507 29515 29516 29517 29518 29519 29520 29630 29659 29920 30002 30089 30146 30243 30465 30481
30505 30524 30526 30608 30693 30763 30780 30843 30889 30914 30921 30929 30981 30993 31043 31062
31080 31128 31190 31208 31291 31353 31382 31450 31480 31529 31684 31688 31887 31924 31925 32057
32066 32156 32181 32236 32282 32357 32383 32409 32444 32449 32488 32528 32690 32731 32854 32876
33125 33153 33162 33279 33478 33615 33771 33890 34010 34129 34136 34138 34141 34156 34177 34235
34521 34567 34836 34878 34894 34897 34957 35025 35118 35152 35261 35397 35432 35500 35512 35554
35590 35623 35741 35779 35872 35942 36021 36052 36092 36117 36171 36319
75: 1498 1606 1683 1882 2544 2599 2781 2796 2971 3079 3122 3440 3592 3900 4109 4249 4298 4354 4476
5629 6050 6191 6668 6939 8824 8998 9066 9166 9447 9939 10202 11044 11190 11607 11890 12101 12297
12406 12674 13353 14068 14432 15403 15540 15633 15807 16311 16360 16398 17142 18752 18898 19096
19152 19840 19913 22031 22616 22967 23033 24165 26971 27057 27228 27788 28142 28161 28213 28298
28401 29712 30550 30689 31398 31728 31945 32103 32754 35729
76: 19052 19780 22647
77: 1093 1852 1939 2277 2454 2485 2554 2593 3298 3431 11280 17862 18647 18935 19185 19767 21372
22807 29154 29521
78: 311 344
79: 783 971 1168 1384 1428 1471 1556 10265 26959 29149 33844
80: 955 1156 1264 1308 1519 1643 1704 1707 2143 2161 2162 2329 2994 3337 3453 3454 3455 3886 4189
4326 6822 7878 9477 9495 9703 12391 12413 14029 14078 14101 14146 19142 19820 19965 21407 22698
23005 25449 25450 25927 25974 25976 25978 25980 25982 30138 31108
81: 374 697 729 827 833 870 1052 1088 1101 1181 1276 1312 1354 1644 1673 1698 1827 1832 2039 2442
2611 2880 3058 3227 4459 4755 4756 4757 5919 5920 6453 6860 10231 10258 11242 11272 11373 11384
13775 13811 14595 14596 15435 15814 15815 15816 15817 15818 15819 15820 15821 15822 15823 15824
15825 15826 15827 15828 15829 15830 15831 15832 15833 15834 15835 15836 15837 15838 15839 15840
15841 15842 15843 15844 15845 15846 15847 15848 15849 15850 15851 15852 15853 16886 17485 17556
17661 17662 17802 18070 18582 18694 18742 19031 19145 19369 19502 19599 19982 19983 20094 20133
20134 20658 20659 20660 20661 20662 20663 20664 20665 20666 20667 20668 20669 20670 20671 20672
20673 20674 20675 21805 22656 22769 22998 23303 26809 27105 27106 27107 35370 35371 35372 35373
35374 35375 35608 36310
82: 878 1247 1468 1605 1845 2641 2835 2931 3788 4423 5776 6452 6454 7147 7783 8080 9697 11729 12511
13716 13781 13874 13875 13879 13991 14041 14089 14092 14106 14134 15798 18755 19300 19394 20055
20359 22587 29741 30938 30962 35281
83: 682 931 1277 1481 1666 1734 1811 1812 1874 1922 2118 2218 2592 2601 2736 2997 3108 3168 3542
3584 3629 3882 4027 4176 4275 4377 4473 4503 4601 4682 4823 4871 4913 4993 5137 5174 5190 5226 5243
5301 5378 5425 5426 5439 5533 5598 5652 5999 6091 6144 6162 6212 6298 6349 6477 6551 6637 6711 6743
6986 6987 6991 6997 7090 7116 7176 7263 7441 7489 7644 7672 7712 7740 7851 7911 8090 8144 8174 8220
8306 8334 8521 8577 8633 8765 8833 8865 8954 9052 9106 9107 9222 9539 9544 9729 9783 9806 9870 9935
10016 10064 10299 10399 10469 10624 10702 10761 10801 10895 10913 10984 11016 11047 11167 11186
11332 11472 11523 11612 11659 11688 11750 11791 11856 11954 12060 12108 12163 12223 12260 12296
12316 12422 12558 12594 12634 12665 12718 12799 12817 12824 12881 12926 12971 13068 13119 13167
13198 13218 13248 13249 13250 13500 13806 13807 14009 14128 14190 14230 14274 14384 14514 14534
14582 14613 14701 14766 14789 14881 14955 15014 15048 15127 15173 15233 15383 15523 15951 15972
16092 16159 16374 16413 16585 16631 16688 16754 16774 16836 17095 17187 17248 17348 17415 17558
17590 17611 17612 17613 17947 17956 18073 18097 18199 18241 18316 18387 18418 18474 18486 18520
18682 18708 18779 18904 19161 19236 19637 19709 19734 20052 20194 20238 20304 20399 20634 20715
20802 20833 20910 20974 21008 21065 21103 21159 21218 21265 21294 21587 21608 21668 21698 21718
21766 21853 21889 22009 22011 22079 22113 22186 22251 22280 22338 22360 22453 22518 22552 22736
22815 22950 23078 23126 23294 23363 23462 23501 23512 23617 23693 23723 23764 23819 23967 24026
24072 24078 24080 24081 24107 24327 24393 24491 24507 24540 24567 24648 24844 24902 24969 24993
25039 25185 25232 25353 25388 25427 25519 25602 25740 25808 25810 25822 25860 25955 26087 26198
26325 26556 26816 26832 26889 26955 26956 27055 27134 27217 27256 27312 27333 27366 27417 27508
27564 27642 27688 27791 27938 27957 28020 28072 28234 28300 28500 28553 28597 28730 28815 28877
28909 28961 28996 29020 29024 29037 29087 29111 29167 29223 29252 29421 29469 29543 29579 29624
29668 29731 29759 29814 29964 29988 30075 30108 30149 30275 30365 30404 30430 30448 30473 30502
30513 30642 30748 30869 30906 31006 31055 31125 31461 31515 31825 31869 31906 32045 32139 32196
32225 32239 32368 32410 32455 32513 32550 32629 32723 32767 32797 32851 32985 33024 33058 33141
33206 33315 33352 33427 33551 33559 33647 33683 33792 33943 34045 34106 34165 34212 34271 34324
34424 34491 34526 34619 34654 34710 34769 34805 34913 34943 35004 35031 35072 35155 35222 35399
35423 35510 35595 35638 35703 35726 35773 35896 35927 36049 36164 36199 36287 36414
84: 829 975 1398 1464 1467 1647 2034 3506 4148 7961 8043 9449 10280 11421 13354 18599 20103 21320
22634 23305 29152 35616
85: 4725 4915 4964 5227 6259 6369 7039 8087 8349 8415 8429 8439 8902 10117 10411 10713 10952 11127
11671 12158 12235 12870 13049 13599 13653 14586 14792 15146 16204 16272 16664 18278 18515 18895
19740 21271 21856 21954 23312 23768 23827 24095 24453 24615 24775 25006 25636 25753 26532 26700
26793 26861 27316 27691 28071 28518 28973 29190 29368 29374 29769 29790 29903 29991 30808 31451
31854 34541 35055 36251
86: 706 957 1115 1193 1246 1470 1970 2030 2889 3009 3012 3022 3044 3151 3207 3252 3317 4224 4447
4768 4896 5166 5270 5325 6003 6073 6397 6418 6533 6650 7139 7271 7296 7297 7298 7629 7658 7685 7730
8084 8292 8409 8853 8933 8979 8980 8981 9035 9036 9048 9390 9496 9523 9607 10196 10274 11247 11454
11570 11574 11575 11577 11578 11724 11725 11726 11727 11728 12133 12134 12169 12437 12584 13098
13972 14028 14231 14477 14518 14562 14729 14873 15013 15092 15358 15671 15892 15942 16020 16051
16233 16234 16281 16282 16283 16284 16285 16286 16287 16288 16442 16444 16445 16467 16882 17697
17926 18003 18526 18531 18713 18857 18870 18915 19064 19377 19843 19844 20068 20288 20530 20544
20954 21445 21699 21839 21840 22156 22279 22451 22574 22880 23232 23708 23709 23795 25027 25340
25367 25399 25658 25728 25900 25905 25906 26068 26078 26281 26383 26509 26524 26737 26968 27038
27135 27375 27435 27665 27666 27844 27845 27846 28775 29848 30045 30212 30264 30506 30600 30828
30835 30897 30898 30919 31162 31186 31187 31189 31201 31292 31653 31654 31655 31657 31678 31797
31974 32155 32539 32581 32582 32590 32599 32678 32716 32823 32824 32944 32977 33536 33775 33888
33889 34387 34676 34788 34925 35001 35061 35225 35478 35834 35883 35928 36009 36108 36254
87: 4543 4630 4650 4656 4658 4665 4671 4680 4749 4803 4853 4861 4911 4917 4939 4952 4959 5051 5251
5256 5306 5447 5489 5497 5563 6104 6130 6325 6336 6339 6367 6597 6745 6790 7159 7169 7170 7171 7248
7251 7426 7622 7651 7701 7718 8120 8214 8239 8285 8497 8719 8891 9137 9242 9280 9506 9548 9593 9601
9609 9817 9980 10069 10104 10144 10296 10431 10472 10573 10829 10854 11128 11446 11690 11703
11708 11761 11779 11945 12059 12212 12270 12573 12646 12957 13018 13091 14236 14247 14277 14493
14495 14722 14876 14913 15064 15130 15132 15133 15263 15341 15364 15371 15382 15485 15933 16075
16305 16618 16638 16679 16740 16762 17050 17718 17730 17916 17957 18023 18111 18118 18196 18202
18214 18251 18511 18538 18722 19625 19670 20235 20258 20598 20938 20946 20976 20996 21045 21138
21869 22150 22193 22262 22300 22460 22520 23159 23241 23309 23537 23574 23578 23587 23679 23784
23985 24371 24429 24460 24620 25014 25212 25282 25332 25377 25743 25942 26246 26248 26353 26378
26537 26541 26669 26838 27176 27177 27353 27354 27360 27400 27402 27519 27531 27706 27839 27896
27902 28479 28639 28817 28861 29448 29834 29839 29928 29929 29930 30077 30094 30274 30442 30685
31293 31294 31295 31296 31297 31298 31299 31300 31301 31302 31303 31304 31305 31306 31307 31308
31309 31310 31311 31312 31313 31314 31453 31752 31822 31969 31985 32061 32430 32484 32556 32786
32833 32834 32835 32836 32837 32838 32839 32840 32841 32865 32901 32972 32989 32996 33186 33518
33556 33566 33648 33768 33841 33891 33892 33893 33894 33895 33896 33897 33898 33899 33900 33901
33902 33903 33904 33905 33906 33907 33908 33909 33910 33911 33912 33913 33914 33915 33916 33917
33918 33919 33920 33921 33922 33923 33924 33925 33995 34020 34510 34631 34680 34717 34775 34822
34922 34929 34985 35388 35398 35419 35436 35455 35464 35624 35681 35951 36062 36144 36174 36243
36248
88: 743 752 753 779 1089 1248 1321 1340 1359 1514 1539 1953 2439 2675 2682 2774 2777 2814 3067 3253
3282 3287 3290 3320 3338 3345 3530 3597 3731 3759 3880 4012 4228 4320 4327 5722 5723 5758 5766 6444
6492 6842 6900 7951 7952 7953 9363 9471 9472 11277 11281 11282 12403 12457 12469 12484 13684 13770
13779 13809 13873 14039 14040 14111 14446 14447 17794 17795 19112 19143 19168 19169 19219 19241
19242 19244 19769 19770 19771 19772 19773 20367 20391 20407 20427 20453 21315 21316 21484 22804
22805 22821 22912 22927 23024 23029 26293 26513 27203 27223 29381 31680 31747 31755 32163 32164
34742 35610
89: 984 985 1073 1122 1331 1387 1447 1538 1547 1663 1736 1770 1892 2084 2087 2275 2378 2543 2677
2902 2932 2979 2985 3019 3030 3037 3047 3065 3071 3095 3102 3159 3190 3193 3198 3218 3230 3412 3414
3580 3627 3755 3762 3795 3853 3905 3942 3964 4193 4201 4208 4230 4261 4280 5165 5646 5713 5737 6002
6401 6408 6423 6425 6438 6446 6449 6471 6520 6531 6675 6888 7611 8804 8922 8975 8991 9326 9327 9328
9329 9368 9377 9393 9394 9398 9399 9427 9444 9445 9446 9458 9639 9701 10150 10514 10546 10993
11283 11284 11581 12002 12003 12004 12241 12479 12481 12945 12973 13000 13099 13101 13729 14232
14706 14830 14990 15394 15395 15396 15397 15398 15548 16002 16156 16162 16165 16890 16893 16983
17001 17534 17810 18206 18402 18805 18954 19045 19125 19492 19823 19824 19825 19826 19827 19828
19829 19830 19831 19924 20472 20922 20923 21471 21910 22671 22672 22673 22822 22896 22916 22922
23010 23307 23603 23604 24306 24688 24859 25667 25672 25863 25864 25928 26080 26447 26515 26616
26762 26912 27045 27759 28001 28471 29082 29135 29680 30140 32934 33067 33971 35457
90: 673 838 914 953 1227 1408 1418 1548 1702 1917 2106 2215 3543 4743 4979 5185 5818 6385 7777 7846
7866 7996 8065 8984 9022 9489 10137 10260 11274 14211 14560 14712 15282 18542 19078 19253 19258
19303 19316 19986 20096 20138 20141 20642 20981 20982 20983 20988 20989 21194 21195 21196 21197
21198 21199 21200 21201 21394 22473 22702 22771 23687 23911 23912 23914 24691 24721 24804 25459
26120 26604 27042 27991 32159 32526 32570 35066 35290 35297
91: 947 1242 1455 1821 2380 2954 5130 5321 5640 6041 6105 6197 6666 6693 6843 7086 7099 7621 7650
7700 7717 7955 8284 8437 9012 9094 9174 9493 9507 9886 11445 11928 11929 11996 12124 12125 12131
12300 12389 12462 12572 14019 14117 15015 15093 15171 15247 15536 15811 16017 16453 16625 17473
17499 17513 17585 18099 18893 18994 19111 20069 21540 22236 22306 22347 22466 22573 24855 24980
25013 25331 25376 25394 25453 25991 26568 26781 27342 27480 27510 27576 28255 28324 28625 29532
29821 30255 30296 30330 31427 31469 32555 32830 32831 32832 32918 33038 33039 33519 33644 33767
34357 34679 34774 34984 35108 36047 36381
92: 873 988 1655 1708 2157 2184 2254 2319 2884 5143 5482 5617 5671 5681 6543 6861 7301 7778 7786
7875 8126 8860 9691 10162 10163 10164 11383 11839 13369 13370 13371 13372 13373 13374 13375 13376
13377 13378 13379 13380 13381 13382 13383 13384 13385 13386 13387 13388 13389 13390 13391 13392
13393 13394 13395 13396 13397 13398 13399 13400 13401 13402 13403 13404 13405 13406 13407 13408
13409 13410 13666 13696 13728 13741 13839 14008 14082 14658 15099 15204 15205 15427 15795 15812
16258 16478 16793 17856 18559 19312 19432 19778 20020 20059 20692 21433 22497 22595 22693 22725
24420 24703 24869 25461 25488 26385 26657 26658 26659 27043 27441 27781 28591 29694 30955 31214
31659 34571 34572 34575 34576 34577 34578 35999
93: 1393 1744 1890 2166 2463 2500 6456 8017 9124 9125 9688 12360 13321 15649 15650 17680 19728
21375 21798 22035 31150 31151 34380 34581 34861 34862 34863 34864 34865 34866 34867 34868 34869
34870 34871 34872
94: 335 455 679 723 745 785 797 798 989 1000 1060 1081 1105 1232 1241 1306 1307 1318 1323 1420 1426
1437 1445 1535 1546 1557 1624 1631 1634 1652 1659 1661 1739 1781 1788 1799 1808 1814 1891 1916 1948
2019 2041 2170 2181 2188 2189 2267 2272 2308 2449 2457 2517 2559 2572 2575 2587 2590 2628 2639 2690
2794 2812 2821 2845 2927 2957 2958 2959 2961 2965 2999 3003 3021 3023 3052 3076 3088 3090 3217 3233
3254 3259 3276 3307 3325 3333 3347 3348 3356 3384 3392 3393 3400 3472 3503 3642 3675 3683 3684 3743
3744 3745 3746 3766 3770 3781 3785 3829 3868 3876 3883 3911 3943 3945 3985 3994 4041 4042 4043 4052
4083 4098 4105 4122 4236 4277 4305 4317 4355 4474 4745 4856 4885 4886 4895 5118 5177 5289 5515 5732
6148 6395 6443 6517 6518 6550 6829 6837 6851 6880 6897 7150 7353 7354 7355 7356 7357 7358 7359 7361
7362 7363 7364 7365 7366 7367 7372 7857 8190 8374 8387 8413 8729 8857 8892 8934 8935 8936 9065 9073
9143 9262 9309 9382 9400 9587 9937 10054 10225 10284 10285 10286 10426 10456 10779 10934 10935
11792 11968 11969 11970 11971 11972 11973 11974 11975 11976 11977 11978 11979 11980 11988 11990
11991 11993 11994 12236 12237 12238 12239 12240 12259 12790 12961 12995 13001 13035 13315 13361
13755 14122 14123 14227 14233 14431 14517 14644 14645 14646 14663 14690 14834 14893 15074 15106
15190 15191 15279 15283 15559 15600 15692 15768 15806 15955 16005 16034 16055 16059 16139 16146
16150 16699 16794 16795 16796 17040 17459 17495 17502 17543 17544 17545 17546 17547 17665 17804
17826 18231 18232 18233 18234 18268 18269 18270 18271 18272 18350 18351 18475 18789 18911 18950
19009 19082 19089 19154 19188 19222 19223 19224 19286 19323 19478 19711 19763 19854 19878 20004
20051 20339 20459 20531 20532 20549 20578 20649 20650 20651 20947 21184 21185 21186 21187 21189
21190 21213 21335 21804 21829 21830 21922 21923 22685 22794 22925 22952 22957 22994 23013 23146
23330 23331 23332 23333 23553 23710 23863 23917 24294 24387 24707 24708 24709 24710 24731 24852
24897 25089 25880 25881 25924 26052 26055 26084 26104 26105 26113 26250 26289 26421 26422 26423
26424 26425 26433 26434 26526 26527 26611 26612 26833 26950 26951 26985 27049 27100 27302 27442
27443 27444 27445 27446 27673 27767 27821 27828 27829 27995 28184 28253 28365 28448 29150 29527
29749 29765 30142 30143 30144 30145 30218 30392 30512 30676 30694 30830 30940 31072 31073 31081
31092 31093 31138 31166 31222 31227 31409 31410 31465 31535 31536 31546 31547 31596 31661 31662
31667 31718 31957 31958 31979 32123 32301 32302 32303 32304 32305 32583 32955 33069 33070 33880
33969 33970 34618 34854 34858 34959 35280 35303 35304 35544 36014 36234 36432
95: 846 1166 1207 1409 1473 1494 1520 1575 1850 2259 2810 3199 3291 3796 4463 4995 5007 5008 5021
5041 5079 5103 5104 5146 5237 5292 5368 5408 5478 5491 5499 5581 5630 5820 5974 5988 6106 6286 6441
6581 6681 6723 6731 6732 6784 6988 7013 7027 7130 7151 7152 7317 7328 7329 7330 7331 7332 7333 7343
7600 7601 7640 7668 7699 7735 8085 8086 8091 8196 8197 8248 8302 8314 8871 8937 8949 9186 9187 9188
9343 9508 9762 9847 9866 9910 9934 9994 10175 10403 10421 10657 10766 10831 10943 10994 11063
11088 11169 11170 11191 11416 11468 11492 11507 11663 11738 11872 11895 11950 12110 12190 12298
12306 12346 12590 12764 12803 12808 12813 12822 12878 12896 12928 12954 13117 13187 13196 13197
13327 13336 13337 13338 13339 13340 13341 13518 13588 13644 13777 13829 13982 14059 14243 14276
14358 14502 14524 14703 14764 14806 14875 14896 14911 15180 15218 15266 15367 15516 15522 15554
15767 16029 16073 16347 16393 16407 16622 16670 16696 16726 16845 17118 17159 17218 17372 17409
17432 17879 17938 17967 18107 18130 18142 18365 18400 18524 18650 18718 18900 19131 19407 19614
19914 20187 20222 20302 20701 20937 20965 21202 21244 21399 21677 21700 21725 21768 21867 21997
22073 22135 22175 22214 22284 22340 22462 22508 22791 23238 23334 23432 23645 23654 23678 23743
23955 23977 24308 24419 24431 24475 24512 24579 24592 24633 24680 24718 24802 25034 25349 25375
25417 25546 25593 25680 25683 25716 26051 26338 26380 26391 26539 26592 26613 26736 26840 26875
26924 26932 26996 27041 27056 27062 27115 27129 27356 27516 27527 27711 27715 27723 27764 27810
27836 27923 27947 27952 27982 27994 28065 28191 28265 28375 28536 28581 28599 28600 28648 28709
28785 28919 28950 28960 29017 29107 29148 29539 29576 29669 29673 29691 29704 29836 29896 30001
30028 30109 30178 30206 30214 30267 30431 30446 30519 30529 30567 30577 30666 30684 30707 30813
30814 30966 31198 31199 31347 31447 31474 31498 31558 31784 31904 31905 32078 32202 32228 32328
32347 32401 32402 32412 32544 32584 32744 32795 32906 32922 32945 32978 33074 33085 33202 33313
33321 33520 33557 33581 33637 33693 33702 33788 33828 33998 33999 34026 34050 34211 34269 34273
34321 34328 34341 34347 34426 34548 34560 34678 34691 34752 34773 34930 34945 34983 35023 35067
35190 35211 35265 35403 35513 35625 35699 35707 35716 35752 35783 36057 36077 36194 36236 36237
36377 36412
96: 1162 4573 4730 4929 4936 4943 5149 5222 5315 5348 5393 5513 5577 6089 6297 6326 6565 6694 6804
7245 7710 8152 8340 8355 8509 8944 9210 9323 9324 9537 9982 10002 10147 10195 10317 10354 10425
10676 10687 10973 11084 11126 11583 11628 11652 11680 11927 12067 12364 12396 12629 12650 12847
12876 12918 13043 13134 13171 13550 13606 13646 13706 14467 14565 14791 15115 15136 15481 16209
16542 16716 16809 16825 17346 18158 18197 18320 18329 18384 18512 18832 19659 20257 20863 20973
21285 21743 21991 22083 22305 22517 23257 23283 23321 23479 23487 23489 23528 23772 23793 23986
24005 24040 24042 24118 24135 24445 24472 24476 24518 24543 24556 24606 24631 24635 24810 24988
25120 25386 25505 25558 25771 25826 26010 26229 26328 26558 26760 26819 26852 26873 26877 27028
27071 27103 27231 27288 27323 27544 27610 27679 27699 27734 27739 27766 27911 27914 27921 28098
28183 28282 28349 28433 28517 28826 28851 28900 28917 28979 29369 29639 29653 29656 29670 29672
29887 29897 30159 30246 30304 30336 30559 30986 31014 31022 31163 31372 31455 31524 31769 31914
32091 32201 32382 32425 32442 32548 32890 33292 33549 34002 34040 34054 34656 34807 35006 35129
35187 35247 35420 35515 35574 35639 35648 35660 35661 35682 35683 35748 36189
97: 628 687 705 716 738 774 795 799 831 855 888 928 1040 1129 1297 1480 1503 1511 1636 1679 1694 1710
2164 2502 2555 3164 3477 4047 4767 4897 5745 5991 6648 6887 7320 9033 9045 9046 9383 9891 11267
11334 11349 13924 13925 13974 15316 15958 16291 16292 16452 16468 17817 18349 18525 18593 18981
19115 19163 19200 19246 19867 19910 19992 20533 21051 21360 22854 22888 24967 25875 26103 26601
26801 27776 29678 33959 34853 36005
98: 777 1309 1988 2183 2322 2556 2837 2861 3066 3116 3953 4328 4385 4697 4698 4699 4729 5700 6018
6246 6300 7920 8432 9704 9794 10868 11077 11108 11390 11518 11613 12157 12234 12326 12478 12566
12628 13693 14795 16207 16265 16870 17419 18425 18499 18573 18756 18791 19419 19750 20121 20245
20879 21238 21447 21785 21863 22487 22585 23626 23835 24149 24485 24643 25634 26698 26790 26802
27964 28291 28512 28871 29351 29740 29784 29802 29957 30311 30349 30806 31264 33872 34750
99: 1568 1676 2334 2642 3166 3417 3814 3935 4421 4494 4556 4644 4750 4792 4931 5004 5065 5197 5263
5302 5360 5403 5473 5527 5579 5586 5690 5926 5934 5943 5956 6021 6052 6085 6100 6202 6238 6310 6371
6575 6635 6644 6662 6699 6705 6734 6778 6780 6949 6975 6978 7046 7062 7105 7121 7210 7219 7284 7285
7410 7431 7483 7706 7723 7772 8255 8269 8350 8373 8503 8507 8557 8568 8594 8728 8732 8743 8822 9093
9263 9291 9294 9551 9586 9823 9887 9981 9986 9990 10320 10476 10530 10591 10604 10668 10748 10790
10839 10887 11036 11163 11289 11684 11809 12095 12173 12219 12267 12282 12374 12375 12442 12453
12585 12655 12738 12742 12935 13107 13124 13489 13498 13543 13598 13726 14259 14263 14265 14303
14306 14405 14491 14515 14579 14600 14648 14666 14684 14705 14721 14746 14824 14863 15037 15121
15217 15378 15528 15878 15897 15935 16358 16551 16553 16586 16626 16820 16856 17027 17086 17162
17169 17222 17232 17246 17360 17366 17671 17676 17861 17910 17932 18129 18136 18282 18334 18435
18461 18641 18824 19384 19693 19714 19926 20233 20280 20725 21017 21157 21435 21682 21738 21984
22131 22140 22245 22249 22255 22270 22290 22321 22322 22355 22535 22739 23077 23105 23108 23170
23195 23296 23315 23366 23415 23503 23555 23579 23673 23929 24150 24325 24334 24338 24481 24555
24622 24792 24887 25028 25153 25158 25177 25213 25245 25247 25296 25297 25382 25420 25422 25463
25522 25541 25543 25746 25830 25897 25898 26213 26218 26233 26284 26285 26342 26343 26444 26550
26589 26761 27125 27195 27216 27250 27266 27367 27648 27804 28009 28033 28045 28060 28116 28449
28750 28799 29198 29344 29410 29457 29496 29647 29808 29890 29905 29942 29994 30007 30128 30169
30238 30289 30359 30375 30644 30662 30692 30708 30742 30823 30831 30857 30901 31010 31046 31458
31477 31677 31679 31702 31742 31790 31999 32004 32110 32114 32161 32257 32463 32464 32530 32635
32998 33098 33102 33179 33183 33215 33324 33335 33544 33546 33586 33605 33835 34078 34137 34281
34470 34496 34543 34599 34601 34665 34703 34709 34759 34801 34850 35078 35147 35233 35564 35631
35693 35695 35713 35814 36030 36039 36113 36145 36172 36215 36263 36271
100: 1390 2044 2320 2580 2603 2904 3143 3155 3189 4011 4494 4556 4644 5197 5263 5302 5360 5403 5579
5690 5943 6021 6052 6085 6100 6150 6202 6310 6371 6413 6490 6575 6635 6644 6662 6699 6705 6734 6774
6778 6780 6949 6975 6978 7062 7121 7210 7219 7410 7431 7483 7706 7723 8269 8350 8373 8557 8594 8652
8728 8732 8743 8822 9093 9274 9291 9586 9767 9823 9887 9981 9986 9990 10320 10422 10476 10530
10591 10604 10668 10711 10748 10790 10791 10839 10887 11036 11101 11163 11503 11623 11673 11684
11809 12018 12173 12219 12282 12374 12375 12442 12453 12585 12655 12742 12868 12882 12935 13055
13107 13543 13598 13717 13920 14147 14182 14370 14405 14515 14579 14600 14648 14665 14684 14705
14746 14824 14863 14965 15037 15097 15121 15217 15256 15378 15528 15878 15897 15922 15928 15935
15950 16358 16522 16626 16820 16854 16856 17027 17086 17103 17162 17222 17360 17673 17861 17932
17968 18282 18334 18435 18461 18824 19351 19655 19664 19693 19714 20139 20140 20233 20280 20457
20577 20607 20725 20858 21017 21461 21682 21738 22131 22140 22178 22290 22321 22322 22355 22535
22768 22986 23077 23105 23108 23170 23195 23250 23296 23315 23366 23415 23503 23527 23535 23673
23849 24334 24338 24555 24792 24887 25028 25153 25158 25177 25247 25297 25382 25420 25422 25463
25541 25543 25746 25897 25898 25966 26213 26218 26284 26285 26342 26343 26444 26550 26589 26761
27125 27195 27216 27250 27266 27367 27412 27545 27648 27804 27838 28009 28033 28045 28060 28449
28750 28799 28855 28862 28967 29198 29256 29282 29307 29344 29410 29457 29496 29647 29808 29890
29905 29934 29942 30128 30169 30189 30196 30238 30289 30375 30644 30662 30692 30708 30823 30831
30901 31010 31046 31458 31677 31679 31702 31741 31742 32004 32016 32110 32114 32161 32463 32464
32530 32610 32612 32635 32683 32713 32866 32998 33089 33098 33102 33179 33215 33324 33432 33445
33480 33482 33544 33546 33586 33605 33835 34078 34137 34151 34200 34281 34470 34496 34543 34599
34601 34620 34665 34703 34709 34759 34801 35058 35078 35147 35233 35564 35631 35693 35695 35713
35907 35912 35930 35953 35979 36030 36039 36113 36136 36145 36172 36215 36263 36271 36393 36404
101: 683 722 728 1099 1110 1157 1219 1251 1275 1292 1355 1394 1479 1515 1541 1549 1552 1564 1569
1572 1594 1611 1637 1718 1751 1774 1802 1817 1926 2121 2133 2230 2286 2344 2350 2490 2518 2548 2551
2591 2615 2662 2771 2804 2828 2830 2872 2926 2947 3004 3035 3068 3073 3075 3124 3128 3172 3182 3371
3372 3373 3512 3613 3628 3637 3646 3661 3666 3718 3739 3768 3769 3936 3976 3982 4020 4170 4188 4206
4225 4285 4353 4365 5726 5769 5990 6386 6392 6407 6419 6436 6479 6484 6826 6830 6931 6990 7493 7598
8011 8561 8576 8880 8881 9116 9374 9706 9726 10235 10281 10944 11197 11198 11377 11379 11432 11889
12395 12761 13553 13859 13964 13971 13980 14035 14110 14372 14380 14890 15290 15322 15708 16004
16064 16070 16186 16328 16438 16880 16881 17215 17470 17481 17519 17615 17685 17796 18229 18243
18818 18821 18956 18967 19158 19296 19344 19355 19362 19389 19451 19779 19845 19853 19887 19949
19970 20006 20015 20061 20381 20412 21464 21493 21530 21577 21643 22591 22686 22720 22770 22803
22879 22904 22905 22919 22960 23025 23438 24418 24705 26268 27024 27209 27219 27819 28227 28323
28359 28404 29138 29565 29671 29843 30729 30749 31346 31358 31721 31884 31885 31902 32140 33707
36012 36327
102: 804 1466 1573 1715 2006 2775 3216 3395 3396 3397 3583 3705 3997 4255 4356 4362 4521 4784 5241
5334 5350 5500 5510 5606 6068 6139 6396 6595 6938 7012 7091 7113 7238 7419 7634 7663 7686 7742 8271
8297 8544 8567 8657 8726 9215 9254 9282 9515 9603 9825 9873 9941 10019 10257 10370 10502 10625
10701 10734 10794 10795 10796 10918 10977 11149 11314 11440 11459 11596 11637 11871 12047 12178
12255 12535 12580 12699 12844 13079 13160 13501 13558 14057 14143 14386 14472 14735 14842 14962
15040 15368 15919 16025 16465 16824 17191 17355 17564 17720 17833 17935 17991 18307 18460 18711
18880 18901 19116 19346 19632 20008 20378 20397 20419 20605 20714 21306 21341 21683 21742 21983
22098 22168 22252 22292 22356 22392 22442 22514 22617 22903 23101 23362 23482 23572 23680 23698
23734 23742 23968 24016 24296 24576 24729 24953 24984 25022 25116 25139 25196 25345 25366 25402
25536 25617 25744 25780 25847 26211 26292 26710 26742 26934 26992 27150 27211 27276 27306 27862
27884 28022 28090 28204 28220 28338 28692 28739 28993 29146 29211 29352 29415 29571 29651 29714
30017 30035 30124 30180 30216 30262 30483 30669 30726 30895 30916 30961 30992 31033 31406 31516
31724 31818 31859 31959 32046 32117 32188 32221 32230 32271 32380 32393 32472 32534 32710 32733
32898 32920 32974 33142 33182 33246 33252 33450 33534 33678 33780 34188 34291 34350 34398 34514
34671 34726 34780 34907 34993 35024 35110 35138 35221 35511 35570 35626 35746 35902 35916 35991
36133 36181 36386
103: 309 348 349 411 630 898 905 915 1533 1595 1792 2768 3382 3404 3669 4434 5153 5688 6982 7146
7374 7885 9364 10152 10153 11279 15067 16455 16779 16780 16781 16782 16783 18532 19184 19230
19766 20402 21437 22781 24696 25892 26049 27990 33033 34259 35288 35289 36420
104: 309 348 349 410 412 630 898 905 915 1533 1595 1792 2768 3382 3404 3669 4434 5153 5688 6982 7146
7374 7885 9364 10152 10153 11279 15067 16455 16779 16780 16781 16782 16783 18532 19184 19230
19766 20402 21437 22781 24696 25892 26049 27990 33033 34259 35288 35289 36420
105: 309 348 349 411 630 898 905 915 1533 1595 1792 2768 3382 3404 3669 4434 5153 5688 6982 7146
7374 7885 9364 10152 10153 11279 15067 16455 16779 16780 16781 16782 16783 18532 19184 19230
19766 20402 21437 22781 24696 25892 26049 27990 33033 34259 35288 35289 36420
106:
107: 2302 2317 2621 4459 9731 12383 12416 12445 14161 15400 16479 16480 16481 16482 16483 16484
16485 16486 17549 18273 18549 18645 21327 27051 27052 27078 27079 27080 27081 27082 27083 27084
27085 28573 36295 36296 36297 36298 36299 36300
108: 711 750 773 1291 1577 11268 17501 18982 19216 22866
109: 696 720 876 1113 1262 1263 1267 1397 1414 1641 1645 1662 1691 1984 2010 2029 2056 2159 2160
2434 2483 3236 3621 4292 4694 5872 6462 9349 9402 10256 12996 13997 14138 15203 17664 18556 18803
19133 19449 19481 19944 19967 21319 21791 22695 22978 23001 23007 35609
110: 622 1325 1507 1616 2282 2533 2805 3136 3861 4394 5907 6044 6859 6955 7877 8574 8988 9109 10132
12376 12377 12427 12440 12510 13228 13229 13230 13231 13232 13233 13234 13235 13236 13237 13238
13239 13240 13368 14350 14351 14352 14418 14649 15401 15509 16054 16120 16487 16488 17492 17555
18020 18174 18921 19135 20034 20356 20953 21345 21603 22603 24062 24676 24764 25877 26306 27010
27174 27224 27261 27479 27830 28149 28215 28314 28447 29675 30752 31404 31424 31740 31827 31953
32094 32591 32958 33027 33758 33759 33761 34385 35529
111: 713 715 737 844 875 885 887 895 924 994 1003 1004 1005 1006 1009 1051 1160 6501 10250 10270
10275 10277 15319 15321 18166 19176 19352 22642 22823 22849 26804 26805 26812 30509
112: 686 822 840 868 921 925 940 1002 1019 1020 1059 1076 1134 6502 18167 20313 22860 24866 28902
36333
113: 545 749 757 758 764 781 882 909 1090 1114 1123 1131 1229 1230 1259 1273 1336 1348 1395 1396
1430 1439 1463 1482 1491 1496 1590 1601 1608 1610 1630 1658 1717 1720 1726 1727 1763 1815 1823 1842
1846 1855 1888 1962 1963 1969 1971 2072 2169 2231 2273 2357 2413 2415 2470 2491 2510 2513 2516 2535
2606 2647 2667 2676 2789 2793 2799 2800 2802 2803 2815 2820 2829 2843 2854 2862 2915 3036 3041 3081
3091 3110 3126 3145 3160 3204 3322 3324 3330 3354 3363 3410 3421 3425 3427 3429 3480 3482 3496 3514
3520 3525 3549 3556 3585 3589 3594 3600 3604 3605 3608 3609 3610 3611 3612 3618 3622 3626 3631 3632
3633 3635 3639 3650 3651 3653 3654 3664 3667 3671 3672 3676 3685 3686 3687 3688 3689 3690 3691 3692
3693 3694 3695 3700 3702 3706 3713 3714 3724 3729 3732 3738 3751 3756 3772 3773 3775 3777 3779 3780
3782 3792 3794 3797 3798 3799 3800 3801 3802 3810 3812 3813 3856 3888 3889 3938 3947 3948 3952 3954
3986 3987 3988 3989 4016 4017 4018 4025 4035 4070 4093 4101 4103 4106 4112 4197 4200 4204 4282 4290
4300 4323 4330 4339 4344 4358 4364 4379 4487 4488 5147 5625 5757 5869 6412 6670 6825 6943 7348 7760
7761 8408 8825 8895 9002 9037 9070 9162 9420 10145 10234 11059 11209 11210 11571 11573 12114 12293
12463 12673 13006 14006 14408 15178 15538 15672 15711 15730 15731 15732 15805 16410 16429 16430
16431 16432 16433 16434 16435 16436 16440 16461 16888 17387 17436 17509 17647 17690 17691 17828
17872 17876 18008 18601 18644 18649 18836 19070 19124 19179 19233 19448 19833 20065 20131 21246
22607 22640 22825 22898 22906 22908 23040 24544 24545 24546 24547 25059 25060 25061 25062 25063
25064 25065 25066 26420 26485 26490 26798 27017 27485 27529 27794 28165 28267 28350 29376 30547
30745 31258 31259 31260 31261 31262 31359 31377 31656 31716 31726 31916 32113 32829 32846 32847
33028 33508 33512 33513 33960 33961 33962 33963 33964 33965 33968 34456 34849 35254 35301 36006
114: 1135 1540 1553 2328 2563 2620 2698 2875 3048 3161 3361 3464 3921 4721 4759 7315 7339 7776 9475
11418 15415 15626 16229 16230 19264 19325 20107 20122 20366 21470 21649 21790 22809 26079 26300
28568 28781 33075
115: 1135 1540 1553 2328 2563 2620 2698 2875 3048 3161 3361 3464 3921 4721 4759 7315 7339 7776 9475
11418 15415 15626 16229 16230 19264 19325 20107 20122 20366 21470 21649 21790 22809 26079 26300
28568 28781 33075
116: 1135 1540 1553 2328 2563 2620 2698 2875 3048 3161 3361 3464 3921 4721 4759 7315 7339 7776 9475
11418 15415 15626 16229 16230 19264 19325 20107 20122 20366 21470 21649 21790 22809 26079 26300
28568 28781 33075
117: 1135 1540 1553 2328 2563 2620 2698 2875 3048 3161 3361 3464 3921 4721 4759 7315 7339 7776 9475
11418 15415 15626 16229 16230 19264 19325 20107 20122 20366 21470 21649 21790 22809 26079 26300
28568 28781 33075
118: 842 843 910 1417 1581 1584 1591 1907 2255 2893 2952 4440 4457 4536 4584 4591 4597 4603 4604
4633 4657 4683 4712 4783 4831 4909 5033 5272 5328 5549 5626 5761 5933 6086 6129 6136 6160 6161 6169
6434 6491 6636 6659 6667 6750 6760 6781 6807 6858 6930 6953 6954 6999 7036 7110 7193 7196 7224 7409
7484 7642 7670 7707 7737 8096 8162 8170 8176 8216 8304 8316 8372 8575 8627 8641 8731 8768 8786 8795
8826 8930 8990 9100 9101 9147 9281 9295 9301 9535 9550 9602 9679 9771 9925 10083 10314 10393 10397
10496 10568 10589 10680 10712 10877 11046 11137 11143 11180 11375 11470 11487 11539 11610 11657
11687 11716 11823 12007 12106 12128 12199 12221 12266 12278 12339 12528 12547 12556 12592 12647
12651 12652 12672 12696 12884 12984 12985 12986 13072 13081 13169 13199 13456 13479 13582 13882
14371 14484 14494 14784 14854 14984 15021 15041 15060 15125 15169 15386 15547 15682 15684 15705
16014 16318 16322 16341 16390 16409 16540 16579 16602 16609 16677 16735 17116 17208 17266 17359
17426 17522 17667 17972 18004 18165 18193 18359 18360 18386 18437 18454 18458 18463 18467 18801
19001 19199 19336 19606 19618 20038 20353 20559 20562 20599 20617 20630 20679 20756 20810 20894
21001 21014 21036 21060 21149 21517 21838 21881 21967 22017 22047 22141 22143 22169 22293 22304
22319 22335 22346 22363 22381 22388 22396 22402 22409 22419 22441 22512 22602 22893 22979 23079
23096 23152 23279 23421 23475 24031 24298 24380 24504 24562 24634 24660 24756 24823 25037 25083
25112 25137 25159 25202 25235 25268 25351 25383 25412 25421 25799 26022 26060 26085 26721 26745
26876 27013 27037 27075 27101 27222 27252 27350 27358 27494 27603 27724 27783 27786 27793 27910
27975 28025 28268 28270 28284 28308 28312 28344 28356 28429 28524 28621 28783 28843 28895 28903
28918 29200 29292 29681 29682 29699 29724 29750 29830 29838 29978 30004 30163 30165 30187 30191
30192 30247 30248 30307 30326 30337 30378 30539 30548 30746 30844 31024 31050 31267 31338 31746
31757 31762 31777 31873 31915 31917 32002 32075 32240 32268 32447 32483 32546 32579 32638 32745
32864 33079 33100 33112 33177 33180 33225 33295 33369 33391 33405 33438 33467 33525 33545 33622
33790 33801 33974 34034 34126 34145 34280 34282 34312 34339 34340 34523 34600 34659 34753 34771
34932 34963 35010 35016 35020 35097 35101 35105 35168 35223 35386 35416 35422 35560 35651 35711
35734 35808 35856 35935 35980 36018 36045 36068 36141 36179 36188 36264 36384 36385 36387
119: 346 946 1022 4065
120: 1443 6972 9136 9655 9660 9661 10192 14378 15663 18250 21395 24694 24972 26308 27014 27199
27424 27672 28164 28209 28355 28463 30747 31364 31758 31919 31921 32104
121: 429 1465 1886 1887 2407 2487 2568 2720 2917 3008 3192 3862 4329 6535 6972 9136 9386 9656 9662
10192 11380 11995 11996 13826 14378 15663 15761 15763 17698 17825 18250 19197 19475 19995 22697
22988 23665 24694 24972 26308 27014 27178 27179 27180 27181 27182 27199 27424 27672 28164 28209
28355 28463 30747 31364 31758 31919 31921 32104
122: 428 1887 2032 2407 2487 2568 2720 2917 3862 3916 4329 6972 9136 9386 9656 9658 9662 10192
11380 13826 14378 15663 17698 17825 17877 18250 18983 19197 19475 19995 21601 22697 22988 23665
24694 24972 26308 27014 27199 27424 27672 28164 28209 28355 28463 30747 31364 31758 31919 31921
32104
123: 431 858 932 1098 1180 1252 1320 1443 1913 2104 2105 2113 2471 2565 3240 3437 3540 3866 4063
4064 4071 4378 4477 4478 5736 6972 9058 9136 9372 9655 9659 9660 9661 9662 10192 10230 10254 12564
14378 15663 15761 15763 16052 16124 16155 16163 17396 17698 17808 17823 18250 18586 18787 18923
19120 19443 19963 20380 21230 21339 21358 21395 22632 23014 23796 24694 24972 26308 26811 27014
27199 27424 27672 28164 28209 28355 28463 30747 31364 31758 31919 31921 32104 34851
124: 430 1252 1320 1443 1674 1913 1957 2104 2112 2331 2471 2678 3540 4063 4064 4071 4378 4477 4478
6972 9058 9136 9372 9657 9658 9659 9660 9661 9662 9732 10192 14378 15663 16163 17698 17823 18250
18787 19120 19443 19963 21339 22632 23014 23796 24694 24972 26308 27014 27199 27424 27672 28164
28209 28355 28463 30424 30747 31364 31758 31919 31921 32104
125: 1151 1928 2289 2296 2472 3878 4173 4707 5127 5167 5168 5749 6532 6881 6882 6883 7350 7507 7508
7509 7510 7511 7512 7513 7514 7515 7516 7517 7518 7519 7520 7521 7522 7523 7524 7525 7526 7527 7528
7529 7530 7531 7532 7533 7534 7535 7536 7537 7538 7539 7540 7541 7542 7543 7544 7545 7546 7547 7548
7549 7550 7551 7552 7553 7554 7555 7556 7557 7558 7559 7560 7561 7562 7563 7564 7565 7566 7567 7568
7569 7570 7571 7572 7573 7574 7575 7576 7780 8392 8393 8394 8395 8440 8441 8442 8443 8444 8445 8446
8447 8448 8449 8451 8452 8453 8454 8455 8456 8457 8458 8459 8460 8461 8462 8463 8464 8465 8466 8467
8468 8469 8470 8471 8472 8473 8474 8475 8476 8477 8478 8479 8480 8481 8701 8846 8884 9667 9668 9669
9670 9671 9672 10512 11122 11123 11124 11125 11393 11834 11835 11836 11900 12242 13254 13255
13256 13257 13264 13265 13266 13267 13268 13269 13270 13271 13272 13273 13274 13275 13276 13277
13278 13279 13280 13281 13282 13283 13284 13285 13286 13287 13288 13289 13290 13291 13292 13293
13294 13295 13296 13297 13298 13299 13300 13301 13302 13303 13304 13305 13306 13307 13308 13309
13310 13311 13312 13313 13364 13524 13739 13838 13904 13917 14015 14074 14115 14886 15088 15513
15514 15567 15568 15569 15570 15602 15603 15604 15605 15606 15607 15608 15609 15610 15611 15612
15613 15614 15615 15616 15617 15618 15619 15620 15621 15622 15623 15624 15861 15862 15863 15864
15865 15866 15867 15868 15869 15872 15873 16497 16498 16499 16500 16501 16502 16503 16504 16505
16506 16897 16898 16899 16900 16901 16902 16903 16904 16905 16906 16907 16908 16909 16910 16911
16912 16913 16914 16915 16916 16917 16918 16919 16920 16921 16922 16923 16924 16925 16926 16927
16928 16929 16930 16931 16932 16933 16934 16935 16936 16937 16938 16939 16940 16941 16942 16943
16944 16945 16946 16947 16948 16949 16950 16951 16952 16953 16954 16955 16956 16957 16958 16959
16960 16961 16962 16963 16964 16965 16966 16967 16968 16969 16970 16971 16972 16973 16974 16975
16976 16977 16978 16979 16980 16981 16982 17617 17618 17619 17620 17621 17622 17623 17624 17625
17626 17627 17628 17629 17630 17631 17632 17633 17634 17635 17636 18028 18029 18030 18031 18032
18033 18035 18036 18037 18038 18039 18040 18041 18042 18043 18044 18045 18046 18047 18048 18049
18050 18051 18055 18056 18057 18058 18059 18060 18061 18062 18063 18064 18065 18066 18067 18068
18069 18597 19181 19231 19483 19528 19529 19531 19532 19534 19537 19540 19541 19542 19543 19544
19545 19546 19547 19548 19549 19550 19551 19552 19553 19554 19555 19556 19557 19558 19559 19560
19561 19562 19564 19565 19566 19567 19571 19572 19573 19847 20537 21056 21359 21844 21845 21847
21913 22716 22982 22983 23222 23223 23224 23225 23226 23670 23882 24169 25048 25070 25700 25868
25902 25903 25916 25917 25918 26072 26092 26093 26094 26095 26096 26097 26098 26099 26100 26101
26102 26124 26125 26126 26127 26128 26129 26130 26131 26132 26133 26134 26135 26136 26137 26138
26139 26140 26141 26142 26143 26144 26145 26146 26147 26148 26149 26150 26151 26152 26153 26154
26155 26156 26157 26158 26159 26160 26161 26162 26163 26164 26165 26166 26167 26179 26180 26181
26182 26183 26267 26382 26412 26448 26449 26450 26451 26452 26453 26454 26455 26456 26457 26458
26459 26460 26461 26462 26463 26464 26465 26466 26467 26468 26469 26470 26471 26472 26473 26474
26475 26476 26477 26478 26479 27459 28656 28657 28658 28659 28660 28661 28662 28663 28664 28665
28666 28667 28668 28669 28670 28671 28674 29039 29040 29041 29042 29043 29044 29045 29046 29047
29048 29049 29050 29051 29052 29053 29054 29055 29056 29057 29058 29059 29060 29061 29062 29063
29064 29065 29066 29067 29068 29069 29070 29071 29072 29073 29074 29075 29076 29077 29078 29081
29684 30533 30585 30586 30587 30588 30589 30590 30591 30592 30593 30594 30595 30597 31027 31213
31322 31323 31324 31325 31326 31327 31328 31329 31330 31331 31332 31333 31334 31335 31336 31437
31607 31608 31609 31610 31611 31612 31613 31615 31616 31618 31619 31621 31622 31623 31624 31625
31626 31627 31628 31629 31630 31631 31632 31633 31634 31635 31636 31637 31638 31639 31640 31641
31642 31643 31644 31645 31646 31647 31648 31649 31650 32802 33270 33274 33710 33711 33712 33713
33714 33715 33716 33717 33718 33719 33720 33721 33722 33723 33724 33725 33726 33727 33728 33729
33730 33731 33732 33733 33734 33735 33736 33737 33738 33739 33740 33741 33742 33743 33744 33745
33746 33747 33748 33749 33750 33751 33752 33753 33754 33755 33756 33757 34465 35305 35306 35308
35309 35310 35311 35312 35313 35314 35315 35316 35317 35318 35319 35320 35321 35322 35323 35324
35325 35326 35327 35328 35329 35330 35331 35332 35333 35334 35335 35336 35337 35338 35339 35340
35341 35342 35343 35344 35345 35346 35347 35349 35351 35352 35353 35354 35355 35356 35357 35358
35538 35539 35540
126: 1224 1477 1625 1706 3735 3747 6929 10188 11224 11424 11435 11436 11437 12417 13914 13932
14435 15084 15110 15288 15691 16007 16185 17694 18190 19846 20067 21569 21703 22576 24057 26431
26432 26925 26948 28208 28224 28264 28328 31317 31341 31412 31421 32587 32919
127: 2203 4147 6030 9436 11226 12373 16170 20153 21556 25988 35530
128: 2203 4147 6030 9436 11226 12373 16170 20153 21556 25988 35530
129: 650 658 703 1217 1411 1489 2529 2598 3158 3908 4100 5184 6399 6433 6448 9096 9488 9711 10261
11374 12415 12426 13366 13988 14593 14906 15712 16046 17648 17651 17783 18574 18877 19004 19281
19361 19402 20033 20044 21475 22577 24715 26523 29762 31751 31932 32577 33029
130: 650 658 703 1217 1411 1489 2529 2598 3158 3908 4100 5184 6399 6433 6448 9096 9488 9711 10261
11374 12415 12426 13366 13988 14593 14906 15712 16046 17648 17651 17783 18574 18877 19004 19281
19361 19402 20033 20044 21475 22577 24715 26523 29762 31751 31932 32577 33029
131: 789 960 997 1172 1209 1324 1422 1526 1542 2237 2497 2519 3922 3972 4178 4179 5725 6459 6855
9428 10237 10511 11381 12423 12475 14053 14118 17652 17670 17675 19291 19293 19446 19454 19775
20108 22653 22886 23215 23216 25087 33816 33882 36019
132: 789 960 997 1172 1209 1324 1422 1526 1542 2237 2497 2519 3922 3972 4178 4179 5725 6459 6855
9428 10237 10511 11381 12423 12475 14053 14118 17652 17670 17675 19291 19293 19446 19454 19775
20108 22653 22886 23215 23216 25087 33816 33882 36019
133: 789 960 997 1172 1209 1324 1422 1526 1542 1730 1795 1796 1797 1901 2878 3311 4084 6459 6855
9428 10213 10214 10215 10216 10237 10511 11381 12423 12475 14053 14118 15675 17652 19291 19446
19454 19775 20108 22653 22886 22899 22971 23215 23216 36019
134: 789 960 997 1172 1209 1324 1422 1526 1542 1730 1795 1796 1797 1901 2878 3311 4084 6459 6855
9428 10213 10214 10215 10216 10237 10511 11381 12423 12475 14053 14118 15675 17652 19291 19446
19454 19775 20108 22653 22886 22899 22971 23215 23216 36019
135: 1055 1379 1560 2050 2696 2903 4412 4420 4555 4606 4661 4728 4780 4870 4906 4947 4997 5225 5262
5326 5367 5390 5452 5535 5605 5958 5987 6075 6128 6213 6250 6283 6381 6605 6721 6821 7031 7068 7112
7174 7250 7312 7450 7471 7591 7637 7665 7698 7732 7982 8104 8167 8177 8253 8300 8345 8434 8530 8668
8791 8908 8918 8919 8920 9009 9158 9214 9273 9525 9591 9798 9842 9857 9921 9989 10051 10089 10323
10391 10499 10559 10574 10686 10723 10746 10774 10802 10838 10870 10920 10936 10951 10979 11001
11024 11065 11078 11109 11148 11360 11465 11516 11555 11655 11686 11744 11772 11797 11864 11883
11933 12037 12064 12147 12188 12252 12324 12476 12527 12588 12626 12703 12741 12771 12816 12827
12908 13039 13102 13166 13503 13579 13638 13751 13951 14140 14197 14271 14471 14525 14591 14621
14691 14748 14796 14843 14932 15044 15085 15147 15241 15332 15424 15515 15529 15755 15859 15904
15984 16098 16197 16241 16266 16386 16397 16537 16642 16651 16691 16731 16831 17042 17170 17233
17361 17371 17403 17566 17578 17736 17927 17993 18079 18127 18152 18221 18300 18426 18456 18500
18632 18683 18697 18776 18875 18912 19157 19642 19749 19834 20206 20223 20247 20285 20597 20712
20877 20967 21011 21121 21236 21264 21630 21726 21783 21849 21895 21970 22092 22103 22184 22229
22285 22324 22414 22465 22513 22551 22741 23019 23074 23076 23147 23273 23316 23378 23466 23565
23624 23701 23731 23785 23840 23873 23969 24020 24108 24147 24312 24320 24384 24483 24526 24583
24641 24771 24813 24835 24870 24892 25000 25030 25068 25170 25347 25355 25413 25521 25573 25595
25610 25640 25693 25697 25752 25795 25913 25958 26223 26264 26356 26398 26403 26497 26563 26693
26734 26768 26789 26883 27285 27313 27334 27371 27389 27486 27682 27721 27857 27878 28050 28111
28290 28485 28544 28574 28627 28677 28745 28763 28792 28870 28977 29120 29191 29192 29262 29355
29420 29440 29463 29526 29549 29583 29661 29772 29792 29833 29871 29917 29955 29993 30081 30113
30166 30229 30272 30351 30403 30447 30479 30498 30613 30663 30671 30800 30858 30912 30936 31003
31032 31133 31135 31211 31233 31517 31562 31666 31803 31996 32172 32213 32274 32440 32498 32541
32693 32729 32739 32894 33011 33025 33095 33167 33318 33336 33464 33524 33594 33662 33681 33708
33785 33862 34017 34079 34174 34232 34290 34335 34416 34482 34556 34604 34686 34715 34740 34762
34800 34893 34909 34917 34944 35003 35027 35087 35153 35219 35241 35269 35409 35445 35508 35578
35641 35764 35888 35966 36050 36063 36119 36225 36283 36410
136: 1055 1379 1560 2050 2696 2903 4412 4420 4555 4606 4661 4728 4780 4870 4906 4947 4997 5225 5262
5326 5367 5390 5452 5535 5605 5958 5987 6075 6128 6213 6250 6283 6381 6605 6721 6821 7031 7068 7112
7174 7250 7312 7450 7471 7591 7637 7665 7698 7732 7982 8104 8167 8177 8253 8300 8345 8434 8530 8668
8791 8908 8918 8919 8920 9009 9158 9214 9273 9525 9591 9798 9842 9857 9921 9989 10051 10089 10323
10391 10499 10559 10574 10686 10723 10746 10774 10802 10838 10870 10920 10936 10951 10979 11001
11024 11065 11078 11109 11148 11360 11465 11516 11555 11655 11686 11744 11772 11797 11864 11883
11933 12037 12064 12147 12188 12252 12324 12476 12527 12588 12626 12703 12741 12771 12816 12827
12908 13039 13102 13166 13503 13579 13638 13751 13951 14140 14197 14271 14471 14525 14591 14621
14691 14748 14796 14843 14932 15044 15085 15147 15241 15332 15424 15515 15529 15755 15859 15904
15984 16098 16197 16241 16266 16386 16397 16537 16642 16651 16691 16731 16831 17042 17170 17233
17361 17371 17403 17566 17578 17736 17927 17993 18079 18127 18152 18221 18300 18426 18456 18500
18632 18683 18697 18776 18875 18912 19157 19642 19749 19834 20206 20223 20247 20285 20597 20712
20877 20967 21011 21121 21236 21264 21630 21726 21783 21849 21895 21970 22092 22103 22184 22229
22285 22324 22414 22465 22513 22551 22741 23019 23074 23076 23147 23273 23316 23378 23466 23565
23624 23701 23731 23785 23840 23873 23969 24020 24108 24147 24312 24320 24384 24483 24526 24583
24641 24771 24813 24835 24870 24892 25000 25030 25068 25170 25347 25355 25413 25521 25573 25595
25610 25640 25693 25697 25752 25795 25913 25958 26223 26264 26356 26398 26403 26497 26563 26693
26734 26768 26789 26883 27285 27313 27334 27371 27389 27486 27682 27721 27857 27878 28050 28111
28290 28485 28544 28574 28627 28677 28745 28763 28792 28870 28977 29120 29191 29192 29262 29355
29420 29440 29463 29526 29549 29583 29661 29772 29792 29833 29871 29917 29955 29993 30081 30113
30166 30229 30272 30351 30403 30447 30479 30498 30613 30663 30671 30800 30858 30912 30936 31003
31032 31133 31135 31211 31233 31517 31562 31666 31803 31996 32172 32213 32274 32440 32498 32541
32693 32729 32739 32894 33011 33025 33095 33167 33318 33336 33464 33524 33594 33662 33681 33708
33785 33862 34017 34079 34174 34232 34290 34335 34416 34482 34556 34604 34686 34715 34740 34762
34800 34893 34909 34917 34944 35003 35027 35087 35153 35219 35241 35269 35409 35445 35508 35578
35641 35764 35888 35966 36050 36063 36119 36225 36283 36410
137: 1055 1379 1560 1800 2050 2696 2903 4412 4420 4555 4606 4661 4728 4780 4870 4906 4947 4997 5225
5262 5326 5367 5390 5452 5535 5605 5958 5987 6075 6128 6213 6250 6283 6381 6605 6721 6821 7031 7068
7112 7174 7250 7312 7450 7471 7591 7637 7665 7698 7732 7982 8104 8167 8177 8253 8300 8345 8434 8530
8668 8791 8908 8918 8919 8920 9009 9158 9214 9273 9525 9591 9798 9842 9857 9921 9989 10051 10089
10323 10391 10499 10559 10574 10686 10723 10746 10774 10802 10838 10870 10920 10936 10951 10979
11001 11024 11065 11078 11109 11148 11360 11465 11516 11555 11655 11686 11744 11772 11797 11864
11883 11933 12037 12064 12147 12188 12252 12324 12476 12527 12588 12626 12703 12741 12771 12816
12827 12908 13039 13102 13166 13503 13579 13638 13751 13951 14140 14197 14271 14471 14525 14591
14621 14691 14748 14796 14843 14932 15044 15085 15147 15241 15332 15424 15515 15529 15755 15859
15904 15984 16098 16197 16241 16266 16386 16397 16537 16642 16651 16691 16731 16831 17042 17170
17233 17361 17371 17403 17566 17578 17736 17927 17993 18079 18127 18152 18221 18300 18426 18456
18500 18632 18683 18697 18776 18875 18912 19157 19642 19749 19834 20206 20223 20247 20285 20597
20712 20877 20967 21011 21121 21236 21264 21630 21726 21783 21849 21895 21970 22092 22103 22184
22229 22285 22324 22414 22465 22513 22551 22741 23004 23019 23074 23076 23147 23273 23316 23378
23466 23565 23624 23701 23731 23785 23840 23873 23969 24020 24108 24147 24312 24320 24384 24483
24526 24583 24641 24771 24813 24835 24870 24892 25000 25030 25068 25170 25347 25355 25413 25521
25573 25595 25610 25640 25693 25697 25752 25795 25913 25958 26223 26264 26356 26398 26403 26497
26563 26693 26734 26768 26789 26883 27285 27313 27334 27371 27389 27486 27682 27721 27857 27878
28050 28111 28290 28485 28544 28574 28627 28677 28745 28763 28778 28792 28870 28977 29120 29191
29192 29262 29355 29420 29440 29463 29526 29549 29583 29661 29772 29792 29833 29871 29917 29955
29993 30081 30113 30166 30229 30272 30351 30403 30447 30479 30498 30613 30663 30671 30800 30858
30912 30936 31003 31032 31133 31135 31211 31233 31517 31562 31666 31803 31996 32172 32213 32274
32440 32498 32541 32693 32729 32739 32894 33011 33025 33095 33167 33318 33336 33464 33524 33594
33662 33681 33708 33785 33862 34017 34079 34174 34232 34290 34335 34416 34482 34556 34604 34686
34715 34740 34762 34800 34893 34909 34917 34944 35003 35027 35087 35153 35219 35241 35269 35409
35445 35508 35578 35641 35764 35888 35966 36050 36063 36119 36225 36283 36410
138: 998 1007 1143 1433 1740 2067 3449 4211 5733 6872 9416 9480 13985 14018 16446 16777 17805 18966
19271 19375 19434 19777 20019 20063 20955 21488 22593 22692 22732 22969 23003 23884 34744
139: 998 1007 1143 1433 1740 2067 3449 4211 5733 6872 9416 9480 13985 14018 16446 16777 17805 18966
19271 19375 19434 19777 20019 20063 20955 21488 22593 22692 22732 22969 23003 23884 34744
140: 998 1007 1143 1433 1740 2067 3449 4211 5733 6872 9416 9480 13985 14018 16446 16777 17805 18966
19271 19375 19434 19777 20019 20063 20955 21488 22593 22692 22732 22969 23003 23884 34744
141: 998 1007 1143 1433 1740 2067 3449 4211 5733 6872 9416 9480 13985 14018 16446 16777 17805 18966
19271 19375 19434 19777 20019 20063 20955 21488 22593 22692 22732 22969 23003 23884 34744
142: 936 1146 1213 2385 2717 2778 2790 2908 2984 4143 5123 5124 5740 5850 6055 6058 7940 8039 8894
10037 10038 10039 10040 10041 10042 10043 10044 10045 10046 10535 11034 14153 17743 18924 19322
19364 20003 21086 21324 21363 22610 24806 24857 26027 36320 36338 36346
143: 656 667 668 787 835 890 965 1117 1281 1400 1438 1638 1682 1735 1742 1831 1835 1923 2097 2147
2193 2211 2245 2276 2285 2347 2358 2372 2381 2401 2702 2725 2756 2757 2785 2910 2912 2918 2928 2996
3231 3234 3277 3379 3478 3493 3596 3670 3726 3823 3837 3901 3918 3963 4008 4053 4086 4088 4135 4139
4152 4165 4166 4213 4234 4544 4545 4587 4588 4645 4649 4751 4769 4781 4782 4810 4816 4828 4829 4830
4920 4973 5027 5045 5062 5091 5107 5198 5236 5279 5322 5342 5410 5455 5484 5516 5521 5529 5537 5550
5562 5569 5590 5612 5628 5644 5775 5803 5804 5813 5945 5960 5966 6001 6078 6113 6117 6119 6152 6157
6170 6193 6194 6195 6199 6208 6276 6290 6327 6345 6352 6358 6393 6455 6473 6583 6611 6669 6674 6678
6685 6687 6740 6749 6765 6785 6800 6862 6876 6889 6899 6912 6920 6958 6965 7002 7052 7079 7106 7197
7203 7235 7273 7420 7430 7434 7437 7440 7445 7465 7593 7638 7667 7682 7692 7734 7850 7987 7990 8006
8058 8062 8164 8165 8232 8251 8274 8298 8301 8400 8401 8402 8416 8520 8546 8550 8560 8569 8570 8581
8602 8625 8663 8667 8676 8736 8753 8757 8770 8774 8839 8866 8879 8956 9000 9017 9018 9067 9150 9164
9173 9220 9231 9245 9257 9267 9268 9286 9287 9299 9300 9339 9406 9411 9528 9542 9560 9562 9584 9594
9620 9645 9676 9753 9791 9809 9841 9868 10015 10057 10065 10088 10103 10108 10199 10262 10282
10293 10316 10407 10419 10443 10457 10460 10478 10487 10503 10580 10606 10631 10642 10716 10756
10771 10874 10890 10898 10940 10980 10981 10992 11007 11054 11138 11182 11250 11304 11311 11364
11419 11467 11514 11529 11533 11585 11656 11698 11753 11787 11887 11957 11960 12005 12021 12023
12026 12030 12051 12052 12083 12181 12230 12273 12315 12334 12341 12358 12368 12379 12517 12545
12551 12589 12644 12667 12710 12746 12756 12767 12770 12806 12823 12931 12948 12981 13011 13014
13023 13026 13046 13087 13092 13164 13165 13182 13438 13448 13471 13490 13508 13519 13603 13649
13668 13669 13686 13691 13699 13730 13817 13853 13912 13978 14145 14177 14179 14184 14201 14202
14203 14219 14258 14283 14300 14363 14365 14377 14453 14488 14542 14558 14580 14617 14668 14674
14686 14710 14739 14747 14837 14852 14908 14931 14963 14972 14978 15027 15049 15056 15061 15112
15161 15177 15208 15226 15265 15300 15354 15362 15380 15524 15526 15542 15703 15877 15905 15929
15947 15996 15997 15998 16006 16032 16049 16060 16065 16091 16153 16164 16179 16250 16251 16324
16356 16366 16403 16404 16510 16536 16547 16572 16600 16607 16640 16671 16682 16695 16746 16747
16758 16844 17017 17048 17076 17124 17140 17183 17192 17214 17244 17253 17365 17377 17414 17424
17427 17460 17478 17540 17679 17764 17778 17836 17837 17838 17863 17898 17924 17933 17996 18015
18072 18121 18189 18209 18210 18213 18306 18340 18344 18362 18376 18377 18403 18419 18428 18430
18449 18479 18483 18528 18606 18607 18614 18658 18703 18944 18977 18978 18988 18998 19002 19003
19049 19058 19076 19119 19174 19213 19248 19337 19338 19349 19406 19467 19615 19624 19641 19663
19715 19716 19752 19791 19792 19809 19818 19941 19942 19946 20017 20035 20075 20208 20217 20220
20297 20368 20376 20400 20441 20443 20561 20581 20622 20627 20640 20683 20710 20730 20737 20744
20745 20746 20809 20822 20841 20844 20889 20890 20897 20901 20904 20905 20999 21005 21028 21038
21097 21154 21295 21403 21491 21518 21519 21520 21535 21538 21539 21575 21652 21663 21681 21750
21888 21969 22018 22028 22030 22065 22118 22124 22142 22163 22211 22219 22266 22283 22333 22380
22387 22429 22431 22458 22484 22496 22506 22560 22567 22604 22605 22668 22669 22670 22690 22704
22775 22855 22894 22943 22954 22963 23107 23188 23308 23352 23372 23381 23382 23405 23416 23464
23465 23505 23514 23559 23567 23586 23591 23600 23606 23616 23634 23639 23766 23769 23820 23938
23962 24021 24023 24088 24346 24403 24446 24496 24534 24570 24608 24652 24765 24787 24833 24894
24895 24939 24965 25032 25051 25129 25181 25186 25228 25233 25252 25255 25272 25277 25279 25304
25348 25370 25397 25540 25569 25574 25596 25606 25726 25797 25857 25858 25954 26026 26199 26200
26225 26230 26253 26283 26299 26337 26345 26538 26572 26662 26743 26764 26797 26854 26892 26981
27020 27076 27090 27126 27225 27238 27294 27321 27345 27347 27386 27406 27407 27491 27512 27533
27611 27636 27664 27668 27701 27708 27753 27808 27847 27931 27946 27956 27971 27977 27993 28027
28064 28102 28178 28231 28316 28319 28402 28425 28489 28501 28539 28698 28741 28756 28782 28821
28829 28868 28883 28888 28890 28907 28936 29003 29009 29109 29140 29179 29214 29251 29263 29267
29333 29365 29371 29419 29488 29541 29568 29578 29600 29627 29732 29824 29827 29900 29946 29951
29969 30021 30092 30098 30120 30131 30164 30170 30177 30190 30207 30295 30299 30300 30320 30322
30354 30409 30421 30439 30541 30543 30558 30573 30607 30621 30635 30641 30645 30699 30701 30731
30732 30739 30754 30794 30821 30874 31069 31117 31159 31226 31268 31395 31486 31507 31571 31681
31732 31736 31761 31783 31851 31882 31886 31926 31934 31950 31994 32011 32014 32039 32053 32098
32100 32102 32130 32259 32340 32351 32362 32424 32478 32497 32527 32543 32559 32560 32602 32620
32661 32689 32694 32751 32764 32788 33004 33061 33093 33107 33115 33118 33121 33124 33149 33176
33184 33188 33210 33217 33218 33220 33303 33348 33355 33387 33393 33410 33455 33459 33463 33475
33539 33596 33602 33636 33666 33679 33787 33994 34004 34037 34077 34107 34112 34185 34194 34250
34262 34264 34298 34299 34338 34349 34354 34359 34401 34473 34488 34527 34623 34661 34722 34730
34763 34803 34819 34840 34877 34954 34980 35029 35080 35098 35104 35246 35426 35433 35454 35460
35534 35612 35664 35705 35731 35744 35751 35759 35793 35796 35802 35840 35851 35867 35879 35889
35920 35931 35943 35952 35964 35969 35987 35988 35989 36055 36120 36130 36143 36146 36154 36157
36162 36244 36380 36382 36416 36427
144: 321 467 2486 2567 4431 4518 4563 4590 4660 4684 4686 4727 4786 4809 4862 4864 5005 5019 5036
5055 5141 5201 5266 5284 5313 5324 5355 5371 5387 5479 5538 5551 5573 5609 5908 6074 6079 6132 6156
6173 6204 6233 6341 6360 6361 6497 6558 6568 6592 6620 6689 6733 6742 6747 6806 6874 6875 6916 7019
7069 7123 7128 7157 7177 7239 7457 7473 7636 7664 7680 7684 7731 8166 8224 8235 8299 8419 8506 8609
8637 8730 8771 8797 8869 9241 9325 9524 9529 9610 9759 9814 9830 9849 9912 9931 9972 9992 9999
10052 10334 10363 10467 10667 10677 10700 10738 10782 10813 10850 10885 10894 10975 11031 11154
11460 11528 11569 11636 11704 11752 11766 11886 11930 11934 12016 12050 12201 12210 12211 12222
12323 12331 12352 12471 12530 12555 12586 12639 12691 12759 12763 12843 12916 13061 13076 13083
13145 13176 13195 13211 13429 13557 13625 13759 13967 14169 14281 14304 14359 14360 14402 14481
14512 14564 14634 14709 14715 14726 14826 14855 14864 14957 14979 15057 15207 15228 15342 15370
15517 15914 15936 15969 16069 16293 16441 16575 16593 16692 16718 16823 16851 16861 17036 17102
17228 17337 17351 17418 17421 17516 17582 17583 17727 17728 17912 17931 17966 17987 17988 18082
18106 18125 18309 18358 18363 18391 18476 18484 18707 18732 18843 18885 19620 19666 19703 19759
20284 20560 20573 20596 20602 20626 20696 20883 20911 20966 21004 21160 21210 21671 21753 21802
21987 22121 22145 22177 22180 22238 22278 22303 22326 22332 22341 22382 22416 22463 22504 22526
23086 23138 23263 23434 23481 23488 23520 23536 23588 23631 23760 24003 24041 24091 24304 24323
24392 24433 24490 24523 24549 24559 24647 24717 24761 24796 24797 24819 24827 24828 24829 24879
24915 25003 25007 25029 25033 25176 25231 25346 25368 25372 25396 25398 25492 25520 25747 25775
25827 25907 26249 26301 26359 26396 26571 26582 26738 26779 26785 26830 27074 27273 27355 27368
27369 27382 27398 27471 27495 27553 27621 27676 27751 27769 27772 27963 27968 28061 28092 28483
28502 28538 28555 28601 28602 28623 28696 28738 28806 28882 28901 28947 28994 29118 29119 29177
29272 29298 29401 29431 29456 29464 29547 29548 29582 29609 29637 29645 29745 29813 29835 29883
29963 29980 29989 30054 30068 30155 30195 30256 30292 30332 30643 30876 30991 31019 31049 31161
31530 31809 31812 31840 31841 31842 31843 32072 32174 32238 32289 32377 32433 32443 32458 32501
32540 32564 32565 32567 32568 32621 32631 32639 32646 32673 32706 32872 32967 32999 33082 33185
33195 33293 33332 33381 33417 33456 33537 33540 33572 33635 33782 33833 34086 34104 34109 34131
34169 34247 34258 34287 34304 34308 34322 34423 34476 34512 34544 34615 34677 34685 34714 34716
34765 34781 34794 34796 34813 34826 34881 34942 34953 34979 35002 35046 35100 35113 35121 35136
35142 35182 35395 35400 35427 35489 35496 35525 35526 35527 35546 35552 35572 35694 35829 35849
35955 35978 36111 36129 36187 36224 36289 36367 36383
145: 321 467 2486 2567 4431 4518 4563 4590 4660 4684 4686 4727 4786 4809 4862 4864 5005 5019 5036
5055 5141 5201 5266 5284 5313 5324 5355 5371 5387 5479 5538 5551 5573 5609 5908 6074 6079 6132 6156
6173 6204 6233 6341 6360 6361 6497 6558 6568 6592 6620 6689 6733 6742 6747 6806 6874 6875 6916 7019
7069 7123 7128 7157 7177 7239 7457 7473 7636 7664 7680 7684 7731 8166 8224 8235 8299 8419 8506 8609
8637 8730 8771 8797 8869 9241 9325 9524 9529 9610 9759 9814 9830 9849 9912 9931 9972 9992 9999
10052 10334 10363 10467 10667 10677 10700 10738 10782 10813 10850 10885 10894 10975 11031 11154
11460 11528 11569 11636 11704 11752 11766 11886 11930 11934 12016 12050 12201 12210 12211 12222
12323 12331 12352 12471 12530 12555 12586 12639 12691 12759 12763 12843 12916 13061 13076 13083
13145 13176 13195 13211 13429 13557 13625 13759 13967 14169 14281 14304 14359 14360 14402 14481
14512 14564 14634 14709 14715 14726 14826 14855 14864 14957 14979 15057 15207 15228 15342 15370
15517 15914 15936 15969 16069 16293 16441 16575 16593 16692 16718 16823 16851 16861 17036 17102
17228 17337 17351 17418 17421 17516 17582 17583 17727 17728 17912 17931 17966 17987 17988 18082
18106 18125 18309 18358 18363 18391 18476 18484 18707 18732 18843 18885 19620 19666 19703 19759
20284 20560 20573 20596 20602 20626 20696 20883 20911 20966 21004 21160 21210 21671 21753 21802
21987 22121 22145 22177 22180 22238 22278 22303 22326 22332 22341 22382 22416 22463 22504 22526
23086 23138 23263 23434 23481 23488 23520 23536 23588 23631 23760 24003 24041 24091 24304 24323
24392 24433 24490 24523 24549 24559 24647 24717 24761 24796 24797 24819 24827 24828 24829 24879
24915 25003 25007 25029 25033 25176 25231 25346 25368 25372 25396 25398 25492 25520 25747 25775
25827 25907 26249 26301 26359 26396 26571 26582 26738 26779 26785 26830 27074 27273 27355 27368
27369 27382 27398 27471 27495 27553 27621 27676 27751 27769 27772 27963 27968 28061 28092 28483
28502 28538 28555 28601 28602 28623 28696 28738 28806 28882 28901 28947 28994 29118 29119 29177
29272 29298 29401 29431 29456 29464 29547 29548 29582 29609 29637 29645 29745 29813 29835 29883
29963 29980 29989 30054 30068 30155 30195 30256 30292 30332 30643 30876 30991 31019 31049 31161
31530 31809 31812 31840 31841 31842 31843 32072 32174 32238 32289 32377 32433 32443 32458 32501
32540 32564 32565 32567 32568 32621 32631 32639 32646 32673 32706 32872 32967 32999 33082 33185
33195 33293 33332 33381 33417 33456 33537 33540 33572 33635 33782 33833 34086 34104 34109 34131
34169 34247 34258 34287 34304 34308 34322 34423 34476 34512 34544 34615 34677 34685 34714 34716
34765 34781 34794 34796 34813 34826 34881 34942 34953 34979 35002 35046 35100 35113 35121 35136
35142 35182 35395 35400 35427 35489 35496 35525 35526 35527 35546 35552 35572 35694 35829 35849
35955 35978 36111 36129 36187 36224 36289 36367 36383
146: 1197 1254 1290 1688 1787 1810 1865 2315 2419 2566 2582 2617 2856 2909 3043 4539 4724 4935 4965
5214 5362 5404 5623 5680 5910 5937 6357 6547 6577 6672 6951 7041 7089 7133 7236 7424 7481 8100 8263
8337 8514 8580 8671 8838 8997 9167 9202 9271 9298 9381 9590 9713 9903 9996 10107 10211 10351 10595
10694 10922 10966 11064 11168 11278 11338 11604 11712 11858 11939 12102 12294 12671 12773 12848
12901 12920 13060 13155 13478 13548 13622 13832 14436 14573 14694 14926 15126 15174 15545 15681
15854 15909 16242 16355 16411 16462 16543 16811 17139 17165 17227 17362 17568 17760 18091 18115
18184 18227 18563 18817 18867 19104 19182 19466 19651 19707 19765 20027 20748 21074 21289 21408
21618 21729 21850 21851 21928 21994 22026 22221 22315 22523 22793 23085 23400 23563 23704 23725
23964 24000 24089 24584 24670 24671 24672 24808 24880 24950 24996 25113 25180 25244 25295 25514
25571 25768 25846 25926 26076 26118 26224 26291 26375 26402 26415 26502 26599 26727 26829 27039
27067 27087 27226 27339 27521 27797 28041 28084 28192 28279 28351 28403 28496 28651 28722 28991
29029 29036 29126 29184 29255 29358 29554 29587 29635 29702 29818 30010 30060 30222 30554 30688
30877 30988 31044 31402 31493 31773 31864 31894 32032 32142 32177 32218 32277 32339 32403 32467
32665 32752 32879 33050 33126 33331 33469 33554 33624 33684 34172 34225 34529 34938 35048 35141
35232 35277 35381 35473 35505 35585 35674 35743 35776 35884 35959 36051 36064 36099 36183 36321
36418
147: 3965 4571 4752 4832 4986 5011 5038 5043 5095 5097 5255 5305 5540 5560 5944 5959 6067 6112 6175
6225 6240 6272 6305 6710 6744 6769 7051 7227 7247 7264 7368 7414 7635 7693 8151 8379 8420 8504 8672
8755 8921 9213 9230 9252 9269 9516 10315 10341 10353 10367 10437 10462 10471 10500 10605 10630
10637 10658 10683 10789 10846 10999 11029 11111 11519 11592 11627 11664 11742 11789 12008 12033
12094 12138 12143 12154 12162 12168 12172 12186 12192 12198 12231 12272 12550 12630 12709 12739
13010 13030 13073 13084 13094 13109 13133 13480 13507 13520 14294 14500 14527 14544 14612 14720
14741 14745 14750 14771 14865 14874 14915 14945 14950 14951 14982 15043 15059 15087 15101 15167
15345 15377 15469 15556 15736 15880 15934 15946 16096 16104 16247 16268 16544 16722 16859 17044
17906 17911 17917 17950 17954 17963 17974 17979 17981 18133 18134 18140 18154 18226 18292 18297
18331 18395 18457 18501 18504 18680 18757 18768 19671 19742 20255 20567 20580 20582 20616 20697
20698 20711 20733 20766 20781 20959 21002 21012 21156 21162 21267 21773 21782 21857 21892 21899
21958 22062 22108 22161 22173 22274 22421 22424 22432 23087 23150 23189 23196 23203 23256 23282
23373 23506 23533 23549 23558 23585 23635 23763 23825 23846 23939 23957 23959 23978 24039 24130
24336 24382 24435 24517 24531 24595 24840 24847 24946 25017 25128 25143 25164 25188 25195 25254
25283 25360 25400 25504 25547 25582 25583 25737 25757 25963 26222 26587 26594 26618 26681 26682
26692 26841 26843 27190 27329 27378 27395 27498 27499 27518 27725 27863 27885 28069 28074 28114
28131 28593 28618 28619 28718 28790 28949 29000 29254 29341 29486 29504 29614 29776 29782 29783
29795 29796 29800 29801 29947 30070 30160 30194 30201 30259 30271 30333 30419 30458 30460 30493
30523 30528 30681 30783 30784 30797 31015 31057 31149 31473 31487 31501 31503 31787 31793 31801
31804 31806 31835 31995 32073 32171 32333 32336 32355 32604 32611 32696 32957 32976 33000 33031
33068 33078 33083 33094 33122 33143 33161 33168 33470 33471 33535 33630 33631 33650 33652 33781
34157 34315 34610 34621 34670 34793 34994 35131 35244 35465 35469 35550 35566 35798 35823 35852
35870 35913 35924 35934 35970 35977 36094 36095 36147
148: 401 1323 1624 2267 2639 2690 2959 2965 2999 3003 3021 3052 3259 3472 3642 3683 3684 3744 3745
3770 3829 3911 3943 4042 4043 4105 4122 4236 4277 4317 4474 4745 4856 4885 4886 4899 4900 5131 5132
5177 5289 5515 5732 6148 6395 6443 6516 6517 6518 6540 6541 6550 6837 6851 6880 6897 7150 7353 7354
7356 7359 7360 7361 7362 7363 7365 7366 7367 7372 7857 8124 8190 8374 8413 8729 8892 8934 8935 8936
9065 9073 9143 9262 9400 9587 9937 10054 10286 10456 10778 10779 10818 10819 10820 10821 10934
10935 11543 11544 11731 11732 11792 11905 11906 11907 11908 11909 11910 11911 11912 11913 11967
11968 11969 11970 11971 11972 11973 11974 11975 11976 11977 11978 11979 11980 11981 11982 11983
11984 11987 11988 11989 11990 11991 11992 11993 11994 12236 12237 12238 12239 12240 12259 12385
12386 12388 12465 12600 12601 12790 12961 13001 13035 13315 13525 13526 13527 13528 13529 13530
13755 14122 14123 14227 14312 14313 14314 14315 14316 14317 14318 14319 14320 14321 14322 14323
14324 14325 14326 14431 14459 14460 14461 14462 14463 14517 14644 14645 14646 14663 14690 14834
15074 15190 15191 15279 15487 15488 15572 15573 15574 15575 15576 15577 15578 15579 15580 15581
15582 15583 15600 15692 15742 15743 15744 15745 15746 15747 15748 15783 15784 15785 15786 15787
15788 15789 15790 15791 16005 16034 16112 16113 16114 16115 16116 16146 16294 16493 16494 16699
16703 16704 16705 16785 16786 16787 16788 16789 16795 16796 17040 17156 17447 17448 17449 17450
17451 17459 17543 17544 17545 17546 17547 17804 17826 18231 18232 18233 18234 18268 18269 18270
18271 18272 18350 18351 18475 18789 18911 19009 19082 19089 19154 19286 19323 19478 19711 19763
20004 20051 20156 20157 20158 20159 20160 20320 20321 20322 20323 20324 20325 20326 20327 20328
20329 20330 20332 20333 20339 20549 20578 20649 20654 20655 20656 20686 20687 20688 20689 20690
20691 20792 20793 20794 20795 20947 21184 21185 21186 21187 21188 21189 21190 21335 21701 21702
21829 21830 21831 22794 23058 23059 23060 23061 23062 23146 23332 23553 23710 23885 23886 23887
23888 24294 24387 24707 24708 24709 24710 24805 24852 24897 25706 25707 25924 26028 26029 26030
26031 26032 26033 26034 26035 26036 26052 26055 26084 26104 26105 26113 26250 26289 26422 26423
26424 26425 26433 26526 26527 26611 26612 26619 26620 26621 26622 26623 26624 26625 26626 26627
26628 26629 26630 26631 26632 26633 26634 26635 26636 26637 26638 26639 26640 26641 26642 26643
26644 26645 26646 26647 26648 26649 26650 26651 26652 26833 26985 27100 27153 27154 27155 27156
27157 27158 27159 27160 27161 27162 27163 27164 27165 27166 27167 27168 27169 27170 27171 27172
27302 27414 27442 27443 27444 27445 27446 27574 27673 27767 27821 27829 27995 28184 28253 28365
28448 28582 28583 28584 28585 28586 28587 28588 28589 29150 29527 29749 29765 30142 30143 30144
30218 30392 30676 30686 30694 30830 31072 31073 31081 31166 31255 31256 31257 31285 31286 31287
31288 31289 31290 31409 31410 31535 31536 31537 31538 31539 31540 31541 31542 31543 31544 31545
31546 31547 31548 31549 31550 31596 31661 31662 31667 31718 31957 31958 32123 32301 32302 32583
32955 33069 33070 33810 33880 34116 34364 34618 34843 34844 34858 34959 35280 35303 35544 36000
36001 36002 36003 36014 36234
149: 310 457 470 712 881 1361 1493 1772 2295 2336 2440 2630 2631 2708 2853 2989 3462 3491 3834 3927
4048 4060 4127 4140 4160 4191 4241 4250 4302 5192 5679 5712 5811 5914 6447 6485 7872 7874 9469
13359 13901 13913 16134 16173 16892 17389 17790 17866 18577 18938 19220 19851 20421 20992 21409
21479 21642 22719 23039 23691 24702 27436 27600 29693 31156
150: 310 456 1361 1772 2295 2336 2440 2630 2631 2708 2853 2989 3462 3491 3834 3927 4048 4060 4127
4140 4160 4191 4241 4250 4302 5192 5679 5712 5811 5914 6447 6485 7872 7874 9469 13359 13901 13913
16134 16173 16892 17389 17790 17866 18577 18938 19220 19851 20421 20992 21409 21479 21642 22719
23039 23691 27436 27600 29693 31156
151: 4669 4822 4994 5636 5930 6141 6149 6598 6663 6764 7001 7156 7189 7291 7449 7453 7708 8109 8279
8622 8760 8789 9255 9306 9643 9785 10106 10322 10342 10376 10406 10582 10653 11003 11061 11667
12015 12130 12185 12546 12874 13178 13604 13648 14170 14499 14545 14606 14754 14847 14953 15011
15164 15166 15179 15369 15906 16605 16635 16650 17038 17368 17705 17707 17839 17900 18000 18149
18228 18287 18422 18478 18686 18705 18715 19653 20583 20615 20704 20717 20861 21269 22000 22043
22202 22216 22223 22403 22404 22430 23141 23285 23365 23854 23877 23901 23975 24047 24390 24457
24618 24677 24724 25157 25226 25236 25276 25285 25384 25597 25735 25802 26003 26242 26377 26744
26865 26961 27393 27728 27881 27936 28128 28930 28955 29034 29329 29466 29711 29727 29738 29899
29970 29973 30049 30181 30278 30288 30420 30434 30461 30496 31272 31476 31824 31987 32080 32283
32329 32502 32504 32695 32793 33003 33087 33181 33296 33396 33582 33617 33623 33836 34047 34076
34097 34105 34134 34285 34319 34392 34658 35009 35112 35210 35475 35485 35932 36121 36392
152: 458 4669 4822 4994 5636 5930 6141 6149 6598 6663 6764 7001 7156 7189 7291 7449 7453 7708 8109
8279 8622 8760 8789 9255 9306 9643 9785 10106 10322 10342 10376 10406 10582 10653 11003 11061
11667 12015 12130 12185 12546 12874 13100 13178 13604 13648 14170 14499 14545 14606 14754 14847
14953 15011 15164 15166 15179 15369 15906 16605 16635 16650 17038 17368 17705 17707 17839 17900
18000 18149 18228 18287 18422 18478 18686 18705 18715 19653 20583 20615 20704 20717 20861 21269
22000 22043 22202 22216 22223 22403 22404 22430 23141 23285 23365 23854 23877 23901 23975 24047
24390 24457 24618 24677 24724 25157 25226 25236 25276 25285 25384 25597 25735 25802 26003 26242
26377 26744 26865 26961 27393 27728 27881 27936 28128 28930 28955 29034 29466 29711 29727 29738
29899 29970 29973 30049 30181 30278 30288 30420 30434 30461 30496 31272 31476 31824 31987 32080
32283 32329 32502 32504 32695 32793 33003 33087 33181 33296 33396 33582 33617 33623 33836 34047
34076 34097 34105 34134 34285 34319 34392 35009 35112 35210 35475 35485 35932 36121 36392
153: 4509 4626 4709 4882 5054 5242 5437 5595 5968 6818 7056 7163 7319 7321 7454 7476 8099 8505 8690
8776 8798 9341 9644 9793 9862 9918 9995 10338 10475 10647 10755 10826 10833 10875 11002 11018
11157 11513 11618 11689 11740 11775 11999 12031 12082 12347 12624 12748 12856 13181 13241 13539
13787 13993 14159 14168 14251 14505 14546 14605 14682 14728 14810 14867 14958 15213 15236 15261
15355 15557 15915 15965 16071 16564 16639 16658 17029 17180 17241 17433 17576 17914 17990 18085
18291 18424 18552 19649 19704 20203 20236 20569 20825 20875 21135 21291 21679 21866 21965 22107
22257 23201 23523 23647 23721 23817 24110 24139 24293 24400 24449 24611 24836 24893 25163 25221
25509 25567 25600 25739 25748 25764 26002 26106 26107 26108 26109 26110 26111 26112 26543 26747
26857 27128 27341 27559 27627 27697 27983 28055 28112 28638 28717 28867 29145 29172 29235 29406
29451 29570 29602 29820 29950 30233 30357 30417 30436 30454 30491 30601 30822 31037 31663 31664
32160 32166 32235 32411 32459 32508 32790 32893 33244 33283 33345 33493 33695 34008 34184 34252
34420 34602 34634 34810 34940 35208 35266 35380 35415 35491 35627 35685 35754 35855 35917 35926
36072 36207
154: 4646 4855 5119 5228 5349 5354 5394 5400 5429 5564 5565 5611 5980 6315 6372 6566 6567 6612 6695
6712 6998 7025 7048 7103 7231 7252 7412 7487 7599 7677 7861 8249 8264 8423 8508 8611 8695 8742 8827
9201 9279 9302 9338 9600 9744 9745 9863 10006 10012 10070 10339 10381 10468 10562 10708 10717
10781 10843 10914 10964 10969 11028 11165 11462 11619 11874 11956 12086 12204 12209 12662 12693
12766 12814 12836 12854 13047 13050 13137 13183 13427 13541 13567 13615 13629 14193 14198 14215
14498 14585 14633 14708 14716 14922 15478 15551 15876 15982 15987 16214 16534 16617 16667 16813
16816 17085 17347 17358 17559 17596 17713 17921 18075 18139 18318 18324 18669 18674 18733 19085
19627 20210 20224 20272 20274 20694 20839 20843 20868 21730 21741 21963 21992 22087 22246 22352
22528 23114 23130 23246 23340 23452 23480 23576 23925 23997 24004 24082 24297 24317 24461 24524
24563 24673 24785 24790 24818 24848 25004 25118 25127 25246 25511 25591 25635 25695 25698 25709
25762 25770 25813 25848 26245 26355 26416 26514 26553 26575 26817 26827 26868 27420 27476 27506
27747 27826 27904 28097 28115 28728 28926 28980 29006 29088 29089 29124 29131 29199 29228 29269
29306 29328 29347 29366 29372 29409 29475 29552 29560 29585 29592 29636 29658 30018 30037 30093
30355 30412 30444 30463 30469 30488 30499 30521 30660 30983 30994 31058 31470 31789 31813 31852
31855 32070 32297 32353 32470 32613 32657 32663 32874 32897 33080 33500 33568 33633 33673 34103
34181 34551 34568 34815 35017 35030 35160 35165 35192 35240 35586 35597 35633 35640 35756 35848
35975 36034 36087 36226 36286
155: 5200 5345 5391 5954 6334 6528 6562 7118 7436 7466 7697 8333 9878 9969 9970 10067 10408 10446
10618 10669 10849 11033 11139 11668 12208 12344 12873 13063 13142 13446 13602 13650 14587 14756
15945 16196 16205 16217 16862 16863 17369 17386 17430 17548 18280 18684 19468 21746 21960 22037
22038 22254 22386 23286 23360 23499 23500 23642 23790 23791 24029 24030 24074 25005 25130 25249
25299 25401 25503 25638 25642 25643 25759 25821 25997 26216 26740 26754 26820 27280 27317 27980
28015 28972 29613 29643 29901 30175 31017 31018 31054 31863 32076 32285 34792 35133 35567 36307
156: 5200 5345 5391 5954 6334 6528 6562 7118 7436 7466 7697 8333 9878 9969 9970 10067 10408 10446
10618 10669 10849 11033 11139 11668 12208 12344 12873 13063 13142 13446 13602 13650 14587 14756
15945 16196 16205 16217 16862 16863 17369 17386 17430 17548 18280 18684 19468 21746 21960 22037
22038 22254 22386 23286 23360 23499 23500 23642 23790 23791 24029 24030 24074 25005 25130 25249
25299 25401 25503 25638 25642 25643 25759 25821 25997 26216 26740 26754 26820 27280 27317 27980
28015 28972 29613 29643 29901 30175 31017 31018 31054 31863 32076 32285 34792 35133 35567 36307
157: 454 3965 4571 4752 4986 5011 5038 5043 5095 5097 5255 5305 6067 6240 6272 6305 6744 7051 7247
7264 7368 7414 7635 7693 8379 8420 8755 8921 9230 9252 9269 9516 10683 10846 11029 11519 11592
11664 11789 12143 12168 12192 12198 12630 12709 13030 13480 13507 13520 14294 14500 14612 14771
14865 14915 14945 14950 14951 14982 15043 15059 15087 15377 15556 15736 15880 15946 16104 16859
17044 17906 17954 18226 18457 18501 18680 18768 19671 19742 20567 20580 20616 20697 20711 20733
20766 20781 20959 21002 21012 21156 21267 21782 21857 21899 22108 22161 22173 22421 22424 23087
23196 23282 23373 23549 23825 23939 23957 23959 23978 24130 24336 24382 24435 24531 24595 24840
24847 25017 25195 25254 25360 25400 25737 25963 26222 26618 26681 26682 26692 26841 26843 27190
27329 27725 28069 28593 28718 28790 28949 29000 29341 29486 29504 29614 29776 29783 29795 29801
29947 30070 30194 30201 30259 30271 30333 30419 30458 30460 30493 30523 30528 30784 31057 31149
31473 31487 31501 31503 31806 31995 32073 32333 32336 32355 32611 32696 32957 33000 33078 33083
33094 33122 33161 33535 33781 34315 34670 34793 34994 35131 35244 35465 35469 35550 35870 35913
35924 36094 36095 36147
158: 454 3965 4571 4752 4986 5011 5038 5043 5095 5097 5255 5305 6067 6240 6272 6305 6744 7051 7247
7264 7368 7414 7635 7693 8379 8420 8755 8921 9230 9252 9269 9516 10683 10846 11029 11519 11592
11664 11789 12143 12168 12192 12198 12630 12709 13030 13480 13507 13520 14294 14500 14612 14771
14865 14915 14945 14950 14951 14982 15043 15059 15087 15377 15556 15736 15880 15946 16104 16859
17044 17906 17954 18226 18457 18501 18680 18768 19671 19742 20567 20580 20616 20697 20711 20733
20766 20781 20959 21002 21012 21156 21267 21782 21857 21899 22108 22161 22173 22421 22424 23087
23196 23282 23373 23549 23825 23939 23957 23959 23978 24130 24336 24382 24435 24531 24595 24840
24847 25017 25195 25254 25360 25400 25737 25963 26222 26618 26681 26682 26692 26841 26843 27190
27329 27725 28069 28593 28718 28790 28949 29000 29341 29486 29504 29614 29776 29783 29795 29801
29947 30070 30194 30201 30259 30271 30333 30419 30458 30460 30493 30523 30528 30784 31057 31149
31473 31487 31501 31503 31806 31995 32073 32333 32336 32355 32611 32696 32957 33000 33078 33083
33094 33122 33161 33535 33781 34315 34670 34793 34994 35131 35244 35465 35469 35550 35870 35913
35924 36094 36095 36147
159: 4045 4470 4787 4860 5164 5460 5530 5531 5575 5936 5946 6168 6786 7071 7075 7237 7442 8122 8493
8510 8640 8749 9249 9253 9569 9597 9869 9872 10374 10452 10453 10481 10594 10607 11697 12001 12195
12265 12726 13015 13082 13452 13469 14275 14327 14328 14329 14330 14331 14332 14333 14334 14335
14336 14337 14338 14339 14340 14341 14342 14343 14344 14345 14346 14347 14348 14349 14466 14478
14487 14692 14719 14918 15352 15472 16090 16188 16244 16351 16408 16599 17123 17185 17476 17554
17949 17984 18380 18436 18717 19469 19639 20572 20757 20836 21150 21887 22128 22197 22235 22241
22405 22423 23300 23389 23407 23490 23529 23573 23706 23952 24045 24876 25095 25334 25425 25718
25725 25828 26215 26237 27434 27602 28005 28040 28104 29027 29028 29206 29299 29430 29470 30261
31183 31496 32020 32295 32350 32426 32650 32895 33013 33103 33350 33411 33585 33669 33688 33689
33831 33838 34117 34274 34275 34435 34734 34757 34833 35117 35201 35202 35509 35549 35740 35747
35799 35807 35822 35911 35950 35957 35998 36028 36080 36211
160: 321 451 452 4518 4590 4660 4684 4727 4786 4862 4864 5036 5055 5141 5266 5313 5355 5479 5538
5573 6079 6132 6204 6233 6360 6361 6497 6568 6592 6689 6742 6874 6875 6916 7019 7123 7177 7239 7473
7636 7664 7680 7731 8166 8224 8299 8637 8730 8797 8869 9529 9759 9814 9849 9912 9931 9992 10052
10334 10467 10738 10813 10850 10885 10894 10975 11031 11154 11460 11528 11569 11704 11752 11886
11930 11934 12050 12210 12211 12222 12323 12331 12352 12530 12586 12639 12691 12763 13145 13195
13759 13967 14169 14281 14359 14360 14402 14512 14634 14709 14715 14826 14855 15228 15370 15517
15969 16069 16293 16441 16593 16692 16718 16823 17036 17228 17351 17418 17421 17582 17583 17727
17728 17912 17988 18106 18125 18363 18476 18732 19620 19703 19759 20284 20602 20883 20911 20966
21160 21210 21671 22121 22177 22238 22303 22332 22382 22463 22526 23138 23481 23520 23536 23631
23760 24003 24091 24304 24392 24433 24490 24549 24647 24717 24761 24796 24797 24827 24828 24829
24879 25007 25033 25372 25396 25520 25747 26359 26396 26571 26738 26785 27074 27355 27368 27382
27471 27495 27553 27621 27676 27751 27769 27772 27963 27968 28502 28538 28601 28602 28623 28696
28806 28882 28901 28947 29119 29177 29298 29431 29464 29548 29582 29637 29645 29745 29813 29835
29963 29980 29989 30054 30155 30292 30332 30643 30876 30991 31049 31161 31809 31840 31841 31842
31843 32174 32238 32443 32501 32540 32646 32673 32872 32967 33195 33293 33417 33540 33572 33635
33782 33833 34104 34109 34131 34247 34304 34322 34423 34512 34544 34685 34714 34765 34813 34881
34942 34953 34979 35046 35100 35121 35136 35182 35395 35400 35427 35546 35572 35694 35955 36224
36289 36367
161: 4512 4991 5026 5593 6766 7594 8519 9844 10326 10358 10439 11510 11631 12017 12717 14301 14929
15887 16111 16491 16852 17068 17098 17205 17475 19652 21168 21256 21908 22407 22426 23084 23179
23259 24324 24356 25156 25220 25286 25516 25940 26252 27381 29213 30647 31504 32519 32670 32686
32947 33253 33327 33403 33422 34125 34144 34492 35795 36103 36155
162: 2213 2242 2292 2573 2697 2742 2850 2876 2977 3029 3087 3093 3214 3258 3283 3284 3288 3293 3295
3308 3335 4400 5779 5780 5781 5782 6846 7876 7913 7973 7974 7995 8404 9461 9462 13665 13931 13941
14126 14129 15100 16450 18616 18617 18979 19939 19940 19945 20386 21619 22666 23297 26534 26535
26536 26593 26943 29380 33072
163: 310 456 1361 1772 2295 2336 2440 2630 2631 2708 2853 2989 3462 3491 3834 3927 4048 4060 4127
4140 4160 4191 4241 4250 4302 5192 5679 5712 5811 5914 6447 6485 7872 7874 9469 13359 13901 13913
16134 16173 16892 17389 17790 17866 18577 18938 19220 19851 20421 20992 21409 21479 21642 22719
23039 23691 27436 27600 29693 31156
164: 747 951 1034 1729 1754 1935 1999 2081 2528 2540 2578 2607 2797 2806 2808 2924 3017 3100 3121
3153 3286 3386 4091 5148 6411 6430 7763 8028 9485 9892 10278 12414 13857 14107 14442 14594 15670
16475 16889 17465 17642 19006 19007 19367 19371 19978 20144 20151 21172 21799 22733 22826 22918
23052 26271 27023 28186 28228 28335 29805 30730 31357 31420 31691 31938 32149 32162 34467
165: 473 913 949 1743 3998 6028 10232 13705 13813 13816 13940 14073 14086 14133 14139 17134 18245
18842 18999 20072 22569 35366
166: 472 913 949 1670 1675 1743 2252 2253 3016 3998 5799 6028 9723 10232 11361 11362 13705 13813
13816 13940 14073 14086 14133 14139 14559 17134 17857 18245 18635 18842 18999 19149 19234 19378
19482 19836 19837 20072 21242 21636 22569 22874 35366
167: 850 1119 1725 1762 1839 2043 2198 3049 4435 6046 6878 7941 9717 11269 12362 18589 18973 18984
19055 19196 19871 19996 20529 22856 22940 22942 22996
168: 643 815 830 1155 1206 1329 2100 2291 2760 2892 3899 4168 4495 4527 4842 4848 4852 4863 5475
5476 5917 5996 6017 6908 7314 7779 8092 9085 9709 10139 11582 12496 13774 14071 14081 14381 14702
15669 16310 17002 17483 17885 18216 18578 18834 18853 18905 19339 19698 20014 20355 20423 20552
21525 21686 22684 23870 26011 26307 26340 26358 26482 27011 27123 27268 28175 28271 28296 28385
28550 30757 30834 31748 32136 33071 33796 35606 35646 35649 35657 35672 35678
169: 702 980 1513 1589 1738 2309 2625 2888 4479 4506 4558 4664 4957 5042 5049 5158 5353 5397 5451
5459 5741 5935 5981 6142 6375 6571 6615 6617 6621 6896 6942 6950 6960 7044 7072 7100 7143 7144 7186
7270 7278 7435 7490 8078 8227 8371 8501 8522 8551 8554 8565 8566 8620 8734 8856 9068 9071 9084 9198
9285 9388 9526 9606 9681 9820 9867 9888 9952 10171 10187 10493 10563 10593 10670 10747 10763 10803
10937 11071 11144 11254 11345 11532 11842 11851 11879 11951 12206 12433 12643 13005 13074 13346
13428 13437 13504 13677 13703 13734 13762 13835 13893 14214 14302 14406 14437 14654 14683 15103
15357 15627 15630 15667 15716 15891 15932 15971 16313 16337 16373 16464 16577 16601 17584 17701
17723 17726 17814 17815 17919 18007 18117 18124 18591 19020 19088 19147 19607 19650 19701 19720
19895 20085 20609 20695 20925 20933 21085 21215 21293 21336 21337 21714 21715 21734 21787 21796
21797 21878 21933 21985 22053 22208 22271 22286 22358 22367 22500 22531 22629 22817 23341 23350
23377 23445 23470 23497 23531 23540 23583 23924 24017 24319 24345 24415 24535 25096 25167 25173
25211 25281 25288 25513 25590 25689 25779 25835 25854 26254 26279 26294 26360 26401 26426 27031
27036 27063 27137 27206 27221 27239 27309 27310 27470 27487 27490 27539 27628 27730 27782 27815
27816 28196 28200 28261 28278 28301 28339 28354 28400 28434 28609 28612 28735 28889 29116 29196
29308 29546 30065 30067 30182 30258 30646 30687 30737 30738 30920 31028 31210 31231 31345 31386
31408 31464 31471 31603 31706 31711 31892 31897 31954 32017 32071 32150 32198 32241 32338 32421
32499 32569 32662 32675 32677 32769 32862 32892 32902 32903 32905 33081 33409 33626 33664 33820
33821 33958 34146 34253 34294 34297 34404 34411 34479 34480 34500 34754 34755 34939 35109 35186
35435 35775 35794 35864 35983 36091 36107 36140 36177 36246 36294 36368 36423
170: 643 815 830 1155 1206 1329 2100 2291 2760 2892 3899 4168 4495 4527 4842 4848 4852 4863 5475
5476 5917 5996 6017 6908 7314 7779 8092 9085 9709 10139 11582 12496 13774 14071 14081 14381 14702
15669 16310 17002 17483 17885 18216 18578 18834 18853 18905 19339 19698 20014 20355 20423 20552
21525 21686 22684 23870 26011 26307 26340 26358 26482 27011 27123 27268 28175 28271 28296 28385
28550 30757 30834 31748 32136 33071 33796 35606 35646 35649 35657 35672 35678
171: 2586 3587 4703 5835 7148 17886 18657 19722 19723 19724 19725 19726 19727 23042 29855
172: 735 894 927 1091 1214 1236 1270 1432 1518 1786 2085 2767 3010 4427 4533 4624 4687 4700 4761
4762 4763 4764 4765 4766 4790 4841 4892 4984 5060 5318 5428 5528 5592 5833 6057 6065 6096 6124 6322
6488 6713 6753 6890 6902 6966 6969 7204 7411 8189 8209 8388 8638 8669 8688 8733 8803 8842 8959 8983
9062 9083 9119 9296 9484 9513 9549 9626 9843 10179 10212 10215 10303 10379 10464 10770 10822 11192
11382 11642 11759 11774 11819 11893 11963 12444 12677 12840 12959 13013 13096 13220 13224 13319
13563 14186 14199 14204 14293 14310 14311 14425 14516 14615 14659 14660 14744 14888 14909 14974
14981 15163 15258 15325 15475 15560 15702 15707 15710 15713 15714 16103 16232 16345 16459 16513
16538 16562 16595 16849 16989 17059 17199 17261 17463 17464 17616 17640 17641 17884 18356 18394
18450 18656 18812 18829 18833 19295 19388 19776 20062 20211 20301 21117 21123 21574 21841 21898
22110 22158 22265 22592 22731 23090 23171 23266 23509 24060 24360 24416 24766 24784 24801 25088
25410 25468 25661 25962 26115 26260 26361 26480 26503 26546 26654 26660 26988 27007 27035 27253
27255 27267 27426 27427 27675 27773 27805 28038 28156 28159 28177 28180 28219 28256 28257 28342
28346 28362 28422 28436 28444 28486 28541 28675 28776 29016 29030 29031 29032 29035 29155 29237
29261 29331 29453 29705 29760 29763 29764 30032 30253 30655 30727 30768 30769 30854 31100 31180
31343 31350 31390 31393 31713 31722 31735 31768 31798 31883 31911 31955 32489 32654 32904 32942
33200 33250 33308 33362 33414 33465 33491 33528 33640 33809 33843 34030 34087 34149 34205 34214
34362 34434 34444 34481 34605 34635 34668 34712 34760 34920 34968 34992 35062 35075 35296 35365
35833 35857 35876 35886 35971 36010 36011 36084
173: 633 826 1027 1028 1132 1279 1460 1769 1868 2024 2065 2636 6451 6848 6849 9404 11429 13905
14114 15313 16784 17887 19386 19435 20021 20022 20101 21567 22870 22947 22993 24061 25448 33243
33818
174: 766 2115 2732 5837 6478 8016 12360 13321 13713 14007 14027 15649 15650 16447 18265 18946
19487 19728 21373 21798 22035 33263 34380 34581 34864 34868 34870 34871 34872
175: 1075 1188 1319 1527 1530 1543 1558 2117 2307 2782 3200 5838 6614 8008 8682 10228 10957 11396
13888 14150 14383 14413 14414 14416 14440 14455 14916 19144 19433 19860 20382 21101 21579 21696
22477 22820 23728 24629 26661 26708 26772 27133 27840 28193 29115 30892 30905 32400 33600 34901
176:
177: 681 1668 2263 2652 2919 5865 6985 8029 11386 12408 12998 16169 17518 17812 18553 18783 19453
19991 21583 22730
178: 1353 1758 1902 2163 2747 3265 3343 3390 3624 4351 4361 4372 4574 5789 5922 5923 5924 6420 6426
6870 7165 8153 9652 11074 12129 13360 13680 13858 13906 14141 14420 17135 17136 17506 17807 18200
18738 21438 25050 25734 27501 30721 30722 32746 32777 33275 35467
179: 518 684 792 1194 1317 1407 1448 1848 1959 2003 2048 2239 2738 3123 4283 4424 5112 5720 5763
6037 6189 6475 7373 7927 8034 8818 9467 9487 11327 11328 11411 11412 11413 11580 12503 13227 16874
18527 18962 18980 19005 19121 19122 19204 19218 19340 19426 19427 19464 19874 19875 19900 19901
19902 20398 21481 21482 21542 22624 22625 22765 22766 22944 22973 24423 24704 26962 32479 32932
33065 34741
180: 518 684 792 1194 1237 1317 1403 1407 1448 1459 1848 1959 2003 2048 2466 3399 3497 5112 6037
6475 7373 8818 9138 9139 9467 9487 11327 11328 11411 11412 11413 12503 18527 18962 18980 19005
19121 19122 19204 19218 19340 19426 19427 19464 19874 19875 19900 19901 19902 21558 22624 22625
22765 22766 22944 22973 24423 24704 26962 32479 32932 33065 34741 35533
181: 726 871 15310 27530
182:
183: 1760 6834
184: 1760 6834
185:
186: 1174 1221 1257 1288 1570 1578 1805 1806 2026 2158 2202 2311 2355 2450 2557 2595 2608 2967 2980
3210 3292 3941 4074 4076 4321 4389 4449 4510 4516 4627 4641 4817 4845 4933 4966 5010 5209 5258 5268
5283 5323 5344 5389 5463 5494 5546 5568 5635 5647 5649 5677 5708 6042 6095 6153 6201 6495 6560 6596
6673 6754 6863 6967 7029 7115 7162 7472 7620 7656 7696 7724 7787 7791 7792 7869 7870 8021 8114 8290
8312 8358 8488 8584 8587 8670 8758 8823 8834 8992 8995 9005 9016 9134 9148 9151 9159 9170 9175 9176
9178 9216 9240 9387 9453 9512 9611 9637 9642 9795 9819 9836 9911 10176 10185 10198 10203 10204
10648 10758 11057 11058 11070 11150 11177 11189 11451 11606 11609 11692 11795 11891 12089 12103
12104 12105 12113 12126 12170 12193 12203 12214 12264 12276 12279 12281 12290 12301 12309 12485
12552 12577 12670 12676 12685 12713 12757 13004 13037 13106 13190 13316 13584 13672 13864 13894
14046 14192 14217 14250 14362 14468 14568 14732 14736 14778 14853 14868 14880 14937 15026 15154
15160 15176 15223 15338 15344 15347 15349 15521 15532 15546 15689 15903 15961 15983 16011 16053
16140 16184 16221 16334 16370 16383 16391 16394 16396 16405 16412 16541 16624 16751 16765 16766
16805 16868 17106 17109 17115 17119 17121 17179 17240 17341 17461 17525 17695 17787 17903 17915
17980 18080 18098 18192 18246 18276 18289 18354 18480 18688 18709 18725 18772 18890 18920 19077
19177 19178 19210 19251 19702 19721 19876 20106 20207 20218 20439 20456 20623 20736 20848 20917
21029 21136 21167 21214 21229 21297 21411 21724 21811 21815 22007 22016 22021 22023 22024 22025
22097 22148 22155 22187 22231 22299 22373 22452 22507 22763 22774 23094 23589 23651 23688 23702
23716 23757 24109 24119 24310 24426 24589 24687 24732 24886 24938 24947 25018 25108 25151 25225
25275 25330 25356 25408 25411 25555 25637 25708 25723 25731 25806 25893 25920 25929 26005 26082
26090 26208 26302 26348 26598 26600 26677 26732 26756 26835 26922 27000 27059 27308 27385 27419
27455 27463 27509 27535 27656 27748 27790 27869 27893 28053 28078 28169 28221 28333 28399 28549
28578 28654 28712 28769 28772 28820 28986 29141 29171 29245 29362 29414 29534 29535 29629 29709
29710 29717 29721 29725 29737 29924 29997 30119 30202 30266 30321 30410 30441 30462 30527 30542
30552 30553 30560 30569 30661 30771 30779 30871 30980 31034 31415 31593 31709 31795 31826 31833
31889 31890 32105 32197 32531 32692 32741 32743 32748 32761 32766 32771 32843 32966 32988 32997
33194 33301 33344 33468 33529 33584 33634 33773 33875 34007 34062 34154 34243 34302 34313 34381
34384 34415 34498 34501 34555 34667 34693 34698 34784 34799 34970 35076 35407 35414 35621 35732
35737 35739 35742 35885 36118 36218 36242 36358 36408
187: 582 637 866 1365 1731 2080 2179 2387 2673 2719 2726 2865 3050 3352 3940 3970 4155 5816 7302
7993 8019 8045 8074 8142 8985 9365 9409 9470 9498 10143 10549 10586 10941 11434 11998 12454 12492
13554 14085 14889 14895 15295 15759 16295 17133 17835 18266 18535 18536 18621 18952 19015 19016
19099 19100 19239 19261 19309 19452 19584 19857 19882 19883 19884 19885 19886 20104 20337 20957
21311 21371 21814 22749 22853 22864 22926 23041 23228 24741 24966 25971 25979 25981 25986 28837
29010 29862 30389 30395 31029 31253 32936 33996 35283 35287 35369
188: 1069 1371 1804 2645 2646 2801 3273 3323 3376 3858 4894 5770 6027 6910 9403 9486 10170 12504
13885 14376 15632 16309 17842 18846 19175 19205 19272 19870 21546 22783 22939 23032 24941 25043
26314 26999 27254 28155 28254 28294 28426 28565 30772 30773 31383 31723 31876 32143
189: 942 963 1316 1499 1632 2761 2987 5809 6973 8874 10219 14062 14083 15289 17865 18637 19127
19444 19822 20370 21089 21658 22953 23038 24758 24780 29382 32571 32574 34378
190: 942 963 1316 1632 2484 2754 3895 5715 6973 10219 14062 14083 15289 16127 17792 19127 19444
19822 21453 22764 22953 24758 24780 27532 31697 32571 32574 34378
191: 825 966 1210 1462 2221 2913 3722 4186 4600 4702 5161 5162 5163 5791 5792 5904 6111 6506 6508
6536 6735 7218 7793 7977 8173 8792 10158 11195 11730 13849 14181 14662 14891 14892 14991 15389
15412 15413 15414 16252 16253 16254 16255 16256 16778 17541 17542 18146 18624 18749 20466 20467
20468 20469 20470 21212 21509 23213 23595 23660 23718 23919 23920 24404 24665 24666 24667 24668
24669 25044 25045 25046 25091 25092 25093 25878 25879 25891 25919 26952 26953 26954 27048 27142
27573 27599 27817 27818 28830 28831 30269 30508 30515 31182 31234 31273 31274 31275 31587 32849
33826 33942 34361 34363 34804 34856 35479 35480 35481 35482 35483 35542
192: 734 995 1107 1183 1234 1302 1338 2475 6398 9727 13722 13725 13834 13887 15273 17871 19491
20341 21387 22750
193: 979 1628 1686 1841 2871 2886 3387 4265 4425 4737 4738 4760 4974 5178 5672 5755 5921 6461 6527
6852 6877 7318 7340 7577 7578 7579 7616 8007 8014 8015 8490 8914 8923 8947 8969 9435 9455 9456 9699
9722 9728 10423 11221 11288 11323 11545 11546 11547 11548 11549 11550 11551 12116 12117 12118
13679 13923 14987 14988 15104 15195 16009 16303 16304 18541 19032 19043 19155 19273 19274 19438
19476 19477 19586 19604 19605 19925 19959 19960 19961 19962 20392 20436 20437 20551 21389 22541
22667 22681 22738 23028 23048 25053 25691 26088 26957 27430 27453 27454 27577 27578 27768 28003
30507 30517 30957 30958 30959 31114 31284 31991 32719 32861 32940 33020 33241 33242 33509 33667
33934 33937 33938 34206 34388 34389 34390 34449 34450 34451 34452 34453 34454 34455 35294 35363
35690
194: 1633 1669 2351 2503 2686 2783 2848 3101 3321 3456 3680 3817 4130 4266 5729 5876 5877 5878 5879
5880 5881 5882 5883 5884 5885 5886 5887 5888 5889 5891 5894 5896 5897 5898 9437 9478 10424 11319
11336 15802 17797 17799 19326 19353 19417 19799 20025 20798 21055 21368 21467 21468 21638 22723
22785 23310 24734 24737 26918 31534 34745 35256 35617 36232
195: 999 1235 1847 1975 2624 2643 3350 3538 3715 4436 4884 5151 6029 6060 6469 6859 6909 6915 6948
7463 7585 7597 8596 9099 9185 9321 9463 10174 10183 10193 10272 10528 11438 11588 12451 13002
13009 13233 13367 13368 14051 14055 14373 14382 14396 14407 14415 14451 14898 15401 15438 15499
15509 15635 15690 15700 15720 15801 16326 16335 16336 16346 17467 17492 17660 17672 17688 17867
18160 18639 18809 19113 19442 19685 19686 19966 20785 20790 20956 21208 21209 21660 21914 22767
23231 23663 23869 24421 24678 26413 26665 26975 26984 27001 27022 27298 27830 28185 28187 28203
28207 28210 28229 28275 28320 28336 28337 28363 30532 30710 30711 30723 30756 30767 31118 31146
31271 31355 31356 31381 31403 31405 31567 31689 31770 31888 31929 31930 31937 31941 32126 32141
32146 34385 34445 36013
196: 1559 2831 3898 4905 4919 4941 5918 6260 6274 7403 7404 8435 8436 8553 9359 11333 12098 12155
12232 12420 15156 15157 18114 18215 19299 19393 20054 20251 20445 21299 21369 21780 21806 22588
23754 23818 24120 26739 29777 30971 33287 33579 33628 33856 34041 34217 34395 34396 35437
197: 1173 1660 1863 1885 1928 2289 2296 2312 2472 2494 2515 2649 2650 3070 3570 3878 3966 3967 4095
4118 4149 4172 4173 4198 4276 4335 4455 4486 4635 4707 5126 5127 5128 5167 5168 5749 6532 6881 6882
6883 7300 7350 7507 7508 7509 7512 7517 7518 7520 7523 7524 7525 7526 7527 7529 7530 7533 7534 7535
7537 7538 7539 7540 7541 7543 7546 7547 7548 7549 7550 7551 7552 7553 7554 7555 7556 7557 7558 7559
7562 7563 7565 7569 7570 7571 7572 7574 7575 7576 7780 7950 8392 8393 8394 8395 8396 8397 8440 8441
8442 8443 8444 8445 8446 8447 8448 8449 8450 8451 8452 8453 8454 8455 8456 8457 8458 8459 8460 8461
8462 8463 8464 8465 8466 8467 8468 8469 8470 8471 8472 8473 8474 8475 8476 8477 8478 8479 8480 8481
8701 8846 8884 9366 9667 9668 9669 9670 9671 9672 10512 11117 11118 11119 11120 11121 11122 11123
11124 11125 11393 11834 11835 11836 11837 11898 11900 12242 13216 13217 13218 13264 13274 13275
13279 13280 13287 13288 13289 13300 13303 13305 13308 13364 13524 13704 13739 13838 13904 13917
14015 14074 14115 14523 14524 14525 14526 14886 14887 15088 15184 15185 15186 15187 15308 15513
15514 15564 15565 15566 15567 15568 15569 15570 15602 15603 15604 15605 15606 15607 15608 15609
15610 15611 15613 15614 15615 15616 15622 15623 15624 15861 15862 15863 15864 15865 15866 15867
15868 15869 15870 15871 15872 15873 15874 16040 16175 16497 16498 16499 16500 16501 16502 16503
16504 16505 16506 16702 16897 16898 16899 16900 16901 16902 16903 16904 16905 16906 16907 16908
16909 16910 16911 16912 16913 16914 16915 16916 16917 16918 16919 16920 16921 16922 16923 16924
16925 16926 16927 16928 16929 16930 16931 16932 16933 16934 16935 16936 16937 16938 16939 16940
16941 16942 16943 16944 16945 16946 16947 16948 16949 16950 16951 16952 16953 16954 16955 16956
16957 16958 16959 16960 16961 16962 16963 16964 16965 16966 16967 16968 16969 16970 16971 16972
16973 16974 16975 16976 16977 16978 16979 16980 16981 16982 17269 17270 17271 17272 17273 17274
17275 17276 17277 17278 17279 17280 17281 17282 17283 17284 17285 17286 17287 17288 17289 17290
17291 17292 17293 17294 17295 17296 17297 17298 17299 17300 17301 17302 17303 17304 17305 17306
17307 17308 17309 17310 17311 17312 17313 17314 17315 17316 17317 17318 17319 17320 17321 17322
17323 17324 17325 17326 17327 17328 17329 17393 17617 17618 17619 17620 17621 17622 17623 17624
17625 17626 17627 17629 17630 17631 17632 17633 17634 17635 17636 17819 17827 18028 18029 18030
18031 18032 18033 18034 18035 18036 18037 18038 18039 18040 18041 18042 18043 18044 18045 18046
18047 18048 18049 18050 18051 18052 18053 18054 18055 18056 18057 18058 18059 18060 18061 18062
18063 18064 18065 18066 18067 18068 18069 18597 19181 19231 19302 19483 19528 19529 19530 19531
19532 19533 19534 19535 19536 19537 19538 19539 19540 19541 19542 19543 19544 19545 19546 19547
19548 19549 19550 19551 19552 19553 19554 19555 19556 19557 19558 19559 19560 19561 19562 19563
19564 19565 19566 19567 19568 19569 19570 19571 19572 19573 19847 19985 20000 20102 20537 20545
20546 20547 21056 21318 21347 21359 21844 21845 21846 21847 21913 22615 22716 22721 22982 22983
22984 23221 23222 23223 23224 23225 23226 23670 23882 24068 24169 25048 25069 25070 25071 25072
25073 25074 25075 25076 25077 25652 25699 25700 25868 25882 25883 25884 25901 25902 25903 25904
25916 25917 25918 26072 26092 26093 26094 26095 26096 26097 26098 26099 26100 26101 26102 26124
26125 26126 26127 26128 26129 26130 26131 26132 26133 26134 26135 26136 26137 26138 26139 26140
26141 26142 26143 26144 26145 26146 26147 26148 26149 26150 26151 26152 26153 26154 26155 26156
26157 26158 26159 26160 26161 26162 26163 26164 26165 26166 26167 26168 26169 26170 26171 26172
26173 26174 26175 26176 26177 26178 26179 26180 26181 26182 26183 26316 26317 26318 26319 26320
26321 26322 26382 26412 26448 26449 26450 26451 26452 26453 26454 26455 26456 26457 26458 26459
26460 26461 26462 26463 26464 26465 26466 26467 26468 26469 26470 26471 26472 26473 26474 26475
26476 26477 26478 26479 27457 27458 27459 28656 28657 28658 28659 28660 28661 28662 28663 28664
28665 28666 28667 28668 28669 28670 28671 28672 28673 28674 28700 28701 28702 28703 28704 28705
29039 29040 29041 29042 29043 29044 29045 29046 29047 29048 29049 29050 29051 29052 29053 29054
29055 29056 29057 29058 29059 29060 29061 29062 29063 29064 29065 29067 29068 29069 29070 29071
29072 29073 29074 29075 29076 29077 29078 29079 29080 29081 29684 30503 30504 30533 30595 30596
30597 31027 31213 31218 31322 31323 31324 31325 31326 31327 31328 31329 31330 31331 31332 31333
31334 31335 31336 31437 31564 31604 31607 31608 31609 31610 31611 31612 31613 31614 31615 31616
31617 31618 31619 31620 31621 31622 31623 31624 31625 31626 31627 31628 31629 31630 31631 31632
31633 31634 31635 31636 31637 31638 31639 31640 31641 31642 31643 31644 31645 31646 31647 31648
31649 31650 32575 32802 32852 33030 33268 33269 33270 33271 33272 33273 33274 33710 33711 33712
33713 33714 33715 33716 33717 33718 33719 33720 33721 33722 33723 33724 33725 33726 33727 33728
33729 33730 33731 33732 33733 33734 33735 33736 33737 33738 33739 33740 33741 33742 33743 33744
33745 33746 33747 33748 33749 33750 33751 33752 33753 33754 33755 33756 33757 33926 34114 34465
34749 35305 35306 35307 35308 35309 35310 35311 35312 35313 35314 35315 35316 35317 35318 35319
35320 35321 35322 35323 35324 35325 35326 35327 35328 35329 35330 35331 35332 35333 35334 35335
35336 35337 35338 35339 35340 35341 35342 35343 35344 35345 35346 35347 35348 35349 35350 35351
35352 35353 35354 35355 35356 35357 35358 35538 35539 35540
198: 504 1173 1660 1863 1885 1928 2289 2296 2312 2472 2494 2515 2649 2650 3070 3570 3878 3966 3967
4095 4118 4149 4172 4173 4198 4276 4335 4455 4486 4635 4707 5126 5127 5128 5167 5168 5749 6532 6881
6882 6883 7300 7350 7507 7508 7509 7512 7517 7518 7520 7523 7524 7525 7526 7527 7529 7530 7533 7534
7535 7537 7538 7539 7540 7541 7543 7546 7547 7548 7549 7550 7551 7552 7553 7554 7555 7556 7557 7558
7559 7562 7563 7565 7569 7570 7571 7572 7574 7575 7576 7780 7950 8392 8393 8394 8395 8396 8397 8440
8441 8442 8443 8444 8445 8446 8447 8448 8449 8450 8451 8452 8453 8454 8455 8456 8457 8458 8459 8460
8461 8462 8463 8464 8465 8466 8467 8468 8469 8470 8471 8472 8473 8474 8475 8476 8477 8478 8479 8480
8481 8701 8846 8884 9366 9667 9668 9669 9670 9671 9672 10512 11117 11118 11119 11120 11121 11122
11123 11124 11125 11393 11834 11835 11836 11837 11898 11900 12242 13216 13217 13218 13264 13274
13275 13279 13280 13287 13288 13289 13300 13303 13305 13308 13364 13524 13704 13739 13838 13904
13917 14015 14074 14115 14523 14524 14525 14526 14886 14887 15088 15184 15185 15186 15187 15308
15513 15514 15564 15565 15566 15567 15568 15569 15570 15602 15603 15604 15605 15606 15607 15608
15609 15610 15611 15613 15614 15615 15616 15622 15623 15624 15861 15862 15863 15864 15865 15866
15867 15868 15869 15870 15871 15872 15873 15874 16040 16175 16497 16498 16499 16500 16501 16502
16503 16504 16505 16506 16702 16897 16898 16899 16900 16901 16902 16903 16904 16905 16906 16907
16908 16909 16910 16911 16912 16913 16914 16915 16916 16917 16918 16919 16920 16921 16922 16923
16924 16925 16926 16927 16928 16929 16930 16931 16932 16933 16934 16935 16936 16937 16938 16939
16940 16941 16942 16943 16944 16945 16946 16947 16948 16949 16950 16951 16952 16953 16954 16955
16956 16957 16958 16959 16960 16961 16962 16963 16964 16965 16966 16967 16968 16969 16970 16971
16972 16973 16974 16975 16976 16977 16978 16979 16980 16981 16982 17269 17270 17271 17272 17273
17274 17275 17276 17277 17278 17279 17280 17281 17282 17283 17284 17285 17286 17287 17288 17289
17290 17291 17292 17293 17294 17295 17296 17297 17298 17299 17300 17301 17302 17303 17304 17305
17306 17307 17308 17309 17310 17311 17312 17313 17314 17315 17316 17317 17318 17319 17320 17321
17322 17323 17324 17325 17326 17327 17328 17329 17393 17617 17618 17619 17620 17621 17622 17623
17624 17625 17626 17627 17629 17630 17631 17632 17633 17634 17635 17636 17819 17827 18028 18029
18030 18031 18032 18033 18034 18035 18036 18037 18038 18039 18040 18041 18042 18043 18044 18045
18046 18047 18048 18049 18050 18051 18052 18053 18054 18055 18056 18057 18058 18059 18060 18061
18062 18063 18064 18065 18066 18067 18068 18069 18597 19181 19231 19302 19483 19528 19529 19530
19531 19532 19533 19534 19535 19536 19537 19538 19539 19540 19541 19542 19543 19544 19545 19546
19547 19548 19549 19550 19551 19552 19553 19554 19555 19556 19557 19558 19559 19560 19561 19562
19563 19564 19565 19566 19567 19568 19569 19570 19571 19572 19573 19847 19985 20000 20102 20537
20545 20546 20547 21056 21318 21347 21359 21844 21845 21846 21847 21913 22615 22716 22721 22982
22983 22984 23221 23222 23223 23224 23225 23226 23670 23882 24068 24169 25048 25069 25070 25071
25072 25073 25074 25075 25076 25077 25652 25699 25700 25868 25882 25883 25884 25901 25902 25903
25904 25916 25917 25918 26072 26092 26093 26094 26095 26096 26097 26098 26099 26100 26101 26102
26124 26125 26126 26127 26128 26129 26130 26131 26132 26133 26134 26135 26136 26137 26138 26139
26140 26141 26142 26143 26144 26145 26146 26147 26148 26149 26150 26151 26152 26153 26154 26155
26156 26157 26158 26159 26160 26161 26162 26163 26164 26165 26166 26167 26168 26169 26170 26171
26172 26173 26174 26175 26176 26177 26178 26179 26180 26181 26182 26183 26316 26317 26318 26319
26320 26321 26322 26382 26412 26448 26449 26450 26451 26452 26453 26454 26455 26456 26457 26458
26459 26460 26461 26462 26463 26464 26465 26466 26467 26468 26469 26470 26471 26472 26473 26474
26475 26476 26477 26478 26479 27457 27458 27459 28656 28657 28658 28659 28660 28661 28662 28663
28664 28665 28666 28667 28668 28669 28670 28671 28672 28673 28674 28700 28701 28702 28703 28704
28705 29039 29040 29041 29042 29043 29044 29045 29046 29047 29048 29049 29050 29051 29052 29053
29054 29055 29056 29057 29058 29059 29060 29061 29062 29063 29064 29065 29067 29068 29069 29070
29071 29072 29073 29074 29075 29076 29077 29078 29079 29080 29081 29684 30503 30504 30533 30595
30596 30597 31027 31213 31218 31322 31323 31324 31325 31326 31327 31328 31329 31330 31331 31332
31333 31334 31335 31336 31437 31564 31604 31607 31608 31609 31610 31611 31612 31613 31614 31615
31616 31617 31618 31619 31620 31621 31622 31623 31624 31625 31626 31627 31628 31629 31630 31631
31632 31633 31634 31635 31636 31637 31638 31639 31640 31641 31642 31643 31644 31645 31646 31647
31648 31649 31650 32575 32802 32852 33030 33268 33269 33270 33271 33272 33273 33274 33710 33711
33712 33713 33714 33715 33716 33717 33718 33719 33720 33721 33722 33723 33724 33725 33726 33727
33728 33729 33730 33731 33732 33733 33734 33735 33736 33737 33738 33739 33740 33741 33742 33743
33744 33745 33746 33747 33748 33749 33750 33751 33752 33753 33754 33755 33756 33757 33926 34114
34465 34749 35305 35306 35307 35308 35309 35310 35311 35312 35313 35314 35315 35316 35317 35318
35319 35320 35321 35322 35323 35324 35325 35326 35327 35328 35329 35330 35331 35332 35333 35334
35335 35336 35337 35338 35339 35340 35341 35342 35343 35344 35345 35346 35347 35348 35349 35350
35351 35352 35353 35354 35355 35356 35357 35358 35538 35539 35540
199: 504 1173 1660 1863 1885 1928 2289 2296 2312 2472 2494 2515 2649 2650 3070 3570 3878 3966 3967
4095 4118 4149 4172 4173 4198 4276 4335 4455 4486 4635 4707 5126 5127 5128 5167 5168 5749 6532 6881
6882 6883 7300 7350 7507 7508 7509 7512 7517 7518 7520 7523 7524 7525 7526 7527 7529 7530 7533 7534
7535 7537 7538 7539 7540 7541 7543 7546 7547 7548 7549 7550 7551 7552 7553 7554 7555 7556 7557 7558
7559 7562 7563 7565 7569 7570 7571 7572 7574 7575 7576 7780 7950 8392 8393 8394 8395 8396 8397 8440
8441 8442 8443 8444 8445 8446 8447 8448 8449 8450 8451 8452 8453 8454 8455 8456 8457 8458 8459 8460
8461 8462 8463 8464 8465 8466 8467 8468 8469 8470 8471 8472 8473 8474 8475 8476 8477 8478 8479 8480
8481 8701 8846 8884 9366 9667 9668 9669 9670 9671 9672 10512 11117 11118 11119 11120 11121 11122
11123 11124 11125 11393 11834 11835 11836 11837 11898 11900 12242 13216 13217 13218 13264 13274
13275 13279 13280 13287 13288 13289 13300 13303 13305 13308 13364 13524 13704 13739 13838 13904
13917 14015 14074 14115 14523 14524 14525 14526 14886 14887 15088 15184 15185 15186 15187 15308
15513 15514 15564 15565 15566 15567 15568 15569 15570 15602 15603 15604 15605 15606 15607 15608
15609 15610 15611 15613 15614 15615 15616 15622 15623 15624 15861 15862 15863 15864 15865 15866
15867 15868 15869 15870 15871 15872 15873 15874 16040 16175 16497 16498 16499 16500 16501 16502
16503 16504 16505 16506 16702 16897 16898 16899 16900 16901 16902 16903 16904 16905 16906 16907
16908 16909 16910 16911 16912 16913 16914 16915 16916 16917 16918 16919 16920 16921 16922 16923
16924 16925 16926 16927 16928 16929 16930 16931 16932 16933 16934 16935 16936 16937 16938 16939
16940 16941 16942 16943 16944 16945 16946 16947 16948 16949 16950 16951 16952 16953 16954 16955
16956 16957 16958 16959 16960 16961 16962 16963 16964 16965 16966 16967 16968 16969 16970 16971
16972 16973 16974 16975 16976 16977 16978 16979 16980 16981 16982 17269 17270 17271 17272 17273
17274 17275 17276 17277 17278 17279 17280 17281 17282 17283 17284 17285 17286 17287 17288 17289
17290 17291 17292 17293 17294 17295 17296 17297 17298 17299 17300 17301 17302 17303 17304 17305
17306 17307 17308 17309 17310 17311 17312 17313 17314 17315 17316 17317 17318 17319 17320 17321
17322 17323 17324 17325 17326 17327 17328 17329 17393 17617 17618 17619 17620 17621 17622 17623
17624 17625 17626 17627 17629 17630 17631 17632 17633 17634 17635 17636 17819 17827 18028 18029
18030 18031 18032 18033 18034 18035 18036 18037 18038 18039 18040 18041 18042 18043 18044 18045
18046 18047 18048 18049 18050 18051 18052 18053 18054 18055 18056 18057 18058 18059 18060 18061
18062 18063 18064 18065 18066 18067 18068 18069 18597 19181 19231 19302 19483 19528 19529 19530
19531 19532 19533 19534 19535 19536 19537 19538 19539 19540 19541 19542 19543 19544 19545 19546
19547 19548 19549 19550 19551 19552 19553 19554 19555 19556 19557 19558 19559 19560 19561 19562
19563 19564 19565 19566 19567 19568 19569 19570 19571 19572 19573 19847 19985 20000 20102 20537
20545 20546 20547 21056 21318 21347 21359 21844 21845 21846 21847 21913 22615 22716 22721 22982
22983 22984 23221 23222 23223 23224 23225 23226 23670 23882 24068 24169 25048 25069 25070 25071
25072 25073 25074 25075 25076 25077 25652 25699 25700 25868 25882 25883 25884 25901 25902 25903
25904 25916 25917 25918 26072 26092 26093 26094 26095 26096 26097 26098 26099 26100 26101 26102
26124 26125 26126 26127 26128 26129 26130 26131 26132 26133 26134 26135 26136 26137 26138 26139
26140 26141 26142 26143 26144 26145 26146 26147 26148 26149 26150 26151 26152 26153 26154 26155
26156 26157 26158 26159 26160 26161 26162 26163 26164 26165 26166 26167 26168 26169 26170 26171
26172 26173 26174 26175 26176 26177 26178 26179 26180 26181 26182 26183 26316 26317 26318 26319
26320 26321 26322 26382 26412 26448 26449 26450 26451 26452 26453 26454 26455 26456 26457 26458
26459 26460 26461 26462 26463 26464 26465 26466 26467 26468 26469 26470 26471 26472 26473 26474
26475 26476 26477 26478 26479 27457 27458 27459 28656 28657 28658 28659 28660 28661 28662 28663
28664 28665 28666 28667 28668 28669 28670 28671 28672 28673 28674 28700 28701 28702 28703 28704
28705 29039 29040 29041 29042 29043 29044 29045 29046 29047 29048 29049 29050 29051 29052 29053
29054 29055 29056 29057 29058 29059 29060 29061 29062 29063 29064 29065 29067 29068 29069 29070
29071 29072 29073 29074 29075 29076 29077 29078 29079 29080 29081 29684 30503 30504 30533 30595
30596 30597 31027 31213 31218 31322 31323 31324 31325 31326 31327 31328 31329 31330 31331 31332
31333 31334 31335 31336 31437 31564 31604 31607 31608 31609 31610 31611 31612 31613 31614 31615
31616 31617 31618 31619 31620 31621 31622 31623 31624 31625 31626 31627 31628 31629 31630 31631
31632 31633 31634 31635 31636 31637 31638 31639 31640 31641 31642 31643 31644 31645 31646 31647
31648 31649 31650 32575 32802 32852 33030 33268 33269 33270 33271 33272 33273 33274 33710 33711
33712 33713 33714 33715 33716 33717 33718 33719 33720 33721 33722 33723 33724 33725 33726 33727
33728 33729 33730 33731 33732 33733 33734 33735 33736 33737 33738 33739 33740 33741 33742 33743
33744 33745 33746 33747 33748 33749 33750 33751 33752 33753 33754 33755 33756 33757 33926 34114
34465 34749 35305 35306 35307 35308 35309 35310 35311 35312 35313 35314 35315 35316 35317 35318
35319 35320 35321 35322 35323 35324 35325 35326 35327 35328 35329 35330 35331 35332 35333 35334
35335 35336 35337 35338 35339 35340 35341 35342 35343 35344 35345 35346 35347 35348 35349 35350
35351 35352 35353 35354 35355 35356 35357 35358 35538 35539 35540
200: 998 1007 1143 1433 1740 2067 3449 4211 5733 6872 9416 9480 13985 14018 16446 16777 17805 18966
19271 19375 19434 19777 20019 20063 20955 21488 22593 22692 22732 22969 23003 23884 34744
201: 998 1007 1143 1433 1740 2067 3449 4211 5733 6872 9416 9480 13985 14018 16446 16777 17805 18966
19271 19375 19434 19777 20019 20063 20955 21488 22593 22692 22732 22969 23003 23884 34744
202: 664 786 941 968 1106 1147 1161 1245 1285 1351 1368 1401 1474 1484 1506 1529 1604 1609 1612 1714
1728 1776 1801 1816 1871 1931 2027 2045 2062 2232 2526 2537 2583 2751 3405 3426 3428 3432 3534 3662
3710 3717 3720 3742 3761 3811 3939 3949 3950 4040 4085 4087 4110 4226 4242 4318 4334 4347 4502 4508
4517 4528 4550 4553 4594 4628 4639 4642 4796 4798 4799 4821 4985 4992 5053 5059 5074 5365 5417 5471
5474 5520 5522 5566 5702 5929 5955 6118 6122 6125 6127 6133 6143 6178 6221 6258 6304 6318 6319 6376
6417 6509 6609 6618 6624 6625 6629 6772 6980 7011 7015 7016 7020 7055 7059 7063 7066 7067 7078 7101
7102 7107 7185 7207 7244 7259 7268 7342 7464 7884 8002 8025 8068 8069 8111 8210 8213 8272 8317 8327
8335 8341 8529 8534 8537 8639 8665 8740 8744 8745 8746 8780 8781 8793 8802 8864 8909 8925 9229 9236
9243 9260 9290 9389 9418 9474 9557 9580 9608 9621 9743 9748 9773 9774 9816 9821 9824 9848 9850 9893
9894 9906 9960 9963 9977 10009 10010 10071 10072 10240 10294 10328 10330 10331 10438 10461 10491
10504 10572 10581 10585 10611 10619 10672 10674 10682 10692 10696 10731 10764 10827 10902 10970
11013 11017 11076 11134 11152 11257 11303 11403 11491 11497 11512 11563 11630 11691 11739 11773
11780 11821 11866 11869 11943 11961 12013 12045 12057 12085 12247 12262 12313 12321 12350 12418
12514 12531 12537 12538 12539 12542 12606 12613 12622 12711 12727 12753 12754 12839 13012 13062
13127 13138 13139 13146 13148 13149 13153 13318 13445 13484 13487 13496 13499 13564 13627 13745
13785 13800 13822 13865 13927 14249 14353 14354 14355 14356 14357 14552 14642 14775 14804 14805
14823 14827 14884 14954 14964 14968 14980 15017 15030 15032 15045 15134 15189 15254 15268 15307
15483 15858 15912 15943 15949 15952 15967 16072 16077 16123 16167 16181 16201 16417 16466 16568
16637 16653 16661 16709 16710 16742 16800 16828 16860 16866 16876 16877 16878 17025 17053 17055
17060 17061 17062 17065 17078 17171 17174 17189 17250 17338 17580 17717 17719 17729 17782 18081
18237 18283 18284 18299 18408 18410 18434 18446 18464 18468 18470 18503 18518 18521 18546 18547
18594 18767 18802 18849 18860 18910 18942 18943 18996 19075 19110 19211 19621 19635 19660 19758
19808 19842 20088 20192 20231 20242 20262 20269 20282 20293 20305 20357 20424 20565 20575 20601
20608 20612 20716 20747 20751 20760 20761 20799 20804 20807 20811 20857 20865 20873 20919 20958
21023 21025 21105 21115 21132 21146 21158 21221 21474 21534 21711 21736 21739 21822 21823 21824
21825 21826 21871 21906 21966 22046 22233 22243 22323 22325 22361 22385 22397 22427 22492 22505
22533 22626 22885 22970 23104 23116 23124 23143 23164 23172 23173 23174 23205 23207 23274 23275
23359 23364 23369 23380 23396 23414 23469 23477 23493 23494 23504 23516 23522 23524 23534 23550
23551 23561 23590 23594 23602 23614 23623 23664 23733 23740 23804 23812 23830 23832 23940 23953
23965 23966 23988 24002 24012 24034 24049 24124 24134 24138 24141 24151 24328 24329 24358 24359
24362 24367 24373 24374 24442 24451 24464 24470 24494 24501 24519 24566 24571 24613 24623 24657
24743 24744 24745 24746 24747 24748 24749 24750 24812 24943 24990 24994 25132 25160 25161 25174
25190 25198 25222 25223 25259 25530 25537 25871 25872 25873 25932 25933 25934 25935 25936 25937
25944 25984 25985 26209 26227 26231 26236 26265 26326 26327 26330 26350 26393 26394 26547 26784
26849 26859 26896 26944 27099 27111 27365 27370 27384 27397 27399 27405 27418 27718 27865 27888
27985 27987 28026 28039 28042 28094 28521 28525 28547 28554 28559 28595 28613 28614 28616 28632
28640 28689 28747 28751 28752 28846 28850 28865 28956 28990 28992 29110 29122 29125 29134 29142
29143 29215 29232 29265 29278 29418 29424 29450 29479 29482 29489 29490 29542 29550 29553 29562
29569 29586 29596 29601 29604 29774 29775 29794 29812 29885 29940 29983 29990 30027 30051 30066
30101 30158 30174 30210 30221 30224 30306 30334 30371 30398 30399 30612 30626 30634 30648 30668
30853 30859 30870 31000 31009 31020 31026 31169 31235 31337 31488 31497 31977 31998 32007 32042
32043 32088 32173 32185 32200 32243 32244 32246 32251 32321 32322 32323 32324 32325 32327 32356
32432 32457 32465 32490 32562 32563 32580 32626 32627 32628 32632 32633 32704 32842 32860 32873
32880 33026 33032 33097 33104 33137 33138 33171 33172 33187 33193 33222 33223 33297 33304 33406
33413 33448 33461 33497 33560 33561 33574 33686 33698 33859 33863 33867 33874 34012 34075 34080
34098 34130 34219 34222 34289 34305 34306 34320 34336 34413 34427 34495 34503 34519 34531 34593
34637 34729 34735 34933 34951 35014 35015 35021 35038 35045 35049 35107 35122 35139 35143 35144
35148 35149 35169 35170 35174 35200 35203 35204 35207 35274 35471 35502 35503 35506 35522 35523
35524 35557 35591 35599 35601 35602 35632 35637 35670 35767 35771 35778 35785 35786 35868 35878
35891 35895 35904 36038 36071 36126 36142 36152 36163 36176 36186 36196 36198 36260 36262 36288
36290 36292 36397 36399 36428 36430
203: 861 1809 2718 2901 2956 3046 3528 3638 3828 4081 4346 4981 5724 5907 5998 6523 6898 7930 8035
8081 8562 8855 9072 9141 10264 11202 11230 12390 13328 13358 14433 15625 15680 15688 16319 16451
16474 16706 16707 17555 18173 18174 18612 19012 19498 20124 20148 20416 20653 21486 21527 22876
23657 23889 23892 23894 23895 23899 23916 24539 24676 25659 25660 26054 26116 26123 26921 26994
27144 27145 27146 27243 27479 28143 28240 28309 28383 28470 28766 29675 30511 30728 31082 31417
31424 31673 31949 31952 32147 32958 33027 35529 36352
204: 803 1311 1419 1550 2075 2424 3196 3213 3842 3871 4551 4598 4719 4808 4839 5215 5265 5338 5413
5466 5526 5571 5707 5965 6093 6155 6219 6285 6333 6526 6557 6632 6961 7004 7082 7124 7232 7461 7486
7703 7855 7862 8033 8171 8275 8353 8361 8545 8697 8751 9211 9292 9503 9555 9853 9874 9930 9997
10394 10402 10465 10638 10693 10730 10743 10765 10848 10930 10982 11032 11141 11559 11662 11847
11859 11946 12028 12041 12524 12688 12747 12768 12775 12801 12826 12879 12927 13028 13029 13067
13175 13217 13444 13580 13587 13643 13675 13890 14022 14100 14185 14574 14618 14687 14920 15051
15474 15931 15966 16206 16615 16804 16871 17196 17257 17336 17577 17714 18094 18128 18281 18285
18351 18445 18482 18539 18671 19014 19101 19471 19658 19696 19888 20188 20214 20283 20347 20593
20709 20805 20823 20995 21084 21219 21451 21670 21755 21998 22066 22071 22222 22282 22309 22398
22859 23095 23276 23278 23280 23281 23358 23385 23457 23596 23726 23771 23972 24022 24100 24299
24408 24510 24529 24814 24843 24871 24910 24952 24992 25117 25140 25379 25391 25532 25557 25580
25607 25626 25801 25840 25865 25866 25923 26086 26206 26349 26606 26724 26831 27019 27116 27300
27475 27489 27537 27632 27852 27876 28031 28076 28252 28419 28566 28608 28688 28748 28753 28987
29117 29162 29226 29268 29350 29353 29428 29663 29986 30036 30116 30152 30225 30282 30297 30301
30422 30466 30487 30665 30818 30833 30975 30979 31052 31204 31520 31694 31867 31988 31992 32116
32184 32217 32270 32376 32388 32466 32652 32871 33091 33203 33359 33383 33503 33515 33575 33619
33675 34049 34191 34192 34268 34327 34417 34509 34557 34562 34650 34701 34777 34797 34961 34988
35056 35069 35157 35215 35276 35391 35519 35588 35643 35697 35745 35846 35985 36069 36076 36082
36105 36161 36222 36255 36362
205: 791 900 1284 1649 1996 2294 3085 3753 5743 6391 7945 16036 17125 19123 19918 21361 22834 22897
23751 23752
206: 4579 4647 4718 4805 5073 5169 5333 5363 5405 5436 5443 5454 5519 5523 5534 5578 5674 5675 5978
6005 6035 6102 6261 6546 6578 6737 7032 7042 7061 7080 7104 7111 7119 7122 7140 7141 7142 7181 7451
7475 7639 8156 8215 8233 8234 8237 8238 8240 8250 8538 9504 9638 9746 9752 9754 9755 9756 9775 9838
9961 9962 9974 9998 10013 10100 10306 10347 10356 10420 10633 10661 10663 10718 10793 10871 10889
10890 10910 10947 10971 11156 11525 11602 11616 11620 11639 12244 12340 12349 12351 12354 12637
12794 12815 12825 12859 12955 12972 12978 13131 13135 13140 13144 13430 13467 13470 13517 13537
13612 13808 14010 14563 14609 14783 15096 15235 16080 16099 16100 16177 16591 16801 16812 16818
16819 16840 16857 17091 17202 17212 17226 17363 17364 17385 18084 18141 18186 18207 18208 18223
18224 18235 18343 18690 18847 18955 19472 19674 19675 19676 19677 19678 19679 19680 19681 19682
19683 19684 19746 20554 20619 20699 20726 20779 20852 20854 20859 20867 20893 20900 20903 21248
21860 21876 21896 21905 21907 22041 22049 22051 22052 22060 22070 22085 22215 22234 22256 22310
22314 22318 22354 22374 22399 22439 22480 23197 23244 23247 23342 23398 23406 23413 23431 23433
23448 23473 23610 23621 23649 23857 23883 23979 24008 24010 24013 24032 24170 24171 24172 24173
24174 24175 24176 24177 24178 24179 24180 24181 24182 24183 24184 24185 24186 24187 24188 24189
24190 24191 24192 24193 24194 24195 24196 24197 24198 24199 24200 24201 24202 24203 24204 24205
24206 24207 24208 24209 24210 24211 24212 24213 24214 24215 24216 24217 24218 24219 24220 24221
24222 24223 24224 24225 24226 24227 24228 24229 24230 24231 24232 24233 24234 24235 24236 24237
24238 24239 24240 24241 24242 24243 24244 24245 24246 24247 24248 24249 24250 24251 24252 24253
24254 24255 24256 24257 24258 24259 24260 24261 24262 24263 24264 24265 24266 24267 24268 24269
24270 24271 24272 24273 24274 24275 24276 24277 24278 24279 24280 24281 24282 24283 24284 24285
24286 24287 24288 24289 24290 24313 24432 24502 24506 24508 24593 24658 24661 24726 24730 24789
25145 25146 25240 25241 25392 25481 25482 25550 25577 25694 25852 25948 25959 25968 26533 26763
26842 26897 26899 26947 27093 27141 27284 27565 27575 27608 27643 27712 27729 27741 27762 27785
27924 27930 27937 27961 27976 28017 28018 28066 28088 28617 28620 28622 28629 28708 28723 28879
28948 28954 28966 28974 29100 29205 29301 29345 29354 29438 29501 29610 29616 29641 29642 29650
29700 29701 29863 29868 30008 30023 30171 30205 30323 30348 30361 30374 30537 30574 30995 30997
31008 31012 31036 31230 31442 31448 31527 31568 31601 31868 32064 32074 32085 32179 32182 32189
32267 32286 32299 32342 32485 32592 32779 32780 32781 33055 33084 33159 33214 33330 33419 33516
33658 33691 33701 33855 34133 34260 34296 34307 34333 34358 34403 34414 34515 34536 34539 34649
34987 35089 35120 35132 35146 35164 35175 35176 35224 35448 35449 35456 35474 35547 35553 35565
35569 35645 36042 36043 36067 36073 36182 36195 36365 36366 36379 36406
207: 4404 5859 5860 6839 6840 6841 6842 6843 6844 6845 6846 7371 9322 11985 11986 12969 18618 21634
25430 25431 25432 25433 25434 25435 25436 25437 25438 25439 25440 25441 25442 25443 25444 29866
36314
208: 4512 4991 5026 5593 6766 7594 8519 9844 10326 10358 10439 11510 11631 12017 12717 14301 14929
15887 16111 16491 16852 17068 17098 17205 17475 19652 21168 21256 21908 22407 22426 23084 23179
23259 24324 24356 25156 25220 25286 25516 25940 26252 27381 29213 30647 31504 32519 32670 32686
32947 33253 33327 33403 33422 34125 34144 34492 35795 36103 36155
209: 649 651 652 1208 1741 3649 3854 4415 4416 4417 7216 15075
210: 841 1011 1012 1587 1870 2197 2674 3144 4050 5693 11260 17773 19228 19855 22689 29389
211: 486 487 792 1194 1317 1407 1448 1848 1959 2239 2410 2466 2738 2972 3123 3197 3334 3399 3436
3441 3442 3467 3497 3906 4021 4283 4424 5112 5720 5763 6037 6189 6475 6873 7373 7890 7927 7966 7968
8027 8034 8054 8818 11412 12503 13227 16874 18580 18939 19122 19426 19464 19901 20365 20398 21440
21481 21482 21542 21558 22491 22625 22766 24704 26962 33065 35533
212: 1136 3162 3655 3778 5114 5735 7934 8877 9135 9190 9700 13667 14216 14661 15274 16496 17477
18585 18696 19307 20073 20420 21496 22814 24712 26796 31775 35992 35993 35994 35995 35996 36227
213: 852 1118 1565 1598 1958 2130 2131 2739 2798 2962 2991 3202 4055 4067 4444 4560 4609 4672 4678
4779 4814 4859 5040 5257 5300 5765 5949 5964 5993 6094 6134 6198 6820 6917 6918 6946 6984 7220 7265
7959 8047 8179 8421 8555 8585 8675 8718 9191 9256 9352 9378 9500 9596 9879 9913 9988 10011 10148
10477 10492 10620 11426 11495 11646 11805 11814 12010 12342 12487 12513 12609 12912 13485 13486
13569 13631 13916 14109 14434 14631 14897 15042 15065 15257 15351 15561 15926 16509 16590 16790
17032 17428 17940 18009 18433 18693 18822 18868 19107 19148 19480 19486 19647 19896 19999 20314
20360 20543 20684 20916 21013 21079 21116 21865 22182 22372 22545 22546 22608 22761 23177 23412
23564 23571 23640 23983 24960 25166 25253 25302 25922 25989 26232 26270 26277 26278 26296 26507
26588 27235 27236 27237 27245 27246 27903 27978 28927 28941 29468 29860 29877 30038 30082 30211
30341 30516 30575 30622 30690 30698 30760 30951 30952 30953 30954 31574 31575 31686 31699 31765
31975 32242 32517 32642 32645 33062 33178 33400 33401 33408 33420 33473 33474 33795 33991 34279
34391 34573 34608 34630 34700 34751 35079 35258 35541 35787 35824 35836 35937 35941 35965 36350
36351
214: 867 1189 1335 1752 1905 1951 1961 2139 2156 2520 2923 3053 3268 6416 6440 6641 6642 6643 6827
13069 14212 14213 14836 15301 15302 15303 17645 17860 18969 19024 19357 19819 20076 22566 22910
22931 23327 26512 28469 30316 30968 30969 30970 31191 31428 32845 33794
215: 937 983 1036 1345 1360 1469 2126 2127 2128 2129 2256 2382 2414 2629 2813 2982 3194 3328 3344
3463 3483 3494 3552 3616 3641 3740 3845 3919 4119 4180 4216 4220 4229 4264 4314 4325 5682 5714 5783
5810 6063 7879 8023 8438 9026 9027 9028 9029 9030 9031 9032 9040 9689 10238 13984 14001 14063
14064 14099 14119 14137 16144 17390 17791 18638 18796 18800 18930 19141 19437 19821 20429 20535
21406 21452 21620 21659 21919 21920 22682 29757 31067 31145 32956 33927 33931 33932 33933
216: 1112 2306 4982 5756 6025 6482 6865 6904 7153 7608 7949 8578 10178 11256 11916 12380 12982
13003 13701 14105 14422 15416 15563 15757 15792 16315 17526 17550 18997 19109 19517 19518 20087
20678 21349 22228 22628 23715 24858 26273 26608 26998 27208 28181 28232 28303 28451 30759 31349
31708 31922 32144 33239 36442
217: 641 657 708 1283 1326 1696 1859 1955 2001 4274 4771 5188 5427 5902 6404 7334 7351 7673 8077
8363 8482 8483 8878 9348 9494 9654 10138 10155 11176 11276 11317 12988 13209 13324 13325 14087
14899 15111 15312 15318 15426 15436 15498 16033 16280 16473 16698 17330 17469 17644 18267 19083
19289 19760 20013 20056 20462 20920 20927 20928 20952 21087 21223 21224 21226 21227 21310 21836
22780 23677 23689 23809 23810 23861 23910 24161 24166 24538 24541 24739 24919 24920 24921 24923
24924 24925 24926 24927 24928 24929 24930 24931 24932 24933 24937 24961 24971 25084 25085 25314
25315 25316 25317 25318 25319 25321 25322 25323 25484 25653 25673 25674 25675 25912 26062 26063
26064 26065 26066 26667 26900 26904 27046 27586 27587 27588 27589 27590 27591 27592 27593 27594
27595 27596 28373 28773 29011 29012 29013 29846 29850 29851 29852 30584 30825 31085 31086 31087
31089 31090 31175 31176 31177 31196 31269 31321 31429 31431 31561 31576 31598 31828 31831 32089
32601 33018 33966 34207 34208 34462 34466 34640 34641 34642 34648 34845 34923 35177 35178 35248
35249 35293 35300 35605 35607 36303 36304 36305 36419
218: 813 952 1223 1228 1990 2111 2301 2634 2635 3060 3835 3975 4308 4428 4485 11914 11915 13807
13938 15278 15954 16418 17821 18651 18972 19056 20112 21330 21379 22622 27484 27601 30811 30812
31968
219: 1218 2342 2368 2467 2527 2743 3032 3603 3849 4015 4049 5861 6857 10518 10519 10520 10521 10522
10523 10524 10525 16141 17746 17878 19046 19383 20377 20383 20405 21398 21515 25469
220: 629 823 1082 1083 1084 1231 1607 4418 4419 4695 5421 6504 6639 6640 6891 6892 7581 7582 7583
7584 7789 8200 8201 8202 8203 8204 8205 8206 8207 8208 9023 9376 9395 9397 10124 10226 10881 11354
11355 11356 11409 11410 11439 11904 12777 12778 12779 12780 12781 12782 12783 12784 12785 12786
12787 12962 12963 12964 12965 12966 12967 12968 13121 13122 13663 15953 16495 16776 16873 17668
17699 18325 18544 18664 18665 18666 19037 19038 19039 19040 19041 19042 19512 19513 19514 19515
19516 19687 19688 19689 19690 19762 19801 19802 19803 19804 19805 19806 20023 20024 20334 20642
20783 20784 20931 21944 21945 21946 21947 21948 21949 21950 21951 21952 21953 22611 22884 22911
23912 23914 24691 24804 25428 26083 26120 26443 26602 26775 26776 26777 27147 27669 31170 31171
31172 31173 31174 31566 33042 33043 33044 33045 33046 33047 33048 33049 33264 33265 33266 33939
33940 33941 33944 33948 33949 33950 33951 33952 33953 33954 33955 34366 34367 34368 35290 35292
35297 35359 35360 35361 36336 36337
221: 853 1096 11376 19989 22827 22828
222: 1202 2046 2365 3221 6188 8026 9375 9476 11325 11326 19447 19968 19969 21529 22883 22977 25992
36331
223: 605 606 1622 1687 1820 2031 2416 2550 2657 2755 3038 3072 3117 3163 3195 3228 3554 3682 3741
3783 3884 3885 4117 4163 4196 4345 4392 4448 4465 4705 4717 4739 4754 5120 5187 5189 5483 5852 6107
6108 6404 6493 6983 8484 8485 8487 8498 9120 9123 9180 9181 10532 10592 10924 10925 11219 12705
12706 12707 12987 13322 13323 14025 14655 15436 15494 15510 15553 15793 15794 16008 16280 16289
16698 16791 17692 17780 18271 18572 18792 18947 19027 19360 20036 20318 20450 21087 21222 21223
21224 21226 21227 21340 21446 21788 21915 21916 21917 22469 23063 23674 23675 23690 23910 24161
24321 24536 24537 24538 24541 24689 24690 24727 24757 24803 24919 24922 24924 24930 24935 24936
25310 25314 25315 25320 25324 25325 25653 25938 26063 26064 26065 26440 26487 26491 26504 26529
26530 26655 26656 26667 26900 26902 26904 26905 26906 26907 26908 26913 26919 27046 27823 28280
28374 28562 29847 29849 30097 30629 30825 31088 31091 31122 31123 31157 31188 31192 31315 31316
31430 31431 31432 31533 31598 31753 31754 31829 31830 31978 31980 31981 31982 31983 32596 32597
32600 32826 33018 33822 33823 33966 34923 35248 35250 35605 35607 36301 36302 36315 36316 36317
36318
224: 1701 1703 1756 1757 2123 2177 2208 2233 2234 2356 2392 2538 2666 2712 2740 2750 2844 2906 3033
3301 3327 3367 3504 3553 3565 3588 3727 3728 3733 3791 3844 3914 3980 3999 4381 5194 5656 5657 5658
5659 5660 5661 5662 5669 5670 5683 5798 5807 6480 6971 7149 7327 7491 7492 7880 7903 7904 8024 8075
8076 8976 8977 9063 9076 9647 9739 9740 9896 10048 10049 10050 11478 11482 11964 11965 12243 12246
12596 12597 12598 13070 13200 13201 13202 13203 13204 13205 13206 13207 13225 13226 13252 13355
13413 13803 13870 13937 14080 14163 14164 14165 14210 14235 14441 14465 14667 14894 15182 15506
15507 15508 15773 15774 15775 15776 15777 15778 15779 15780 16231 16290 16329 16512 16767 16768
16769 16770 16771 16772 17751 17761 17772 17848 18178 18277 18554 18695 19164 19166 19519 19520
19521 19522 19523 19524 19525 19526 19601 20142 20176 20177 20178 20179 20180 20181 20182 20335
20336 21393 21421 21431 21454 21485 21522 21528 21597 21635 21657 21800 21942 22641 22812 23212
23661 23745 23746 23747 25676 25677 25678 25679 25970 25996 26018 26446 26525 27834 28325 28369
28392 29853 31197 31265 32157 32310 32320 33956 33967 33973 34001 34110 34458 34459 34460 34461
34927 35364
225: 801 972 1504 1700 1825 1864 2124 2305 2422 3176 3321 3614 3677 3678 3789 4890 5181 5182 5183
5873 5874 5875 5876 5877 5878 5879 5880 5881 5882 5883 5884 5885 5886 5887 5888 5889 5890 5891 5892
5893 5894 5895 5896 5897 5898 7991 10424 11266 11350 11351 13939 17505 17683 18790 18963 19136
19198 19428 19866 19911 19912 20797 20798 21055 21366 22727 22882 23310 23799 23800 23801 23802
24065 24734 26918 28376 31534 35617 36232 36312 36313
226: 1253 1689 2546 3133 3764 4257 4316 4357 4413 4514 4541 4621 4640 4679 4818 4844 4924 4925 4927
4932 4950 4969 5082 5133 5219 5296 5340 5361 5411 5453 5480 5541 5587 5931 5973 6066 6154 6220 6257
6262 6312 6332 6346 6354 6576 6584 6622 6738 6974 7035 7050 7074 7129 7180 7288 7289 7415 7422 7495
7496 7589 7590 7694 7883 7886 7887 7971 7981 8044 8123 8131 8141 8256 8265 8318 8328 8339 8351 8512
8524 8549 8589 8686 8759 8787 8868 8872 8993 8994 9060 9061 9075 9081 9103 9168 9169 9239 9324 9344
9396 9517 9612 9761 9764 9765 9768 9782 9812 10014 10076 10091 10116 10149 10169 10184 10318 10355
10447 10516 10517 10584 10656 10703 10732 10855 10856 10858 10862 10909 10974 10990 11081 11315
11414 11496 11508 11538 11564 11629 11718 11790 11798 11827 11868 11959 12022 12029 12046 12091
12312 12335 12431 12435 12516 12553 12611 12612 12619 12645 12697 12719 12758 12846 12917 12979
12980 13040 13132 13193 13194 13454 13515 13551 13670 13678 13683 13697 13846 13855 13886 13900
14050 14397 14421 14456 14531 14576 14597 14678 14793 14798 14799 14947 15025 15066 15120 15122
15137 15138 15296 15297 15381 15543 15544 15666 15769 15803 15804 15881 15883 15964 15980 16084
16176 16202 16316 16340 16559 16628 16672 16680 16689 16690 16693 16727 16755 16864 17030 17041
17094 17177 17217 17238 17350 17376 17413 17514 17575 17593 17770 17854 18104 18242 18244 18319
18335 18370 18405 18447 18481 18810 18902 18903 19313 19314 19315 19436 19609 19710 20009 20010
20057 20266 20271 20310 20442 20548 20566 20624 20639 20703 20720 20829 20853 20864 20870 20914
21030 21078 21099 21108 21113 21255 21346 21690 21691 21740 21752 21816 21990 22058 22063 22157
22272 22313 22339 22406 22417 22510 22538 22636 22877 23103 23132 23204 23243 23258 23326 23328
23329 23391 23428 23468 23486 23519 23612 23636 23739 23762 23783 23848 23853 23951 23976 24038
24102 24136 24148 24164 24343 24385 24398 24430 24458 24465 24500 24557 24560 24572 24591 24624
24656 24683 24738 24907 24948 25002 25049 25238 25291 25311 25359 25495 25618 25644 25705 25772
25825 25855 25921 25925 26207 26357 26408 26691 26709 26719 26769 26839 26866 26870 26982 27021
27094 27120 27121 27189 27215 27286 27352 27447 27449 27450 27515 27534 27540 27543 27572 27609
27612 27634 27640 27646 27714 27716 27743 27746 27870 27894 27900 27913 27917 27944 28046 28095
28139 28147 28230 28241 28304 28343 28428 28526 28527 28649 28690 28793 28813 28814 28825 28840
28849 28857 28863 28899 28924 28929 28951 28985 29102 29129 29163 29186 29240 29332 29343 29356
29513 29558 29591 29615 29648 29676 29677 29726 29832 29886 29912 29939 29943 30012 30058 30090
30121 30199 30217 30250 30251 30285 30324 30339 30340 30343 30373 30381 30432 30482 30598 30606
30618 30700 30713 30724 30785 30863 30891 30915 30925 30932 31016 31389 31446 31454 31475 31494
31563 31594 31595 31668 31669 31670 31701 31703 31715 31834 31845 31901 31909 31972 32005 32079
32111 32152 32190 32219 32296 32331 32366 32391 32417 32460 32507 32515 32698 32700 32732 32796
32899 32982 33066 33086 33128 33174 33342 33488 33595 33612 33638 33839 33854 33865 33972 34092
34102 34198 34209 34246 34248 34300 34310 34507 34607 34687 34736 34787 34860 34915 34966 34995
35047 35088 35150 35166 35183 35278 35299 35401 35425 35487 35581 35582 35658 35667 35749 35777
35862 35922 35956 36024 36035 36096 36098 36178 36184 36219 36259 36276 36285 36401 36434 36435
36436 36437 36438 36439 36440 36441
227: 591 922 926 981 1050 1333 1352 1483 1554 1571 1617 1620 1621 1623 1629 1640 1749 1807 2002 2011
2095 2190 2246 2284 2330 2524 2545 2569 2600 2791 2833 2863 2864 2966 2988 3113 3139 3146 3263 3296
3300 3305 3527 3576 3643 3644 3645 3708 3725 3831 3848 3893 3995 4030 4102 4108 4111 4218 4219 4324
4343 4359 4441 4442 4482 4589 4605 4804 4812 4836 4878 4996 5064 5129 5311 5359 5402 5423 5424 5432
5467 5524 5637 5746 5942 6009 6023 6087 6245 6313 6347 6351 6364 6487 6574 6594 6600 6601 6630 6657
6707 6715 6746 6795 6841 6937 6993 7033 7077 7281 7282 7602 8094 8258 8311 8332 8403 8643 8779 8784
8785 8801 8812 8813 8814 8893 9010 9011 9157 9233 9275 9278 9454 9578 9599 9616 9698 9705 9777 9932
9953 9976 10111 10130 10190 10324 10350 10529 10564 10603 10808 10873 10965 11055 11056 11079
11102 11151 11171 11235 11236 11243 11265 11464 11499 11526 11626 11746 11799 11853 11932 11936
11962 12075 12474 12494 12638 12694 12811 12849 12944 13027 13034 13156 13547 13621 13772 13833
13976 13989 14125 14144 14166 14272 14404 14673 14679 14680 14689 14760 14904 14989 14992 15237
15339 15346 15534 15660 15719 15733 15960 16041 16042 16097 16121 16183 16192 16193 16372 16401
16508 16603 16619 16711 16725 16810 17127 17128 17130 17153 17173 17175 17235 17343 17472 17637
17639 17682 17700 17818 18006 18024 18298 18348 18392 18595 18701 18845 18986 19087 19195 19499
19503 19622 19691 19865 20130 20143 20190 20276 20287 20568 20576 20643 20732 20820 20821 20828
20832 20838 20840 20842 20895 21070 21072 21112 21148 21253 21505 21650 21737 21747 21832 21894
21925 22014 22029 22074 22101 22104 22139 22192 22196 22425 22482 22488 22494 22495 22790 22845
23099 23113 23118 23127 23209 23234 23450 23577 23581 23656 23671 23672 23720 23829 23855 23864
23865 23999 24084 24117 24156 24300 24301 24443 24452 24462 24516 24573 24604 24614 24621 24674
24692 24711 24716 24760 24860 24890 24918 24958 25008 25057 25179 25191 25192 25193 25203 25260
25261 25512 25544 25554 25579 25603 25604 25688 25756 25784 25845 25931 25957 26009 26023 26024
26025 26037 26067 26191 26263 26280 26303 26352 26557 26559 26674 26850 26860 26869 27016 27066
27299 27311 27376 27391 27392 27522 27556 27624 27659 27690 27719 27726 27843 27920 27929 28083
28170 28222 28307 28386 28476 28551 28564 28592 28786 28787 28853 28880 28933 29018 29183 29197
29210 29229 29288 29295 29323 29390 29412 29432 29465 29634 29927 29931 30013 30061 30062 30079
30235 30353 30362 30402 30549 30667 30765 30776 30819 30861 30956 30987 31074 31110 31111 31131
31236 31318 31369 31414 31522 31592 31606 31658 31725 31771 31802 31814 31948 31951 31984 32092
32175 32176 32227 32250 32252 32404 32446 32525 32634 32718 32765 32863 32869 33035 33267 33284
33339 33402 33547 33592 33651 33659 33665 33677 33784 33802 33806 33813 33814 33857 34000 34027
34051 34083 34091 34095 34121 34142 34431 34489 34530 34614 34723 34828 34958 35037 35081 35140
35264 35408 35466 35484 35536 35584 35634 35721 35730 35973 36046 36424 36433
228: 3951 4570 4731 4802 4904 4907 4926 4949 4953 4962 5012 5212 5347 5468 5673 6131 6151 6217 6236
6263 6275 6291 6337 6340 6496 6564 6679 6805 6932 7005 7053 7125 7187 7290 7311 7324 7439 7480 7485
7674 7798 7803 7804 7805 7806 7807 7808 7809 7810 7811 7812 7813 7814 7815 7816 7817 7818 7819 7820
7821 7822 7823 7824 7825 7826 7827 7828 7829 7830 7831 7832 7833 7834 7835 7836 7837 7838 7839 7840
7841 7842 7843 7844 7845 8101 8150 8267 8308 8322 8343 8399 8424 8425 8433 8527 8616 8617 8619 8644
8782 8810 8851 8896 8898 8917 8926 9117 9206 9247 9293 9308 9310 9311 9312 9313 9314 9315 9316 9317
9318 9319 9320 9502 9564 9567 9618 9742 9758 9770 9975 9983 10085 10109 10110 10112 10300 10377
10384 10395 10495 10558 10577 10587 10675 10697 10722 10788 10844 10896 10916 10950 10968 10989
11015 11099 11100 11105 11142 11161 11481 11515 11524 11554 11648 11658 11695 11711 11770 11788
12071 12087 12159 12189 12332 12353 12371 12635 12802 12838 12883 12925 13031 13057 13080 13129
13162 13565 13571 13583 13628 13641 13724 13746 13760 13768 13928 13943 13968 14108 14200 14229
14295 14423 14532 14535 14536 14572 14599 14664 14698 14725 14774 14817 14859 15005 15063 15118
15141 15152 15215 15376 15423 15519 15756 15860 15896 15981 16105 16211 16235 16262 16384 16419
16514 16578 16654 16655 16669 16738 16748 16750 16826 16846 16865 17073 17110 17345 17422 17562
17594 17939 17983 18018 18022 18090 18093 18120 18217 18219 18305 18341 18406 18413 18494 18678
18734 18770 19103 19633 19644 19717 19736 20241 20292 20571 20884 20972 20997 21075 21129 21235
21305 21744 21786 21817 21848 21854 21900 21938 21975 22068 22081 22126 22199 22269 22408 22413
23098 23184 23287 23320 23472 23485 23526 23539 23632 23659 23696 23777 23794 23813 23814 23844
23945 24014 24036 24076 24077 24079 24098 24105 24140 24350 24482 24492 24511 24525 24581 24640
24649 24772 24845 24883 24909 24945 24997 25056 25148 25210 25390 25507 25538 25565 25611 25628
25712 25789 25874 25964 26021 26193 26257 26262 26368 26379 26586 26679 26685 26759 26782 26783
26787 26814 26882 26890 27143 27210 27278 27394 27469 27524 27547 27549 27554 27622 27623 27635
27654 27678 27689 27740 27825 27939 27969 28012 28106 28288 28468 28529 28605 28678 28743 28762
28779 28807 28808 28812 28869 28912 28989 29099 29137 29159 29166 29194 29207 29303 29349 29416
29443 29505 29564 29595 29605 29654 29786 29807 29876 29879 29894 29953 29966 30043 30074 30153
30241 30286 30313 30366 30406 30450 30500 30717 30781 30789 30805 30807 30826 30990 31021 31042
31051 31095 31096 31113 31116 31137 31459 31582 31730 31807 31861 32122 32169 32294 32428 32441
32452 32523 32659 32674 32758 32804 32805 32806 32807 32808 32809 32810 32811 32812 32813 32814
32815 32816 32817 32818 32819 32820 32821 32822 32877 32909 32973 33208 33285 33433 33510 33558
33570 33590 33591 33654 33657 33837 33853 33870 33877 34021 34060 34068 34071 34094 34135 34377
34622 34651 34785 34821 34838 34947 34989 35044 35092 35116 35127 35220 35243 35259 35439 35443
35563 35576 35760 35803 35818 35821 36090 36202
229: 4569 4701 4732 4791 4834 4835 4914 4956 5013 5035 5205 5211 5346 5392 5434 5561 5574 5928 6121
6140 6222 6237 6299 6320 6350 6384 6563 6720 6816 6879 7006 7188 7234 7279 7310 7322 7423 7460 7470
7799 7800 7801 7802 7848 7849 8102 8266 8412 8516 8528 8623 8645 8653 8660 8735 8773 8808 8852 8904
9199 9218 9261 9568 9581 9617 9677 9741 9788 9818 9917 9984 10053 10301 10385 10387 10388 10490
10494 10557 10576 10685 10698 10726 10787 10845 10906 10917 10946 10967 11094 11116 11147 11473
11474 11475 11476 11477 11540 11558 11608 11649 11650 11651 11681 11769 11855 12032 12040 12070
12152 12191 12253 12311 12372 12519 12536 12648 12752 12762 12830 12831 12833 12910 12939 12990
13033 13056 13059 13085 13161 13262 13439 13572 13574 13575 13632 13634 13635 13720 13810 14011
14218 14228 14241 14242 14296 14571 14588 14598 14699 14752 14765 14781 14946 14959 15036 15047
15142 15214 15422 15884 15895 15916 15938 16106 16212 16271 16385 16523 16576 16581 16587 16657
16739 16749 16798 16827 16847 16986 16990 17111 17344 17412 17563 17716 17722 17902 17936 17998
18017 18078 18119 18131 18148 18303 18304 18440 18441 18459 18509 18677 18758 19470 19643 19645
19668 19705 19743 20253 20267 20570 20588 20606 20707 20817 20835 20908 20943 20971 21018 21046
21048 21128 21216 21234 21262 21302 21303 21745 21775 21813 21858 21901 21974 21980 22080 22375
22410 23017 23097 23185 23214 23269 23270 23271 23319 23353 23471 23538 23545 23552 23611 23658
23697 23722 23776 23821 23937 23987 24015 24093 24104 24128 24349 24505 24551 24776 24791 24826
24846 24862 24863 24864 24865 24908 24944 24998 25150 25152 25184 25206 25209 25239 25270 25274
25292 25499 25506 25561 25566 25608 25627 25783 25790 25853 25869 25870 25965 26059 26226 26258
26346 26367 26585 26684 26729 26750 26786 26815 27152 27173 27183 27184 27277 27281 27390 27411
27496 27523 27566 27604 27677 27780 27831 27849 27858 27873 27880 27942 27955 28011 28044 28080
28107 28287 28509 28516 28528 28604 28653 28684 28744 28761 28896 28978 28988 29084 29085 29086
29136 29165 29188 29273 29281 29334 29348 29359 29444 29506 29522 29523 29563 29594 29655 29720
29779 29798 29873 29874 29910 29954 29979 30042 30059 30064 30127 30148 30198 30209 30242 30305
30379 30405 30449 30470 30501 30605 30678 30788 30817 30838 30902 30989 31031 31084 31485 31583
31584 31585 31586 31816 31860 31865 31973 31993 32168 32191 32226 32298 32312 32313 32314 32315
32316 32317 32318 32319 32370 32423 32429 32476 32589 32607 32660 32697 32707 32720 32759 32908
33054 33076 33092 33165 33207 33209 33251 33255 33257 33312 33363 33425 33434 33435 33446 33454
33571 33577 33655 33656 33871 34067 34072 34093 34100 34119 34152 34153 34261 34270 34325 34352
34356 34407 34502 34737 34874 34890 34899 34919 34928 34946 35043 35071 35082 35126 35260 35378
35438 35577 35611 35613 35701 35815 35858 35898 35906 35923 35982 36016 36100 36203 36395 36413
230: 1985 2721 2722 2973 3824 4185 4223 4445 4491 4564 4921 4946 4972 5105 5218 5247 5250 5320 5759
6071 6717 6808 7195 7631 7660 7689 7729 8112 8113 8146 8294 8315 8357 8647 8963 9521 9786 9801
10059 10060 10290 10596 10851 10888 11456 11484 11505 11811 12055 12076 12146 12196 12205 12307
12582 12602 12620 12855 12907 13075 13488 13540 13614 13842 14047 14090 14158 14278 14486 14767
14776 14812 14883 15124 15153 15333 15782 16022 16130 16199 16649 16717 16732 17099 17410 17669
17831 17923 17982 18191 18195 18372 18514 18604 18727 19268 19636 20428 20734 20846 21313 22146
22165 22281 22445 22483 22554 22782 23054 23129 23206 23653 23758 23788 23798 24424 24478 24588
24637 25025 25342 25363 25405 25518 25630 25745 26562 26834 26879 27570 27613 27639 27694 27749
27918 27919 27953 28823 28824 28838 28858 28915 28953 29092 29455 29870 29923 29936 30137 30268
30318 30360 30568 30603 31443 31457 31819 32022 32537 32987 33397 33531 33777 33827 34005 34044
34674 34790 34999 35412 35418
231: 666 1385 1618 2310 3106 3232 3314 3575 3590 3827 4014 4082 4181 5196 5213 5214 5215 5216 5217
5218 5219 5220 5221 5222 5223 5224 5225 5226 5227 5228 5229 5230 5730 6045 6934 8083 9079 9491 9936
12409 12788 12899 12953 12977 13877 14088 14124 14151 14366 14652 14905 15108 15434 15491 15661
15750 17800 18013 18259 18352 18388 18811 18974 18985 19054 19595 19872 19997 20536 20948 22623
22857 22948 23227 23686 23890 23891 23893 23896 23897 23898 23900 25080 25081 25082 25471 25662
26190 26938 27006 27138 28151 28259 28334 28384 28418 28460 28968 30715 30716 31061 31160 31339
31340 31392 31717 31912 32097 32859 32962 32963 33511 33616 33706 33817 33886 33887 36170
232: 709 944 1328 1339 1427 1501 1576 1783 1784 1967 2171 2274 2338 2367 2430 2451 2571 2577 2680
2753 2824 2874 2890 2891 2898 2930 2938 2976 3001 3002 3006 3042 3069 3105 3111 3137 3209 3242 3275
3278 3285 3312 3316 3318 3366 3407 3430 3435 3481 3545 3598 3625 3648 3679 3734 3748 3749 3806 3807
3860 3890 3937 3944 4006 4039 4097 4164 4199 4209 4260 4262 4289 4322 4390 4397 5420 5738 5819 5846
5916 6020 6470 6833 7304 7935 7942 7984 7998 8013 8056 8142 8965 8985 9038 9057 9195 9651 10143
10550 11287 12454 13788 13869 13945 14084 14221 14222 14223 14224 14225 15107 15271 15295 15393
15432 16067 16299 16792 17496 17529 17813 18248 18534 18590 18945 19059 19237 19275 19584 19923
20344 20395 20426 20646 20648 21231 21338 21396 21497 21568 21637 21814 21828 22872 22995 23797
24684 24685 24699 24700 24861 24966 25451 25979 25986 28370 28371 29742 29804 29859 30395 31030
31070 31101 31194 31195 31253 31590 34379 34739 35537
233:
234: 642 731 959 993 1130 1255 1366 1583 2462 3055 3237 4484 5752 5822 7881 13698 14020 14103 21057
21434 22688 22810 22850 23805 25995
235: 1175 1261 1301 1937 2108 2281 2431 2432 2701 2939 2946 3135 3955 4529 4634 4691 4776 4866 4934
4945 5039 5199 5303 5381 5416 5547 5580 6011 6022 6076 6123 6230 6264 6309 6321 6554 6638 6719 6797
7030 7047 7108 7215 7294 7306 7462 8022 8115 8195 8277 8362 8552 8700 8767 8870 9232 9619 9686 9690
9837 9860 9927 10077 10119 10243 10333 10335 10410 10466 10554 10707 10720 10740 10751 10832
10912 10927 10958 10959 11010 11035 11164 11461 11552 11670 11707 11767 11833 11844 11849 11873
11920 12035 12100 12180 12249 12338 12421 12520 12700 12729 12871 12886 12891 12900 13054 13093
13174 13186 13521 13600 13652 13944 14044 14060 14135 14188 14307 14482 14581 14604 14635 14675
14914 15020 15159 15267 15311 15418 15924 15994 16058 16110 16118 16194 16528 16634 16662 16685
16764 16799 17057 17210 17268 17331 17444 17445 17520 17557 17570 17737 17758 17964 18076 18109
18364 18415 18451 18675 18706 18825 18863 18964 19201 19667 19708 19868 20164 20193 20215 20290
20458 20589 20826 20915 20963 21006 21082 21127 21142 21300 21314 21672 21716 21767 21909 22015
22093 22288 22350 22384 22537 22848 23115 23167 23339 23459 23601 23692 23744 23753 23881 23909
23982 23989 24085 24155 24316 24365 24378 24411 24417 24533 24553 24701 24832 24900 24981 25041
25105 25123 25124 25136 25415 25552 25563 25594 25613 25632 25727 25814 25837 25969 25999 26000
26001 26012 26013 26014 26015 26205 26381 26390 26590 26703 26707 26749 26771 27117 27271 27275
27319 27330 27336 27468 27507 27620 27867 27891 27974 28130 28504 28560 28575 28610 28680 28758
28827 28981 29147 29182 29221 29326 29398 29514 29572 29603 29785 29815 29902 30030 30047 30096
30117 30161 30219 30257 30383 30433 30459 30471 30497 30627 30664 30810 30840 30883 30890 30903
30935 30965 30974 31059 31130 31147 31165 31207 31531 31573 31832 31858 32224 32278 32361 32413
32477 32486 32524 32715 32721 32794 32907 33201 33290 33371 33506 33522 33614 33646 33705 33783
33879 34048 34096 34168 34240 34263 34318 34433 34497 34550 34639 34663 34699 34786 34834 34892
34903 34910 34918 34964 35077 35191 35262 35404 35476 35662 35698 35784 35909 35986 36027 36138
36220 36245 36356 36378
236: 1024 1295 1600 2374 2443 2955 3156 3177 3212 3602 3913 4273 4893 5704 6445 9433 13709 17784
19381 20047 21448 22580 36326
237: 923 1125 1258 1699 1983 2012 2426 2441 2744 2795 2852 3220 3331 4480 4481 9034 9401 9683 11307
16137 17788 17789 17816 18530 18576 18592 19073 19812 20348 21096 21351 22712 22991
238: 420 764 1348 1717 1763 1842 1963 1971 2169 2491 2513 2802 2803 3091 3363 3609 3988 4487 4488
5147 5625 5757 5869 6412 6670 6825 7348 7760 8408 8825 9002 9070 9162 10145 11059 11209 11210
11571 11573 12114 12293 12463 12673 13006 14006 15178 15538 15730 15731 15732 15805 16410 16429
16430 16431 16432 16433 16434 16436 16440 16888 17436 17690 17828 17876 18008 18601 18649 18836
19070 19124 19179 19233 19448 19833 20065 20131 22607 22640 22825 22898 22906 22908 24545 24547
25059 25060 25061 25062 25063 25064 25065 26420 26490 26798 27485 27529 27794 28350 29376 30547
31656 31716 31726 31916 33508 33513 33960 33961 33962 33963 33964 33965 33968 34456 35254
239: 1782 1866 2038 2082 2214 2262 2264 2270 2279 2303 2323 2326 2346 2384 2388 2423 2429 2437 2464
2482 2511 2522 2531 2552 2553 2589 2614 2637 2644 2671 2672 2745 2764 2773 2817 2842 2879 2882 2899
2941 2951 2990 2993 3026 3045 3074 3084 3109 3131 3167 3223 3247 3255 3266 3274 3302 3339 3380 3394
3434 3447 3452 3489 3490 3492 3515 3517 3526 3536 3544 3566 3568 3578 3579 3581 3607 3615 3640 3660
3663 3681 3698 3699 3716 3826 3838 3867 3887 3910 3920 3956 3996 4007 4051 4075 4078 4092 4217 4254
4269 4281 4291 4311 4341 4350 4352 4371 4374 4376 4386 4693 5696 5697 5699 5731 5767 5768 5787 5800
5808 5858 5867 5868 6185 6187 6190 6458 7892 7893 7909 7910 7912 7919 7960 7985 7992 8031 8048 8057
9695 9707 9720 10220 10221 11068 12505 12975 13708 13892 13896 13898 13929 13935 13954 13956
13975 14045 14136 14149 14902 16047 16056 16894 16895 16896 17654 17659 17742 17749 17752 17767
17775 17779 17801 17824 17841 17843 17864 17870 17873 18168 18170 18551 18569 18581 18611 18636
18643 18793 18797 18798 18807 18940 18941 20342 20364 20415 20425 20454 21094 21354 21386 21428
21436 21439 21441 21442 21443 21472 21490 21494 21500 21501 21536 21545 21551 21559 21560 21561
21562 21563 21585 21586 21590 21591 21592 21593 21594 21598 21599 21606 21607 21614 21639 21640
21641 21653 21713 21940 23047 24675 25474 25990 26915 26916 26917 27044 27140 28427 29377 29378
29385 31185 34563 36235 36334
240: 638 663 839 869 1315 1425 1497 1534 1544 2406 3448 4031 4151 6463 6868 9351 9354 11273 13765
13819 13922 14132 15016 18931 19987 20095 21573 22753 22779
241: 1633 1669 2351 2503 2686 2783 2848 3101 3321 3456 3680 3817 4130 4266 5729 5876 5877 5878 5879
5880 5881 5882 5883 5884 5885 5886 5887 5888 5889 5891 5894 5896 5897 5898 9437 9478 10424 11319
11336 15802 17797 17799 19326 19353 19417 19799 20025 20798 21055 21368 21467 21468 21638 22723
22785 23310 24734 24737 26918 31534 34745 35256 35617 36232
242: 309 348 349 410 411 412 619 630 646 675 740 759 811 879 893 898 905 915 919 1015 1094 1169 1260
1265 1268 1375 1421 1533 1551 1593 1595 1654 1656 1693 1792 1826 1853 1861 1899 1919 1920 1921 1944
1956 1966 1968 1982 2009 2013 2017 2023 2049 2053 2060 2078 2140 2141 2186 2227 2260 2265 2290 2348
2408 2409 2459 2495 2507 2514 2525 2693 2741 2768 2770 2788 2841 2895 2934 2950 2983 3040 3062 3089
3129 3138 3246 3257 3342 3349 3382 3385 3403 3404 3408 3422 3433 3466 3469 3479 3488 3498 3499 3505
3523 3539 3619 3668 3669 3711 3767 3776 3850 3857 3859 3863 3865 3872 3891 3931 4036 4124 4138 4157
4182 4183 4222 4296 4307 4336 4367 4380 4384 4410 4434 5153 5618 5688 5721 5836 5847 5853 5925 6265
6390 6460 6472 6840 7146 7217 7303 7374 7504 7610 7885 8041 8052 8073 9129 9130 9131 9132 9133 9353
9358 9364 9369 9627 9628 9629 9630 9632 9633 9634 9635 9636 10239 10246 10255 10269 11233 11245
11279 11340 11366 11425 13345 13365 13414 13415 13416 13417 13418 13419 13420 13421 13422 13789
13792 13821 13828 13843 14048 14152 14206 14207 14208 14209 15067 15405 15407 15408 15410 16145
16455 16779 16780 16781 16783 17391 17523 17649 17663 17677 17888 18021 18179 18180 18263 18532
18579 18928 19000 19023 19047 19108 19134 19139 19159 19184 19217 19230 19290 19404 19410 19412
19450 19500 19501 19766 19917 19998 20031 20077 20123 20125 20128 20352 20354 20402 20550 20551
21100 21211 21325 21334 21355 21392 21437 21450 21483 21550 21576 21632 21633 21664 22565 22599
22609 22781 22802 22836 22851 22887 23002 23012 23015 23016 23068 23681 23682 24069 24696 24778
24779 25313 25445 25892 26041 26042 26048 26049 27110 27148 27149 27437 27990 27999 28006 28007
28285 29528 29685 29686 29687 29688 29689 32927 32928 32930 33033 33844 34259 35255 35282 35285
35288 35289 36007 36332 36420
243: 1304 1750 1906 1989 2000 2066 2102 2107 2109 2167 2287 2390 2452 2549 2605 2883 2945 3000 3018
3248 3510 3599 3665 3816 4002 4115 4153 4162 4202 4205 4212 4243 4284 4319 4373 4383 5179 5180 5834
6109 6457 6847 6981 7217 7303 8964 9481 9631 9692 10152 10153 11348 13700 13721 13791 13802 13867
13936 14003 14148 14206 14207 14208 14209 15069 15070 15071 15406 15411 15760 16048 16143 16160
16455 16994 17126 17674 18021 18179 18532 18804 18929 18953 19187 19270 19374 19500 19501 20018
20058 20361 20409 21391 22594 22691 22726 23045 23067 23068 23681 25313 25651 25654 25690 26043
26044 26045 26046 26047 26050 27109 27193 27423 27770 27774 31083 32856 32857 32937 33033
244: 1304 1750 1906 1989 2000 2066 2102 2107 2109 2167 2287 2390 2452 2549 2605 2883 2945 3000 3018
3248 3510 3599 3665 3816 4002 4115 4153 4162 4202 4205 4212 4243 4284 4319 4373 4383 5179 5180 5834
6109 6457 6847 6981 7217 7303 8964 9481 9631 9692 10152 10153 11348 13700 13721 13791 13802 13867
13936 14003 14148 14206 14207 14208 14209 15069 15070 15071 15406 15411 15760 16048 16143 16160
16455 16994 17126 17674 18021 18179 18532 18804 18929 18953 19187 19270 19374 19500 19501 20018
20058 20361 20409 21391 22594 22691 22726 23045 23067 23068 23681 25313 25651 25654 25690 26043
26044 26045 26046 26047 26050 27109 27193 27423 27770 27774 31083 32856 32857 32937 33033
245: 1304 1750 1906 1989 2000 2066 2102 2107 2109 2167 2287 2390 2452 2549 2605 2883 2945 3000 3018
3248 3510 3599 3665 3816 4002 4115 4153 4162 4202 4205 4212 4243 4284 4319 4373 4383 5179 5180 5834
6109 6457 6847 6981 7217 7303 8964 9481 9631 9692 10152 10153 11348 13700 13721 13791 13802 13867
13936 14003 14148 14206 14207 14208 14209 15069 15070 15071 15406 15411 15760 16048 16143 16160
16455 16994 17126 17674 18021 18179 18532 18804 18929 18953 19187 19270 19374 19500 19501 20018
20058 20361 20409 21391 22594 22691 22726 23045 23067 23068 23681 25313 25651 25654 25690 26043
26044 26045 26046 26047 26050 27109 27193 27423 27770 27774 31083 32856 32857 32937 33033
246: 1883 2489 2498 3870 5152 5154 5155 5179 5618 5925 6265 6850 6981 6982 7146 8499 9384 9490
10151 11232 11244 11253 13345 13414 13415 13416 13417 13418 13419 13420 13421 13422 15068 15760
16307 16455 16779 16780 16781 16782 16783 17741 18532 19022 19086 19091 19500 19501 20083 20129
20145 20438 22631 23681 25313 25654 25690 26043 26044 26045 26046 26047 26050 27774 27998 31139
31652 32929 33033 33844 35255 35282 35285 35288 35289
247: 1334 1813 2327 3007 3617 4304 5742 7943 8040 9330 10210 13957 14052 14309 15813 16993 17650
21043 21044 21362 23218 24422 26274 26980 27249 28236 28297 28417 31401 31433 31738 31923 32133
32858 32912 33238 36017 36335
248: 707 1334 1667 1981 2125 2398 2714 2935 3892 4490 6033 6935 7938 9429 12428 13732 13753 13957
14052 14091 15272 15813 16993 17484 18852 18856 18908 19180 19232 19848 21043 21044 21317 22717
26980 27427 28167 28179 28236 28297 31923 33040 33238 36017 36335
249: 1334 1650 1722 1851 1858 3078 3830 4000 4174 4215 4430 7895 10210 13732 13753 13957 14052
14091 15813 16131 16471 16993 17666 18882 20418 21043 21044 21667 22737 22777 22837 23218 24422
25671 26653 26980 27427 28167 28297 31401 31433 31738 31923 32858 32912 33238 36017 36335
250: 1240 2818 2949 2970 3059 3118 3180 3262 3289 4433 4439 4507 4534 4535 4540 4549 4554 4578 4643
4676 4807 4813 4840 5085 5240 5244 5280 5309 5379 5430 5485 5488 5498 5502 5507 5570 5979 5995 6047
6083 6279 6335 6348 6382 6529 6530 6561 6591 7026 7167 7286 7647 7704 7714 7726 7759 8110 8310 8359
8382 8383 8601 8689 9304 9532 9588 9738 9790 9880 9964 9965 10074 10094 10332 10412 10428 10483
10583 10666 10883 11442 11644 11676 11678 11710 11921 11931 11935 11940 11941 12137 12184 12248
12477 12554 12569 12760 12864 13097 13491 13593 13597 13655 13659 13727 13747 13790 13825 13996
14131 14289 14469 14480 14504 14507 14590 14607 14759 14870 14872 14924 15337 15360 15366 15384
15388 15392 15879 15970 16012 16437 16643 16733 16829 16842 17046 17384 17528 17735 17920 17986
18108 18123 18204 18327 18385 18471 18687 18737 20202 20259 20277 20625 20629 20738 20755 20762
20851 20918 21077 21274 21694 21748 21759 21957 21959 22130 22153 22191 22195 22247 22295 23154
23289 23292 23376 23418 23756 23782 23950 23970 24086 24552 24762 24885 24889 24957 25010 25338
25380 25418 25452 25465 25733 25758 25812 26323 26329 26331 26334 26336 26341 26344 26363 26365
26366 26370 26728 26746 26799 27097 27132 27388 27504 27520 27525 27560 27775 27856 28531 28576
28606 28624 28633 28635 28636 28637 28642 28797 29180 29195 29236 29330 29397 29403 29644 29908
29985 30003 30040 30156 30280 30382 30411 31001 31011 31509 31518 31786 31971 32003 32044 32205
32206 32253 32265 32307 32330 32352 32418 32436 32475 32518 32533 32552 32702 32867 32900 32981
33101 33105 33113 33139 33258 33309 33492 33542 33563 33576 33597 33599 33601 33604 33618 33764
33830 34018 34023 34204 34249 34329 34516 34522 34533 34682 34772 34795 34806 34823 34827 34973
34976 35033 35054 35096 35128 35161 35179 35194 35199 35410 35424 35447 35459 35462 35468 35488
35493 35575 35583 35647 35654 35655 35656 35663 35680 35758 35766 36025 36026 36029 36031 36033
36040 36056 36061 36070 36074 36093 36204 36261 36272
251: 618 671 810 883 1014 1269 1303 1603 1614 1680 1837 1867 2008 2068 2069 2920 3169 3188 3304 3601
3803 4154 4294 4399 5903 5916 6186 6400 6435 7302 7963 8051 8142 8489 8965 8987 9483 9492 9498 9499
10142 10549 10586 11225 11318 11339 11579 11998 13554 13689 13694 13710 13740 13771 13812 13814
13818 13844 13856 13884 13942 13987 14085 14098 14130 14657 14895 15393 15762 15995 16295 17517
17530 18261 18262 18535 18536 18959 19063 19069 19252 19403 19474 20028 20029 20030 20039 20154
20337 20363 20448 21231 21549 22586 22597 22598 22751 22863 22920 22955 25099 25451 25467 25685
25971 25975 25977 25979 25981 25983 26386 26387 26496 27597 29103 30384 30386 30387 30389 31029
31104 31105 31106 32935 33017 33957 34113 34564 35283 35287 35369 35537
252: 1226 1582 1651 1843 1862 1918 2481 2737 2857 3099 3115 3140 3336 3409 3445 3550 3567 3960 4348
4382 9371 13876 13949 19413 19798 21547 22722 22958
253: 647 1109 1250 1566 1954 2658 3924 4387 6051 6831 9423 9464 9684 10233 11391 12430 13926 14000
14056 14065 14066 15105 15655 15656 15657 15658 16035 16157 17398 18886 19018 19094 19095 19988
20091 21499 23717 30317 33022 36168
254: 911 2404 2684 3225 3402 3647 4452 4493 4531 4572 4577 4620 4632 4857 4937 4944 4967 5084 5138
5217 5229 5234 5376 5384 5596 5610 5638 5643 5927 5938 5976 5983 5989 6159 6205 6216 6224 6239 6243
6249 6256 6271 6278 6280 6302 6303 6317 6323 6328 6353 6356 6589 6658 6706 6782 6919 7070 7076 7081
7088 7595 7918 8159 8194 8309 8323 8329 8347 8354 8634 8636 8646 8650 8656 8699 8821 8836 8841 8897
8911 8955 8958 9357 9573 9577 9750 9760 9831 9839 9840 9884 10066 10343 10344 10345 10346 10352
10432 10508 10547 10565 10569 10575 10597 10602 10660 10725 10727 10806 10807 10809 10817 10859
11050 11073 11075 11103 11136 11173 11378 11557 11594 11605 11617 11621 11622 11624 11665 11679
11748 11749 11756 11800 11813 11862 11863 11880 11882 12039 12066 12079 12092 12121 12122 12148
12218 12287 12299 12330 12343 12345 12348 12357 12361 12563 12653 12654 12661 12668 12675 12682
12692 12714 12723 12735 12755 12852 12853 12861 12862 12938 13473 13481 13483 13492 13494 13502
13514 13516 13542 13544 13608 13610 13617 13618 13661 13681 13695 13723 13836 13840 13903 13910
14036 14173 14290 14417 14601 14603 14614 14627 14628 14629 14656 14704 14779 14780 14782 14786
14802 14811 14829 14850 14938 14993 15052 15113 15117 15119 15219 15285 15471 15898 15930 15940
15948 15976 16078 16200 16261 16278 16375 16381 16520 16526 16529 16539 16589 16592 16604 16839
16841 16853 16985 16988 17112 17155 17157 17181 17182 17190 17197 17198 17204 17206 17209 17242
17243 17249 17251 17258 17259 17264 17267 17429 17431 17434 17510 17511 17515 17684 18150 18164
18315 18322 18330 18491 18702 18763 18815 18854 18914 19283 19306 19382 19612 19628 19630 19950
19951 20166 20201 20240 20264 20275 20286 20311 20350 20700 20713 20743 20759 20769 20775 20855
20940 20964 20975 20980 20994 21134 21249 21250 21275 21321 21602 21674 21761 21964 21973 21977
21986 22096 22138 22366 22481 22511 22758 22786 22787 23065 23066 23080 23245 23248 23249 23251
23295 23301 23345 23347 23361 23371 23397 23419 23430 23569 23630 23641 23643 23644 23646 23648
23729 23730 23737 23831 23948 23980 23984 24071 24127 24142 24295 24314 24318 24514 24515 24554
24794 24878 24901 25531 25533 25631 25763 25773 25776 25787 25792 26203 26494 26561 26580 26617
26673 26676 26680 26683 26699 26701 26702 26731 26751 26755 26929 27131 27413 27467 27541 27542
27569 27607 27616 27637 27645 27657 27789 27799 27811 27814 27853 27864 27967 27979 27981 27984
28019 28024 28051 28056 28081 28096 28129 28406 28450 28481 28491 28494 28498 28506 28510 28523
28542 28557 28603 28645 28683 28685 28726 28731 28755 28842 28845 28847 28854 28860 28886 28887
29170 29208 29209 29219 29222 29243 29284 29290 29297 29300 29317 29318 29325 29447 29499 29698
29706 29708 29718 29778 29797 29891 30024 30112 30114 30122 30172 30220 30249 30331 30338 30576
30599 30602 30616 30632 30670 30725 30778 30786 30795 30798 30803 30809 30820 30824 30849 30864
30865 30872 30879 31127 31445 31495 31499 31528 31569 32001 32026 32030 32041 32047 32048 32067
32069 32077 32082 32084 32180 32211 32212 32214 32291 32332 32345 32363 32373 32395 32396 32405
32512 32625 32637 32643 32649 32738 32763 33108 33116 33136 33144 33145 33156 33245 33254 33291
33328 33338 33346 33347 33353 33354 33360 33361 33367 33370 33398 33399 33415 33418 33421 33424
33426 33443 33449 33466 33505 33687 33852 33869 34019 34035 34036 34120 34127 34132 34159 34166
34171 34223 34228 34234 34244 34256 34295 34436 34718 34758 34883 35137 35236 35429 35461 35571
35628 35653 35715 35750 35841 35843 35893 35903 36079 36150 36229 36230 36231 36241 36257 36278
36280 36282
255: 678 976 2324 2397 2585 3225 3979 4349 4530 4531 4568 4572 4577 4620 4622 4623 4632 4654 4667
4674 4685 4690 4857 4876 4937 4967 5138 5234 5536 5610 5638 5643 5772 5857 5927 5938 5940 5975 5983
5989 6159 6205 6216 6224 6239 6243 6244 6256 6271 6278 6302 6317 6323 6328 6329 6344 6353 6355 6356
6682 6706 6727 6729 6736 6756 6782 6783 6799 6811 6817 6903 6977 7070 7076 7081 7120 7184 7190 7205
7595 7962 8050 8149 8159 8188 8194 8276 8323 8329 8347 8368 8604 8605 8606 8650 8674 8693 8699 8790
8830 8836 8897 8911 8955 9497 9565 9573 9577 9750 9831 9839 9884 9926 10008 10066 10287 10319
10343 10344 10346 10352 10357 10360 10380 10427 10432 10508 10547 10569 10575 10578 10590 10600
10602 10626 10634 10643 10659 10665 10725 10807 10809 10817 10859 11050 11073 11075 11103 11136
11173 11489 11494 11501 11509 11534 11557 11594 11605 11617 11621 11635 11643 11665 11748 11749
11800 11813 11862 11863 11878 11881 11882 12027 12039 12058 12066 12078 12079 12092 12122 12148
12218 12257 12275 12286 12287 12310 12322 12330 12345 12348 12357 12361 12515 12563 12607 12610
12614 12617 12642 12653 12661 12678 12692 12714 12723 12735 12755 12837 12853 12857 12913 13432
13434 13443 13463 13473 13481 13483 13495 13502 13514 13516 13542 13544 13559 13566 13617 13624
13681 13695 13769 13836 13895 13903 13910 14036 14173 14261 14279 14290 14291 14426 14601 14603
14614 14627 14629 14656 14670 14704 14779 14780 14782 14786 14828 14938 14941 14993 15052 15113
15119 15197 15209 15216 15219 15230 15232 15240 15253 15471 15898 15930 15940 15948 15973 16085
16200 16243 16248 16261 16278 16353 16365 16375 16381 16520 16529 16539 16567 16594 16724 16744
16745 16756 16760 16839 16992 16995 17028 17034 17045 17063 17069 17080 17081 17090 17112 17132
17157 17181 17182 17188 17190 17198 17206 17209 17242 17243 17249 17260 17263 17264 17267 17411
17431 17434 17510 17515 17586 17684 17745 17748 17953 18150 18164 18230 18290 18294 18312 18317
18330 18332 18342 18347 18382 18491 18550 18763 18815 18854 18914 19249 19328 19411 19612 19628
19630 19669 20109 20149 20201 20240 20263 20264 20275 20279 20286 20311 20585 20740 20743 20775
20855 20934 20940 20975 20980 20994 21134 21249 21260 21278 21498 21548 21584 21589 21674 21761
21880 21882 21964 21973 21977 21979 21989 22048 22096 22138 22206 22511 22657 22844 23046 23049
23050 23065 23066 23125 23131 23135 23136 23137 23149 23153 23175 23180 23192 23198 23245 23248
23251 23267 23301 23345 23357 23361 23370 23397 23399 23409 23427 23430 23608 23630 23643 23644
23648 23729 23730 23737 23823 23826 23831 23837 23839 23852 23856 23948 23984 24127 24295 24326
24332 24333 24341 24342 24375 24377 24394 24401 24428 24434 24438 24467 24468 24473 24499 24514
24521 24554 24594 24596 24599 24601 24626 24627 24655 24795 24878 25101 25498 25531 25533 25551
25668 25720 25721 25729 25763 25773 25776 25785 25787 25792 25994 26203 26516 26561 26580 26617
26671 26673 26683 26699 26701 26702 26731 26751 26755 26765 26837 26845 26847 26881 26895 27131
27197 27220 27265 27413 27467 27541 27542 27569 27607 27616 27637 27645 27657 27686 27687 27710
27713 27717 27735 27787 27811 27814 27853 27861 27879 27907 27925 27927 27932 27954 27967 27981
27984 28019 28024 28030 28051 28056 28058 28081 28096 28119 28135 28148 28212 28313 28423 28424
28450 28481 28491 28494 28498 28503 28510 28523 28542 28552 28603 28683 28716 28721 28729 28755
28845 28847 28854 28887 28904 28921 28922 28942 28945 28946 29097 29104 29105 29108 29170 29208
29216 29220 29222 29243 29277 29283 29284 29296 29300 29315 29317 29318 29325 29392 29429 29447
29467 29473 29499 29536 29537 29540 29573 29574 29577 29698 29706 29708 29718 29778 29797 29884
29891 29932 29952 30006 30114 30122 30172 30228 30327 30331 30393 30564 30570 30576 30599 30602
30604 30616 30632 30670 30680 30725 30786 30795 30798 30803 30824 30846 30864 30865 30879 31094
31127 31263 31366 31511 31569 31570 32001 32021 32047 32048 32067 32069 32077 32082 32108 32180
32211 32212 32214 32258 32291 32326 32363 32395 32396 32405 32512 32606 32617 32625 32643 32649
32738 32763 33006 33108 33116 33144 33145 33229 33245 33346 33347 33353 33366 33367 33370 33384
33386 33389 33416 33443 33466 33496 33505 33687 33700 33852 33869 34009 34019 34029 34035 34036
34120 34127 34139 34140 34159 34171 34180 34190 34223 34228 34234 34244 34256 34295 34309 34428
34436 34525 34713 34718 34758 34883 35236 35238 35239 35272 35298 35429 35461 35628 35653 35715
35725 35750 35841 35843 35893 36079 36116 36150 36153 36229 36230 36231 36241 36257 36274 36280
36281 36282
256: 4542 4819 4865 4901 4958 5142 5238 5317 5594 6010 7681 7860 8338 8342 8763 8829 9779 9834 9928
10062 10415 10750 10904 10991 11053 11130 11133 11536 11675 11953 12065 12139 12164 12562 12664
12765 12776 12796 12804 12820 12865 12888 12893 13594 13658 13673 13674 13845 13889 13902 14049
14113 14506 14530 14761 14825 15023 15128 15993 16276 16616 16644 16743 17571 17944 17992 18103
18162 18188 18346 18404 18423 18495 18496 18517 18764 18850 19737 19753 20171 20195 20229 20246
20261 20814 20906 21032 21243 21685 21769 22056 22136 22183 22436 23217 23235 23291 23444 23748
23850 23858 23859 24050 24092 24154 24436 24469 24597 24628 25371 25525 25559 26371 26712 27072
27088 27349 27514 27536 27571 27614 27618 27631 27647 27792 27871 27895 27915 28118 28520 28596
28736 28892 28893 29101 29187 29829 29916 29976 30203 30376 30427 30476 30677 30679 30842 30909
30937 31132 31425 31821 32726 32800 33052 33192 33294 33552 33562 34046 34224 34239 34301 34418
34457 34494 34725 34764 34896 34908 34956 35091 35237 35390 35472 35635 35673 36048 36409
257: 3951 4570 4731 4802 4904 4907 4926 4949 4953 4962 5012 5212 5347 5468 5673 6131 6151 6217 6236
6263 6275 6291 6337 6340 6496 6564 6679 6805 6932 7005 7053 7125 7187 7290 7311 7324 7439 7480 7485
7674 7798 7803 7804 7805 7806 7807 7808 7809 7810 7811 7812 7813 7814 7815 7816 7817 7818 7819 7820
7821 7822 7823 7824 7825 7826 7827 7828 7829 7830 7831 7832 7833 7834 7835 7836 7837 7838 7839 7840
7841 7842 7843 7844 7845 8101 8150 8267 8308 8322 8343 8399 8424 8425 8433 8527 8616 8617 8619 8644
8782 8810 8851 8896 8898 8917 8926 9117 9206 9247 9293 9308 9310 9311 9312 9313 9314 9315 9316 9317
9318 9319 9320 9502 9564 9567 9618 9742 9758 9770 9975 9983 10085 10109 10110 10112 10300 10377
10384 10395 10495 10558 10577 10587 10675 10697 10722 10788 10844 10896 10916 10950 10968 10989
11015 11099 11100 11105 11142 11161 11481 11515 11524 11554 11648 11658 11695 11711 11770 11788
12071 12087 12159 12189 12332 12353 12371 12635 12802 12838 12883 12925 13031 13057 13080 13129
13162 13565 13571 13583 13628 13641 13724 13746 13760 13768 13928 13943 13968 14108 14200 14229
14295 14423 14532 14535 14536 14572 14599 14664 14698 14725 14774 14817 14859 15005 15063 15118
15141 15152 15215 15376 15423 15519 15756 15860 15896 15981 16105 16211 16235 16262 16384 16419
16514 16578 16654 16655 16669 16738 16748 16750 16826 16846 16865 17073 17110 17345 17422 17562
17594 17939 17983 18018 18022 18090 18093 18120 18217 18219 18305 18341 18406 18413 18494 18678
18734 18770 19103 19633 19644 19717 19736 20241 20292 20571 20884 20972 20997 21075 21129 21235
21305 21744 21786 21817 21848 21854 21900 21938 21975 22068 22081 22126 22199 22269 22408 22413
23098 23184 23287 23320 23472 23485 23526 23539 23632 23659 23696 23777 23794 23813 23814 23844
23945 24014 24036 24076 24077 24079 24098 24105 24140 24350 24482 24492 24511 24525 24581 24640
24649 24772 24845 24883 24909 24945 24997 25056 25148 25210 25390 25507 25538 25565 25611 25628
25712 25789 25874 25964 26021 26193 26257 26262 26368 26379 26586 26679 26685 26759 26782 26783
26787 26814 26882 26890 27143 27210 27278 27394 27469 27524 27547 27549 27554 27622 27623 27635
27654 27678 27689 27740 27825 27939 27969 28012 28106 28288 28468 28529 28605 28678 28743 28762
28779 28807 28808 28812 28869 28912 28989 29099 29137 29159 29166 29194 29207 29303 29349 29416
29443 29505 29564 29595 29605 29654 29786 29807 29876 29879 29894 29953 29966 30043 30074 30153
30241 30286 30313 30366 30406 30450 30500 30717 30781 30789 30805 30807 30826 30990 31021 31042
31051 31095 31096 31113 31116 31137 31459 31582 31730 31807 31861 32122 32169 32294 32428 32441
32452 32523 32659 32674 32758 32804 32805 32806 32807 32808 32809 32810 32811 32812 32813 32814
32815 32816 32817 32818 32819 32820 32821 32822 32877 32909 32973 33208 33285 33433 33510 33558
33570 33590 33591 33654 33657 33837 33853 33870 33877 34021 34060 34068 34071 34094 34135 34377
34622 34651 34785 34821 34838 34947 34989 35044 35092 35116 35127 35220 35243 35259 35439 35443
35563 35576 35760 35803 35818 35821 36090 36202
258: 1985 2721 2722 2973 3824 4185 4223 4445 4491 4564 4921 4946 4972 5105 5218 5247 5250 5320 5759
6071 6717 6808 7195 7631 7660 7689 7729 8112 8113 8146 8294 8315 8357 8647 8963 9521 9786 9801
10059 10060 10290 10596 10851 10888 11456 11484 11505 11811 12055 12076 12146 12196 12205 12307
12582 12602 12620 12855 12907 13075 13488 13540 13614 13842 14047 14090 14158 14278 14486 14767
14776 14812 14883 15124 15153 15333 15782 16022 16130 16199 16649 16717 16732 17099 17410 17669
17831 17923 17982 18191 18195 18372 18514 18604 18727 19268 19636 20428 20734 20846 21313 22146
22165 22281 22445 22483 22554 22782 23054 23129 23206 23653 23758 23788 23798 24424 24478 24588
24637 25025 25342 25363 25405 25518 25630 25745 26562 26834 26879 27570 27613 27639 27694 27749
27918 27919 27953 28823 28824 28838 28858 28915 28953 29092 29455 29870 29923 29936 30137 30268
30318 30360 30568 30603 31443 31457 31819 32022 32537 32987 33397 33531 33777 33827 34005 34044
34674 34790 34999 35412 35418
259: 721 1337 1372 1410 5422 6500 10253 15183 15315
260: 1322 2425 2562 2681 3364 3821 5701 5764 6421 6481 6552 9710 13426 13909 14037 14519 15764
17781 18610 18993 19259 19788 21458 21473 21523 22709 23031 24058 30394 34744 35284 35286
261: 661 688 1930 2266 2512 2534 2632 2724 3034 3368 3518 3703 3784 3819 3881 4128 6000 6183 6901
7932 8564 9064 9080 9407 9889 10156 10173 10201 11306 11343 12505 13742 14424 15696 15799 16330
16460 17491 18613 18816 19106 19189 19372 19811 19892 20408 20446 21102 21492 21552 21553 22742
22795 22924 23306 25993 26983 27009 27212 27248 28141 28150 28157 28235 28260 28326 28348 28431
30750 31380 31397 31727 31764 31933 31946 32118 32165
262: 884 1141 1314 1391 1509 1965 2055 3709 6864 7965 15673 19140 19440 19955 20955 21469 21554
21555 21572 21646 22674 22909 25894 30394
263: 1249 1450 1829 1875 2150 2168 2212 2584 2622 2669 2822 2859 2916 3238 3245 3264 3271 3306 3315
3319 3757 4058 4210 4214 4239 4340 4747 6180 6402 6486 6823 6824 6835 7939 11261 13219 13880 14042
14985 14986 17646 18588 19098 19240 19493 19856 20432 21521 22824 22900 22917 26058 26419
264: 572 573 918 1415 1653 1897 1933 2597 2713 3054 3235 3513 4132 4137 4898 5159 5160 5801 6414
8854 9640 11329 12425 13263 13733 14023 15181 15723 15724 15725 15726 15727 15728 15765 15796
16003 17003 17004 17005 17006 17007 17008 17009 17010 17011 17012 17013 17014 17015 17016 17400
17401 17498 17657 17803 18583 19269 19387 20048 20791 21466 21930 22635 25094 25687 26081 27598
28466 34692
265: 571 918 1415 1653 1897 1933 2597 2713 3054 3235 3513 4132 4137 4898 5159 5160 5801 6414 8854
9640 11329 12425 13263 13733 14023 15181 15723 15724 15725 15726 15727 15728 15765 15796 16003
17016 17400 17401 17498 17657 17803 18583 19269 19387 20048 20791 21466 21930 22635 25094 25687
26081 27598 28466 31700 34692
266: 571 918 1415 1653 1897 1933 2597 2713 3054 3235 3513 4132 4137 4898 5159 5160 5801 6414 8854
9640 11329 12425 13263 13733 14023 15181 15723 15724 15725 15726 15727 15728 15765 15796 16003
17016 17400 17401 17498 17657 17803 18583 19269 19387 20048 20791 21466 21930 22635 25094 25687
26081 27598 28466 31700 34692
267: 339 725 1789 2022 2240 2609 2881 3222 3532 3973 3977 3978 5709 6868 7922 19173 19247 19947
21573 22655
268: 504 1001 1151 1173 1660 1863 1885 1928 2289 2296 2312 2472 2494 2515 2649 2650 3070 3570 3878
3966 3967 4095 4118 4149 4172 4173 4198 4276 4335 4455 4486 4635 4707 5126 5127 5128 5167 5168 5749
6532 6881 6882 6883 7300 7350 7507 7508 7509 7512 7517 7518 7520 7523 7524 7525 7526 7527 7529 7530
7533 7534 7535 7537 7538 7539 7540 7541 7543 7546 7547 7548 7549 7550 7551 7552 7553 7554 7555 7556
7557 7558 7559 7562 7563 7565 7569 7570 7571 7572 7574 7575 7576 7780 7950 8392 8393 8394 8395 8396
8397 8440 8441 8442 8443 8444 8445 8446 8447 8448 8449 8450 8451 8452 8453 8454 8455 8456 8457 8458
8459 8460 8461 8462 8463 8464 8465 8466 8467 8468 8469 8470 8471 8472 8473 8474 8475 8476 8477 8478
8479 8480 8481 8701 8846 8884 9366 9667 9668 9669 9670 9671 9672 10512 11117 11118 11119 11120
11121 11122 11123 11124 11125 11393 11834 11835 11836 11837 11898 11900 12242 13216 13217 13218
13254 13255 13256 13264 13274 13275 13279 13280 13287 13288 13289 13300 13303 13305 13308 13364
13524 13704 13739 13838 13904 13917 14015 14074 14115 14523 14524 14525 14526 14886 14887 15088
15184 15185 15186 15187 15308 15513 15514 15564 15565 15566 15567 15568 15569 15570 15602 15603
15604 15605 15606 15607 15608 15609 15610 15611 15613 15614 15615 15616 15622 15623 15624 15861
15862 15863 15864 15865 15866 15867 15868 15869 15870 15871 15872 15873 15874 16040 16175 16497
16498 16499 16500 16501 16502 16503 16504 16505 16506 16702 16897 16898 16899 16900 16901 16902
16903 16904 16905 16906 16907 16908 16909 16910 16911 16912 16913 16914 16915 16916 16917 16918
16919 16920 16921 16922 16923 16924 16925 16926 16927 16928 16929 16930 16931 16932 16933 16934
16935 16936 16937 16938 16939 16940 16941 16942 16943 16944 16945 16946 16947 16948 16949 16950
16951 16952 16953 16954 16955 16956 16957 16958 16959 16960 16961 16962 16963 16964 16965 16966
16967 16968 16969 16970 16971 16972 16973 16974 16975 16976 16977 16978 16979 16980 16981 16982
17269 17270 17271 17272 17273 17274 17275 17276 17277 17278 17279 17280 17281 17282 17283 17284
17285 17286 17287 17288 17289 17290 17291 17292 17293 17294 17295 17296 17297 17298 17299 17300
17301 17302 17303 17304 17305 17306 17307 17308 17309 17310 17311 17312 17313 17314 17315 17316
17317 17318 17319 17320 17321 17322 17323 17324 17325 17326 17327 17328 17329 17393 17617 17618
17619 17620 17621 17622 17623 17624 17625 17626 17627 17629 17630 17631 17632 17633 17634 17635
17636 17819 17827 18028 18029 18030 18031 18032 18033 18034 18035 18036 18037 18038 18039 18040
18041 18042 18043 18044 18045 18046 18047 18048 18049 18050 18051 18052 18053 18054 18055 18056
18057 18058 18059 18060 18061 18062 18063 18064 18065 18066 18067 18068 18069 18597 19181 19231
19302 19483 19528 19529 19530 19531 19532 19533 19534 19535 19536 19537 19538 19539 19540 19541
19542 19543 19544 19545 19546 19547 19548 19549 19550 19551 19552 19553 19554 19555 19556 19557
19558 19559 19560 19561 19562 19563 19564 19565 19566 19567 19568 19569 19570 19571 19572 19573
19847 19985 20000 20102 20537 20545 20546 20547 21056 21318 21347 21359 21844 21845 21846 21847
21913 22615 22716 22721 22982 22983 22984 23221 23222 23223 23224 23225 23226 23670 23882 24068
24169 25048 25069 25070 25071 25072 25073 25074 25075 25076 25077 25652 25699 25700 25816 25868
25882 25883 25884 25901 25902 25903 25904 25916 25917 25918 26072 26092 26093 26094 26095 26096
26097 26098 26099 26100 26101 26102 26124 26125 26126 26127 26128 26129 26130 26131 26132 26133
26134 26135 26136 26137 26138 26139 26140 26141 26142 26143 26144 26145 26146 26147 26148 26149
26150 26151 26152 26153 26154 26155 26156 26157 26158 26159 26160 26161 26162 26163 26164 26165
26166 26167 26168 26169 26170 26171 26172 26173 26174 26175 26176 26177 26178 26179 26180 26181
26182 26183 26267 26316 26317 26318 26319 26320 26321 26322 26382 26412 26448 26449 26450 26451
26452 26453 26454 26455 26456 26457 26458 26459 26460 26461 26462 26463 26464 26465 26466 26467
26468 26469 26470 26471 26472 26473 26474 26475 26476 26477 26478 26479 27457 27458 27459 28656
28657 28658 28659 28660 28661 28662 28663 28664 28665 28666 28667 28668 28669 28670 28671 28672
28673 28674 28700 28701 28702 28703 28704 28705 29039 29040 29041 29042 29043 29044 29045 29046
29047 29048 29049 29050 29051 29052 29053 29054 29055 29056 29057 29058 29059 29060 29061 29062
29063 29064 29065 29067 29068 29069 29070 29071 29072 29073 29074 29075 29076 29077 29078 29079
29080 29081 29684 30503 30504 30533 30582 30585 30586 30587 30588 30589 30592 30593 30594 30595
30596 30597 31027 31213 31218 31322 31323 31324 31325 31326 31327 31328 31329 31330 31331 31332
31333 31334 31335 31336 31437 31564 31604 31607 31608 31609 31610 31611 31612 31613 31614 31615
31616 31617 31618 31619 31620 31621 31622 31623 31624 31625 31626 31627 31628 31629 31630 31631
31632 31633 31634 31635 31636 31637 31638 31639 31640 31641 31642 31643 31644 31645 31646 31647
31648 31649 31650 32575 32802 32852 33030 33268 33269 33270 33271 33272 33273 33274 33710 33711
33712 33713 33714 33715 33716 33717 33718 33719 33720 33721 33722 33723 33724 33725 33726 33727
33728 33729 33730 33731 33732 33733 33734 33735 33736 33737 33738 33739 33740 33741 33742 33743
33744 33745 33746 33747 33748 33749 33750 33751 33752 33753 33754 33755 33756 33757 33926 34114
34465 34749 35305 35306 35307 35308 35309 35310 35311 35312 35313 35314 35315 35316 35317 35318
35319 35320 35321 35322 35323 35324 35325 35326 35327 35328 35329 35330 35331 35332 35333 35334
35335 35336 35337 35338 35339 35340 35341 35342 35343 35344 35345 35346 35347 35348 35349 35350
35351 35352 35353 35354 35355 35356 35357 35358 35538 35539 35540
269: 504 1001 1151 1173 1660 1863 1885 1928 2289 2296 2312 2472 2494 2515 2649 2650 3070 3570 3878
3966 3967 4095 4118 4149 4172 4173 4198 4276 4335 4455 4486 4635 4707 5126 5127 5128 5167 5168 5749
6532 6881 6882 6883 7300 7350 7507 7508 7509 7512 7517 7518 7520 7523 7524 7525 7526 7527 7529 7530
7533 7534 7535 7537 7538 7539 7540 7541 7543 7546 7547 7548 7549 7550 7551 7552 7553 7554 7555 7556
7557 7558 7559 7562 7563 7565 7569 7570 7571 7572 7574 7575 7576 7780 7950 8392 8393 8394 8395 8396
8397 8440 8441 8442 8443 8444 8445 8446 8447 8448 8449 8450 8451 8452 8453 8454 8455 8456 8457 8458
8459 8460 8461 8462 8463 8464 8465 8466 8467 8468 8469 8470 8471 8472 8473 8474 8475 8476 8477 8478
8479 8480 8481 8701 8846 8884 9366 9667 9668 9669 9670 9671 9672 10512 11117 11118 11119 11120
11121 11122 11123 11124 11125 11393 11834 11835 11836 11837 11898 11900 12242 13216 13217 13218
13254 13255 13256 13264 13274 13275 13279 13280 13287 13288 13289 13300 13303 13305 13308 13364
13524 13704 13739 13838 13904 13917 14015 14074 14115 14523 14524 14525 14526 14886 14887 15088
15184 15185 15186 15187 15308 15513 15514 15564 15565 15566 15567 15568 15569 15570 15602 15603
15604 15605 15606 15607 15608 15609 15610 15611 15613 15614 15615 15616 15622 15623 15624 15861
15862 15863 15864 15865 15866 15867 15868 15869 15870 15871 15872 15873 15874 16040 16175 16497
16498 16499 16500 16501 16502 16503 16504 16505 16506 16702 16897 16898 16899 16900 16901 16902
16903 16904 16905 16906 16907 16908 16909 16910 16911 16912 16913 16914 16915 16916 16917 16918
16919 16920 16921 16922 16923 16924 16925 16926 16927 16928 16929 16930 16931 16932 16933 16934
16935 16936 16937 16938 16939 16940 16941 16942 16943 16944 16945 16946 16947 16948 16949 16950
16951 16952 16953 16954 16955 16956 16957 16958 16959 16960 16961 16962 16963 16964 16965 16966
16967 16968 16969 16970 16971 16972 16973 16974 16975 16976 16977 16978 16979 16980 16981 16982
17269 17270 17271 17272 17273 17274 17275 17276 17277 17278 17279 17280 17281 17282 17283 17284
17285 17286 17287 17288 17289 17290 17291 17292 17293 17294 17295 17296 17297 17298 17299 17300
17301 17302 17303 17304 17305 17306 17307 17308 17309 17310 17311 17312 17313 17314 17315 17316
17317 17318 17319 17320 17321 17322 17323 17324 17325 17326 17327 17328 17329 17393 17617 17618
17619 17620 17621 17622 17623 17624 17625 17626 17627 17629 17630 17631 17632 17633 17634 17635
17636 17819 17827 18028 18029 18030 18031 18032 18033 18034 18035 18036 18037 18038 18039 18040
18041 18042 18043 18044 18045 18046 18047 18048 18049 18050 18051 18052 18053 18054 18055 18056
18057 18058 18059 18060 18061 18062 18063 18064 18065 18066 18067 18068 18069 18597 19181 19231
19302 19483 19528 19529 19530 19531 19532 19533 19534 19535 19536 19537 19538 19539 19540 19541
19542 19543 19544 19545 19546 19547 19548 19549 19550 19551 19552 19553 19554 19555 19556 19557
19558 19559 19560 19561 19562 19563 19564 19565 19566 19567 19568 19569 19570 19571 19572 19573
19847 19985 20000 20102 20537 20545 20546 20547 21056 21318 21347 21359 21844 21845 21846 21847
21913 22615 22716 22721 22982 22983 22984 23221 23222 23223 23224 23225 23226 23670 23882 24068
24169 25048 25069 25070 25071 25072 25073 25074 25075 25076 25077 25652 25699 25700 25816 25868
25882 25883 25884 25901 25902 25903 25904 25916 25917 25918 26072 26092 26093 26094 26095 26096
26097 26098 26099 26100 26101 26102 26124 26125 26126 26127 26128 26129 26130 26131 26132 26133
26134 26135 26136 26137 26138 26139 26140 26141 26142 26143 26144 26145 26146 26147 26148 26149
26150 26151 26152 26153 26154 26155 26156 26157 26158 26159 26160 26161 26162 26163 26164 26165
26166 26167 26168 26169 26170 26171 26172 26173 26174 26175 26176 26177 26178 26179 26180 26181
26182 26183 26267 26316 26317 26318 26319 26320 26321 26322 26382 26412 26448 26449 26450 26451
26452 26453 26454 26455 26456 26457 26458 26459 26460 26461 26462 26463 26464 26465 26466 26467
26468 26469 26470 26471 26472 26473 26474 26475 26476 26477 26478 26479 27457 27458 27459 28656
28657 28658 28659 28660 28661 28662 28663 28664 28665 28666 28667 28668 28669 28670 28671 28672
28673 28674 28700 28701 28702 28703 28704 28705 29039 29040 29041 29042 29043 29044 29045 29046
29047 29048 29049 29050 29051 29052 29053 29054 29055 29056 29057 29058 29059 29060 29061 29062
29063 29064 29065 29067 29068 29069 29070 29071 29072 29073 29074 29075 29076 29077 29078 29079
29080 29081 29684 30503 30504 30533 30582 30585 30586 30587 30588 30589 30592 30593 30594 30595
30596 30597 31027 31213 31218 31322 31323 31324 31325 31326 31327 31328 31329 31330 31331 31332
31333 31334 31335 31336 31437 31564 31604 31607 31608 31609 31610 31611 31612 31613 31614 31615
31616 31617 31618 31619 31620 31621 31622 31623 31624 31625 31626 31627 31628 31629 31630 31631
31632 31633 31634 31635 31636 31637 31638 31639 31640 31641 31642 31643 31644 31645 31646 31647
31648 31649 31650 32575 32802 32852 33030 33268 33269 33270 33271 33272 33273 33274 33710 33711
33712 33713 33714 33715 33716 33717 33718 33719 33720 33721 33722 33723 33724 33725 33726 33727
33728 33729 33730 33731 33732 33733 33734 33735 33736 33737 33738 33739 33740 33741 33742 33743
33744 33745 33746 33747 33748 33749 33750 33751 33752 33753 33754 33755 33756 33757 33926 34114
34465 34749 35305 35306 35307 35308 35309 35310 35311 35312 35313 35314 35315 35316 35317 35318
35319 35320 35321 35322 35323 35324 35325 35326 35327 35328 35329 35330 35331 35332 35333 35334
35335 35336 35337 35338 35339 35340 35341 35342 35343 35344 35345 35346 35347 35348 35349 35350
35351 35352 35353 35354 35355 35356 35357 35358 35538 35539 35540
270: 504 1001 1151 1173 1660 1863 1885 1928 2289 2296 2312 2472 2494 2515 2649 2650 3070 3570 3878
3966 3967 4095 4118 4149 4172 4173 4198 4276 4335 4455 4486 4635 4707 5126 5127 5128 5167 5168 5749
6532 6881 6882 6883 7300 7350 7507 7508 7509 7512 7517 7518 7520 7523 7524 7525 7526 7527 7529 7530
7533 7534 7535 7537 7538 7539 7540 7541 7543 7546 7547 7548 7549 7550 7551 7552 7553 7554 7555 7556
7557 7558 7559 7562 7563 7565 7569 7570 7571 7572 7574 7575 7576 7780 7950 8392 8393 8394 8395 8396
8397 8440 8441 8442 8443 8444 8445 8446 8447 8448 8449 8450 8451 8452 8453 8454 8455 8456 8457 8458
8459 8460 8461 8462 8463 8464 8465 8466 8467 8468 8469 8470 8471 8472 8473 8474 8475 8476 8477 8478
8479 8480 8481 8701 8846 8884 9366 9667 9668 9669 9670 9671 9672 10512 11117 11118 11119 11120
11121 11122 11123 11124 11125 11393 11834 11835 11836 11837 11898 11900 12242 13216 13217 13218
13254 13255 13256 13264 13274 13275 13279 13280 13287 13288 13289 13300 13303 13305 13308 13364
13524 13704 13739 13838 13904 13917 14015 14074 14115 14523 14524 14525 14526 14886 14887 15088
15184 15185 15186 15187 15308 15513 15514 15564 15565 15566 15567 15568 15569 15570 15602 15603
15604 15605 15606 15607 15608 15609 15610 15611 15613 15614 15615 15616 15622 15623 15624 15861
15862 15863 15864 15865 15866 15867 15868 15869 15870 15871 15872 15873 15874 16040 16175 16497
16498 16499 16500 16501 16502 16503 16504 16505 16506 16702 16897 16898 16899 16900 16901 16902
16903 16904 16905 16906 16907 16908 16909 16910 16911 16912 16913 16914 16915 16916 16917 16918
16919 16920 16921 16922 16923 16924 16925 16926 16927 16928 16929 16930 16931 16932 16933 16934
16935 16936 16937 16938 16939 16940 16941 16942 16943 16944 16945 16946 16947 16948 16949 16950
16951 16952 16953 16954 16955 16956 16957 16958 16959 16960 16961 16962 16963 16964 16965 16966
16967 16968 16969 16970 16971 16972 16973 16974 16975 16976 16977 16978 16979 16980 16981 16982
17269 17270 17271 17272 17273 17274 17275 17276 17277 17278 17279 17280 17281 17282 17283 17284
17285 17286 17287 17288 17289 17290 17291 17292 17293 17294 17295 17296 17297 17298 17299 17300
17301 17302 17303 17304 17305 17306 17307 17308 17309 17310 17311 17312 17313 17314 17315 17316
17317 17318 17319 17320 17321 17322 17323 17324 17325 17326 17327 17328 17329 17393 17617 17618
17619 17620 17621 17622 17623 17624 17625 17626 17627 17629 17630 17631 17632 17633 17634 17635
17636 17819 17827 18028 18029 18030 18031 18032 18033 18034 18035 18036 18037 18038 18039 18040
18041 18042 18043 18044 18045 18046 18047 18048 18049 18050 18051 18052 18053 18054 18055 18056
18057 18058 18059 18060 18061 18062 18063 18064 18065 18066 18067 18068 18069 18597 19181 19231
19302 19483 19528 19529 19530 19531 19532 19533 19534 19535 19536 19537 19538 19539 19540 19541
19542 19543 19544 19545 19546 19547 19548 19549 19550 19551 19552 19553 19554 19555 19556 19557
19558 19559 19560 19561 19562 19563 19564 19565 19566 19567 19568 19569 19570 19571 19572 19573
19847 19985 20000 20102 20537 20545 20546 20547 21056 21318 21347 21359 21844 21845 21846 21847
21913 22615 22716 22721 22982 22983 22984 23221 23222 23223 23224 23225 23226 23670 23882 24068
24169 25048 25069 25070 25071 25072 25073 25074 25075 25076 25077 25652 25699 25700 25816 25868
25882 25883 25884 25901 25902 25903 25904 25916 25917 25918 26072 26092 26093 26094 26095 26096
26097 26098 26099 26100 26101 26102 26124 26125 26126 26127 26128 26129 26130 26131 26132 26133
26134 26135 26136 26137 26138 26139 26140 26141 26142 26143 26144 26145 26146 26147 26148 26149
26150 26151 26152 26153 26154 26155 26156 26157 26158 26159 26160 26161 26162 26163 26164 26165
26166 26167 26168 26169 26170 26171 26172 26173 26174 26175 26176 26177 26178 26179 26180 26181
26182 26183 26267 26316 26317 26318 26319 26320 26321 26322 26382 26412 26448 26449 26450 26451
26452 26453 26454 26455 26456 26457 26458 26459 26460 26461 26462 26463 26464 26465 26466 26467
26468 26469 26470 26471 26472 26473 26474 26475 26476 26477 26478 26479 27457 27458 27459 28656
28657 28658 28659 28660 28661 28662 28663 28664 28665 28666 28667 28668 28669 28670 28671 28672
28673 28674 28700 28701 28702 28703 28704 28705 29039 29040 29041 29042 29043 29044 29045 29046
29047 29048 29049 29050 29051 29052 29053 29054 29055 29056 29057 29058 29059 29060 29061 29062
29063 29064 29065 29067 29068 29069 29070 29071 29072 29073 29074 29075 29076 29077 29078 29079
29080 29081 29684 30503 30504 30533 30582 30585 30586 30587 30588 30589 30592 30593 30594 30595
30596 30597 31027 31213 31218 31322 31323 31324 31325 31326 31327 31328 31329 31330 31331 31332
31333 31334 31335 31336 31437 31564 31604 31607 31608 31609 31610 31611 31612 31613 31614 31615
31616 31617 31618 31619 31620 31621 31622 31623 31624 31625 31626 31627 31628 31629 31630 31631
31632 31633 31634 31635 31636 31637 31638 31639 31640 31641 31642 31643 31644 31645 31646 31647
31648 31649 31650 32575 32802 32852 33030 33268 33269 33270 33271 33272 33273 33274 33710 33711
33712 33713 33714 33715 33716 33717 33718 33719 33720 33721 33722 33723 33724 33725 33726 33727
33728 33729 33730 33731 33732 33733 33734 33735 33736 33737 33738 33739 33740 33741 33742 33743
33744 33745 33746 33747 33748 33749 33750 33751 33752 33753 33754 33755 33756 33757 33926 34114
34465 34749 35305 35306 35307 35308 35309 35310 35311 35312 35313 35314 35315 35316 35317 35318
35319 35320 35321 35322 35323 35324 35325 35326 35327 35328 35329 35330 35331 35332 35333 35334
35335 35336 35337 35338 35339 35340 35341 35342 35343 35344 35345 35346 35347 35348 35349 35350
35351 35352 35353 35354 35355 35356 35357 35358 35538 35539 35540
271: 736 1413 2148 2288 2359 2627 2656 2981 3281 3353 3476 3586 4056 4158 4258 4360 4451 4668 4706
4849 4875 4877 5252 5274 5282 5330 5373 5431 5553 5600 5614 5615 5616 5642 5727 5728 5771 5953 6004
6053 6103 6196 6362 6586 6619 6996 7049 7109 7269 7299 7369 7623 7652 7702 8036 8107 8236 8242 8286
8536 8837 8927 9405 9505 9715 9776 9864 9885 9987 10096 10133 10249 10474 10907 10995 11043 11062
11204 11205 11447 11922 12220 12284 12382 12384 12392 12410 12439 12459 12460 12482 12493 12574
12681 13078 13114 13115 13170 13453 13796 13797 13798 13799 14154 14155 14389 14483 14501 14510
14755 14794 14832 14844 14845 15374 15437 15555 15770 15977 16392 16399 16463 16666 16833 17019
17020 17117 17375 17579 17588 17909 17960 17989 18138 18399 18700 18730 18823 18828 18848 18858
18881 18883 19171 19226 19661 19748 19859 20278 20385 20474 20538 20539 20540 20541 20542 20680
20724 20866 21301 21465 21531 21689 21721 21789 21862 22072 22112 22149 22181 22190 22213 22230
22296 22351 22362 22364 22411 22449 23083 23390 23467 23476 24009 24019 24083 24123 24781 24856
24891 24912 25015 25333 25378 25393 25850 25856 26040 26774 26914 26965 27012 27053 27054 27122
27192 27401 27422 27720 27784 27809 27996 28223 28243 28244 28458 28594 28676 28784 28958 29038
29095 29417 29607 29662 29692 29697 29728 29842 29941 30022 30213 30270 30380 30939 31164 31462
31779 32034 32203 32275 32557 32773 32994 32995 33057 33130 33517 33564 33580 33661 33685 33692
33694 33704 33769 33825 34229 34276 34330 34332 34425 34432 34504 34528 34681 34776 34809 34812
34817 34960 34986 35028 35106 35145 35180 35231 35486 35531 35543 35589 35644 35675 35676 35691
35709 35712 35727 35774 35866 35984 36032 36175 36192 36221 36291 36407 36411
272: 1037 1298 1490 1567 1588 1711 1765 2685 3548 6845 7923 9725 11324 14903 19126 19964 22633
273: 828 1186 1822 2185 2250 2371 3027 3355 3701 3869 4312 4538 6922 9426 11183 11344 12394 13986
14427 15634 16400 16448 17145 17853 18011 18631 19008 19893 21170 21171 22116 22833 26806 26976
27136 27204 28172 28218 28352 28430 30740 31365 31682 31893 32093 32757 32917
274: 760 2612 2613 2968 3418 3962 4121 5762 6936 9086 9408 9687 11368 13750 17840 18609 18864 18897
18916 20100 20343 21429 22724 25987 27303 31739 32595
275: 376 494 637 866 1080 1184 1201 1381 1613 1627 1731 1759 1777 2080 2179 2387 2673 2719 2726 2865
3050 3120 3279 3352 3369 3419 3474 3940 3970 4155 4175 4375 5420 5816 7302 7993 8019 8045 8074 9195
10248 10549 10586 10941 11998 13342 13554 15393 15759 16295 17133 17678 17835 18260 18621 18952
20337 21311 21367 21371 21390 21503 21514 22926 22961 22962 23041 24741 25971 26495 26496 26936
28837 29010 29804 29862 31237 31238 31239 31240 31597 31776 33996 35369
276: 1199 1204 1205 1286 1310 1592 1903 2070 2480 2733 4019 5786 9367 9385 9430 9438 19250 19287
19420 19774 19904 19993 19994 21510 21511 21512 21513 21621 22748 22788 22839 22840 22932 22934
25121 34565
277: 754 945 1522 2064 2807 2834 3243 6036 6062 6101 6941 7607 9088 9092 9104 9479 11270 12436
12446 12458 12466 14026 14387 14388 14390 14393 14394 14395 14457 15196 15200 17537 17798 18840
18957 19057 19873 20681 22760 25778 26007 26312 27214 27227 27251 27257 31675 31720 32844
278: 654 948 1010 1108 1488 1766 2195 2219 2638 2655 2660 3080 3836 4231 4411 4432 4467 4525 4526
4567 4648 4704 4777 4872 4954 4975 5067 5094 5096 5106 5150 5172 5223 5248 5295 5332 5343 5388 5462
5486 5493 5509 5542 5582 5788 5831 6064 6090 6120 6218 6248 6293 6378 6512 6513 6514 6521 6522 6559
6599 6704 6801 6886 6957 7000 7092 7098 7242 7308 7402 7448 7468 7505 7612 7613 7614 7643 7671 7711
7739 7858 8082 8105 8129 8145 8217 8305 8346 8398 8539 8558 8571 8662 8702 8703 8704 8705 8706 8707
8708 8709 8710 8711 8712 8722 8723 8766 8805 8815 8867 8883 8885 8886 8887 8888 8889 8890 8966 8967
8970 8971 8972 8973 8982 9020 9055 9056 9204 9221 9346 9538 9543 9625 9664 9665 9730 9737 9787 9807
9865 9967 10047 10090 10336 10430 10441 10555 10649 10699 10724 10742 10759 10784 10834 10869
10915 10929 10948 10963 11019 11145 11358 11405 11471 11517 11556 11615 11764 11777 11846 11865
11875 11917 12006 12038 12063 12217 12325 12486 12491 12518 12593 12627 12687 12716 12860 12946
12992 13007 13058 13103 13154 13192 13423 13424 13512 13536 13611 13662 14031 14095 14162 14239
14240 14298 14379 14409 14475 14503 14584 14647 14676 14738 14851 14856 14956 15002 15050 15073
15086 15102 15148 15198 15210 15294 15328 15334 15359 15385 15420 15429 15433 15468 15492 15512
15562 15721 15729 15855 15913 15968 15999 16015 16031 16061 16238 16369 16449 16476 16511 16573
16623 16694 16714 16730 16822 16830 16855 16883 16884 17151 17176 17237 17340 17354 17446 17487
17551 17560 17581 17702 17942 17975 18077 18135 18222 18326 18374 18393 18401 18448 18600 18619
18620 18685 18710 18723 18835 18976 19050 19266 19305 19629 19695 19787 20042 20165 20170 20200
20225 20273 20331 20461 20463 20555 20641 20773 20824 20878 20921 20926 20941 20951 21037 21058
21067 21143 21191 21192 21193 21239 21247 21284 21348 21427 21669 21692 21723 21834 21835 21902
21912 21918 21924 21927 21935 21937 21962 22054 22117 22185 22258 22268 22349 22370 22467 22470
22471 22530 22707 23055 23056 23057 23064 23092 23163 23230 23242 23336 23337 23338 23425 23447
23453 23513 23625 23669 23694 23732 23786 23806 23973 23996 24114 24163 24309 24368 24399 24409
24484 24542 24577 24642 24682 24713 24725 24751 24752 24753 24754 24759 24788 24816 24825 24839
24905 24951 24976 24982 25038 25110 25172 25243 25294 25312 25352 25387 25426 25510 25570 25586
25609 25749 25761 25910 26004 26069 26119 26194 26197 26297 26324 26397 26409 26432 26436 26483
26484 26584 26596 26607 26666 26695 26714 26726 26757 26884 26909 26910 26911 26926 26939 27050
27114 27119 27194 27282 27293 27357 27472 27500 27752 27848 27872 28070 28122 28435 28474 28558
28579 28626 28682 28759 28791 28984 29091 29098 29132 29176 29270 29360 29413 29434 29435 29510
29561 29593 29631 29640 29734 29837 29844 29918 29956 29998 30072 30104 30129 30130 30151 30232
30279 30302 30350 30407 30428 30455 30480 30492 30538 30614 30628 30649 30672 30673 30674 30719
30720 30802 30832 30862 30894 30913 30931 30941 30942 30943 30944 30945 30946 30947 30948 30998
31002 31048 31112 31193 31205 31228 31376 31521 31599 31698 31781 31976 31989 32086 32099 32125
32204 32231 32276 32279 32375 32384 32392 32415 32427 32487 32549 32585 32586 32588 32705 32730
32799 32827 32828 32848 32888 32961 32968 32969 33023 33090 33204 33227 33317 33341 33458 33550
33613 33625 33668 33682 33791 33819 33842 34016 34101 34196 34226 34331 34406 34486 34554 34633
34655 34719 34768 34837 34891 34906 34914 34924 34926 34955 35005 35019 35070 35124 35151 35184
35252 35271 35405 35446 35514 35528 35556 35603 35620 35686 35687 35688 35689 35761 35850 35954
36053 36075 36127 36193 36253 36309 36311 36322 36323 36359 36375
279: 820 865 1225 1238 1305 1431 1441 1830 1836 1986 2759 3926 4436 5134 5151 5754 5912 6008 6859
6915 6948 7352 7585 8032 8596 9099 9112 9146 9185 9321 10174 10193 11588 11840 12438 12441 12449
12456 12483 12489 12490 12497 14373 14382 14396 14407 14415 15401 15792 15801 16066 16326 16336
17467 17535 17655 17822 18160 19021 19092 19146 20084 20449 20785 20786 20787 20788 20789 20790
20956 21208 21329 21914 22630 23869 24056 24678 26413 26481 26975 27001 27298 28185 28187 28207
28210 28274 28275 28320 28337 28413 28440 30486 30710 30723 30756 30767 31146 31270 31271 31355
31381 31660 31888 31929 31930 31941 31947 32126 32146 33019 34841 34842 36013
280: 5173 5481 5909 6543 9691 9890 10023 10024 10025 10026 10027 10028 10029 10030 10031 10032
10033 10034 10035 10036 12378 13344 13666 13979 14658 15099 15795 15812 16611 18177 25454 25455
25464 26511 27043 27667 27833 28591 34108 34575 34576 34577 34578 34580 34583 35999
281: 1532 1685 1753 1838 1940 2343 2734 2746 2921 3119 3142 3183 3219 3310 3443 3459 3487 3846 3930
4034 4077 4090 4125 4134 5144 5145 5481 5671 5785 5909 6838 7375 7867 7868 8951 9024 9025 9144 9691
10023 10024 10025 10026 10027 10028 10029 10030 10031 10032 10033 10034 10035 10036 10140 10165
10166 11264 11406 11839 12378 13344 13411 15099 15205 15428 15500 15501 15502 15503 15795 15808
15812 16119 16258 16612 16984 18622 19138 19331 19430 19462 19863 19905 20358 20401 21424 21624
22789 22875 24869 25454 25461 25464 25488 26039 26658 26659 27043 27440 27667 27756 27781 27833
28505 29157 30960 32825 34108 34571 34572 34575 34576 34577 34578 34580 34583 35291 35999
282: 3909 9355 9440 9950 9951 11369 11431 12567 13260 13823 15584 15585 15586 15587 15588 15589
15590 15591 15592 15593 15594 15595 15596 15597 15598 15599 19260 19952 19977 20434 25489 25490
25819 25820
283: 625 626 627 631 655 669 670 701 710 724 727 730 748 767 768 769 770 771 772 788 794 796 800 805
806 808 809 818 824 834 848 877 891 892 899 901 902 906 907 912 929 930 954 956 970 990 996 1017 1018
1032 1041 1042 1043 1044 1061 1062 1063 1064 1065 1066 1067 1068 1077 1078 1086 1100 1111 1120 1127
1128 1137 1138 1149 1150 1152 1153 1154 1164 1176 1177 1178 1179 1182 1196 1596 1665 1695 1761 1818
1834 1927 1993 2059 2196 2206 2229 2278 2297 2314 2332 2333 2354 2360 2373 2375 2379 2402 2403 2411
2417 2418 2427 2428 2453 2474 2501 2509 2560 2640 2668 2769 3061 3439 3559 3562 3721 3974 4059 4073
4313 4429 4692 4887 5231 5705 5793 5794 5795 5841 5842 5843 5844 5845 5854 5863 7377 7378 7379 7380
7381 7382 7383 7384 7385 7386 7387 7388 7389 7390 7391 7392 7393 7394 7395 7396 7397 7398 7399 7400
7603 7604 7605 7917 7975 7978 7979 7980 7997 8012 8066 8072 8414 9049 9050 9373 9425 9443 9451 9468
10223 10224 10251 10252 10259 10271 10540 10541 10542 10543 10544 10545 11040 11211 11212 11213
11214 11215 11217 11239 11240 11241 11290 11291 11292 11293 11294 11295 11296 11297 11298 11299
11300 11301 11359 11394 11397 12595 12994 13123 13221 13412 13736 13737 13738 13782 13783 13847
13852 13959 14013 14226 14361 15004 15192 15193 15194 15276 15309 15430 15601 16062 16166 17538
17604 17605 17606 17607 17608 17609 17610 17612 17613 17696 17756 17774 17786 17851 17852 17890
17891 17892 17893 18558 18571 18626 18627 18628 18629 18630 18660 18743 18744 18745 18746 18747
19011 19030 19150 19172 19209 19215 19227 19235 19415 19459 19460 19461 19588 19589 19590 19591
19592 19593 19594 19784 19909 19927 19928 19929 19930 19931 19932 19933 19934 19935 19936 19937
19938 20111 20126 20135 20136 20174 20175 20374 20435 20657 21240 21377 21504 21611 21612 21628
22619 22649 22659 22660 22661 22662 22663 22664 22665 22715 22734 22776 22797 23027 23034 23035
23036 23044 23683 24763 25473 25623 25645 25646 26061 26795 26800 26803 26927 27086 27779 27822
28000 28699 28962 28963 29383 29695 29696 29867 31179 31279 31280 31281 31282 31283 32208 33228
33231 33240 33800 33805 35257 36328 36329 36339 36340 36341 36342 36343 36344 36345 36347
284: 534 926 1333 1352 1483 1554 1571 1620 1621 2863 2864 3113 3146 3263 3708 3725 3848 4441 4442
4482 4589 4605 4804 4812 4836 4878 4880 4996 5064 5129 5311 5359 5402 5423 5424 5432 5467 5524 5637
5746 5942 6009 6023 6087 6245 6313 6347 6351 6364 6574 6594 6600 6601 6630 6645 6657 6707 6715 6746
6795 6937 6993 7033 7077 7280 7281 7282 7602 7722 8094 8258 8311 8332 8643 8779 8784 8785 8812 8813
8814 8893 9010 9011 9157 9233 9275 9278 9578 9599 9616 9698 9705 9777 9932 9953 9976 10111 10130
10190 10324 10350 10529 10564 10603 10622 10808 10873 10965 11055 11056 11079 11102 11171 11265
11463 11464 11499 11526 11600 11626 11746 11799 11853 11932 11936 11962 12075 12474 12494 12638
12694 12811 12849 12944 13027 13034 13156 13449 13547 13621 13772 13833 13976 13989 14125 14144
14166 14272 14404 14673 14679 14680 14689 14760 14904 14989 14992 15237 15339 15534 15660 15733
15960 16097 16183 16192 16193 16372 16401 16603 16619 16711 16725 16810 16891 17024 17127 17153
17173 17175 17219 17235 17236 17343 17472 17637 17639 17682 17700 17818 18006 18024 18298 18348
18595 18701 18845 18986 19195 19499 19503 19600 19622 19691 19865 20190 20276 20287 20460 20568
20576 20643 20732 20754 20820 20821 20828 20832 20838 20840 20842 20895 21070 21071 21072 21110
21112 21148 21253 21737 21747 21832 21894 21925 22014 22029 22074 22101 22104 22192 22196 22289
22425 22447 22482 22488 22494 22495 22502 22790 23099 23113 23118 23127 23128 23208 23209 23234
23384 23450 23577 23581 23656 23671 23672 23720 23829 23855 23864 23865 23944 23999 24084 24156
24300 24443 24452 24462 24516 24573 24604 24614 24621 24674 24692 24760 24853 24860 24890 24918
24958 25008 25057 25067 25179 25191 25192 25193 25203 25260 25261 25423 25494 25512 25544 25554
25578 25579 25603 25604 25688 25756 25784 25845 25931 25957 26009 26023 26037 26067 26191 26263
26280 26303 26352 26557 26559 26674 26850 26860 26869 27016 27066 27299 27311 27376 27391 27392
27421 27483 27522 27556 27624 27659 27690 27719 27726 27843 27920 27929 28083 28170 28222 28245
28307 28386 28476 28551 28564 28592 28786 28787 28853 28880 28933 29018 29183 29197 29210 29229
29288 29295 29323 29390 29412 29432 29465 29634 29715 29927 29931 30013 30061 30062 30063 30079
30235 30353 30362 30402 30549 30667 30765 30776 30819 30861 30956 30987 31110 31131 31236 31318
31369 31414 31514 31522 31592 31606 31658 31725 31771 31802 31948 31951 31984 32038 32092 32175
32176 32227 32250 32252 32374 32404 32446 32525 32634 32718 32765 32863 32869 33035 33134 33284
33339 33340 33402 33547 33587 33592 33651 33659 33665 33677 33784 33813 33814 33857 34000 34027
34051 34074 34083 34091 34095 34121 34142 34431 34489 34530 34614 34666 34723 34828 34958 35008
35037 35081 35140 35264 35408 35466 35484 35536 35584 35634 35721 35730 35973 36046 36424 36433
285: 1140 1170 1287 1442 1452 1475 1508 1517 1672 1705 2149 3092 4559 7762 7790 7905 9379 10263
12097 14112 14189 15306 17875 17976 18806 18989 19214 19257 19574 19575 19576 19577 19578 19579
19580 19581 19582 19899 21422 22137 22201 22773 22799 24916 24978 26121 26531 27832 28571
286: 802 886 1423 1456 1504 1876 3381 3413 3573 3760 3879 4072 5181 5182 5183 7891 9424 10424 15317
15802 18240 18788 18937 18958 20455 20797 20798 21055 21622 22621 24734 24737 26918 31534 35617
36232 36312 36313
287: 704 1458 1502 1828 2014 2092 2103 2153 3191 3470 3475 3875 3904 3968 4252 4306 4521 4784 5220
5241 5350 5438 5500 5510 5606 5992 6467 6595 7012 7091 7113 7238 7663 7742 7873 8221 8271 8297 8567
9215 9421 9825 10019 10180 10186 10207 10370 10436 10625 10701 10794 10795 10796 10918 10977
11149 11440 11566 11637 11871 12047 12480 12580 12699 12844 13160 13501 13558 13685 13712 14472
14577 16122 16700 16824 16987 16991 17191 17252 17355 17521 17564 17656 17759 18249 18307 18880
19044 19943 20371 20714 21306 21544 21683 21742 21983 22098 22252 22356 22392 22514 22694 22914
22933 23101 23362 23482 23572 23698 23734 23742 23968 24016 24729 24953 24984 25022 25116 25402
25617 25780 25847 26742 26934 26992 27033 27211 27276 28022 28090 28338 28396 28462 28739 28993
29146 29352 29393 29415 29571 29651 29714 29911 30017 30124 30180 30216 30262 30483 30625 30848
30873 30916 30961 30992 31033 31351 31363 31406 31516 31724 31759 31859 32046 32188 32221 32230
32271 32380 32393 32898 33142 33182 33246 33252 33256 33365 33534 33678 33780 34058 34291 34350
34398 34514 34726 34889 34907 34993 35024 35110 35138 35221 35511 35570 35626 35902 35991 36181
36386
288: 332 836 837 1191 1392 1579 1964 2016 2138 2178 2182 2836 3226 4061 4080 4120 4238 4256 4301
4521 4784 5220 5241 5350 5438 5500 5510 5606 6039 6595 6836 6962 7012 7091 7113 7238 7419 7494 7663
7742 7900 8221 8271 8297 8544 8567 8726 9215 9254 9696 9825 9873 10019 10180 10207 10370 10436
10625 10734 10794 10795 10796 10918 10977 11149 11237 11440 11566 11596 11637 11871 12047 12178
12509 12580 12699 12751 12844 13160 13501 13558 13841 13899 13966 14429 14577 14842 14962 15040
15368 15678 15919 16700 16824 16987 16991 17191 17252 17355 17564 17656 17720 18249 18307 18711
18917 19081 19320 19632 19953 20440 20605 20714 20818 21306 21683 21742 21983 22168 22252 22356
22392 22514 22710 22935 22936 23101 23362 23482 23572 23698 23734 23742 23968 24016 24576 24729
24953 24984 25116 25139 25196 25536 25617 25744 25780 25847 26710 26742 27033 27150 27211 27276
27306 28022 28090 28158 28239 28338 28396 28739 28993 29146 29352 29393 29415 29571 29651 29714
29911 30017 30124 30180 30216 30483 30669 30734 30735 30848 30873 30895 30916 30961 30992 31033
31351 31363 31516 31759 31818 31859 31891 32046 32188 32221 32230 32271 32380 32393 32472 32710
32733 32898 32974 33142 33182 33246 33252 33256 33365 33450 33678 33780 34058 34291 34350 34398
34514 34726 34889 34907 34993 35024 35110 35138 35221 35511 35570 35626 35746 35902 35916 35991
36133 36181
289: 1347 1363 1773 1775 1976 2146 3391 4464 5870 6856 7894 7906 7907 7914 11196 19345 19356 19877
22921 29379
290: 862 1525 1879 1909 2349 2619 3187 3907 3912 4136 4161 4268 4513 4608 4662 4734 4825 4837 5000
5202 5277 5327 5341 5445 5545 5591 5821 5901 6014 6034 6081 6166 6214 6251 6277 6338 6633 6716 6792
6924 7037 7084 7096 7200 7277 7313 7325 7418 7488 7619 7649 7679 7716 8089 8246 8283 8321 8369 8431
8540 8588 8659 8761 8811 8863 8882 8903 9200 9223 9412 9530 9545 9826 9856 9916 10022 10080 10197
10325 10400 10470 10534 10561 10640 10691 10737 10744 10775 10811 10837 10863 10921 10931 10939
10954 10987 11023 11166 11259 11444 11521 11568 11660 11682 11751 11771 11820 11848 11919 12062
12149 12175 12261 12328 12399 12488 12499 12512 12571 12632 12690 12720 12789 12791 12792 12795
12797 12805 12818 12880 12887 12889 12897 12903 12905 12949 12950 12951 12952 12956 12958 12970
13052 13077 13157 13189 13436 13585 13642 13690 13756 13961 13965 14157 14205 14269 14439 14490
14533 14569 14622 14685 14737 14815 14871 14960 15019 15149 15243 15361 15425 15753 15856 15917
15988 16019 16038 16101 16133 16178 16218 16239 16279 16300 16629 16663 16668 16729 16803 16996
16997 16998 16999 17000 17043 17131 17168 17231 17378 17567 17598 17724 17830 17948 18005 18074
18112 18157 18225 18288 18375 18407 18488 18510 18603 18652 18670 18735 18766 18794 18837 18871
19238 19611 19713 19852 20191 20219 20250 20291 20633 20768 20830 20881 20944 20977 20991 21033
21122 21237 21266 21277 21288 21344 21380 21676 21751 21760 21810 22008 22075 22106 22176 22209
22297 22353 22376 22443 22493 22515 22571 22687 23109 23148 23314 23349 23443 23456 23511 23628
23703 23735 23787 23841 23876 23902 23923 23931 23991 24112 24292 24383 24407 24488 24564 24646
24769 24830 24868 24884 24956 24983 25012 25058 25107 25141 25329 25373 25416 25477 25497 25564
25587 25615 25624 25669 25750 25807 25841 25899 25960 26089 26196 26261 26311 26372 26399 26414
26565 26688 26711 26766 26788 26824 26887 27008 27113 27274 27295 27362 27408 27462 27503 27684
27705 27851 27875 27941 27966 28048 28077 28166 28211 28293 28366 28414 28484 28507 28533 28646
28695 28765 28789 28874 28964 28998 29083 29174 29274 29346 29411 29439 29461 29567 29599 29626
29840 29913 29919 29960 29987 30034 30099 30183 30239 30265 30303 30344 30397 30418 30425 30451
30478 30531 30565 30615 30630 30714 30796 30856 30888 30911 30928 30933 30977 31056 31109 31203
31373 31423 31479 31685 31823 31956 32058 32135 32195 32233 32287 32387 32399 32469 32514 32554
32708 32728 32783 32882 32980 33041 33154 33213 33248 33282 33334 33453 33521 33553 33609 33672
33766 33864 34015 34064 34195 34242 34284 34345 34410 34471 34547 34603 34684 34689 34766 34816
34885 34905 34948 34978 35035 35093 35162 35213 35279 35387 35450 35490 35593 35630 35666 35780
35899 35914 36059 36131 36216 36240 36354 36389
291: 2040 2204 2456 3374 3595 4026 4037 4408 6181 6429 7957 9460 11249 11310 13934 14072 17793
19405 19817 20074 21459 21460 21524 21570 21571 22568 22705 27438 27439
292:
293: 639 1116 1436 1537 2691 3175 3465 3902 4131 5710 7349 7788 8385 10538 11216 11218 11370 15749
18640 18648 18933 19583 19979 21477 23918 25817 30514 33507
294: 1013 1521 2093 2191 2216 2217 3754 4332 5778 6059 6925 7972 8563 8819 8952 9014 9089 9152
12680 13210 13990 14403 15530 15687 16344 16516 16517 18861 18995 19879 21617 22020 22728 26017
26958 27034 27242 28134 28197 28238 28361 28372 28461 29015 30545 30697 31362 31438 31896 32131
32916 32964
295: 2370 2478 2521 2711 2868 2998 3104 3241 3873 3903 4010 4089 4113 4497 4629 4655 4801 5052 5358
5401 5457 5555 5607 5784 6061 6147 6394 6403 6415 6544 6573 6623 6684 6809 6905 7010 7085 7160 7262
7452 8004 8005 8071 8192 8280 8515 8590 8666 8748 9248 9552 9566 9747 9829 10021 10086 10295 10378
10488 10627 10828 10866 10972 11542 11595 11641 11696 11760 11778 12014 12544 12722 12841 12976
13136 13447 13562 14004 14248 14428 14445 14808 14927 15028 15262 15324 15882 16063 16076 16142
16333 16570 16821 17049 17178 17239 17353 17394 17442 17494 17846 17847 18314 18473 18655 18891
19648 20345 20614 20763 20909 21027 21064 21137 21257 21565 21566 21605 21697 21731 21870 21932
21981 22263 22329 22342 22394 23123 23158 23265 23379 23474 23525 23774 23943 24011 24073 24372
24693 24786 25147 25215 25289 25508 25782 25851 25943 26210 26376 26542 27026 27380 27410 28013
28093 28189 28248 28332 28480 29264 29324 29449 29555 29588 29649 29723 29880 30015 30076 30150
30347 30703 30867 30996 31229 31388 31491 31960 31997 32101 32127 32199 32266 32379 32454 32699
33096 33205 33343 33377 33462 33555 34055 34163 34213 34272 34323 34430 34475 34546 34632 34707
34965 35041 35073 35167 35185 35389 35495 35580 35890 35929 35936 36097 36213 36415
296: 790 939 1402 1446 1833 2210 2433 2596 2704 2809 2851 3086 3250 3358 3389 3411 3457 3634 3697
3894 4227 5812 7928 7958 8046 8061 13711 13977 18169 20413 21462 21526 21662 22703 22843 22990
23302 23807 24697 26813 32576 34746
297: 917 920 1102 1103 1171 1212 1299 1406 1657 1713 1780 1908 1941 2114 2238 2244 2353 2412 2588
2706 2779 2827 2943 3005 3056 3082 3239 3326 3370 3378 3438 3486 3591 3623 3652 3674 3704 3712 3815
3825 3874 3958 3969 4024 4094 4107 4240 4259 4270 4297 4309 4391 5692 5830 6409 6853 7889 7948 8003
9432 12370 13883 14016 14032 14069 14096 16126 16135 16151 16154 17388 17497 17653 17754 18557
18567 18925 18936 19025 19156 19395 19603 19813 19835 20071 20384 20389 20406 21326 21350 21588
21610 22570 22838 22873 22930 22956 22987 29384 29854 31872
298: 530 606 623 742 1622 2031 2416 2550 2657 2755 3038 3072 3117 3163 3195 3228 3554 3682 3741 3783
3884 3885 4117 4163 4196 4345 4392 4448 4465 4705 4716 4717 4742 4748 4754 5120 5187 5189 5852 6389
6404 6432 6493 6983 8484 8485 8486 8487 8498 9120 9181 9648 9716 10532 10533 10592 11219 11229
11420 12705 12706 12707 12987 12988 13322 13323 13947 14025 14655 15553 15793 15794 16008 16289
17780 18572 18792 18947 19027 19360 19489 20036 20046 20318 20450 21087 21223 21224 21225 21226
21227 21228 21340 21446 21915 21916 21917 22578 22606 23063 23690 24161 24536 24537 24538 24689
24690 24727 24757 24803 24922 24924 24934 25310 25653 25938 25939 26440 26504 26530 26667 26668
26901 26902 26903 26906 26907 26908 26913 26919 27823 28562 29847 30097 31122 31123 31157 31188
31192 31320 31432 31533 31598 31829 31830 31978 32600 32826 34923 35063 35251 36315 36316 36317
36318
299: 530 605 623 660 742 744 845 859 1025 1026 1599 1622 1687 1820 1925 1994 2031 2120 2416 2550
2657 2755 3038 3072 3117 3163 3195 3228 3554 3682 3741 3783 3884 3885 4117 4163 4196 4345 4392 4448
4465 4717 4740 4741 4742 4748 4889 5187 5189 5483 5852 6389 6404 6432 6493 6503 8484 8485 8486 8487
8498 9044 9120 9181 9653 9716 10532 10533 11219 11229 11420 11483 12705 12706 12707 12987 12988
13322 13323 14054 14087 14655 15510 15722 15793 15794 16280 16698 16708 17692 17780 18267 18270
18572 18792 18947 18961 19027 19067 19282 19360 19489 19730 19793 20036 20046 20318 20450 20528
20927 20929 20930 21087 21222 21223 21224 21225 21227 21307 21308 21309 21340 21446 21915 21916
21917 22469 22472 22578 22606 23011 23063 23676 23684 23690 24161 24321 24536 24537 24538 24541
24689 24690 24727 24757 24803 24919 24922 24924 24934 25310 25653 25938 25939 26064 26427 26428
26429 26440 26491 26504 26530 26901 26902 26905 26906 26907 26913 26919 27046 27586 27588 27589
27823 28280 28374 28562 29847 30097 30629 31071 31122 31123 31157 31188 31192 31278 31315 31316
31320 31418 31432 31533 31565 31598 31753 31754 31829 31830 31831 31978 31980 31981 31982 31983
32600 32826 32850 33822 33966 34574 34923 35063 35248 36301 36302 36308 36315 36316 36317 36318
300: 967 1454 2468 2900 3185 3630 4004 5773 6185 9053 10220 10221 10222 11068 13896 14902 17524
17843 21551 21713 23860 26528 26916 26917 26946 31184 31185 36334
301: 933 992 2437 2553 2614 2637 2745 3492 3566 3640 3660 3716 3867 3920 4092 4281 4371 4374 5731
5767 6190 6458 7960 10548 13935 14136 14902 17659 17801 18170 18611 18793 18807 20364 20454 21490
21536 21545 21713 26528 26915 26916 26917 27140 29377 29378 33803 36235 36334
302:
303: 2071
304: 908 938 1053 1243 1370 1472 2228 2992 3424 4099 6869 11234 13208 17834 19458 20078 20375 21312
22816 23030 23667
305: 615 635 662 665 690 863 1008 1021 1087 1185 1296 1369 1380 1399 1545 1597 1635 1664 1678 1681
1692 1771 1872 1898 1929 1945 1974 1991 2021 2051 2088 2089 2090 2110 2116 2122 2132 2224 2248 2298
2335 2455 2460 2506 2561 2564 2610 2683 2689 2694 2695 2765 2784 2811 2839 2840 2847 2849 2867 2894
2944 3013 3224 3377 3388 3446 3450 3484 3531 3537 3546 3547 3560 3577 3593 3659 3707 3843 3983 3984
4022 4054 4057 4133 4141 4232 4248 4293 4402 4403 4976 4977 4978 4980 5171 5655 5750 5862 5871 6498
7606 7908 7915 7916 7931 7946 7969 7970 7983 8030 8049 8817 8942 8943 9347 9361 9362 9380 9434 9646
9942 9943 9944 9945 9946 9947 9948 9949 10125 10126 10127 10137 10266 10279 10283 10881 11067
11069 11199 11200 11262 11330 11838 13222 13223 13555 14561 15281 15628 15629 15800 16068 16148
16152 16349 16613 17021 17395 17397 17533 17699 17757 17768 18264 18442 18543 18564 18598 18667
18668 18949 18965 18968 19029 19071 19072 19165 19167 19170 19203 19225 19243 19245 19288 19292
19341 19373 19431 19764 19849 19858 19881 20012 20016 20049 20369 20388 20430 20642 20644 20652
20984 20985 20986 20987 21093 21245 21332 21402 21412 21415 21416 21487 21516 21600 21615 21616
21801 22651 22792 22841 22889 22913 22949 22968 22974 22976 22980 23687 23913 24075 24940 26053
26442 26603 26605 27042 30139 32158 32925 32926 33230 33798 33945 34365 34369 34370 34371 34372
34373 34374 34375 34376 35477
306: 614 677 693 857 1139 1412 1536 1794 2007 2025 2447 2493 2699 2762 3840 4046 4253 4315 4458 4472
4498 4504 4565 4575 4576 4580 4581 4610 4625 4854 4888 4940 4948 4988 4989 4990 5002 5014 5017 5024
5047 5048 5072 5077 5083 5086 5092 5109 5115 5117 5366 5370 5407 5409 5559 5744 5950 5969 5971 6116
6177 6179 6342 6519 6580 6582 6686 6702 6708 6709 6726 6730 6739 6761 6762 6773 6793 6796 6803 6814
7008 7134 7136 7154 7178 7182 7192 7221 7243 7253 7254 7255 7267 7427 7500 7501 7502 7503 7587 7588
7741 7865 7944 8020 8042 8079 8134 8135 8136 8137 8138 8140 8147 8154 8155 8157 8158 8180 8183 8191
8225 8228 8241 8386 8406 8517 8612 8613 8626 8632 8661 8769 8875 8913 8948 8968 9219 9251 9540 9541
9571 9572 9682 9708 9855 9858 9902 9923 9971 9979 9993 10000 10018 10092 10120 10160 10161 10191
10390 10448 10455 10527 10612 10650 10652 10664 10673 10681 10812 10816 10825 10860 11308 11309
11316 11430 11498 11576 11654 11717 11719 11720 11721 11802 11822 11852 11885 12304 12355 12526
12618 12769 12828 12909 13016 13017 13020 13021 13022 13125 13158 13362 13431 13440 13462 13476
13497 13578 13637 13881 14156 14234 14252 14257 14268 14282 14288 14292 14458 14459 14464 14551
14700 14740 14803 14900 14901 14967 14971 15094 15131 15206 15220 15229 15260 15280 15350 15486
15717 15920 15921 15939 15941 16028 16109 16246 16257 16420 16421 16422 16423 16424 16425 16426
16427 16428 16530 16574 16582 16583 16608 16797 16837 16869 17023 17096 17097 17100 17101 17163
17207 17265 17370 17379 17407 17441 17462 17474 17704 17945 18027 18252 18253 18254 18255 18256
18257 18301 18453 18740 18741 19191 19496 19597 19626 19634 19646 19814 19815 20011 20173 20312
20315 20475 20477 20564 20586 20618 20620 20742 20767 20778 20803 20849 20990 21069 21140 21164
21165 21263 21727 21833 21873 21904 21921 21971 22059 22082 22086 22237 22264 22316 22377 22379
22543 22544 22713 22714 23006 23022 23155 23166 23168 23182 23272 23343 23354 23368 23401 23410
23439 23440 23460 23478 23502 23532 23546 23562 23605 23613 23662 23668 23719 23927 24006 24028
24033 24322 24331 24364 24386 24448 24610 24723 24740 24800 24807 24874 24882 24914 24973 24974
25086 25097 25122 25125 25126 25133 25169 25187 25214 25216 25251 25263 25266 25300 25301 25305
25326 25429 25470 25486 25515 25534 25664 25777 25794 25815 25823 25849 25862 25888 25889 25895
25896 25945 26070 26074 26077 26241 26310 26506 26544 26570 26576 26579 26581 26778 26794 26856
26935 26964 27091 27102 27202 27244 27605 27737 27827 27943 27950 28021 28110 28194 28226 28367
28368 28410 28473 28475 28631 28770 28771 28832 28833 28852 28934 28975 29271 29336 29402 29472
29474 29477 29485 29487 29495 29503 29533 29606 29618 29665 29667 29679 29872 29945 30052 30083
30147 30176 30325 30423 30579 30650 30682 30736 30829 30881 30949 31007 31025 31099 31155 31158
31254 31276 31370 31466 31467 31468 31502 31526 31560 31714 31749 31836 31837 31838 31839 31900
31962 31963 31964 32024 32031 32052 32063 32068 32223 32245 32248 32256 32349 32367 32378 32407
32419 32450 32474 32492 32614 32640 32684 32712 32782 32885 32896 32910 32911 32946 33051 33077
33109 33120 33148 33158 33163 33259 33260 33261 33262 33276 33278 33325 33368 33374 33376 33378
33392 33429 33457 33997 34115 34122 34183 34267 34447 34513 34579 34612 34731 34911 35022 35051
35090 35115 35171 35173 35196 35218 35228 35393 35521 35545 35558 35559 35562 35600 35755 35789
35790 35797 35809 35820 35825 35828 35854 35918 35961 35962 36089 36115 36134 36135 36148 36160
36166 36200 36273 36284 36360 36361 36369

[0097] Recombinant DNA constructs are prepared using the DNA encoding each of the identified homologs and the constructs are used to prepare multiple events of transgenic corn, soybean, canola and cotton plants as illustrated in Examples 2-5. Plants are regenerated from the transformed plant cells and used to produce progeny plants and seed that are screened for enhanced water use efficiency, enhanced cold tolerance, increased yield, enhanced nitrogen use efficiency, enhanced seed protein and enhanced seed oil. From each group of multiple events of transgenic plants with a specific recombinant DNA for a homolog the event that produces the greatest enhancement in yield, water use efficiency, nitrogen use efficiency, enhanced cold tolerance, enhanced seed protein and enhanced seed oil is identified and progeny seed is selected for commercial development.

### Example 7

### Consensus Sequence

[0098] This example illustrates the identification of consensus amino acid sequence for the proteins and homologs encoded by DNA that is used to prepare the transgenic seed and plants of this invention having enhanced agronomic traits.

[0099] ClustalW program was selected for multiple sequence alignments of the amino acid sequence of SEQ ID NO: 311, 314, 316, 333, 344, 346, 365, 373, 383-386, 404-405, 426, 449, 461, 466, 478, 488, 490-491, 512, 541, 543-544, 559, 579, 583, 603, and 610-611 and their homologs. Three major factors affecting the sequence alignments dramatically are (1) protein weight matrices; (2) gap open penalty; (3) gap extension penalty. Protein weight matrices available for ClustalW program include Blosum, Pam and Gonnet series. Those parameters with gap open penalty and gap extension penalty were extensively tested. On the basis of the test results, Blosum weight matrix, gap open penalty of 10 and gap extension penalty of 1 were chosen for multiple sequence alignment.

[0100] The consensus amino acid sequence can be used to identify DNA corresponding to the full scope of this invention that is useful in providing transgenic plants, for example corn and soybean plants with enhanced agronomic traits, for example improved nitrogen use efficiency, improved yield, improved water use efficiency and/or improved growth under cold stress, due to the expression in the plants of DNA suppressing a protein with amino acid sequence identical to the consensus amino acid sequence.

[0101] The SEQ ID NOs for the identified consensus sequences are reported in table 8 below and the full consensus sequences are provided in the attached sequence listing.

TABLE 8

| PEP SEQ ID NO | Consensus SEQ ID NO |
|---|---|
| 311 | 36447 |
| 314 | 36448 |
| 316 | 36449 |
| 333 | 36450 |
| 344 | 36451 |
| 346 | 36452 |
| 365 | 36453 |
| 373 | 36454 |
| 383 | 36455 |
| 384 | 36456 |
| 385 | 36457 |
| 386 | 36458 |
| 404 | 36459 |
| 405 | 36460 |
| 426 | 36461 |
| 449 | 36462 |
| 461 | 36463 |
| 466 | 36464 |
| 478 | 36465 |
| 488 | 36466 |
| 490 | 36467 |
| 491 | 36468 |
| 512 | 36469 |
| 541 | 36470 |
| 543 | 36471 |
| 544 | 36472 |
| 559 | 36473 |
| 579 | 36474 |
| 583 | 36475 |
| 603 | 36476 |
| 610 | 36477 |
| 611 | 36478 |

### Example 9

### Identification of Amino Acid Domain by Pfam Analysis

[0102] This example illustrates the identification of domain and domain module by Pfam analysis.

[0103] The amino acid sequence of the expressed proteins that are shown to be associated with an enhanced trait were analyzed for Pfam protein family against the current Pfam collection of multiple sequence alignments and hidden Markov models using the HMMER software. The Pfam protein domains and modules for the proteins of SEQ ID NOs: 308-310, 312-313, 315, 317-332, 334-343, 345, 347-364, 366-372, 374, 382, 387-403, 406-412, 414-425, 427-448, 450-460, 462-465, 467-477, 479-482, 484-487, 493-511, 513-539, 542, 545-558, 560-578, 580-582, 584-598, 600-602, 604-608, and 612-614 are shown in Tables 9, 10 and 11. The Hidden Markov model databases for the identified patent families are also available from the Pfam consortium (ftp.sanger.ac.uk/pub/databases/Pfam/) allowing identification of other homologous proteins and their cognate encoding DNA to enable the full breadth of the invention for a person of ordinary skill in the art. Certain proteins are identified by a single Pfam domain and others by multiple Pfam domains. The function of the identified Pfam domains in proteins providing an enhanced trait in plants was verified by searching identified homologs for the conservation of the identified Pfam domains. The score value for the identified Pfam domains in sequences from table 1 and the minimum score value for the Pfam domain between a protein from table 1 and its identified homologs are reported below in table 9.

TABLE 9
Pfam annotation

| PEP | | | | | | |
|---|---|---|---|---|---|---|
| SEQ | | | | | | |
| ID | Pfam domain | | | | Minumun | |
| NO | name | Begin | Stop | Score | Score | E-value |
| 308 | Aminotran_1_2 | 69 | 470 | 60.3 | −40.6 | 7.20E−15 |
| 309 | Homeobox | 65 | 119 | 67.2 | −2.9 | 6.20E−17 |
| 309 | HALZ | 120 | 164 | 45.5 | 25 | 2.10E−10 |
| 310 | bZIP_1 | 108 | 171 | 40.6 | 27.4 | 6.30E−09 |
| 310 | bZIP_2 | 108 | 162 | 42.2 | 18.1 | 2.10E−09 |
| 312 | Peptidase_S10 | 39 | 504 | 699 | −109.9 | 4.00E−207 |
| 313 | SBP | 103 | 181 | 167.3 | 41.4 | 4.60E−47 |
| 315 | GDPD | 436 | 728 | 154.9 | −14.9 | 2.50E−43 |
| 317 | DUF1292 | 111 | 180 | 19.6 | 16.5 | 4.10E−05 |
| 318 | Aminotran_1_2 | 127 | 473 | 234 | −30.7 | 3.70E−67 |
| 319 | FAD_binding_4 | 50 | 191 | 14.8 | −6.6 | 0.00012 |
| 319 | Lact-deh-memb | 279 | 570 | 657.8 | 75.1 | 9.70E−195 |
| 320 | Fe-ADH | 25 | 365 | 19.5 | −175 | 9.00E−17 |
| 320 | DHQ_synthase | 37 | 346 | −77.9 | −116.5 | 1.00E−06 |
| 321 | AlaDh_PNT_N | 4 | 135 | 277 | −6.3 | 4.20E−80 |
| 321 | AlaDh_PNT_C | 147 | 302 | 315.9 | −13.4 | 8.10E−92 |
| 321 | Shikimate_DH | 152 | 276 | 2 | −4.2 | 0.00013 |
| 322 | Thiolase_N | 14 | 277 | 421.7 | −110.9 | 1.20E−123 |
| 322 | Thiolase_C | 284 | 406 | 219.2 | −5.3 | 1.10E−62 |
| 323 | Thiolase_N | 14 | 277 | 452 | −110.9 | 8.90E−133 |
| 323 | Thiolase_C | 284 | 406 | 218.6 | −5.3 | 1.70E−62 |
| 324 | SOUL | 1 | 150 | 167.1 | 30.2 | 5.20E−47 |
| 325 | AA_kinase | 98 | 373 | 206.1 | −39 | 9.60E−59 |
| 326 | AA_kinase | 10 | 285 | 196.9 | −39 | 5.70E−56 |
| 327 | AA_kinase | 98 | 374 | 191.3 | 78.7 | 2.80E−54 |
| 327 | NAD_binding_3 | 552 | 687 | 164.9 | 4 | 2.40E−46 |
| 327 | Homoserine_dh | 695 | 891 | 378.1 | 59.2 | 1.60E−110 |
| 328 | HLH | 204 | 253 | 56.2 | 35.3 | 1.20E−13 |
| 329 | HLH | 204 | 253 | 56.2 | 35.3 | 1.20E−13 |
| 330 | HLH | 258 | 307 | 70 | 32.4 | 8.90E−18 |
| 331 | HLH | 258 | 307 | 70 | 32.4 | 8.90E−18 |
| 332 | Thioredoxin | 7 | 105 | 42 | −14.2 | 2.40E−09 |
| 332 | Glutaredoxin | 169 | 233 | 94.3 | 24.9 | 4.20E−25 |
| 332 | Glutaredoxin | 298 | 362 | 101.9 | 24.9 | 2.10E−27 |
| 332 | Glutaredoxin | 405 | 469 | 94 | 24.9 | 5.10E−25 |
| 334 | Pkinase | 143 | 405 | 308.2 | 154.7 | 1.80E−89 |
| 334 | Pkinase_Tyr | 143 | 443 | −10.3 | −149.1 | 4.90E−13 |
| 335 | Gln-synt_N | 17 | 97 | 146.5 | 13.5 | 8.20E−41 |
| 335 | Gln-synt_C | 103 | 355 | 291.7 | −123.7 | 1.60E−84 |
| 336 | Pkinase | 143 | 405 | 308.2 | 154.7 | 1.80E−89 |
| 336 | Pkinase_Tyr | 143 | 443 | −10.3 | −149.1 | 4.90E−13 |
| 337 | MethyltransfD12 | 23 | 264 | 358.3 | −38.5 | 1.40E−104 |
| 338 | bZIP_1 | 87 | 150 | 55.9 | 25.5 | 1.60E−13 |
| 338 | bZIP_2 | 87 | 141 | 42 | 29.7 | 2.40E−09 |
| 338 | MethyltransfD12 | 191 | 432 | 360.2 | −38.5 | 4.00E−105 |
| 339 | zf-B_box | 1 | 47 | 29.8 | 22.6 | 1.10E−05 |
| 339 | MethyltransfD12 | 248 | 489 | 358.3 | −38.5 | 1.40E−104 |
| 340 | TPP_enzyme_N | 2 | 177 | 156.7 | −34.7 | 7.20E−44 |
| 340 | TPP_enzyme_M | 193 | 325 | 89 | −7.8 | 1.70E−23 |
| 340 | TPP_enzyme_C | 380 | 517 | 104.2 | 19.9 | 4.40E−28 |
| 341 | RolB_RolC | 11 | 197 | 186.6 | 109.2 | 6.90E−53 |
| 341 | Amino_oxidase | 246 | 729 | 336.5 | 57.4 | 5.10E−98 |
| 342 | Amino_oxidase | 55 | 532 | 117.8 | 45.7 | 3.60E−32 |
| 343 | NIR_SIR_ferr | 131 | 201 | 97.3 | 6.9 | 5.50E−26 |
| 343 | NIR_SIR | 209 | 369 | 171.8 | −18.6 | 2.00E−48 |
| 343 | NIR_SIR_ferr | 390 | 459 | 95 | 6.9 | 2.50E−25 |
| 345 | DEAD | 121 | 290 | 239.3 | 67.8 | 9.80E−69 |
| 345 | Helicase_C | 359 | 435 | 120.7 | 96.2 | 4.90E−33 |
| 347 | LRRNT_2 | 38 | 79 | 46 | 19.6 | 1.40E−10 |
| 347 | LRR_1 | 108 | 130 | 15.4 | 11 | 0.24 |
| 347 | LRR_1 | 132 | 154 | 14.8 | 11 | 0.35 |
| 347 | LRR_1 | 156 | 178 | 12.2 | 11 | 1.4 |
| 347 | LRR_1 | 180 | 201 | 13.7 | 11 | 0.73 |
| 347 | LRR_1 | 228 | 250 | 11.2 | 11 | 2.2 |
| 347 | LRR_1 | 252 | 274 | 14.6 | 11 | 0.42 |
| 347 | LRR_1 | 299 | 321 | 12.7 | 11 | 1.1 |
| 347 | LRR_1 | 347 | 369 | 16.7 | 11 | 0.1 |
| 347 | LRR_1 | 419 | 441 | 12.8 | 11 | 1.1 |
| 347 | LRR_1 | 443 | 465 | 15.3 | 11 | 0.25 |
| 347 | LRR_1 | 467 | 489 | 14.6 | 11 | 0.4 |
| 347 | LRR_1 | 491 | 513 | 16.4 | 11 | 0.12 |
| 347 | LRR_1 | 539 | 560 | 16.7 | 11 | 0.094 |
| 347 | Pkinase | 662 | 927 | 117.1 | 90.1 | 6.00E−32 |
| 347 | Pkinase_Tyr | 662 | 927 | 74.3 | 31.1 | 4.50E−19 |
| 348 | Homeobox | 118 | 172 | 62.6 | 36.3 | 1.50E−15 |
| 348 | HALZ | 173 | 217 | 45.3 | 38.9 | 2.40E−10 |
| 349 | Homeobox | 139 | 193 | 62.6 | 36.3 | 1.50E−15 |
| 349 | HALZ | 194 | 238 | 45.3 | 38.9 | 2.40E−10 |
| 350 | WD40 | 560 | 599 | 34.4 | 22.4 | 4.50E−07 |
| 350 | WD40 | 646 | 683 | 30.5 | 22.4 | 6.80E−06 |
| 351 | C4dic_mal_tran | 199 | 465 | 224.8 | −17.4 | 2.30E−64 |
| 352 | Peroxidase | 85 | 320 | 359.4 | 241.3 | 6.80E−105 |
| 353 | Peroxidase | 85 | 320 | 359.4 | 241.3 | 6.80E−105 |
| 354 | LisH | 7 | 33 | 40.7 | 29.6 | 5.80E−09 |
| 354 | WD40 | 185 | 223 | 46.5 | 23.7 | 1.10E−10 |
| 354 | WD40 | 244 | 282 | 30.2 | 23.7 | 8.60E−06 |
| 354 | WD40 | 285 | 323 | 40.2 | 23.7 | 8.40E−09 |
| 354 | WD40 | 327 | 364 | 23.5 | 23.5 | 0.00089 |
| 354 | WD40 | 368 | 406 | 50.7 | 23.7 | 5.80E−12 |
| 354 | WD40 | 410 | 457 | 46.3 | 23.7 | 1.20E−10 |
| 354 | WD40 | 461 | 501 | 33.6 | 23.7 | 8.20E−07 |
| 355 | bZIP_2 | 325 | 379 | 26.7 | 26.7 | 9.40E−05 |
| 355 | bZIP_1 | 334 | 386 | 28.8 | 28.8 | 2.20E−05 |
| 356 | FAD_binding_4 | 107 | 242 | 132.8 | 15.5 | 1.10E−36 |
| 356 | ALO | 266 | 581 | −44 | −93.7 | 1.40E−07 |
| 357 | NAM | 69 | 200 | 315.8 | 262 | 8.70E−92 |
| 358 | Ribosomal_L21p | 136 | 232 | 164.5 | 45.4 | 3.20E−46 |
| 359 | BTB | 192 | 301 | 85.6 | 19.5 | 1.70E−22 |
| 360 | RWP-RK | 104 | 155 | 106.6 | 89.8 | 8.40E−29 |
| 360 | PB1 | 325 | 408 | 83.2 | 66.1 | 9.20E−22 |
| 361 | Ammonium_transp | 29 | 451 | 263 | −105.1 | 7.00E−76 |
| 362 | BTB | 192 | 301 | 85.6 | 19.5 | 1.70E−22 |
| 363 | OPT | 85 | 744 | 815.2 | −141.6 | 4.10E−242 |
| 364 | DUF506 | 14 | 238 | 260.4 | 45.9 | 4.30E−75 |
| 366 | FTCD_N | 10 | 202 | 184 | −99.6 | 4.10E−52 |
| 367 | FTCD_N | 7 | 199 | 231.8 | −99.6 | 1.70E−66 |
| 368 | SSF | 44 | 461 | −0.7 | −114.1 | 8.50E−09 |
| 369 | Aminotran_5 | 68 | 433 | 435.7 | −139.8 | 7.30E−128 |
| 369 | Beta_elim_lyase | 93 | 373 | −78.8 | −110.3 | 5.00E−05 |
| 370 | ABC_tran | 67 | 262 | 118.5 | 9.8 | 2.10E−32 |
| 371 | Monooxygenase_B | 39 | 418 | 1037 | 175.6 | 0 |
| 372 | PMEI | 34 | 191 | 206.1 | 40.3 | 9.40E−59 |
| 374 | CCT | 141 | 185 | 83.6 | 63 | 7.20E−22 |
| 375 | PHD | 82 | 131 | 38.5 | 27 | 2.70E−08 |
| 375 | SET | 361 | 496 | 154.8 | 52.6 | 2.60E−43 |
| 376 | AP2 | 111 | 163 | 73.7 | 56 | 6.70E−19 |
| 377 | bZIP_2 | 390 | 444 | 33.6 | 21.1 | 8.20E−07 |
| 377 | bZIP_1 | 392 | 453 | 32.9 | 26.8 | 1.30E−06 |
| 378 | AP2 | 24 | 75 | 79.3 | 57 | 1.30E−20 |
| 379 | A_thal_3526 | 17 | 70 | 119.3 | 100.1 | 1.30E−32 |
| 380 | AP2 | 24 | 75 | 78.9 | 57 | 1.80E−20 |
| 381 | Clp_N | 17 | 67 | 39.1 | 1.9 | 1.70E−08 |
| 381 | Clp_N | 96 | 146 | 43.1 | 1.9 | 1.10E−09 |
| 381 | AAA | 202 | 396 | 46 | 14.1 | 1.50E−10 |
| 381 | AAA_2 | 597 | 762 | 361.4 | 28 | 1.70E−105 |
| 381 | AAA_5 | 601 | 767 | 15.6 | 4.1 | 4.80E−05 |
| 381 | ClpB_D2-small | 768 | 857 | 122.4 | 27.9 | 1.50E−33 |
| 382 | eRF1_1 | 1 | 131 | 178 | 0.7 | 2.60E−50 |
| 382 | eRF1_2 | 136 | 268 | 172.7 | 4.1 | 1.00E−48 |
| 382 | eRF1_3 | 271 | 370 | 159.5 | 8.8 | 1.00E−44 |
| 387 | zf-CCCH | 113 | 138 | 31 | 2.1 | 4.80E−06 |
| 388 | zf-B_box | 1 | 47 | 42.6 | 15.5 | 1.50E−09 |
| 388 | zf-B_box | 48 | 90 | 24.8 | 15.5 | 0.00035 |
| 388 | CCT | 350 | 394 | 81.3 | 60.2 | 3.50E−21 |
| 389 | HLH | 128 | 178 | 33.4 | 10.8 | 9.20E−07 |
| 390 | Arginosuc_synth | 100 | 446 | 574.6 | −233.5 | 1.10E−169 |
| 391 | SH3BGR | 204 | 301 | −7.5 | −5.5 | 0.006 |
| 391 | Glutaredoxin | 205 | 279 | 45.1 | 21 | 2.70E−10 |
| 392 | AsnA | 3 | 246 | 612.2 | 27.6 | 5.50E−181 |
| 393 | NAD_binding_1 | 221 | 337 | 150.2 | 19.5 | 6.20E−42 |
| 394 | cNMP_binding | 39 | 131 | 74.2 | 21.2 | 4.70E−19 |
| 394 | Crp | 186 | 217 | 49.9 | 20.8 | 1.00E−11 |
| 395 | PLAC8 | 71 | 166 | 175.3 | 63.2 | 1.80E−49 |
| 396 | HSP20 | 42 | 148 | 109.2 | 34.1 | 1.40E−29 |
| 397 | Myb_DNA-binding | 14 | 61 | 44.2 | 28.5 | 5.30E−10 |
| 397 | Myb_DNA-binding | 67 | 112 | 47.4 | 28.5 | 5.60E−11 |
| 398 | ATP-sulfurylase | 136 | 462 | 529.7 | −150.4 | 3.50E−156 |
| 399 | WRKY | 300 | 360 | 135.4 | 52.5 | 1.80E−37 |
| 400 | Asp | 106 | 439 | −70.2 | −149.4 | 2.10E−09 |
| 401 | Gln-synt_N | 42 | 122 | 26.1 | 14.1 | 4.70E−06 |
| 401 | Gln-synt_C | 141 | 444 | −72.8 | −123.9 | 2.90E−06 |
| 402 | GATase_2 | 27 | 397 | 686.8 | −57.2 | 1.90E−203 |
| 402 | Glu_syn_central | 477 | 773 | 530.8 | 32.1 | 1.70E−156 |
| 402 | Glu_synthase | 830 | 1221 | 802.2 | −154.6 | 3.30E−238 |
| 402 | GXGXG | 1298 | 1493 | 323.1 | 9.5 | 5.60E−94 |
| 403 | Form_Nir_trans | 87 | 343 | 364.7 | −118.6 | 1.70E−106 |
| 406 | NAD_binding_2 | 51 | 213 | 202.4 | 12.2 | 1.20E−57 |
| 407 | NAD_binding_2 | 1 | 162 | 189.3 | 12.2 | 1.00E−53 |
| 408 | Glutaredoxin | 39 | 103 | 76.8 | 30 | 7.70E−20 |
| 409 | Glutaredoxin | 59 | 123 | 111.1 | 55.5 | 3.80E−30 |
| 410 | Homeobox | 139 | 193 | 62.6 | 36.3 | 1.50E−15 |
| 410 | HALZ | 194 | 238 | 45.3 | 38.9 | 2.40E−10 |
| 411 | Homeobox | 137 | 193 | 59.7 | 36.3 | 1.10E−14 |
| 411 | HALZ | 194 | 238 | 45.3 | 38.9 | 2.40E−10 |
| 412 | Homeobox | 139 | 193 | 62.6 | 36.3 | 1.50E−15 |
| 412 | HALZ | 194 | 238 | 45.3 | 38.9 | 2.40E−10 |
| 414 | CCT | 228 | 272 | 90.1 | 74.2 | 7.80E−24 |
| 415 | MBD | 25 | 144 | 62.2 | 36 | 2.00E−15 |
| 416 | MBD | 21 | 94 | 49.3 | 13 | 1.50E−11 |
| 417 | Pkinase | 12 | 263 | 298.2 | 182.4 | 1.70E−86 |
| 417 | Pkinase_Tyr | 12 | 261 | 17.9 | −122.6 | 6.50E−15 |
| 418 | SRF-TF | 3 | 53 | 85.4 | 21.1 | 2.00E−22 |
| 419 | SRF-TF | 11 | 65 | 30.5 | 18.7 | 6.90E−06 |
| 420 | eIF-5a | 85 | 154 | 129 | 10.6 | 1.50E−35 |
| 421 | Homeobox | 33 | 89 | 78.7 | 45.4 | 2.00E−20 |
| 421 | START | 236 | 457 | 196.1 | 6.7 | 9.50E−56 |
| 422 | Homeobox | 33 | 89 | 78.7 | 45.4 | 2.00E−20 |
| 422 | START | 236 | 457 | 196.1 | 6.7 | 9.50E−56 |
| 423 | Homeobox | 33 | 89 | 78.7 | 45.4 | 2.00E−20 |
| 423 | START | 236 | 457 | 196.1 | 6.7 | 9.50E−56 |
| 424 | Homeobox | 33 | 89 | 78.7 | 45.4 | 2.00E−20 |
| 424 | START | 236 | 457 | 196.1 | 6.7 | 9.50E−56 |
| 425 | Arginase | 61 | 336 | 283.6 | 0 | 4.40E−82 |
| 427 | CBFB_NFYA | 147 | 203 | 134.7 | 100.3 | 3.00E−37 |
| 428 | CBFB_NFYA | 148 | 204 | 139.4 | 89.5 | 1.10E−38 |
| 429 | CBFB_NFYA | 93 | 149 | 140.9 | 87.3 | 4.10E−39 |
| 430 | CBFB_NFYA | 70 | 126 | 140.2 | 89.5 | 6.60E−39 |
| 431 | CBFB_NFYA | 73 | 129 | 141.1 | 74.2 | 3.30E−39 |
| 432 | PAS_2 | 103 | 219 | 243 | 82 | 7.50E−70 |
| 432 | GAF | 252 | 433 | 108.7 | 62.8 | 1.90E−29 |
| 432 | Phytochrome | 444 | 623 | 410.7 | 29 | 2.40E−120 |
| 432 | PAS | 654 | 770 | 105.5 | 8.3 | 1.80E−28 |
| 432 | PAS | 785 | 907 | 113.5 | 8.3 | 6.80E−31 |
| 432 | HisKA | 927 | 991 | 52.6 | 25.1 | 1.50E−12 |
| 432 | HATPase_c | 1039 | 1152 | 69.6 | 37.6 | 1.20E−17 |
| 433 | HMG_box | 44 | 113 | 115.8 | 37.7 | 1.40E−31 |
| 434 | SPRY | 77 | 224 | 25.9 | 22.2 | 1.70E−05 |
| 435 | SPRY | 77 | 224 | 25.9 | 22.2 | 1.70E−05 |
| 436 | RRM_1 | 4 | 68 | 69.7 | 29.9 | 1.00E−17 |
| 436 | RRM_1 | 97 | 160 | 52.9 | 29.9 | 1.30E−12 |
| 437 | RRM_1 | 4 | 68 | 69.7 | 29.9 | 1.00E−17 |
| 437 | RRM_1 | 97 | 160 | 52.9 | 29.9 | 1.30E−12 |
| 438 | RRM_1 | 4 | 69 | 56.2 | 51.6 | 1.20E−13 |
| 438 | zf-CCHC | 85 | 102 | 31.4 | 18.3 | 3.10E−06 |
| 439 | RRM_1 | 4 | 69 | 56.2 | 51.6 | 1.20E−13 |
| 439 | zf-CCHC | 85 | 102 | 31.4 | 18.3 | 3.10E−06 |
| 440 | RRM_1 | 4 | 69 | 57.1 | 49.8 | 6.80E−14 |
| 440 | zf-CCHC | 86 | 103 | 33 | 18.3 | 1.20E−06 |
| 441 | RRM_1 | 4 | 69 | 57.1 | 49.8 | 6.80E−14 |
| 441 | zf-CCHC | 86 | 103 | 33 | 18.3 | 1.20E−06 |
| 442 | MMR_HSR1 | 119 | 240 | 131.3 | 66.5 | 3.10E−36 |
| 442 | KH_2 | 345 | 409 | 87.5 | 25.3 | 4.60E−23 |
| 443 | MMR_HSR1 | 119 | 240 | 131.3 | 66.5 | 3.10E−36 |
| 443 | KH_2 | 345 | 409 | 87.5 | 25.3 | 4.60E−23 |
| 444 | MMR_HSR1 | 119 | 240 | 131.3 | 66.5 | 3.10E−36 |
| 444 | KH_2 | 345 | 409 | 87.5 | 25.3 | 4.60E−23 |
| 445 | zf-C3HC4 | 152 | 193 | 40.2 | 29.7 | 8.40E−09 |
| 446 | zf-C3HC4 | 152 | 193 | 40.2 | 29.7 | 8.40E−09 |
| 447 | zf-C3HC4 | 152 | 193 | 40.2 | 29.7 | 8.40E−09 |
| 448 | zf-C3HC4 | 152 | 193 | 40.2 | 29.7 | 8.40E−09 |
| 450 | 2-Hacid_dh | 8 | 324 | 145.9 | 14 | 1.20E−40 |
| 450 | 2-Hacid_dh_C | 113 | 292 | 276.4 | 117.8 | 6.30E−80 |
| 451 | AlaDh_PNT_N | 4 | 136 | 272.7 | −6.3 | 8.50E−79 |
| 451 | AlaDh_PNT_C | 148 | 303 | 309.5 | −13.4 | 7.00E−90 |
| 452 | AlaDh_PNT_N | 4 | 136 | 272.7 | −6.3 | 8.50E−79 |
| 452 | AlaDh_PNT_C | 148 | 303 | 309.5 | −13.4 | 7.00E−90 |
| 453 | tRNA_synt_1c_R1 | 14 | 171 | 220.2 | 40.2 | 5.30E−63 |
| 453 | tRNA_synt_1c_R2 | 172 | 264 | 109.8 | 27.2 | 9.20E−30 |
| 453 | tRNA-synt_1c | 271 | 577 | 565.2 | −112.8 | 7.30E−167 |
| 453 | tRNA-synt_1c_C | 579 | 770 | 242.5 | 25.4 | 1.10E−69 |
| 454 | SBP_bac_3 | 75 | 296 | 114.2 | 56.9 | 4.30E−31 |
| 455 | Gln-synt_N | 17 | 97 | 146.5 | 13.5 | 8.20E−41 |
| 455 | Gln-synt_C | 103 | 355 | 291.7 | −123.7 | 1.60E−84 |
| 456 | bZIP_1 | 76 | 139 | 43.5 | 27.4 | 8.20E−10 |
| 456 | bZIP_2 | 76 | 130 | 42.5 | 27 | 1.70E−09 |
| 457 | bZIP_1 | 76 | 139 | 43.5 | 27.4 | 8.20E−10 |
| 457 | bZIP_2 | 76 | 130 | 42.5 | 27 | 1.70E−09 |
| 458 | BPD_transp_2 | 5 | 354 | 254.5 | 33.4 | 2.60E−73 |
| 459 | BPD_transp_2 | 82 | 431 | 254.5 | 33.4 | 2.60E−73 |
| 460 | Asp_decarbox | 2 | 119 | 198.7 | 156.7 | 1.60E−56 |
| 462 | Glt_symporter | 4 | 370 | 805.4 | −247.2 | 3.70E−239 |
| 463 | Glt_symporter | 4 | 370 | 805.4 | −247.2 | 3.70E−239 |
| 464 | SBP_bac_3 | 75 | 296 | 114.2 | 56.9 | 4.30E−31 |
| 465 | SBP_bac_3 | 75 | 296 | 114.2 | 56.9 | 4.30E−31 |
| 467 | AlaDh_PNT_N | 4 | 136 | 262.3 | −6.3 | 1.20E−75 |
| 467 | AlaDh_PNT_C | 148 | 302 | 275.9 | −13.4 | 9.10E−80 |
| 468 | Nitroreductase | 20 | 181 | 82.5 | 37 | 1.60E−21 |
| 469 | Acid_phosphat_B | 1 | 179 | 89.8 | −18.9 | 9.70E−24 |
| 470 | bZIP_1 | 76 | 139 | 43.5 | 27.4 | 8.20E−10 |
| 470 | bZIP_2 | 76 | 130 | 42.5 | 27 | 1.70E−09 |
| 471 | Ubiquitin | 22 | 92 | 45.4 | 19.6 | 2.20E−10 |
| 472 | LIM | 172 | 228 | 29 | 9.4 | 2.50E−06 |
| 473 | LIM | 147 | 203 | 42 | 2.4 | 2.40E−09 |
| 474 | zf-C3HC4 | 197 | 237 | 43.5 | 21.9 | 8.40E−10 |
| 475 | RCC1 | 95 | 145 | 24.5 | 21.5 | 0.00045 |
| 475 | RCC1 | 266 | 315 | 25.8 | 21.5 | 0.00018 |
| 475 | RCC1 | 350 | 398 | 48.9 | 21.5 | 2.00E−11 |
| 476 | Sulfate_transp | 198 | 510 | 494.9 | −44.7 | 1.10E−145 |
| 476 | STAS | 533 | 652 | 84.7 | 1.5 | 3.30E−22 |
| 477 | RCC1 | 95 | 145 | 24.5 | 21.5 | 0.00045 |
| 477 | RCC1 | 266 | 315 | 25.8 | 21.5 | 0.00018 |
| 477 | RCC1 | 350 | 398 | 48.9 | 21.5 | 2.00E−11 |
| 479 | Glyco_transf_20 | 58 | 544 | 840.5 | −201.3 | 9.90E−250 |
| 479 | Trehalose_PPase | 593 | 829 | 338.3 | −32.2 | 1.50E−98 |
| 480 | RRM_1 | 19 | 89 | 25 | 18 | 0.0003 |
| 481 | Asp | 89 | 438 | −88.1 | −149.4 | 2.40E−08 |
| 482 | Ank | 44 | 81 | 12 | 1.2 | 0.67 |
| 482 | Ank | 83 | 112 | 21.9 | 1.2 | 0.0026 |
| 482 | Ank | 118 | 150 | 16.3 | 1.2 | 0.13 |
| 482 | Ank | 152 | 184 | 17.2 | 1.2 | 0.07 |
| 482 | Ank | 186 | 218 | 31.4 | 1.2 | 3.70E−06 |
| 482 | Ank | 220 | 252 | 24.2 | 1.2 | 0.00055 |
| 482 | Ank | 254 | 287 | 29 | 1.2 | 2.00E−05 |
| 482 | Ank | 288 | 320 | 1.6 | 1.2 | 22 |
| 484 | DSPc | 105 | 240 | 25.3 | −4.2 | 1.90E−06 |
| 485 | Usp | 8 | 162 | 86.9 | 26.5 | 7.20E−23 |
| 486 | U-box | 17 | 94 | 76.1 | 33.2 | 1.30E−19 |
| 487 | U-box | 10 | 84 | 83.9 | 33.2 | 5.70E−22 |
| 493 | MIT | 5 | 73 | 103.3 | 38.4 | 8.20E−28 |
| 493 | AAA | 169 | 353 | 231.7 | 43.1 | 1.80E−66 |
| 493 | Vps4_C | 368 | 433 | 127.3 | −2.2 | 5.10E−35 |
| 494 | AP2 | 80 | 132 | 77.7 | 59.9 | 4.20E−20 |
| 495 | Ssl1 | 37 | 292 | 530.7 | −115.9 | 1.80E−156 |
| 495 | C1_4 | 374 | 422 | 98.3 | 50.7 | 2.60E−26 |
| 496 | POX | 213 | 346 | −18.9 | −23 | 2.80E−05 |
| 496 | Homeobox | 396 | 454 | −2.1 | −3.7 | 0.019 |
| 497 | POX | 214 | 350 | −0.6 | −24.9 | 6.60E−07 |
| 497 | Homeobox | 404 | 462 | −2.5 | −3.7 | 0.021 |
| 498 | Dimerisation | 34 | 82 | 71.7 | 35.1 | 2.70E−18 |
| 498 | Methyltransf_2 | 91 | 342 | 278.1 | −95.8 | 2.00E−80 |
| 499 | DUF640 | 1 | 160 | 251 | 172 | 2.90E−72 |
| 500 | p450 | 2 | 479 | 214.1 | −29.9 | 3.80E−61 |
| 501 | MFS_1 | 47 | 528 | 24.1 | 24.1 | 0.00057 |
| 501 | PTR2 | 109 | 520 | 323.9 | −39.5 | 3.30E−94 |
| 502 | Pkinase | 16 | 269 | 336.6 | 200.3 | 4.70E−98 |
| 502 | Pkinase_Tyr | 16 | 267 | 36.2 | −68.3 | 3.90E−16 |
| 502 | NAF | 311 | 372 | 112.2 | 25.9 | 1.70E−30 |
| 503 | Acyl-ACP_TE | 92 | 367 | 438 | 40.9 | 1.40E−128 |
| 504 | PAS_2 | 69 | 185 | 230.5 | 48 | 4.20E−66 |
| 504 | GAF | 218 | 402 | 111.1 | 45.8 | 3.60E−30 |
| 504 | Phytochrome | 413 | 592 | 421.7 | 29 | 1.20E−123 |
| 504 | PAS | 620 | 735 | 101.9 | 8.3 | 2.20E−27 |
| 504 | PAS_4 | 626 | 740 | 35.5 | 16.4 | 2.10E−07 |
| 504 | PAS | 750 | 875 | 100 | 8.3 | 8.30E−27 |
| 504 | HisKA | 895 | 959 | 44.5 | 22.5 | 4.10E−10 |
| 504 | HATPase_c | 1007 | 1118 | 72.8 | 37.5 | 1.20E−18 |
| 505 | PAS_2 | 69 | 185 | 230.5 | 48 | 4.20E−66 |
| 505 | GAF | 218 | 402 | 108 | 45.8 | 3.20E−29 |
| 505 | Phytochrome | 413 | 592 | 421.7 | 29 | 1.20E−123 |
| 505 | PAS | 620 | 735 | 101.9 | 8.3 | 2.20E−27 |
| 505 | PAS_4 | 626 | 740 | 35.5 | 16.4 | 2.10E−07 |
| 505 | PAS | 750 | 875 | 100 | 8.3 | 8.30E−27 |
| 505 | HisKA | 895 | 959 | 44.5 | 22.5 | 4.10E−10 |
| 505 | HATPase_c | 1007 | 1118 | 72.8 | 37.5 | 1.20E−18 |
| 506 | PAS_2 | 69 | 185 | 230.5 | 48 | 4.20E−66 |
| 506 | GAF | 218 | 402 | 105.4 | 45.8 | 1.90E−28 |
| 506 | Phytochrome | 413 | 592 | 421.7 | 29 | 1.20E−123 |
| 506 | PAS | 620 | 735 | 101.9 | 8.3 | 2.20E−27 |
| 506 | PAS_4 | 626 | 740 | 35.5 | 16.4 | 2.10E−07 |
| 506 | PAS | 750 | 875 | 100 | 8.3 | 8.30E−27 |
| 506 | HisKA | 895 | 959 | 44.5 | 22.5 | 4.10E−10 |
| 506 | HATPase_c | 1007 | 1118 | 72.8 | 37.5 | 1.20E−18 |
| 507 | zf-C3HC4 | 152 | 193 | 40.2 | 29.7 | 8.40E−09 |
| 508 | zf-C3HC4 | 152 | 193 | 40.2 | 29.7 | 8.40E−09 |
| 509 | CSD | 4 | 70 | 156.9 | 6.7 | 6.20E−44 |
| 510 | Pkinase | 17 | 329 | 223.2 | 116.5 | 6.80E−64 |
| 510 | Pkinase_Tyr | 17 | 329 | −72.7 | −149.3 | 6.80E−09 |
| 511 | SIS | 56 | 193 | 64.5 | 12.1 | 4.00E−16 |
| 511 | CBS | 226 | 347 | 78.5 | 25.8 | 2.50E−20 |
| 513 | BCCT | 15 | 504 | 945.1 | −372.2 | 3.30E−281 |
| 514 | Dehydrin | 1 | 93 | 40.4 | 23 | 7.30E−09 |
| 515 | Nitroreductase | 20 | 181 | 82.5 | 37 | 1.60E−21 |
| 516 | Auxin_inducible | 29 | 95 | 139.1 | 43.4 | 1.40E−38 |
| 517 | zf-CCHC | 602 | 619 | 19.6 | 19.6 | 0.00034 |
| 517 | Plus-3 | 699 | 804 | 138.8 | 52.5 | 1.70E−38 |
| 518 | U-box | 7 | 83 | 86.3 | 36.7 | 1.10E−22 |
| 519 | bZIP_1 | 273 | 333 | 45.2 | 30.3 | 2.50E−10 |
| 519 | bZIP_2 | 273 | 327 | 47.2 | 32.8 | 6.40E−11 |
| 520 | FAD_binding_3 | 80 | 438 | −92.9 | −134.3 | 3.00E−06 |
| 520 | FHA | 558 | 634 | 61.7 | 36.3 | 2.80E−15 |
| 521 | LIM | 10 | 66 | 63.1 | 36.4 | 1.00E−15 |
| 521 | LIM | 109 | 165 | 80 | 36.4 | 8.40E−21 |
| 522 | Ndr | 23 | 307 | 507.9 | −78.4 | 1.30E−149 |
| 523 | Pkinase | 81 | 374 | 221.1 | 100.3 | 2.80E−63 |
| 523 | Pkinase_Tyr | 81 | 374 | −78.4 | −126.6 | 1.60E−08 |
| 524 | SRF-TF | 9 | 59 | 121.8 | 12.8 | 2.30E−33 |
| 524 | K-box | 75 | 174 | 156.5 | 74.3 | 7.80E−44 |
| 525 | Sina | 98 | 297 | 406.3 | 16.2 | 5.10E−119 |
| 526 | HLH | 28 | 78 | 10.6 | 9 | 0.013 |
| 527 | Myb_DNA-binding | 10 | 57 | 44.7 | 29.4 | 3.50E−10 |
| 527 | Myb_DNA-binding | 63 | 108 | 52.8 | 29.4 | 1.30E−12 |
| 528 | HLH | 61 | 144 | 22.1 | 22.1 | 0.00078 |
| 529 | DUF828 | 85 | 273 | 300.8 | 11.5 | 2.80E−87 |
| 529 | PH_2 | 290 | 397 | 32.2 | −0.7 | 7.90E−07 |
| 530 | SRF-TF | 9 | 59 | 115.9 | 14.8 | 1.30E−31 |
| 530 | K-box | 74 | 173 | 138.8 | 5.9 | 1.70E−38 |
| 531 | PBP | 20 | 165 | 220.2 | −19.8 | 5.20E−63 |
| 532 | PTR2 | 97 | 499 | 485.3 | 16.2 | 8.10E−143 |
| 533 | ABC_membrane | 71 | 350 | 216 | 33.5 | 1.00E−61 |
| 533 | ABC_tran | 424 | 609 | 222.2 | 71.8 | 1.30E−63 |
| 534 | GATase_2 | 2 | 173 | −17.6 | −89.2 | 1.00E−07 |
| 534 | Asn_synthase | 227 | 460 | 297.7 | −50.9 | 2.60E−86 |
| 535 | Acetate_kinase | 25 | 420 | 605.3 | −200.3 | 6.30E−179 |
| 536 | PTA_PTB | 452 | 770 | 511.1 | −121.8 | 1.50E−150 |
| 537 | OKR_DC_1 | 20 | 491 | 143 | −45.4 | 9.50E−40 |
| 537 | OKR_DC_1_C | 485 | 584 | −4.2 | −51.6 | 1.60E−07 |
| 538 | Mito_carr | 79 | 176 | 131.9 | 23.8 | 2.10E−36 |
| 538 | Mito_carr | 184 | 281 | 107.7 | 23.8 | 4.00E−29 |
| 538 | Mito_carr | 285 | 375 | 88.8 | 23.8 | 1.90E−23 |
| 539 | AP2 | 114 | 165 | 76 | 27 | 1.40E−19 |
| 542 | 60KD_IMP | 128 | 347 | 360.6 | 7.8 | 2.90E−105 |
| 545 | eIF-5a | 86 | 155 | 133.7 | 17.4 | 6.00E−37 |
| 546 | Aa_trans | 32 | 463 | 484.6 | −127.8 | 1.40E−142 |
| 547 | zf-B_box | 1 | 45 | 38.3 | 36.1 | 3.10E−08 |
| 548 | MFS_1 | 47 | 528 | 24.1 | 24.1 | 0.00057 |
| 548 | PTR2 | 109 | 520 | 323.9 | −39.5 | 3.30E−94 |
| 549 | Homeobox | 17 | 71 | 62.8 | −2.9 | 1.30E−15 |
| 549 | HALZ | 72 | 116 | 73.7 | 20 | 6.80E−19 |
| 550 | Homeobox | 68 | 122 | 77 | 12.5 | 6.70E−20 |
| 550 | HALZ | 123 | 167 | 81.9 | 19.5 | 2.30E−21 |
| 551 | Homeobox | 68 | 122 | 77 | 12.5 | 6.70E−20 |
| 551 | HALZ | 123 | 167 | 81.9 | 19.5 | 2.30E−21 |
| 552 | Homeobox | 68 | 122 | 77 | 12.5 | 6.70E−20 |
| 552 | HALZ | 123 | 167 | 81.9 | 19.5 | 2.30E−21 |
| 553 | Homeobox | 71 | 125 | 75.9 | 52.9 | 1.40E−19 |
| 553 | HALZ | 126 | 170 | 38.4 | 19.5 | 2.90E−08 |
| 554 | PP2C | 35 | 319 | 82.4 | 44 | 1.60E−21 |
| 555 | PP2C | 46 | 328 | 119.2 | 44 | 1.40E−32 |
| 556 | PP2C | 40 | 319 | 112.1 | −25.3 | 1.90E−30 |
| 557 | Response_reg | 13 | 125 | 87.6 | 5.1 | 4.60E−23 |
| 557 | Myb_DNA-binding | 202 | 252 | 45.8 | 22.8 | 1.70E−10 |
| 558 | AP2 | 151 | 203 | 84.3 | 58.7 | 4.30E−22 |
| 560 | F-box | 51 | 106 | 29.6 | 15.3 | 1.30E−05 |
| 560 | Tub | 117 | 442 | 535 | 81.2 | 9.00E−158 |
| 561 | AA_permease | 78 | 509 | 33.9 | −118 | 6.60E−07 |
| 562 | AA_permease | 65 | 510 | 41.7 | −118 | 2.90E−09 |
| 563 | Transaldolase | 39 | 258 | 17.3 | −12.6 | 6.50E−10 |
| 564 | Acetate_kinase | 25 | 420 | 605.3 | −200.3 | 6.30E−179 |
| 565 | OKR_DC_1 | 20 | 491 | 143 | −45.4 | 9.50E−40 |
| 565 | OKR_DC_1_C | 485 | 584 | −4.2 | −51.6 | 1.60E−07 |
| 566 | Gal_Lectin | 75 | 152 | 66.5 | 27 | 1.00E−16 |
| 567 | zf-C3HC4 | 107 | 148 | 32.2 | 20.4 | 2.10E−06 |
| 568 | Aa_trans | 32 | 429 | 241.2 | −100.4 | 2.60E−69 |
| 569 | zf-C3HC4 | 85 | 135 | 36.6 | 23.4 | 9.90E−08 |
| 570 | HR_lesion | 1 | 138 | 322 | 103.1 | 1.20E−93 |
| 571 | zf-Dof | 43 | 105 | 140.8 | 27.7 | 4.30E−39 |
| 572 | zf-Dof | 43 | 105 | 140.8 | 27.7 | 4.30E−39 |
| 573 | zf-Dof | 43 | 105 | 140.8 | 27.7 | 4.30E−39 |
| 574 | zf-B_box | 1 | 46 | 30.1 | 22.6 | 9.20E−06 |
| 575 | PAS_2 | 69 | 185 | 230.5 | 48 | 4.20E−66 |
| 575 | GAF | 218 | 402 | 111.1 | 45.8 | 3.60E−30 |
| 575 | Phytochrome | 413 | 592 | 421.7 | 29 | 1.20E−123 |
| 575 | PAS | 620 | 735 | 101.9 | 8.3 | 2.20E−27 |
| 575 | PAS_4 | 626 | 740 | 35.5 | 16.4 | 2.10E−07 |
| 575 | PAS | 750 | 875 | 100 | 8.3 | 8.30E−27 |
| 575 | HisKA | 895 | 959 | 44.5 | 22.5 | 4.10E−10 |
| 575 | HATPase_c | 1007 | 1118 | 72.8 | 35.3 | 1.20E−18 |
| 576 | PAS_2 | 69 | 185 | 230.5 | 48 | 4.20E−66 |
| 576 | GAF | 218 | 402 | 111.1 | 45.8 | 3.60E−30 |
| 576 | Phytochrome | 413 | 592 | 421.7 | 29 | 1.20E−123 |
| 576 | PAS | 620 | 735 | 101.9 | 8.3 | 2.20E−27 |
| 576 | PAS_4 | 626 | 740 | 35.5 | 16.4 | 2.10E−07 |
| 576 | PAS | 750 | 875 | 100 | 8.3 | 8.30E−27 |
| 576 | HisKA | 895 | 959 | 44.5 | 22.5 | 4.10E−10 |
| 576 | HATPase_c | 1007 | 1118 | 72.8 | 35.3 | 1.20E−18 |
| 577 | PAS_2 | 69 | 185 | 230.5 | 48 | 4.20E−66 |
| 577 | GAF | 218 | 402 | 111.1 | 45.8 | 3.60E−30 |
| 577 | Phytochrome | 413 | 592 | 421.7 | 29 | 1.20E−123 |
| 577 | PAS | 620 | 735 | 101.9 | 8.3 | 2.20E−27 |
| 577 | PAS_4 | 626 | 740 | 35.5 | 16.4 | 2.10E−07 |
| 577 | PAS | 750 | 875 | 100 | 8.3 | 8.30E−27 |
| 577 | HisKA | 895 | 959 | 44.5 | 22.5 | 4.10E−10 |
| 577 | HATPase_c | 1007 | 1118 | 72.8 | 35.3 | 1.20E−18 |
| 578 | Ammonium_transp | 47 | 470 | 651.5 | −140.2 | 8.00E−193 |
| 580 | Thg1 | 1 | 255 | 283.3 | 28.8 | 5.50E−82 |
| 580 | Thg1 | 273 | 520 | 352.9 | 28.8 | 6.10E−103 |
| 581 | DUF647 | 177 | 593 | 868.5 | 29.4 | 3.80E−258 |
| 582 | AP2 | 95 | 147 | 79.8 | 52.3 | 1.00E−20 |
| 584 | Peptidase_C2 | 1696 | 1997 | 285.6 | −156.6 | 1.10E−82 |
| 584 | Calpain_III | 1999 | 2149 | −9.8 | −54.1 | 3.00E−06 |
| 585 | HSP70 | 37 | 644 | 1324.4 | 412 | 0 |
| 586 | Pkinase | 4 | 260 | 305.1 | 111.6 | 1.50E−88 |
| 586 | Pkinase_Tyr | 4 | 264 | −38.8 | −125 | 3.80E−11 |
| 587 | WRKY | 165 | 223 | 131.8 | 5.7 | 2.30E−36 |
| 587 | WRKY | 327 | 386 | 148.1 | 5.7 | 2.70E−41 |
| 588 | WRKY | 183 | 241 | 144.9 | 5.7 | 2.60E−40 |
| 588 | WRKY | 361 | 420 | 151.5 | 5.7 | 2.60E−42 |
| 589 | LysM | 103 | 148 | 20.7 | 20.1 | 0.0039 |
| 590 | LRRNT_2 | 357 | 400 | 30.5 | 18.9 | 6.80E−06 |
| 590 | LRR_1 | 431 | 452 | 11.8 | 10.9 | 1.7 |
| 590 | Pkinase_Tyr | 587 | 867 | 120.2 | −144.1 | 6.70E−33 |
| 590 | Pkinase | 595 | 867 | 114.7 | 74.8 | 3.00E−31 |
| 591 | GATase_2 | 2 | 161 | 78.2 | −89.2 | 2.90E−20 |
| 591 | Asn_synthase | 209 | 450 | 337.9 | −46 | 2.00E−98 |
| 592 | GH3 | 31 | 592 | 1167.9 | −249.6 | 0 |
| 593 | MFS_1 | 37 | 502 | 38.5 | 23.9 | 2.70E−08 |
| 593 | PTR2 | 99 | 494 | 362.6 | 91.2 | 7.30E−106 |
| 594 | Glutaredoxin | 89 | 153 | 85.3 | 17.5 | 2.20E−22 |
| 595 | Glutaredoxin | 30 | 94 | 97.7 | 55.5 | 3.90E−26 |
| 595 | Glutaredoxin | 166 | 230 | 90.6 | 55.5 | 5.30E−24 |
| 595 | Glutaredoxin | 273 | 337 | 101.9 | 55.5 | 2.10E−27 |
| 596 | Glutaredoxin | 13 | 75 | 59 | 39.4 | 1.70E−14 |
| 597 | GTP1_OBG | 212 | 377 | 230.5 | −51.4 | 4.30E−66 |
| 597 | MMR_HSR1 | 379 | 502 | 136.2 | 38 | 1.10E−37 |
| 597 | DUF1967 | 585 | 654 | 104.9 | 10.4 | 2.80E−28 |
| 598 | HLH | 70 | 120 | 39.8 | 10.5 | 1.10E−08 |
| 600 | LRR_1 | 116 | 138 | 14.5 | 11.1 | 0.44 |
| 600 | LRR_1 | 140 | 162 | 12.9 | 11.1 | 1 |
| 600 | LRR_1 | 164 | 186 | 15.2 | 11.1 | 0.27 |
| 600 | LRR_1 | 188 | 209 | 13.7 | 11.1 | 0.73 |
| 600 | Pkinase_Tyr | 497 | 764 | 39 | −37.1 | 2.50E−16 |
| 601 | DEAD_2 | 72 | 256 | 297.9 | 29.3 | 2.20E−86 |
| 601 | DUF1227 | 267 | 413 | 296.6 | 165.1 | 5.20E−86 |
| 602 | NUDIX | 32 | 173 | 60.1 | 2.2 | 8.60E−15 |
| 604 | zf-C3HC4 | 27 | 67 | 31.5 | 19.1 | 3.40E−06 |
| 605 | SRF-TF | 9 | 59 | 116 | 14.8 | 1.20E−31 |
| 605 | K-box | 75 | 176 | 99.8 | 5.9 | 9.20E−27 |
| 606 | SRF-TF | 9 | 59 | 109.5 | 14.8 | 1.10E−29 |
| 606 | K-box | 74 | 173 | 96.9 | 5.9 | 7.20E−26 |
| 607 | Aa_trans | 58 | 464 | 166.2 | 133 | 9.40E−47 |
| 608 | Aa_trans | 26 | 463 | 373 | −127.8 | 5.50E−109 |
| 612 | Myb_DNA-binding | 20 | 67 | 46.2 | 26.4 | 1.30E−10 |
| 612 | Myb_DNA-binding | 73 | 118 | 44.6 | 26.4 | 3.80E−10 |
| 613 | Globin | 14 | 123 | 64.6 | −6.9 | 3.80E−16 |
| 613 | FAD_binding_6 | 177 | 276 | 42.5 | −2.2 | 1.60E−09 |
| 613 | NAD_binding_1 | 287 | 396 | 88.4 | −1.7 | 2.60E−23 |
| 614 | Globin | 6 | 103 | 61.7 | 9.9 | 2.80E−15 |
| 614 | FAD_binding_6 | 156 | 262 | 42.7 | −4.5 | 1.40E−09 |
| 614 | NAD_binding_1 | 271 | 379 | 66.1 | −3.4 | 1.30E−16 |

TABLE 10
Pfam module annotation

| PEP | | |
|---|---|---|
| SEQ | | |
| ID NO | Pfam domain module | Position |
| 308 | Aminotran_1_2 | 69-470 |
| 309 | Homeobox::HALZ | 65-119::120-164 |
| 310 | bZIP_2 | 108-162 |
| 312 | Peptidase_S10 | 39-504 |
| 313 | SBP | 103-181 |
| 315 | GDPD | 436-728 |
| 317 | DUF1292 | 111-180 |
| 318 | Aminotran_1_2 | 127-473 |
| 319 | FAD_binding_4::Lact-deh- | 50-191::279-570 |
| | memb | |
| 320 | Fe-ADH | 25-365 |
| 321 | AlaDh_PNT_N::AlaDh_PNT_C | 4-135::147-302 |
| 322 | Thiolase_N::Thiolase_C | 14-277::284-406 |
| 323 | Thiolase_N::Thiolase_C | 14-277::284-406 |
| 324 | SOUL | 1-150 |
| 325 | AA_kinase | 98-373 |
| 326 | AA_kinase | 10-285 |
| 327 | AA_kinase::NAD_binding_3:: | 98-374::552-687::695-891 |
| | Homoserine_dh | |
| 328 | HLH | 204-253 |
| 329 | HLH | 204-253 |
| 330 | HLH | 258-307 |
| 331 | HLH | 258-307 |
| 332 | Thioredoxin::Glutaredoxin::Glutaredoxin:: | 7-105::169-233::298-362:: |
| | Glutaredoxin | 405-469 |
| 334 | Pkinase | 143-405 |
| 335 | Gln-synt_N::Gln-synt_C | 17-97::103-355 |
| 336 | Pkinase | 143-405 |
| 337 | MethyltransfD12 | 23-264 |
| 338 | bZIP_1::MethyltransfD12 | 87-150::191-432 |
| 339 | zf-B_box::MethyltransfD12 | 1-47::248-489 |
| 340 | TPP_enzyme_N::TPP_enzyme_M:: | 2-177::193-325::380-517 |
| | TPP_enzyme_C | |
| 341 | RolB_RolC::Amino_oxidase | 11-197::246-729 |
| 342 | Amino_oxidase | 55-532 |
| 343 | NIR_SIR_ferr::NIR_SIR::NIR_SIR_ferr | 131-201::209-369::390-459 |
| 345 | DEAD::Helicase_C | 121-290::359-435 |
| 347 | LRRNT_2::LRR_1::LRR_1::LRR_1:: | 38-79::108-130::132-154:: |
| | LRR_1::LRR_1::LRR_1:: | 156-178::180-201::228-250:: |
| | LRR_1::LRR_1::LRR_1::LRR_1:: | 252-274::299-321::347-369:: |
| | LRR_1::LRR_1::LRR_1:: | 419-441::443-465::467-489:: |
| | Pkinase | 491-513::539-560::662-927 |
| 348 | Homeobox::HALZ | 118-172::173-217 |
| 349 | Homeobox::HALZ | 139-193::194-238 |
| 350 | WD40::WD40 | 560-599::646-683 |
| 351 | C4dic_mal_tran | 199-465 |
| 352 | Peroxidase | 85-320 |
| 353 | Peroxidase | 85-320 |
| 354 | LisH::WD40::WD40::WD40:: | 7-33::185-223::244-282::285-323:: |
| | WD40::WD40::WD40::WD40 | 327-364::368-406::410-457:: |
| | | 461-501 |
| 355 | bZIP_2::bZIP_1 | 325-379::334-386 |
| 356 | FAD_binding_4::ALO | 107-242::266-581 |
| 357 | NAM | 69-200 |
| 358 | Ribosomal_L21p | 136-232 |
| 359 | BTB | 192-301 |
| 360 | RWP-RK::PB1 | 104-155::325-408 |
| 361 | Ammonium_transp | 29-451 |
| 362 | BTB | 192-301 |
| 363 | OPT | 85-744 |
| 364 | DUF506 | 14-238 |
| 366 | FTCD_N | 10-202 |
| 367 | FTCD_N | 7-199 |
| 368 | SSF | 44-461 |
| 369 | Aminotran_5 | 68-433 |
| 370 | ABC_tran | 67-262 |
| 371 | Monooxygenase_B | 39-418 |
| 372 | PMEI | 34-191 |
| 374 | CCT | 141-185 |
| 375 | PHD::SET | 82-131::361-496 |
| 376 | AP2 | 111-163 |
| 377 | bZIP_2 | 390-444 |
| 378 | AP2 | 24-75 |
| 379 | A_thal_3526 | 17-70 |
| 380 | AP2 | 24-75 |
| 381 | Clp_N::Clp_N::AAA::AAA_2:: | 17-67::96-146::202-396::597-762:: |
| | ClpB_D2-small | 768-857 |
| 382 | eRF1_1::eRF1_2::eRF1_3 | 1-131::136-268::271-370 |
| 387 | zf-CCCH | 113-138 |
| 388 | zf-B_box::zf-B_box::CCT | 1-47::48-90::350-394 |
| 389 | HLH | 128-178 |
| 390 | Arginosuc_synth | 100-446 |
| 391 | Glutaredoxin | 205-279 |
| 392 | AsnA | 3-246 |
| 392 | NAD_binding_1 | 221-337 |
| 394 | cNMP_binding::Crp | 39-131::186-217 |
| 395 | PLAC8 | 71-166 |
| 396 | HSP20 | 42-148 |
| 397 | Myb_DNA- | 14-61::67-112 |
| | binding::Myb_DNA-binding | |
| 398 | ATP-sulfurylase | 136-462 |
| 399 | WRKY | 300-360 |
| 400 | Asp | 106-439 |
| 401 | Gln-synt_N::Gln-synt_C | 42-122::141-444 |
| 402 | GATase_2::Glu_syn_central::Glu_synthase:: | 27-397::477-773::830-1221:: |
| | GXGXG | 1298-1493 |
| 403 | Form_Nir_trans | 87-343 |
| 406 | NAD_binding_2 | 51-213 |
| 407 | NAD_binding_2 | 1-162 |
| 408 | Glutaredoxin | 39-103 |
| 409 | Glutaredoxin | 59-123 |
| 410 | Homeobox::HALZ | 139-193::194-238 |
| 411 | Homeobox::HALZ | 137-193::194-238 |
| 412 | Homeobox::HALZ | 139-193::194-238 |
| 414 | CCT | 228-272 |
| 415 | MBD | 25-144 |
| 416 | MBD | 21-94 |
| 417 | Pkinase | 12-263 |
| 418 | SRF-TF | March 1953 |
| 419 | SRF-TF | November 1965 |
| 420 | eIF-5a | 85-154 |
| 421 | Homeobox::START | 33-89::236-457 |
| 422 | Homeobox::START | 33-89::236-457 |
| 423 | Homeobox::START | 33-89::236-457 |
| 424 | Homeobox::START | 33-89::236-457 |
| 425 | Arginase | 61-336 |
| 427 | CBFB_NFYA | 147-203 |
| 428 | CBFB_NFYA | 148-204 |
| 429 | CBFB_NFYA | 93-149 |
| 430 | CBFB_NFYA | 70-126 |
| 431 | CBFB_NFYA | 73-129 |
| 432 | PAS_2::GAF::Phytochrome::PAS:: | 103-219::252-433::444-623:: |
| | PAS::HisKA::HATPase_c | 654-770::785-907::927-991:: |
| | | 1039-1152 |
| 433 | HMG_box | 44-113 |
| 434 | SPRY | 77-224 |
| 435 | SPRY | 77-224 |
| 436 | RRM_1::RRM_1 | 4-68::97-160 |
| 437 | RRM_1::RRM_1 | 4-68::97-160 |
| 438 | RRM_1::zf-CCHC | 4-69::85-102 |
| 439 | RRM_1::zf-CCHC | 4-69::85-102 |
| 440 | RRM_1::zf-CCHC | 4-69::86-103 |
| 441 | RRM_1::zf-CCHC | 4-69::86-103 |
| 442 | MMR_HSR1::KH_2 | 119-240::345-409 |
| 443 | MMR_HSR1::KH_2 | 119-240::345-409 |
| 444 | MMR_HSR1::KH_2 | 119-240::345-409 |
| 445 | zf-C3HC4 | 152-193 |
| 446 | zf-C3HC4 | 152-193 |
| 447 | zf-C3HC4 | 152-193 |
| 448 | zf-C3HC4 | 152-193 |
| 450 | 2-Hacid_dh_C | 113-292 |
| 451 | AlaDh_PNT_N::AlaDh_PNT_C | 4-136::148-303 |
| 452 | AlaDh_PNT_N::AlaDh_PNT_C | 4-136::148-303:: |
| 453 | tRNA_synt_1c_R1::tRNA_synt_1c_R2:: | 14-171::172-264::271-577 |
| | tRNA-synt_1c::tRNA- | 579-770 |
| | synt_1c_C | |
| 454 | SBP_bac_3 | 75-296 |
| 455 | Gln-synt_N::Gln-synt_C | 17-97::103-355 |
| 456 | bZIP_1 | 76-139 |
| 457 | bZIP_1 | 76-139 |
| 458 | BPD_transp_2 | 5-354 |
| 459 | BPD_transp_2 | 82-431 |
| 460 | Asp_decarbox | 2-119 |
| 462 | Glt_symporter | 4-370 |
| 463 | Glt_symporter | 4-370 |
| 464 | SBP_bac_3 | 75-296 |
| 465 | SBP_bac_3 | 75-296 |
| 467 | AlaDh_PNT_N::AlaDh_PNT_C | 4-136::148-302 |
| 468 | Nitroreductase | 20-181 |
| 469 | Acid_phosphat_B | 1-179 |
| 470 | bZIP_1 | 76-139 |
| 471 | Ubiquitin | 22-92 |
| 472 | LIM | 172-228 |
| 473 | LIM | 147-203 |
| 474 | zf-C3HC4 | 197-237 |
| 475 | RCC1::RCC1::RCC1 | 95-145::266-315::350-398 |
| 476 | Sulfate_transp::STAS | 198-510::533-652 |
| 477 | RCC1::RCC1::RCC1 | 95-145::266-315::350-398 |
| 479 | Glyco_transf_20::Trehalose_PPase | 58-544::593-829 |
| 480 | RRM_1 | 19-89 |
| 481 | Asp | 89-438 |
| 482 | Ank::Ank::Ank::Ank::Ank::Ank:: | 44-81::83-112::118-150::152-184:: |
| | Ank::Ank | 186-218::220-252::254-287:: |
| | | 288-320 |
| 484 | DSPc | 105-240 |
| 485 | Usp | 8-162 |
| 486 | U-box | 17-94 |
| 487 | U-box | October 1984 |
| 493 | MIT::AAA::Vps4_C | 5-73::169-353::368-433 |
| 494 | AP2 | 80-132 |
| 495 | Ssl1::C1_4 | 37-292::374-422 |
| 496 | POX::Homeobox | 213-346::396-454 |
| 497 | POX::Homeobox | 214-350::404-462 |
| 498 | Dimerisation::Methyltransf_2 | 34-82::91-342 |
| 499 | DUF640 | 1-160 |
| 500 | p450 | 2-479 |
| 501 | PTR2 | 109-520 |
| 502 | Pkinase::NAF | 16-269::311-372 |
| 503 | Acyl-ACP_TE | 92-367 |
| 504 | PAS_2::GAF::Phytochrome::PAS:: | 69-185::218-402::413-592:: |
| | PAS::HisKA::HATPase_c | 620-735::750-875::895-959 |
| | | 1007-1118 |
| 505 | PAS_2::GAF::Phytochrome::PAS:: | 69-185::218-402::413-592:: |
| | PAS::HisKA::HATPase_c | 620-735::750-875::895-959:: |
| | | 1007-1118 |
| 506 | PAS_2::GAF::Phytochrome::PAS:: | 69-185::218-402::413-592:: |
| | PAS::HisKA::HATPase_c | 620-735::750-875::895-959:: |
| | | 1007-1118 |
| 507 | zf-C3HC4 | 152-193 |
| 508 | zf-C3HC4 | 152-193 |
| 509 | CSD | April 1970 |
| 510 | Pkinase | 17-329 |
| 511 | SIS::CBS | 56-193::226-347 |
| 513 | BCCT | 15-504 |
| 514 | Dehydrin | January 1993 |
| 515 | Nitroreductase | 20-181 |
| 516 | Auxin_inducible | 29-95 |
| 517 | zf-CCHC::Plus-3 | 602-619::699-804 |
| 518 | U-box | July 1983 |
| 519 | bZIP_2 | 273-327 |
| 520 | FAD_binding_3::FHA | 80-438::558-634 |
| 521 | LIM::LIM | 10-66::109-165 |
| 522 | Ndr | 23-307 |
| 523 | Pkinase | 81-374 |
| 524 | SRF-TF::K-box | 9-59::75-174 |
| 525 | Sina | 98-297 |
| 526 | HLH | 28-78 |
| 527 | Myb_DNA- | 10-57::63-108 |
| | binding::Myb_DNA-binding | |
| 528 | HLH | 61-144 |
| 529 | DUF828::PH_2 | 85-273::290-397 |
| 530 | SRF-TF::K-box | 9-59::74-173 |
| 531 | PBP | 20-165 |
| 532 | PTR2 | 97-499 |
| 533 | ABC_membrane::ABC_tran | 71-350::424-609 |
| 534 | GATase_2::Asn_synthase | 2-173::227-460 |
| 535 | Acetate_kinase | 25-420 |
| 536 | PTA_PTB | 452-770 |
| 537 | OKR_DC_1::OKR_DC_1_C | 20-491::485-584 |
| 538 | Mito_carr::Mito_carr::Mito_carr | 79-176::184-281::285-375 |
| 539 | AP2 | 114-165 |
| 542 | 60KD_IMP | 128-347 |
| 545 | eIF-5a | 86-155 |
| 546 | Aa_trans | 32-463 |
| 547 | zf-B_box | January 1945 |
| 548 | PTR2 | 109-520 |
| 549 | Homeobox::HALZ | 17-71::72-116 |
| 550 | Homeobox::HALZ | 68-122::123-167 |
| 551 | Homeobox::HALZ | 68-122::123-167 |
| 552 | Homeobox::HALZ | 68-122::123-167 |
| 553 | Homeobox::HALZ | 71-125::126-170 |
| 554 | PP2C | 35-319 |
| 555 | PP2C | 46-328 |
| 556 | PP2C | 40-319 |
| 557 | Response_reg::Myb_DNA- | 13-125::202-252 |
| | binding | |
| 558 | AP2 | 151-203 |
| 560 | F-box::Tub | 51-106::117-442 |
| 561 | AA_permease | 78-509 |
| 562 | AA_permease | 65-510 |
| 563 | Transaldolase | 39-258 |
| 564 | Acetate_kinase | 25-420 |
| 565 | OKR_DC_1::OKR_DC_1_C | 20-491::485-584 |
| 566 | Gal_Lectin | 75-152 |
| 567 | zf-C3HC4 | 107-148 |
| 568 | Aa_trans | 32-429 |
| 569 | zf-C3HC4 | 85-135 |
| 570 | HR_lesion | 1-138 |
| 571 | zf-Dof | 43-105 |
| 572 | zf-Dof | 43-105 |
| 573 | zf-Dof | 43-105 |
| 574 | zf-B_box | January 1946 |
| 575 | PAS_2::GAF::Phytochrome::PAS:: | 69-185::218-402::413-592:: |
| | PAS::HisKA::HATPase_c | 620-735::750-875::895-959:: |
| | | 1007-1118 |
| 576 | PAS_2::GAF::Phytochrome::PAS:: | 69-185::218-402::413-592:: |
| | PAS::HisKA::HATPase_c | 620-735::750-875::895-959:: |
| | | 1007-1118 |
| 577 | PAS_2::GAF::Phytochrome::PAS:: | 69-185::218-402::413-592:: |
| | PAS::HisKA::HATPase_c | 620-735::750-875::895-959:: |
| | | 1007-1118 |
| 578 | Ammonium_transp | 47-470 |
| 580 | Thg1::Thg1 | 1-255::273-520 |
| 581 | DUF647 | 177-593 |
| 582 | AP2 | 95-147 |
| 584 | Peptidase_C2::Calpain_III | 1696-1997::1999-2149 |
| 585 | HSP70 | 37-644 |
| 586 | Pkinase | 4-260 |
| 587 | WRKY::WRKY | 165-223::327-386 |
| 588 | WRKY::WRKY | 183-241::361-420 |
| 589 | LysM | 103-148 |
| 590 | LRRNT_2::LRR_1::Pkinase_Tyr | 357-400::431-452::587-867 |
| 591 | GATase_2::Asn_synthase | 2-161::209-450 |
| 592 | GH3 | 31-592 |
| 593 | PTR2 | 99-494 |
| 594 | Glutaredoxin | 89-153 |
| 595 | Glutaredoxin::Glutaredoxin::Glutaredoxin | 30-94::166-230::273-337 |
| 596 | Glutaredoxin | 13-75 |
| 597 | GTP1_OBG::MMR_HSR1::DUF1967 | 212-377::379-502::585-654 |
| 598 | HLH | 70-120 |
| 600 | LRR_1::LRR_1::LRR_1::LRR_1:: | 116-138::140-162::164-186:: |
| | Pkinase_Tyr | 188-209::497-764 |
| 601 | DEAD_2::DUF1227 | 72-256::267-413 |
| 602 | NUDIX | 32-173 |
| 604 | zf-C3HC4 | 27-67 |
| 605 | SRF-TF::K-box | 9-59::75-176 |
| 606 | SRF-TF::K-box | 9-59::74-173 |
| 607 | Aa_trans | 58-464 |
| 608 | Aa_trans | 26-463 |
| 612 | Myb_DNA- | 20-67::73-118 |
| | binding::Myb_DNA-binding | |
| 613 | Globin::FAD_binding_6::NAD_binding_1 | 14-123::177-276::287-396 |
| 614 | Globin::FAD_binding_6::NAD_binding_1 | 6-103::156-262::271-379 |

TABLE 11
Description of Pfam domains

| | Accession | Gathering | |
|---|---|---|---|
| Pfam domain name | number | cutoff | Domain description |
| 14-3-3 | PF00244.12 | 25.0000; | 14-3-3 protein |
| 2-Hacid_dh | PF00389.22 | 11.2000; | D-isomer specific 2-hydroxyacid |
| | | | dehydrogenase, catalytic domain |
| 2-Hacid_dh_C | PF02826.11 | −78.6000; | D-isomer specific 2-hydroxyacid |
| | | | dehydrogenase, NAD binding domain |
| 3-alpha | PF03475.6 | 25.0000; | 3-alpha domain |
| 3HCDH_N | PF02737.10 | −78.7000; | 3-hydroxyacyl-CoA dehydrogenase, NAD |
| | | | binding domain |
| 60KD_IMP | PF02096.12 | −95.0000; | 60 Kd inner membrane protein |
| AAA | PF00004.21 | 12.3000; | ATPase family associated with various cellular |
| | | | activities (AAA) |
| AAA_2 | PF07724.6 | −5.0000; | ATPase family associated with various cellular |
| | | | activities (AAA) |
| AAA_5 | PF07728.6 | 4.0000; | ATPase family associated with various cellular |
| | | | activities (AAA) |
| AA_kinase | PF00696.20 | −40.0000; | Amino acid kinase family |
| AA_permease | PF00324.13 | −120.8000; | Amino acid permease |
| ABC_membrane | PF00664.15 | 19.4000; | ABC transporter transmembrane region |
| ABC_membrane_2 | PF06472.7 | −94.9000; | ABC transporter transmembrane region 2 |
| ABC_tran | PF00005.19 | 9.5000; | ABC transporter |
| ACP_syn_III_C | PF08541.2 | −20.5000; | 3-Oxoacyl-[acyl-carrier-protein (ACP)] |
| | | | synthase III C terminal |
| ACT | PF01842.17 | 0.7000; | ACT domain |
| AFG1_ATPase | PF03969.8 | −177.5000; | AFG1-like ATPase |
| ALO | PF04030.6 | −99.7000; | D-arabinono-1,4-lactone oxidase |
| AMP-binding | PF00501.20 | 0.0000; | AMP-binding enzyme |
| AP2 | PF00847.12 | 21.7000; | AP2 domain |
| APH | PF01636.15 | −1.3000; | Phosphotransferase enzyme family |
| APS_kinase | PF01583.12 | 25.0000; | Adenylylsulphate kinase |
| ATP-sulfurylase | PF01747.9 | −163.3000; | ATP-sulfurylase |
| A_thal_3526 | PF09713.2 | 25.0000; | Plant protein 1589 of unknown function |
| | | | (A_thal_3526) |
| Aa_trans | PF01490.10 | −128.4000; | Transmembrane amino acid transporter protein |
| Abhydrolase_1 | PF00561.12 | 10.3000; | alpha/beta hydrolase fold |
| Abi | PF02517.8 | −5.0000; | CAAX amino terminal protease family |
| Acetate_kinase | PF00871.9 | −206.2000; | Acetokinase family |
| Acetyltransf_1 | PF00583.16 | 17.8000; | Acetyltransferase (GNAT) family |
| Acid_phosphat_B | PF03767.6 | −36.0000; | HAD superfamily, subfamily IIIB (Acid |
| | | | phosphatase) |
| Actin | PF00022.11 | −144.0000; | Actin |
| Acyl-ACP_TE | PF01643.9 | −106.0000; | Acyl-ACP thioesterase |
| AdoHcyase_NAD | PF00670.13 | −23.6000; | S-adenosyl-L-homocysteine hydrolase, NAD |
| | | | binding domain |
| AlaDh_PNT_C | PF01262.13 | −43.4000; | Alanine dehydrogenase/PNT, C-terminal |
| | | | domain |
| AlaDh_PNT_N | PF05222.7 | −11.7000; | Alanine dehydrogenase/PNT, N-terminal |
| | | | domain |
| Ala_racemase_N | PF01168.12 | −34.3000; | Alanine racemase, N-terminal domain |
| Alliinase_C | PF04864.5 | −233.5000; | Allinase |
| Amidase | PF01425.13 | −133.0000; | Amidase |
| Amidohydro_1 | PF01979.12 | −37.4000; | Amidohydrolase family |
| Amino_oxidase | PF01593.16 | −11.4000; | Flavin containing amine oxidoreductase |
| Aminotran_1_2 | PF00155.13 | −57.5000; | Aminotransferase class I and II |
| Aminotran_3 | PF00202.13 | −206.1000; | Aminotransferase class-III |
| Aminotran_5 | PF00266.11 | −164.4000; | Aminotransferase class-V |
| Ammonium_transp | PF00909.13 | −144.0000; | Ammonium Transporter Family |
| Ank | PF00023.22 | 0.0000; | Ankyrin repeat |
| Anth_synt_I_N | PF04715.5 | 25.0000; | Anthranilate synthase component I, N terminal |
| | | | region |
| ApbA | PF02558.8 | −16.2000; | Ketopantoate reductase PanE/ApbA |
| Arginase | PF00491.13 | −48.2000; | Arginase family |
| Arginosuc_synth | PF00764.11 | −236.3000; | Arginosuccinate synthase |
| Arm | PF00514.15 | 17.0000; | Armadillo/beta-catenin-like repeat |
| AsnA | PF03590.7 | 25.0000; | Aspartate-ammonia ligase |
| Asn_synthase | PF00733.13 | −52.8000; | Asparagine synthase |
| Asp | PF00026.15 | −153.8000; | Eukaryotic aspartyl protease |
| Asp_decarbox | PF02261.8 | −44.4000; | Aspartate decarboxylase |
| Auxin_inducible | PF02519.6 | 25.0000; | Auxin responsive protein |
| BAG | PF02179.8 | 25.0000; | BAG domain |
| BAH | PF01426.10 | 7.0000; | BAH domain |
| BCCT | PF02028.9 | −386.1000; | BCCT family transporter |
| BNR | PF02012.12 | 18.0000; | BNR/Asp-box repeat |
| BPD_transp_1 | PF00528.14 | −6.6000; | Binding-protein-dependent transport system |
| | | | inner membrane component |
| BPD_transp_2 | PF02653.8 | −66.1000; | Branched-chain amino acid transport system/ |
| | | | permease component |
| BSD | PF03909.9 | 26.4000; | BSD domain |
| BTB | PF00651.23 | 6.2000; | BTB/POZ domain |
| Bac_DnaA | PF00308.10 | −108.0000; | Bacterial dnaA protein |
| BenE | PF03594.5 | −283.2000; | Benzoate membrane transport protein |
| Beta_elim_lyase | PF01212.13 | −110.3000; | Beta-eliminating lyase |
| Big_2 | PF02368.10 | 0.0000; | Bacterial Ig-like domain (group 2) |
| C1_1 | PF00130.14 | 11.4000; | Phorbol esters/diacylglycerol binding domain |
| | | | (C1 domain) |
| C1_4 | PF07975.4 | 25.0000; | TFIIH C1-like domain |
| C2 | PF00168.22 | 3.7000; | C2 domain |
| C4dic_mal_tran | PF03595.9 | −43.6000; | C4-dicarboxylate transporter/malic acid |
| | | | transport protein |
| CBFB_NFYA | PF02045.7 | 25.0000; | CCAAT-binding transcription factor (CBF- |
| | | | B/NF-YA) subunit B |
| CBS | PF00571.20 | 19.5000; | CBS domain pair |
| CCT | PF06203.6 | 25.0000; | CCT motif |
| CDC48_2 | PF02933.9 | 25.0000; | Cell division protein 48 (CDC48), domain 2 |
| CDC48_N | PF02359.10 | −2.0000; | Cell division protein 48 (CDC48), N-terminal |
| | | | domain |
| CDP-OH_P_transf | PF01066.13 | 0.0000; | CDP-alcohol phosphatidyltransferase |
| CS | PF04969.8 | 8.6000; | CS domain |
| CSD | PF00313.14 | −0.3000; | ‘Cold-shock’ DNA-binding domain |
| CW_binding_2 | PF04122.4 | 0.0000; | Putative cell wall binding repeat 2 |
| Calpain_III | PF01067.14 | −57.0000; | Calpain large subunit, domain III |
| Carbpep_Y_N | PF05388.3 | 2.5000; | Carboxypeptidase Y pro-peptide |
| CbiC | PF02570.7 | 25.0000; | Precorrin-8X methylmutase |
| Chal_sti_synt_C | PF02797.7 | −6.1000; | Chalcone and stilbene synthases, C-terminal |
| | | | domain |
| Chal_sti_synt_N | PF00195.11 | −71.3000; | Chalcone and stilbene synthases, N-terminal |
| | | | domain |
| CheW | PF01584.11 | 25.0000; | CheW-like domain |
| Chorismate_bind | PF00425.10 | −153.0000; | chorismate binding enzyme |
| ClpB_D2-small | PF10431.1 | 21.5000; | C-terminal, D2-small domain, of ClpB protein |
| Clp_N | PF02861.12 | 0.0000; | Clp amino terminal domain |
| Cna_B | PF05738.5 | 7.0000; | Cna protein B-type domain |
| CpcD | PF01383.13 | 3.5000; | CpcD/allophycocyanin linker domain |
| Crp | PF00325.12 | 20.7000; | Bacterial regulatory proteins, crp family |
| Cupin_2 | PF07883.3 | 19.4000; | Cupin domain |
| Cupin_4 | PF08007.4 | −112.1000; | Cupin superfamily protein |
| Cys_Met_Meta_PP | PF01053.12 | −278.4000; | Cys/Met metabolism PLP-dependent enzyme |
| Cytidylate_kin | PF02224.10 | −51.6000; | Cytidylate kinase |
| Cytochrom_C | PF00034.13 | 11.7000; | Cytochrome c |
| Cytokin-bind | PF09265.2 | −143.4000; | Cytokinin dehydrogenase 1, FAD and cytokinin |
| | | | binding |
| DAO | PF01266.16 | −34.9000; | FAD dependent oxidoreductase |
| DEAD | PF00270.21 | 7.2000; | DEAD/DEAH box helicase |
| DEAD_2 | PF06733.7 | 5.2000; | DEAD_2 |
| DHC_N1 | PF08385.4 | −162.0000; | Dynein heavy chain, N-terminal region 1 |
| DHC_N2 | PF08393.5 | −204.1000; | Dynein heavy chain, N-terminal region 2 |
| DHQ_synthase | PF01761.12 | −119.7000; | 3-dehydroquinate synthase |
| DIL | PF01843.11 | 25.0000; | DIL domain |
| DNA_pol_lambd_f | PF10391.1 | 25.0000; | Fingers domain of DNA polymerase lambda |
| DPPIV_N | PF00930.13 | −124.2000; | Dipeptidyl peptidase IV (DPP IV) N-terminal |
| | | | region |
| DRTGG | PF07085.4 | −5.3000; | DRTGG domain |
| DSPc | PF00782.12 | −21.8000; | Dual specificity phosphatase, catalytic domain |
| DUF1227 | PF06777.3 | −22.0000; | Protein of unknown function (DUF1227) |
| DUF1289 | PF06945.5 | 25.0000; | Protein of unknown function (DUF1289) |
| DUF1292 | PF06949.3 | 13.2000; | Protein of unknown function (DUF1292) |
| DUF1348 | PF07080.3 | 25.0000; | Protein of unknown function (DUF1348) |
| DUF1513 | PF07433.3 | −172.5000; | Protein of unknown function (DUF1513) |
| DUF1644 | PF07800.4 | −15.6000; | Protein of unknown function (DUF1644) |
| DUF1685 | PF07939.3 | 25.0000; | Protein of unknown function (DUF1685) |
| DUF1715 | PF08215.4 | 25.0000; | Eukaryotic domain of unknown function |
| | | | (DUF1715) |
| DUF1933 | PF09147.2 | 25.0000; | Domain of unknown function (DUF1933) |
| DUF1967 | PF09269.3 | 9.0000; | Domain of unknown function (DUF1967) |
| DUF1985 | PF09331.3 | 11.9000; | Domain of unknown function (DUF1985) |
| DUF442 | PF04273.5 | −20.4000; | Putative phosphatase (DUF442) |
| DUF506 | PF04720.4 | 25.0000; | Protein of unknown function (DUF506) |
| DUF537 | PF04396.6 | −4.6000; | Protein of unknown function, DUF537 |
| DUF538 | PF04398.4 | −24.3000; | Protein of unknown function, DUF538 |
| DUF547 | PF04784.6 | −24.7000; | Protein of unknown function, DUF547 |
| DUF568 | PF04526.5 | 25.0000; | Protein of unknown function (DUF568) |
| DUF588 | PF04535.4 | 25.0000; | Domain of unknown function (DUF588) |
| DUF6 | PF00892.12 | 21.7000; | Integral membrane protein DUF6 |
| DUF640 | PF04852.4 | −18.1000; | Protein of unknown function (DUF640) |
| DUF647 | PF04884.6 | 25.0000; | Protein of unknown function, DUF647 |
| DUF828 | PF05703.3 | −53.1000; | Plant protein of unknown function (DUF828) |
| DUF836 | PF05768.6 | 2.0000; | Glutaredoxin-like domain (DUF836) |
| DZC | PF08381.3 | 15.3000; | Disease resistance/zinc finger/chromosome |
| | | | condensation-like region |
| DapB_N | PF01113.12 | −20.7000; | Dihydrodipicolinate reductase, N-terminus |
| DbpA | PF03880.7 | 16.6000; | DbpA RNA binding domain |
| DegT_DnrJ_EryC1 | PF01041.9 | −161.3000; | DegT/DnrJ/EryC1/StrS aminotransferase family |
| Dehydrin | PF00257.11 | −4.4000; | Dehydrin |
| Dimerisation | PF08100.3 | 25.0000; | Dimerisation domain |
| DnaJ | PF00226.23 | −8.0000; | DnaJ domain |
| Dockerin_1 | PF00404.10 | 24.1000; | Dockerin type I repeat |
| DoxX | PF07681.4 | 0.3000; | DoxX |
| DpmII | PF04556.4 | 25.0000; | DpmII restriction endonuclease |
| Dynein_heavy | PF03028.7 | −455.0000; | Dynein heavy chain |
| EAL | PF00563.12 | −16.4000; | EAL domain |
| EFG_C | PF00679.16 | 6.0000; | Elongation factor G C-terminus |
| EFG_IV | PF03764.10 | 25.0000; | Elongation factor G, domain IV |
| EIN3 | PF04873.5 | −192.4000; | Ethylene insensitive 3 |
| ENT | PF03735.6 | 14.7000; | ENT domain |
| Exo_endo_phos | PF03372.15 | 11.0000; | Endonuclease/Exonuclease/phosphatase family |
| Exostosin | PF03016.7 | −53.2000; | Exostosin family |
| ExsB | PF06508.5 | −91.9000; | ExsB |
| F-box | PF00646.25 | 14.7000; | F-box domain |
| F420_oxidored | PF03807.9 | −34.5000; | NADP oxidoreductase coenzyme F420- |
| | | | dependent |
| FAD-oxidase_C | PF02913.11 | −36.0000; | FAD linked oxidases, C-terminal domain |
| FAD_binding_1 | PF00667.12 | −79.0000; | FAD binding domain |
| FAD_binding_3 | PF01494.11 | −136.6000; | FAD binding domain |
| FAD_binding_4 | PF01565.15 | −8.1000; | FAD binding domain |
| FAD_binding_5 | PF00941.13 | −57.4000; | FAD binding domain in molybdopterin |
| | | | dehydrogenase |
| FAD_binding_6 | PF00970.16 | −4.9000; | Oxidoreductase FAD-binding domain |
| FAD_binding_8 | PF08022.4 | −10.4000; | FAD-binding domain |
| FAD_binding_9 | PF08021.3 | −22.9000; | Siderophore-interacting FAD-binding domain |
| FA_desaturase | PF00487.16 | 0.2000; | Fatty acid desaturase |
| FCD | PF07729.4 | 29.0000; | FCD domain |
| FHA | PF00498.18 | 25.0000; | FHA domain |
| FLYWCH | PF04500.8 | 12.8000; | FLYWCH zinc finger domain |
| FMN_dh | PF01070.10 | −203.2000; | FMN-dependent dehydrogenase |
| FTCD | PF02971.6 | 25.0000; | Formiminotransferase domain |
| FTCD_C | PF04961.4 | −69.6000; | Formiminotransferase-cyclodeaminase |
| FTCD_N | PF07837.4 | −110.1000; | Formiminotransferase domain, N-terminal |
| | | | subdomain |
| FYRC | PF05965.6 | 17.1000; | F/Y rich C-terminus |
| FYRN | PF05964.6 | 16.3000; | F/Y-rich N-terminus |
| FYVE | PF01363.13 | 3.9000; | FYVE zinc finger |
| F_bP_aldolase | PF01116.12 | −157.6000; | Fructose-bisphosphate aldolase class-II |
| Fe-ADH | PF00465.11 | −189.8000; | Iron-containing alcohol dehydrogenase |
| Fe—S_biosyn | PF01521.12 | −0.4000; | Iron-sulphur cluster biosynthesis |
| FeoB_C | PF07664.4 | 16.6000; | Ferrous iron transport protein B C terminus |
| FeoB_N | PF02421.10 | −0.4000; | Ferrous iron transport protein B |
| Fer2 | PF00111.19 | 11.2000; | 2Fe—2S iron-sulfur cluster binding domain |
| Fer2_BFD | PF04324.7 | 16.0000; | BFD-like [2Fe—2S] binding domain |
| Fer4 | PF00037.19 | 15.5000; | 4Fe—4S binding domain |
| Ferric_reduct | PF01794.11 | −7.0000; | Ferric reductase like transmembrane component |
| Flavodoxin_1 | PF00258.17 | 6.3000; | Flavodoxin |
| FleQ | PF06490.3 | −14.4000; | Flagellar regulatory protein FleQ |
| Form_Nir_trans | PF01226.9 | −131.5000; | Formate/nitrite transporter |
| FrhB_FdhB_C | PF04432.5 | −42.4000; | Coenzyme F420 hydrogenase/dehydrogenase, |
| | | | beta subunit C terminus |
| FrhB_FdhB_N | PF04422.5 | 4.6000; | Coenzyme F420 hydrogenase/dehydrogenase, |
| | | | beta subunit N terminus |
| FtsH_ext | PF06480.7 | 6.8000; | FtsH Extracellular |
| Fumble | PF03630.6 | 25.0000; | Fumble |
| GAF | PF01590.18 | 23.0000; | GAF domain |
| GATA | PF00320.19 | 28.5000; | GATA zinc finger |
| GATase_2 | PF00310.13 | −91.6000; | Glutamine amidotransferases class-II |
| GCC2_GCC3 | PF07699.5 | 30.0000; | GCC2 and GCC3 |
| GDPD | PF03009.9 | −18.0000; | Glycerophosphoryl diester phosphodiesterase |
| | | | family |
| GFO_IDH_MocA | PF01408.14 | 1.0000; | Oxidoreductase family, NAD-binding |
| | | | Rossmann fold |
| GGDEF | PF00990.13 | −45.0000; | GGDEF domain |
| GH3 | PF03321.5 | −336.0000; | GH3 auxin-responsive promoter |
| GRAS | PF03514.6 | −181.6000; | GRAS family transcription factor |
| GSPII_E | PF00437.12 | −98.1000; | Type II/IV secretion system protein |
| GSPII_E_N | PF05157.7 | 5.7000; | GSPII_E N-terminal domain |
| GTP1_OBG | PF01018.14 | −56.2000; | GTP1/OBG |
| GTP_EFTU | PF00009.19 | 8.0000; | Elongation factor Tu GTP binding domain |
| GTP_EFTU_D2 | PF03144.17 | 25.0000; | Elongation factor Tu domain 2 |
| GTP_EFTU_D3 | PF03143.9 | 14.3000; | Elongation factor Tu C-terminal domain |
| GUCT | PF08152.4 | 25.0000; | GUCT (NUC152) domain |
| GXGXG | PF01493.11 | 5.0000; | GXGXG motif |
| Gal_Lectin | PF02140.10 | 25.0000; | Galactose binding lectin domain |
| GatB_Yqey | PF02637.10 | −28.5000; | GatB domain |
| Gate | PF07670.6 | 29.5000; | Nucleoside recognition |
| GcpE | PF04551.6 | −312.3000; | GcpE protein |
| GerE | PF00196.11 | 6.1000; | Bacterial regulatory proteins, luxR family |
| Gln-synt_C | PF00120.16 | −124.0000; | Glutamine synthetase, catalytic domain |
| Gln-synt_N | PF03951.11 | 9.0000; | Glutamine synthetase, beta-Grasp domain |
| Globin | PF00042.14 | −7.3000; | Globin |
| Glt_symporter | PF03616.6 | −272.0000; | Sodium/glutamate symporter |
| Glu_syn_central | PF04898.6 | 25.0000; | Glutamate synthase central domain |
| Glu_synthase | PF01645.9 | −198.4000; | Conserved region in glutamate synthase |
| Glutaredoxin | PF00462.16 | 17.2000; | Glutaredoxin |
| Glyco_hydro_1 | PF00232.10 | −301.8000; | Glycosyl hydrolase family 1 |
| Glyco_hydro_28 | PF00295.9 | −97.0000; | Glycosyl hydrolases family 28 |
| Glyco_hydro_35 | PF01301.11 | −184.5000; | Glycosyl hydrolases family 35 |
| Glyco_hydro_42 | PF02449.7 | −230.8000; | Beta-galactosidase |
| Glyco_transf_20 | PF00982.13 | −243.6000; | Glycosyltransferase family 20 |
| Glyco_transf_9 | PF01075.9 | −62.2000; | Glycosyltransferase family 9 |
| | | | (heptosyltransferase) |
| Glycos_transf_1 | PF00534.12 | −7.3000; | Glycosyl transferases group 1 |
| Glycos_transf_2 | PF00535.18 | 17.6000; | Glycosyl transferase family 2 |
| Got1 | PF04178.4 | 25.0000; | Got1-like family |
| Gp_dh_C | PF02800.12 | −64.1000; | Glyceraldehyde 3-phosphate dehydrogenase, C- |
| | | | terminal domain |
| Guanylate_cyc | PF00211.12 | −23.7000; | Adenylate and Guanylate cyclase catalytic |
| | | | domain |
| HALZ | PF02183.10 | 18.1000; | Homeobox associated leucine zipper |
| HAMP | PF00672.17 | 19.8000; | HAMP domain |
| HATPase_c | PF02518.18 | 22.4000; | Histidine kinase-, DNA gyrase B-, and HSP90- |
| | | | like ATPase |
| HD | PF01966.14 | 17.8000; | HD domain |
| HD-ZIP_N | PF04618.4 | 25.0000; | HD-ZIP protein N terminus |
| HDAC_interact | PF08295.4 | −17.1000; | Histone deacetylase (HDAC) interacting |
| HEPN | PF05168.6 | 0.1000; | HEPN domain |
| HIG_1_N | PF04588.5 | −5.2000; | Hypoxia induced protein conserved region |
| HLH | PF00010.18 | 8.3000; | Helix-loop-helix DNA-binding domain |
| HMG_box | PF00505.11 | 4.1000; | HMG (high mobility group) box |
| HPPK | PF01288.12 | 25.0000; | 7,8-dihydro-6-hydroxymethylpterin- |
| | | | pyrophosphokinase (HPPK) |
| HR1 | PF02185.8 | 0.0000; | Hr1 repeat |
| HR_lesion | PF05514.3 | 25.0000; | HR-like lesion-inducing |
| HSP20 | PF00011.13 | 13.0000; | Hsp20/alpha crystallin family |
| HSP70 | PF00012.12 | −286.0000; | Hsp70 protein |
| HTH_3 | PF01381.14 | 27.7000; | Helix-turn-helix |
| HTH_6 | PF01418.9 | 0.0000; | Helix-turn-helix domain, rpiR family |
| HTH_8 | PF02954.11 | 17.3000; | Bacterial regulatory protein, Fis family |
| HTH_AraC | PF00165.15 | 22.0000; | Bacterial regulatory helix-turn-helix proteins, |
| | | | AraC family |
| Helicase_C | PF00271.23 | 6.9000; | Helicase conserved C-terminal domain |
| HemolysinCabind | PF00353.11 | 5.0000; | Hemolysin-type calcium-binding repeat (2 |
| | | | copies) |
| HisKA | PF00512.17 | 22.1000; | His Kinase A (phosphoacceptor) domain |
| HisKA_3 | PF07730.5 | 30.0000; | Histidine kinase |
| His_kinase | PF06580.5 | 25.0000; | Histidine kinase |
| Homeobox | PF00046.21 | −4.1000; | Homeobox domain |
| Homoserine_dh | PF00742.11 | −5.0000; | Homoserine dehydrogenase |
| Hpt | PF01627.15 | 25.0000; | Hpt domain |
| Hydrolase | PF00702.18 | 13.6000; | haloacid dehalogenase-like hydrolase |
| Hydrolase_3 | PF08282.4 | −64.8000; | haloacid dehalogenase-like hydrolase |
| IGPD | PF00475.10 | 25.0000; | Imidazoleglycerol-phosphate dehydratase |
| IQ | PF00612.19 | 18.3000; | IQ calmodulin-binding motif |
| IlvN | PF07991.4 | −75.8000; | Acetohydroxy acid isomeroreductase, catalytic |
| | | | domain |
| K-box | PF01486.9 | 0.0000; | K-box region |
| KA1 | PF02149.11 | 25.0000; | Kinase associated domain 1 |
| KH_2 | PF07650.9 | 5.0000; | KH domain |
| KOW | PF00467.21 | 29.1000; | KOW motif |
| KR | PF08659.2 | −74.3000; | KR domain |
| Kelch_1 | PF01344.17 | 11.7000; | Kelch motif |
| Kelch_2 | PF07646.7 | 14.0000; | Kelch motif |
| Kinesin | PF00225.15 | −135.0000; | Kinesin motor domain |
| LIM | PF00412.14 | 0.0000; | LIM domain |
| LRRNT_2 | PF08263.4 | 18.6000; | Leucine rich repeat N-terminal domain |
| LRR_1 | PF00560.25 | 10.9000; | Leucine Rich Repeat |
| LRR_2 | PF07723.5 | 14.5000; | Leucine Rich Repeat |
| LRR_3 | PF07725.4 | 20.0000; | Leucine Rich Repeat |
| Lact-deh-memb | PF09330.3 | 25.0000; | D-lactate dehydrogenase, membrane binding |
| Lactamase_B | PF00753.19 | 24.6000; | Metallo-beta-lactamase superfamily |
| Lectin_legB | PF00139.11 | −110.1000; | Legume lectin domain |
| Lipase_GDSL | PF00657.14 | 13.9000; | GDSL-like Lipase/Acylhydrolase |
| Lipoprotein_9 | PF03180.6 | −121.0000; | NLPA lipoprotein |
| LisH | PF08513.3 | 20.7000; | LisH |
| LysM | PF01476.12 | 20.0000; | LysM domain |
| MBD | PF01429.11 | 12.9000; | Methyl-CpG binding domain |
| MCD | PF05292.3 | 25.0000; | Malonyl-CoA decarboxylase (MCD) |
| MCPsignal | PF00015.13 | −88.3000; | Methyl-accepting chemotaxis protein (MCP) |
| | | | signaling domain |
| MEKHLA | PF08670.3 | −59.7000; | MEKHLA domain |
| MFS_1 | PF07690.8 | 23.5000; | Major Facilitator Superfamily |
| MIT | PF04212.10 | 18.3000; | MIT (microtubule interacting and transport) |
| | | | domain |
| MMR_HSR1 | PF01926.15 | 31.2000; | GTPase of unknown function |
| MOFRL | PF05161.5 | 25.0000; | MOFRL family |
| MORN | PF02493.12 | 0.0000; | MORN repeat |
| MOSC | PF03473.9 | 25.0000; | MOSC domain |
| MOSC_N | PF03476.8 | 25.0000; | MOSC N-terminal beta barrel domain |
| Malic_M | PF03949.7 | −143.9000; | Malic enzyme, NAD binding domain |
| MaoC_dehydratas | PF01575.11 | −10.9000; | MaoC like domain |
| Metal_hydrol | PF10118.1 | −74.9000; | Predicted metal-dependent hydrolase |
| Metallophos | PF00149.20 | 22.0000; | Calcineurin-like phosphoesterase |
| MethyltransfD12 | PF02086.7 | −49.4000; | D12 class N6 adenine-specific DNA |
| | | | methyltransferase |
| Methyltransf_11 | PF08241.4 | 24.4000; | Methyltransferase domain |
| Methyltransf_12 | PF08242.4 | 23.0000; | Methyltransferase domain |
| Methyltransf_16 | PF10294.1 | −43.0000; | Putative methyltransferase |
| Methyltransf_2 | PF00891.10 | −103.8000; | O-methyltransferase |
| Miro | PF08477.5 | 10.8000; | Miro-like protein |
| Mito_carr | PF00153.19 | 0.0000; | Mitochondrial carrier protein |
| Molybdop_Fe4S4 | PF04879.8 | 13.6000; | Molybdopterin oxidoreductase Fe4S4 domain |
| Molybdopterin | PF00384.14 | −50.0000; | Molybdopterin oxidoreductase |
| Molydop_binding | PF01568.13 | 1.1000; | Molydopterin dinucleotide binding domain |
| Monooxygenase_B | PF04744.4 | 25.0000; | Monooxygenase subunit B protein |
| Mur_ligase | PF01225.17 | 4.9000; | Mur ligase family, catalytic domain |
| Mur_ligase_C | PF02875.13 | 8.0000; | Mur ligase family, glutamate ligase domain |
| Mur_ligase_M | PF08245.4 | −44.7000; | Mur ligase middle domain |
| Myb_DNA-binding | PF00249.23 | 21.7000; | Myb-like DNA-binding domain |
| Myosin_N | PF02736.11 | 9.0000; | Myosin N-terminal SH3-like domain |
| Myosin_head | PF00063.13 | −372.4000; | Myosin head (motor domain) |
| N6_N4_Mtase | PF01555.10 | −36.4000; | DNA methylase |
| NAD_Gly3P_dh_N | PF01210.15 | −44.0000; | NAD-dependent glycerol-3-phosphate |
| | | | dehydrogenase N-terminus |
| NAD_binding_1 | PF00175.13 | −3.9000; | Oxidoreductase NAD-binding domain |
| NAD_binding_2 | PF03446.7 | −63.5000; | NAD binding domain of 6-phosphogluconate |
| | | | dehydrogenase |
| NAD_binding_3 | PF03447.8 | −1.7000; | Homoserine dehydrogenase, NAD binding |
| | | | domain |
| NAD_binding_6 | PF08030.4 | −23.6000; | Ferric reductase NAD binding domain |
| NAF | PF03822.6 | 4.5000; | NAF domain |
| NAGLU | PF05089.4 | 25.0000; | Alpha-N-acetylglucosaminidase (NAGLU) |
| NAM | PF02365.7 | −19.0000; | No apical meristem (NAM) protein |
| NB-ARC | PF00931.14 | −79.5000; | NB-ARC domain |
| NIR_SIR | PF01077.14 | −18.7000; | Nitrite and sulphite reductase 4Fe—4S domain |
| NIR_SIR_ferr | PF03460.9 | 2.4000; | Nitrite/Sulfite reductase ferredoxin-like half |
| | | | domain |
| NLE | PF08154.4 | 14.0000; | NLE (NUC135) domain |
| NMT1 | PF09084.3 | 20.0000; | NMT1/THI5 like |
| NOG1 | PF06858.6 | 50.0000; | Nucleolar GTP-binding protein 1 (NOG1) |
| NTP_transf_2 | PF01909.15 | 18.8000; | Nucleotidyltransferase domain |
| NTP_transferase | PF00483.15 | −39.9000; | Nucleotidyl transferase |
| NUDIX | PF00293.20 | 0.2000; | NUDIX domain |
| Ndr | PF03096.6 | −82.0000; | Ndr family |
| NifU | PF01106.9 | −5.6000; | NifU-like domain |
| Nitroreductase | PF00881.16 | 14.2000; | Nitroreductase family |
| Nramp | PF01566.10 | −171.4000; | Natural resistance-associated macrophage |
| | | | protein |
| OB_RNB | PF08206.3 | 4.1000; | Ribonuclease B OB domain |
| OKR_DC_1 | PF01276.12 | −206.6000; | Orn/Lys/Arg decarboxylase, major domain |
| OKR_DC_1_C | PF03711.7 | −52.0000; | Orn/Lys/Arg decarboxylase, C-terminal domain |
| OKR_DC_1_N | PF03709.7 | 7.0000; | Orn/Lys/Arg decarboxylase, N-terminal domain |
| OMPdecase | PF00215.16 | −45.6000; | Orotidine 5′-phosphate decarboxylase/HUMPS |
| | | | family |
| OPT | PF03169.7 | −233.0000; | OPT oligopeptide transporter protein |
| OpuAC | PF04069.4 | −45.4000; | Substrate binding domain of ABC-type glycine |
| | | | betaine transport system |
| Orn_Arg_deC_N | PF02784.8 | −76.0000; | Pyridoxal-dependent decarboxylase, pyridoxal |
| | | | binding domain |
| Orn_DAP_Arg_deC | PF00278.14 | 6.7000; | Pyridoxal-dependent decarboxylase, C-terminal |
| | | | sheet domain |
| P-II | PF00543.14 | −29.0000; | Nitrogen regulatory protein P-II |
| PAH | PF02671.13 | 25.0000; | Paired amphipathic helix repeat |
| PAPS_reduct | PF01507.11 | −53.4000; | Phosphoadenosine phosphosulfate reductase |
| | | | family |
| PAS | PF00989.16 | 0.0000; | PAS fold |
| PAS_2 | PF08446.3 | −2.1000; | PAS fold |
| PAS_3 | PF08447.3 | 17.2000; | PAS fold |
| PAS_4 | PF08448.2 | 16.4000; | PAS fold |
| PB1 | PF00564.16 | 12.3000; | PB1 domain |
| PBP | PF01161.12 | −20.6000; | Phosphatidylethanolamine-binding protein |
| PC_rep | PF01851.14 | 0.0000; | Proteasome/cyclosome repeat |
| PGI | PF00342.11 | −146.0000; | Phosphoglucose isomerase |
| PGM_PMM_I | PF02878.8 | −37.5000; | Phosphoglucomutase/phosphomannomutase, |
| | | | alpha/beta/alpha domain I |
| PGM_PMM_II | PF02879.8 | −20.0000; | Phosphoglucomutase/phosphomannomutase, |
| | | | alpha/beta/alpha domain II |
| PHD | PF00628.21 | 26.2000; | PHD-finger |
| PH_2 | PF08458.2 | −6.6000; | Plant pleckstrin homology-like region |
| PLAC8 | PF04749.9 | −1.1000; | PLAC8 family |
| PMEI | PF04043.7 | 25.0000; | Plant invertase/pectin methylesterase inhibitor |
| PMSR | PF01625.13 | −32.7000; | Peptide methionine sulfoxide reductase |
| PNK3P | PF08645.3 | −67.6000; | Polynucleotide kinase 3 phosphatase |
| PNTB | PF02233.8 | −341.0000; | NAD(P) transhydrogenase beta subunit |
| POX | PF07526.3 | −39.4000; | Associated with HOX |
| PP-binding | PF00550.17 | 25.3000; | Phosphopantetheine attachment site |
| PP2C | PF00481.13 | −36.3000; | Protein phosphatase 2C |
| PPR | PF01535.12 | 1.6000; | PPR repeat |
| PRP4 | PF08799.3 | 25.0000; | pre-mRNA processing factor 4 (PRP4) like |
| PSCyt1 | PF07635.3 | 50.0000; | Planctomycete cytochrome C |
| PTA_PTB | PF01515.11 | −165.5000; | Phosphate acetyl/butaryl transferase |
| PTR2 | PF00854.13 | −50.0000; | POT family |
| PWWP | PF00855.9 | 0.3000; | PWWP domain |
| Pantoate_ligase | PF02569.7 | −106.0000; | Pantoate-beta-alanine ligase |
| Pantoate_transf | PF02548.7 | −93.0000; | Ketopantoate hydroxymethyltransferase |
| PduL | PF06130.4 | 25.0000; | Propanediol utilisation protein PduL |
| Pectinesterase | PF01095.11 | −222.9000; | Pectinesterase |
| PepSY_TM | PF03929.8 | 11.9000; | PepSY-associated TM helix |
| Peptidase_C14 | PF00656.14 | −22.5000; | Caspase domain |
| Peptidase_C2 | PF00648.13 | −183.5000; | Calpain family cysteine protease |
| Peptidase_M3 | PF01432.12 | −146.0000; | Peptidase family M3 |
| Peptidase_M41 | PF01434.10 | −139.8000; | Peptidase family M41 |
| Peptidase_S10 | PF00450.14 | −198.0000; | Serine carboxypeptidase |
| Peptidase_S24 | PF00717.15 | 10.0000; | Peptidase S24-like |
| Pericardin_rpt | PF07054.3 | 0.0000; | Pericardin like repeat |
| Peripla_BP_1 | PF00532.13 | −44.9000; | Periplasmic binding proteins and sugar binding |
| | | | domain of the LacI family |
| Phage_fiber | PF03335.5 | 0.0000; | Phage tail fibre repeat |
| Phytochrome | PF00360.12 | 13.0000; | Phytochrome region |
| PilZ | PF07238.6 | 19.6000; | PilZ domain |
| Pkinase | PF00069.17 | 70.3000; | Protein kinase domain |
| Pkinase_C | PF00433.16 | 15.3000; | Protein kinase C terminal domain |
| Pkinase_Tyr | PF07714.9 | −155.0000; | Protein tyrosine kinase |
| Plant_zn_clust | PF10533.1 | 25.0000; | Plant zinc cluster domain |
| Plus-3 | PF03126.10 | 25.0000; | Plus-3 domain |
| Pollen_allerg_1 | PF01357.13 | 17.2000; | Pollen allergen |
| Pribosyltran | PF00156.19 | 20.0000; | Phosphoribosyl transferase domain |
| Proteasome | PF00227.18 | −36.7000; | Proteasome A-type and B-type |
| PseudoU_synth_2 | PF00849.14 | −18.0000; | RNA pseudouridylate synthase |
| Pterin_bind | PF00809.14 | −53.7000; | Pterin binding enzyme |
| Pyr_redox | PF00070.19 | 5.0000; | Pyridine nucleotide-disulphide oxidoreductase |
| Pyr_redox_2 | PF07992.6 | −20.0000; | Pyridine nucleotide-disulphide oxidoreductase |
| Pyridox_oxidase | PF01243.12 | 17.1000; | Pyridoxamine 5′-phosphate oxidase |
| Pyrophosphatase | PF00719.11 | −41.0000; | Inorganic pyrophosphatase |
| RCC1 | PF00415.10 | 21.2000; | Regulator of chromosome condensation (RCC1) |
| RIO1 | PF01163.14 | −89.1000; | RIO1 family |
| RNA_Me_trans | PF04252.5 | 25.0000; | Predicted SAM-dependent RNA |
| | | | methyltransferase |
| RNA_pol_L | PF01193.16 | 16.9000; | RNA polymerase Rpb3/Rpb11 dimerisation |
| | | | domain |
| RRM_1 | PF00076.14 | 17.9000; | RNA recognition motif. (a.k.a. RRM, RBD, or |
| | | | RNP domain) |
| RVT_1 | PF00078.19 | 32.0000; | Reverse transcriptase (RNA-dependent DNA |
| | | | polymerase) |
| RVT_2 | PF07727.6 | −180.0000; | Reverse transcriptase (RNA-dependent DNA |
| | | | polymerase) |
| RWP-RK | PF02042.7 | 25.0000; | RWP-RK domain |
| RecA | PF00154.13 | −100.6000; | recA bacterial DNA recombination protein |
| Reg_prop | PF07494.3 | 5.4000; | Two component regulator propeller |
| ResIII | PF04851.7 | 0.8000; | Type III restriction enzyme, res subunit |
| Response_reg | PF00072.16 | 4.1000; | Response regulator receiver domain |
| Rho_N | PF07498.4 | 31.0000; | Rho termination factor, N-terminal domain |
| Rhodanese | PF00581.12 | 25.0000; | Rhodanese-like domain |
| Rhomboid | PF01694.14 | −1.2000; | Rhomboid family |
| Ribosomal_L21p | PF00829.13 | −23.0000; | Ribosomal prokaryotic L21 protein |
| Ribosomal_S19 | PF00203.13 | 11.0000; | Ribosomal protein S19 |
| Ribosomal_S9 | PF00380.11 | −24.0000; | Ribosomal protein S9/S16 |
| Rieske | PF00355.18 | −7.0000; | Rieske [2Fe—2S] domain |
| RolB_RolC | PF02027.9 | 25.0000; | RolB/RolC glucosidase family |
| Rrf2 | PF02082.12 | −17.5000; | Transcriptional regulator |
| RrnaAD | PF00398.12 | −73.3000; | Ribosomal RNA adenine dimethylase |
| Rubredoxin | PF00301.12 | 14.0000; | Rubredoxin |
| S-AdoMet_synt_M | PF02772.8 | 25.0000; | S-adenosylmethionine synthetase, central |
| | | | domain |
| S4 | PF01479.17 | 15.0000; | S4 domain |
| S6PP | PF05116.5 | −113.7000; | Sucrose-6F-phosphate phosphohydrolase |
| SAM_1 | PF00536.22 | 11.3000; | SAM domain (Sterile alpha motif) |
| SAM_2 | PF07647.9 | 0.0000; | SAM domain (Sterile alpha motif) |
| SBP | PF03110.6 | 25.0000; | SBP domain |
| SBP_bac_3 | PF00497.12 | 16.6000; | Bacterial extracellular solute-binding proteins, |
| | | | family 3 |
| SCP | PF00188.18 | 10.0000; | SCP-like extracellular protein |
| SET | PF00856.20 | 23.5000; | SET domain |
| SH3BGR | PF04908.7 | −12.0000; | SH3-binding, glutamic acid-rich protein |
| SIS | PF01380.14 | 0.0000; | SIS domain |
| SLA_LP_auto_ag | PF05889.5 | −170.7000; | Soluble liver antigen/liver pancreas antigen |
| | | | (SLA/LP autoantigen) |
| SMC_N | PF02463.11 | −95.8000; | RecF/RecN/SMC N terminal domain |
| SOUL | PF04832.4 | 25.0000; | SOUL heme-binding protein |
| SPRY | PF00622.20 | 10.0000; | SPRY domain |
| SRF-TF | PF00319.10 | 11.0000; | SRF-type transcription factor (DNA-binding |
| | | | and dimerisation domain) |
| SSF | PF00474.9 | −162.3000; | Sodium:solute symporter family |
| START | PF01852.11 | −20.7000; | START domain |
| STAS | PF01740.13 | 0.0000; | STAS domain |
| SbmA_BacA | PF05992.4 | −145.6000; | SbmA/BacA-like family |
| SelR | PF01641.10 | −66.5000; | SelR domain |
| Shikimate_DH | PF01488.12 | −4.4000; | Shikimate/quinate 5-dehydrogenase |
| Shugoshin_C | PF07557.3 | 25.0000; | Shugoshin C terminus |
| Sigma54_activat | PF00158.18 | −95.0000; | Sigma-54 interaction domain |
| Sina | PF03145.8 | −48.4000; | Seven in absentia protein family |
| SirA | PF01206.9 | 7.0000; | SirA-like protein |
| SpoIIE | PF07228.4 | −13.7000; | Stage II sporulation protein E (SpoIIE) |
| Spore_permease | PF03845.5 | −134.0000; | Spore germination protein |
| Ssl1 | PF04056.6 | −151.8000; | Ssl1-like |
| Suc_Fer-like | PF06999.4 | −42.4000; | Sucrase/ferredoxin-like |
| Sulfate_transp | PF00916.12 | −131.5000; | Sulfate transporter family |
| Synaptobrevin | PF00957.13 | 25.0000; | Synaptobrevin |
| TAT_signal | PF10518.1 | 22.9000; | TAT (twin-arginine translocation) pathway |
| | | | signal sequence |
| TFIID-31 kDa | PF02291.7 | 25.0000; | Transcription initiation factor IID, 31 kD subunit |
| TFIID_90 kDa | PF04494.7 | 25.0000; | WD40 associated region in TFIID subunit |
| TGS | PF02824.13 | 5.6000; | TGS domain |
| TIR | PF01582.12 | 43.5000; | TIR domain |
| TPP_enzyme_C | PF02775.13 | 19.7000; | Thiamine pyrophosphate enzyme, C-terminal |
| | | | TPP binding domain |
| TPP_enzyme_M | PF00205.14 | −8.1000; | Thiamine pyrophosphate enzyme, central |
| | | | domain |
| TPP_enzyme_N | PF02776.10 | −70.0000; | Thiamine pyrophosphate enzyme, N-terminal |
| | | | TPP binding domain |
| TPR_1 | PF00515.20 | 16.1000; | Tetratricopeptide repeat |
| TPR_2 | PF07719.9 | 23.9000; | Tetratricopeptide repeat |
| Thg1 | PF04446.4 | 25.0000; | tRNAHis guanylyltransferase |
| ThiS | PF02597.12 | 19.3000; | ThiS family |
| Thioesterase | PF00975.12 | −10.5000; | Thioesterase domain |
| Thiolase_C | PF02803.10 | −30.7000; | Thiolase, C-terminal domain |
| Thiolase_N | PF00108.15 | −129.5000; | Thiolase, N-terminal domain |
| Thioredoxin | PF00085.12 | −16.6000; | Thioredoxin |
| Thymidylate_kin | PF02223.9 | 2.3000; | Thymidylate kinase |
| Torsin | PF06309.3 | −158.6000; | Torsin |
| TraB | PF01963.9 | −62.0000; | TraB family |
| Trans_reg_C | PF00486.20 | 25.0000; | Transcriptional regulatory protein, C terminal |
| Transaldolase | PF00923.11 | −49.0000; | Transaldolase |
| Trehalose_PPase | PF02358.8 | −49.4000; | Trehalose-phosphatase |
| TrkA_C | PF02080.13 | 25.0000; | TrkA-C domain |
| TrkA_N | PF02254.10 | 4.7000; | TrkA-N domain |
| Trp_Tyr_perm | PF03222.5 | −232.6000; | Tryptophan/tyrosine permease family |
| Trp_halogenase | PF04820.6 | −283.2000; | Tryptophan halogenase |
| Tub | PF01167.10 | −98.0000; | Tub family |
| Tubulin | PF00091.17 | −48.7000; | Tubulin/FtsZ family, GTPase domain |
| Tup_N | PF08581.2 | 25.0000; | Tup N-terminal |
| U-box | PF04564.7 | −7.6000; | U-box domain |
| U3_snoRNA_C | PF09384.2 | 25.0000; | U3 small nucleolar RNA C terminal |
| UBA | PF00627.23 | 22.4000; | UBA/TS-N domain |
| UBA_2 | PF08587.3 | 25.0000; | Ubiquitin associated domain (UBA) |
| UDPG_MGDP_dh_N | PF03721.6 | −67.4000; | UDP-glucose/GDP-mannose dehydrogenase |
| | | | family, NAD binding domain |
| UIM | PF02809.12 | 16.6000; | Ubiquitin interaction motif |
| UVR | PF02151.11 | 16.0000; | UvrB/uvrC motif |
| Usp | PF00582.18 | 22.3000; | Universal stress protein family |
| Utp21 | PF04192.4 | 25.0000; | Utp21 specific WD40 associated putative |
| | | | domain |
| Vps4_C | PF09336.2 | −4.6000; | Vps4 C terminal oligomerisation domain |
| WD40 | PF00400.24 | 21.5000; | WD domain, G-beta repeat |
| WRKY | PF03106.7 | −6.7000; | WRKY DNA-binding domain |
| WW | PF00397.18 | 0.0000; | WW domain |
| XH | PF03469.6 | 25.0000; | XH domain |
| XS | PF03468.6 | 25.0000; | XS domain |
| XYPPX | PF02162.9 | 0.7000; | XYPPX repeat |
| Xan_ur_permease | PF00860.12 | −146.7000; | Permease family |
| YLP | PF02757.9 | 2.7000; | YLP motif |
| Y_Y_Y | PF07495.5 | 5.0000; | Y_Y_Y domain |
| Zn_clus | PF00172.10 | 12.0000; | Fungal Zn(2)-Cys(6) binuclear cluster domain |
| adh_short | PF00106.17 | −40.2000; | short chain dehydrogenase |
| bZIP_1 | PF00170.13 | 24.8000; | bZIP transcription factor |
| bZIP_2 | PF07716.7 | 15.0000; | Basic region leucine zipper |
| cNMP_binding | PF00027.21 | 20.6000; | Cyclic nucleotide-binding domain |
| eIF-5a | PF01287.12 | 9.6000; | Eukaryotic initiation factor 5A hypusine, DNA- |
| | | | binding OB fold |
| eIF2A | PF08662.3 | −71.9000; | Eukaryotic translation initiation factor eIF2A |
| eRF1_1 | PF03463.7 | −12.9000; | eRF1 domain 1 |
| eRF1_2 | PF03464.7 | 3.6000; | eRF1 domain 2 |
| eRF1_3 | PF03465.7 | 1.4000; | eRF1 domain 3 |
| Efhand | PF00036.24 | 21.7000; | EF hand |
| fn3 | PF00041.13 | 7.2000; | Fibronectin type III domain |
| mTERF | PF02536.6 | −60.0000; | mTERF |
| Malic | PF00390.11 | 25.0000; | Malic enzyme, N-terminal domain |
| oligo_HPY | PF08352.4 | 2.6000; | Oligopeptide/dipeptide transporter, C-terminal |
| | | | region |
| p450 | PF00067.14 | −105.0000; | Cytochrome P450 |
| Peroxidase | PF00141.15 | −10.0000; | Peroxidase |
| Rve | PF00665.18 | 32.0000; | Integrase core domain |
| tRNA-synt_1c | PF00749.13 | −130.2000; | tRNA synthetases class I (E and Q), catalytic |
| | | | domain |
| tRNA-synt_1c_C | PF03950.10 | 25.0000; | tRNA synthetases class I (E and Q), anti-codon |
| | | | binding domain |
| tRNA-synt_1g | PF09334.3 | −272.5000; | tRNA synthetases class I (M) |
| tRNA_synt_1c_R1 | PF04558.7 | 25.0000; | Glutaminyl-tRNA synthetase, non-specific |
| | | | RNA binding region part 1 |
| tRNA_synt_1c_R2 | PF04557.7 | 25.0000; | Glutaminyl-tRNA synthetase, non-specific |
| | | | RNA binding region part 2 |
| Ubiquitin | PF00240.15 | 19.4000; | Ubiquitin family |
| zf-B_box | PF00643.16 | 15.3000; | B-box zinc finger |
| zf-C3HC4 | PF00097.17 | 16.0000; | Zinc finger, C3HC4 type (RING finger) |
| zf-CCCH | PF00642.16 | 0.0000; | Zinc finger C-x8-C-x5-C-x3-H type (and |
| | | | similar) |
| zf-CCHC | PF00098.15 | 17.9000; | Zinc knuckle |
| zf-CDGSH | PF09360.2 | 10.4000; | Iron-binding zinc finger CDGSH type |
| zf-CW | PF07496.7 | 25.0000; | CW-type Zinc Finger |
| zf-Dof | PF02701.7 | 25.0000; | Dof domain, zinc finger |
| zf-GRF | PF06839.4 | 22.7000; | GRF zinc finger |
| zf-RanBP | PF00641.10 | 23.0000; | Zn-finger in Ran binding protein and others |
| zf-TRAF | PF02176.10 | 18.6000; | TRAF-type zinc finger |
| zf-dskA_traR | PF01258.9 | 21.0000; | Prokaryotic dksA/traR C4-type zinc finger |

The application's sequence listing, which the Patent Office published only in electronic form, follows.

SEQUENCE LISTING (36478 sequences)

SEQ ID NO: 1 - DNA, 1452 bp, Oryza sativa
atggctgctcccagcgtcgccgtcgacaacctcaaccccaaggttttgaattgtgagtatgcagtgcgtggagagattgtgatccatgctcagcgcctgcagcaacagctacagactcaaccagggtctcttccttttgatgagatcctatactgcaacattgggaatccccagtctcttggtcagaagccagttacattcttcagggaggttattgctctttgtgatcatccatgcttgttggaaaaggaggaaaccaaatcattgttcagtgctgatgccatttctcgagcaacaacaattcttgcctcgattcctggaagagcaactggagcatacagccacagccagggcatcaaagggctgcgtgatgcaattgctgctggaattgcatcacgtgacggataccctgcaaatgcagacgacattttccttactgacggagcaagccctggagttcacatgatgatgcagttactgataaggaacgagaaagatggcattctctgcccaattcctcaatatcctttgtactcagcctccattgctcttcatggtggagctcttgtcccgtattatcttaatgaatcaacaggctggggtttggagatctctgaccttaagaagcaactcgaagattctcggttgaaaggcattgatgttagggctttggtagttatcaatccaggaaatccaactgggcaggttcttgctgaggaaaaccaacgggacatagtgaagttctgcaaaaatgagggacttgttcttctggctgatgaggtgtaccaagagaacatctatgttgacaacaagaaatttaactctttcaagaagatagcgagatccatgggatacaacgaggatgatctccctttagtatcatttcaatctgtttctaagggatattatggtgaatgtggcaaaagaggaggctacatggagattactggcttcagtgctccagttagagagcagatctacaaagtggcgtcagtgaacttatgttccaatatcactggccagatccttgccagcctcgtcatgaatccaccaaaggctggagatgcatcatatgcttcatacaaggcagagaaagatggaatcctccaatcattagctcgccgtgcaaaggcattggagaatgctttcaacagtcttgagggaattacatgcaacaaaactgaaggagcaatgtacctcttccctcagcttagtctgccacaaaaggcaattgacgctgctaaagctgctaacaaagcacctgatgctttctatgcccttcgtctcctcgaggcaaccggaattgttgttgtccctggatctggatttggccaagttcctggcacatggcacatcagatgcacaatcctgccacaggaggagaagatccccgcgatcatctcccgcttcaaggcattccatgagggcttcatggcagcgtaccgcgactag

SEQ ID NO: 2 - DNA, 642 bp, Glycine max
atggcggttttaccaagtagctcctcaagcttggaattgaccatatctgtacctggttttgcttcttcaccaacccttcttccctcatcatctgtgaaagaattggacataaatcaagtacctcttgaagaagattggatggcatcaaacatggaagatgaagaagaaagcagcaatggagaacctcctcgaaagaaactccgtctcacaaaggaacaatctcttctccttgaagaaagctttagacaaaaccacacgttgaacccaaagcagaaagagtctttggcaatgcaactgaagctgcgaccaaggcaagtggaggtgtggtttcagaaccgtagggccaggagcaagctgaagcagacagagatggagtgcgagtacctcaagaggtggttcggttccctcacagagcagaaccggaggctccagagggaagtggaggagctgcgagccattaaggtgggcccacccaccgtgatctcccctcactcctgcgaaccgctcccggcctccacactttccatgtgtccccgctgcgagcgtgtcacctccaccgccgacaaaccgccctccgccgcggccactttgtccgctaaagtgccgccaactcaatcccgccaaccctccgcggcctgttga

SEQ ID NO: 3 - DNA, 576 bp, Glycine max
atgtctcttccaagacccagtgagggtaaagccccttctcagctgaaagaaggagtagcacctgctgctgctgaagcctcaacctcttcttcatggaataataggctaaacacttttcctcctttatctctacacaacaagaatagcaaaattgaagacagtgatgaggatatgttcacagttccagatgtggaagccacaccaattaatgttcattctgcagtgactcttcaaaatagtaaccttaatcaacgtaatgtaacagaccctcaatttcaatctggctttcctggaaagcgccgcaggggaagaaatcctgcagataaggaacatagacgcctcaagaggttgttgcggaatagggtctctgctcaacaagcccgcgaaagaaagaaggtttatgtgaatgacttggaatcaagagctaaagagatgcaagataaaaacgctatcttagaagagcgtatctctactttaatcaatgagaacaccatgctgcggaaggttcttatgaatgcgaggccaaaaaatgatgacagcattgaacaaaagcaagaccagttaagtaagagctaa

SEQ ID NO: 4 - DNA, 789 bp, Gossypium hirsutum
tcggtactcccttgggaagcatgctgaagatcatcggaccatattttcctgcgagtctttgagtcggagacttaaggattccgacgtggggtttcttcatgggaaccatatgaatatcacatggctgaggttgaggctcagggtcttgtttcgatacgtcgagaacgacgtcggttttgtggtcttcgacttcgacgagatcggctaaagcaaggtccaaggttgtctccgtggtggacggcggcgagtcgctcaagagcctggcggaagatggcgatgtagagatggtgaagatgaagaataagaggagcacggccgaagtactgcgatcgcgttaacgctttatcacgataccttctaccacatatcactaacaacatcaacactcatcactctcgacgacatccactcgatcactactctcacacgaccgattaactcctcatccacgcggccgcctgcaggagccggccgtgctcctcttattcttcatcttcaccatctctacatcgccatcttccgccaggctcttgagcgactcgccgccgtccaccacggagacaaccttggaccttgctttagccgatctcgtcgaagtcgaagaccacaaaaccgacgtcgttctcgacgtatcgaaacaagaccctgagcctcaacctcagccatgtgatattcatatggttcccatgaagaaaccccacgtcggaatccttaagtctccgactcaaagactcgcaggaaaatatggtccgatgatcttcagcatgcttcccaagggagtaccgatag

SEQ ID NO: 5 - DNA, 1524 bp, Zea mays
atggcctgctctctctcggctccgctggctcgtgctgtaacggccattctcctgctggcctccatcatctgctgctgccgctcggcgccgccgggtgcgctcgtgacgcgtctccccgggttcgacggcgccaagctgccgtcgaagcactacgccgggtacgtgacggtggacgagcatgtcgggagcaagctgttctactacctggtggagtcggagcgcgacccggcccgggaccctgtcgtgctctggctcaacggcggccccggctgctccagcatggatggcttcgtctacgagcacggaccgttcaactttgagtcaggagggtcaagtggaaatctaccaaagcttcatctcaacccttatagctggtccaaggtgtctagtgtaatatacttggactctccttctggtgtcgggctgtcatactcaaaaaatgtttcagattatgaaactggtgaccttaagacagccgctgattcacatacttttcttctcaagtggttccagctctatccggagttccagaaaaatccattttacatagctggagagtcatatgccggagtttatatccctaccctcgcaaaccaagtggtccaaggaatccataaaggagataatccagttataaacttcaagggctacatggttgggaatggtgtgtgtgacgtcacctttgatggtaatgctcttgtaccgtttgcacatggaatgggcctaatttcagatgacatatacgagcaaacgaatactgcatgtcaaggaaactactggaactattcttatagtgaaaaatgcgccgatgcagtgtcgaatgtcgatacggtaatcagcgggataaatatttataacatttctgagccatgctaccatggcacaaacaccaaggaagtgatctcacgacgaactattaataatagaatgccgcaaagcttcaaagatcttggtgtaactagcaggccccttcctgtaagaacaagaatgtttggacgggcttggcctttgagagctcctgtaagagatgggcgtgttccttcgtggcaagagctagccgctgctaataattttccatcagttatgtgtatgaacgatgaagtagcgacggcatggctcaaccatgacagcgtcagatctgcaattcatgcagaaccagtcagtgcaattggaccgtggatcctatgcacagatcaattgttgtttcaccatgatgctgggagtatgatcatctatcacaaaaaccttacaagtcagggttatcgagctatcatttacagcggcgaccatgatatgtgtgtaccttacactgggagcctagcatggaccacatctttacgctatggtgtcattgattcgtggcgaccgtggtttgtcaatggacaagtttctgggtacactcaaggatacgagaatggcctcacttttgctactattaagggttctgggcatgcagttcctgagtataaaccacaggaagcattggctttctacagccgttggcttgctggttctaaactgtga

SEQ ID NO: 6 - DNA, 1296 bp, Zea mays
atggattgggatctcaacgcggcgggcgcgtgggacctcgcggagctggagcaggaccacgcggccgcggcgccgtcgtcggggggccacgccgccaatgctgccgcggcgggcacggggacggagagccgcccgccggcgcccggggcagcaggggcacccgccgagtgctccgtggacctgaagctgggcgggatgggcgagtgcgagcccggcgcggcccgcagggagagggaggccgcggcgggggcggcgaagcggccgcgccccgccgggcccggcgggcagcagcagcagcagtgcccgtcgtgcgcggtggacgggtgcagggcggacctgggcaagtgccgcgactaccaccggcggcacaaggtgtgcgaggcgcactccaagacccccgtcgtcgtcgtcgccggccgcgagatgcgcttctgccagcagtgcagcaggttccatctacttgcagagttcgacgccgacaagcgcagctgcagaaagcgtctggacgggcacaatcgccgccgcaggaagccacagccagacaccatggcttctgctagctttatcgcaagccagcaaggcacgcgattctcaccatttgcgcatccaagactggaggcgagctggccgccgggggtgatgaaaaccgaggagagtccatatcacatcactcaccaaatccctctgggctccagcagcagcagcaggcagcagcatttcgtggctctgggagccgccacgcctgcctacgccaaggaaggccggcgcttccctttcctgcaggagggcgagataagcttcgccaccggcgtggtgctggagccgccggcggcggctccagcgtgccagccgctcctcaggacgggagcaccatccgagagcagcggcgccggcggcagtaagatgttctccgatcaggggctggctcgcgtgctcgactcggactgtgctctctctcttctgtcagcgccggccaactcctccggcatcgacgtcagcaggatggtccgcccgactgaacacgtccccatggcccagcagcccgtggtcccgggcctgcagttcggcagcgcgtcgtggttcccgcgcccccaggcttccacgggcggctccttcgtccccttctgccccgccgcggtggagggcgagcagcagctgaacgccgtgctgggccccaacgacagcgaggtgagcatgaactacggcgggatgttccacgtcggcggcggcagcggcggcggcgagggctcctcggacggcggcacctcgtcgtcgatgcccttctcgtggcagtag

SEQ ID NO: 7 - DNA, 1068 bp, Zea mays
atgatgcgctgcgccgccgccgcgcttgcggtcgccctcatcgctgccgttgccgccgcaaccgctgcggggtcgccggccgcgggcacgtgcgcgcggaggggcgcgccgccgttcctcgacgccgtcggatcccgctgccccttcgtccggatcgacccgtccccgcctctcgagatcaatgaaccatctttacttttagccgctgctgggcatattttgattaaagttccttgtttatatcgattaataaaatggaatttctgctggtgcctcgaatgtggatgggttatattgcgaatttggaaagttgtggtttcttatataccttgtcttctgctgaaggtgagaggagagactgttgatactgagttgaaccttcgaaggaggggtgcttcatactccattctcttttatgctgcatggtgtccattttctagcaaactgcgaccaatatttggaactctcagcactatgtaccctcagatacatcactttactgttgaagaatcttctgctacaccaagcctgttttcaagatatggagtccgtggtttcccagccattcttcttgtaaatgagactacgatggttcgatatcggggttcaaaagatcttaactctctggtcgatttctataaagaaactacaggtctcgatccaattgcatatattgatgttgttgaacaagagagcacgggaagcttgagctcagttatgccatgggatcgttctattcgtgaaatggccaaagatgagatgtatttgttagttgcagttctttttattatcgtgaaggttgtagcacacttcatacctgttgtcatgtctcatctgagagctttcttagttgttcgtgtccaaaacttgaacctagggatccgtaggggatcaaaccagctcctggaacgagccttgaatgttcttgatgtaaggaggctttggagcaagctgaggctgagcaataaggcaacagacttgaggaagggagcaagtaatgcccgagcttgggcttcctcatttccttctgtttcactgggtgaaccttcatcttcaagacaagcttag

SEQ ID NO: 8 - DNA, 2472 bp, Zea mays
atgcatagactccagttctcctctctccctctctctctcggtcttaaaaatccagcgccaacgcggccgccggacgcgcattgctctccctccccgcctcgtctcctcacttcattctcgccacatcttcctctgctcccctcctcccaggtggcgttcttggagctccagctcctcgagctgcgtctgtctacgcttgggtggcggcagcccgcaatggggaggagcagccgagcctgctcccttctcggttccgcggcccagctgctcctcctgctgctgctctcgctcggctccgcggccgcccagaagggctccacatggaagaccctgagcggcaaggctccagtaatcgttgctaagggcgggttctccggtctatttcctgattccagtgattttgcttatcggattcttgggaccattagctcccctgacacagtcatgtggtgtgatgttcggttgacaaaggatggcgatggtatctgcctaccgagcataaacatggataactgcacaatgatagacaatgtttttccagaagggaagaagacctacaatgttaatggtgtatctacggtgggatggttctccgtggactatacgagcactgatctgctgccaaacgtgacactgaagcaatcggtcctatctcgtacccctgtttatgatggttccatgttgataaattctgttgaaaatgttttcacctcatttaacgcctctgcagtttggttaaatgtccagcaagacagtttctacagccagtttaagcttagcatgcgaaactatatcctgtctttatcgaaacaattcattactgattacatctcatcgcctgaagtgaacttcctcaccagtatatctggaagagttagcaagaagacaaagcttgtgttccgctttcttgacgaaggctctattgagccatcgacaaaccagacatatgggtccatgttgaaaaatctaacatttgtcaagacttttgcctctggaatacttgttcccaaaagctatatctggcctgttacaccagataattacctactgccttatacttcagttgttgatgatgctcacaaagcggggctagaaatctatgctgctgattttgcaaatgactttactatcagctataactacagctttgatccattagcggaatatctttccttcattggtaacagtgccttctctgtcgatggtgtgttgactgatttcccgattactccttcagaggcagttggttgctttagtaacctgaacaacagcaagatcgaccatgctaaacctctggttatctctcataatggtgctagcggtgactacccagactgcaccgaccaagcttatgaaaaggcagttgctgatggtgcagatgtcattgactgtcctgttcaagtgaccaaagatggcatactgatatgcatgagttctgttgacctaatggatgtcactactgttggaaaatcatcatttacttcgcaagtaactaccatcaacgatctgaaggctggtcctggagtcttcaccttcaaccttacttgggatgatatttctaagaacctacagcccatgatatcgaacccaatgagcacctataaactgtacagaaatcccagaaacaagaatgcaggaaatttcatgagattatcagactttttgacgtttgcaaagggaaaggatttgtcaggaatcatgataactgttgagcatgctgcattcatggcagagaagcttggatttggagtggtagacgcagtggtcaaagcacttgatgactctggttatagcaaacagactgcccagaatgttatgattcagtcaaccaacagctcggtgctaaagaagttcaagcaggaaaccaagtacagccttgtctacatgattgaagaaggtgtcagagatgccgcaccttcatcccttgcagacattaagaagtttgctaatgccgtctctgttagcaccacatctgttttaccacagacccattattatttgacaaaccagaccaataagcttgtcacgtcccttcagtctgcgggcctccaagtttacgtctatgtgctcatgaatgagtttgcatctcagccgaatgacttcttcgcagacgccacttcacagattaatgcttatgtgcaaggtgctaaggtggacgggatcatcactgatttccctgggactgctcacagatacaaattgaactcctgcacgagcatgggaaacagcgcaccactatttatgcagcctccgcaaccaggtagcctccttttaaccatggccccagatgtacagccaccagcagcggcgccaatgccgctcttgacggacgctgacgttgcagaaccagccctacctccagtcagtaacaccacaacagctgcatctccttcgcatgccgccctcagaatgcgaaccgatgtctcgatcctcatcgcattgctgatgctatgtgcttccctcctcatctga

SEQ ID NO: 9 - DNA, 693 bp, Zea mays
atggtagtgggggcatcatcggagtccggcgccgcggcttccggaggtacctctagtacggctccgccgcggaaggggaagtcgtgcaagggctgcctttactactcgtcagtgctcaagtcccgcggctacaacccaatctgcgttgggatcccccgttccatcccccaagttcctaactacgtggtggatgagcctaaggaggacgcgacagcgcaggggcatgatctcaggcggttcaggtacgggtgcgcgggttactccatattcgtgaacagggacggccaaggtggtgagggcgagggcaagacgttgttgccgtattgcagaggcctcgagttattggtggacagcagattggtcgagagaaaaccatccgcagctgaacaagctccagcacatgttacaaaggatgcagcagctaccacccgctctcaccaacaaggacaacagagacctgcgaacttgtcgaggcaggaattcttggagaggaaagttactgtccatagcttttctctgtccccagcccccactaggatatattgccttgctgatgtatacggatggcacaggtttaagaagagtgctggactggtcgcttcaggggtcgcgaagaatctaaacaaaacggccaattatatcaaggaaaatattcatgacatattgtaccacgatcgtcgcccaccaaagtag

SEQ ID NO: 10 - DNA, 849 bp, Synechocystis sp.
atggcttcctctatgctctcttccgctactatggttgcctctccggctcaggccactatggtcgctcctttcaacggacttaagtcctccgctgccttcccagccacccgcaaggctaacaacgacattacttccatcacaagcaacggcggaagagttaactgcatgcaggtgtggcctccgattggaaagaagaagtttgagactctctcttaccttcctgaccttaccgattccggtggtcgcgtcaactgcatgcaggccatggctgcttatctgtttaatcaagaaaatgaaccggatgaaagcgatagcataacgctctacgatgaagcggggcggcctttagattgctacgtggaaaactccctcgaacaagaggacgctcaatacttattattgatgcccgttgacatcccggtggtaattattgcctgggaagaagatgacgatgaaacagaagatgctgaggcaattttactagaggaccaagaagaaattagtggcatttttgcagatgctaaggccgtactggcagaattagatttgtcgttgaagtacactgcctacaccctcaccgtcagtggtgaactgccccccattgaagatgaagatattctcaccctggaaattgaagggaacgatccggctggggaaatggaagaggaagaattgcaattcctggctagtttttaccacgaggaagaacgctatagcatttacactcccctagcgcctttattatttcttgctaaagccattagtgaaacacaaattgagttggtgcaccccgacaatgatgaactcaaacatattctagaagagcttttatttgaagatgcggactag

SEQ ID NO: 11 - DNA, 1437 bp, Xenorhabdus nematophila
atggcttcctctatgctctcttccgctactatggttgcctctccggctcaggccactatggtcgctcctttcaacggacttaagtcctccgctgccttcccagccacccgcaaggctaacaacgacattacttccatcacaagcaacggcggaagagttaactgcatgcaggtgtggcctccgattggaaagaagaagtttgagactctctcttaccttcctgaccttaccgattccggtggtcgcgtcaactgcatgcaggccatggtgatacaagagaatcctttctcatcccgcattgctaacagggcaaagaacattaatgcctcagtggcagtagggctggcagatatcgttgccaaattgaaaagtgaaggccgtgacattattgggttgaatgaaggtgagctggatttcagtactggcgccactattgttaatgaaacccttcgggcattgatagatggcagaactcgttatagctggctcaacggtgaacctgaattaagagagaagatctgccaaaaagtatttgaagataaccggattaaagcgacgcctgaaaatgtcatcgtgaccaatggctccaaacaagttatttatgaaatattacagacagtcattaaccccggcgatgaagtgattattcccgtaccctgttgggcgacatatcttgaagctgtcaaattagccggagggaaagcggttttaattgaaaatattggtgttgatttggatgttgaaaaaatcaaacaggctatcactgacaataccaaacttatcattatcaatacgccgaataatccgaccggagccgtttactcaaaatccgcattacagacactgtgccaaatcgtcaaagaaaaacaaatattcgtgttatctgatgaagcctatgaacaaattgtatttgatgatgaacatcatagcttggctgccattgatgacaatgaatacattattacggtgcaaacattttcaaaaagctttgccatgacgggctaccgtattggctatatgatagcccatcctgaattaatctgcagagtctctgacctgcatggtcatatgaccgataatgtctgcacttttgcccagtatggtgcgattgcctcacttgaaaagcccaaggatttgtatcaagaaaggttagagatactcaaaaaacgacgtgatcgatcataccaatatgcccgcgaatttttcgaatgtgagcttcctgctggcgcattttacctgttccccaatgttgaaaaatacctcaatgaccgttgtcgtgatgccactcaattctgtgaatatctgctcacccatgcaggggtagccctgatcccggcagaagcctgtctttatcgtggacatgtacgaatttcttttgctgcgtcaatggatgctattgagcagggatttgaacggatcgcaaacgtattgcggtag

SEQ ID NO: 12 - DNA, 1716 bp, Corynebacterium glutamicum
atgacgcaaccaggacagaccaccacgacttcgcacgaagcgatcgatgcgttcaagagaatcgtcggcgacgaacatgtactgacctctgagcgtgccacgatgccattcagcaaaggctatcgattcggcggaggaccagtcttcgccgtggtgcgccccggcacgctggtcgagatgtggcgggcgctgcaggtatccgtcgacaacaacctcatcgtcatcccgcaggcatcgaacacgggcctgactggtggatccggccccggcttccaagactacgatcgccccattgtgatcatctcgactcaccgcatcgatgaggtgcacctcatcaacgacgcgcgcgaggcgatctcgctcgcgggcaccccgctgacacacctgaccgacgcgctcgccaagcaccagcgcgagccgcactcggtgatcgggtcgacatcaatcggcgcctcggtcatcggcggcatcgcgaacaactcgggcggcagccagattcgcaagggtccggcattcacgcgcgaagcgatcttcgcccgcgtcaacgacgacggcaaggtcgagctggtcaatcacctgggcatctcgctcggagacgaccctgaggtcgcactcgaccgtctacagcgcggcgagtggtctcccgaggatgtcaccccagctcccgaagactcgaacgagaccgagtacgccgagcacttgcgcaagatcgtgccttcgcctgctcgctacaatgcgaaccccgagtacctgttcgaggcttccggctcggccggcaagctgatggtgttcgcggtgcgcacccgcaccttccctcgcgaagtgcacccgaccgtgttttacatcggcacgaacaacacgcacgagctcgaagagatccgtcggttgttcctcgaagccgacatgccgctgcctatctctggtgagtacatgggccgcagtgccttcgacttggccgagaagtacggcaaagacaccttcgtcttcctgaagttcatgagtccagcgctgcagacgcgcatgttctcgttcaagacgtgggccaacggcttgttctcgaagattcccggcattggtccgaccttcgccgacacggtatcgcaagccatgttcagcgtgctgcccaaccagctgcccaagcgcatgatggagtaccgcaaccgtttcgagcatcacctgctgctcaccgtcagcgagtcgcagaaggccgcgagcgagaagatgctcaaggagttcttcgcagagcccgagcacactggtgagttcttcatctgcacgtctgatgaagaaaagagcgcgtcgctcaaccggttcggcgcggccagtgccgccactcgctacgccgcgttgaagcgccggcacatcgcagggctcatccccatcgatgtggccctgcgtcgcgacgattggaactggctcgaggtgctgccggaggagatcgacgaccagcttgaggtcaaggcgtattacgggcacttcttctgccatgtgatgcaccaggactatgtcgccaagcagggcgtggatctcgaggcgctgcacgaccgcatccagcacctgctggaggagcgcggcgcgaagctgcccgccgagcacaactacggtcgcatctacaagctgccggagtccatggaagagcacttcaaggagctcgatccgacgaatacgttcaacgccggtatcggcggcacgtcgccgcacaaggactgggcctag

SEQ ID NO: 13 - DNA, 1191 bp, Nostoc sp. PCC 7120
atgcctaatcaattatctaatcaaaccttgtctaatcaaactgctagttcattaatcaccctcgcggttgccccggcaaaagttatccgtggctgtaatatattgcaggtagccgccacagaaattgccaaattgggcagtcgtcctttaattgtggcaggtaatagcaccgttgctatcagccaagagaaactacagccaattttagaagcccagaatctgcacgttgcccaagcctcttatggtgcagattgtgcggaagttagcttaaaagccttgaggaaagcagccaaagaacataaagccgatacgattatcgggattggtgggggcaaagctttagatacagcaaagttagttgcccatcagttagatatacctatagtcacaattcccacatcggcagctacctgtgccgcttggacggcgctatcaaatgtatattctgaggacggggcgtttctttacgatgtggctttatctcgctgtcccgacttgctgatacttgactacgacttgatccaaactgcaccacaacatacactagtggcagggattggggatgcgatcgctaaatggtatgaagcttctgttagtagtgggcatttagaacaaactttaattatctccgcagtccaacaagcgcgagttttacgcgatattttattccaaaagtcggcaattgccttacaacaaccaggtagtgaagcttggcgggaagttgttgatgccacagttttactagctggtgtcatcggtggactcggtggggcgcagtgccgtacagtagccgcccatgcagtccataatggtttaacccacattgccggacacagtagtatccacggtgaaaaagttgcctacggtattttggtacagctgcgtctggaagaaatggtacaaggtaatcaattagcagccgcctcacgacaacaactattaaagttttatgcagagattggactgccacaaaaattaggagacttggggttgggtaatattaccttaggcgagttacaaacagccgccgaaatcgctttaacacctcaatctgacattcatcgtctaccattcaaagttgtgttggaacagttaatggcagcgatggtttctaccactgcaccaacagatagtagagactcagttcatcgtgtctccaccaggggaataagtgacgaggttgaggaatga

SEQ ID NO: 14 - DNA, 1137 bp, Bacillus subtilis
atgatcataggggttcctaaagagataaaaaacaatgaaaaccgtgtcgcattaacacccgggggcgtttctcagctcatttcaaacggccaccgggtgctggttgaaacaggcgcgggccttggaagcggatttgaaaatgaagcctatgagtcagcaggagcggaaatcattgctgatccgaagcaggtctgggacgccgaaatggtcatgaaagtaaaagaaccgctgccggaagaatatgtttattttcgcaaaggacttgtgctgtttacgtaccttcatttagcagctgagcctgagcttgcacaggccttgaaggataaaggagtaactgccatcgcatatgaaacggtcagtgaaggccggacattgcctcttctgacgccaatgtcagaggttgcgggcagaatggcagcgcaaatcggcgctcaattcttagaaaagcctaaaggcggaaaaggcattctgcttgccggggtgcctggcgtttcccgcggaaaagtaacaattatcggaggaggcgttgtcgggacaaacgcggcgaaaatggctgtcggcctcggtgcagatgtgacgatcattgacttaaacgcagaccgcttgcgccagcttgatgacatcttcggccatcagattaaaacgttaatttctaatccggtcaatattgctgatgctgtggcggaagcggatctcctcatttgcgcggtattaattccgggtgctaaagctccgactcttgtcactgaggaaatggtaaaacaaatgaaacccggttcagttattgttgatgtagcgatcgaccaaggcggcatcgtcgaaactgtcgaccatatcacaacacatgatcagccaacatatgaaaaacacggggttgtgcattatgctgtagcgaacatgccaggcgcagtccctcgtacatcaacaatcgccctgactaacgttactgttccatacgcgctgcaaatcgcgaacaaaggggcagtaaaagcgctcgcagacaatacggcactgagagcgggtttaaacaccgcaaacggacacgtgacctatgaagctgtagcaagagatctaggctatgagtatgttcctgccgagaaagctttacaggatgaatcatctgtggcgggtgcttaa

SEQ ID NO: 15 - DNA, 1224 bp, Medicago truncatula
atggctccggcagcagcatcttcagactcctctatacagcctagagatgtttgcatcgttggtgttgcacgtacaccaatgggtgcgtttcttggtactctttcatctgtacctgccaccaagctaggctcgatagctattgaagctgctcttaaaagggccaatgttgatccagcaattgtggaagaagtattctttgggaatgtccttagtgctaatttggggcaagctcctgctagacaagctgctcttggagcaggactatcgaaatcagtagtctgcacaactgttaacaaagtttgtgcgtcaggaatgaaagctacaatgcttgccgcccaaagtattcaattgggcataaatgacgttgttgtggccggtggtatggaaaacatgtctagtgtacctaagtacctggcagaagcaagaaaaggatcccgccttggacacgattcactagttgatgggatgttaaaagatggtctgtgggatgtttataaggatgtaggtatgggtgtgtgtgctgaactctgtgcagataaccattcaataacaagagaagaccaggataattatgcagttcagagttttgaacgtggaatttctgcccaagaaaatggttactttgggtgggaaatcactccggttgaagtctctggtggaaggggaagaccatcaacaattgttgacaaggatgagggtctaggaaagtttgatgctgccaagttacgcaaacttcgaccaagcttcaaggagactggaggctctgttactgccggcaatgcttccagcataagtgatggtgctgctgcattagttttggtgagtggagagaaggcattgaagcttgggcttcaggtcattgcgaaaatcactggatacgctgatgctgctcaggacccagagttatttacaacagctccagccattgccatccccaaagctattgccaatgcagggctggagacttcaaaaattgatttttatgaaattaatgaagcctttgcggttgtggctcttgcaaatcagaaacttcttggactagattcggcaaaagtaaatgtacatggtggagctgtatcattgggccatcctcttggttgcagtggtgctcgtatcctggtgacacttttgggggtactgaagcagaaaaacggaaagtacggtgtaggtggtgtttgcaacggaggaggtggtgcatctgcccttgttgtggagctcctgtga

SEQ ID NO: 16 - DNA, 1224 bp, Gossypium hirsutum
atggctccagtagcagcaacatcttcagattctataaagcctagagatgtttgtgttgttggtgttgcacgtactccaatgggtggatttcttggctctctgtcatctttatctgccaccaagcttggttcgatagccatagaagctgctcttaaaagggcaaatgttgatccatcacttgtgcaagaagttttctttggcaatgtactcagcgcgaatttgggacaggctccagctagacaggctgcgctaggtgcaggaattcctaactcggtcatatgcaccactgttaacaaagtttgtgcatctgggatgaaagcaacaatgcttgccgcacagagtattcagttgggcattaatgatgttgttgtggctggtggcatggagagcatgtctaatgtacctaaatatttgggagaagcaaggaaaggatctcggcttgggcatgatactcttgtcgatggaatgttgaaagatggactatgggatgtttatagtgattgtggcatgggcagctgtgctgaattatgtgctgagaaacatgctattacaagggaggagcaggataactttgctgttcaaagctttgagcgtggcattgctgctcaacagggtggagcctttgcatgggaaattgctccggttgaagttcctggggggaggggaaagccatccatcatagtcgacaaggatgaaggtctaggaaagtttgatgctgcaaaattgaggaagctgcgaccaagtttcaaggataatggaggcactgttacagctggcaatgcctccagtataagtgatggtgctgctgctttaatcctagtcagtggagaaaaggcacttgagctgggattgcaagtgattgcaaagattgcaggatatgcagatgctgcacaggcaccagagtttttcacaacagcgccagcccttgcaatacccaaagccatttcaaatgctggcttggatgcttctcaagttgattactacgaaatcaatgaagcctttgctgttgtggctcttgcaaatcagaaactgcttggccttaatccagagaaggttaatgtgaatggtggagctgtatccttgggacatcctttgggttgcagtggagctcgtatcttggtcacgcttttgggggttttgaagcagaaaaatgggaaatacggagttggtggtgtttgcaatggtggtggaggtgcatctgcactcgttgtagagcttctgtaa

SEQ ID NO: 17 - DNA, 477 bp, Glycine max
atgtataagttttctccttataaaagctcatgtcttgcccttctatttgattatatccaaggcaagaacaactacaagcaaaaaattgagatgacagcgcctgtgatcacagaagtttcacctagtgatggacccttttgtaaatcctcatttgttgtcagcttctttgtgccaaaattgaaccaagcaaaccctcctcctgcaaagggtctccatgtccaaagatggaacaatatgtatgtggcagcaaggcagtttggtggacacgtaaacgattcaaatgttgcggtggaagccgctgtgttgcgagctagtattgaaggcacaaaatggtctggtgccattgacaaaaaccagaaagctggccatgcttctgtttacactgtggcacaatacaatgacccttttgaatatcagaatagggtgaatgagatatggttcttgtttgaaatggaaagtgaaaggcatgcaatttga

SEQ ID NO: 18 - DNA, 1638 bp, Glycine max
atggcttcctctatgctctcttccgctactatggttgcctctccggctcaggccactatggtcgctcctttcaacggacttaagtcctccgctgccttcccagccacccgcaaggctaacaacgacattacttccatcacaagcaacggcggaagagttaactgcatgcaggtgtggcctccgattggaaagaagaagtttgagactctctcttaccttcctgaccttaccgattccggtggtcgcgtcaactgcatgcaggccatgtgtgctgtttcatctacttacccacagtatgttgtcgcaaaattcggcggtaccagtgtggcagactttgatgccatgaatcactgtgccgatattattctggcaaacgcagatgtccgcgtagtcgttttgtccgcttctgcgggggtgactaatttgctggtcgcattggcgacgggctgtgataacgataaacgtaaaaagtgcctgaaacagatccgtgacattcaatatgcgattattgaccgattaaatgacgtgaatgtgatatgtgaagaaattgatcgcctgctggaaaatatcgagatgttgtcagaagccgcatcattggcaacctctgaggcgttaactgatgaattggtcagccacggtgaagtgatgtccacattgctattcgtagaattactgcgtcaacgcaatgtaaatgcagagtggtttgatatccgcagggtcatgcgaacgaatgatcacttcggacgagcagaaccagactcccttcaactccatatatcggcggttgagctccttcagcctcgtttgaataatacagttgttatcacacaaggttttatcggcagagaagaaaaaggccgcacaactacactgggacgtggtggcagtgattataccgccgccttactcggcgaagcgctgaatttacagcgtgttgatatttggacggatgttcccggcatctataccactgatccccgtgttgcaccaacagccaagcgcatcgataaaattgcatttgatgaggcagcagagatggcgacatttggtgctaagatcctccacccagctacgttgctacctgccattcgttgcggtattcctgtttttgttggatcaagtaaagatccacaggccggcggcacactggtttgtgacaaaaccgaaaacccgcccctgtttcgtgcactggcattacgccgcaaacagacgttattaaccttgcacagcctaaaaatgttacatgcaaggggctttctggcggaagtttttacgctgcttttacgccataacatttcagtagatttgattaccacctcagaagtcagtgtcgccctaatcctggatacaactggctctaccagcaccaatggcagtctgctgactaatgctctgctgaccgaactttctacattatgtcgtgtagaagttgaagaagatctggcgctggtggcaattatcggtaatgagctttcacaggctaaagggttggggaaagaaatttttggcacactggaatcttttaatatccggatgatcagctatggcgcaagcagccacaatgtatgtttgctcgttcccggtcaagatgcggaatcagtcattcagaaactgcatcagaatttgtttaaggtgtga

SEQ ID NO: 19 - DNA, 1374 bp, Glycine max
ttaagattcaaacaaaccccgatgcagcgtctggatcacctgttctgcatctttaccgggaaccagcaaacagacattatggctgctcgcgccacagctgatcatgcgaatattgaatgattccagtgtgccaaaaatttctttgcctaaccctttggcccgtgaaagttcattaccgataattgccaccagtgccatatcttcttccacttctacgtgacataatgtggaaagctcagtcagcaaagcattagtcagcaggctgccattcgtgctggtggagccggttgtatccaggatcagggcgatgctcacttctgatgtggtaatcagatccactgaaatattatggcgcgaaagcagggtaaaaacttccgcaagaaagcctcttgcatgcagcattttcaggctgtgaagtgtcagtaaagtttgcttgcggcgtaacgccagtgctcgatatagcggtgggttgccgattttatcacaaacgatagtaccacctgcttttgggtctttgctggagccaacaaaaaccggtataccgcaacgtaccgctggcaataatgtcgccggatgaaggattttggcaccgaatgttgccatctcagcggcttcatcaaaagcaattctatcaatgcgtttagcggtaggcgcaacacggggatcggttgtgtaaatacccggaacatctgtccagatatcaacacgatgtaatccaagtgcttctcccaacaaagcggcggtataatcactgcctccccgtcccaatgttgttgtccggcctttttcttcccggccaataaagccttgtgtgataacgatggtattgtccagacgagaatgaagatgttccattgtcaaagcatgaagctgaagagtgtctggttctgcctgcccaaaaatattattagtgcgcatgatgcgacggatatcaaaccattcggcgtctgtattgcgttggcgcagcaattccacaaacagcaaagtggacatgatttcaccgtggctaactaattcatcggtcagtgcatcagaagttgcgagcgatgcggcttctgatattgtctcaatattttccagcaggcgatcaatttcttctcggatcacatccgttgtattcaatcgctcaatgatggcatattgaatatcacgaatctgtttcagatgattctcccgtttatcactatcacaacctgccgccagtgcaatcagcaaattggttacgccagcagacgcagacaggacaaccactcggactttggtgtttgccaaaataatgtcggcacagttattcatggcatcaaaatctgccacactagtacccccgaattttgctacaacatattgtgaatgaggagacgaaacagcatacat

SEQ ID NO: 20 - DNA, 2694 bp, Glycine max
atggcttcctctatgctctcttccgctactatggttgcctctccggctcaggccactatggtcgctcctttcaacggacttaagtcctccgctgccttcccagccacccgcaaggctaacaacgacattacttccatcacaagcaacggcggaagagttaactgcatgcaggtgtggcctccgattggaaagaagaagtttgagactctctcttaccttcctgaccttaccgattccggtggtcgcgtcaactgcatgcaggccagtgtgattgcgcaggcaggggcgaaaggtcgtcagctgcataaatttggtggcagtagtctggctgatgtgaagtgttatttgcgtgtcgcgggcattatggcggagtactctcagcctgacgatatgatggtggtttccgccgccggtagcaccactaaccagttgattaactggttgaaactaagccagaccgatcgtctctctgcgcatcaggttcaacaaacgctgcgtcgctatcagtgcgatctgattagcggtctgctacccgctgaagaagccgatagcctcattagcgcttttgtcagcgaccttgagcgcctggcggcgctgctcgacagcggtattaacgacgcagtgtatgcggaagtggtgggccacggggaagtatggtcggcacgtctgatgtctgcggtacttaatcaacaagggctgccagcggcctggcttgatgcccgcgagtttttacgcgctgaacgcgccgcacaaccgcaggttgatgaagggctttcttacccgttgctgcaacagctgctggtgcaacatccgggcaaacgtctggtggtgaccggatttatcagccgcaacaacgccggtgaaacggtgctgctggggcgtaacggttccgactattccgcgacacaaatcggtgcgctggcgggtgtttctcgcgtaaccatctggagcgacgtcgccggggtatacagtgccgacccgcgtaaagtgaaagatgcctgcctgctgccgttgctgcgtctggatgaggccagcgaactggcgcgcctggcggctcccgttcttcacgcccgtactttacagccggtttctggcagcgaaatcgacctgcaactgcgctgtagctacacgccggatcaaggttccacgcgcattgaacgcgtgctggcctccggtactggtgcgcgtattgtcaccagccacgatgatgtctgtttgattgagtttcaggtgcccgccagtcaggatttcaaactggcgcataaagagatcgaccaaatcctgaaacgcgcgcaggtacgcccgctggcggttggcgtacataacgatcgccagttgctgcaattttgctacacctcagaagtggccgacagtgcgctgaaaatcctcgacgaagcgggattacctggcgaactgcgcctgcgtcaggggctggcgctggtggcgatggtcggtgcaggcgtcacccgtaacccgctgcattgccaccgcttctggcagcaactgaaaggccagccggtcgaatttacctggcagtccgatgacggcatcagcctggtggcagtactgcgcaccggcccgaccgaaagcctgattcaggggctgcatcagtccgtcttccgcgcagaaaaacgcatcggcctggtattgttcggtaagggcaatatcggttcccgttggctggaactgttcgcccgtgagcagagcacgctttcggcacgtaccggctttgagtttgtgctggcaggtgtggtggacagccgccgcagcctgttgagctatgacgggctggacgccagccgcgcgttagccttcttcaacgatgaagcggttgagcaggatgaagagtcgttgttcctgtggatgcgcgcccatccgtatgatgatttagtggtgctggacgttaccgccagccagcagcttgctgatcagtatcttgatttcgccagccacggtttccacgttatcagcgccaacaaactggcgggagccagcgacagcaataaatatcgccagatccacgacgccttcgaaaaaaccgggcgtcactggctgtacaatgccaccgtcggtgcgggcttgccgatcaaccacaccgtgcgcgatctgatcgacagcggcgatactattttgtcgatcagcgggatcttctccggcacgctctcctggctgttcctgcaattcgacggtagcgtgccgtttaccgagctggtggatcaggcgtggcagcagggcttaaccgaacctgacccgcgtgacgatctctctggcaaagacgtgatgcgcaagctggtgattctggcgcgtgaagcaggttacaacatcgaaccggatcaggtacgtgtggaatcgctggtgcctgctcattgcgaaggcggcagcatcgaccatttctttgaaaatggcgatgaactgaacgagcagatggtgcaacggctggaagcggcccgcgaaatggggctggtgctgcgctacgtggcgcgtttcgatgccaacggtaaagcgcgtgtaggcgtggaagcggtgcgtgaagatcatccgttggcatcactgctgccgtgcgataacgtctttgccatcgaaagccgctggtatcgcgataaccctctggtgatccgcggacctggcgctgggcgcgacgtcaccgccggggcgattcagtcggatatcaaccggctggcacagttgttgtaa

SEQ ID NO: 21 - DNA, 1185 bp, Glycine max
atgactccctcgtgcgaaggttccttcaatgcaaaaagtgcaaggttaagctcactatactccctcatggacttcccagttcaaagggactctgccttggacaattctcaaccaaattctcatcaaagcaatgaccaaaattctggtaagtttgcaaaggctgctaattctagcagcaaaggtcttgatcgttccttagtgataaactcacctaaaggatcaccgggaagacaaaagaaccctttaaattctgatacatcaaacatggttccaagaagtgaggaaacaacacctcctgatgagcaatctgaagctgttggtcatgatagtattcatggatctcgtggtcaatattttaaccaaacctcaagctcagcaagacatagagcaaagggaaaagctcatgatactaaacaaaaatactgtgatgaaggcttgttggaatcttcttccctatgctccattggagcctcaaataacagaaacgtgtgtagcaggacacatgatgatatcgatgactcaacgtatttaagcaataatgatgaagaaccagaagatgtagtgaaggaaaagcctgcttgggaaggcaccggtgtcaagagaagtaggaatgcagaagttcataatttatgtgaaaggaagcgaagagataagatcaacaagaggatgcgtatattgaaggagctcataccaaattgcaataagacggacaaagcttcaatgcttgatgatgccatcgaatatcttaagaccctaaagcttcagttacagatgatgtcaatgggtgctggattttgtatgccgttcatgatgctacctaatgctgctcatcatatgatgaacacaccccatttacatcagttaatgggacttggtatggggttcaggccaggcacagccatgccttgtagcctccctcagttccctattacacctttgcatggtatcactgacaacagagttcacatgtttggtttccctaaccaagttccacccatgccaatttctcatgcacctttcattccaatgcttggaaatccttctacacaacccacccctcttgcaactagcacaaacatcaacctggcggaaaaccctgcttcttcccagttaactactctaatggcctcgtcccccaagaacttgtttattagtggacaagctgaatatgcaacaaagcaatag

SEQ ID NO: 22 - DNA, 1783 bp, Glycine max
tcgctacgtaggcccccccccccattctctttttatattcaacaagcaagtttgtctttttttcttctttttttcttctcttctttatggtttttagttactaaaagtgtgtggttttattatgttccagttatggcaaaggttcccttgagctggtatgggaaaatggtcaacttcacgtgcagcaaggaggttcatcatcaacatcaagtgtcgtcacacgaatgactccctcgtgcgaaggttccttcaatgcaaaaagtgcaaggttaagctcactatactccctcatggacttcccagttcaaagggactctgccttggacaattctcaaccaaattctcatcaaagcaatgaccaaaattctggtaagtttgcaaaggctgctaattctagcagcaaaggtcttgatcgttccttagtgataaactcacctaaaggatcaccgggaagacaaaagaaccctttaaattctgatacatcaaacatggttccaagaagtgaggaaacaacacctcctgatgagcaatctgaagctgttggtcatgatagtattcatggatctcgtggtcaatattttaaccaaacctcaagctcagcaagacatagagcaaagggaaaagctcatgatactaaacaaaaatactgtgatgaaggcttgttggaatcttcttccctatgctccattggagcctcaaataacagaaacgtgtgtagcaggacacatgatgatatcgatgactcaacgtatttaagcaataatgatgaagaaccagaagatgtagtgaaggaaaagcctgcttgggaaggcaccggtgtcaagagaagtaggaatgcagaagttcataatttatgtgaaaggaagcgaagagataagatcaacaagaggatgcgtatattgaaggagctcataccaaattgcaataagacggacaaagcttcaatgcttgatgatgccatcgaatatcttaagaccctaaagcttcagttacagatgatgtcaatgggtgctggattttgtatgccgttcatgatgctacctaatgctgctcatcatatgatgaacacaccccatttacatcagttaatgggacttggtatggggttcaggccaggcacagccatgccttgtagcctccctcagttccctattacacctttgcatggtatcactgacaacagagttcacatgtttggtttccctaaccaagttccacccatgccaatttctcatgcacctttcattccaatgcttggaaatccttttacacaacccacccctcttgcaactagcacaaacatcaacctggcggaaaaccctgcttcttcccagttaactactctaatggcctcgtcccccaagaacttgtttattagtggacaagctgaatatgcaacaaagcaataagcaccgagtcaggtttcccttccccactagccatcaatttgtatcccaaaaagagaagaaataaaatttagcatgtctaaggcaattgctagaaaagtcgatttaaagattgtgggatctgataataaatattcagcaactagacactgacacttcatggttggatgctttactgcttaatttgaaacactgatgaaaatggtcattggattcattggaagcatagaagtatggttcttagttatcatccagtaccattctgtatgaattattcaaattaaggtgtcttattaggcgatgaaggcttctaataacaacacaacatttagaagtcaaaaaaaaaaaaaaaaaaaaaaaaaaaaaaaaaaaaaaaa

SEQ ID NO: 23 - DNA, 1293 bp, Arabidopsis thaliana
atggaacaccaaggttggagttttgaggagaattatagtttgtccactaatagaagatctatcaggccacaagatgaactagtggagttattatggcgagatggacaagtggttctgcagagccaaactcatagagaacaaacccaaacccagaaacaagatcatcatgaagaagccctaagatccagcacctttcttgaagatcaagaaactgtctcttggatccaataccctccagatgaagacccattcgaacccgacgacttctcctcccacttcttctcaaccatggatcccctccagagaccaacctcagagacggttaagcctaagtccagtcctgaacctcctcaagtcatggttaagcctaaggcctgtcctgaccctcctcctcaagtcatgcctcctccaaaatttaggttaacaaattcatcatcggggattagggaaacagaaatggaacagtactcggtaacgaccgttggacctagccattgcggaagcaacccatcacagaacgatctcgatgtctcaatgagtcatgatcgaagcaaaaacatagaagaaaagcttaatccgaacgcaagttcctcatcaggtggctcctctggttgcagctttggcaaagatatcaaagaaatggctagtggaagatgcatcacaaccgaccgtaagagaaaacgtataaatcacactgacgaatctgtatctctatcagatgcaatcggtaacaagtcgaaccaacgatcaggatcaaaccgaaggagtcgagcagctgaagttcataatctctccgaaaggaggaggagagataggatcaatgagagaatgaaggctttgcaagaactaatacctcactgcagtaaaactgataaagcttcgattttagacgaagccatagattatttgaaatcacttcagttacagcttcaagtgatgtggatggggagtggaatggcggcggcggcggcttcggctccgatgatgttccccggagttcaacctcagcagttcatacgtcagatacagagcccggtacagttacctcgatttccggttatggatcagtctgcaattcagaacaatcccggtttagtttgccaaaacccggtacaaaaccagatcatctccgaccggtttgctagatacatcggtgggttcccacacatgcaggccgcgactcagatgcagccgatggagatgttgagatttagttcaccggcgggacagcaaagtcaacaaccgtcgtctgtgccgacgaagaccaccgacggttctcgtttggaccactag

SEQ ID NO: 24 - DNA, 1687 bp, Arabidopsis thaliana
tgtttctcaacaattttctggtctcttagagtgagaggagagagcgacagagttgtgttgggcgtggaacttggactagttccacatatcaggttatatagatcttctctttcaacttctgattcgtccagaagctttcctaatctgagatctgacatggaacaccaaggttggagttttgaggagaattatagtttgtccactaatagaagatctatcaggccacaagatgaactagtggagttattatggcgagatggacaagtggttctgcagagccaaactcatagagaacaaacccaaacccagaaacaagatcatcatgaagaagccctaagatccagcacctttcttgaagatcaagaaactgtctcttggatccaataccctccagatgaagacccattcgaacccgacgacttctcctcccacttcttctcaaccatggatcccctccagagaccaacctcagagacggttaagcctaagtccagtcctgaacctcctcaagtcatggttaagcctaaggcctgtcctgaccctcctcctcaagtcatgcctcctccaaaatttaggttaacaaattcatcatcggggattagggaaacagaaatggaacagtactcggtaacgaccgttggacctagccattgcggaagcaacccatcacagaacgatctcgatgtctcaatgagtcatgatcgaagcaaaaacatagaagaaaagcttaatccgaacgcaagttcctcatcaggtggctcctctggttgcagctttggcaaagatatcaaagaaatggctagtggaagatgcatcacaaccgaccgtaagagaaaacgtataaatcacactgacgaatctgtatctctatcagatgcaatcggtaacaagtcgaaccaacgatcaggatcaaaccgaaggagtcgagcagctgaagttcataatctctccgaaaggaggaggagagataggatcaatgagagaatgaaggctttgcaagaactaatacctcactgcagtaaaactgataaagcttcgattttagacgaagccatagattatttgaaatcacttcagttacagcttcaagtgatgtggatggggagtggaatggcggcggcggcggcttcggctccgatgatgttccccggagttcaacctcagcagttcatacgtcagatacagagcccggtacagttacctcgatttccggttatggatcagtctgcaattcagaacaatcccggtttagtttgccaaaacccggtacaaaaccagatcatctccgaccggtttgctagatacatcggtgggttcccacacatgcaggccgcgactcagatgcagccgatggagatgttgagatttagttcaccggcgggacagcaaagtcaacaaccgtcgtctgtgccgacgaagaccaccgacggttctcgtttggaccactaggttggtgagccactttgctacttccttatttttggtatgtttcttttttatatctatctttctgaacatacttaaaacgttcaaggatgtattattatagagtaaacgtgcaacttcattacgttattttctgtatatgtgagtttatgtatgtcaaaatgacatgatgagattttttgtaaacaacatcttaaaaacaggacatgtgatttttgtaatcgtaaaaaaaaaggtaaat

SEQ ID NO: 25 - DNA, 1473 bp, Glycine max
atgggtggatcagtgagggacgtgaagtcgaagggcgaggtcgacgaggtggtggcgagtggctctccggttatcctccacttctgggcgtcgtggtgcgaagcttccaagcacatggaccaactcttctctcacctttccactgatttccccaacgcccgcttcttaagggtcgaggccgaagagcaacccgagatttctgaggcttactccgtctccgctgttcctttctttgccttctgcaaggatgggaagacctttgatacattggagggagctgatccgtcaagcttagccaataaggttgctaaagtagcaggctcaattaaccctggagaatctgcatctcctgccagtcttgggatggctgcaggggcttctgttcttgaaacggtgaaagaattagcaaaagacaatgattcttcaaaggagaaaaatcaagttcaaccagggcttagtggtcctctgaaaaagagaattcagcagcttgttgactctaatcctgtcatgcttttcatgaaaggaactcctgaagagccaaaatgtggatttagcaggaaagttgttgttgtgttgaacgaagagagagtcaagtttggaagttttgatgtcctatcagactcagaggttcgtgaaggcttgaagaagttttccaattggcccacatttcctcagctttactgtaaaggagaacttcttggtgggtgtgacatagcaattgctatgcatgagagtggggaactgaaggaagtttttaaagatcatggaattgatactactaatgaagcaaaagagaaagaatcaggaaacggcaaaggtggcatctcaaaatctactgatttgagtacaaccttatcctctcgtctggaaagcctggtaaattcaagtgcagttatgctgtttatgaaaggaaagccagatgaacctaagtgtggtttcagtaggaaggtagttgaaattctccagcaagaaaatgttccctttgagagttttgacattcttactgatgaagaagttcgtcaagggcttaaggtttattcaaactggtccagttatcctcaactgtatatcaagggtgagcttattggtggatcagatattgtgttggagatgcaaaaaagcggagaacttaggaagaatttacacgagaaagggattcttcctgcagagaccattcaagatcgactgaagaatttgattgcctcgtcccctgtgatgctgttcatgaagggtaccccagatgcaccaagatgtggttttagttccagagttgctgatgcccttcgacaagagggcttgaattttgggtcctttgatatattgactgatgaggaagtgagacagggattgaaggtatactcaaattggccaacctatcctcaactctactacaaaagtgagctgattggtggtcatgatattgtgatggagctgcgaaataatggggagctgaagtcgactttatctgagtag

SEQ ID NO: 26 - DNA, 1278 bp, Ashbya gossypii
atgcgtaagtgcaaggtgttcatgggcacttctcacccagaacttgggaagttagtgtgtgagaagctgggcatcgagccggcgccatgtacactgaagaagtttgccaacggcgaaacgtctgtacaaatcggggtctctgtgcgtgatgaggatgtatacgtgatccagtcggggtcgtcgaccatcaatgaccacattatggagctgctcattctagtctccgcgtgtaaggggggctctgcacggaaggtgacggcagtgattccgcagttcccatactccaagcaatgcaagatgaagaagcacagaggcgcaatcacagcacgtatgcttgcgaacttgctgataatagccggcgcggaccatgtcgtgtccatggacctgcacgcctcgcagatgcaggggttcttcacgaagccagtggacaacctgtacggtggccccagcctggcgaaatggatcagagagaatgtggaggactatcagcacgctgtcgtagtttcaaaaaaccctggcggtacgaagcgtgtgacagcgcttgctgattcgctgaagattaacttcgcgatgattcacaccgatcgtcgtcggtccaaagacctttactcccagaccaaggatatgaagcagttgcggatgcggaagcagtccatgctacggaaaaacaggccgattgtcaggccgggtgctgctgaagacgaggaagagaatatcatattgaccaacgggatccagactgctcggattattaatggacatgttatcgatgatgatgtggatgatgcataccattcggatgtcgtcgtttcggatcaggaaggatctctcgcaagtgactcgtatcccatcggtggtagttacgaagccgcagccgactcggaagatgaagaggcaccacaggaaaagcaggaaaagcttatcacgttagtgggtaacgtgaacgggcggtctgcaatcattctggatgacatgattgacagacccggttccttcatctctgctgcagagcatatggttaagaattgtggtgcgaaacgtgtttatgttgtagccacacatggcatcttcaccggcgactgtttagagcagctagaacagtccgatgccgtgtaccaagtcattgttaccaacacgtatccaatcaatagagatcgcatgaagcgctcccaaaagctggttgttattgatacgtcgtctatttttgccgaatgtatccgccgcgatcactatggtgaatctatatctgttctgtttgattcactagcctcgctgtag

SEQ ID NO: 27 - DNA, 1788 bp, Arabidopsis thaliana
atggggcaatgttacgggaaggttaatcagagtaagcaaaatggtgaagaagaagctaacacgactacttatgttgtttccggcgacgggaatcagattcagcctctaactccggttaattacggtcgagctaagaacactccagctaggtcatcgaatccgagtccttggcctagtcctttccctcacggatcagcgagccctcttccttctggtgtttctccttctccggccagaacttccactccgaggaggtttttccgacggcctttcccgccgccttctccagccaaacacattaaggcttctttgatcaaacgtcttggagtgaagcctaaggaaggtccgatccctgaggagagaggaactgagccggagcagtcgcttgataagagctttggttatggcaagaattttggtgctaagtacgaattggggaaagaagtgggtcgagggcattttggtcatacttgttctggccgtggtaagaagggagatattaaggatcatcctattgctgtcaagatcatctccaaggctaagatgacaacagcaattgcaattgaagatgttcgcagggaggtgaagttactgaaatcattatctggacacaaatatttaatcaaatattatgatgcatgtgaggacgccaataacgtatacatagtcatggagttgtgtgatggtggagaacttttggacagaattttagcaaggggtggtaaatacccggaggatgatgcaaaggcgattgtcgtacaaattctaactgttgtttcattttgtcatctccaaggagttgtgcaccgtgacttaaagccagagaattttctatttacatcaagccgcgaagactcagacttgaaacttattgattttggtctctcagactttattagacctgatgaaagactgaatgatatagttggaagtgcctactatgtcgcgcctgaagttttacacaggtcatatagccttgaggctgatatatggagtattggagttattacatatatactcttatgtggaagccgacctttttgggcacggacagaatctggaatctttcgcactgtactaagaactgaaccaaactatgatgacgtaccttggccttcttgttcatcagaaggtaaagattttgtgaaacgacttctcaacaaagactataggaagcgaatgtctgcagttcaagctttgactcatccgtggttacgggatgatagtcgtgtgattcctttagacattttgatctataagttggtcaaagcctacttgcacgcgacacctcttagacgagctgctttaaaggcgctagcaaaagcattgaccgagaacgagctagtctatcttagagcacagttcatgctgttgggaccaaacaaagatggtagcgtctctctcgaaaacttcaagacggcgcttatgcaaaacgcaacagacgcaatgagagaatcaagagttcctgaaatacttcacactatggaatctctagcgtataggaagatgtatttcgaagagttctgtgcagcagcaattagcatccatcaactagaagctgttgacgcgtgggaagagatagcaacggcaggtttccagcattttgaaaccgagggaaaccgagtgatcacaatcgaagaactagcaagggaactgaatgtgggtgcgtctgcgtatggacacttgagagattgggtaagaagcagtgacgggaagctgagttacttagggttcactaagttcttgcacggagttactcttcgtgctgctcacgcaagacctcgctag

SEQ ID NO: 28 - DNA, 1071 bp, Arabidopsis thaliana
atgagtcttgtttcagatctcatcaaccttaacctctcagactccactgacaaaatcattgctgaatacatatgggttggtggttctggaatggacatgagaagcaaagccaggactctacctggaccagtgactgacccttcgcagctaccaaagtggaactatgatggttcaagcacaggccaagctcctggtgaagacagtgaagtcatcttataccctcaagccatattcaaggatcctttccgtagaggaaacaacattcttgtcatgtgcgatgcgtacactcccgcgggtgaaccaatcccgactaacaaaagacacgctgcggctaaggtctttagcaaccctgatgttgcagctgaagtgccatggtatggtattgagcaagaatacactttactccagaaagatgtgaagtggcctgttggttggcctattggtggttatcccggccctcagggaccgtactattgcggtattggagcagacaaatcttttggcagagatgttgttgattctcactacaaggcctgcttatacgctgggatcaacattagtggcatcaatggagaagtcatgccgggtcagtgggagttccaggtcggtccagctgttggtatctcggctgctgatgaaatttgggtcgctcgttacattttggagaggatcacagagattgctggtgtagtggtatcttttgacccgaaaccgattcccggtgactggaacggtgctggtgctcactgcaactacagtaccaagtcaatgagggaagaaggcggttacgagatcatcaagaaagcaatcgataaattgggactgagacacaaagaacacattgctgcttacggtgaaggcaatgagcgtcgtctcacaggacaccacgagactgctgacatcaacactttcctttggggtgttgcgaaccgtggagcatcgatccgagtaggacgtgatacggagaaagaagggaaaggatactttgaggacaggaggccagcttcgaacatggatccttacattgtcacttccatgattgcagagactacaatcctctggaatccttag

SEQ ID NO: 29 - DNA, 1788 bp, Arabidopsis thaliana; identical to SEQ ID NO: 27

SEQ ID NO: 30 - DNA, 876 bp, Glycine max
atgagcggccgcgaacaaaagcttatttctgaagaagatttgaagaaaaatcgcgcttttttgaagtgggcagggggcaagtatcccctgcttgatgatattaaacggcatttgcccaagggcgaatgtctggttgagccttttgtaggtgccgggtcggtgtttctcaacaccgacttttctcgttatacccttgccgatatcaatagcgacctgatcagtctctataacattgtgaagatgcgtactgatgagtacgtacaggccgcacgcgagctgtttgttcccgaaacaaattgcgccgaggtttactatcagttccgcgaagagttcaacaaaagccaggatccgttccgtcgggcggtactgtttttatatttgaaccgctacggttacaacggcctgtgtcgttacaatctgcgcggtgagtttaacgtgccgttcggccgctacaaaaaaccctatttcccggaagcagagttgtatcacttcgctgaaaaagcgcagaatgcctttttctattgtgagtcttacgccgatagcatggcgcgcgcagatgatgcatccgtcgtctattgcgatccgccttatgcaccgctgtctgcgaccgccaactttacggcgtatcacacaaacagttttacgcttgaacaacaagcgcatctggcggagatcgccgaaggtctggttgagcgccatattccagtgctgatctccaatcacgatacgatgttaacgcgtgagtggtatcagcgcgcaaaattgcatgtcgtcaaagttcgacgcagtataagcagcaacggcggcacacgtaaaaaggtggacgaactgctggctttgtacaaaccaggagtcgtttcacccgcgaaaaaataa

SEQ ID NO: 31 - DNA, 1380 bp, Glycine max
atgagccaggaacaagcgactagctctttagctgcaagctctttaccatcaagcagcgagaggtcatcaagctctgctccacatttggagatcaaagaaggaattgaaagcgatgaggagatacggcgagtgccggagtttggaggagaagctgtcggaaaagaaacttccggtagagaatctggatcggcgaccggtcaggagcggacacaggcgactgtcggagaaagtcaaaggaagcgagggaggacaccggcggagaaagagaacaagcggctgaagaggttgttgaggaacagagtttcagctcagcaagcaagagagaggaaaaaggcttacttgagcgagttggaaaacagagtgaaagacttggagaacaaaaactctgaacttgaagagcgactctctactcttcagaacgagaaccagatgcttagacatattctgaagaacacaacaggaaacaagagaggaggtggtggtggttctaatgctgatgcaagccttagcggccgcgaacaaaagcttatttctgaagaagatttgaagaaaaatcgcgcttttttgaagtgggcagggggcaagtatcccctgcttgatgatattaaacggcatttgcccaagggcgaatgtctggttgagccttttgtaggtgccgggtcggtgtttctcaacaccgacttttctcgttacatccttgccgatatcaatagcgacctgatcagtctctataacattgtgaagatgcgtactgatgagtacgtacaggccgcacgcgagctgtttgttcccgaaacaaattgcgccgaggtttactatcagttccgcgaagagttcaacaaaagccaggatccgttccgtcgggcggtactgtttttatatttgaaccgctacggttacaacggcctgtgtcgttacaatctgcgcggtgagtttaacgtgccgttcggccgctacaaaaaaccctatttcccggaagcagagttgtatcacttcgctgaaaaagcgcagaatgcctttttctattgtgagtcttacgccgatagcatggcgcgcgcagatgatgcatccgtcgtctattgcgatccgccttatgcaccgctgtctgcgaccgccaactttacggcgtatcacacaaacagttttacgcttgaacaacaagcgcatctggcggagatcgccgaaggtctggttgagcgccatattccagtgctgatctccaatcacgatacgatgttaacgcgtgagtggtatcagcgcgcaaaattgcatgtcgtcaaagttcgacgcagtataagcagcaacggcggcacacgtaaaaaggtggacgaactgctggctttgtacaaaccaggagtcgtttcacccgcgaaaaaataa

SEQ ID NO: 32 - DNA, 1551 bp, Glycine max
atgagcgtgagcttttgcgagctttgtggtgccgaagctgatctccattgtgccgcggactctgccttcctctgccgttcttgtgacgctaagttccatgcctcaaattttctcttcgctcgtcatttccggcgtgtcatctgcccaaattgcaaatctcttactcaaaatttcgtttctggtcctcttcttccttggcctccacgaacaacatgttgttcagaatcgtcgtcttcttcttgctgctcgtctcttgactgtgtctcaagctccgagctatcgtcaacgacgcgtgacgtaaacagagcgcgagggagggaaaacagagtgaatgccaaggccgttgcggttacggtggcggatggcatttttgtaaattggtgtggtaagttaggactaaacagggatttaacaaacgctgtcgtttcatatgcgtctttggctttggctgtggagacgaggccaagagcgacgaagagagtgttcttagcggcggcgttttggttcggcgttaagaacacgacgacgtggcagaatttaaagaaagtagaagatgtgactggagtttcagctgggatgattcgagcggttgaaagcaaattggcgcgtgcaatgacgcagcagcttagacggtggcgcgtggattcggaggaaggatgggctgaaaacgacaacgttagcggccgcgaacaaaagcttatttctgaagaagatttgaagaaaaatcgcgcttttttgaagtgggcagggggcaagtatcccctgcttgatgatattaaacggcatttgcccaagggcgaatgtctggttgagccttttgtaggtgccgggtcggtgtttctcaacaccgacttttctcgttatacccttgccgatatcaatagcgacctgatcagtctctataacattgtgaagatgcgtactgatgagtacgtacaggccgcacgcgagctgtttgttcccgaaacaaattgcgccgaggtttactatcagttccgcgaagagttcaacaaaagccaggatccgttccgtcgggcggtactgtttttatatttgaaccgctacggttacaacggcctgtgtcgttacaatctgcgcggtgagtttaacgtgccgttcggccgctacaaaaaaccctatttcccggaagcagagttgtatcacttcgctgaaaaagcgcagaatgcctttttctattgtgagtcttacgccgatagcatggcgcgcgcagatgatgcatccgtcgtctattgcgatccgccttatgcaccgctgtctgcgaccgccaactttacggcgtatcacacaaacagttttacgcttgaacaacaagcgcatctggcggagatcgccgaaggtctggttgagcgccatattccagtgctgatctccaatcacgatacgatgttaacgcgtgagtggtatcagcgcgcaaaattgcatgtcgtcaaagttcgacgcagtataagcagcaacggcggcacacgtaaaaaggtggacgaactgctggctttgtacaaaccaggagtcgtttcacccgcgaaaaaataa

SEQ ID NO: 33 - DNA, 1632 bp, Rhodopseudomonas palustris
atgccgacgcttgcgaccgctttgctcgacgctctcaaggatcacggcgccaaggagatcttcggcatccccggcgatttcgtgctgccgttcttcaaggtgatcgaggagagcggaagcctgccttatttcacgctgagccacgagccggcggtcggcttcgcggcggatgcggcgtcgcgctaccgcggcggtatcggcgtcgcagtggtgacctacggcgccggcgcgttcaatctggtcaattcgatcgctggcgcttacgcggagcgctcgccggtggtggtgatcgccggcgcgcccggcgcgcgcgaacgcaccagtggctatctgctgcaccatcaggtccgcaccgtcgacacgcaactcgcggtgttcaaggaagtcacctgcgcgcaggcggtgctgaacgatcccgccaccgcgccggccgagatcgcccgcgtgctgcgcagctcgctggaactgtcgctgccggtctacatcgaattcccccgcgacatggtcgacgccaaggtcgagccggtcgagaagctgccgcagcgggcggccgaccccggcgcgtgcgccgaatgttccgaggaaattcttgaccggatcgccaaggccaagtcgccggtggtcgtggtcgacgtcgaaatccgccgctacggcgtcgagaagcaggtcgccgcactggcgcgcaagctcggcctgccggtggtgacgacgttcatgggccgcgggctgctcgaaggcgacgacgacgtcgttgccggcacctatatgggcgccgccggcgatcccggcctgtcggcgctggtagaagagtccgacctggtgctgatgttcggggtgatcctgtccgacaccaatttcgcgctgtcgaccaacatgaccgatccgcgccgcaccgtgctcgccaccgggcgcgaggtgcagatcggccatcacgtctatcgtgacctgccgctggcggatctgatcgccgggctcgacgctcacgccacggcgcatccgccgcgaccgcgcaatgctgggcagggcatggtctatccgcgcaagctggtcgccgattccggcgcgatcgcaccgtccgatatcgccaccgcgatcaacgacctgttcgacaagcacggcaagatgccgatgaccgccgacatcggcgactgcctgttcaccgcgatggagatcgacaacaccgcgctggcggcgccgggctactacgccggcatgggcttcggcgtgccggcgggcgtcggcgtcgccgccaccgggttgcggccgctgatcctggtcggcgacggcgcgttccagatgaccggctgggagctcggcaattgtaagcgctacggcctcgatccgatcgtggtgctgttcaacaattgcagctgggagatgctgcgggtgttccagccggagtcgaagttcaacgatctcgacgactggcacttcgccgacatcgcgccgtcgatcggcggccacggcgtgcgcgtcaccacccgcgccgaactcgccgcggcgctcgatgccgccgtcgcgcggcgcgggcagttctcgctgatcgaagtgatgctgccgcgtggcgccacctcgcatacgctggcgcggttcgtcaaaggcttcaaggccgcgcgcgagcggatgaagtga

SEQ ID NO: 34 - DNA, 2268 bp, Agrobacterium tumefaciens
atgtcagcctcatctcttcttgataaacaatgcgatcatttctctaccaaaattgtggatctgataatggtcgacaaggctgatgagttggaccgccgcgttgccgcagccttctcagaacgagaagcttcgagggaaagaagaattagtcaaatttccggcgagtgcaacgctgggttagcttgcaaaaggctggccgacggtcgctttccggagatatcagccggtcagagggtcgcagtcctctccgcttacatctatgttggcgaggaaattctgaggtggatactcgaaccagaagcttcggtgcgaacaagagtgagtggtctcgttgccatcgaccttgcaccatcttgcatggatatttccagagctcaacttctccaaaccatgaatttgctgagtggtaaaagatgtgcacccagcgaccttagtcatttcgtggccatttcaatctctgagactgcccgctcccgaaccctgcaaatggcgccgtacgaagaaggctcgttgaaaagcgttaccgggtttaccgtaatcattgaagaggcagtaccatttgacatggtagcttatggtcgaaacctgatgctgaaagcctcggcagggtcctttccaacgatcgacttgctctatgactacagattgtttctcgacaaatgttccgatagtgggcggatcggcttctttccggaagatgttcccaggccaaaagtagcggtcattggggctggcatttccgggctcgtggtggcaagcgaactgcttcatgctggcgtagacgatgttacaatatatgaagcaggtgatcgggttggaggtaagctttggtcacatgccttcaaggacgctccgggcgtcgtggccgaaatgggggcgatgcgatttcctcctgctgcatcgtgcttgtttttcttcctcgagcgatacggtctgtcttcgatgaggccgttcccaaatcccggcacagtcgacactgacttggtctacgagggttgccgatacatgtggaaagccgggcagcagccaccgaagttgttccatcgcgtttacagcgggtggcatgcgttcttgaaggacggtttccttgagggagatattgtgttggcgtcgcctgatgctatcactgaggccttgaaatcaggggacattaggcgggctcatgactcctggcaaatttggctgaaccgtttcgggagggagtcgttctcctcagcgatagagaggatctttctgggcacgcatcctcctggtggagaaacatggagtttccctcatgattgggacctattcaagctaatgggaataggatctggcgggtttggtccagtttttgaaagcgggtttactgagatccttcgcttggtcataaacggatatgaagaaaatcagcggatgtgctctgaaggaatctcagaacttccacgtcgaatagcctctcaagtggttaacggtgtgtctgtaagccagcgtatacgccatgttcaagtcagggcgatcgagaaggaaaagacaaaaataaagataaggcttaagagcgggatatcagaactttatgataaagtggtggttacatctggactcgcaaatatccaactcaggcattgtctgacatgcgataccaccatttttcgtgcaccagtgaaccaagcggttgataacagccacatgacaggctcttcaaaactcttcctgctgactgaacgaaaattttggtttgaccatatgctcccgtcctgtgtcctcatggacgggttcgcaaaagcagtctattgcctggactatgagccgcaggatccgaacggtaaaggtctggtgctcatcagttatacatgggaggacgactcccacaagctattggcggtccccgacaaaaaagagagattatgtctgctgcgtgacgcaatttcaaaatctttcccggtgtttgcccagcatctagttcccgcctgcgctgattacgaccaaaatgttgttcaacatgattggcttacagacgagaatgccggcggacgtttcaaacttaaccgacgcggcgaagatttttattctgaagaacttttctttcaagcgctggacacgactaatgatactggagtttacttggcgggttgcagttgttccttcaccggtggatgggtggagggcgctattcagaccgcgtgtaacgccgtctgcgcaattatccacaattgtggaggcattttagcgaaggacaatcctcttaaacacccttggaagagatataactaccgcaatagaaattaa

SEQ ID NO: 35 - DNA, 1683 bp, Pseudomonas fluorescens
atgaacaagaacaatcgccatcctgcagacggtaagaaaccgatcaccatttttggcccggactttcctttcgccttcgacgactggatcgaacacccggccggtctcggcagcattcccgagcacaaccacggcgccgaagtggccatcgtcggggccggcatcgcgggtctggtggcggcgtatgagctgatgaaactcggcttgaagccggtcgtttatgaggcctcgaagcttggcggtcgtctgcgttcgcaagcgttcaacggtaccgacggcatcgtcgccgagctcggcggcatgcgtttcccagtgtcgtccaccgcgttctatcactacgtcgacaaactcggcctcgagaccaagcccttccccaacccgctgaccccggcctccggcagcaccgtgatcgacctggaaggcaaaacccattacgcacagagcctgaaggatcttcctgcactgttccaggaagtggctgacgcctgggccgacgctctggaggccggctcacagttcgccgatatccagcaggcgatccgcgaccgtgacgtgccgcgcctgaaagagctgtggaacacgcttgttcctctttgggacgaccgcaccttctacgacttcgtcgccacgtcgaaagccttcgccaaactgtcgttccatcaccgcgaagtgttcggccaggttggtttcggtaccggcggctgggactcggacttccccaactcgatgctggaaatcttccgtgtggtgatgaccaactgcgacgatcaccagcatctggtggtcggcggcgtcgaacaagtaccgcaaggcatctggcgtcatgcgccggagcggtgcgtacactggccggcaggtaccagcctcaagtcgcttcaccacggtgccccgcgctccggggtaaagaaaatcgcccacgcgcctgacggtcgtttcgcggtcaccgacaacaatggcgacacccgcgaatacgccgccgtactgaccacctgccagagctggctgctgaccacccagatcgaatgcgacgaaagcttgttctcgcaaaagatgtggatggccctggaccgcacgcgctacatgcaatcgtcgaagaccttcgtgatggtcgaccgcccgttctggaaggacaaggacccggaaaccggtcgcgacctgatgagcatgaccctcaccgatcgcctgacccgtggcacctacctgttcgataacggcgacgacaagccgggcgtgatctgtctgtcgtactcgtggatgagcgatgcgctgaagatgctcccgcacccagtggaaaaacgcgtgaagctggcactggatgcgttgaagaagatctacccgaaagtcgacatcgccgcgcggatcatcggcgatccgatcaccgtgtcgtgggaagccgacccgcacttcctcggtgcgttcaagggcgccctgcccggccactatcgctacaaccagcgcatgtacgcgcacttcatgcaggacgacatgccgcaggagcagcgcgggattttcatcgccggcgacgacgtatcatggacgcctgcgtgggtcgaaggtgcggtgcagacctcgctcaatgcagtctggggaatcatgaagcacttcggcgggtccacacataaagagaaccctggcccgggtgatgtgttcaacgacatcggcccgatcgccctgcccgagtaa

SEQ ID NO: 36 - DNA, 1794 bp, Triticum aestivum
atggcttcctcggcctccctgcagagcttcctcccgccctcggcccacgcggcgacgtcgtcgtcccggcaccggcccagccgcgcccgccccttccagtgcgcggccgtctccgcgccgtcgtcgtcggccgcctcgccgtcggcctcggccgtcccggcggagcggctggagcctcgcgtggagcagcgggagggcggctactgggtgctcaaggagaagtaccgcaccagcctgaacccgcaggagaaggtgaagctgggcaaggagcccatggcgctcttcacggagggcggcatcaaggagctcgccaagctgcccatggagcagatcgacgccgacaagctcaccaaggaggacgtcgacgtgcggctcaagtggctcggcctcttccaccgccgcaagcagcagtatgggcggttcatgatgcgtctgaagctgcccaacggcgtgacgacgagcgagcagacgaggtacctggcgagcgtgatcgagaagtacggcaaggagggctgcgccgacgtgacgacccggcagaactggcagatccgcggcgtgacgctgccggacgtgccggagatcctggaggggctccgctccgttggcctcaccagcctgcagagcggcatggacaacgtgcgcacccccgtcggcagcccgctcgccggcatcgaccccctcgagatcgtcgacacgcgcccctacaccaacctcctctcctcctacatcaccaacaactccgagggcaacctcgccatcaccaaccttcctaggaagtggaacgtgtgcgtgatcggcacccacgatctgtacgagcacccgcacatcaacgacctggcgtacatgccggccgagaaggacggcaagttcgggttcaacctgctggtgggcgggttcatcagccccaagaggtggggcgaggccctgccgctcgacgcctgggtccccggcgacgacatcatcccggtctgcaaggccgtcctcgaggctttccgcgacctcggcaccaggggcaaccgccagaagacgcgcatgatgtggctcatcgacgagctcgggatggaggcgttccggtcggagatcgagaagaggatgccgaacggcgtgctggagcgcgcggcggccgaggacctgatcgacaagaagtgggagcggcgcgactacctcggcgtgcacccgcagaagcaggaggggctctccttcgtgggcctgcacgtgcccgtcggccggctgcaggccgccgacatgttcgagctggcccgcctcgccgacgagtacggctccggcgagctccgcctcaccgtggagcagaacatcgtcctccccaacgtcaagaacgagaaggtggaagctctgctcgccgagccgctgctgcagaagttctcggcgcacccgtcgctgctgatgaaggggctggtggcgtgcacgggcaaccagttctgcgggcaggccatcatcgagaccaaggcgcgggcgctgcaggtgacgcgcgacgtggaggcgcgcgtgtccgtgcccagggcggtgcgcatgcactggacggggtgccccaacagctgcgcgcaggtgcaggtggccgacatcggcttcatgggctgcctcaccaagaacagcagcggcaagatcgtcgaggcggcggacatcttcgtcggcggccgcgtcggcagcgactcgcacctcaccggggtgtacaagaaggcggtgccgtgcgaggacctggtgcccctcgtcgccgacctcctggtggagcggttcggggccgtgcccagggagagggaggaggacgaggagtag

SEQ ID NO: 37 - DNA, 579 bp, Zea mays
ttgtccctcaggagctgcatgatcaaggtgctatctttgtatgaatcctcgccaagcgtatccaactgagaaatagcctcatcaaacgcctgcctggcaaggttgcaagctttgtctggagagttcagaatctcgtaatagaaaactgagaagttaagtgcaagtccaagtcttatgggatgagtagatgccagttccgccaacgcaatatccaagtactgcgatcgcgttaacgctttatcacgataccttctaccacatatcactaacaacatcaacactcatcactctcgacgacatccactcgatcactactctcacacgaccgattaactcctcatccacgcggccgcctgcaggagcggatattgcgttggcggaactggcatctactcatcccataagacttggacttgcacttaacttctcagttttctattacgagattctgaactctccagacaaagcttgcaaccttgccaggcaggcgtttgatgaggctatttctcagttggatacgcttggcgaggattcatacaaagatagcaccttgatcatgcagctcctgagggacaatag

SEQ ID NO: 38 - DNA, 1848 bp, Zea mays
atgatctccctgctccgacgcgccctcgccgcctccgcctcggcttcgtctccggcggccacgtaccggagactcctcgtcgtcgcgccactctctccgcccgcggcccctccaggcccatgccaggcgcccgcggcagggtcgccggagccgccgaggcgggcgttccactgttctacgccccccctggggttcaggtccaccccggcgtcgtgggccggtccctgtccgggggagggcgagggcgagggcgagggcgagggcgtggatacgggggctgagaaggggctggagatcgcgaggctggggacctcgccgcggatcgtggagaagctcgccgcgcggggcatcaccaggctcttccccatccagagggctgttcttgagccagcaatgcaaggaaaagacatgattggccgtgctcgaacagggactgggaagaccctggcttttggtattcctatcatggacaagatcctcagctacaacgagaagaatggaaatggcaggaatcctttagccataatcttggcaccaacaagagaacttgctcggcaggttgagaaggaatttagagaatctgctcccttggacaccctctgtgtatatggaggtgttcctatcaatcagcaaatgagagctcttaactatggtgttgacatagtggtcggaactccaggtcgagttattgaccttctgagaaggggtgttttaaacctttcacagatccagtttgtggtcctagatgaagctgatcaaatgctggctgtgggtttcgatgaagatgttgaggtgatcatggagcaattgccacagaaccgtcaaagcatgctgttctcagcaacaatgcctagttggataagaaaaatttcgaacaagtacttaaaggatccagttataattgaccttgttggtgactcagatcagaaattacctgaaggaatctctctctattccattgcatctgataacttcgggaagccttcaattattggtcctttgattaaagagcatgccaatgttggaaaatgcattgtgtttactcaaactaaacgggaagcagatagattggcatatgtcatgggaaggagttatcagtgtcaggcactgcatggggatatttcacagaatcaaagagagaggacactttcaggatttcgtgatggtcgttttaatatccttgtggcaactgatgtcgcagctcgtggattggacatacccaacgttgatctagtggtacattatgagatcccaaatacatcggagttatttgttcacagatctgggagaactgcacgagcagggaagaaaggcagtgcaattctaatatacacgtatgaacagactagagctgtaagggtcatcgagcaagatataggatgcaggttcacagagcttccgaagatgccagtttcagatgaggctgcagacatgtttaatgtcatgagagatactcgctctagatcagttggaagcagaagaacaggtggaccttttagccgtgaaggttatggtgactttgaagaccatcgttccagaggcttcggtgattttgacagatttggtggttcctctgaccgcggcggtggattccgtgactcaggttcaaggtaccacggtggatctggaggtttcagacgatcttccagtgactttggcaggcctagcctcagtcgttctgatagatctggcgactttggagacagttatttcagcagacgtggtaacgctgactttgggcgttcccggagctctgatgattcaggctcctcacattacccaagaggctatagtggtactggcacgtcagattccggcaacttcggtggcttcaagggttccaagtga

SEQ ID NO: 39 - DNA, 479 bp, Zea mays
cgccgcccttcttgttgtagatgcggcacaggacccagtcatccaacctgaggctgttcttcttgcgcgccgagcggtcgacgtcggcgaggcggtactcgtgcatgatccagttggtcttctcgcccttgggcgccttgccggcgtagaagacgagcgccttaagtactgcgatcgcgttaacgctttatcacgataccttctaccacatatcactaacaacatcaacactcatcactctcgacgacatccactcgatcactactctcacacgaccgattaactcctcatccacgcggccgcctgcaggagcaaggcgctcgtcttctacgccggcaaggcgcccaagggcgagaagaccaactggatcatgcacgagtaccgcctcgccgacgtcgaccgctcggcgcgcaagaagaacagcctcaggttggatgactgggtcctgtgccgcatctacaacaagaagggcggcgtag

SEQ ID NO: 40 - DNA, 2970 bp, Glycine max
atggaagacaatgccttcctgctcttgttctatgttggccgtcgcaactggaagcttctcatgtctcctttactgctcgtgcttttgcttctctctccacttgcttcccccttcagtgaagaaggacaagcactaatggcgatgaaggcttcgttcggcaatatggcagacactctccttgactgggatgacgcgcataatgacgacttttgttcttggcgtggagttttctgtgacaatgtcagccttactgtggtttctctgaacctctccagcttgaaccttggtggagagatatcaccagccattggtgacttgggaaacctgcaatccatagacttgcaagggagtaaactaaccgggcaaatcccagatgaaattggaaactgtgcagcactcgttcatctggatttgtccgataatcagctttacggtgatatacctttctccttgtcaaagctgaagcaactcgagttcttaaatttaaagagcaaccaattgactggtcctatcccttcaactttaacccaaattccaaacctaaagactcttgatcttgctcgaaataggctcactggagagataccaagaatactctattggaatgaagtcttgcagtaccttgggttgcgtgggaacatgttgagtggtactttgtcccctgatatctgccaattaactaatttgtggtattttgatgtgagaggcaataatttgactggtaccgtacctgacagcattgggaactgcacaagttttgaaatcttggacatatcatataatcggattactggggagattccatataatattggatttctgcaagttgctactttgtcacttcaaggaaatagattaactggggagattccagaagtgattggtttaatgcaagcccttgcaatattggatttgagtgagaatgagttagtgggaccaattcccccaattcttggcaatctgactttcactggcaagctgtaccttcacggaaacatgcttacaggttcaatacctcccgaactcggcaatatgtccaaactgagctacctgcaattgaatgacaaccacctagagggtaatattccaaatgaatttgggaagctagaacatctttttgaattgaatcttgccaataatcatcttgatggaactatcccacataacataagttcttgcactgccttaaatcagtttaatgtgcatggtaatcagttaagtggttccattccattgagcttccgcagcctagagagtttgacatacttaaacctctctgcaaacaacttcaaggggattataccagttgagttggggcatatcattaatctagacacattggatctatctagcaataatttttcagggaatgtgccagcatctgttggttttcttgagcatctcctgaccctgaatttgagtcataaccaccttgatggtcccttgcctgctgaatttgggaatctcagaagcattcagattcttgatttgtcattcaataatctctctggtatcattcctccggaaattggacagctgcagaaccttatgtctctgattatgaacaacaatgatctgcatgggaagattcctgatcagttgactaattgtttcagtcttacctcactaaatttgtcctataataacctttccggagtaattccttcaatgaagaacttctcacggttttcagctgacagcttccttggaaattctttgctatgtggagattggttaggatcaatatgttgcccttatgtaccaaaatcaagagagattttttcgagagttgctgttgtatgcctcacgcttggaattatgatattgttggccatggtaattgtagcgttctacagatccagccaatcgaagcgattgaggaaaggatccagcagaactgggcaaggtcctccaaaactggttattcttcacatggatatggctatccacaccttggatgatataatgagaagtactgagaatctcaatgagaaatatatcatagggtatggtgcgtctagcactgtatacaaatgtgttttgaagaattcccgaccaattgcaattaagcgactgtacaaccaacaagcacataatttaagggagtttgagactgaacttgaaacagttgggagcattagacatagaaaccttgtcaccttgcatggatatgctcttactccctatggaaatctccttttctatgactatatggcgaatggctcactgtgggatcttctacatggtcccttgaaggtaaaacttgattgggaaactcgcctgaggattgctgttggagcagcagaaggacttgcatatctccatcatgactgcaacccacgtatagttcacagggacataaagtcttcaaacattctgctggatgagacttttgaggctcatctttctgattttggcactgcaaaatgtatctcaaccacaagaactcatgcatcgacttatgtccttggaactataggctatattgaccctgagtatgcccgaacatctaggctgaatgaaaaatcagatgtatatagctttggcatagttctgctggagctacttactgggaagaaggcagtggacaatgagtccaatttgcatcaattgatattgtccaaggcagatagcaacactgtaatggaaactgtggatccagaggtctccataacttgcattgatctggctcatgttaagaagactttccagcttgctttgctttgcacgaaaaagaacccttctgagaggcctactatgcatgaagtagccagggtgttggtatcactacttccttcaccactaagtaaaatccttgcccctcctgcaaagaagttcgactatgcccatttcgtgatcgagaagggacaacaacgaaaagtggaagaacaaaaacctcagcaggataacatcttacccaatgctcaatggtttgttcgttttggggatgttatatccaaaagcacttga

SEQ ID NO: 41 - DNA, 765 bp, Arabidopsis thaliana
atggattacgcatgcgtgtgtatgtataaatataaaggcatcgtcacgcttcaagtttgtctcttttatattaaactgagagttttcctctcaaactttaccttttcttcttcgatcctagctcttaagaaccctaataattcattgatcaaaataatggcgattttgccggaaaactcttcaaacttggatcttactatctccgttccaggcttctcttcatcccctctctccgatgaaggaagtggcggaggaagagaccagctaaggctagacatgaatcggttaccgtcgtctgaagacggagacgatgaagaattcagtcacgatgatggctctgctcctccgcgaaagaaactccgtctaaccagagaacagtcacgtcttcttgaagatagtttcagacagaatcatacccttaatcccaaacaaaaggaagtacttgccaagcatttgatgctacggccaagacaaattgaagtttggtttcaaaaccgtagagcaaggagcaaattgaagcaaaccgagatggaatgcgagtatctcaaaaggtggtttggttcattaacggaagaaaaccacaggctccatagagaagtagaagagcttagagccataaaggttggcccaacaacggtgaactctgcctcgagccttactatgtgtcctcgctgcgagcgagttacccctgccgcgagcccttcgagggcggtggtgccggttccggctaagaaaacgtttccgccgcaagagcgtgatcgttag

SEQ ID NO: 42 - DNA, 828 bp, Arabidopsis thaliana
atggcctcctccctatttacgtacatatgcacatacacatataaactatatgctctatatcatatggattacgcatgcgtgtgtatgtataaatataaaggcatcgtcacgcttcaagtttgtctcttttatattaaactgagagttttcctctcaaactttaccttttcttcttcgatcctagctcttaagaaccctaataattcattgatcaaaataatggcgattttgccggaaaactcttcaaacttggatcttactatctccgttccaggcttctcttcatcccctctctccgatgaaggaagtggcggaggaagagaccagctaaggctagacatgaatcggttaccgtcgtctgaagacggagacgatgaagaattcagtcacgatgatggctctgctcctccgcgaaagaaactccgtctaaccagagaacagtcacgtcttcttgaagatagtttcagacagaatcatacccttaatcccaaacaaaaggaagtacttgccaagcatttgatgctacggccaagacaaattgaagtttggtttcaaaaccgtagagcaaggagcaaattgaagcaaaccgagatggaatgcgagtatctcaaaaggtggtttggttcattaacggaagaaaaccacaggctccatagagaagtagaagagcttagagccataaaggttggcccaacaacggtgaactctgcctcgagccttactatgtgtcctcgctgcgagcgagttacccctgccgcgagcccttcgagggcggtggtgccggttccggctaagaaaacgtttccgccgcaagagcgtgatcgttag

SEQ ID NO: 43 - DNA, 2367 bp, Zea mays
atggagccgtcccgtggcggtgttggcggcggcgggcggcggtggggggaggcggagggtgatgcggcggaggaagggagacgaggggaggacgggggcgaggtgagcctgcgggagtggctggaccggccgggccgagcggtggaggcggcagagtgcgtgcacgtgttcaggcaggtggcggaggcggtggccgtcgcgcacgcgcagggggtggccgtgggcagcgcgcggccgtcgtgcttcgtcgtgtcgccgcccttcgcgcgcgtcgccttcatcgagtccgcctccggctccgacgcctcgggctcgtgctcgggctctgacgcctccgaggacgccgacggcgacccggacccggacccggacgcctcgcctccgctgcggcgacgcgacagcgccgtccccggcgaggagcgcgcggggaggtcgttcccgctcaagagcgtgctggccatggagctcagctggtacaccagccctgaggatgcggacgacagcgccgctaccttcgcctctgacgtctacagactgggtgtgctcttgttcgagctgttctatacattcgaaacgatggaggacaagatgcgggcaatggcgaatctgcggcaccgggtgttgccaccgcagttgctgttcaaatggcccaaggaagcatccttctgccagttgctaatgcaccctgtgccagaaaccagaccgaagatgagtgaggtgctgcagagtgagttccttaatcagtcaaggaatagcttggaagagcatgaagcggcacttaggttacgcgaagagatagaagaacaagaattattgctggattttcttcagcagttgcagaaaagaaagcaagatatagccgacagtttgcagggcactattgctttcctctcttctgacatcaatgaggtaccccaccagcaatctgcaattggccactgtgagaacttcttatccgattgggataaagaggtgtgctctggaactgttgaagaacagagtgattgtggatccaggaagcgttttagacctgagctgcaaggtgttgatatggaggaaaataatcgtagtgttgaagaatgttccagaacagtaccatcctctgagttaatccaggaaagtgttctgtctaaaagctccaggttgatgaagaacttcaaaaaacttgaaacagcctattttctaacaaggtccaagttgatgaagcaagttggcagccaaataagtagctgtgatcgagttgttaagaacactactggttcagctgttgggactgagggaagttcattagatgatttttcactggaaaggcaatatggtacaaggcaaagaggttgggtaaactcttttcttgaaggattgtgcaagtatttgtcattcagtaagttgaaagttcaggcagaactgaagcattgtgatttgctgaactcgtcaaacttagtatgctccgtagggtttgaccgagatagagagttttttgcaactgcaggtgtaaataagaagataaaagtgtttgagtataatatgattgtaaatgaacaccgtgatattcactatcctgtagtagagatgtctaatagatcaaagttgagttgtatttgctggaacagttatatgaagagtcatattgcatctagtgattttgagggtatagtacaggtttgggatgttactaggagtcaagtttttgttgggatgagggagcatgagcgacgcgtgtggtcggtggacttctcaattgtggacccaacaaaattggtcagtgggagtgatgatggatctgtgaaactgtgggatatgaatcaggctgggagtattggcactattagaacaagagcaaatgtgtgttctgtacaatttcaacctgatactgctcgctccattgccatcggctctgcagaccacaaaatttactgctatgatctacgtaacatacgagctccttattgtacactagttggccacacaaagactgtaagctatgttaagtatctggatgcatcaacaatactatccgcatctactgacaactcattgaagctttgggacttatcgatgaatccaggaaggataattgacagtccagttcaaacatttacagggcatacaaatacaaagaacttcgttggtctttccatatctgatggttacattgctactggctctgaaacaaatgaggtttttgtctaccacaaagaatttcccatgccagtgttggcttataagttcagcgtgacggaccctatatcgggacaggagattgatgatcagtcacagttcatttcatgcgtctgctggagagggcagtcttcaactctactttctgcaaattccagcggcaacattaagatcttagaaatggactga

SEQ ID NO: 44 - DNA, 1725 bp, Zea mays
atggcagccgatccttcgtcctcttccacggggcaacaaacggcggacatccgcgcggccccgcccgaggactcgaggcagatggcaatgagcgggccgctcaatgtccggggcgaccggaggccgccgccgatgcagagggccttcagccggcaggtctcgctcggcagcggcgtgacggtgctgggcatggacagagcggggaggagcggtggcgcaaggggccaacggaccctcccccgcagtggtaggagcctcggggtgctcaaccacagcggcggcttggtccaggccgccggcgacggcgccgcgcgcagggttggcgacttcagcatgttccggaccaagtcgacgctgagcaagcagaactcgatgctgccgacgaggatcagggagtccgacctcgaactgcccacgcacgtcgaagacccgcagtccgccagcagcaggccggcggaggacccgctcaacaagagcgtccccgccggccgctacttcgcggcgctccgtggccctgagctcgacgaagtccgcgatactgaggacatcctgttgcccaaggacgaggtgtggccgttcctgctgcggttcccgatcggctgcttcggtgtgtgcctgggcctcggcagccaggccatcctgtggggcgcgctggcggcgagcccggcgatgcgcttcctccacgtcacgcccatgatcaacgtcgcgctgtggctgctggcggtcgccgtgctcgtcgcgacgtccgtcacctacgcgctcaagtgcatcttctacttcgaggccatccgacgcgagtacttccacccggtccgcgtcaatttcttcttcgcgccgtggatcgcggccatgttcgtgaccatcggcctaccccgctcctacgcgcccgagcggccgcacccggccgtgtggtgcgccttcgtcctgccgctcttcgcgctcgagctcaagatatacgggcagtggctgtccggcggcaagcggcggctgtgcaaggtggccaacccgtcgtcccacctctcggtggtgggcaacttcgtcggggccatactggcggcgagggtcgggtggacggaggccggcaagctcctgtgggccatcggggtcgcgcactacatcgtcgtgttcgtcacgctgtaccagcggctgcccaccaacgaggcgctgcccaaggagctgcacccggtgtactccatgttcatcgccacgccgtcggccgccagcctcgcctgggccgcgatctacggcagcttcgacgccgtggcgcgcaccttcttcttcatggccatcttcttgtacctgtccctcgtcgtgcgcatcaacttcttccgggggttccggttctccctcgcgtggtggtcgtacacgttccccatgaccacggcgtcgctggccaccgtcaagtatgccgaggctgtgccgtgcttcgcgagcagggccctcgcgctgagcctctccctcatgtcgtcgaccatggtgtcgatgctgctcgtgtcgacgctcctgcacgcgctcgtctggcgatcgctctttcccaacgacctggccatcgccatcaccaaggaccggcaaaacggcgcggtgaagccgaatgacagggggaagagggccagcaagagagtgcacgacatcaagcgatgggccaagcaggcgcccctctccctcgtgtcctcaatcaccaagagccactcggcggacaaggaggaagaagagagaactgaataa

SEQ ID NO: 45 - DNA, 1092 bp, Solanum tuberosum
atgggttttcgtttgagtcatttgagtcttgcattgagctttgtggcacttgcacttgcaggtgttgctatttatagaaatacttatgaagccatcatcatgaataacggatcactactccaaaatgcttctccacatttcgattcgttggaatcaggcgtagccagtattttaaccttaaataataagaagagaaattcagacatgtacttgagacagcagctaactccggaggcatgcgttttctcagctgtacgaggagttgtggacagtgctattgatgcagaaacacgcatgggagcttctcttattcgtctccacttccatgactgcttcgttgatggttgtgatggaggtattctgctagatgatattaatggaacatttacaggggaacaaaactcaccacccaacgccaactcagccagaggttatgaagtaatagcacaagctaaacaaagtgtcatagatacatgccccaacatatctgtatcttgtgctgacatattagctattgctgctcgtgattcggttgctaaattaggaggacaaacttataacgttgcattagggagaagcgatgctagaacggccaactttactggtgctttaactcaacttccagctccattcgacaacctaactgtccaaatacagaaattcaacgataaaaatttcaccctccgtgaaatggttgcgctagctggtgcgcacacggtaggtttcgccaggtgttctaccgtttgcaccagcggtaacgttaatcctgccgcacaactccaatgcaactgctccgccacgcttactgattctgatttgcaacaattggatactactcctactatgttcgacaaagtttactacgataacttaaacaacaaccaaggtataatgttttcggatcaagttttgaccggggatgctacaactgctggttttgtaacggattatagcaacgatgttagcgttttccttggagattttgctgctgccatgatcaagatgggagacttgcctccatccgcgggcgctcaattggaaattcgtgatgtttgtagcagggttaatcccacttctgtggcttctatgtag

SEQ ID NO: 46 - DNA, 1092 bp, Solanum tuberosum
atgggttttcgtttgagtcatttgagtcttgcattgagctttgtggcacttgcacttgcaggtgttgctatttatagaaatacttatgaagccatcatcatgaataacggatcactactccaaaatgcttctccacatttcgattcgttggaatcaggcgtagccagtattttaaccttaaataataagaagagaaattcagacatgtacttgagacagcagctaactccggaggcatgcgttttctcagctgtacgaggagttgtggacagtgctattgatgcagaaacacgcatgggagcttctcttattcgtctccacttccatgactgcttcgttgatggttgtgatggaggtattctgctagatgatattaatggaacatttacaggggaacaaaactcaccacccaacgccaactcagccagaggttatgaagtaatagcacaagctaaacaaagtgtcatagatacatgccccaacatatctgtatcttgtgctgacatattagctattgctgctcgtgattcggttgctaaattaggaggacaaacttataacgttgcattagggagaagcgatgctagaacggccaactttactggtgctttaactcaacttccagctccattcgacaacctaactgtccaaatacagaaattcaacgataaaaatttcaccctccgtgaaatggttgcgctagctggtgcgcacacggtaggtttcgccaggtgttctaccgtttgcaccagcggtaacgttaatcctgccgcacaactccaatgcaactgctccgccacgcttactgattctgatttgcaacaattggatactactcctactatgttcgacaaagtttactacgataacttaaacaacaaccaaggtataatgttttcggatcaagttttgaccggggatgctacaactgctggttttgtaacggattatagcaacgatgttagcgttttccttggagattttgctgctgccatgatcaagatgggagacttgcctccatccgcgggcgctcaattggaaattcgtgatgtttgtagcagggttaatcccacttctgtggcttctatgtga

SEQ ID NO: 47 - DNA, 1638 bp, Zea mays
atggggctgctcacgtcggcggagctcaactacctcgtcttccgctacctccaggagtcaggttttattcatgctgcatttactctaggttatgaagctgggatccataagtgtggcattgatggtaatgcagtcccacctggtgctcttatcactattgtgcagaaaggcctccaatacattgaactggaagcaagtagcgatgagaattatgatgaagttgagagggattttgcgcttttggagccacttgaaatcatcacaaaagatgttgaagagttgcaacagattgtgaaaaggaggaaaattgagagatctcaaactgaacttgagaaggataagggaaaagagaaagaacgtaacgaggagcatgaacgacgtccttgtggcgaaagggagagggaacaacatgaaaaagaaaaagagcaagtcagggacaaggacaaatctgaaaaagatagggaccatgataaagagaaggagaaagagagaaagagaaaggcagcatgcagagcgtatatggatgtaagtacaactgctcaggagatatctaacactgatgttactgttttggaaggacacagttcagaggtttttgcttgtgcgtggagtccaactagttctcttctagcttctggatcaggagactcaactgctagaatctggacaattccatatggtccatgtggttccgacatgcaaccatattctcctggtgttcatgttttgaaacattttaaaggtcggaccaatgaaaagagcaaggatgtcaccacgcttgactggaatggtgaaggtacactactcgctacgggctcctacgatggacaggcaagaatatggagtagagatggagacctgaagcagacactgttcaaacataagggacccatattttcattgaaatggaataagaaaggagattttctcctaagtggaagtgttgataaaactgctattgtttgggatacaaagacatgggaatgcaaacagcagtttgaatttcattcagctccaacactagatgttgattggagaaataataactcttttgcaacatgttcaaccgataacatgatctatgtttgcaagattggggaacagcgtccggttaaagcattcagtggccatcagagtgaagttaatgctatcaagtgggatccgactggttctcttttggcttcatgttctgatgattggacagcaaagatatggagtatgaagcaagacaaatgtgtatttgatttcaaggagcataccaaggaaatatacactattcggtggagcccaacaggcccaggaacaaacaatcctaatcagcagttgcttttggccagcgcgtcttttgattcaactatcaagctttgggaagtcgagcaaggatgccttctgtacagcttgtctggtcataggtataggcaaccagtgtattctgttgcatttagccccgacggcgaatacttagcgagcgggtccctggatcagtgcctacacatctggtctgtgaaagaaggcaggatcctgaagacgtacagaggtactgggggcatattcgaagtgtgctggaacaaagaaggcagcaagattgctgcctgtttctccaacaacacagtctgcgtgatggatttccggatgtag

SEQ ID NO: 48 - DNA, 1242 bp, Zea mays
atggcgtccgagatgagcaaaaacgtgaaggccctcgacgagcaggaggtcacctcgcagcactcacgcgcccagaccagcgacgctgccgaggagcagcagcagcaacagcaggcggtggacccgctggcgcggcagtcgtccattatgtcgctgacgctggaggagctgcagaactcgctgtgcgagccgggccgcaacttcggatccatgaacatggacgagttcatggccaacatatggaacgccgaggagttccaggccgccacagccggctgcaacaaggagggcgcggagcgtgagccggtgcccgtggcgacgacgacgggcacaggtgagaacggaggaggaggaggaagtgggaggggactggttcggcagggttcgttcgcgctgccgccgccgctgtcccggaagacggtggaggaggtctgggccgagatcagccagggcccggcggacttccaggccagcgcggcgccgcagcccgtggcgcagccccaggcggcgagcggcggcggcgtcgcggccagcgggcggcaggcgacgctgggcgagatgacgctggaggacttcctcgtgaaggccggcgtcgtgcggggcgccttcgccggccacggccacggcgtcggcatggtcccggccggcccgatgggcatgcagcacaacgcggctcctcccatgatgtaccaggtggcggcagcggcggcgccgccgcccggcgctgtatacccggtgatgggcgacggcatggggtaccacggcggcgggtaccccgggggcgtggcggtggtgccgcccccgccgccgtctcagtgcgtggcggccgcccgccagcccggggtcgtcggacgggatgagcgccatgacgcaggcggagatgatgaactgcattggcaacggaggggtggtccgcaacggcggcggcgggcgcgcggaagcgcgacttccccgaggacgggtgcaccgagaagaccgtggagcgacggcagcgccgcattgatcaagaaccgcgagtccgcggcccggtcacgcgcccggaagcaggcgtataccgtggagcttgaggctgagctgaaccatctcaaggaggagaacgagcgcctcagagcagaggagaggacgattctgctgtcgaagaaaaagatgctggtggagaagatgatggagcaggcaagggagaatgtgagcgccaagaaggtcggtcccggactgcgccggtggggcagcgccatgtggtga

SEQ ID NO: 49 - DNA, 1767 bp, Lycopersicon esculentum
atgctccgttccttcgcttccaaacgctctcttcaatcccttctccaccaccattaccgccgctgccgtcagaatcctcaattcccaatcatcaatccccgtcccttttcttcatcgccgggaccgccgtcttccgacgccgagctccggaaatacatcggatacacacttctcctcttaggttctgctgccgccacgtattattcctttccattctcggaagacgcgagagacaaaaaagctcagctatttcggtatgctccgttgccggatgatcttcatactgtgtccaatgggagtgggactcatgaggttcggactcgcgctttcttgcaacccgagtcagtggaggagcttgaagggatagtgaaagaagcgaatgtgaggaagcataagatccggccggttgggtcgggtttgtctccgaatgggattgggttaacgcgagctgggatggtgaatttggcgttaatggataaggttttgagtgtggataaggagaataaaagggttactgttcaagctgggattcgagttcagcagcttgtggatgagattaaggagtttgggattactcttcagaactttgcttccataagagaacaacagattggtggcattgttcaggttggtgcccatggcactggtgccaggttgcctccaattgatgaacaagtcataagcatgaaagtggttacccctgcgaagggcacaatagaaatttcaaaagagaaagatccagaactcttttatctagctcgatgtggacttgggggacttggtgtggttgcagaagtcactcttcagtgtgttgagaggcaggagcttgtagaacatacattcctgtctaacatgaaagatatcaagaaaaatcacaagaaattcctatccgagaacaagcatgtcaaatacttgtacattccgtatactgatgccgttgtggttgtgacatgcaatcctatgtctaaggagaaaggtccaccaaagaacaaacctaaatatactgcagaagaagccttgcagcatgtccgagatctctatttggagtcgttgactaagtacagagattctggttctccaagtgaacctgaaatagttgaactatcattcactgaactgagagataaactacttgcgatggatcctctcaacaaggagcatgtaattaaagtcaacaaagctgaggcagaatactggaggaaatcagaagggtatcgagttggctggagtgatgaaattttagggttcgactgtggtggccaccagtgggtatcagagacatgtttccctgcaggtacactctcaaagcctagcatgaaagacctggagtacatagaggagttgatgcagctcattgagaaagaaagtgtacctgcccctgcacctatagagcagagatggactgcttgcagtaaaagtcaaatgagtccagcttatagctcagcggatgatgatatattctcatgggttggaattatcatgtatcttccaaccatggatgctcggcagagaaggcaaatcacggaggagttcttccactacaggcatatgacacaatcacagttgtgggatcagtattctgcttttgatcattgggcaaagattgaggttcccaaggacatagaagaccttgcaggtctgcaggcaaggctaaagaagaaattccctgtggatgcatacaatcaagcgcgaaaggagctggacccaaaccgcatcctatctaataacatgcttgaaaagctcttcccttcctctgaggctgtgtaa

SEQ ID NO: 50 - DNA, 1273 bp, Zea mays
tccgagcacgacaccaccgaagccaccccgacgaagcccgacgccaccggagccgccctgacgcagcccgcggccgccggagcctctgcccccgtccccaacgccaccggcgcccgccccgaccccgccggagctcgcttcaccggttcatcgtccggcaaactggtggtggagggggggaagtcgaagaaggaggaggagagcctgccgccgggcttcaggttccacccgacggacgaggagctcatcacgtactacctgcggcagaagatcgccgacgccagcttcacggcgagggccatcgccgaggtcgacctcaacaagtgcgagccatgggatctcccggagaaagcgaagctgggagaaaaagagtggtatttcttcagcctgagggaccgcaagtacccaacgggtgtgcgaacaaaccgtgccactaacgctggttactggaagacaacggggaaagataaggaaatcttcaccggtcagctaccagccacgccagagctagtagggatgaagaaaaccctggtgttctacaaaggaagagctcctcggggcgagaagacaaactgggtcatgcatgagtatcgtctgcatcactcctctagatcagtccccaaatctaataaggacgagtgggtggtgtgccgggtgttcgccaagagcaccggcgctaagaagtacccgtccaacaacgcgcactcgcggttgcaccaccacccgtacgcgctggacatggtgccaccgctgctgcagcacgaccccttcgcgcgccaccacaactacccgtacatgacctcggccgacctggccgagctcgcgcgcttcgcccgcggcacgccggggctgcacccgcacatccagccggcgccgcaccccgggacgtcggcgtcggcgtacatgaaccccgccgccgccggggcgccaccgtcgttcgcgctctctggcggcctcagcctgaacctcggcgcctcgccggccatgccgccgtcgctgccgccgacagcattccacgcgacgatgtcgatggcgatgagcggacagacggcggcgccgagttgtgccggcaccggtaataaccatcgtcatcaggtggtggcgggtgagcaccagcagcagcagatggcggcggcgggggctcggcggctgcgtgatcgtgcccggagcggacggagggttcgtcgccgacgcggccgccgggggtcggtaccagagcttggacgtggagcagctggtggagaggtactggcctgccggctaccaggtctag

SEQ ID NO: 51 - DNA, 753 bp, Zea mays
atggcgtcgcggcgctgtctcctccgcttcctctcgatccgcctcgttcctcagagatctcaacctcttgcgccgatctcgactgcgacccggaccctaacctctttgtccgaggccctcggctccccagctccccgggccctcgcctccccccggctgtactacccctcgcgctgccacttcgcgacccgctcctccggcgacgaggacgacggagaagacgaagaagagcactacgacgatgaggggagcgatggggaatggggggacgatgaggaggtggtggcggcgaagaaaccgagcgggaagaccgaagaggagaaggtagcggaggcggcggagatcggctacaaggtgttgggaccgctcggggctgacgataaacccttcaagccctacgagcccgtcttcgccgtcgtacagatcggctcgcaccaattcaaggtgagcaatggcgactccatcttcacggagaggttgaagttctgtgatgtgaatgacaagttggtcttaaaccgagttctcatgcttggttcacaagctcaaacagttattgggaggccaatactacctgatgctgctgttcatgctgttgtagaagaacatgccttagatgcaaaagtgatcatattcaagaagaaacggagaaaaaattaccgccggacaaagggccatcgacaggaattgacaaaactgagaataaccaacattgaaggaatagataagccagagagcaaggtgtctgttctctaa

SEQ ID NO: 52 - DNA, 1110 bp, Zea mays
atggcgacagtcgcagcccgccggctgcttggcacggcggcggaggctaggctattgtcaatgaaatggtgtacatgctcttgttcaattagtgtgaaccatgtgcttctgaatcctggatggatgttgtttcatcagtttgaggtttgtggagatattaattctgttttgatgcgtggtagctgtactgtactgaacttccatcagaatatggttctttgtccgaggtgcatatctgtggagagaaataacaagcaaacctgtgttaagctctttgcagagaatacaagttctctcaagaacggttcctcagccccaatagcttcctttatcgccaaacttattgtatctcttccacctaatcagcagaccatagtccacccaggaatttttgacaaacagctgaaatacgacggttttgtgtggacaatcgatagcaccgtcactgggaggtttgtgattgagatagagtttcttgacctgaaggtcgctgatccgtctggcggggagccggcctcgatttgggcctcccgccaggtcaagcagtgctcggacagcacggccctgtcgtccctggctcggatgctgcacgaggacgtcctcaccgacatcaccatcaacgcggcggacggcagcgtgggcgcgcaccgcgcggtcctggcgacgcggtcgccggtgttccggagcatgttctcgcacgacctgagggagaaggagctctccaccgtggacatcaccgacatgtccctggacgcgtgccgcgccttcctcagctacatctacggcgacgtgcgcggcggcgaggagttcctggcgaaccggctggcgctcctccgcgccgccgacaagtacgacatcggcgacctcagggaggcctgccacgagagcctgctggaagacatcgacgcgcgcaacgtgctggagcggctgcagacggcgcacctgtaccggctgccgaggctcaagggcggctgcctgaggttccttgtggacttcaggaaggtgtacgagatgcacgacgacgacctcaacgcgttcctgcagacggccgacagggaactcgtggccgaggtgttccatggcgttcttgccgcgtggagcgggcggtaa

SEQ ID NO: 53 - DNA, 1272 bp, Zea mays
atgcgaagtgtttgccagaccctacgtgtggtcacagatagagagatggaagacgaaacggtgctggaaatgaacgagctgaactcttttactcctcatgggaaggacaaagttgagttgtcctttggatgcaattcagcagatcgtagaggagaggcctcttggacaagtctggcaggaacatcacagcaagaatccgagttagctgcattgcggatgcatggaatgttctcacctggggggcagggtccatctctatctggtgttcaggcaactgctgaaggtagcaaggcaaaaaggcgtacaaaggccgagaagaccgttagtttgcagattcttcggcagtacttcgctggtagcctgaaagatgcagcaaggagccttggagtgtgccctacgaccctcaaaagaatttgcaggcagcatggtataacccgctggccatcgcgaaagatcaagaaggtagaccactctctaagaaagcttcaacagatcattgattcggttcatggagcagagacagctttccagctaaacaccctgtacaaggatatcacgaacacctcaatatcatctgacaacaatttgtcaggaagtgtcacggttcctccaaccaaccagagcaatctcaccgacgtcaacaagcaccaaccccacaagtcaagcagtaatgtgccatcaacttcacactcacactcttcgtgcagccacagttctgagtcaagtccctcatgtagcggtggtgcaacaaaacatgcacaacagggtataattgatcagatgaagtcagaaaatcctgtgaaagacagctctattcagactctgcaaacagaaaacacttcattatttgagcatttctcagttaatgagactccaattgatcttctacaggatgttactgaaaaggctaatggtggacatcattcttctcgaagcccgttgtcccccaatcccaagcagaacacagatgcaaatatgagagtaaaggcaacatttggctcagaaaaagtgagattcagactgaacccagagtgcaattttcaagaactgaagcatgagatagcaaaacgtttgagtatagtagacacaaaccccttggttttgaagtacttggatgatgattcagaatgggtcttgatgacatgcgatgcagatctacaggagtgccttcatgtatacaaactagcaggaatccaaacaatcaaaatttcagttcatttagctgttagtccagctacaagggtgacaactggtcacactggtttgtcatga

SEQ ID NO: 54 - DNA, 1446 bp, Zea mays
atgtcgtcgtcgtccgggacgacgatgccgctggcgtaccagacgtcggcgtcgtctcccgagtggctgaacaagggcgacaacgcgtggcagctgacggcggcgacgctggtggggctgcagagcttcccgggtctggtggtcctgtacggcggcgtggtgaagaagaagtgggccgtgaactcggccttcatggcgctgtacgcgttcgcggcggtgtggatctgctgggtgacctgggcctacaacatgtccttcggcgacaggctgctgccgctgtggggcaaggcgcggccggcgctgagccagggcgggctggtggggcaggccggcctccccgccacggcgcaccacttcgccagcggcgccctggagaccccggccgcggagccgctgtacccgatggccacggtggtgtacttccagtgcgtgttcgcggccatcaccctggtgctggtcgccgggtcgctgctgggccggatgagcttcgccgcgtggatgctgttcgtgccgctctggctcaccttctcctacaccgtcggcgccttctccgtatggggcggcgggttcctcttccagtggggcgtcatcgactactgcggcggctacgtcatccacctctccgctggcttcgccgggttcacggcagcctactgggtggggccccgggcgcagaaggacagggagaggttcccgccgaacaacatcctgttcacgctcaccggcgcgggcctgctgtggatggggtgggccggcttcaacggcggcgggccgtacgccgccaacgtggtggcgtccatgtcggtgctcaacaccaacatctgcaccgccatgagcctcctcgtctggacctgcctcgacgtcgtcttcttcaagaagccctccgtcgtgggcgccgtccagggcatgatcaccggactcgtctgcatcacgcccgccgcagggctggtgcaggggtgggcggccatggtgatgggcgtgctggccggcagcgtgccgtggtacacgatgatgatcctgcacaagcggtcccggctgctgaagcacgtggacgacacgctgggcgtcatccacacgcacggcgtggcggggctcctgggcggcctgctcacggggctcctcgccgaccccaccctgtgcgcgctcttcctgccggtcaccaactccaagggcgccttctacggcgacggcgcgcagctcggcaagcagctggcgggcgcgctcttcatcatcggatggaacgtggccgtcacctccatcatctgcgtcgccatcaacgccgtcgtcccgctgcgcatgacccaggacaagctcgaggtcggcgacgacgccgtccatggcgaggaggcgtacgcgctctggggagacggcgagctctacgacgtcaccgaccacgggccacgcgccgccgccgccgtcgcgcccatgtccacgcccccgaattga

SEQ ID NO: 55 - DNA, 1110 bp, Zea mays; identical to SEQ ID NO: 52

SEQ ID NO: 56 - DNA, 2346 bp, Zea mays
atgccacatcccccgcgagcaactactaccatggcatcctcccctccacctcctcgccaggaagaggaccagcaacgggaagaagggcaccaccatggcgacggaggcgacgacgaccagatcaccacaccgctcctggtggaagcggcgacgacgtcgtcgccgtcgccgtcggagggagacgatccagagaactcgccgatcgagcaggtggcgctgacggtgccggtgggcgacgacccgtcgacgccggtgctgacgttccggatgtgggtgctgggcacggcgtcgtgcgcgctgctgtcgttcctgaaccagttcttctggtaccgcaaggagccgctgaccatcacggccatctcggcgcagatcgcggtggtgccgctgggccgcctgatggcggcggcgctccccgcgcgcgccgtgctccgcggcacccgctgggagttctcgctcaacccgggccccttcagcgtcaaggagcacgtgctcgtcaccatcttcgccaactccggcgccggcaccgtctacgccatccacgtcatcaccgccgtccgcgtcttctacggcaagcacatcaccttcttcgtctccctcctcgtcgtgctcaccacccaggtgctggggttcggctgggcgggaatattccggcggtacctggtggagccggcggcgatgtggtggccgtctaacctcgtgcaggtctccctcttcagggcgctccacgagaaggagcggcgcgtgaagggaggcatgacgcggaaccagttcttcctggtggcattcgtctgcagcttcgcctactacgtcttcccgggctacctgttccagatgctcacctccctgtcgtggctctgctgggcgttcccgcgctccgtggtggcgcagcagctggggtcggggctgagcgggctgggcgtgggcgcggtggggctcgactggtccaccatctcctcctacctcggaagcccgctcgccagcccctggttcgccaccgccaacgtggccgccggcttcgtcctcatcatgtacgtcatcacgcccgccgcgtactactggctcggcctgtacggggcgcgcagcttccccatcttctccgacgggctcttcaccgccgccgggcagacgtacaacatctccagcatcgtggactccaacttccggttcgacaccgaggcatacgagcgcaacggcccgctctacctcagcaccttcttcgccgtcacctacggggtcggcttcgcgtccctcaccgccacggttgtgcacgtcttcctcttccacgggagcgagatctggcagctgagcaggtcagcgttccaagagaagaaggtggacgtgcacacgaggctgatgaggaggtacaggcaggtccccgagtggtggttcatctgcatcctcgtcgccaacgtcgccgtcaccatattcgcctgcgagtactacatcgagcagctccagctgccctggtggggcgtcctgctcgcctgcgccatcgccttcttcttcaccctcccgatagggatcatcacagcgacgacgaaccagactccaggcctgaacatcatcaccgaatacatcatggggtacctgtacccgggccgtcccgtcgccaacatgtgcttcaaggtgtacggctacatcagcatgacgcaggcgctggccttcctgcaagacttcaagctgggccactacatgaagatcccgccgaggaccatgttcatggcgcaggtggtggggacgctgatcgcggcgctcgtgtacatcgggacggcgtggtggctcatggacagcgtccccaacatctgcagcacggagctgctccccgccgacagcccctggacgtgccccatggaccacgtgttctacgacgcgtccgtcatctggggcctcatcggcccgcgcaggatcttcggcgacctcggcacctactcggcggtcaactggttcttcctgggcggcgccgtcgcgcccctcctcgtgtggctcgcgcaccgggtgttcccgagccagagctggatcctgctcgtcaacatgcccgtgctcatcggctccaccggcatgatgccgccggccaccgccgtcaactacaccacgtggatcattgccgggttcctgtcggggtacgtggtctacaggtaccggcgtcactggtgggagcgccacaactacctgctctctggcgcgctcgacgctggcctggcgttcatggccgtgctcatctacctgtgcttgggcttggagaacgtcggcctcaactggtggggcaatgatctggacgggtgccctctcgcctcttgtcccactgccaaaggtatcgttgttgagggctgcccggtgtatacatga

SEQ ID NO: 57 - DNA, 855 bp, Zea mays
atggtgatggaggagacgatagacgacagtgagatgagcttgtcgaacatggtgctgggcttcctggaagatttcgagagggacgagcgacggccggagaacgacgacgacaacaacgaggaggagggctccagcggcggcgacaccgccgagagcaaggccttctggcagacccaacacttgcagctgcgcgaggcactggccaagggcagcccagccgagagcaggatccgcgcggacacggaggaggccgtcaagagcatgcgcgccgcggcctgctcctgctcctgcacggggcggcccgccgcccgggactgccggccgtgcatgctccggcacgtcgccgaccggctgcgcgacgccggctacgacagcgcgctctgcaaatccaagtggacgcgctcgccggatatcccttcaggcgagcacagctacgtggaggtggcggtgcagacgaggagcggcaagtccgtgcgcgtggtggtggagctcagcttccgcgccgagttcgaggtggcgcgcgccagcgccggctaccgcgcgctggtgaccgcgctgcccgaggtgttcgtcggccgggccgaccggctgcgcggcgtcgtcaaggtcatgtgcgccgcggccaagcagtgcatgaaggataacaacatgcacatgggaccctggaggaagcacaagtacatgcaggccaagtggctcggcacgcccgagcggggagcggcggcggtggcggcggcggagacgccggtggtggcggttccgtcggtgacggtcggctcgccagagaagcagaccaagttcagggcgtccatgctgaccttcgactttggccggaccgcgctggaggtcgcgtga

SEQ ID NO: 58 - DNA, 258 bp, Zea mays
atgtccgcctcacgcagctcctctcccaactccatctcacagtggagccagaaagagaacaagatgtttgaagaggcactcgcatactacggcgagggcacatccaaccggtgggacaaggtgtccagagccatgggaggcatcaagtctgctgaggaggtgcgctgccactatgaagatcttgactacgacgtcaagatgattgaatcaggccacgtgccgtaccccaagtacaagacacatggattctggacctga

SEQ ID NO: 59 - DNA, 927 bp, Physcomitrella patens
atggctgcacaacctctgaggcgcttgcatctcgcgtgctgcaaaatttacatttccgacactcgaaatgcggctgcgttgcaagaaattgagtctactttccgcgcgcatccagaggcacctcttctgcacgtttttgaggaccacgaatacaatagagtgggttatactcttgcaggctcggtctgtagttctgagtcgcgcaatgcaagaacacctctgcagtcggcagtcacggatgttgtgcggacggcattgcggaccatcgatttgaggcaacattcaggaagtcatccccgactgggagttgtggatcacatttgcacgcatccactcggtacggcgaccatgactgacacaacagcaatcgcagaagggattgcttctgaaattggtcaagaacttaaagttcctgctttcttgtatggagctgcccatcggaacggaagaccattggacgacattcggcgtgctcttggttatttccaacccagcaacggaggtctttggattggttcaaacattttccctgctactatgcaaccagattttggaccaagagttgcaccgcctagtagcggtatcgtagttgttggagcttgtccctgggtaatgaattacaatgttccgctgacaacgatagacttagacaagggaaaacgcatagcaagaaaagtgagtgaacgaggaggtggtttggccaaagtgcaagccatggccttactgcatggcaccgattgcattgaaattgcatgtaatttgctggatacggatgtttcaaatccacaggcagtgcaacatttggttgcagcgcttgcagccaaagaaggagttcaagctagtaatggatatctaactggtcattcgaaggaggatatcctccgattagcctcggagaagctcaatgctctcgacgagaaattgtag

SEQ ID NO: 60 - DNA, 906 bp, Zea mays
atgatgctgaggccgcccgcgttagcgtgctgcaaactctacatctccgaggcccgcaactcgggggcgttgcgtgccatcgagcacgcggcggcggcgctccgcccgttggccgtgctcgtcaacaccttcgccgacgacgcctacaaccgggtcgggtacacgctcgtgtcccccctcgcgggcggcgccgcctcgccgccgctgcgctgcgcggcgttccgcgtggtcgcggccgcgatcgaggccgtcgacctggacgcccacgccggcgcgcacccgcgcctcggcgtcgtcgaccacatcgccttccaccctctggccagcgcccgcctcgaggacgtcaccgcgctcgccagggccgtggcggcggacatcggagacaggcttcaagtgccgacgtacctgtacggcgcagctcacagagacggcaggacgctggcgtccatcaggaggcagctgggctacttcacgccgacctcccccggcggcgagcagtggcacggcgcgccggactcgctgctgccggtggccccggacgccgggccccggacgtcgtccgcgtccaatggcgtggtggtggtgggcgccacgccgtgggtggacaactacaacgtgcccctggccacgaccgacgtcagcgtcgcgaggcgcatcgcgcgcgcggtcagcgagcgcggcggcgggctcgcgtgcgtgcaggccatggggctcgcgcacggcgacggcgccaccgaggtcgcctgcaacctacttcacccggacgcggtgggcgccgaccaggtgcaggagagggtgagccggctcgccgccggcctcggggtcggcgtcggccaggggtacttcaccgacttctcgcgggagaaggtcgtcgagctgtacttgcaggccgctcaagctgcctga

SEQ ID NO: 61 - DNA, 2142 bp, Chlamydomonas reinhardtii
atggccaacacaaacgtggcttatcccgttttgggggtttacttgcttctggtcctgggcgccggcctccttgcggcgttcgtgaaccgcatccacctccgcaagggccatggcgacaaggtgcgcgagcacttcatggccggcaaaggcttaggcacattcgtatggttctggacgatgatggcgacgctattttcgggctactcggtttccggtattgtgaacgaggcctacggaaccggctggatggccactcgctggattcccggcggtgtgggcctctatattgcctttgccgtcatggcgccgcgcatccacgcagtcgccaagcgccgcggctactttactatgtctcaggtcctgtttgaccgcttctccggacccagcagctgccactggattatcccgcacatcatcgcgctgctggcgttcttctgcctgcagctgcccgtgttcacctacctgatcacccagttccagtcgctgggccgcgaggtgcgcaccttcaccgccggcgacatcagcgccaccaccgccatctgcgtggccgcttcggtgctgctcatctgcgacctgctgggcggcatgcgcgccgtcgccttcacagacgtgcttcagggcgtcgtgctcttctgcggctccatcattttcctggtaatccagaagaccgagcttggcggctttgaggatgcccacaactactggggcaaccctgccaatgtggccaaaccgcgtgtttggaacatgcagcacgtgccgaacgaggtcaaccaggtcagctactttgacttcgtgttcaagaccaccgcggccgccaccatgttcccccacctgacggcccgcctgttcgcggccaaggacgccaaggtcatccgcaagggcatgtcgatgatggtgttcaccttctttgtggttcagttctcgtccatgatcaccggctgggtggccatcgccgccctacccgtgctgcccaagggctcctcggcctttggcgccatgctgctgcttgtcgcccagcagggcaccggccaggccgtggtgtctgcgctgctgctggcctccgccatctgcgccatgatgtccaccgccgactctgcgctgctggcctgtagcagcatgtgggtgcgcgacctgtacaccaagtacttccgcccccacgccagcgagatggagcagctcatcttcggcaaggtcgtggccatcatcgcgctggccatcggcgtactgctcggcaacctgtccattgagaccggcaagcccgacctgtcgggcctgtttgcgctgcagaacgtgacgcccatccacgtcgtgcccgccgtctggctgggcctgcactggcgcggcctgcgtggcgaggcggtgctggtgggcttcgtgaccggcctgggtgtgacgctgggcattgtgttctcggacaagaacatctcgcgctcggtgggctcggacatgaccgcgagcggcctgtcgtcggcctggatcggcttctgcatcaacatcgctctcgtcatctccatcggcagcctgatgcagttcttcccgcgcctgttcccctggatcaagccgctgcccccgcccgccgaggaggaggagactgcccccgatagcggcgacaccgacgccgcctcgcaggactcgcaggacgccatcgccattgccgccaacgaggccgccattgccgccgctaagggcattgaggcgcccgagctgccgcccgtccccgtcgacgctgctggccaccacaccatccccgccggccaccacgccggcgagcagtacagcgcttttgtgccgcgctggttggacattggcacccgccgcgacaagaccttgaacccttacttctggaccttcatgggcattgtgctgctcttcaccgtgcccttctaccgcccgcccggctccaaggacggctacgtcggctccatcggcgcctggcccttcacctcgctgttcctgtcgggcatcctggccatctgcggctccgtcaccttcctgtacttctggaccgactaccgccccatcaaggagtccgtcgcgcccggcatgttgccgccgcaggaggtggtggtcgcggagccgggcgccgagaacggagcggcagtcagcgtggtggcggccgccgcagagcccatcaaggcctag

SEQ ID NO: 62 - DNA, 1407 bp, Chlamydomonas reinhardtii
atgttgcagcgcgctgcatgtcagctgcttcaggcctcacgcctggtcgcacccgcgatgggcaacctggcgctgcgcgggctatcagctgcgccccagcctgcagaggacgctgatgcaggtcagagcagaggcccttccacctctggcggcggctccggggtgattgagaagaagggcatcgccctgcgcggcgtgccgttatacctggacatgcaggccaccacccccatggacccccgcgttatcgacgccatgctgccgtacatgaccgagcagttcggcaacccacactcacgcacccatctgtacggctgggagtcggaggaggcggtagaggatgcacgcaagcagattgccggcctcatcggcgccgaccccaaggagatcatcttcacctctggcgccaccgagtccaacaacaccgccatcaaaggagtggcctcatacttcaaagacaagaagaagcacgtcatcaccacacagacggagcacaagtgcgtgttggacagctgccgctggcttcagcagcgtggctgggacgtcacctacctgccggtccggcccgacgggctgctagacctggcggtgctggaggcggccatgcggcccgacacggcgctggtcagcgtcatggcagtcaacaacgagattggagtggtgcagcccgtggacgagatcggcgagatgtgccgcaagcgtggcgtgtacttccacaccgacggcgcgcaggcggtgggtaagatccctgttgacgtgaacaagagcaagatcgacctcatgtccatcagcggccacaagatctacggacccaagggcatcggcgcgctctatgtgcgcaggcggcctcgtgtgcggctggaggcgctgatgagcggcggcggccaggagcgcggcctgcgctccggcaccgtgcccacgccgttggtggtggggctgggcgcggcgtgcgcggtggcgggccgcgagctgcaggccgacctggcacacgtgcggcggctggaggagcgcctgcgcaccggcatcaccagccagctgcagggcgtgcacctgaacggccccgccgaccccgcgcgccgctacccgggcaacctgaacctgtcgtttgcctacgtggagggcgagtcgctgatcatggggctcaaggagatcgcggtcagcagcggctccgcctgcaccagcgcctcgctggagcccagctacgtgctgcgcgcgctgggcgtggaggaggagctagcgcacaccagcatccggtacggcatgggccgcttcacaaccgacgcggaggtggaacgtgccatcgacatgactgtgtcgcacgtcaacaagctgcgcgagatgagcccgctgtgggagatggtgcaggagggcgtggacatcaagagcatccagtgggcgcagcactga

SEQ ID NO: 63 - DNA, 855 bp, Chlamydomonas reinhardtii
atggcgcatcagattcttcgctcgtcgcgtattgcgtccagcacccgcgtggcgcagcgtagcagccgagttcatgctgtgtcagttcgctgcgcggcggctcccgccgacgtgatgctcgaggtcaaggacctcactgcttccatcgcgggcacccacacccccattctgaagggcgtgaacctcaccatccgcaacggcgaggttcatgcgatcatgggaaagaacggttcaggcaagagcacgctcagcaaggtgctggtgggccatccggactacgaggtgacgggcggcacggccgttttcaagggcaagaacctgtttgagatggagcccgaggagcgctcgcacgcgggtctgttcctcagcttccaaaccccgatcgaggtgccgggcgtgagcaacgtcgatttccttcggatggcttgcaattcgcgccgcaaggcgctggggcatccggagctggatcccctggagttttacgcctacattatgccaaagctggagatgctgaacatggaccccaccttcctcaaccgcaacgtgaacgagggcttctcgggaggcgagaagaagcgcaatgagatcctgcagctggctgtgctggaggccgacatggccatcctggacgagattgactcgggcctggacatcgacgcactgcgggatgtggccaaggccgtgaaccagctcaggagtgacgacaccggtgtcctcatggtcacgcactacaagcgcctactggactacatcaagcccgacttcgtgcacatcatgcaggccggcgagatcgtgaagacaggcgacatgagtctggtcgaccagctggaggccggcggctacgccactctgtag

SEQ ID NO: 64 - DNA, 1263 bp, Nitrosomonas europaea
atgggtatcaaaaacctttataaacggggagtgatggggctttacggtgttgcttatgcagtagccgcattagccatgacagtaacattggatgtctcgacggtagcagctcatggggagcgatcccaggagccgttccttcggatgcgtacagttcaatggtatgacatcaaatggggtcctgaggtaaccaaagttaatgagaacgcaaaaatcaccggtaagtttcacttggctgaagattggccacgtgcagctgcacaacctgatttttccttctttaacgtaggaagcccaagcccggtattcgtacgtttgagtaccaagatcaatggccatccatggttcatttcaggtcctctgcaaattggccgtgactatgagtttgaagtcaatctgcgtgcacgtattccgggacgtcatcacatgcatgccatgctgaacgtcaaagatgcaggtccgattgctgggccaggtgcatggatgaacattaccggaagctgggatgattttaccaacccactgaaattattgacgggtgagacaattgattcagaaaccttcaacttatcgaacggtatattctggcacgttgtctggatgtccatcggtattttctggattggtgtttttacagcacggccgatgttcctgccacgtagtcgtgtattgttggcctacggtgatgatctgttgatggatccgatggacaaaaaaatcacctgggtacttgccattctgacgctggcgctggtatggggtggataccgttatacggaaaataaacatccctacacggtacctatccaggcaggtcaatccaaagtggcagcattaccagtagcacccaacccagtatcgattgtcattacagatgctaactatgacgtaccgggacgtgcactgcgtgtcaccatggaagtaaccaataatggcgacatacctgtcacatttggtgagttcaccacggcaggcatacgtttcatcaactctactggccgtaaatacttggatcctcagtatcctcgtgaactgatcgctgtcggtttgaatttcgacgatgaaagcgcaattcaacctggtcagaccaaggaactgaaaatggaagccaaagatgcattgtgggaaatccaacgtctgatggcgttgctgggtgacccggaaagccgttttggtggattattgatgtcttgggatgcagaaggtaatcgccatatcaacagtattgctggtccggtgattcctgtcttcaccaaactctga

SEQ ID NO: 65 - DNA, 603 bp, Capsicum annuum
atggaaggtggcaattttctcacagtttgtcttattttagttgccttgactacttctaattatttgaaatcagtttcagcggcaaggccagctgtgggggaaacaaatacggagtttataagaacatcttgtaagtcaacaacttatcctaacttatgtttcagctcattatcaagccgtgcaagtgctattggagcttccccacaacttctagcacatgaatccctcaccgttagcctcgaaacagctcaatcaacatcctctatgatgttgaagttggcacacggtcaaggcatgacgccgagagagatcggcgccatgcatgactgtgtggaggaactaagtgacacagtcgttggactgaggaagtctttgggggaaatgaagcaactaaggggcaaagattttgatttgaaaatgaatgatattcaaacatgggtaagtgctgccttgacggacgaggatacatgcactgaggggtttgatggaaaagtgatgaacgggaaagtcaagacagttgttaggggaaagattcttgaagttgcacatttgacgagcaatgctttggctttgatcaaccgtctggctgcccttcacggctag

SEQ ID NO: 66 - DNA, 786 bp, Glycine max
atgatgccaaccccactccaagttcggaggaggcctgtctttgaatttgatgatgagcatcttcagaatcaaaagcccaccattccaatggaattgcagattgtcagttcccaacaacattttcgtcttcccgatggttgggtggtcgagaaaaagccccgtccctctcacgagtctcgttttgacaagtattactatgagccaggcaccggaaggaaatttcgttctttgttatctgttcagagacatctagcaggagaaacaagagactatgttgttgctaacacaatgatgtcaaaaaatgaaaacactaattttattgagtctggggcaggacggaagttcggttccttgaaagctcttgagaatttcttattagaagaaaatgcatgtataacaacacttaagtcagcagtgaaatcaggcactggagagcaaatggcttgtggtgtgagaagtgaccttaaacctgtccataaaggctcttctgtaggagaagaagtacaaatcactccaaagtccttgaaacacactattcaatctgcactttctgagaaatcagattctcggaagaaaaccaagtcggagaaggacaacagagcttccatgcataacttaactgtaccaccaccagcaaaagtaagctgggttctgtctggttccggggggttctggagccctttccttgatgattccattgtaccagaacctgaaaagatgaaatggtccaaagcatttgtactatcaatccatgatgatggagatattaatggacttaatagctga

SEQ ID NO: 67 - DNA, 597 bp, Glycine max
atggatgaagtggatctagatcttgagaactatgaagaactttttggtatggccctcagtcattctgaggagctttttgaaaatggtggaattgatagcttgtttgggacaaaaggcatgtctgctggagattccaattgtcaggaagctattgctgctgaggggtcgtcggttggacaggtcaatgcaatgcaaccagcttgcagcaatgcagcgtctgcagattccattttgagtactaaaactgaaccaattctttgttttactggaaggcaaactcaatcaaacctttctttttctggtgttactggagagagtagtgctggagactatcaagactgtggggcttcttcaatgcttctcatgggagaacctccttggtttgctccttgtccggagaattccctacaatccgccaaccgtagtaatgctgtcatgcggtacaaggaaaagaagaagacacggatgtttgacaaaaaagttaggtatgcctctcgcaaggcaagggctgatgtcagaaggcgtgtgaaagggcggtttgtcaaagccggtgacgtctatgattatgaccctttgagcacaaccagaagctgctag

SEQ ID NO: 68 - DNA, 1545 bp, Glycine max
atgtgcaagtgtggctcttgtggtacaagaaaacagacacttagtgaatgggaaaaacatacaggttgcagagcgaaaaaatggaaacatagtgtgaaagtgaaaagtacaatgctaccactggaaaaatggatggcagaaaacattccacttgatggaatacctgagcagttagatcaacagcaggtgctggcctttttgcaagagaagtatgagcctgttaatgtaaaatggacaacagaaagatgtgctgtttgcagatgggttgaagattgggaagataacaaaattattatttgtaacagatgccaaatagcagtccaccaagaatgctatggggcaaagaatgttcaggattttacttcttgggtttgtagagtatgtgaaactcctgatgttgagagagagtgttgcctctgcccagtaaaaggtggtgctctaaagccaacggatgttgaaatgttgtgggttcatgtaacatgtgcttggtttcgacctcaagttgttttccaaaaccatgaggccatggaacctgccatgggaatccttaaaattcctcctaattcctttgtgaagacttgtgtgacctgtaaacagagccatggttcctgcataagttgttgcaagtgttctacttattttcatgtgatgtgtgcatcaagggcaggatatacaatggagttacattccatggagaagaatgggactcaagtaacaaggaagctaatatattgtgcaattcacagggttccaaatccagattctgtactggtggtacacacacccctggggattttctctcccagaacttcacttcaaaatcagaggggatgcttcaggggatcagggctaattttatcaaagaatatagagcttaatgaatcttcaaccactgaaaatgacttagtagagccgctgtctgcggccaggtgtcgtgtgtaccgaaggtctcctaataagagagctgatgtgccaataattcacttgctggggggacccagccttcattctttaggtgcaataactcagttgaacatttttaaggatgctgatgaatctaaagtattcacttctttcaaggaacgtcttcaccatttatgggaaacggaaaaatttagagtttgctttggaaaatcgggcattcatggatggggtctcttcgctcgtagagatatacaagaaggagagatggttgttgagtatcgtggtgtgcacgtaaggcgtagtgttgctgacctgagggaagaaaaataccgttcagaaggcaaggattgctatctgttcaagatcagtgaggaagtggtagttgatgcaacgaacagaggcaatatagcacgtttaataaaccattcttgcatgccaaactgctatgcaaggattatgagtctgggtgatcaggggagccgaattgttcttattgccaagaccaatgtttctgctggtgaagaactaacgtatgattacttgtttgatccagatgagcgggatgaattgaaagttccttgcctttgcaaagcccctaattgtaggagatctatgaattag

SEQ ID NO: 69 - DNA, 780 bp, Glycine max
atggattttgattcatctttcttccaataccaaaactttaactcttcctttgtaaattcctctgtttgtgcagaaccattttcttgggagaactttcttttcttcaatgaagaaaacaccaccaccaccacccttaattccttcaccatcactgaccactcctcacaatcacgaatcaaggaatcatcatcctcagattattccaactcttcgggctccttggtcagcactgagtcacaactagaagtctcatccaatttaactcatgcaagccatcaactcgaaacacatgcatcaccacaaccaccaaaagaaggtaacaaagacaagagacccttcagaggagtgaggagaaggccatggggaaaatttgctgctgaaataagagactccacaagaaatggggtcagagtttggattggcacatttgacacagctgaagcagcagcactggcttatgaccaagctgctttgtccacaagagggtccatggcagtgctgaatttcccagaagaagtggtgagggaatcactcaaagacatgcagaacaataataagccatcattggaagatggttcctctccagtgttggcactcaagagaaaacacaccatgaggagaaaatccaaagccactaacaaaaaaaccaaaaggggtcatggaatggagttagaaaatattgtgctttcacaaaatgtgctggtcttggaggacttgggttctgagtacttggagcaacttctcagcttgacttcttctgatgatgatttcctttgctag

SEQ ID NO: 70 - DNA, 1647 bp, Glycine max
atgggagaaaatgaagaagcgatgcagaggcttcactttctgaagcagccgttaaacatggagcaacttagcatcccgcaattcaacccctcgcaaatgcgcgcgaggcagcatcatcatcagaatcagttcgacggtgggaacagtaacaagcgggctggtataccaccctcccacccgcacccgatccctcccatttccccctactctcagatcccggtgtcgcgtcagcacaacaacatttcccctacacccacccacacccgatcactctcgcagccctcgtttttctcgctcgactccctccctcccctcagcccttcccccttccgtgactcctcctcgacttccgtgtcggaagctgctgacgtgtccatggaagatcgcgacgtgagttctcattccctgttgccaccctcacctttctccagaacactcaacaacagtaatttaccattaccccctcgtaaagcgcatagacgctctaacagtgacattccgtttgggttttccaccgttttgcaatcctctccgccgcttatccctcttcggaaccccgtttcagcgaaacctgctcagttagtcaaaagagaaacaccgtgggacaggggtgttgagaataataataataataatgtagaggggtccggggagaagaaatcccctgaaggggaagtggtggatgatcttttctctgcttacatgaatttggatagctttgatgcgttgaactcttctgggacagatgataaaaatggaggcgaaaatcgcgatgatttggatagtagagcgagtgggactaagaccaatggtggtgacagtagtgataatgaggccgaaagtagtgttaatgagagtggggatggtggggtgaggcagggagggaatgagaagagggaagggatgaagaggagtgctgggggtgagattgcgcccaccactaggcactataggagtgtctccatggatagtttcattgggaagttgaatttcgatgaggagtcgcccaagctgcctccttcccccgggcagagaagtgctctgatgtcgcctgctggtggaattgatgggaattcggcggccttcagcttggagtttggaaatggggagttcagtgggcctgaactgaagaaaattatggccaatgaaaagcttgctgagattgccttgatcgatccaaagcgtgccaaaaggattttggccaaccggcaatcggctgcgcgatccaaagagcggaagatgcggtacatttcggagctagaacacaaggttcagactctacagacagaagccaccacactatctgcacagcttactctgttacagagagattcggctggactcactaaccagaatagtgagttgaagtttcgccttcaatccatggaacaacaagcaaagcttcgagatgctctaaatgaggcgcttactgctgaggttcaaagactaaagcttgccacagctgaactaagtggcgattcgcatggttctggctgtttgattcctcaacattctgtcaatcctctgatgttccagcaacagcagcagcctcctactgcatcccaacaaaacattcatcttcaacagcagcaacagcagcagcatcagaatggtaatgccaactcaaattctgacttaaaacaatag

SEQ ID NO: 71 - DNA, 567 bp, Glycine max
atggctccgagggatatcaatagatctaacgttgttgttgccggaggatccaacccgacccgtaaagagatccgataccgcggcgtgaggaagcggccgtggggccgctacgccgccgagatccgcgatcccggcaagaagacgcgcgtctggctaggaacgttcgacaccgcggaggaggcggcgcgtgcgtacgatgcggcggcgcgtgagttccgcggcgcaaaggctaagaccaatttccccacccacgcggagctgacgcacgcggcggcgcgtagccccagccagagcagcacgttggattcgtcctctcccccgacgccgccgttggacctcactcttgccgccccactcgccgccggtggcgcgttggtgttcccagtggcgcggcccgtggtcttcttcgacgcgttcgagcgtgccgaggtgcgcgcgtcgttcgatcttcccgtggcggcgttcagcgactcggactcgtccacggtcatggattacgagcggggctcacgtcggagagtgttggatcttgaccttaatgtccctcctccgcccgaggttgcctag

SEQ ID NO: 72 - DNA, 1005 bp, Glycine max
atgtcgagtggatccgtgagacgggtttcccgtcaagatatccagctggtgcaaaatctcatagaacgatgtctacaactgtatatgagccagaaagaagttgtggaaacactattagctcaagcaaaaatagagcctggtttcactgaactagtttggcaaaagcttgaagaagaaaatgaagaattcttcaaggcttattatgcaagattggttttgaagcagcaaataatgcaattcaacaaattgctggatcagcaagtgcaattaatgcagttacactcaagtactgttgcatcactacctacatctaacgggtcacatatccctgcagtgtcatcactacctagctctaatgggtcacatatccctgcaatacctgagaatccagcatgctacactgcagaccgaacccaaacaagtttgaagccagaaaatatgcaacatcatgttgattccagattatctaatgtgtttaataatggcgggtcatcactacatacaagtatgcatgctgcagttgatatgtctgctcatggtaataggattaatggcccttctagcatgctttctgctcaaagcgcaaacatgggtctgatacaaggaatcaatggtggtggaatgatcaaatctgagcctggatattctggttgttctccttacatgtttggtactgatggaaatgtcctggagacacgcccaactattggtggtgcttcagtcacatcattcactaatgttgagtccaactcacattctctgaatgaggtggtcctagatccagacacttcttcatttggatttctggggcagattcccagaaattttagcctttcagatctgactgctgatttttctcagagttctgatatactggagacctattctaggtcacccttcctagctacggataatgagaacttccttgacagaggagaacaggacaataataggctggactccatatcagaaggcttgagttatgaagactttgggagtgagtag

SEQ ID NO: 73 - DNA, 669 bp, Glycine max
atgaggaagggcagaggtggaggcgcctcggcggcggcggtggatgtgaacggatccattttaaaggagcctcggtaccggggcgtgaggaagagaccgtgggggagattcgccgcggagatcagagacccgttgaagaaagccagggtttggttgggaaccttcaattctgccgaggatgctgctcgtgcctacgacgccgccgctcggactctccgaggtcccaaggccaaaacaaatttcccccctctctcacctttttgctatccacaccccaccaccgatcctttcttctacactggtttccacgatcaacaccaccaccacaacaacaacaaccttaacaaccctcaaagacccacttcaagtggcatgagtagcaccgttgagtccttcagtgggccccgccctcccaccaccaccactaccaccacaaccacaactgcgacgccgtttttgactgctacgcggagatacccgcgcactccccctcttgtccctgaagactgccacagtgactgcgactcttcctcctccgtcgttgacgacggcgacgacaacatcgtttcgtcgtcgtttcgacctcccttgccgtttgatctcaacgcgctgccgtttgatgatgctgccgcggatgatgatctacgccgcaccgcgctttgtctctag

SEQ ID NO: 74 - DNA, 2736 bp, Arabidopsis thaliana
atgaatccagagaaattcacacacaagacaaacgagacaattgctacagctcatgagctagctgtgaatgcaggacatgctcaattcactcctttgcatttagctggtgctttgatctctgatcccaccggtatatttcctcaagcaatctctagtgccggtggcgagaacgcagctcaatctgctgaaagagtgatcaatcaagccttgaagaagcttccttcacaatctcctccacctgatgatattccagcgagttctagtcttattaaggtcattcgtcgtgctcaagctgctcagaagtcacgaggtgatactcatttggctgttgaccagttgattatgggtcttcttgaagattctcaaatcagggatttgttgaacgaagtcggtgtagcgacggcgagggtaaagtctgaggttgagaagcttcgtgggaaagaagggaagaaagttgagagtgcttcaggggacacaaattttcaagctttaaagacttatggaagagatttggttgagcaagcagggaagcttgatcctgtgattggtcgtgatgaggagattagaagagtcgtgaggattctttcgaggagaacgaagaacaatcctgtgcttattggagagccaggagttggtaaaacagctgtggttgaaggtttagcacaaaggattgtgaaaggagatgtgcccaacagtcttactgatgtgagattaatttcgttggacatgggtgcgttagttgctggtgctaaataccgaggagagtttgaagaaaggttgaaatctgttttgaaagaagttgaggacgctgaaggcaaagtgattctctttattgatgagattcatttggttcttggtgctggcaaaactgaagggtcgatggatgcagctaatctgttcaagcccatgttagctagagggcagcttcgatgcattggtgctacaacgcttgaagaatacaggaaatatgttgagaaagatgctgcctttgagaggaggttccaacaagtctatgttgcggagccaagtgtgcctgacaccattagtatccttagaggactcaaggagaagtatgagggacatcatggtgtgcgaatccaagacagagctcttataaatgctgctcagctgtctgctcgttacataactggtcggcatttaccggataaagcaattgatttggttgatgaggcttgtgcgaatgtgagagtccagcttgatagtcaacctgaagagattgataaccttgaaaggaagaggatgcagctggaaattgaacttcacgccttggaaagggagaaggataaagccagcaaagctcgacttatagaggtgcggaaagagcttgatgacctgagagacaagcttcagcctctcacgatgaaatacagaaaggagaaagagagaattgatgagattcgaaggcttaaacagaaaagagaagagctcatgttttctttgcaggaggcagaacgaagatatgaccttgcaagagctgctgatctaagatatggcgcaattcaagaagtggaatctgcaattgcccaacttgaaggaacttcttctgaagagaatgtgatgctcacagaaaacgttgggcctgaacacattgctgaggttgtgagccgttggacagggattccagtgacgagacttggccaaaatgagaaggagaggttgattggtcttgctgataggttgcataagcgggttgtgggacagaatcaagcggtaaatgcagtttctgaggcaattctaaggtcaagggcaggacttggaaggccacaacagccaactggatcattcttattccttggaccaactggtgttggcaaaactgagctcgccaaggctcttgctgagcagctgtttgatgatgaaaacctcttagttcggattgatatgtcggaatatatggaacaacactctgtctctcgcctcattggggcaccaccagggtatgttggtcacgaggaaggtggacaactaactgaggctgtgaggaggcgaccttattgtgtcatactctttgatgaagtggagaaggctcatgttgctgtcttcaacactctgctccaagttttggatgatggtcgattgacagacgggcaaggcaggacagtcgatttcaggaactcggtgataatcatgacatcaaaccttggtgctgaacacctccttgcagggctaactgggaaagtaacaatggaagtggcccgggactgtgtgatgcgggaggtgaggaaacacttcagaccagagctcttgaacaggcttgacgagattgtggtgttcgaccccctttcacatgaccagttgaggaaagtagctcggcttcaaatgaaagacgttgctgtccggcttgctgaaagaggagttgctttggcagtcactgatgctgctttggactatatcttggcagagagttatgacccggtgtatggtgctaggcctataaggagatggatggagaagaaggtggtgacagaactgtcaaagatggttgtgcgtgaggaaatcgatgaaaactccactgtttacatagatgcaggcgctggtgatcttgtgtaccgggtagaaagtggaggtctagtggacgcttcaacaggcaagaagtcagatgtgctgattcatattgctaacgggccaaagagaagtgatgcagctcaggcggtgaagaagatgaggatcgaggaaatagaagatgacgataatgaggaaatgatcgaggattag

SEQ ID NO: 75 - DNA, 1137 bp, Arabidopsis thaliana
atgaagatcgttcgcagggattttgttcgtaatggacccggaagcgttaagatggtggcagaggactctgatgatctctggtatgcttataacttgattgctgtgggcgatagtgtaatggctgtcactttcagaaaagttcagagagagatacctggtgggggaagagactctgaacgtgttaaactgaagctggaagtacaagttgaggaggtggactatgacaaagacggatctgttttgcgcatacgtggcaaaaatatcctggagaatgagcacgtaaagattggtgcattccatactttggaacttgagctgaaacgaccttttgtgttgagaaaggaaatgtgggactcaatggctcttgatacactcaaacaggcctcagatcccgctgctagtgctgatctagctgtagttctaatgcaagaaggactggcacaaatcttccttgtgggcagaagtgtgacaagtagccgtgcacgaatagaaacatccattcctaggaagcatggacctgcaattgctggttacgagtctgctttgaagaaattttttgagaatgttctgcaggcctttgtgaaacatgttgacttcagtgtcgttcgctgcgcagtagttgcaagtcccggcttcacaaaggatcagtttcatcgccacttattgttggaagcagaaagaagacaactgagacctattattgagaataaatcacgtataatattggtgcacacaaactctggatatagacatagcctgggtgaggttctccatgcccccaacgtgatgaatatgataaaagatacaaaagcagcaaaagaggtcaaagctctcaatgattttcacaacatgctttcaactgaaccagatcgggcatgctatggaccaaaacacgtggaagttgcaaatgaacgaatggcaattcaaacgcttctcataacggacgagcttttcaggaattctgacgtgaaaacaaggaagaagtatgtgaatttggtggagtcggtaaaagattcgggaggagatgcttttatattttcggcgatgcatgtgtcaggagaacaattggcacagctgactggaatagcagctcttctcaggttccctttaccagaactcgaagacattgagatgtag

SEQ ID NO: 76 - DNA, 441 bp, Glycine max
atggaagaagaaagtattgggttgggaaaaagtttggttgtagaaaaggagggagaaattgaatgcgaggaggagcaagaggaaggtgaagaaattgaagctttgaggaatgaggaggtggaagacaaagagggtgtgggaacaagttcggttgcggagaattgtttgatgaaagaggaaggaggggattatgaaagagcggaaggagatgggaagaagaaggacttgttggagaagatggtggaggacaatcagaagatggtggagatgatgacacaactgtttcagaggaatgagatgcagactacacttctcacctctctctcgcaaagggtggaacagcttgagagagccttggcttgtgagaagttgaggaggaagaaaaagagaaaggctgatgccaaaattaaacgaaataatcctaaaaatggcttcatctag

SEQ ID NO: 77 - DNA, 1140 bp, Zea mays
acccagccaccaggagcataggactgcatgtttagtgctatgttgggattatgcacactttgacgaatgtggaccatgcctactgctctctgattctcgtcgtatagttttgctctgtacatgtgtgcatcaacattgatgggatcattgtttgtgtccgtaagacatccctcggcaactgagcaatccccgcagtcgtccagcacccaaccgaaaagtttgtcctcctggatgtagttcttaaaagcctcgactgcatgtgtggccctttccttggcatccttgggctcacccatgacgtccatccggaggagcacggactcggcgggctcctgcagatccctgatgaggctccctacccctccctccacccctgccagcttcatccggaccatctcaatgatgatcttcaccaccatgtaggcgccgtcgtcgaggaagtagttctccttgagcgcgccgtgcccggtcgtctccatcatcaggtgcgtctccaagtactgcgatcgcgttaacgctttatcacgataccttctaccacatatcactaacaacatcaacactcatcactctcgacgacatccactcgatcactactctcacacgaccgattaactcctcatccacgcggccgcctgcaggagcggagacgcacctgatgatggagacgaccgggcacggcgcgctcaaggagaactacttcctcgacgacggcgcctacatggtggtgaagatcatcattgagatggtccggatgaagctggcaggggtggagggaggggtagggagcctcatcagggatctgcaggagcccgccgagtccgtgctcctccggatggacgtcatgggtgagcccaaggatgccaaggaaagggccacacatgcagtcgaggcttttaagaactacatccaggaggacaaacttttcggttgggtgctggacgactgcggggattgctcagttgccgagggatgtcttacggacacaaacaatgatcccatcaatgttgatgcacacatgtacagagcaaaactatacgacgagaatcagagagcagtaggcatggtccacattcgtcaaagtgtgcataatcccaacatagcactaaacatgcagtcctatgctcctggtggctgtag

SEQ ID NO: 78 - DNA, 1137 bp, Zea mays
cagccaccaggagcataggactgcatgtttagtgctatgttgggattatgcacactttgacgaatgtggaccatgcctactgctctctgattctcgtcgtatagttttgctctgtacatgtgtgcatcaacattgatgggatcattgtttgtgtccgtaagacatccctcggcaactgagcaatccccgcagtcgtccagcacccaaccgaaaagtttgtcctcctggatgtagttcttaaaagcctcgactgcatgtgtggccctttccttggcatccttgggctcacccatgacgtccatccggaggagcacggactcggcgggctcctgcagatccctgatgaggctccctacccctccctccacccctgccagcttcatccggaccatctcaatgatgatcttcaccaccatgtaggcgccgtcgtcgaggaagtagttctccttgagcgcgccgtgcccggtcgtctccatcatcaggtgcgtctccaagtactgcgatcgcgttaacgctttatcacgataccttctaccacatatcactaacaacatcaacactcatcactctcgacgacatccactcgatcactactctcacacgaccgattaactcctcatccacgcggccgcctgcaggagcagagacgcacctgatgatggagacgaccgggcacggcgcgctcaaggagaactacttcctcgacgacggcgcctacatggtggtgaagatcatcattgagatggtccggatgaagctggcaggggtggagggaggggtagggagcctcatcagggatctgcaggagcccgccgagtccgtgctcctccggatggacgtcatgggtgagcccaaggatgccaaggaaagggccacacatgcagtcgaggcttttaagaactacatccaggaggacaaacttttcggttgggtgctggacgactgcggggattgctcagttgccgagggatgtcttacggacacaaacaatgatcccatcaatgttgatgcacacatgtacagagcaaaactatacgacgagaatcagagagcagtaggcatggtccacattcgtcaaagtgtgcataatcccaacatagcactaaacatgcagtcctatgctcctggtggctgtag

SEQ ID NO: 79 - DNA, 429 bp, Zea mays
atgaaaggtaagatcaacggagaagaagaagataacaacaacgtcaaggccacgacggagagtgatatctccgccgtgaaggaagaagaagatccgattccttcgtctcctcctcagtttctcgaacactcgaccggttttaactaccggcgaagcttcaccgatctccgtgatcttatgcccaaccccgtcgtcgaagctggatcttccgacagctgcgactcgagcgctgttctaaacgaagaaaccagctcggagaatgggagattgacgccgccggcgacggtcgccggcgggagtttcttgcagttcgtgaaaacagaggatcacgacgagttttttagcggcgaagaagcttgtggcggcttcttctccgacgtgcaaccgccgtctctgaattggtactccgcgtctgatcactggacatga

SEQ ID NO: 80 - DNA, 1161 bp, Zea mays
atgatgatgatgggcgaaggcgtgagcgtgccgccgtggtcccaccacgtccccgtgagcggcgtcgacgccggcgtcggcggcgacgagatgacgccgtacctgctggcggcgctgcggcagtacctgccgtgcaacgacgccggcgccgccgaggcggacgacgaggaggcggcggccatggccgcgggcgtggacggctacggctgcgacgagttccgcatgtacgagttcaaggtccggcggtgcgcccgcgcgcgcagccacgactggaccgagtgccccttcgcgcacccgggggagaaggcgcggcggcgcgacccgcgcaggtaccactactcgggcgccgcctgcccggacttccgcaagggcgggtgcaggcgcggcgacgcctgcgacttcgcgcacggcgtcttcgagtgctggctccacccggcgcgctaccgcacccagccctgcaaggacggcacggcctgccgccgccgcgtctgcttcttcgcgcacaccccggaccagctgcgggtgctcccgcccacgccgcagcagtctagcgccagccccaggggcgccggcgcgctgcccgagtcctacgacggctccccgctgcgtcgccaggcgttcgagagctacctcaccaagagcatcgtgtcctcgtcgccgacaagcacactcctctcgccgcccaagacgcccccgtcggagtcgccgccgctgtcgccggacgggaccgccgccgccttccgccgcgggtcctggccgggcgccgggtcccccgtcaacgacgtcctggcctcgctccgccagctccgcctcggcacggccagctcgtccccgtccggcgggtggggcggctacccggcgtccgcggctgcctacgggtcgcccacagcgggcggcctctacagcctgccctccaccccgagggccacgccgacagccctcgccaccgccaccgcctccgcctccggctacatgcccaacctggagccgcttgacgtcagcttcggcggcgacgaggagcccgtggagagggtggagtccgggcgggccctccgcgccaaggtgttcgagcggctcagcagggagggcgctgtttcctgctacccagctgccggaaccggtggccccgacgtcgggtgggtctccgacctcatcaactga

SEQ ID NO: 81 - DNA, 1224 bp, Zea mays
atggcttctctctgtgatttctgtgggaaacaaaggtcaatgatctactgcagatcagatgcggcatcattgtgcttatcatgcgaccgtaatgttcattcagctaatgcactgtctcgacgtcatacaaggacccttctttgtgatcgttgtggttcacagcctgcatcagtccgatgtcttgaggacaacgcatcactttgccaaaactgtgactggaatgggcatgatgcagaatcaggggcttctggacataaaaggcaagccataaactgctactcagggtgcccatcatctgcagagctttcgagaatctggtcatttattactgatatcccgactgtagcagctgagcccgactatgaggatggactaagcatgatgacaattgatggcagtgatgttactaatcgtcacgatacttcagatgataaaagattgttggaaatagctaacacaacactcatgagcgatccaccttcagccgacaagcttaaatctccgacaggctcttcttctggagatgggtttgatgttatgactctagccacagatcagcctgctggaccagtttcagcaacgcctaaggtacctaatgccagagatgatgataagttcaatgatggcatgtacgaagacttgtgtgtagatgatgctgaccttacattcgaggattatgaagagctatttggtacctctcacattcgaacagaggaactctttgatgacgctggaattgacggttacttcgaattgaaagagacaccacctttttatttcaacgagcagcccaaagctatgcagatagaatgtggcaacgtggtatcagctgattgtgcgatgtcaaacccaggggcaagggctgattccagcctttgtattcccgtcaggcaggtcagatctagtatatcccactccttatctggtctgactggtgagagcagcgctggagatcaccacgactgtggggtgtcaccgatgctcctcatgggtgagccaccctggcattctcctggtggtccagaaggctcagtcgctggaggcagcagagatagcgctctcacacggtacaaggagaagaagaagaggagaaagtttgacaagaagatcagatatgcttctcgcaaggctagggcggacgtgaggaagcgggtcaagggacggttcataaaggccggtgaagcgtacgactatgatccgctaagccagactagaagctactga

SEQ ID NO: 82 - DNA, 918 bp, Zea mays
atggcaagcttattcccacagctcgcgcagatggagcacggcgtagccggcgcctcccatggcgcgccgagcttcctgttctgcaatggcgcaggtgcagccacggcagactcagcctcgctagagacctcgtccggtgttctcgacacctccccacgaggcggaggcgctgattctggcggtaggaaggccccgacgaagcccagggaagacagcgccagcgccagcgccagcttcagcttcagctctgcgcactccaaggactcgagctcgaagggaagcaccaagaataggggagggaaaagaggcagaagcagcaaggaggtagacgaggaggaggagcccaaggggtacatacacgtcagggcaaggagagggcaagccacggacagccacagccttgcggagagggtgaggagggagaggatcagcgagaggatgagggtgctgcaggccctggtccctggctgtgataaggtcactggaaaagccctcgttttggacgagatcatcaactacgtgcagtccttgcagaaccaagtcgagttcctttccatgaagatcgcttcactgagccctgtgctgtatggctttggcatggacactactgacgctttcagcactgaccatactactcaaaaaatcgaagggatgctccagctccaccacgaggcgcttgcggtgcctagctctgccctgagcagacctccattcgaggctatcgcggacagtacgcacgccaccgcctctgcctcctccccccggtcctacgagctccacggcgatggcggcggcggcggcgccagcatctctttcccgcaggacggcggcggctacatggcgcaaacagtaggtgggccaaggccagagctgttcaaccaagtggtgttcagtaaccacatgtgctctttccagtag

SEQ ID NO: 83 - DNA, 1353 bp, Arabidopsis thaliana
atggctgaaatctcggcgacttcgtttccttcttcttcttcctctgctctcgtcatccgtagctcccacaatggtagcttaaaatgtcagaatgtagctgttccaaaaactacttcccagttccaagagttatctctgaaacgaagccagcttgttggcaatgccgttgttaccggtcatgttaccggatcccgcagctgcaagaatcaagctattcgagctgttctatccggtgatggaaccgccttgactactgattcaaaggaggctggacttcgtggaaaactgaaaaaggtcgttctagcttacagtggaggcttagacacctctgtcattgtgccatggcttaaggagaactatggttgtgaagttgtgtgcttcactgctgatgttggtcagggcataaaagagttagagggtttagaacaaaaggctaaggctagtggtgcttctcagttggtcgttaaggatctcacagaggagtttgtgaaagatttcatcttcccttgtcttagagctggtgccatctatgaacgaaaatacttgcttggtacctccatggctcgacctgtcattgctaaggccatggttgatgtagcagcagaggttggagctgatgccgttgcacatgggtgtactggaaaaggaaatgaccaggttcggtttgagctcaccttcttttcattaaaccctgaacttaaagttgtggcaccatggagagaatgggaaatccaaggccgagaagatgctattgagtatgcaaagaagcataatgttcccgtcccagtgacaaagaagtccatttacagccgggacagaaacctgtggcaccttagtcatgagggtgatctattggaagatccagcaaacgagccaaagaaagatatgtacatgatgagtgtggatcctgaagatgctcctgatcagcctgaatacatcgagatcgggatagaatctggacttccagtggcgctgaacgggaaggctctgagtccagccacacttctggccgagctaaacacaataggaggaaagcacgggattgggcggattgacatggttgagaaccgtctggttgggatgaaatcacgaggaagatggtttgatccgcttagggagtccatggacgctttcatggagaagataaccgagacaaccacgggatctgtgacactgaagctgtacaaaggatctgtgtcggttacagggcgtcagagtcctaacagtctgtatagacaggacatatcttcgtttgaagggagtgagatctacaaccaagcggatgcagccgggtttattcgtctttacgggcttccaatgaaaattagagctatgcttaagaaaattagctag

SEQ ID NO: 84 - DNA, 1086 bp, Zea mays
atggtcggacggatgacaggagaaatgggagggctcagatcgaggatcctcaggaccttgcagtccttccccaccgccgctcccgcgcagtcgcccaacctcctcctcgcgccgctccctcccggcgcaggcccctcgcctcagccgcccgcggcgccatgcgtccgcctccaggaaccggcgccgcaggagccgccgctgggcgatgaagcgcgggccgcgcccggcggcggaggcgatgacgacaaggagaacgtctcgccaggcgccaccccgcgcaaggccaagaagatgaagctcagctcggaccaccacgacagaagcccgggcctcggggaggagcagcgcgccgatggcgccacgcgctaccgccggccggacctcgcctcggcgacgctcttcgacccggacctcctcgccgccttccgccgcgccgtcgacgcctacgcgcaggccctggacgcggccaggcgccgcgacgtcgacgtcgacgtcgacgacggggacggcgtccctggcggcggcggcggcggaggaggaggtgggccgggcgtcacggaccccctggatgcgttcgagcggcggtgcccgcccggcggcgagcgcgcggtggtgctgtacaccacgtcgatccgcggcgtgcgcaggacgttcgaggactgcgcccgcgtgcgccgcctgctcggcggcctccgcgtggcgttcctggagcgcgacgtctccatgcacgctccctacagggaggagctccgggcgctgcttcgctgcgggcggggggagggcggcggcggcgcgttccccgtgccgccgcggctgttcgtggacggtaggtacctcggcggcgccgacgaggtcgtggcgctgcacgagcggtcccagctccggcccgtgctctggcgcgccgcgcggcgcggcgcggcggaggtcccgtgcgcggtctgcggcggcgcgtggttcgtggtgtgcggcgcgtgcggcggcagtcattggctccatgacgccagcgccggcgccgcggcgcccggccgcgtgacgtgctccgcgtgcaacgagaacggactcgtgccctgccctctctgcagctaa

SEQ ID NO: 85 - DNA, 993 bp, Escherichia coli
atgaaaaccgcttacattgccaaacaacgtcaaattagcttcgtgaaatctcacttttctcgtcaactggaagaacgtctggggctgatcgaagtccaggcgccgattcttagccgtgtgggggatggcacgcaggataacttgtcgggctgtgaaaaagcggtgcaggtaaaagtgaaagctctgcctgatgcccagttcgaagtggttcattcactggcgaagtggaaacgtcagaccttagggcaacacgacttcagcgcgggcgaagggctgtacacgcacatgaaagcccttcgccccgatgaagaccgtctttctccgttgcactcggtctatgttgaccagtgggactgggaacgcgtaatgggcgacggtgagcgtcaattctcgactctgaaaagcacggtagaggcgatctgggcgggaattaaagcaaccgaagctgcggttagcgaagagtttggcctggcaccgttcctgccggatcagatccacttcgtacacagccaggagttactgtctcgttatccggatcttgatgccaaagggcgtgagcgggcgatagcgaaagatcttggcgcggtattccttgtcgggattggcggcaagctgagcgatggtcatcgccacgacgtgcgcgcaccggattatgatgactggagcaccccgtcagagctgggccatgcgggtctgaacggcgatattctggtgtggaacccggtactggaagatgcgtttgagctttcctccatggggatccgtgtagatgccgacacgctgaagcatcaactggcgctgaccggtgacgaagatcgcctggagctggagtggcatcaggcgctgctgcgcggtgaaatgccgcagaccatcggcggcggtatcggccagtctcgtttgactatgctgctgctgcaactgccgcatatcggccaggttcagtgtggagtatggccagctgctgttcgcgagagcgtcccttctctgctgtag

SEQ ID NO: 86 - DNA, 1107 bp, Zea mays
atggctgccgtgaccgcggcggccgtctctctgccctcctcctcctcctcccctgccgccgccaaggccaaggcgtccgcgtccgcgtccccgtcgtctccatgcggccacctccagttcccgcggcggcacggcggcccgcgcgcggtgcggctgcgcgtgcaggtgtccaccaccgagaccgcggaggcggagccggtcaagaagctggagaaggtgtccaagaagcaggaggaggggctcgtcaccaacaagtacaagcccaaggagccgtacgtcgggaggtgcctgctcaacaccaggatcaccggcgaccaagcgcccggggagacgtggcacatggtcttcagcacagaaggcgaggtcccctacagagagggccagtccatcggcgtcatcgcggatggcgaggacaagaacggcaagccgcacaagctcaggctctactccatcgccagcagcgccctcggagatttcggcgactccaagacggtgtcgctgtgcgtgaagaggctggtctacaccaacgatcagggggaggtcgtcaaaggagtctgctcgaacttcctctgtgacttgaagccaggcgctgaggtgaagatcacagggccagtgggcaaggagatgctcatgcccaaagaccccaacgcaacaatcatcatgctcgcaacgggtaccggcatcgctccgttccgctccttcttgtggaagatgttcttcgaggagcacgaggactacaagtacaccgggctggcgtggctgttcctgggcgtcccgaccagcgacaccctgctgtacaaggaggagctggagaagatgaaggagatggcgccggacaacttccggctggacttcgcggtgagccgggagcagacgaacgcggccggggagaagatgtacatccagacgcgcatggcggagtacaaggaggagctgtgggagctgctcaagaaggacaacacctacgtctacatgtgcgggctcaagggcatggagaagggcatcgacgacatcatgctcgacctcgcagccaaggacgggatcaactggttggactacaagaagcagctcaagaagagcgagcaatggaacgtcgaagtctactga

SEQ ID NO: 87 - DNA, 714 bp, Synechococcus sp. WH8102
atggtggccagcagtggtttcagtcgctattccccccagcaaccgcaggttgcgggtgcagccgaacgaagccgcacccttctggatgtcatccgtgatctggatggagccagcaccgagttggtggaacgcaacaagacgattttcttcccgggggatccggccgaaagggtgtatttgatccgtcgcggagccgtgcgcctgtccagggtgtacgaatcaggcgaagagatcaccgtggcgctgctgcgggaaaacagcctgttcggcgtgctgtcactgctcaccggacaccgatccgaccgcttctatcacgctgttgccttcacgcgggtggaaatggtgaccgcaccggccgcctccgtgcgtgctgccatcgaggcggacaccggtgtcggcctgcgtcttctgcagggcctctccagtcggatcctgcagacggaaacgatgatcgaaaccctcacccaccgcgatatgtcgtcccgattggtgagttttctgctcgtgctgtgcagggatttcggcgtgcccgatgaactcggcatcacgattgatctgcgcctgtctcatcaagccattgccgaagcgatcggctccacacgcgtcaccatcacccgtctgctgggagacttgcgccaatccggactcgttcagattgaccgcaagaagatcacggtgttggatcccatcgccctggccaagcggttcagctga

SEQ ID NO: 88 - DNA, 615 bp, Glycine max
atgagtgatgacgtgatcgccacaagcctgggcgtcggccacttgggcggtaaaaaaaaaaaaaaatcgaatccaagtccaataactatgcttgagcaacaagggtcagatccaacaaagccagcagcggcggcaaccggttttccggcgaccaccgaggcttcttcctacgctccagtagcaccaccccagtccaaacctacagtcgattggtccaccggcctctgtgactgcttctccgattgtggaaactgttgcataacgtggtggtgtccatgtgttacctttggccgagttgcagaaattgttgacaggggatccacgtcatgtggtgctagtggggctctgtatacgctggtttgttgtgggtggccatactcatgcttctaccgctccaagatgagacggcaatatggtttaaagggaaattgttgtacggattgcttgcttcattgctgctgcgagtcctgcgccctctgtcaagaatatcgtgagcttaaacaacgtggatttgacatgattattgggtggcatggaaatgtcgagcaacgaattcaggaagtagccatgactgctgcaacacctccatcagtcgaaaagggcatgagccgttga

SEQ ID NO: 89 - DNA, 453 bp, Medicago truncatula
atgactttgtttgacatggatttgagtagtgtagtgaacaatttcttgaatcatgttcatgaaactccttcaagggatcatgagaatcatgagagcagaagaagggcttctagtatcccggtggacattttggatactcctaaagagtatatatttttcttggatgttcctggtctctccaagtctgaaattcaggtgacaattgaagatgagaacacacttgtcataaagagcaatggaaaaagaaaacggcaagatggtgaggatgaaggctgcaagtacattaggctggagaggagagcacctcagaaactgctgaggaagttccgtttgccagagaatgcaaatgtgtcagcaatcacagccaaatgtgagaatggtgttctaactgtgaatgttgagaagcacactccacctccaaaatcgaaaacagttgaagttgctattgcataa

SEQ ID NO: 90 - DNA, 1104 bp, Zea mays
atggggcgcgcgccgtgctgcgagaagagcgggctgaagaaagggccgtggatgcccgaggaggacgagaagctcgtcgcctacatcaagaagcacggccagggcaactggcgcaccctccccaagaatgccgggctcgcacggtgcgggaagagctgccggctacggtggactaactatctgaggccggacatcaagcgcggccgcttctccttcgacgaggaggagacaatcatccagctccacagcatcctcggcaacaagtggtcagcgatcgcggcgcggctgcccgggcggacggacaacgagatcaagaactactggaacacgcacatccgcaagcgcctgctccgcatgggcatcgaccccgtcacccacgcgccgcgcctcgacctcctcgacctctccgcgctcttcaagcccgccgccgccgccgcgtactactaccccacgcaggccgacctcgacacgctccgagccttggagccgctcgccaactacccggacctcctccgcctcgcctccgccctgctctctggcccgccggcggcgcccgcgatcggcgaccagcaaccgcggcagcttctgccgtggattctgcaggcgcagatggcgcagcaggcggccgccgccgtggcgcaggcgcagctgcaggtggcgccgcaggccgaacagttcgtgcagcagcggcaggcggctggagccgcgtgccaaatgccggacctggtccacacgagcccgacggtgcagcagcaccagcaggtcgcggccgcgcaggagcagcaacaccagccccagggccaggacgacatggccgcggcttgccacagcatgcagccgcagccgcctacgggcggctacgccgtcgacaccctcgacatcccagcgctgatgcagatggtgcaggccgacgacgcgtcgaacctgcagcagtggagcagcatgatcacaagcagcaccaacaacaacaacgtcggctccggcgtgtccacaccgtcgtccagccccggtgccgcgcttgaatcactccaccaccgccaccacgacgtacggcggcgcgagcgatgccgacgccgccgcgctgttcaacatgcagctatctga

SEQ ID NO: 91 - DNA, 1428 bp, Zea mays
atggccaccacccacctcctcactccaccccgcgtccaccacccttccccctccgcttcctcctctgtggctcgcgtccgcgccaccgcctcgctcgcgcacccgctccacctctgccgcctccgcctcgccgccccgcgctcgcgctccccctccccacggcacgggcggcgcgccatgtcggtccgcagctccctcatcgacccggacggcggcgcgctcgtcgagctcgtcgccccgcccgaccgcctcccggcgctgcgcgcggaggcggaggcgctcccgcgggtgcgcctcgcccccgtcgacctccagtgggcgcacgtgctcgccgaggggtgggccagcccgctccgcgggttcatgcgcgagcacgagtacctgcagagcctccacttcaactgcgttcgcctccccgacgggggcctcgtcaacatgtcgctccccatcgtgctcgccatcggggacgccgacaaggagcagatcgggggtaagccggacgtcgcgttacaagggcccgacggcggtgtcgtcgccatcctgcgcagagttgaaatatatccccacaataaagaagaaagaatcgcaagaacatggggtacaactgcacctggtttaccctatgttgatgaggctattgcgtcagctgggaactggctgatcggtggcgatctggaggtgttggaacccatcaaatacaatgatggtcttgatcactacagactttcacctcggcaacttaggaaggagtttgacaagcggggggctgatgctgtgtttgccttccagttgagaaacccagtacacaatggtcatgcactattgatgaatgacactagaaggcgtctcttggaaatgggttacaagaatcccattctactactacatcccttaggtggttataccaaagcggatgatgtcccactgccagttagaatggaacaacacagtaaggttttagaagatggagtgcttgatcctgagactactatagtgtctatatttccctcaccaatgcattatgctggtccaacagaagtgcagtggcatgcaaaggcacgaattaatgctggtgccaatttctatatagtaggccgagatcctgctggaatgggacatccaacagaaaagagggacttgtacaacccagatcacgggaagaaggtcctgagcatggctcctggtttagagaaactcaacatactgcccttcaaggtagcagcttatgatacagtagcaaaggagatggccttttttgatccttcacgcagtcaagattttctgttcatctctggaaccaagatgcgcacttatgccaaaactggagagaatcctccagacggtttcatgtgcccgggtgggtggaaggttcttgttgactactacaacagcctgcaagctgaagaagcgactccagtccctgtatga

SEQ ID NO: 92 - DNA, 1692 bp, Zea mays
atgccaggacaagggcattgcttgccgaaagctcgggaaggggtagggggttgccgccgttgccatatggaggtcgccgtcgtcgaagggccgccgccgcaggtgatgaaggaggagaagcggcccgacgccaagccagagatcgccgcgtcgatggtaggaagcgctcttccgatagtcttcgaaagctttccatcatcgacgcaaagagatgcggccggcaagaagcgggaggaacaagaacaacgcaggctggaggcggccagagcggagatgggcgaggtgcgggaggagaacgagcgcctcaagtcgacgctgtcccgcatcgtcagccagtaccagtccctgcagatgcacttcctcgacgtcgtcaaggtgcacgagcaagcatctgcagccaaagcggagaagctccccgtggcgccggctcccgcgcctccgcctcccgccaccaccggcaccgacgaccccgacgacctcgtctctctgagcctcggcacgagggcgaatagcggtggcggcgcaccacgccgcaagggccacgagaggtcggcgtcctcgtctggcaccgctgatgagatgaccaccgccggcgccgacgacgaaggccaccggctctccctcgggctcggcttcgggcgcggtagcgggctgccggcgtcgacggtggccacggacgacgacaaggccagccacgcgtccgtccggaacttgagctccgacagcagcggcagcgccgactacaacgacaacgccaagcctgctgacctggccgccgcgggcaccgctcgtaagagcccgagcgccggtgccggcgacggatcagctgacgacgaggtgcagcagcaggccaagaaggctagggtttccgtcagagtcaaatgcgatacacccacgatgcccgatggctgtcaatggcggaagtacgggcagaagatctccaaggggaacccgtgcccgcgcgcctactaccgctgcacggtggcgccgcagtgcccggtgaggaagcaggtgcagcggtgcgcggaggacacgtcgatcctgatcaccacgtacgagggcgcgcacaaccacccgctcccgccggcagcgacggccatggcgtccacgacctccgcggcggcggccatgctcacctcgggctccaccagctccgccgcctcggcctcgctcgtccacggccaccaccacccgctggcggccgccgccgccgggctgttcggccccaccaccatggtctccaccgccgcgtcctgccccaccatcactctcgacctcacctcccccgcgaccgcgccgcacaccctcatgcactcctcgccctacgggttcgagtccaaggcggtcccggcggcgtggagcagcgggtacctggcgtacggcggcgccagcgccggcgcccacccgtcctcctactacgccaagagcagctcgccggcgctcgggcaccaccagctgttcggcggaaacctgagcgtgccatcgagaccggagcagatgtacgcccaatcgtacctgcagagagccagcagcctgggccttggaggcggcggcggccatggcgccgtggcgcccgccgtcacggacacgctcgcgaaggccatcacgtccgatccgagcttccagtccgcgctggccgcggcgatcacgtccgtcatgggccgcggcggagccgctgctgcccacaagtga

SEQ ID NO: 93 - DNA, 1329 bp, Zea mays
atgattcggttggtattgcgcggttgctgctgtgatctctctctcttgtcaaactcaaacactacagcaataaccggtgtatatcatgcagcggcatcaaactcgtcggccctcagtgtggtgcaccggcacggcccatgctcgccgctgctggcacggggcggcgagccgtctcacgcggagatcctagacagggaccaggacagggtcgactcaatccaccgcatgaccgctggcccgtggacggccggccagtccagcgcctccaagggcgtgtccctgccggcgcacaggggcctccgcctcggcacggccaattacatcgtctcggttggcctcgggacgcccaggagggacctgttggtggtgttcgacaccggcagcgacctctcgtgggtgcagtgcaagccgtgcaacaactgctacaagcagcacgacccgctcttcgacccgtcgcagtcgacgacctactccgccgtgccctgcggcgcgcaggagtgcctcgactcggggacctgctcgtcgggcaagtgccggtacgaggtcgtctacggcgacatgtcgcagacggacggcaacctcgcgcgcgacacgctgacgctgggcccgtcgtccgaccagctccagggcttcgtcttcgggtgcggcgacgacgacaccggtctgttcggaagggccgacgggctgttcggcctcggccgcgacagggtgtcgctggcctcgcaggcggccgccaggtacggcgcggggttctcctactgcctgccctcgtcgtggcgcgccgaggggtacctgtccctcgggagcgccgccgcgccgccccacgcccagttcacggcgatggtgacgcgcagcgacaccccgtccttctactaccttgacctggtcggcatcaaggtggccggacggacggtcagggtggccccggccgtgttcaaggcgcccggcaccgtgatcgactcgggcacagtcatcacccgtctcccttcccgcgcctactccgcgctccggtcctccttcgcgggcttcatgcgcaggtacaagagggcgcccgcgctgtccatcctggacacgtgctacgacttcaccggccggaccaaggtgcagatcccgtcggtggcgctgctcttcgacggcggcgccaccctgaacctcggcttcggcggtgtgctgtacgtggcgaacaggtcgcaggcgtgcctggcgttcgcgtccaacggcgacgacacgtccgtcggcatcctcgggaacatgcagcagaagacgttcgccgtggtctacgacttggccaaccagaagatcgggttcggcgccaagggctgcagctga

SEQ ID NO: 94 - DNA, 1734 bp, Chlamydomonas reinhardtii
atggacctcgccaccgcgcttggactgggcatagcccccccgccgcccgcggacgactcctcccaccacagcaccacggaagcatgcactctgccggcgtatctgcgcgcgccggaggtgacggcccaggttatggccgagtacatctggctgatgggtgggaccggccagctgcgcagcaagactaaggtgctggacgccaagccgtcttgtgccgaggaggcccctatcatgattgtggagagcaacccagacggccagctcgccgagccgaaccatgagcttttcctcaagccccgcaagatcttccgggaccccttccgcggcggcgaccacattctggtcctctgcgacacattcatcgtcgcccaggttgtcgcggaggctggtgcggctccctcgaccgtgctgcagcccagcgagaccaacagccgcgttgcgtgcgagaacgtcctgcgcgttgccgagcagcaggagcccgtgtttgcggtggagcaggagtacgccatcatccacccggcgtaccccacgaaggttccgctgggacctcggcgcccttcgacctcgcgcgccagcagctgccacagcggctcgcgccgcagcagctacgtgtccagtggctcagcgcgcggcgggatcggcaagaacagcagccaccacggcggcaagcagtcgcacgccgctgccgccgccgctgcggcggcggtcgccggcatcccttggcccagcccggacgcatgtgagcagacggcccaagaagcgagcgcagcgaggcagaaggcgtcgagacagcttgcggactcgcacctgcgctgttgcctctttgcgggcgtgagggtgacgggcgcggacgtgcactcgcttgacggtctgcactcgtacaagatcgggccgtcgccgggggtggacctcggcgatgacctctggaccagcagatacctgctacagcgggtcgcagagcagcacagcgcatcggtgtcgtgggaacccgactcaatgccgtcggaacggccgctgggctgccacttcaaatacagtacggcgtcgacgcggcaggcgccacacggcttgaacgcgatagaacagcagctcgtgcggctgcaggctacgcacgttcagcaccaggtggcctacaacgacggcaggctggaccggctgtcctcgccggaggcctccacgtttacgcacgcggtcggctcggccaacgcctccgtcgtagtgcccagcctaaccttcctgcagcagggcggctacttcacggaccgccgcccgccgtcggatgccgacccctacaaggtgaccctgctcctggcagcgaccacgctggacatccccctgcccaagctgcccgcgtcctcgtccgccggcaacacggcggccaactgcagtggcggcatgtcggcgggcccgtcctcgtgtcccgctgctgctgccctgcctttcggcagtcccatgcagagctacctgctggccgctgcggccgcccaacggcagcagcagcagcagcacctgatgttcgacacggagagcgaggagtgcgactccgtcgacgaagatgatgcgatgactgaagactcggcagctctgctggccaagatggacgacgatggcggcgctgcagaggcgtcgtcgtgcgactcggacttcgaggaccaggacgatgccagctccagccctatcaccggcacctgggcggacaacgactgcacccacatgctgggtgctggcatttaa

SEQ ID NO: 95 - DNA, 4659 bp, Chlamydomonas reinhardtii
atggaggcggtcgcgaccgttgtggccaacgagcccaaggttgctgatatggaggagattctcgccgagcgcgatgcctgcggcgtgggcttcatcgcgaacctgaagaacgttcagagccacaccgtcgtgaagcaggctctgaccgctctgggctgcatggagcaccgcggtgcttgctctgcggacgatgactcgggagatggtgcgggtcttatgactcaaatcccctggaagctgctgaagaaggagatgcccgcgctgaacgagacgaccacgggtgtcggcatggtgttcatgcccaatgatgacgctctagaggcgcagtgcaagcagatcctggagcaggtctgcgccaaggagggcgtgaaggtggtgggctggcgcaaggtgcccgtcaaccacgacatcgtgggccgcttcgccaaagtgacggagccgcgcatctggcaggtcctgattgagggcaagtccggtcaggtcggcgacgagctggagcgtgagctgttcctggtgcgcaagctggtggagaaggctaagaacgccgcgctgcccgctgagttcgctcccgacttctacatttgcacgctgtccagccgcaccattgtgtacaagggcatgctgcgctcggcggtcgtgggcaccttcttccgcgacctggaaaaccccgacttcgagtcggcgttcgccatctaccaccgccgcttctccaccaacaccacccccaagtggccactggcgcagcccatgcgcgtgctgggccacaacggcgagatcaacaccctgcagggcaacctgaactgggttgcctcgcgcgagcacgagctgagcaaccccatctggaagggccgcgaggcggagctgacgccgctgtgcaacgccgcgcagtcggacagcgccaacctggacaacgtggcggagctgctggtgcgcaccggcaccgacccgcaggacgcgctcatgctgctggtgccggaggcctaccgcaaccaccccgacctcatgaaggagtaccccgaggtggtggacttctacgagttctacgagggcctgcaggagggctgggacggccccgcgctgctggtgttctccgacggcaagcgcgtgggcgcccgcctggaccgcaacggcctgcgccccgcgcgcttctggcagaccaaggacgacatgatttacgtggcctccgaggtgggcgtgctgggtgacgccatcaccaacgccgagaacatcgtggccaagggccgcctgggccccggccagatggtgtgcgccgatctggagaagggcattttctcggagacgtcggccatcagcaagctggtggctggccgcaagccctacaaggagtggctggccgcctcgctgcgccgcctgacggacctgggcgagagcaccttcctgaacgagcccatgtacgacgccgctaccatgctgcgcctgcagtccgccatcggcatggacgccgagaacgcgcagatggtggtggagagccaggcgcagaccggcgtggagcccacctactgcatgggtgacgacatcccgctggccgtgctgtcggacaagccgcacatgctgtacgactacttcaagcagcgcttcgcgcaggtgaccaacccgcccatcgacccgctgcgtgagggcctggtcatgagcctggagatgcgcctgggcgcgcgcggcaacctgctgaaccccggcgccgacagctacaagcaggtgctactggactcgcccatcctgctggagagcgagatgcaggccatctccaccgacaaggtgctgggctccaagaccttcaagctgttcttcgaggccggcaagcccggcgccatggaggcggcgctgaagaagctgtgctcggacgtggaggccgccgtcaaggccggctgccagtgcgtggtgctgtcggaccgccccgacggcggtatggacgccggtaaggcgcccatccccgcgctgctggccaccggcgccgtgcaccaccacctgatccgcacctcgctgcgcagcgacacctcgatcgtggtggacaccgccacctgctacagcacccaccacgccgccatgctgatcggcttcggcgcgcacgccatctgcccctacctgggctacgagaccagccgccagtggcgcctgtcggcgcgcacgcagagcctgatcaaggccggcaaggtgccggacatcagcgtcaaggtggcgcagaagaacttcaagaagtcgctggagaagggcgtgctcaagatcctgtccaagatgggcatctcgctgctgtcgtgctaccacggcgcgcagatcttcgaggcgtacggcctgggcaaggacgtgatggacatgtgcttcaagggcaccgtgtcgcgcattggcggcatgagcctggcggacctgcagcgcgagtccgagagcctgtgggccaagggcttccccgagaaggccatgaccaagctggaggactacggcttcatccagtccaagcccaagggtgagttccactccaacaaccagaccatggccaagctgctgcacaaggccatcggcctgggcaacggctccgctgccgacaaggacgcctacaaggcctaccagcagcacttcgcggactcgcccgtggccgtcctgcgcgactgcctggagttcaagtcggaccgcggccccatctccattgaccaggtggagcccgccgccgccatcatggagcgcttctgcaccggtggcatgtcgctgggcgccatctcgcgcgagacgcacgagaccatcgccatcgccatgaaccgcatcggcggcaagtccaactcgggcgagggcggcgaggacccgatccgctggctgcacctgtcggacgtggacggcgagggcaagtccgccaccgcctcctacctgcgcggcctgcgcaacggcgacaccgccacctccaagatcaagcaggtggcgtcgggccgcttcggcgtcacgcccgagtacatcatgaacgcggagcagatggagattaagattgcgcagggcgccaagcccggtgagggcggccagctgcccggccagaaggtgtcgccctacatcgcgcagctgcgccgctccaagcccggcgtgccgctcatctcgccccctccccaccacgacatctactccattgaggacctggcgcagctcatctacgacctgcaccaggtcaacccccgcgccaaggtgtcggtcaagctggtggccgaggccggcatcggcgtcgtcgccagcggcgtggccaaggccaacgccgacatcatccaggtgtctggccacgacggcggcaccggcgcctcgcccatctcgtccatcaagcacgcgggcggccccatggagatgggcctggcggagacgcaccagacgctggtgcgcaacgagctgcgcgagcgcgtggtgctgcgcgtggacggcggcgtgcgcaacggccgcgacgtgctgatgggcgcgctgatgggcgccgacgagttcggcttcggcaccgtggccatgattgccaccggctgcatcatggcgcgcgtgtgccacaccaacaactgccccgtgggcgtggcgtcgcagcgcgaggagctgcgcgcgcgcttccctggcgcccccgaggacctggtcaactacttccacttcgttgccgaggaggtccgtgccgagctggccaacatgggctaccgcagcctggatgaggtcattggccgcgccgacctgctgaagcagcgctccgtcaagctggccaagaccgagggcctggacctgtccttcctcaccaccttcgccggcgccagcggcaagtcctcgacccgccgcgcgcaggaggtgcacgacaacggcccgcagctggacgaccgcatcctggcggaacccgaggtgatggccgccatcaaggaccacaagaccgtgtccaaggccttcgagatcgtcaacgtggaccgctcctcgctaggccgcgttgccggtgtcatcgccaagcaccacggcgacagcggcttccagggcaaggtcaagctgacgctgaccggctcgggcggccagtcgttcggctgcttctgcgtcaagggcctggaggtgaagctggtgggtgaggccaacgactacgtgggcaagggcatgaacggcggcgagatcgccatcgtgccgcccgccaactcgcccttcaagcccgaggaggcctcgctggtcggcaacacttgcctgtacggcgccaccggcggccggctgttcgtgaacggccgcgccggcgagcgcttcgcggtgcgcaactcgctagcggaggcggtggtggagggcgcgggcgaccactgctgcgagtacatgactggcggctgcgtgatcgtgctgggctcggtgggccgcaacgtggcggcgggcatgacgggcggcctgggctacttcctggatgaggacggctcgttcacggacaaggtcaacacggagatcgttagcgtgcagcgcgtgatcaccaaggccggagaggcgcagctgcgggggctgctggaggcgcacgtggcgcacactggcagcgccaaggccaagagcctgctggccaactgggaggcgtcgctgggcaagttctggcagctggtgccgcccgcggagaagaacaccgccgaggtcaacccctcggtggcgcagccggcggcggctggcgccaaggtggctgtcagcgcatga

SEQ ID NO: 96 - DNA, 1068 bp, Chlamydomonas reinhardtii
atgcagcaactgtgcccgtcgccgaagatgaactgcccgcgccatgcccgcctggccgtcgcccgcgttcagcgcgtgcagcagcgcaccggcatcgccattttgtcacgctccgttgtcgccaacgccgcggccggcatcgcgtcggtctctcaaaacggtggcagcaatggcaatggcgcccatgccactctcaccccggtgactcccatcgccgcgcccgcggcccccgctcccgcccctgctgcccctgctccgggtgtgctgccgcctgccgccgccttcaacgccattgttgctgccggcgctgcaaaggccgccatgcctgcatggaagactttcctgatgggcatcatggccggctgctacatcagctttggcggtttcatggccgtcacggccgccaccatgtgtgcaggcctgggcgccaccaaccccatcctgactcgcctggtgatgggcgcgctgttccccttcgggctgctgatcacactggtgtgcggcgccgaactgtacaccggcaacacggcgctggtgacggcggcggtggcggagggcaaggccacgcccaaggacctggcaaagaactggttctggagctacgccggcaacgcggtgggctcgctgctaatggtgggtctggtggcggccaccggtctgctggccaccagcccagtggccgccaacatggcggtggcaaagagcgcgctgcccttcggccaggcgctggtgcgcgggctgctgtgcaactggctggtgtgctcggcggtgtggatggcggcggccgccacctcgctgcccggcaaggcactggcggcctacctgcccgtcatggccttcatcaccctgggcctggagcactcggtggccaacatgttcttctgctcgctgggcatcgtgcagggcgcgcccgtgagctggggcgccttcctcaccaacaacctgctgcccgtgacgctgggcaacaccctggctggcgtgctgtgcatggccgcagcctactgcgcctgcttcggcgccgccggcaataagccggccgctactgccgcccctgctgctgccaagtag

SEQ ID NO: 97 - DNA, 2055 bp, Zea mays
atggtgttccaaaagaggtcctcgtcagagttggaggcgtccggtggaggccaagtcgcggagatgccgcgcgttcccaagtctgcgaggggcaagagatcggtcaggaagaaggaggcccagaacccgccccagatgtcagcattcgaccttctcgcgacggtggcagggaagctgcttgatgagggggtgggctcgctggggaacatgagcgctggtgccccagctttgactgcatgcgcgaaggatgtccgtgtgaagaaggagcagtgtgacgaggaaatgaagcagttcaagcatgaggtgacagatcaggatagctgcaatgagagtgcaattctcccgcacattgtgttccagcgggcggtgaataatgctcggaatgaggatcctaaggcgaagtctgaggcccaggacaaggaatcctccatgatcagctgtaccaaggctgaactgggttgtaattttggtgtgattgcagataggtggtcgcctgaatccgtggaatcaggagccttcacaggagatgcagtggcgagcctgatgccacctgccccagcaggatttcataagaatgcacccgaaatgtataatttgcttgattcaatggatgtggatgtcaagcctcctcctttggtcagctctgacagcaccggcgagatgccattgtatggcgataaagttcaccgctcaacctccttaccaagggtctcgaagggagtggggttttttgctgtagatagagatgatgacgacgataagtcctctgggtgcactcatcccagcaccaccactaacaaggatttcaggtccaattgtacagctgagtatagtagggtaaggaagttgctcaccagtaagtacaggaaagttgctccagcgagggtttacaaatctgatctttcctatagtgatgttgatcggaagccttctttccggaacaaaaaaatgcattatacacgacagaggacacaaaggagtacattcaagcgtaggaagctctttgatcgccattcagttctagcatctgaatttggtaccgcacatggaaagggaaacacgaagaaggttaccggaagagactcccatgctgtgtctttggaagcaaacaaggggactagttcaacgccattccagaaatctcgtgggtcaaatgattgccatgtgaaacttaaaattaagtcttttaaggtgcctgaacttcttgttgaaatcccagaaagtgcaactgttggctcactaaagaaaactgttctcgaggcagtgactgcgattctcggaggtggtctacgtgttggtgttcttcaccatggaaagaaagttagagatgataataaaacgttgattcaggctggtattggtcaggaggatatgctggacaaccttggcttttcacttgaacccaactgtacacaaaacccacaagtccaagctcctgaagatatcagtttcctggaaaccattgatactgctgaacccctcgcaaggattgcacctgctgactcgtcttctaagcatggtgaagttgacctatcacaggagtttgcattaaccccattagcaatgaactaccagggcagtgatcatgattctgtgcactcccctgggggcgtctcatcgcccgataaagtctccacaaactcgcgagctttagttccagttccagctgcagatcccaatgcaggagctatagttccagcgaataagtctaagaggtcaccagagcaggggcaacgcagaatcaggcgcccgttctctgttgctgaagtagaagcacttgtgctcgcagtcgaaaagcttggaaccggaaggtggcgagatgttaaacttcgcgcgtttgacaatgcgaagcaccgtacctatgttgatcttaaggacaaatggaagacgctggtgcacaccgcgagcatctcgccgcagcagcggcgtggcgagccggtgcctcaggagctgctcgaccgggtcctggcggcccaggcctactggtcccagcagcaagccaagctccagcctaagacgcccccgctgctggctgaggctcgcttgctcacctaa

SEQ ID NO: 98 - DNA, 1686 bp, Arabidopsis thaliana
atggcgctacgaacactctcaacgtttccttctcttcctcgtcgccacacaacgacgagacgtgaacccaatctcaccgtcatttaccgtaatccgacgacatcaatcgtctgtaaatcaatagctaattcagaaccaccagtttcactctcggaacgagatggatttgcggcggctgctccaacccctggagaaaggttcctggagaaccaacgagctcatgaagctcagaaagtagtgaagaaagagatcaaaaaggagaagaagaaaaagaaagaggagattattgcacggaaagttgttgatacctcagtctcatgttgttacggctgcggagctccgttacaaacttccgacgtcgattctccgggatttgtcgatttggttacttatgaattgaagaagaagcatcaccagttaagaactatgatatgtggaagatgtcagctattgtcacatggacatatgattacagcagttggtggtaatggaggttatccaggtgggaaacaatttgtatcagctgatgaacttcgtgagaaactttctcatttacgccatgagaaagctttgattgttaaattggttgatatagtggattttaatggaagctttttagctcgtgttcgtgatttagttggagctaatccgattatacttgttataactaagattgatcttcttccaaaaggaacggatatgaattgtatcggggattgggttgtggaagtgaccatgaggaaaaagcttaatgtcttgagtgtccatctcacaagttcaaagtccctggatggagttagcggagttgcatcagagatccagaaggagaaaaagggacgagatgtctacattctgggtgcagctaacgtagggaagtcagcattcatcaatgctttgctgaaaacgatggccgaaagggatcctgttgcagcagcggcacaaaagtacaaaccaattcaatctgctgtccctggaaccaccttgggtccaattcagatcaacgctttcgtcggaggagagaagttgtatgacacaccgggtgtgcacctacaccacaggcaagcagctgtcgttcattcagatgatttacccgcccttgctcctcaaaatcgtctcagaggccaatctttcgatatttcaactttgccaactcaatcgtcaagtagtcccaagggtgagagcttaaacggttatacatttttctggggaggtctcgttaggattgacatcttgaaggctctaccggaaacatgtttcacattctatggaccaaaagctcttgagattcatgcagtaccaaccaaaacagcgactgccttttacgagaaagaactgggtgtgcttctaacacctccatcagggaaaaatcagatgcaggagtggaaagggttacaatctcaccggttacttcaaatcgaaatcaacgatgcaaaaagaccggctagtgatgtggcaatatcagggttaggatggatttcaattgaaccaatccgcaaaacacgaggaactgaaccgagagatctcaatgaagcagagcatgagatacatatttgtgtcagtgtgccaaaaccagttgaagtttttcttcgaccaacattgccaattggtacttcaggtactgaatggtatcagtatcgtgagttaaccgataaggaagaagaagtaagacccaaatggtacttttag

SEQ ID NO: 99 - DNA, 1032 bp, Arabidopsis thaliana
atggctttgtgctctatctgtcctcgcatccctcttcgattcaggccaaaacccatttccccttttctctcaaaacctcaaatttgtctcgcttacagggtttactcttccctgcaatctactactccctctaccagagatgaacttggaactgttagcattgggtttctgggtatgggaatcatgggttctccaatggcacagaacctcatcaaagctgggtgtgatgtgactgtatggaatcgaactaagagcaaatgtgatcctctcgttggattaggagcaaagtacaagtcttctcctgaagaagtgactgcaacttgtgatctcacatttgcaatgcttgctgatcctgaaagtgcaattgatgttgcatgtggaaagaatggagccatatttgggattagttcaggaaaagggtatgttgatgtctcaaccgttgatgtggcctcatcaatactaatcagcaagcaaataaaggataccggagccttgttcttggaggcaccagtttcaggttccaaaaagcctgccgaagatgggcagttaatatttctcactgcaggtgacaagccgctatacgaaaaagctgctcctttcttagacatcatgggaaagtcaaaattctatttgggtgaagttggtaatggagcagcaatgaaacttgtcgtcaacatgatcatgggaagtatgatggcatcattcgcggagggaatacttctaagccagaaagttggactcgatccaaatgtacttgtcgaggttgtctcacagggagctatcaatgcgccaatgtactcactaaagggtccttcaatgatcaagtcagtgtacccgacggcttttccattaaagcatcagcagaaggatatgagactcgcacttggactagcggaatccgtatcgcaatctactccgattgcagccgctgcgaacgagctttacaaggttgcaaaatcttatgggttgagcgatgaagatttctctgcagtaattgaagcactaaaagctgcaaaatcccgagaagcttag

SEQ ID NO: 100 - DNA, 870 bp, Arabidopsis thaliana
atggaagtagggtttctgggtttgggaatcatgggaaaagccatgtcaatgaatctattgaagaatggattcaaagtcactgtatggaacagaacactctccaagtgtgatgagcttgtggagcatggtgcatcagtatgtgagagtccagctgaagtaatcaagaaatgcaaatacactattgctatgctctctgatccttgtgctgctctttcggttgttttcgataaaggcggtgttttggagcagatatgtgaaggaaaaggttatatcgatatgtcgactgttgatgcagagacttctttgaagatcaatgaggcaatcaccgggaagggtggtcggttcgtagaaggtccggtttcaggtagcaaaaagccagctgaagatggccaactcattatccttgctgctggtgacaaggcactctttgaggaatcaatcccagcttttgatgtcttggggaagagatcgttttacttgggacaagttggaaacggagctaaaatgaagctaatagtgaacatgataatgggaagcatgatgaatgcattctctgaggggcttgtattggctgacaagagtggacttagctctgacactcttttggatattctggatctgggagcaatgactaacccgatgttcaaggggaaaggaccttcaatgaacaagagtagttacccaccagcatttccattgaaacatcagcagaaagacatgaggctagctcttgctcttggcgatgaaaacgcggtttccatgcctgtagccgcggctgcaaacgaggcttttaagaaggcgagaagcttgggactaggagatctcgacttctctgctgtgattgaagctgtgaaattctcccgcgaatag

SEQ ID NO: 101 - DNA, 387 bp, Chlamydomonas reinhardtii
atgctcgctactcgttctgctgccttcgcctcggtcgctggccggcggactcttgtcactcgcgctatggcaaccaagctggactcaattagggagacggttgccaagaacaaggtggtcgtgtacagcaagactcactgcccctactgcatgaaggccaagagctccatcaaccagttcctgcagcccagccagtacaccgtcatcgagctggacggccgtgccgacatggacgagatgcaggacgccctgcgcgagctgacgggggcccgctccgtgccccgcgtgttcgtgggcgggaagttcctgggcggtggcgatgacaccgccgccgccgccgccaacggcaccctgaagaagctgctgcaggaggccggtgctctgtag

SEQ ID NO: 102 - DNA, 447 bp, Chlamydomonas reinhardtii
atggcctcgcttcagtgcaatatgcgtccggctaccaccattttgacgcggcgcccggctcaggttgcgcgcaaatctattggcgtagcgcgaagccagactgtgcgcgtcacggcttctggaatggcccccgatttgaagaagtccattgacgagcttattgcatccaacaaagtggtggttttcatgaagggcacccgccagttcccaatgtgtggcttctccaacaccgtggtgcagatcctgaacgtgatggatgtgccgtaccagaccgttaacattctggaggacgacgccatccgcagcggcatgaaggagtacagccaatggcccaccttcccgcaggtttatattaacggcgacttcttcggcggttgcgacattatgatggaggcctaccagtccggcgagctgaaggagcagctggagattgccctcaactcctag

SEQ ID NO: 103 - DNA, 858 bp, Arabidopsis thaliana
atgataaaactactatttacgtacatatgcacatacacatataaactatatgctctatatcatatggattacgcatgcgtgtgtatgtataaatataaaggcatcgtcacgcttcaagtttgtctcttttatattaaactgagagttttcctctcaaactttaccttttcttcttcgatcctagctcttaagaaccctaataattcattgatcaaaataatggcgattttgccggaaaactcttcaaacttggatcttactatctccgttccaggcttctcttcatcccctctctccgatgaaggaagtggcggaggaagagaccagctaaggctagacatgaatcggttaccgtcgtctgaagacggagacgatgaagaattcagtcacgatgatggctctgctcctccgcgaaagaaactccgtctaaccagagaacagtcacgtcttcttgaagatagtttcagacagaatcatacccttaatcccaaacaaaaggaagtacttgccaagcatttgatgctacggccaagacaaattgaagtttggtttcaaaaccgtagagcaaggagcaaattgaagcaaaccgagatggaatgcgagtatctcaaaaggtggtttggttcattaacggaagaaaaccacaggctccatagagaagtagaagagcttagagccataaaggttggcccaacaacggtgaactctgcctcgagccttactatgtgtcctcgctgcgagcgagttacccctgccgcgagcccttcgagggcggtggtgccggttccggctaagaaaacgtttccgccgcaagagcgtgatcgtggatctaagaagagaagaattaaacaagattag

SEQ ID NO: 104 - DNA, 852 bp, Arabidopsis thaliana
atgataaaactactatttacgtacatatgcacatacacatataaactatatgctctatatcatatggattacgcatgcgtgtgtatgtataaatataaaggcatcgtcacgcttcaagtttgtctcttttatattaaactgagagttttcctctcaaactttaccttttcttcttcgatcctagctcttaagaaccctaataattcattgatcaaaataatggcgattttgccggaaaactcttcaaacttggatcttactatctccgttccaggcttctcttcatcccctctctccgatgaaggaagtggcggaggaagagaccagctaaggctagacatgaatcggttaccgtcgtctgaagacggagacgatgaagaattcagtcacgatgatggctctgctcctccggccaagaaactcgccctaaccagagaacagtcacgtcttcttgaagatagtttcagacagaatcatacccttaatcccaaacaaaaggaagtacttgccaagcatttgatgctacggccaagacaaattgaagtttggtttcaaaaccgtagagcaaggagcaaattgaagcaaaccgagatggaatgcgagtatctcaaaaggtggtttggttcattaacggaagaaaaccacaggctccatagagaagtagaagagcttagagccataaaggttggcccaacaacggtgaactctgcctcgagccttactatgtgtcctcgctgcgagcgagttacccctgccgcgagcccttcgagggcggtggtgccggttccggctaagaaaacgtttccgccgcaagagcgtgatcgtcttttgtgggctatggcaactctctag

SEQ ID NO: 105 - DNA, 858 bp, Arabidopsis thaliana
atgattaagctcctgttcacctacatctgcacctacacctacaagctctacgccctctaccacatggactacgcctgcgtgtgcatgtacaagtacaagggcatcgtgaccctccaagtgtgcctcttctacattaagctgagggtgttcctctccaacttcaccttctccagctccatcctcgccctcaagaaccctaacaatagcctcatcaagatcatggccatcctccctgagaactccagcaacctggacctgaccatctccgtgcccggcttctccagctctcccttgtccgacgagggcagcggcggtgggcgcgaccagcttcgcctggacatgaaccgcctgcccagctctgaggacggtgacgatgaggaattctctcacgatgatgggtctgctcctcctcgcaagaaactgaggctgactagggagcagtctcgcctgcttgaggatagtttccgccagaaccacactctgaacccgaagcagaaggaggtcttggctaagcaccttatgcttcgcccgaggcagattgaggtctggtttcagaataggcgtgctaggtcgaagttgaagcagactgagatggagtgcgagtatcttaagcgttggtttggatcgcttactgaggagaatcatcgtttacatagagaagtcgaggaactacgggctatcaaggtcggacccacgacagtcaattcagcgtcatcactaacgatgtgtcccagatgtgagcgggttacgccagcggcatcgccgagtcgggcggttgtaccggttccagcaaagaagacattcccaccacaagaaagagatcgcggatctaagaagagaagaattaaacaagattag

SEQ ID NO: 106 - DNA, 408 bp, Zea mays
ggcagagccgtgcccgtctcatcccctgcccgtgcaagcagctaggtaggacgatttgagcgtggtgttaggccgaaccgctgaaggaagattgctccactgttgactgcattccatctcgcacttgacccacaaatgtattgcttatattcagcaatataatgttcgtgggtcaaatccgggatggaatatagtcgatagtggaagaacggtaacatatgtggtttgcagcaggtgagcaggatgggtgtggatgattgaatatctctgttcagtgttttcatcatctgactgaacactgaatcagcttgctgacgttagaggtttcagtttacctaatttatggtctgtacccatgaaaagtgggaaaaggctgaagaattcgatttctttctttctttcaatgtt

SEQ ID NO: 107 - DNA, 900 bp, Zea mays
atgtcggcgtcgagcgccgcgtgccgcgtatgtggcggcgtagcggagtgcgcgtgccacggcggcgccggcgcgcggtgcggggccgccgtcgcggacctcaaccgcgggtttcccgggatgtggcaccaccaccaccagcagccggaggaggaggaggagcccagcgtcgccggcggtggcgcggcggcggggctgcaggagttccagttcttcggccacgacgacgaccacgacagcgtggcgtggctgttcaacgacccggcgccccacctgcaccgcggtccggcgccggccgcggccgggaacggggttgtgcccgaggccgcgcagcggagagcgccgctgttcgacgggtacgcgcacgctcagtacggccagctgccgggccacgggctcatgttcgacgtgccgctgagccggggcggcggcgacgacgacgcggcggtgctggaggcagggctggggctaggcggcgccggcgccggcgacagcaatccagcgacgacgtccagcgccacaatcattttaatttggccgataacacaagtgattattggaaacgtcaaaaagccgccaatttgtggtccagcgtcactccgactaatgtccttctgcgggagcacgttcaccgacgcggcggccaacggcagcgcaagcggcgccgacccggcagtggaccgggaggcgaaggtgatgcggtacaaggagaagcggaagaggaggcgctacgagaagcagattcgctacgcttcccgtaaggcgtacgcggagatgcggccgcgcgtcaagggccgcttcgccaaggtgcccgacggtgatgctcccgcgccaccagcgccggccgctgcggggggctacgaaccaggccggctcgacctcggatggttccgttcatag

SEQ ID NO: 108 - DNA, 564 bp, Zea mays
atgtcgaacggcacagatcacgcccaaccaccgtcggaaaagttgagtcttccgatggaatcgaggccgaagaagcgtgcgtcaccgggggataactgggcgcctcctccaggttggacgaccgaagaaaaggttcgaacctccggtaccaaagctggtttggtggacaagttctactacgaacctgttacaaatcgcaagttccggtcaaggaccgaggtgatgtactacttggaacacggaacgcctaaaaagaaaaacaagaaatcggttaacaacagtgacaccaaatcacaacgttctgaagacccgagaagctataagcggctgaccccaatccacacaaagcctaacggagcagccacccccccaacccacccccaccccaatgccgctggactttgattttgggatggccccgagaaggtcatttggacagggacaaacggcttacaggaagcttggtgtcctttcattggggactacaagattcaagaatctgtcagccaagattgggacagagccttcactcttctcaccgcaaatgcaaatatgtcggtttag

SEQ ID NO: 109 - DNA, 1233 bp, Zea mays
atggcaaccggcgaggagcacgtggcggcgccggcgccggcggtcgaggagacgccggagaagaagcaggccagcacaaccgagctccccgcaccctcaggctggacgaagaagcttgccccaactcgaggtggacgaggtggacgatttgaggttatttttgtttccccaactggtgaggaaattaaaagcaagagacagctgactcagtacctgaaagctcatcctggaggccctgcatcttcagagtttgattggggaaccagtgatactcccagacgctcagcacgcttgagcgagaaggtcaaggcaactgagagcccagagggtgagaagacccctaaacgggcaagatcaagctctaagaggggcaaaaaggaggaaaaagtggatgcagaggatgcaaatgaggctggagaagatggtgctgcggcggaaggtaaaggtaccgatgtggagatgaaagatgctgaaaatgctgaagacgagaagaaagatgtcccaagtgcagagaagactgaggaagttgacgataagaaagatgctgaaaatgtggagatgaaagatgctgcagagaagactgaggaagttgaagataagaaagaggaagcccctactgtagatgcagcagagaatactgtggaaggtgatgataagaaagaggagccccctgcagagaagactgatgagaaagaggaagccccagctgtagatgcagcagagaagaatgaggaaggtgatgataagaaagaggaggagccccctgcagagaagaagactgttgagaaagaggtggtccctgctgtagatgcagcagagaatactgaacaaagcaccggtgggcaagcacagcctaacgatgttgctgccccagaatctgagaataaaggagacggcaagccagctgaatccgaatcagctccccttgcatttgttgatgacgcagcgccccttgtaatcgttggtgaagagaaaactgaggacagtcaggcagctgaatctgcggtgccttccctggcgtcttcagagggagagaagaaagagaacggtggtgccactgaaccagcagctccgcttgtggttgagacaaaggcagatgcacctcctccagctgatgcagagaagggcgcggagaattcaggccaggtgaacaccgccccccaagaaccgacggcagcgaactgcgacaaggggcagatccaacctggtgcctctgctgtcaggtgcacataa

SEQ ID NO: 110 - DNA, 858 bp, Zea mays
atgtcgacgagtgaggtgtggagcttgtccgatttcgaaatcagcaagtacatcggtgagggcaggttcggcaaggtctacctcgcccgcgagaagcagagcgggtacgtggtggcgctcaaggtgatatttaaggcgaaactgcagaagtaccacttccacgcgcacctgcggcgggagatcgagatccagcagagtctcgaccaccctaacgtgctccgcctcttcacctggttccacgacgaagagcgagtcgtcctcgtcctcgagtacgcggcccgtggcgagctctacaaggtccttcgcgctgctggccgcttcaccgagcgcacgtccgccacatatgtagcgagtcttgctggtgcactggcatactgtcacaaaaagcaagtcattcatagggacatcaagcctgagaatttgctaatcgacatcgagggccggcttaaaattgcagattttggatgggcggctcgttcaaatgctaaacgccacacactctgtggcacaatcgattatctggcaccagagatggtagagaaaaaagctcatgaccatgctgtggacaactggacattaggaatcctgtgctatgagttcttatatggttcacctccttttgaagctgatgaacaggatgataccttgagaaggatagttagggtggatttggcattcccttcatctccttgtgtatcttcagaggctaaggatctcatttccaagcttctagttaaggattcaagcaagaggctttgccttgaagacatcatgaagcatccatggataaagaagaatgcagacccttcaggcagttgcattaagcaaaaagatgtcacaagatcaaagcttctgtag

SEQ ID NO: 111 - DNA, 990 bp, Arabidopsis thaliana
atgaagcaagcttcttcttcttcgtcatgtaatccaacaagtttaacaaacagacttaaaacaatctttaagaaagcagaagagctttcgattctctgtgctattgacgtttgcgtcatctattacggaccagacggtgatctgagaacatggcctaaggatagagagacagtgaaaaatatggctttgaggtataaagaggacagaaaacgcaagaagtgcctcaatcttcatgagttcctcgagaaagagaaggtgaaggacaaagacaagtataaggggaagacgaattatgtgaagaaccctaattggtatccaaactttgatcattactctcctcaacaactctctcaattgattcagtccttagaacgaacactttctactctccaaaaaaggcttcgtattgttgagtcgcagaaaaaacagaacacaaacttggtgcatcagagtttaacaccatcgtatctgaaccagacacaacacttggatcctagcaagttctcgctgtatatgtacaaccatggagatgctactctctcacaactcccactgtctgcttcacaatccaatcaactcatcaattaccagatgcagcatggttttggtcagaacatgtgtttggacaacatcaccaacaacaacaactttcaacatcctggcgtgtcaaacacacaagactactcaccgttactttcggcgaataactacgggttgaataatcacttgatgcagcaacaggatcagcttcatggttttgatcagaacttgtgtatgatgagtgaaatcatcaataacaacaacggtttacaacatcctaatctctcaaacactgttccacatgaattcccttatggtaacactagcttctctcaagatatgttttcgagctatgatgggagcagtttgctacagacatcttctctgccacctctccacaacattcctaacagctattgtttttctgacaactcaagacttctctgctag

SEQ ID NO: 112 - DNA, 969 bp, Arabidopsis thaliana
atggggggcgtgaagagaaagatttctatagagctgatagagaagaaagattcaagagctgttgctttctcaaaacgcagtaggggtctatatagcaaagcctctgatctttgtcttctctccgatgcacaaattgcgatcatagccactccggtctcttccaaatcaaacgtttctttctacacctttggccattcctctgttgataacgttgtagccgctttcctcacgaatcagcgtcctcgggaaggtctagggttagactattggtgggaagatgagaggctttcaaaatcagaggacctggaggaactgagagacgcaatggactcgatgtcgaagatgttgaaagatctgaaggatttgcagaatcaacgagattgtgaggaggacgtgaagaagaagggtgttttacacggaactcatcaaaagcaaacctttaatcctgaatcatgttctgtgaatttcgatgggtttaacaagaacactgaagaatttgatcttgatgaaatatttgattatgtgtcaacagctgaagctctatcgatgaacttggacatggacgatgtctctgtggtgaccacgaatcaaaaccccgtctctgcttctgaaactgttgaagatagagaattggttgttcacaaaaatatggatgaggacaatatccacgtgtctgatatggacgacaaggatacgatgctaatgatttctgacaagaacaatgttttacctgaaaacttggatgaattcgatcaagagctagatcttgatcagctacttgattttgagacaaactatgaaagccttttgaagagttgtgagatggaggattatgcctcgatggtgactacaaagcaaaatctgtgctcaaatcctgaagctgttgaagatggaggattaatgattcaaaaagatttaccggaggataatctctgcttttctgattatttcagtgacttacattgctag

SEQ ID NO: 113 - DNA, 480 bp, Populus deltoides
atgtctgacgaggagcagcacttcgagtcaaaagctgatgcgggagcttcgaaaacttaccctcaacaagctggtaccattcgcaagagcggttacattgtcatcaagaatcgcccttgcgaggttgtggaggtttctacctctaaaactggacgacacggacatgccaagtgccattttgttgcaattgatatcttcaatggaagaaagcttgaagatattgttccttcttcccacaactgtgatgttccccatgtcacccgtactgactatcagctgattgatatctcagaggatggatttgtgagcttgctgactgagaatggcaataccaaggatgacctgaggctcccaactgatgagagtctcctctctcagatcaaggatggatttggcgagggtaaagatcttgttgtgactgtgatgtcctccatgggagaggagcagatctgcgccctcaaggacgttggcccgaagtag

SEQ ID NO: 114 - DNA, 2169 bp, Arabidopsis thaliana
atgagtttcgtcgtcggcgtcggcggaagtggtagtggaagcggcggagacggtggtggtagtcatcatcacgacggctctgaaactgataggaagaagaaacgttaccatcgtcacaccgctcaacagattcaacgccttgaatcgagtttcaaggagtgtcctcatccagatgagaaacagaggaaccagcttagcagagaattgggtttggctccaagacaaatcaagttctggtttcagaacagaagaactcagcttaaggctcaacatgagagagcagataatagtgcactaaaggcagagaatgataaaattcgttgcgaaaacattgctattagagaagctctcaagcatgctatatgtcctaactgtggaggtcctcctgttagtgaagatccttactttgatgaacaaaagcttcggattgaaaatgcacaccttagagaagagcttgaaagaatgtctaccattgcatcaaagtacatgggaagaccgatatcgcaactctctacgctacatccaatgcacatctcaccgttggatttgtcaatgactagtttaactggttgtggaccttttggtcatggtccttcactcgattttgatcttcttccaggaagttctatggctgttggtcctaataataatctgcaatctcagcctaacttggctatatcagacatggataagcctattatgaccggcattgctttgactgcaatggaagaattgctcaggcttcttcagacaaatgaacctctatggacaagaacagatggctgcagagacattctcaatcttggtagctatgagaatgttttcccaagatcaagtaaccgagggaagaaccagaactttcgagtcgaagcatcaaggtcttctggtattgtcttcatgaatgctatggcacttgtcgacatgttcatggattgtgtcaagtggacagaactctttccctctatcattgcagcttctaaaacacttgcagtgatttcttcaggaatgggaggtacccatgagggtgcattgcatttgttgtatgaagaaatggaagtgctttcgcctttagtagcaacacgcgaattctgcgagctacgctattgtcaacagactgaacaaggaagctggatagttgtaaacgtctcatatgatcttcctcagtttgtttctcactctcagtcctatagatttccatctggatgcttgattcaggatatgcccaatggatattccaaggttacttgggttgaacatattgaaactgaagaaaaagaactggttcatgagctatacagagagattattcacagagggattgcttttggggctgatcgttgggttaccactctccagagaatgtgtgaaagatttgcttctctatcggtaccagcgtcttcatctcgtgatctcggtggagtgattctatcaccggaagggaagagaagcatgatgagacttgctcagaggatgatcagcaactactgtttaagtgtcagcagatccaacaacacacgctcaaccgttgtttcggaactgaacgaagttggaatccgtgtgactgcacataagagccctgaaccaaacggcacagtcctatgtgcagccaccactttctggcttcccaattctcctcaaaatgtcttcaatttcctcaaagacgaaagaacccgtcctcagtgggatgttctttcaaacggaaacgcagtgcaagaagttgctcacatctcaaacggatcacatcctggaaactgcatatcggttctacgtggatccaatgcaacacatagcaacaacatgcttattctgcaagaaagctcaacagactcatcaggagcatttgtggtctacagtccagtggatttagcagcattgaacatcgcaatgagcggtgaagatccttcttatattcctctcttgtcctcaggtttcacaatctcaccagatggaaatggctcaaactctgaacaaggaggagcctcgacgagctcaggacgggcatcagctagcggttcgttgataacggttgggtttcagataatggtaagcaatttaccgacggcaaaactgaatatggagtcggtggaaacggttaataacctgataggaacaactgtacatcaaattaaaaccgccttgagcggtcctacagcttcaactacaggttag

SEQ ID NO: 115 - DNA, 2169 bp, Arabidopsis thaliana; identical to SEQ ID NO: 114

SEQ ID NO: 116 - DNA, 2169 bp, Arabidopsis thaliana
atgagtttcgtcgtcggcgtcggcggaagtggtagtggaagcggcggagacggtggtggtagtcatcatcacgacggctctgaaactgataggaagaagaaacgttaccatcgtcacaccgctcaacagattcaacgccttgaatcgagtttcaaggagtgtcctcatccagatgagaaacagaggaaccagcttagcagagaattgggtttggctccaagacaaatcaagttctggtttcagaacagaagaactcagcttaaggctcaacatgagagagcagataatagtgcactaaaggcagagaatgataaaattcgttgcgaaaacattgctattagagaagctctcaagcatgctatatgtcctaactgtggaggtcctcctgttagtgaagatccttactttgatgaacaaaagcttcggattgaaaatgcacaccttagagaagagcttgaaagaatgtctaccattgcatcaaagtacatgggaagaccgatatcgcaactctctacgctacatccaatgcacatctcaccgttggatttgtcaatgactagtttaactggttgtggaccttttggtcatggtccttcactcgattttgatcttcttccaggaagttctatggctgttggtcctaataataatctgcaatctcagcctaacttggctatatcagacatggataagcctattatgaccggcattgctttgactgcaatggaagaattgctcaggcttcttcagacaaatgaacctctatggacaagaacagatggctgcagagacattctcaatcttggtagctatgagaatgttttcccaagatcaagtaaccgagggaagaaccagaactttcgagtcgaagcatcaaggtcttctggtattgtcttcatgaatgctatggcacttgtcgacatgttcatggattgtgtcaagtggacagaactctttccctctatcattgcagcttctaaaacacttgcagtgatttcttcaggaatgggaggtacccatgagggtgcattgcatttgttgtatgaagaaatggaagtgctttcgcctttagtagcaacacgcgaattctgcgagctacgctattgtcaacagactgaacaaggaagctggatagttgtaaacgtctcatatgatcttcctcagtttgtttctcactctcagtcctatagatttccatctggatgcttgattcaggatatgcccaatggatattccaaggttacttgggttgaacatattgaaactgaagaaaaagaactggttcatgagctatacagagagattattcacagagggattgcttttggggctgatcgttgggttaccactctccagagaatgtgtgaaagatttgcttctctatcggtaccagcgtcttcatctcgtgatctcggtggagtgattctatcaccggaagggaagagaagcatgatgagacttgctcagaggatgatcagcaactactgtttaagtgtcagcagatccaacaacacacgctcaaccgttgtttcggaactgaacgaagttggaatccgtgtgactgcacataagagccctgaaccaaacggcacagtcctatgtgcagccaccactttctggcttcccaattctcctcaaaatgtcttcaatttcctcaaagacgaaagaacccgtcctcagtgggatgttctttcaaacggaaacgcagtgcaagaagttgctcacatctcaaacggatcacatcctggaaactgcatatcggttctacgtggatccaatgcaacacatagcaacaacatgcttattctgcaagaaagctcaacagactcatcaggagcatttgtggtctacagtccagtggatttagcagcattgaacatcgcaatgagcggtgaagatccttcttatattcctctcttgtcctcaggtttcacaatctcaccagatggaaatggctcaaactctgaacaaggaggagcctcgacgagctcaggacgggcatcagctagcggttcgttgataacggttgggtttcagataatggtaagcaatttaccgacggcaaaactgaatatggagtcggtggaaacggttaataacctgataggaacaactgtacatcaaattaaaaccgccttgagcggtcctacagcttcaactacaggttga

SEQ ID NO: 117 - DNA, 2169 bp, Arabidopsis thaliana; identical to SEQ ID NO: 116

SEQ ID NO: 118 - DNA, 1023 bp, Zea mays
atgggtggcgcggcggcgggtaccaagtggatccaccacatccagcgcctcagcgcggccaaggtgtcggcggaggcggtggagcggggccagagccgcgtcatcgacgcctccctcaccctaattcgcgagcgcgcaaagctcaaggcagagttgctgcgtgctctgggtggcgtgaaagcttcagcgtcgctcttaggggtccctcttggtcacaactcatcctttttacaaggccctgcatttgctcctccacgcatacgggaggccatttggtgtggaagcacaaactctagcacagaggaaggcaaagaattgaatgatcctcgggtgctaactgatgttggagatgtccccattcacgagatccgtgactgtggtgtcgaagatgacagattaatgcatgtaattagtgagtctgtcaaaacagtgatggaggaggagcctcttcgaccgttggtgttaggaggcgatcattcaatatcttatccagtggttagagctgtgtctgaaaagcttggaggacctgttgacatacttcatcttgatgcacatccagatatctatgattgttttgaagggaacacttattcgcatgcctcgtcatttgccagaataatggaaggtggttatgccaggagactgctacaggttggattgagatcaatcaccaaagaagggcgtgaacaagggaagagatttggtgtggaacagtatgagatgcgaaccttctcaaaggaccgagagaagcttgagaatctgaaacttggggaaggcgtaaagggtgtgtatgtctcagttgatgtggactgccttgacccagcgtttgctcctggggtctctcacatcgaacctggaggcctctccttccgcaatgtcctcaacatcctccagaatttgcagggtgacgttgtcgccgctgatgtggtggagttcaacccacagcgtgacacggtagatgggatgacagccatggtcgccgcgaagctggttcgggagctcactgctaagatctccaagtga

SEQ ID NO: 119 - DNA, 1127 bp, Zea mays
acctgtgggttaggccgagagacaccagagggtgggcgccccagcccttctctatgaagaggtgattgaggactatgtgctgcggccgcgcacagctttcttccgagttctgtgagttaagaacaccgagatggagttgagatggaagaacaggaggctccttggcgaagtccttgtcctcaggtgcctggaaactgtagctagagtctggagaaggaggtggctcaaactctgccacgctctcaacactttcagggacataatcattaacatcaagaaggttaaccgcattgcccattgcatcgatttcacaggggagatcaggaagacatctcctttctccatctacaacaaatctgtatcggtaaactcctgctgggagtaccagcaaaagagaatgatctttcccagatttttgcatggcttttcttgatttccagttatcccatgatccttcaacatatacattctttcctccaagggtccaaagtactgcgatcgcgttaacgctttatcacgataccttctaccacatatcactaacaacatcaacactcatcactctcgacgacatccactcgatcactactctcacacgaccgattaactcctcatccacgcggccgcctgcaggagctggacccttggaggaaagaatgtatatgttgaaggatcatgggataactggaaatcaagaaaagccatgcaaaaatctgggaaagatcattctcttttgctggtactcccagcaggagtttaccgatacagatttgttgtagatggagaaaggagatgtcttcctgatctcccctgtgaaatcgatgcaatgggcaatgcggttaaccttcttgatgttaatgattatgtccctgaaagtgttgagagcgtggcagagtttgagccacctccttctccagactctagctacagtttccaggcacctgaggacaaggacttcgccaaggagcctcctgttcttccatctcaactccatctcggtgttcttaactcacagaactcggaagaaagctgtgcgcggccgcagcacatagtcctcaatcacctcttcatagagaagggctggggcgcccaccctctggtgtctctcggcctaacccacaggttag

SEQ ID NO: 120 - DNA, 804 bp, Glycine max
atgaattgcttatgtgagaaagactctggtctattttcttctcattcaacagctccctatgttcttggatgcccatcatgggcgacttctgaatttgaagtccaacgatcatctatgtccagaagtttgagctcaaaagtggatgttcttccacaacaatgccacaatagcaagacatttaattttcaattccaagaacaggatgcatcttcaaccaaatccactgatcaatcttatccagaagttggtcaaatttctgtccagcatagttctactgattcaacacttatcagaaatgaggggaagagtatgggatgtgtcatcaggtcatttatggggagtcaggatttccctttccctcctccactactggatcacagaccaatacttccagtggaaactgctcctgttcgaattcctcttcaattggattttgcagaagaacctatatacgtgaattcaaagcagtaccatgctattctgaggcgaagacagtatcgagcaaaactcgaagcgcttaacaaacccatcaaggatcggaaaccgtatcttcacgagtcccgccatcaacatgcactgaagagagctagaggcgctggtggacgctttctcaatacaaaaaaacaattacaatcaaatcatacacctgggaatattgcagaatcaaaaatgcatcacattgaaaactatagagatggtgctgatgtctcatatgcatttaacagtgatgcaagaaacatgcagaatgatgcagctgataagggtggtggcaccactcagcaacctctatttgtctacatgtga

SEQ ID NO: 121 - DNA, 912 bp, Glycine max
atgccagggaaacctgacactgatgattggcgtgtagagcgtggggagcagattcagtttcagtcttccatttactctcatcatcagccttggtggcgcggagtgggggaaaatgcctctaaatcatcttcagatgatcagttaaatggttcaatcgtgaatggtatcacgcggtctgagaccaatgataagtcaggtgaaggtgttgccaaagaataccaaaacatcaaacatgccgtgttgtcaaccccatttaccatggacaaacatcttgctccaaatccccagatggaacttgttggtcattcagttgttttaacatctccttattcagatgcacagcatggtcaaatcttgactacttacgggcaacaagttatgataaaccctcaattgtacggaatgtatcatgctagaatgcctttgccacctgaaatggaagaggagcctgtttatgtcaatgcgaagcagtatcatggtattttgaggcgaagacagtcacgtgctaaggctgagattgaaaagaaagtaatcaaaaacaggaagccatacctccacgaatcccgtcaccttcatgcaatgagaagggcaagaggcaacggtggtcgctttctcaacacaaagaagcttgaaaataacaattctaattccacttcagacaaaggcaacaatactcgtgcaaacccctcaacaaactcgcctaacactcaacttttgttcaccaacaatttgaatctaggctcatcaaatgtttcacaagccacagttcagcacatgcacacagagcagagtttcactataggttaccataatggaaatggtcttacagcactataccgttcacaagcaaatgggaaaaaggagggaaactgctttggtaaagagagggaccctaatggggctttcaaataa

SEQ ID NO: 122 - DNA, 750 bp, Glycine max
atggtatcacgcagtctgagaccaatgataagtgaaggtgttgccaaagaataccaaaacatcaaacatgccgtgttgtcaaccccatttaccatggacaaacatcttgctccaaatccccagatggaacttgttggtcattcagttgttttaacatctccttattcagatgcacagcatggtcaaatcttgactacttacgggcaacaagttatgataaaccctcaattgtacggaatgtatcatgctagaatgcctttgccacctgaaatggaagaggagcctgtttatgtcaatgcaaagcagtatcatggtattttgaggcgaagacagtcacgtgctaaggctgagcttgaaaagaaagtaatcaaaaacaggaagccatacctccatgaatcccgtcaccttcatgccatgagaagggctagaggcaatggtggtcgctttctcaacaaaaagaagctcgaaaattacaattctgatgccacttcagacattgggcaaaatactggtgcaaacccctcaacaaactcacctaacactcaacatttgttcaccaacaatgagaatctaggctcatcaaatgcgtcacaagccacggttcaggacatgcacagagtggagagtttcaatattggttaccataatggaaatggtcttgcagaactgtaccattcacaagcaaatggaaaaaaggagggaaactgctttggtaaagagagggaccctaataatggggctttcaaatga

SEQ ID NO: 123 - DNA, 687 bp, Glycine max
atgaagccatttctctttttaaatcttcccaacaccgagttcaattcttcacaagttgattgtaatcactcaatggctcattcttcttatccctacggcgatccaatttttgcttatggaccacaagctattagtcatccccaaatgatacccccgatgctgggactagcatccaccagagtggctttgccacttgatcttgcagaagatggaccaatttatgtcaatgcaaaacaataccatggtatactgagaaggcgtcagtcacgagcaaaacttgaggctcagaacaaacttatcaaaaatcgtaagccatatcttcacgagtctcggcaccgccatgctttgaatagggttaggggatccggggggcgatttctcagcaccaaacagcttgcacagtctaatgcagaatttgtcactggtgcacattctggttctgaccctaccaacagatatcaaaaggaacatctatcagaggtggaaagtcattcctcaaaagatggagataattcatctttcatcacaacctgctccgaccggccatgtttatctggcaacaatgtcaattttcggcagcaggagtgcatgtttctggggaattctgcaaacatgggtggatcaccacagttcagtgggggactcacctttggcggagcaaagcagcgcacatcagttgtccggtga

SEQ ID NO: 124 - DNA, 642 bp, Glycine max
atgaagccattcttgtcgaatcatactgattctatgtacaattgttcccaagttggttgtagtcatccaatggctcatacttcttatccttgtggtgatccttattttggtagttcaatagttgcttatggaccacaggctattaatcaacaaatggtgccccagatgctgggattagcatccaccagaattgcattaccagttgatcttgcagaagatgggcccatttatgtcaatgccaaacaataccatggtatactgagaaggcgacagtcacgagcaaagcttgaagctcaaaacaaactcatcaaaagtcgtaagccatatcttcacgagtctcggcaccgccacgcattgaacagggttaggggatctgggggacgctttcttagcgccaaacagctgccacagtctaatgcagaactagtcactgatgcctatcaaaagaaagatgcatcagaggcagaaaatcatccctcaagcaccggtgaaaatgcatctatcacattcacagccatctctgccttaactagtatgtccagtaacagtgtcaatttccccaacatggctggatcatcgcaatgcagtgggggactcacctttggtgctggagctctccaatgtacttcagttggccgatga

SEQ ID NO: 125 - DNA, 3519 bp, Arabidopsis thaliana
atggtttccggagtcgggggtagtggcggtggccgtggcggtggccgtggcggagaagaagaaccgtcgtcaagtcacactcctaataaccgaagaggaggagaacaagctcaatcgtcgggaacgaaatctctcagaccaagaagcaacactgaatcaatgagcaaagcaattcaacagtacaccgtcgacgcaagactccacgccgttttcgaacaatccggcgaatcagggaaatcattcgactactcacaatcactcaaaacgacgacgtacggttcctctgtacctgagcaacagatcacagcttatctctctcgaatccagcgaggtggttacattcagcctttcggatgtatgatcgccgtcgatgaatccagtttccggatcatcggttacagtgaaaacgccagagaaatgttagggattatgcctcaatctgttcctactcttgagaaacctgagattctagctatgggaactgatgtgagatctttgttcacttcttcgagctcgattctactcgagcgtgctttcgttgctcgagagattaccttgttaaatccggtttggatccattccaagaatactggtaaaccgttttacgccattcttcataggattgatgttggtgttgttattgatttagagccagctagaactgaagatcctgcgctttctattgctggtgctgttcaatcgcagaaactcgcggttcgtgcgatttctcagttacaggctcttcctggtggagatattaagcttttgtgtgacactgtcgtggaaagtgtgagggacttgactggttatgatcgtgttatggtttataagtttcatgaagatgagcatggagaagttgtagctgagagtaaacgagacgatttagagccttatattggactgcattatcctgctactgatattcctcaagcgtcaaggttcttgtttaagcagaaccgtgtccgaatgatagtagattgcaatgccacacctgttcttgtggtccaggacgataggctaactcagtctatgtgcttggttggttctactcttagggctcctcatggttgtcactctcagtatatggctaacatgggatctattgcgtctttagcaatggcggttataatcaatggaaatgaagatgatgggagcaatgtagctagtggaagaagctcgatgaggctttggggtttggttgtttgccatcacacttcttctcgctgcataccgtttccgctaaggtatgcttgtgagtttttgatgcaggctttcggtttacagttaaacatggaattgcagttagctttgcaaatgtcagagaaacgcgttttgagaacgcagacactgttatgtgatatgcttctgcgtgactcgcctgctggaattgttacacagagtcccagtatcatggacttagtgaaatgtgacggtgcagcatttctttaccacgggaagtattacccgttgggtgttgctcctagtgaagttcagataaaagatgttgtggagtggttgcttgcgaatcatgcggattcaaccggattaagcactgatagtttaggcgatgcggggtatcccggtgcagctgcgttaggggatgctgtgtgcggtatggcagttgcatatatcacaaaaagagactttcttttttggtttcgatctcacactgcgaaagaaatcaaatggggaggcgctaagcatcatccggaggataaagatgatgggcaacgaatgcatcctcgttcgtcctttcaggcttttcttgaagttgttaagagccggagtcagccatgggaaactgcggaaatggatgcgattcactcgctccagcttattctgagagactcttttaaagaatctgaggcggctatgaactctaaagttgtggatggtgtggttcagccatgtagggatatggcgggggaacaggggattgatgagttaggtgcagttgcaagagagatggttaggctcattgagactgcaactgttcctatattcgctgtggatgccggaggctgcatcaatggatggaacgctaagattgcagagttgacaggtctctcagttgaagaagctatggggaagtctctggtttctgatttaatatacaaagagaatgaagcaactgtcaataagcttctttctcgtgctttgagaggggacgaggaaaagaatgtggaggttaagctgaaaactttcagccccgaactacaagggaaagcagtttttgtggttgtgaatgcttgttccagcaaggactacttgaacaacattgtcggcgtttgttttgttggacaagacgttactagtcagaaaatcgtaatggataagttcatcaacatacaaggagattacaaggctattgtacatagcccaaaccctctaatcccgccaatttttgctgctgacgagaacacgtgctgcctggaatggaacatggcgatggaaaagcttacgggttggtctcgcagtgaagtgattgggaaaatgattgtcggggaagtgtttgggagctgttgcatgctaaagggtcctgatgctttaaccaagttcatgattgtattgcataatgcgattggtggccaagatacggataagttccctttcccattctttgaccgcaatgggaagtttgttcaggctctattgactgcaaacaagcgggttagcctcgagggaaaggttattggggctttctgtttcttgcaaatcccgagccctgagctgcagcaagctttagcagtccaacggaggcaggacacagagtgtttcacgaaggcaaaagagttggcttatatttgtcaggtgataaagaatcctttgagcggtatgcgtttcgcaaactcattgttggaggccacagacttgaacgaggaccagaagcagttacttgaaacaagtgtttcttgcgagaaacagatctcaaggatcgtcggggacatggatcttgaaagcattgaagacggttcatttgtgctaaagagggaagagtttttccttggaagtgtcataaacgcgattgtaagtcaagcgatgttcttattaagggacagaggtcttcagctgatccgtgacattcccgaagagatcaaatcaatagaggtttttggagaccagataaggattcaacagctcctggctgagtttctgctgagtataatccggtatgcaccatctcaagagtgggtggagatccatttaagccaactttcaaagcaaatggctgatggattcgccgccatccgcacagaattcagaatggcgtgtccaggtgaaggtctgcctccagagctagtccgagacatgttccatagcagcaggtggacaagccctgaaggtttaggtctaagcgtatgtcgaaagattttaaagctaatgaacggtgaggttcaatacatccgagaatcagaacggtcctatttcctcatcattctggaactccctgtacctcgaaagcgaccattgtcaactgctagtggaagtggtgacatgatgctgatgatgccatattag

SEQ ID NO: 126 - DNA, 459 bp, Glycine max
atgaaaggaggaaagtccaagaccgaatctaagagagccgatcccaaacttgctgtgaataagaagggagccgccaccaaggctaggaaacccgccggcaaggggaaggcagcgaaagaccctaacaagccaaagaggcctccaagtgctttcttcgttttcatggaggagttcaggaaggtattcaacaaagaacatcctgaaaacaaagcagtgtctgctgtgggcaaagctgctggagcaaaatggaagaccatgtctgatgctgaaaaagcaccttatgtggcaaagtctgagaaaaggaaagtggagtacgagaagaacatgagagcctataacaagaaacaggcggaaggtcctactggtggggatgaagaagaatctgagaagtctgtatctgaggtgaatgatgaagatgatgatgaggaaggcagtggcgaggaagaggatgacgattag

SEQ ID NO: 127 - DNA, 1878 bp, Zea mays
atggcgtcgcccgacgacgagtccgcgcagccaccatcgaagcggccccgacgcgatgccgaacctgaggtggacgccgctgagccatcaccgcgcgtggtgctcaacccagcggactgcgatctcgacttcgatgtaggcgggggcggtctccgggggagcgcgcttcacgagggcggcttcgcctactgctggtccggcgcgcgcgcgacggttggcgccaggggcggcgggcggtactgcttcgggtgcagaatcgtcgctgagcagccggtggagatggatcccacgacctccggggagcgccacctctgccgcattggggtctcgagaggggatgatcccgtaggtgcgctcggggagtcccagcacagcttcgggttcgggggcacggggaagttctcccaccagcgcaggtttgtcaactacggcgtcaagttcggcgtcggcgacacggtcgtctgcgccgtggacctcgattccaagcccatggcgtcgatagggttcgcgagaaatggcgaatggcttggtattgcgaggcattttgatgcgggcgagaaagggcttggtctggttgacgctcctctgaggccgatgcgatggggatccgcactgtttccccatgtcctgctgaagaatgttatcgtggagatgcagttcagcagggaggatgggctgctgcctgttgatggttatgaaccctgggcctcagctttttctcaaaggaattcagtatttggcccttcgtttgagcaaaataaatgtgaggtcatgatgatggtcggtcttccggcctctggcaagtcaacatgggcagagaaatgggtcaaggagcatcaggagaaacgctatatccttctcggaactaaccttgtattggagcaaatgaaggtgccaggattattgcgtaagaataactatggtgagcgttttgaacgactgatggattgtgctacatggattttcaacaaactgctgactagggctgcaaatacccctcgcaacttcattatcgatcaaacgaatgtttacaagaatgctcgcattcgcaagctgaggccatttgctaactaccgcaagactgctgtggtcatgttcccaactccaagtgaactgaaatccagggcagcgaagcgtttcaatgagatgggaaaggaaataccagctgaagcagttaacgaaatgacagccaattttgtcctaccactctcgaaggatatgcctcattcgaaggagccttttgacgagtatagttcaacatatgctgggactgctgctccacttgatcctagtgcaaggtcatcaatgccaggcttttatccaccaacggccaattcatatggagttggcgacctacgtagcagtgctgctactttcagcacaggtgtgcatactgaaggcaacccaacacatggacagacaccctgcagcgttcgaagtttccggagtccaacaggaaaccaacatggaatccattcaagctatccaagtgctccaaaccaatatcagatgccctcaagctacctgagtaactcaaaccaatatgaagtccgtgcaagctaccgaagtacaccacttccgggatatggacagagtacatatgcttcccgcaagaacccaagcccatacaattctgagatgtaccaaggtattcaggctcccatgagtagcaggaacctctaccgagcacctgggtcagccgaagcctatttggcaccttgctatgcagctggaaatctgattgggaggccacatcaggtgttatcaccatcaacttttccagcacatggtccacaaccagctgctcagtgggtgccaaatcaaggtagttcccgctcatggagttctgacagttataggccttactatggacaatag

SEQ ID NO: 128 - DNA, 1878 bp, Zea mays; identical to SEQ ID NO: 127

SEQ ID NO: 129 - DNA, 840 bp, Zea mays
atgaggccagttttttgtgggaaccttgactatgatgttcgcatctcagaggttgagcgcctttttgggaagtatggaagggtggaacgagtggatctaaagacagggtttgcatttgtctacatggaagatgaacgcgatgctgaagatgctatcagtagacttgatggaattgattttggcagaaaaggaaggaggatcagggttgagtggacaaaggaggatcgcactgttggccgaaaaagcagctcaaggaggtctccaaccaatacaaaaccgaccaaaaccttgtttgtgatcaactttgacccgatcaacacaagaatccgagatctggagaggcacttcgataaatatggcagggtcgcaaatgtaagaatcaaaaagaactttgcctttatccagtttgaggtacaggaggatgctacaagagcattggagggtactaatggaagccatttcatggacagggtgatctctgttgagtatgcacttcgtgatgacgatgaaaaaggtgaaagagggaacgggtacagcccagacaggagaggtcgtgaaagatccccaggtagaaggcgttctcctagtccctacggtagaggacgggagagaggtagcccagattacgggagaagcaaggagagggggagcccagactatggcaggggaggacgcagccctgataatggcaggggagtaagcccagctggtggtggcagaggcgatcatgccaggggtggagggcgcagtcctgactatgatcgccagcgccgggaagctagtcctccaggttatgacaggtcccccagccgctcacctgggagggaggccagagagtag

SEQ ID NO: 130 - DNA, 840 bp, Zea mays; identical to SEQ ID NO: 129

SEQ ID NO: 131 - DNA, 762 bp, Zea mays
atggctcgcgtctacgttgggaacctggatccgcgtgtcacggcgcgggagatcgaggacgagttccggatgtttggggttctgaggagtgtatgggttgctaggaaaccaccagggtttgccttcattgactttgatgaccgcagggatgcacaagatgccattcgtgaattggatggtaagaatggttggagggttgagctgtcaactaaagttggtggtggccgtggccgagaccgtaacggttctgatatgaagtgctatgagtgtggtgaagctggccactttgcacgtgaatgccgcttacggattggttcaggaggcttgggtagtggaaggcgtcgcagccgaagtcctagatatcgcagccgcagccgcagccgcagcccaagatatcgaaggagcccaagctatagcagaagcccgcgagatcgttctcctaggaggcgaagttacagcaggtcgccactgggatctcctgcacggagtctcagcaggtcaccgccgctgccgccgcctcctcccagaaataacagcaggtcaccacctggagcccgagaagtgagcaggtcgccgccgccacctcctcccagaaataacagcaggtcaccaccggcagcccgagacgtgagcaggtcaccaccggcagcccgagacgtgagcaggtcgccaccaccacctcctgatgccagaagaagctatagtggatccccaggacagcagccacaacgcgacgagtccccatatgccaatgacgcctag

SEQ ID NO: 132 - DNA, 762 bp, Zea mays; identical to SEQ ID NO: 131

SEQ ID NO: 133 - DNA, 522 bp, Zea mays
atggcccgcgtgtatgttggcaacttggattcacgggtgacttctggggaactcgaagatgagttccgcgtgtttggagttctgcgaagtgtttggattgcacgtaaaccacctggctttgcatttattgattttgacgacaggagggatgcggaggatgctattcgtgatctagatggtaagaatggatggagagttgaactatctcgtaattccagtggtcgtggtggtcgtgatcggtatggtggatctgagtcgaagtgctatgaatgtggtgagactgggcactttgcacgtgaatgtcgtctgcgcattggctctggaggtctaggcagtggaagacgtcgcagtcgcagccgcagtcgcagtcgcagtcgcagcaggagcaggagcagaagccgcagccctagataccgcaggagtccaagctatagtagaaggagctatagccctcgttatcgctctccaaggcgccgtagtccttcgccagctcgcgcgcgcagctatagcaggtcaccatag

SEQ ID NO: 134 - DNA, 522 bp, Zea mays; identical to SEQ ID NO: 133

SEQ ID NO: 135 - DNA, 1251 bp, Zea mays
atggagcttggcctagcgctccggctcgtcgcgccgccaccgctgctgccgtgtctctcccgtagagctctttccctaccaccggattttgtttcctcgcgtgtgcttcgaggaagacgcatccatgcctcgagactgaagcatggagctggggttgtgtgcaatgcgattatgacctattcaggagtggaagaggaggagatggtggaagaagaaatggaagaggaggctgaaccggcggtgagcacaaggccgcgcctggagctcatcgagaagccggaccggagcctggcgctgctggatgagtacgagtcggaggaactgggcacctctctttgcgccaatcatcgtagcggttatgttgctgtattggggaagccaaatgttggcaagagcacacttattaaccaaatggttggtcagaaactttcaattgtaacagataaaccgcaaacgacaagacatcgcattcttggtatatgttctgaaccagagtaccagattatactttatgacactcctggtgttattaaaaaggagatgcataagctggacagtatgatgatgaagaatgttaggagcgctatcggcagtgcggactgtgtgcttgttgttgctgatgcttgcaaaactcctgaaaagattgatgaaatgcttgaagaaggtgttggaaacaaagatattggacttcctgtactgctggtattgaacaagaaagatctcataaaacccggagaaatcgcaaagaaacttgagtggtaccaaaaatttactaatgttgatgatgttataccaataagtgctaaatttggtcatggagtggatgatatcaaggagtggatattgtcaaagctccctctgggtcctgcttactaccccaaggatatagctagcgaacaccctgagagattttttgttggtgaaatagtgagggaaaagatttttgttcagtacaggcaggaaattccttattcatgccaggttaatgttgtcagttacaaaagtcggcctgctgccaaggacttcattcaagttgagatacttgtggagaaagaatcacaaagaggcattatactagggaaggatggcaaaagcataaagatgctggcaaccgcatcgaggcttgacatcgaggactttctacagaagaaagtctaccttgaggtggaggtcaaagtgaaggaaaactggcggcaggacgagcgactcctgaagcggtatggctacggcggcgagatccaagcgctgtag

SEQ ID NO: 136 - DNA, 1251 bp, Zea mays; identical to SEQ ID NO: 135

SEQ ID NO: 137 - DNA, 1251 bp, Zea mays; identical to SEQ ID NO: 135

SEQ ID NO: 138 - DNA, 1191 bp, Oryza sativa
atggttgccgcagtagcagcttcgttgagatctctcgcacctctatccgcctatcgctctccttcccatggtatccatgccgtcgtcagggactcgtcggcgtacaccacccgacccccgccgccgccgccgacggcagatggcggtggtaatggagggaggattagccccgcggtgttgttcatcatagtgattcttgcggtcatcttcttcatctccggccttctccacctcctggtgaggctgctgatgaagaagcagcaccgccgtggtggagccgagaatgccgccccgtcgccgcacagccggcatgtcgggcgggacgccgcgatggaccggcagctccagcagctgttccacttgcacgattctgggctcgaccaggcgttcatcgacgcgctgccggtgtttgcctaccgcgacattgttggtggtgacaaggagccgtttgattgtgcagtgtgcttgtgtgagttcgacggtgaggacaggctcaggttgttgccggtgtgtggtcatgccttccatctgcattgtatagatacatggctgctgtccaattcgacgtgcccgctttgccgtggtacgctctatgtccccggattgaccatagagagcctgatgtttgattttgatgagaggttggaggagggccggctgtcggaagaatgcgaggatggattccaatcttccagacagaagaagcccatggatgaggaacaaacagtaactgagaagagagtttttcctgtaaggcttgggaagttcaagaatgtcgggaacactggtgtgggtggtgttgacaatggcaatgcagctggtatagtgagtagggaaccaggggagagtagcagtagcagcttggatacgaggaggtgcttctccatgggcacttaccaatatgttcttggggcttctgaacttcgagtggctctccagccaggtcgtaacaaaaatggcgtgggcagcaggttgaagggaagagctactggcataagctctgtcaatgctgaaattatggagggcaagaggatttgtgcaaagagtaaaggtgagagcttctccatgtcgaagatttggcagtggtctaatgtgaagggcaagctgccagctggttcagacaattgctcagaaacggcgagttttccgtggatgaagagagatgctactggagataagtcaaatatgtag

SEQ ID NO: 139 - DNA, 1191 bp, Oryza sativa
atggttgccgcagtagcagcttcgttgagatctctcgcacctctatccgcctatcgctctccttcccatggtatccatgccgtcgtcagggactcgtcggcgtacaccacccgacccccgccgccgccgccgacggcagatggcggtggtaatggagggaggattagccccgcggtgttgttcatcatagtgattcttgcggtcatcttcttcatctccggccttctccacctcctggtgaggctgctgatgaagaagcagcaccgccgtggtggagccgagaatgccgccccgtcgccgcacagccggcatgtcgggcgggacgccgcgatggaccggcagctccagcagctgttccacttgcacgattctgggctcgaccaggcgttcatcgacgcgctgccggtgtttgcctaccgcgacattgttggtggtgacaaggagccgtttgattgtgcagtgtgcttgtgtgagttcgacggtgaggacaggctcaggttgttgccggtgtgtggtcatgccttccatctgcattgtatagatacatggctgctgtccaattcgacgtgcccgctttgccgtggtacgctctatgtccccggattgaccatagagagcctgatgtttgattttgatgagaggttggaggagggccggctgtcggaagaatgcgaggatggattccaatcttccagacagaagaagcccatggatgaggaacaaacagtaactgagaagagagtttttcctgtaaggcttgggaagttcaagaatgtcgggaacactggtgtgggtggtgttgacaatggcaatgcagctggtatagtgagtagggaaccaggggagagtagcagtagcagcttggatacgaggaggtgcttctccatgggcacttaccaatatgttcttggggcttctgaacttcgagtggctctccagccaggtcgtaacaaaaatggcgtgggcagcaggttgaagggaagagctactggcataagctctgtcaatgctgaaattatggagggcaagaggatttgtgcaaagagtaaaggtgagagcttctccatgtcgaagatttggcagtggtctaatgtgaagggcaagctgccagctggttcagacaattgctcagaaacggcgagttttccgtggatgaagagagatgctactggagataagtcaaatatgtga

SEQ ID NO: 140 - DNA, 1191 bp, Oryza sativa; identical to SEQ ID NO: 139

SEQ ID NO: 141 - DNA, 1191 bp, Oryza sativa; identical to SEQ ID NO: 138

SEQ ID NO: 142 - DNA, 1959 bp, Zea mays
atgctctccgtgtcaacggcggccacctcctccccctcctcgcccccctccgcggcggcgacgcccacgggtgctggggcagcagcggcagcgggagcgggagcggcaggggaggactacatagcgtcggaggaggagttccagatgcagctggccatggcgctgtccgcgtcttccaacagcgattgcgtgggggacctggacggggagcagatcaggaaggccaagctcataagcctcgatcgcttcgctgcccaccgcgacgagggccacaccgcggagtcgctctcccgccgatattgggattataactttcttgattaccatgagaaagttattgatggcttctatgacatctttggctcctctattgaatcctctaggcaggggaagatgccatcattagcagatctccaaacaggcataggggacctaggctttgaagtcattgtagtaaaccgagccattgatagtaccttgcaggagatggagcaagtggcacagtgcatcctgttggacttccctgttgccaatattgcactcttagtgcaaagaatagctgagcttgttacagataatatgggtggacctgtcaaagatgctaacgacatgctcacaaggtggctggagaagagtactgagctgagaacatcgctacaaacaagtttgttgcctattggttgcatcaagatagggttatcacgtcaccgtgccctacttttcaagatccttgccgatagtgttgggattccatgcaaacttgtcaaagggagcaattatactggtggtgatgatgacgatgctataaacataattaagatggacaatgaaagggagtttttggttgatctgatggctgctcctggtgctcttattccagcagatatcttaagttggaaaggcaattcgttaaattctaatcgaaaactcggcctgaatcgaacagctggatcatcaagtactgttgatgctaatgtggatcctactgtattgccacttgaacctaaaggtggccaactgcctttgttcagcagtggtgattggatgtcagacattgattctggatatgaggcagcagaaattgcagcttctactcaaacctcttcgggtgtcacaccatctgtttctgctggaagtgtttttggcagttcatggatgctggttaatcatgaccaatcagatggaccatcaacttctgctggtacatcatcgcagcagaaagttgtacctcaaagcgagcatcagcggaatttaaaccgccttccagatctgcaggaaattccagagtcaaaatacctttttgctgatcttgttccttctggggataataagtctaagaaaacttcagtaccattcaaaggaccagatcataggaacaatgagttgcaaaagcgcagagagaacattgtccctaatgctggaagaccacagcagcggttagttatgaagaattggtctccttacaatgatgtttccaacaacaaacagtacaattatgtcgaggattcgtttgctcgtagaaatgttggtaataatgctgcatcatcatcatcccagatgccacgaccagccgtaagatctaaccttaattctggattgcataatgatgcatcatatcataattatgatagcattatggctggtacctctgccatgaagattacatctacagctgagaccgggaaggttcctgaaagggttctgcgtggtgatttggacaagggtcaaacaaattatagattggaggatcaacatgtcatagttcaaccaccacagggaagacttccatggggtaatcctgcagaaggaagagttccaatgaatagagttcagagtcaagcaaaacaacacttggaaaacatggatgcaaagcaagaccataagaaattgctccctgatccaaaaaaatctccccttgacagattcatggacacatcattgccttcaagaaacatgtag

SEQ ID NO: 143 - DNA, 987 bp, Rhodobacter sphaeroides
atgcccggggaacgcctcactgttgtcgtcacgcgacgcctgccggacgtggtcgaggcccgcatgaaggagctgttccgggtcgagctccgcgaccccgatacccagatgtcgcgcgaggatctgatcgaggcgatggggcgtgcggacgtgctggtgccgtgcctgaccgacgacatcgacgccaacatgctggcacaggccgggcccaggctgaagctgatcgcgaactacggcgcgggcgtggatcacatcgacgtggcctcggcgcgccagcgcggcatcctcgtgtcgaacacccccgatgtcgtgaccgaggacacggcggacatggccctcgccctgatccttgcggtcacccgccgcattccggagggcttgaccgagatgcaatcgggcgactggcccggctggtcgccaatggcgcatctgggcgggcggctccgcggccggcggctcggcattctcggaatgggccggatcgggcaggcggtcgcgcggcgcgcccacgccttcgggatgcagatccactaccacaaccgcaagcgcctgcgccccgagatcgaggccgaggtcggcgcgaccttctgggagagcctcgatcagatggtgacgcgcatggacatcatctcggtcaattgcccgcacacgccctcgaccttccacctgctgaacgcgcggcggctgaagctgctgaagcccacggcggtgatcgtgaacacctcgcgcggcgaggtgatcgacgagaatgccctgacgcgcgggctgcgcgcgggcgagatcgcgggcgcgggtctcgacgtgttcgagcacggccacgagatcaatccccgcctgcgcgagctgccgaacgtcgtcctcctgccgcacatgggctcggccacgctcgagggccgcatcgagatgggcgagaaggtcatcctgaacatcaagaccttcgccgacggccaccgcccgccggatcaggtgctgccctcgatgctctag

SEQ ID NO: 144 - DNA, 1137 bp, Bacillus halodurans
atgatcatcggggtaccgaaagagattaaaaataatgagaatcgagtcgcaatgacacctgccagtgtgatgagcttcgttcaagcaggccaccaagtgcttatcgaaagaggtgccggttctggaagtggatttgatgatattgactatggagaagctggggcgacaattgagaacgatgcagcatctgtttgggcaaaagcggatatgatcatgaaagtgaaggagcctctaccacaagagtacggttactttagaaaaggtttactcttatttacgtacttacatttagcagcggagcccgagttagcaaaggcacttgtggaaaatgaagtgacagcgattgcctacgaaaccgttcaagtaggccgaagcttgccgctcttaacaccaatgagtgaagtcgctggccggatggcagcgcaaattggtgctcaatttttggaaaaaccaaaaggcggacgaggcattcttctttctggcgtcccaggagtgacccgcgggaaagtaacgattattggtggaggtgtcgttgggaccaatgctgcaaaggtggcaatgggacttggcgcagatgtaacgatcgttgatctgagccctgaacgtttgcgccaattggatgatttatatggaaccgacattcaaacgcttatgtccaatccgatgaacatcgccgaagcagtagccgcgtcagatttagtcattggggctgtgctcattccgggagcgaaagcaccgaagcttgtaaccgaacaaatggttgaacaaatgaagccaggttctgtcatcgtggatgtagcgattgaccaagggggcatcgttgagactgttgatcggattacaacacacgatgcaccgacctatacgaagcatggcgttgtccattatgctgtagccaacatgccaggggcggttccgcgaacatcaacgattgcacttaccaatgtgacggtaccatatgcattgcagcttgcgaataatggtgttaaacgtgcaattgccgaaaatacagcattggccaaaggggtcaatacggcgaacggatgggtaacatatgaggcagtagctcgagacttaggatatgactatcaatctgtggaaagcgcgttaagcgggctttctgttgaaaatgtatag

SEQ ID NO: 145 - DNA, 1137 bp, Bacillus halodurans; identical to SEQ ID NO: 144

SEQ ID NO: 146 - DNA, 2391 bp, Zea mays
atgggcaccgggggagacgggagcaaggcgggcccggcgctgccgctcgaggcgctgctggcgctcggcctcgaccagcgcaccgccgagaacgcgctcgtcaacgccaaggtcaccgccaacctcgcctccgtcatagccgaggctggtataaaggaatgcgacaagtcagtcggcaatcttctgtatgcagtcgccaccaagtacccaactaatgcacttgttcaccgtcctgtccttattagctatgtcttgtcaacaaagataaagaaccccgcacagctagatgctgctctgtcatttcttactaatactggtcctgattctctagatgtggtcaaatttgaagaagcatgtggtgtaggtgtggttgtttctattgaggaaattaaatctactgttactgatgtgcttgaggagaatatggaagctataaaggagcagcgatatcacataaatgttggtacactatgcggacaggtcaggaagagacacccctggggtgatgctaaggcgataaaggaggaaattgacaagaggcttgcagaaatcctaggtcccaagacagaagctgacaatataaaaccagtgaaaaagaagaaggaaaaaccagcaaaagttgaggagaaaaaagttgcagttgccactgctgccccaccatctgaggaggaattgaacccgtacactatatttccccaaccagaggaaaacttcaaggttcatacagaaatatttttcagtgatgggaacatatggagagcgcataacacaaaggaaattttagaaaaacatcttaaagcaactggaggaaaagtgatgacccgttttccaccagaacctaatggatatcttcatattggtcatgccaaggctatgtttattgattttggtctggctaaggagcgaaatggccattgctaccttagatttgatgacacaaatccagaagctgaaaagaaagaatacatagatcacattcaggaaatcgtccattggatgggatgggagccctacaaagtaacatacacgagtgactatttccaagctttgtatgaacatgccgttgagttaatacagaaagggctagcatatgtggatcaccagactgcagaagaaatcaaggaatacagggaaaagaagatggatagtccatggaggggtaggccaattgaagagtctctgaaattatttgaagacatgaggcgtgggttgattgcagagggtgcagcaactctccgtatgaagcaggatatgcaaaatgagaacaaaaatatgtctgacttaatagcatatagaataaaattcaccccccatccacatgctggcgacaagtggtgtgtctatccgagctatgactacgctcattgcatggtggattctcttgaaaacatcacacattcgctgtgcacacttgagtttgacatacgtcgcccttcatactactggctacttgttgccttgggcctttatcaaccatatgtgtgggaatattcgaggctaaacatatcaaatactgtgatgtctaaaagaaagttgaatcgacttgtgacagagaagtgggtagatgggtgggatgatccccgcttgttgacactggctggtctccggcgacggggagtatcatcaactgcaataaattcctttattcgtggaatcgggataacgagaagtgacaatagcttaattcgtgttgatcgtctagaatatcacatcagggaggagcttaacaaaacagcccctcgaaccatggttgttttgcgacctctaaaggtggtaataactaacttggaagaaggaaaagtactagaccttgatggcaaaatgtggcctgatgcttctgatactgatgcttcctcccactataaggttccgttctcaagaactgtctacattgagaaaactgattttcgcctaaaggactcaaaagactactatgggctagcccctggtaaatctgtcatgctaaggtatgcgttccccataaaatgcacagatgttatctctggtgatagtcctgatgatattgttgaaattcgagctgaatatgatcctttgaagacttctaaactgaagggtgttcttcactggattgctgagccagcacctggtgtagagccattgaaggtggaagtaagattattcgagaaattgttcatgtcagagaatcctgctgaattggaagattggcttggcgatcttaacccacactcgaaagaggtgataaaggatgcttatgctgtaccatcacttgccactgcggttctgggtgacaagttccagtttgagcggcttggttacttcgccgtggatactgactccacacctgagaaactcgtgttcaacagaactgttaccctccgtgattcgttcgggaaagctggacccaagtag

SEQ ID NO: 147 - DNA, 891 bp, Brassica napus
atgttcaataaagtaattaattttctacctatggggaaatttttctgcttttttacttatactactctttccatgcgtagcctaattgtcgctagctgtttactatttttaattccgggtttaactgtcagtgcgacggcccaaaccatggtcttggaaaccaacgggatagctatgactagccgagaagtcagcctagaagccattcggcaacggggtaaattaagggtgggagtgaaggataacttacgacctttgggttttcgggatggacagggggaattaactggtttagaaattgctttggcccgtcgtttagctttggctttgctgggggatgaaacggcggtggagttggttccggtacagaatcaggaccggcttcccctattactcaatggtgacgtggatttaatcattgcccaaatgggccaaaatcctgctcgcgatcgcctggtggatttttccccgccctactatatggacggagttggtttaattagcaaaaacagctccctgaaaaacatagaccgcaaccaggctcacaccattgcggtgcttaataacagcggcaccattcccgttatcaaacaagcatttccccaagctacccttgtgggggtagattcctacgaccaagcctatcaaattctagaacagggccaagccatggcctttgctggggacaattccgtgctgagcggctgggcccaatcccaatccgattactatcatttacctttgcaattaacagttaaccccttagcgatcgccatggccaaaggattgcaacatcaggctctccaacgggaagttaaccaaaccctactgcaattgcgggcttctggttggctccggcaacaatggcaagcctggggcctgcccttctaa

SEQ ID NO: 148 - DNA, 1071 bp, Arabidopsis thaliana
atgagtcttgtttcagatctcatcaaccttaacctctcagactccactgacaaaatcattgctgaatacatatgggttggtggttctggaatggacatgagaagcaaagccaggactctacctggaccagtgactgacccttcgcagctaccaaagtggaactatgatggttcaagcacaggccaagctcctggtgaagacagtgaagtcatcttataccctcaagccatattcaaggatcctttccgtagaggaaacaacattcttgtcatgtgcgatgcgtacactcccgcgggtgaaccaatcccgactaacaaaagacacgctgcggctaaggtctttagcaaccctgatgttgcagctgaagtgccatggtatggtattgagcaagaatacactttactccagaaagatgtgaagtggcctgttggttggcctattggtggttatcccggccctcagggaccgtactattgcggtattggagcagacaaatcttttggcagagatgttgttgattctcactacaaggcctgcttatacgctgggatcaacattagtggcatcaatggagaagtcatgccgggtcagtgggagttccaggtcggtccagctgttggtatctcggctgctgatgaaatttgggtcgctcgttacattttggagaggatcacagagattgctggtgtagtggtatcttttgacccgaaaccgattcccggtgactggaacggtgctggtgctcactgcaactacagtaccaagtcaatgagggaagaaggcggttacgagatcatcaagaaagcaatcgataaattgggactgagacacaaagaacacattgctgcttacggtgaaggcaatgagcgtcgtctcacaggacaccacgagactgctgacatcaacactttcctttggggtgttgcgaaccgtggagcatcgatccgagtaggacgtgatacggagaaagaagggaaaggatactttgaggacaggaggccagcttcgaacatggatccttacattgtcacttccatgattgcagagactacaatcctctggaatccttga

SEQ ID NO: 149 - DNA, 450 bp, Arabidopsis thaliana
atgtctctccaacgacccaatgggaactcgagttcgtcttcttcccacaagaagcacaaaactgaggaagccgatgaggagttgttgatggttcctgacatggaagcagctggatcaacatgtgttctaagcagcagcgccgacgatggagtcaacaatccggagcttgaccagactcaaaatggagtctctacagctaaacgccgccgtggaagaaaccctgttgataaagaatatagaagcctcaagagattattgaggaacagagtatcagcgcaacaagcaagagagaggaagaaagtgtatgtgagtgatttggaatcaagagctaatgagttacagaacaacaatgaccagctcgaagagaagatttctactttgacgaacgagaacacaatgcttcgtaaaatgcttattaacacaaggcctaaaactgatgacaatcactag

SEQ ID NO: 150 - DNA, 450 bp, Arabidopsis thaliana
atgtctctccaacgacccaatgggaactcgagttcgtcttcttcccacaagaagcacaaaactgaggaaagtgatgaggagttgttgatggttcctgacatggaagcagctggatcaacatgtgttctaagcagcagcgccgacgatggagtcaacaatccggagcttgaccagactcaaaatggagtctctacagctaaacgccgccgtggaagaaaccctgttgataaagaatatagaagcctcaagagattattgaggaacagagtatcagcgcaacaagcaagagagaggaagaaagtgtatgtgagtgatttggaatcaagagctaatgagttacagaacaacaatgaccagctcgaagagaagatttctactttgacgaacgagaacacaatgcttcgtaaaatgcttattaacacaaggcctaaaactgatgacaatcactaa

SEQ ID NO: 151 - DNA, 1119 bp, Synechocystis sp. PCC 6803
atgaactttggctatctgatttttttgatcacttccgccgctacctacggtatttttgccctgggcttgaatttacaatggggctttgccgggttgattaattttggccatgtcgcttttatgaccctgggggcctacgcgaccaccttgctgagtttacgaggtttgcccattcccctggcagtgttggtagggatgggattggccatggcgttgggtttgctcattggcacctctaccctcagattaagggaagattacctggcgatcgttaccatcggcgtttccgagttaattcgcttgatagccaacaacgaagagtggttaacccagggaacttttggggtacaaagttttccctggccgatggattttaaccccacattattaagtcgcattgtttttgtgatttggctcacagttctcactatttatgctgaaagtattttaattaaaagtctcttaaaacagtggaaagagggtaaaaaaatccaaggtaagagttatcagccccgtaagcctttggctttgctaatttggggaattattaccacagcgttgattttaactgcctatgtgcctggggtagtttctttgtataactactctggtaaggcggggctaatgttattagctttaaccttgttggcccttacctatgctggtttggaattttgggtccattccccctggggtcgtattctcaaagccatccgggaagatgaagaaattccccgggccctgggcaaaaatgttttttggtataagttacaggccttcatgggtggcggggcgatcgccggtttagcgggggcattgtttgcttggcaattgaccagtatttaccccagtaattttgacacgttgctgacttttaacgcttggatcattgtggtgctggggggagcgggcagtaatgcgggcacggtgttgggcaccattattttttgggcctatgattccctaaccaggtttttgttaccccaaattgcttttttagaccagagtcaagccggagctttacgggttatggtcatcgggctaattttaatggtgttaatggtgtggcgaccccagggcattttaggcaaaaaagaagagttaaccctagggcgctag

SEQ ID NO: 152 - DNA, 1350 bp, Synechocystis sp. PCC 6803
atggcgcaagttagcagaatctgcaatggtgtgcagaacccatctcttatctccaatctctcgaaatccagtcaacgcaaatctcccttatcggtttctctgaagacgcagcagcatccacgagcttatccgatttcgtcgtcgtggggattgaagaagagtgggatgacgttaattggctctgagcttcgtcctcttaaggtcatgtcttctgtttccacggcggagaaaatgaactttggctatctgatttttttgatcacttccgccgctacctacggtatttttgccctgggcttgaatttacaatggggctttgccgggttgattaattttggccatgtcgcttttatgaccctgggggcctacgcgaccaccttgctgagtttacgaggtttgcccattcccctggcagtgttggtagggatgggattggccatggcgttgggtttgctcattggcacctctaccctcagattaagggaagattacctggcgatcgttaccatcggcgtttccgagttaattcgcttgatagccaacaacgaagagtggttaacccagggaacttttggggtacaaagttttccctggccgatggattttaaccccacattattaagtcgcattgtttttgtgatttggctcacagttctcactatttatgctgaaagtattttaattaaaagtctcttaaaacagtggaaagagggtaaaaaaatccaaggtaagagttatcagccccgtaagcctttggctttgctaatttggggaattattaccacagcgttgattttaactgcctatgtgcctggggtagtttctttgtataactactctggtaaggcggggctaatgttattagctttaaccttgttggcccttacctatgctggtttggaattttgggtccattccccctggggtcgtattctcaaagccatccgggaagatgaagaaattccccgggccctgggcaaaaatgttttttggtataagttacaggccttcatgggtggcggggcgatcgccggtttagcgggggcattgtttgcttggcaattgaccagtatttaccccagtaattttgacacgttgctgacttttaacgcttggatcattgtggtgctggggggagcgggcagtaatgcgggcacggtgttgggcaccattattttttgggcctatgattccctaaccaggtttttgttaccccaaattgcttttttagaccagagtcaagccggagctttacgggttatggtcatcgggctaattttaatggtgttaatggtgtggcgaccccagggcattttaggcaaaaaagaagagttaaccctagggcgctag

SEQ ID NO: 153 - DNA, 438 bp, Synechocystis sp. PCC 6803
atggggagcattcgtttgatgcacgcaaaattacatcgggtctgtgtgacggaggccaatgttaattatgtgggcagtatcaccattgacccagtaatgttggagcgggtgggattgttgcccctagaggaggtggatattatcaatctcagcaacggtaatcgcttttccacctatgtcctgcccggtcaagcccattccaaggaaatttgccccaacggtggagccgccttgctttgtcaaccaggcgatcgcctgattatttttgcctacgaactgtgcgatcgccgtgaggtattacaaaaggggcaccaagctaaggtgctagtgaccaacgaaagtaatgaaacggtggatttttatttacaagaactgatacccaaggaagatggggtgaaattcatcaacaatatttgttcggaagccatcccccattag

SEQ ID NO: 154 - DNA, 486 bp, Synechocystis sp. PCC 6803
atgcagttaccggccggtgccggggaagctttaacccagtggcaaaaagcaggatatttattaattgtgatcaccaatcaggcgggcattggccggggttattttgaccacggtgacgtggcggcggtccataccaaaatccgacaagagtacggcaaagagggagtaaagttcaccgattttttcctttgcccccaccatccagaggacggttgtgattgccgtaaaccttcccccgaaatgttgttgcgggcggcggagcagtaccaaatttctctccaggaatcctactttattggcgatgcccccagtgacgtgggagcagccattgcggccggttgtcagccagtggtgctaatgacagggcggggtgaggaaacttgccaacagttggataagtttaggttgcaattagctgggccaattcccgtctttgccaatctgggggaaactgttagtctgctggcttccctttcaagcaaatag

SEQ ID NO: 155 - DNA, 1209 bp, Synechocystis sp. PCC 6803
atggaaactattcaattcaacatacgccagacaattattgtcgcaattttagtgctttacattggtaaatatctcactaaaaaaattaagtttttgcagagttttaatattcccgatgccgtttccggtggagtgctagcttccctgttttttggtctcatctacggtatttttcgcacagaagtagctttcaattttccgattagggatgcttttttaattattttctttacctgcattggtctatcttccaagttaaaagtcctactccagggcggcaaacccctattgattcttttagcaacagcggtgagttttttagtaattcaaaattttgtcggggtgggtatggcttccctattggggcaggcgttaccagtgggtttactctccgggtccatttccctgagtggtggccatggcacggcgatcgcctggtctccggttttttatgataaccacggcatccgtaatgcttcggaaattgccatagcctgtgccacttttgggctggtgttcgggggcattgtgggaggccccatcgccaaatttttaattatccgcaataagttagaaccggattgtgacactaaagatttgaccattggcatccggcgagatcaggacaatgtgcaaattgattacaacaccatgctccacaccattttagtcattggcgttaccatcggtcttggctatgaaattaacgatctggttgctaagttggggttaatgttgccggcctttgtttcctgtttactggcggggatcgtgctcaccaacaccattcccctcgcttttaaaaaattcccttggccggcggaaaccccttccctcgccctgatttccgacgttagtttgggactattcctggccatttccctgatgagcctgcaactctggaccttagccgacattggcggagtgatcgccctgatcctcctggtccaattcatggccacagtgctctacagcattgctgttgtttttcccctcatggggcgtgactacaacgcagcggtagtttgctccggttattccggtttaaccctgggggccacccccacggcgatcgccaatatgaccgcagtgacggaaaaattcggcgccgctccccaggctttcatcgttgtacccttggtgggggccttcttcatcgacattgccaatgcctttgtgatccagcaatttctcaattttcttggctag

SEQ ID NO: 156 - DNA, 1209 bp, Synechocystis sp. PCC 6803; identical to SEQ ID NO: 155

SEQ ID NO: 157 - DNA, 891 bp, Synechocystis sp. PCC 6803
atgttcaataaagtaattaattttctacctatggggaaatttttctgcttttttacttatactactctttccatgcgtagcctaattgtcgctagctgtttactatttttaattccgggtttaactgtcagtgcgacggcccaaaccatggtcttggaaaccaacgggatagctatgactagccgagaagtcagcctagaagccattcggcaacggggtaaattaagggtgggagtgaaggataacttacgacctttgggttttcgggatggacagggggaattaactggtttagaaattgctttggcccgtcgtttagctttggctttgctgggggatgaaacggcggtggagttggttccggtacagaatcaggaccggcttcccctattactcaatggtgacgtggatttaatcattgcccaaatgggccaaaatcctgctcgcgatcgcctggtggatttttccccgccctactatatggacggagttggtttaattagcaaaaacagctccctgaaaaacatagaccgcaaccaggctcacaccattgcggtgcttaataacagcggcaccattcccgttatcaaacaagcatttccccaagctacccttgtgggggtagattcctacgaccaagcctatcaaattctagaacagggccaagccatggcctttgctggggacaattccgtgctgagcggctgggcccaatcccaatccgattactatcatttacctttgcaattaacagttaaccccttagcgatcgccatggccaaaggattgcaacatcaggctctccaacgggaagttaaccaaaccctactgcaattgcgggcttctggttggctccggcaacaatggcaagcctggggcctgcccttctag

SEQ ID NO: 158 - DNA, 891 bp, Synechocystis sp. PCC 6803; identical to SEQ ID NO: 147

SEQ ID NO: 159 - DNA, 1323 bp, Nostoc sp. PCC 7120
atgacacacgtttccagaagaaaatttcttttcaccacaggcgcggcggcggcggcttctattttggtacatggctgtacttccaatggttctcaatcagctaccacaggagaacaagcgccttcagcagcaccagccgctaatgtctcagccgctaacgcacccaaggtagaaacgactaaagccaagttaggatttatccctcttactgatgcggcgcccctcatcattgctaaagaaaagggcttctttgctaaatatggcatgacagatatcgaagtcatcaagcaaaaatcttggcctgtcacccgcgataacttaaaaattggctcatctggtggtggcatcgatggcgcacatatccttagtcccatgccttacctcatgaccatcaatgataaagtgccaatgtatattttggctaggttaaacactaatggtcaggctatttctgtggcggagaaatttaaagaacttaatgtcaacctagaaagtaaatcccttaaagacgcagcgattaaagccaaagctgacaagaaagccttgaaaatgggtattacctttcccggtggtacacacgatttgtggatgcgctattggttagcggctggtggtattaatcctgatcaagatgtggttttggaagctgtaccaccaccgcaaatggtggcaaatatgaaagtcaatactgttgatggtttctgtgtaggagaaccttggaatgctcagttggtcaaccaaaaaataggttattctgctctagttacaggcgaattgtggaaagatcatccagaaaaagcctttagtatgcggcaagattggattgagcaaaatcccaatgcagcccaggcaattttgatggcaatcttggaagcacaacaatggtgcgacaaggcagaaaacaaagaagaaatgtgtaaaatctgctctgatcgtaaatactttaatgttgctgccgcagatattatcgagagagctaaaggcaatatcgattatggtgatggtcgtaaggagcaaaacttcgcccatcggatgaaattctgggcagataatgcttcctatccttataagagtcacgatatttggtttttaactgaagatattcgctggggttatttaccaaaagataccaaagttcaagacattgttaatcaagtcaataaagaagacttgtggaaaaaagcggcgaaagcgattggtgtggctgatgcggaaattcctgctagcagttcccgtggggtggaaactttctttgatggcgtgaaattcgacccagaaaagccagaagaatacttaaatagtttgaaaatcaaaaaagtctaa

SEQ ID NO: 160 - DNA, 1083 bp, Synechocystis sp. PCC 6803
atggaaattggtgttcccaaggaaattaaagaccaggaatttcgggtggggctgacccccagtagtgtacgggcattgctgagccagggccatcaagtatttgtggaagaaggggccggagtcgggtctggcttccccgatggagcctacgcaaaggcgggagctgagttagttgccactgccaaagaggcttggaacagggaattggtggtgaaagtgaaagagcctctccctgaagagtatgaatatttaactttgcctaagttgttgttcacttatctccatttggcagcggaacgtaccctcaccgaagctctaattaaatctggcattacggcgatcgcctatgaaacggtggaattggctgatggtcaattgccattgttggcccccatgagccgcattgccggacgattggcggtgcagatgggtgcccattatttggaaaaacaacagggaggccggggagttctgttgggaggcgtacccggagtcaaggccggacaagtaactatcctcggcggtggcgtagtcggtacagaggcggccaaaatggcgatcggactgggggccatggtgaccatcctagacatcaatgtagaccgtttaaaccaattgggagaactgttcggttcccgggtggatctgcgctacagcaatgccagccaaatcgaagacctgttgccccatacagatttgctcatcggcgcagtattgatcacaggcaagcgggccccagtgttggtttcccgccaggaagtggagcaaatgttgccaggggcggtgattatggatgtggcgatcgaccaagggggctgtgtggagactttgcgggtaacttctcatagtcaacccagttacatcgaagcagaagtagttcatgtgggcattcccaatatgccaggagccactccctggacagcaacccaagcgttgaataatagtacattgcgctatgtgttgaaattggccaatctgggggaacaggcttgggaaaatgatttgccgttggcgaaaggagtcaatgttcaagccggaaaattggtgcaaggggcggtaaaaacggtatttcctgatttgtag

SEQ ID NO: 161 - DNA, 612 bp, Corynebacterium glutamicum
atgactacagttactcaagaccttctagcacttgacgaagacgcacagaacctccttttccgtgaggctcgcaccgcaaatgctttcactgatgaaccaatctctgacgagcagatcgaagcaatcttcgacctagttaagtgggcaccaaccgcaatgaactcccagcctctgcgcgtggtaattgttcgttccgaagaagccaaagctcgcctcgtgccattgatggcagaaggcaaccaggccaaggttgctgcagctcctgcggtcgcacttcttgcagccgacatcgacttccacgaagaaatgcccaagctcttcccacctttcccaggcgcacgcgacatgttcgaagccgatgaagcttcacgtgcttcctccgcagaactcaatgctggccttcagatcggatacgccatcatcggtatccgcgcagcaggtctcgccgctggcccaatgaccggcatggatgcagacgctatctccaaggagttcttcccagacggccgccaccgcgttctggttgccatcaacatgggtaagccagctgacaatgcttggtacgaccgcctgccacgccttgagcaggacgaagttgtcgaaaccctctag

SEQ ID NO: 162 - DNA, 672 bp, Zea mays
atgctcggcggccactaccgccgggactcccgcgtcgtcatcgacgaggccatcgcctacgccgagggcctcaagctgggcggcaacggcaaggaggtctgggtcttcgatatcgacgagacgtccctctccaatctcccctactatgccacccacggcttcggcactaagctatacaacgcgacgagcttcaacgagtacgtgctggaggggagcgcgccggtgctcccggagacgcagcggctgttcaagaagctcgtctcgctgggcatcaagccggtgttcctgacgggccgcaccgaggaccagagggccatcaccgtcaccaacctccgccgccaggggtactccggctggatgacgctgctgctcaagccccgtcggcctcaaggccaccgccatcgccctacaagtccggcgagcgccagaagctccaggacgccgggtacgtcatcgtcggcaacatcggcgaccagtggagcgacatcctcggcgcgccggagggcgcgcgcaccttcaagctgcctgaccccctctactacattggctaagcagcgatgccaacggcgcggcgcggctctccatcagcccatccatcaacccgtcacccggctccagtgcctgtgctcaactactctttgtttgttacccctcacttcttatcatcattaa

SEQ ID NO: 163 - DNA, 450 bp, Arabidopsis thaliana
atgtctctccaacgacccaatgggaactcgagttcgtcttcttcccacaagaagcacaaaactgaggaaagtgatgaggagttgttgatggttcctgacatggaagcagctggatcaacatgtgttctaagcagcagcgccgacgatggagtcaacaatccggagcttgaccagactcaaaatggagtctctacagctaaacgccgccgtggaagaaaccctgttgataaagaatatagaagcctcaagagattattgaggaacagagtatcagcgcaacaagcaagagagaggaagaaagtgtatgtgagtgatttggaatcaagagctaatgagttacagaacaacaatgaccagctcgaagagaagatttctactttgacgaacgagaacacaatgcttcgtaaaatgcttattaacacaaggcctaaaactgatgacaatcactag

SEQ ID NO: 164 - DNA, 318 bp, Brassica napus
atgtctgcaacacaggaagaagacaagaagcccggtggtgacggaggagttcacatcaatctcaaggtcaagggtcaggatgggaatgaggtgttcttcaggatcaagagaagcactcagctgaagaagctgatgaatgcttactgtgacaggcaatctgtggatatgaacgccattgccttcttgtttgatggccgtcgtcttcgtgctgagcagactcccgatgagcttgacatggaggacggtgatgagatcgatgccatgctccatcagaccggtggctgtggtgatggcggcctgaccctttccagggtttag

SEQ ID NO: 165 - DNA, 1599 bp, Arabidopsis thaliana
atgggttggtttaacaagatctttaaaggctctaaccaaaggctccgggttgggaataataagcacaatcacaatgtttattacgataattatccgactgcttcacatgatgatgagcctagtgcggcggatacagatgctgataatgatgaacctcatcatactcaggaaccatctacatctgaggataatacatcgaatgaccaggaaaatgaagacatagaccgtgcaattgcattgtcgcttttagaagagaatcaagaacagacaagtataagcgggaaatactcgatgccggtggatgaagatgagcaacttgctagagccctacaagaaagtatggtagttgggaattcaccccgtcacaaaagtggaagtacatatgataatgggaatgcatatggagctggagatttatatgggaatggacatatgtatggaggaggaaatgtatatgcaaatggagatatttattatccaagacctattacttttcaaatggatttcaggatttgtgctggctgtaatatggagattggccatggaagatttctgaattgccttaattcactatggcatccagaatgttttcgatgttatggctgcagtcagccgatttctgagtacgagttttcaacatcagggaactacccttttcacaaggcttgttacagggagagatatcatcctaaatgtgatgtctgcagccactttataccaacaaatcatgctggtcttattgaatatagggcacatcctttttgggttcagaagtattgtccttctcacgaacacgatgctaccccgagatgttgcagttgtgaaagaatggagccacggaatacgagatatgttgaacttaacgatggacggaaactttgccttgagtgtttggactcggcggtcatggacaccatgcaatgccaacctctgtacttgcaaatacaaaatttctatgaaggactcaacatgaaggtagagcaggaagttccactcctcttggttgagagacaagcacttaacgaagccagagaaggtgaaaagaatggtcactatcacatgccagaaacaaaaggactctgcctttcagaagaacaaactgttagtactgtaagaaagcgatcaaagcatggcacaggaaaatgggccgggaatattacagaaccttacaagttaacacggcaatgtgaagttaccgccattctcatcttattcgggctccctaggttacttactggttcgattctagctcatgagatgatgcatgcgtggatgaggctcaaaggattccgaacactgagccaagatgttgaagaaggtatatgtcaagtgatggctcataaatggttagatgctgagttagctgctggttcaacaaatagcaatgctgcatcatcatcctcctcttctcaaggactgaaaaagggaccgagatctcagtacgagagaaagcttggtgagtttttcaagcaccaaatcgagtctgatgcttctccggtttatggagacgggttcagagctgggaggttagctgttcacaagtacggtttgcgaaaaacacttgagcatatacagatgaccggtagattcccggtttag

SEQ ID NO: 166 - DNA, 1527 bp, Zea mays
atgggttggctgaccaagttttttagaggctcaacccacaatatctcggaagagcagtatcacagcaggcctgcagaagacacagcatggaatgaaccctctagctctcctgttgtgactgacatcctttcagagtttaacaatgaggatattgaccgtgctatagcgctctctctatcggaagaggagcaaagaaaggaaaaggcaatagataaggatatgcatttggaggaggatgagcaacttgcaagagctatccaggaaagtttgaatgttgagtcaccccctcgcagaaatggcagtgccaatggtggtactatgtatcatccgcctcgcgaaactggcaatgcatatcagccacctcgtgaaaatggcagtgccaatggtggaaatgcatatcacccattaccatttatgttctcatctggattcagagcatgcgcaggatgtcacagagagattggtcacgggcgttttctcagttgcatgggagctgtttggcatccggaatgttttcgttgccatgcatgtagtcaacctatatatgactatgagttctccatgtccgggaatcatccataccataaaacttgctacaaggagcagtttcacccgaaatgcgttgtctgcaagcagttcattcctacaaatatgaatggccttattgaatatagggcacatcctttctgggtacaaaaatactgtccttcacatgaaatggatggtactccgaggtgctgtagttgtgaaagaatggagccaagggaatcaaaatatgtattactggatgatggtcgtaagctctgcctggagtgccttgattccgcagtgatggatacaaacgactgccagcctttgtatcttgaaattcaggaattttacgaaggactgaatatgaaagtggaacagcaggttcctctgcttctggtcgagcgacaagctttgaatgaagccatggaaggagagaaggctggtcaccaccatcttcctgaaacaaaaggactatgcttatcagaagaacagactgttagcacgatactgagaccaagaatggctggaaacaaaattatgggaatgataacagagccatataggctgacacggcgatgtgaagtgactgcaattcttattctgtatggtctcccaagattgttgacaggttcaattttagctcatgagatgatgcatgcatggttgcggcttaaaggataccggacactgagcccagacgtagaagagggcatttgccaagttcttgctcacatgtggatcgagtcagagatcatggccggatcaggcagtagtgccgcatcgtcatcctcaggatcttcgtcatccacatcatcgaaaaagggcgggcggtcccagtttgagcacaggcttggggactttttcaagcatcagatcgagacggatacttccatggcctacggagatggtttcagaactgggaatcgagccgttcttcattacggcttgaagcgcacccttgagcatatccggctaactgggacctttccattttag

SEQ ID NO: 167 - DNA, 750 bp, Zea mays
atgaccagcagtcgacaaatggaactgcactacataaacactggatttccatacacaatcaccgagagtttcatggatttctttgagggtctcacttatgctcatgctgactttgctctcatggatggctttcaggatcagggtaatccgtactggacaatgatgcatacaaactcatacaagtatggatactctggttctgggaactattacagttatgctcatgcctatgacattgacgattacatgcatagaactgatggtgggcgcagaacatgggataacactacacctgtaaacaatgtggattctgccaatgttgtcctgcagggtggtgaagctccccgcacaactgcaaatactactagtgaggattgcatccaacaggtacaccaaagtccgggtagtcctcaggttgtttggcaagacaacattgaccctgacaatatgacatatgaggaactcttggatttgggtgaggcagttggaacccagagccgtggtctctctcaagaatgcatttcattgcttcccatcactaagtataagtgtggattcttttcaaggaagaaaacacgccgtgaaaggtgtgtgatttgccaaatggagtacaggagaggaaatttgcagattacgcttccatgcaagcatgtataccatgccagctgcgtgacaagatggcttagcataaacaaggtatgccctgtttgctttgctgaagttcctggcgaggattctctgaggcaatga

SEQ ID NO: 168 - DNA, 1410 bp, Zea mays
atggctgccccgccccgcgccaccgcggtcctcgcgtggtgcgctcactctcgcgcgttctctctcgtgcgcgaggggcgcggcgggcaactccgtttctcgcgtcgcggcgggccactgattgctctggttctcgttttgtacaggggttccggggaggacgggcagcttggcatgggcgggaacgaggagaaggactgggcacactgcgtggaggcactcggttcctacgccgtcaccgccgtcgtagccggtagccgcaactccctcgccatctgcgaagacggccgcctcttcacttgggggtggaaccagcgcggcacgctcgggcacccgccgaagaccaagacggagagctcccctggccccgtccacgccctcgcggggttgaagatcgtccaggcggcgattggtgggtggcattgccttgcagttgacgacaatgggcacgcctacgcctggggtaggggcactcgcttccctgcgttttccgtgactgggggaaacgagtacgggcagtgcggtgaggagcctgagaggaaggaggacgggacgagggcgctcaggagggacatcctgaccccacaggggtgcgcacccaagctcaaagtccggcaagtagctgctggagggacacattcagtggttttgactcaagaaggtcacgtttggacatggggtcagccatggcctcctggtgatatcaagcaaatatcgacaccagtacgcgtgcaaggccttgagaaagtgagggtcattgctgtaggtgcattccataatttggcactcacagaggatggaattttgtgggcatggggtaataatgagtatggtcagctggggactggagatacccaaccaagatcacaccctatacgcgttgaaggactatctgatctctcactggttgacattgctgctggaggctggcattcaactgcactaactatacagggagagataaattcacttccttgctatttattcagagcatgctttaaagatgtccagattagaaagtaccaaaaatataaatattatactatgcaagtgtatgcttgggggagaggagaacacgggaggcttggatttggagatgataagagtagtcgcatggtccccctaaaggttgagtttttagctggagaggatattgttcaggtttcatgtggaggaacacattcagttgctctaactcgagatggccggaggtttttttatgggaggggcgaccatggccgtctgggctacggcaggaagctgacgacaggccagcccatgggagtggacattgacctgccgccgcccaagacccgcagcagccgggacgggcagtggcaggcgaagtacgtggcttgtggcgggcggcacaccctggctattgtggtgtgggcagagaccaccgactga

SEQ ID NO: 169 - DNA, 2004 bp, Zea mays
atggaggcctcggcagcggtcgagtcgtcggccgccgtgtccgtcttcgaggtagtatccagcaagcagcggcggccgccggacacggcgaagctggtgctgaacagccccagcccgcccagcctgcgggaggagctcgtcggcgtggtcggcaaggcgttccggccgcgcgcccacgccggggccgctgctggcgccggtggccgcccgccgccgcgccgcgcgtgggtcctcacggcgctgcagtgcgtcttcccggtgctgcagtgggggaggagctacaccctcgagtccttcaggagtgacgtcatggccggcctcactcttgccagccttggcatccctcagagcattggatacgccaatctagccaagctggaccctcagtacggtctttacacgagcgtcgtgccaccgctgatctacgctgtgatggggacatcgagggagatcgccatcgggccagtcgccgtcgtctcgctgctgctgtcctcgatgatccagaaggtcgtcgacccggccgccgacccggcgacctacaggtcgctcgtcttcacggtgactttcctcgccggggtcttccaggtctccttcggcctcttcaggctggggtttctcgtggatttcctgtcgcacgctgccatcgtggggttcatgggcggggcggccatcgtgatcgggatgcagcagctcaaggggctgcttggcctcgcccatttcaccaacagcaccgatgttgtttctgtcctcaaggctgtctgctctgcgctacgacatgacccgtggcacccgggcaacttcctcatcggatgctccttcctcatattcatcctcaccacacggttcatcgggaggaggtacaagaagctgttctggctgtcagcgatctcgcctctgctgtcggtcatcctgtccaccgctgcggtctacgcgacaagggctgacaggcacggcgtcaagatcatccagaaggtgcacgcgggcctaaacccaagctccgtgaagcagatacacctcaacgggccgcacacaacggagtgcgccaagatcgccgtcatctgcgcagtcatcgccctcacggaagctatcgccgttggccgatctttcgcctccgtaagagggtacagactcgacggcaacaaggagatgctggccatggggttctccaacgttgctgggtctctgtcctcgtgctatgtggcaacaggttcgttctcccgaacggcagtgaacttcagcgcgggggccaggtcgaccgtttcaaacatcgtcatgtccatcaccgtgttcgtcaccctggagctgttcatgaagctcctctactacacgcccatggcggtgctcgcctccatcatcctgtcggctcttccgggactgatcgacatcaaggaggcctgcagcatatggaagatcgacaagatggatttcctcacctgcctcggtgcgtttgttggcgtcctgtttgggtcggtggagattgggcttgcagttgcacttggcatttccttcgcaaagatcatcatacagtcgcttcggcctcaggtggagatccttggcaggctacaagggacagatatcttctgcagcgtcaggcagtaccctgtagcctgcctaactccgactgtactgcctatacgcgtcgacacatccttcctctgcttcatcaacgccacttccgtcaaagaaaggatcacagagtgggtttgggaaggagtggagacctcaaatggaaaagcgagggagaggatacaagcagttgtccttgatatgtcaagtgtggtaaacatcgacacttcaggactcactgcactggaagaaatacacaaggagttggtgtctcttggcttacagatggctatagccagtccgggatggaaggcagttcagaagatgaaagtgtcacaggtggtggacagggtaggacaggactggatcttcatgacagtaggtgaagcggtggaggcctgtctagctgctcataagggcacagctctcgcatgttga

SEQ ID NO: 170 - DNA, 1410 bp, Zea mays; identical to SEQ ID NO: 168

SEQ ID NO: 171 - DNA, 1011 bp, Zea mays
atgtcgtcgctgggtgggcaacagcagcacgggcgcggcgacgaggccagggcgcggctcaggtggacgcgccagctgcacggccgcttcgtgctcgccgtggcccagctcggcggcgcggacagtgagttcctctcatctaagtcgtccgcccacgaactcgcagccagagcctgtccagtcctttctttgaccgcttgcttgaatgctactactaccgacgtcggctttcgttaccaaaacattgcagaggcgacgcccaagtccgtgatgagggcgatggccgtgtcggggctcacgctgtaccacctcaagagccacctccagaggtaccggctggcggtgagccaaggcaccgcgtccccggtgggcgagggcgacaacggaggtggcgccaacgagcggtcgtcctcctcggagagccagctggacgagtacgacgacggttccgtggccgacctgcatggtgattcttccgggagcatggcggcgcgggtgcagagagaggcgaaaaggaagcggcatgagcagatgcagatcgaggtgcagcggcacctccagctgaggatcgaggcgcaggggaggtacatgcagtccgtgctgcgccgggcgcaggaggccctcgccgaccacatactgggctcgccggccaccggcgcggaggcagagctctcggagctggcctccgcggtggagaccgggaccgggtgcctgtcctccacttcctgctgctccacctcgccttccccgatgcgccaccgctccgccgacagctgcgtgacgtcctcctcctcctcctcctcctcggaggccgagagccaggcccccgccggcgccaacacgtgcgctggtacgcgcgactgctccgtcgagcggccggtgcagggcgaggagagtacattcctgcagaggcacgaggacgaggacgaggcagaggaagccgacgttggagctgcagctgcagctgaggacgaggacggcacttcgtcagagattgatctcaacaggtag

SEQ ID NO: 172 - DNA, 2598 bp, Zea mays
atggtttcaaaatcatactcaaatctgctagacctgacctctggagatggatttgactttcgacaaccttttaagtctcttcctcgtgtcgtaacttctcctggtattatatctgacactgattgggatacaataagtgatggtgattcagttggttcagcatcttctactgagaggaaaataatcgttgccaacttccttccgttgaattgtacaagagatgaaactggggtgctttccttctcattggatcatgatgcgcttctcatgcaacttaaagatagtttttcaaatgagactgatgttgtgtatgtgggcagtttgaaggttcaggtagatcctggtgagcaggaccaagttgcacagaagcttcttagagaatatcgatgcatacctacttttctcccatctgacctacagcagcagttctatcatggcttctgtaaacaacaattatggccactttttcattatatgcttccaatttgccttgacaagggtgagctatttgatcgcagcctgtttcaagcttatgtccgagccaacaaactttttgcagataaagttatggaagcaatcaatgcagatgatgacttcgtttgggttcatgattatcatctcatgttgctccctacattcttgaggaagaggttacaccgaataaagattggtttcttccttcacagtccttttccctcctcagaaatctataggactctgcctgtaagggatgaaatcctgaagtcactgcttaatgctgatctcattggtttccaaacatttgactatgcccgccacttcctatcttgctgtagcagattgctaggcctgcattatgagtcaaaacgtggttacattggaatagagtattttggccgaacagtgagcctgaagatcctttccgtgggtgtccatattggtcggcttgaatctgtcttaaaattgcctgctacagttagtaaggttcaagaaattgaacaaaggtataagggcaagatactgatgttaggtgtagatgacatggacatcttcaaagggataagtctgaaatttcttggactggagcttcttctggacagaaacccaaagcttagagagaaggttgtccttgtacaaatcatcaatccagcaagaagcacagggaaggacgtgcaagaagctattacagaagctgtctctgtggctgaaaggattaatacaaattatggttcttcaagttacaagcctgttgtcctaattgatcaccacataccattttatgaaaagattgcattctatgctgcgtctgattgctgtattgtaaatgctgtgagggatggcatgaacttagtaccatatgagtatactgtttgccgacagggaaatgaggagattgataaactcagaggtcttggcaaagacacccatcacacaagcacacttattgtttcggagtttgtgggttgctccccatctcttagtggtgctttcagggtaaatccttggagtgtcgatgatgtggcggatgccttgtgccgtgcaactgatttgactgaatccgagaaacggctgcggcatgaaaagcattatcgctatgtcagtactcatgatgttgcttactgggcacgcagctttgctcaagatctggaaagagcatgcaaagatcattatagcagaaggtgttgggcgattggattcggtctgaattttagagttattgctctttctcctggcttcagaaagctgtcgtcagagcactttgtttcttcttataacaaggcttctagaagagcaatatttcttgattacgatggcacacttgtgccccagtcatcaatcaacaaagctccaagtgaagaagtcatttccgttcttaacaccttatgtaatgatccaaagaacattgtgtttatagtaagtggacgaggacgtgattcccttgatgagtggttttctccgtgtgagaagcttggtctagcggcagaacatggctattttatcagatggagcaaggaagccgcatgggagtcaagctattcaaggccgcagcaagaatggaagcacattgccgaacctgtgatgcaggtatacacagagacaacagatggatcttcaatcgagtcaaaggaaagcgccctagtatggcactatttggacgcggaccatgatttcggttccttccaagcaaaggagctacaaggtcatcttgagagggtgctatcgaatgagcctgttgttgtgaaatgtggtcattatattgtagaggtgaaaccacagggagttagcaaggggcttgctgtcaacaagctgattcacacactggtcaagaacgggaaggcaccggatttcctgatgtgcgtcggcaacgacagatctgatgaggacatgtttgaaagcatcaacagtatgacctccaacgctgtcttatcacccacaacgccagagctgtttgcctgttcagtcggtcagaagcccagcaaagcaaaatattatgtggacgacaccagcgaagtaatcagattgctcaagaatgtaacccgcatcccctcgcagcggcaggatgtcagtgccagccatgggcgtgtgaccttcagaggcgtgctcgattacgtggactag

SEQ ID NO: 173 - DNA, 1395 bp, Zea mays
atgccgcccgggtcggcgacgcaatttcggtacacgcagacgccgtccaaggtgctgcatcttcggaacatgccatgggagtgcaccgaggaggagctcgtcgacctctgcaaaccctttggccgggtcgtaaacaccatgtgcaacgtcggcgctaaccgcaaccaggcattcgtcgagtttgcagatcaaaaccaggcaatttcaatggtgtcctattatgcttcatcttcagaacctgctcaagttcgtggtaaaactgtatatatccaatattcaaacaggcaagaaattactaacaataaaggcactggggattcttctggcaatgttctacttgtcacttttgaaggtgttcagcctaatgatgttaccatagaagttattcatttggttttttcggcatttgggtttgttcacaagatagctacttttgagaaagcagctggtttccaggcacttatccagtatactgatgccccaactgctcttgaagctaaaaactcattggatggaagaagcatcccaaaatatttacttccagaacatatcggtgcctgccacatgcgcataaccttttctgcgcataaggatttgaatatcaaatttcagtcgcatcgcagcagggattacaccaatccttaccttcctgtgaaccaaacagcaattgaggggattgtgcagcccacggtgggccctgatgggaaggtaaaggagcctgagagcaatgtacttttagcatcaattgagaacatgcaatatgctgtgacggtggatgttctgcacactgtgttttctgcttttggagctgttcaaaaaattgcaatgtttgagaagaatggtggaatgcaggctctaatccaatatccagatataactaccgcagccgttgctaaacaagctttggagggacactgcatatatgatggcggttactgtaagcttcatctgtcatactctcgtcatactgatctcaatgtaaaggcacatgatgagagaagcagggactacactctttcagaccctaacgtgcagctgcaagctgctgcacaaacgccagttctaaggtctccgggagtggcatggcagaacactgcatcagtaccagctgctcctttttatgcaagcacagcgacttcaactcctattggagttggacaggtggctgcttggaatcctaacatgcaggcagggagttttgcatctgcatcgactgcataccccaaccaaccattaatggccaactccatgcctcactatcctgctattggatcgagttccggtgccccaccagtatcatttcaggcttcgcagcagatgacacagtatagcatgccccctggtgctccgccgcacgcaccaccagctggccaatcaatttacttcccgaagtaa

SEQ ID NO: 174 - DNA, 1332 bp, Zea mays
atgccgagtcttgcggcgttcttggtcctcctgctcccgccgctgctgctttccgctgctggtgccgcagaggcagaggagcttatcggcttcaaggccacgctgaggcacgtggacgcggacgccgggtacacggaggagcagctgctctcgcgagcgctacgccgcagcagtgctcgcgtggccacgctgcagtcgctcgcggcgttggcgccgggcgacgcgatcaccgcggcgcgcatcctggtgctcgccagcgacggcgagtacctgatggagatggggatcggcacgccgacgcggtactactcggccatcctcgacaccggcagcgacctcatctggacgcagtgcgcgccgtgcctgctctgcgtcgaccagcccacgccctacttcgacccggcgcggtccgccacgtacaggtcgctcggctgcgcgtccccggcgtgcaacgcgctctactacccgctctgctaccagaaggtgtgcgtctaccagtacttctacggcgacagcgccagcactgccggcgtcctcgccaacgagacgttcacgttcggcaccaacgagacccgggtcagcctgccgggcatctcgttcgggtgcgggaacctgaacgctggctcgctcgccaacggctccggcatggtcggcttcgggcgggggtccctgtcgctggtcagccagctgggctcccccaggttctcctactgcctcacctccttcctgtctccggtgcccagccggctctacttcggcgtgtacgccacgctgaacagcaccaacgccagcagcgagccggtgcagtccacgccgttcgtcgtcaacccggcgcttcccacgatgtacttcctgaacatgacgggcatcagcgtcggcggctatctgctgcccatcgacccggcggtgttcgccatcaacgacacggacggcacgggcgggaccatcatcgactccggcaccaccatcacgtacctcgcggagccagcgtatgacgctgtccgcgcggccttcgcgtcgcagatcacgctgcccttgctcaacgttacggatgcctcggttctggacacgtgcttccagtggccgccgccgccgcgccaatcggtgacgctgccgcagcttgtgctccacttcgacggggcggactgggagctccctctgcagaactacatgctggtggatcccagcacagggggcggcttgtgcctggccatggcgtcgtcttccgacggctccatcatcggcagctaccagcaccagaacttcaacgtgctctacgacctcgagaacagcctcatgtccttcgtcccagcaccgtgccatctaatgtag

SEQ ID NO: 175 - DNA, 1689 bp, Zea mays
atggagcggcagtccagcatccggctgggcgcgctggagaagctgaggagcttccgggggatggagaagcagaagagcttccgcgggatcatgtccctcgagcggcggagcagggacagcccggggaaacgcggcgacacgccgctccacctcgcggcgagggccgggagcgtggcccacgcgcagaggatcctcgcggagctcgaccgggcgctggccgccgagatggccgccaggcagaaccaggacggcgagacgccgctgtacgtcgccgccgagaagggccacgcggaggtcgtgcgcgagatcctcaaggtctgtggcgtgcagacggccggcatcaaggccagcaatagtttcgacgcgttccacatcgccgccaagcagggccaccttgaagttctgaaggagatgctgcaggctcttcctgctcttgctatgacaacaaattctgtaaacgctacggccctggacaccgcggcgattcagggccatgttgacatcgtcaatctcctgctggaaaccgatgctagcctcgccaggatcacgaggaacaacgggaaaacggttttacactcagcagcaagaatgggccacgtggaagttgtaagatcgttgctgaataaggatcccaggattggtttgaggacagacaagaaggggcaaactgcgctgcatatggcttcgaaagcgcagaatgctgagatcgtggtcgagttgttgaagccagatgtctcggtcatccatatcgaagacaacaaggggaacaggcccttgcatgttgctactcggaaggggaatatcattatagtgcagactctgttatcagttgaggggatcgatgtcaatgcagttaacaggtctggagagactgcatttgccatcgccgagaaaatggacagtgtagaactcgtgaacatcctgaaagaggctggtggagaagccgcaaagcagcagcaagtacatcctccgaattcggcgaagcagctgaaggaaacagtcagcgatatcagacacgacgtccagtcccagttcaagcaaacacgtcagaccaagatgcaagtcaaccagatcaagaagaggctggagaagctccacatcggcgggctgaacaacgccatcaactccaacaccgtcgtcgcggtgctcatcgccacggtcgccttcgccgccatattcacggtcccgggaaacttcgtggaggagctgagccaggcgcctccgggcatgtccctggggcaggcgtacgtggcgagcaacccggcgttcatcgtcttcctggtcttcgacgcgctggccctcttcatctcgctcgcggtggtcgtggtgcagacctcgctgatcatggtggagcggagggcgaagaagcggatggtgttcgtgatgaacaagctcatgtggctggcgtgcctcttcatctcggtggccttcatcgcgctgacctacgtggtggtggggcgcgacgactggtggctggcctggtgcaccatgggcatcggcgccgcgatcatgctcaccaccctcggctccatgtgctactgcatcgtcgcgcacaggctggaggagaagaacaccaggaagatcaggagggcctccgcgagccagtcccgcggctcgtggtcccgatcagtcgactcggacgaggagatacttaacagcgagtacaagacgaagatgtacgcgctgtag

SEQ ID NO: 176 - DNA, 201 bp, Zea mays
ctcgtggagaaactcaagcacggggcgatggatttgtctctgttcgtcctcatgctgtccctctattgtgtcttgatttggatcaatgcagacacagacagatcatctcatgctgcctcttgtatcttgatttggatgaatcaatgcagacaaatcatcgatgagaaaggatccatccaaccgcatgtacatgtttcttga

SEQ ID NO: 177 - DNA, 843 bp, Zea mays
atggcggccatggcgaacacctctcgtctccccaccccctgcagcctcccaaccatcagcatcggcgctaagagcaggaggctagctgtggcggccgtcagatgcggtcccggcggcagcaggagccaccggaggagccttggggtcttgctgtgtcgatcctcgtccacggccggagcccaagggagcacgaggatggaggactataacaccgccatgaagcggatgatgcgtaacccctacgagtaccatcacgatctcggcatgaactatgctgtcataagtgagagcttgattgttggctcacagcctcagaagcctgaagatatcgatcacttgaaaaatgaagagcgagtagcatatattctttgcttacagcaggacaaggacattgaatattggggcattgacttccaatccattgtcaataggtgcaaagaacttggcattcagcacatcaggagaccggccgtggattttgatccagactcactgaggtcgcaactgccgaaagcagtttcggcgctagaatgggctacgtcgcagcgcaaagggcgggtttatgtccactgcaccgctgggcttgggagagcacctgcggttgcaatcgcttacatgttttggtttgagaacatggatcttaacacggcttatcagaagctaacctccataaggccctgtggacccagcaagagagccatccgcgccgcaacctatgatctagctaagaacgatccatccaaagagccttttgagaaccttccggagcacgcttttgagggcgttgcagactgggagaggaagttgattcatgaccgggtgcgtgctcttcacgaagcatga

SEQ ID NO: 178 - DNA, 495 bp, Zea mays
atggccgccgcgggggcagacggggagcgcaggatcggggtggccatcgactactcggagagcgccaagaaggcgctggactgggccatcgacaacctgctccaccacggggacaccctcgtcgtcgtccacgtcctgcaccacggcgcggaggagaccaagcacacgctttgggccaagtccggatccccgctgatcccactctccgagttccgggagcccgaggtgatgcagggctacggcgtgcgccccgacgccgaggtgctcgacgcgatcgacacggcagcgcgccagaagcagctgaaggtggtggcgaagctctactggggcgacgccagggagaagctctgcgacgccgtcgaggacctcaagatcgattccctcgtcatgggtagtcgcggcctcggcccgatccagaggattctcctgggaagcgtgacaaactacgtgctgtcaaacgcatcgtgcccggtgacagtcgtcaaggggaagtag

SEQ ID NO: 179 - DNA, 1347 bp, Zea mays
atggagcgggcgcgggcgcgggcgccggctctggctctggcgccggtggaggttcccaagttcttcgtgtgcccgatctcgctggaggtcatgcgggacccggtcacgctgtcgtcggggatcacctacgaccgcgacagcatcgagcgctggctgttcaccgacgggcacggcgactgccccgtcaccaagctgccgctgggcgccgacgacctcgagcccacgcccaaccacacgctccggcggctcatccagtcctggtgcgccgcgcacgccgtcgagcggttccccaccccgcgcccaccggtcgacgccgaccgcgtcgccgcgatcgtgggctgcgccaagaagggtggccagcaggaagtgctggccgcgctcagggagctcgcggacatcatcggggagagcgaccgcaaccggcgctgcgtcgagggcgtgccagaagccgtggagttcctcgtgtccgtcgtcaagaaacacgccgcaggcacgtcgtcgtccaagcctctcggcggatgcagatcccaagaggagccgatgtgcggcgtgccggactcccctaaggcgtgctcgccggaggaggcggctctgagcatcttgcattctctcaagctctccgaggcgagcctgaagagagccttggagagcagcgacggtttcgtggacaccttagcgtccgtgctgcgctggccgccgaactaccgggcgcgcacgtacgcgatgcacctgctgaaggcggcgctgtcggcgatgcagccctcgcagctgagctcggcgagcacggatctggtcgagggcgtcgtgagggtggtggcagaccggacgttgtcgcccaaggcgatcaaggtggcgcttcacgtgctctgccggctttgcccgtggggccgcaaccgcgtcaaggcagtcgaggccggcgccgtggcggcggtggtggagctgctcctcaacgaggggtgcgggtgcggtggcagcaacggcaagcgggcggtggagctcgcggtggttgccatcgaccatctgtgcggctgcgcagaagggcggttggagctcgtggcccacccggcagggctggctgttgttgcgcgagccgcgacgcggctgtcccccaccgccaccgagagcgcggtgcgcgcgctgcacgcggtggccaggcactccgcgacccccgcggtgctgcaggagatgcttgccgtcggagtagtagcgaggctgctgtacctggtgcaggccggcgcatcgggcgagcgcccgagggagagggcgcgggagatgctcaagatgcacgccagagtttggaggggctcgccgtgcttggcgtcgcacatggcatcctacccttgttga

SEQ ID NO: 180 - DNA, 1275 bp, Zea mays
atggaggaggacccgcagccgcaggtggaggtgccctgctacttcctgtgccccatctcgctggccatcatgcgagaccccgtgacgctccccaccggcatcacctacgaccgcgacggcatcgagcgctggctcctcactgccaccacctgcccgctcaccaagcagcccgtgccggcggactgcgaccccacgcccaaccacacgctgcgccgcctcatccagtcatggtgcgcgctccacgacgccgacagcgccgaccgcgtccacacgcccaagccccgcgtcgaccgcaccgccgtcaccgcgctggtctcccgggtccactccgccgccaccgggtcggcgccgccgcagcgcccacagctcctcgccgcgctgcgcgagctcagggacgtggcggccgagagcgaccgcaaccggaagctcgtcgccgccgtcccaggcgcggtggacgtcctagccgcggtgttcgcggcgtcggccaacaagtcgtcggaaggcacaggcaccgccgatgccgtccgcgacgatgcgctcgaggtcatcgccttgctcccggtccccgagcaatgcctgcgccgcctcgaggagacgaacgaggcgctggtctccgcgctcgtctccgcgctgcagtggtccagcgccccgtccagggcgcgcgcagcgctgctcctggagcgcgtcacggccgccctgccgcccagccggctggcatccctcccggagcaggtgttcagggaggccgtggagctgctccgcgacaggccggtgtccaggcccgcgaccaaggcggcgctgcaggtgctggtgcgcacggcagcgtggggacgcaaccgcgtcaaggcagtggacgccggcgcggtgcccgtgctcgtcgacatgctcttcgacgacggggcggagcgccgcgcgtgcgagctcgtcctggcggctctggaccgcctgtgcgggtgcgcggatgggcgcgccgagctggtggcgcacgccgcgggagtggcggccgtgggcaggaaggcgctgagggtgtcggaggtggccacggacaaggcagtcagggtgctgcggtccgtggcgaggcacgcggggacgtcggcggtggtgcaggagatggcgcaggccggcgtggcggcgatgctgtgcgtggtggcccagtcggagcagtacggcaagaggacgagagagcgcgcgcgggagacgctacggctgcacgcgagggcatggcggacctcgccgtgcttgaatcaccacctccaggccgtgtacccttgctag

SEQ ID NO: 181 - DNA, 333 bp, Arabidopsis thaliana
atggattcgaagagttttctgctactactactactcttctgcttcttgttccttcatgatgcttctggtctcactctctctttcactcctctatatgtctataactcatatctcactcaagctcatgctcacgttcaaggactttccaaccgcaagatgatgatgatgaaaatggaaagtgaatgggttggagcaaatggagaagcagagaaggcaaagacgaagggtttaggactacatgaagagttaaggactgttccttcgggacctgacccgttgcaccatcatgtgaacccaccaagacagccaagaaacaactttcagctcccttga

SEQ ID NO: 182 - DNA, 48 bp, Arabidopsis thaliana
atgttaaggactgttccttcgggacctgacccgttgcaccatcattag

SEQ ID NO: 183 - DNA, 231 bp, Arabidopsis thaliana
atgagaagacatgatatcatcatcaagcttctccttctcatgtgtcttcttctcagcagattcgtgactcgggaatgtcaagaagtccatttcaagattggacctgcaaagatcatcgcaaaaccgaacaacgcaagagtgatgccaacatggggcgaagaaaaaaagtggcataagcacccctcgggacctaacccaacaggaaatcgtcacccaccggtcaaacactag

SEQ ID NO: 184 - DNA, 231 bp, Arabidopsis thaliana; identical to SEQ ID NO: 183

SEQ ID NO: 185 - DNA, 48 bp, Arabidopsis thaliana
atgtggcataagcacccctcgggacctaacccaacaggaaatcgttag

SEQ ID NO: 186 - DNA, 1320 bp, Gossypium hirsutum
atgtatagcaatttcaaagaacaagcgatagagtacgtgaagcaagcggtacaagaagataatgcagggaactacagcaaagcgttccctttatacatgaacgcgctcgagtatttcaagacccatttgaaatacgagaagaaccccaaaatcagggaagcaattacccagaaattcaccgagtatttacgacgtgccgaggagatccgtgcagttctcgatgaaggtgggccagggccggcttctaacggggatgctgctgttgccacgcgccccaaaagtaagcccaagaatggtggtggcggaggagaaggcggtgacggggaggatccggaacaggccaagttgagagctgggcttgattcggctattattagggaaaaacctaatgttaagtggaatgatgtggccgggttagaaagcgctaagcaggctttacaagaagctgttattttgcctgtcaagtttcctcagttttttactggaaagagaaggcatggagagcttttctttttgtatggaccacctgggaccgggaagtcatacttagccaaggctgttgctactgaagcagactctacattttttagtgtttcttcatcagaccttgtctcaaaatggatgggtgaaagtgaaaaactggtttcaaacctttttcagatggctcgtgatagtgctccttccatcatattcaatgaaatatattccttgtgtggtcagcgaggtgagggcaacgagagtgaagcatcaagacgtatcaaaactgaacttcttgtgcagatgcacggtgttggacatagcgatcaaaaagtcttaatgcttgcagcaacgaatactccctatgctcttgatcacgccatccgccgccgttttgataagcgtatttacattcctctccctgatttgaaggctcgacaacatatgttcaaagtgcatttaggtgatactcctcacaacttgactgaaagtgactttgaaagcttagctcggcggacggaggggttttctgggtcagatatatctgtttgtgttaaggatgttctttttgaacctgttcgtaaaacccaagatgcaatgtttttctacaagacgcctaatgacatgtggatgccatgtggacccaagcaaccaggtgttgtccaaatcaccatgcaggaattggcagccaaaggacttgcagcacagattcttccgcctcctatttcaagatcagattttgataaggtgcttgcgagacagaggccaacagtgagcaaagctgatcttgaggtccatgagagatttacaaatgagtttggagaagaaggccgacggctttga

SEQ ID NO: 187 - DNA, 657 bp, Arabidopsis thaliana
atggatccatttttaattcagtccccattctccggcttctcaccggaatattctatcggatcttctccagattctttctcatcctcttcttctaacaattactctcttcccttcaacgagaacgactcagaggaaatgtttctctacggtctaatcgagcagtccacgcaacaaacctatattgactcggatagtcaagaccttccgatcaaatccgtaagctcaagaaagtcagagaagtcttacagaggcgtaagacgacggccatgggggaaattcgcggcggagataagagattcgactagaaacggtattagggtttggctcgggacgttcgaaagcgcggaagaggcggctttagcctacgatcaagctgctttctcgatgagagggtcctcggcgattctcaatttttcggcggagagagttcaagagtcgctttcggagattaaatatacctacgaggatggttgttctccggttgtggcgttgaagaggaaacactcgatgagacggagaatgaccaataagaagacgaaagatagtgactttgatcaccgctccgtgaagttagataatgtagttgtctttgaggatttgggagaacagtaccttgaggagcttttggggtcttctgaaaatagtgggacttggtga

SEQ ID NO: 188 - DNA, 1287 bp, Zea mays
atgtacggcgtcggcggcggcttcaacgcgccctccaccgctgcctctcggcgccgcaacccaggcgacgaagaggaggacgaggaggatgagggcggtgagggccgcgtcctggaggcgtgggagcgcgcgtacgcggacgaacggtcgtgggagtcactgcaggaggatgagtcgggcctcctccgtcccgtcgacaccaagaccctcgtccacgcgcagtaccgccggcgcctcctactccggtctgccgccgccgccgctgcccgcatccaaaaggggctcatccgctacctctacatcgtcatagacctctcccgggcggcttcagagatggattatcgtcctagtcgaatggctgttgttgcaaaacatgctgaggctttcataagagaattctttgaccagaatccattgagccatgttggcctagtgacaattaaagatggtattgcccatcgacttacagaaatcggagggagcccagagtcacagattaaggctttgatggggaagcttgagtgttctggtgattcatccctgcagaatgctctagacctcgtacatggttatttagatcaagtaccatcatatggtcacaaggaagttctgattttatactctgccctgaatacatttgatcctggtgatatcacggagacaatagcaaagtgtaagaagtcaaaaattagatgctctgttattggtcttgctgcagagatcttcatttgcaaacatctatgtgaagagactggtggatcttacacagttgcactggatgagtctcatttcaaagagttgttactggaacatgctcccccacctcctgcaatagcagaatatgctgcagctaatttgattaagatgggctttccacagaggggtgctgaggagcttatctctatttgctcttgtcacaagaagataaaatctggggctgaaggttacatatgtcctagatgcaaagttaatgtctgtgagcttccaacagaatgtcgaacttgtggtcttacgctagttagttctccacacttggcaaggtcgtatcatcatctcttcccagtaccaccgtttgatgaggtcacccctgtcccaaatagaattcaaaggggagggcagatctgtttcagctgccagcagagcctttataacccagacggccaatctaacctccatgtgcgctgcccaaaatgcaaccaacacttctgccttgattgtgatatttacatccatgagagcctgcacaattgccctggttgtgagagccaacgcagcatcgcttcatag

SEQ ID NO: 189 - DNA, 1425 bp, Zea mays
atgcgcagctgcttcgccagcggcgacggcagtgttatcagcagcgccgacgcgcccttcttccacgtcccggagtacacactgcacggcggcggcggctttgggtttggcgaacccgcagcggacgtcgccgcctcgagcttcttggcggatggttcggtgctgctcgccggccagctgctccgtgccaccgcactgcagagcgtgtcgccggaggagaggcacggtgcctactacggcgtcacgggcgggtcgtcgtcgtacggcccgtcgccctgggatgtcaccgttgctcacgcgcccagcaggatgaccaagcagcctgtcgctggagagccggaaggcggctggatccacgagtcttcgtactactgcccggcgacgtggttctctggcgacggcttccgggacccgttcgccggggcggcggcgagcgagttgtcgctcaggctgcgcgctgggtcctccccgacggcaggtgcggcgagcgtgagcctgccggatcagtcctcggaggtgagctgctccggcttgacgcattggagtagcggcggcggccccggcatgttccagcttccttgcggcggcgccggacaggtggcggtggcggcacgtccgggccccatgcacttctcgcaggtcctgtcgcggtggtccgggtacgcggacgtcacgcagcaggtgttggacgagttcgtcatccgcctgctgcaagacgtggccgggttcgccggcggcggtgaggcgagctgcccgctgccatcgtcaagttattgctccaagacgacgtcatccaacccgaacccgtcggtgtttgttagctcggaagagcaccacaatgagctcaagaacgacctccagaaactgctacagataatggaccaacggtgcaagcaatgcctggacgagatccagaatgcggcgtcgaagtacggcagccttgtgcgcccgggcggcggcggcggcgccctctcgacgctgtttgcgcagcgcgcggtgtcagcgacgcaccggaggctcagggcgcggatcaccggcgagatcgcggcggccacgcggggaggtaatcagccgtcgtcgtcgtcgtcgctgtcgctggccgacagggagcgcagctgggagtcggccttcatccagaagcactgggcgctgcggcagctcaggcgcggcgaccagcaatcgtggcggccgcagcgcggcctgccggagaagtccgtggccgtgctcaaagcctggatgttcgagaacttcctccgcccgtacccgagagacaaggagaaggagatgttagcagccaggagcggactgagcaggagccaggtctccaactggttcatcaacgcccgcgttcggctgtggaagccgatgatagaggagatgtacgaggatctcaagaaggcctccgcaggaataatggaggcctga

SEQ ID NO: 190 - DNA, 1521 bp, Zea mays
atgagcgccgaggtgccgcacttccaccaccccggcgtgcttcttgaccagggcggcttcgggttcggcggcctcggcaacgcggcggtcgtcggcggcgccgcgacggcggcggatctgggcgcgcactacgcggcgaacaacatcgtgctggcctccttcgccagccagctcctcgctaacgcccccgcgccgccgcgggatgatcgtgccggcgggaggacgccgccggacgagatggacgaagagctgtacggcgtcgccggctgcgacagccgcgtcgcggcgagcttgcggtgccccagccaatccggggccatggcggtctggtcgtcgccatcgtcgtccaagaagccgtacggcatctggaccagcgccggcggaccagctcatgaaccataccacctcgccgcggccgggctctccgacgcgggaggcctccgctacccgctcgccgcctgcagtggcggcaacgcgtccgcggcggcggcgagcgagctgtcgctgactctgtgctccaactccatcgcttcctcggacagcgcgctgaacgcgacggagcagtgctcctcgggagcgagccggtccgccctgaccgagctgccgcgggcgcggtcccggatggcgctgcacttcgccgcggtggtggcgcgctcgcggtacgcggccgtggtccaggatttgctcaacgacgtcgtcggccacatgctggacggcgtcgccgacgtgaccgacgactcgtgcagcggcatcggctcggttggcgcgccgtccgcggtgagctccaacaggttcatggcctcgaccgaagacgccggcgcgcgctggggccaggcccagagggtccggagcaacctcctcaagacgcttcagctgatggacgagaagtacaaccagtgcttggacgagatccagagcacgacggccaggttcaacaccctgatgcactcgcccccgggcggcggcggcggcggcggcggcatctgcgcgccgttcgcgcaccgcgccgtgtcgacgatgtaccgtgggctgaggcggcggctcgccggcgagatcatggctgcggcgagcagggccagctgctggggcgagtcgtcgtcgtcggtgacggtggccgcgggcggcgacgtggagcggagctgggagtcggccttcatacagaagcactggtcggcgcagcagctgcggcgcaccgagcagcagtgctggcggccccagcgcggcctgccggagaagtccgtcgccgtgctcaaggcgtggatgttcgagaacttcctgcacccgtatcccaaggaccatgagaaggacgtgctggcggcaaggagcggcctcaccaggaaccaggtgtcgaattggttcataaacgcgcgggttcgtctatggaagccgatgatcgaggagatgtaccaggacctcaagaggagctcgggtgcaggaggaggagggcacggcccggcgatggagccacagcagcacttgagcaagcgtcgaatttgcgagctggaagatggtggccagtag

SEQ ID NO: 191 - DNA, 1098 bp, Zea mays
atgggttccatcatggagcaacgctgcaacaacgatcagcaggcgctgctcgacgctcagctcgagctctggcacagcacgttcgcgttcatcaagtccatggcgttcaagtcggcgctggagctcggcatcgccgacgccatccactgccacggcggcaccgccacgctcacccagatagccaccaaggccgcgctccacccgtccaagacaccgtgcctgcgcaggctcatgcgcgcgctcacagtcgccggcatcttcagcgtcgccaagaactcgtccgacgatgacggcgatcagcacgtctacggcctcactccggcctcccgacttcttgtcggctcgtcacagaacttggctccaacactgagcctcatccttaacaacgtcttcgtggccccgttccttgacctcggcacgtggttcgagagcgcgctgccggccacagacctgccgctcttcgagctgtcccaccggaagaacgtgtgggacgtcgtcggccacgacccgtccgtgagccagctcttcaacgccgggatggtcgcggatacccgcttcctcatggacatcgccgtcagggagtgcggcgacgtgtttcaggggatacgctccctggtcgacgttggcggcggccatggcgcggcggcgcaggccatctctgcggcgttccctgccatacagtgcaccgtgctggaccttgcacacgtggtcgcaaccgctcccgcttgcgctgggctcagcttcgttgctggcgacatgtttgaggccattccgccagcgaatgctgtcttcctcaagtggatcatgcacgactggggtgacactgagtgtgtcacgatactaaagaactgcaagaaagctatacctccacgagatgcaggcggcaaggtgataatagtagataccgtggttggtgcagggcctccaaaccttaagaacaaagagacacaggtcatgtctgatctcttctttatgatcgtcaacggccttgagagagatgagcaggaatggaggaacgtcatctttgaagctggtttcagtgactacataatcataccagttttaggtgttcgatcaatcatcgagctatacccctag

SEQ ID NO: 192 - DNA, 780 bp, Zea mays
atgtcgacgagcggcgcgaggtcgtggtcgccgccgccgcggccgagccggtacgagtcgcagaagcggcgggactggcagaccttcacgcggtacctgggcgcgcaccgcccgccgctggagctgtgccgctgcagcggcgcgcacgtgctcgagttcctgcgctacctcgaccgcttcggcaagacgcgcgttcacgcgccgtcctgcgcggcgtacggcggcggcggcggcggacggccggtggagcccgccgtggcgtgccagtgcccgctgcgccaggcgtggggcagcctcgacgcgctcgtcggccgcctccgcgccgctttcgaggagcgtcacggggcgcgtgggatctggacgtcgtcgcagcagcccgacggcggcgttggcgtcggcgtcggcgtcggtggcggcgacggcgccaaccccttcgccgcgcgcgccgtcagactgtacctgcgcgacgtccgcgacgcgcagtccagggcgcgcggcatctcctacagcaggaagaagaagaagaggagcaagcagctggtcgacggcgccgccgcagccgggtgcgcccgcccgcccgtgaccagcgtgacgttaatgcctgctgctgctctgccgcacgcaccgcctccaccatgtccgccgccgccgctgccgccgccgtactgcctcaccggtgtgcccttcgagttctgtgactatggcagcgtcctcggaggagttaccgccaacggtgcgcctggcttctacttgccatcgctgttcaacaccttcggctag

SEQ ID NO: 193 - DNA, 1551 bp, Zea mays
atgccggtgatcggaagcctcggcgcactggcaggcgcgcttccgccgcaccgagcgctggccgcgctagcggcgcgccacggcccgctcatgcacctgcgcctcggctcctaccacgcggtggtggcctcgtcggcggacaccgcccggcttgtcctcaaggtccacgacctcgccttcgccgaccggccgcgcacggccgccggcgaggtcgcctcctacggctacctcggcatcgtgcacaccccgtacggcgcctactggcgcatggcgcgcaagctctgcgccaccgagctcttctccgcgcgccgcgtggactcgttcgagcgcgtccgcgcccaggagatgcgcgcgctcgcgcgcggcctgttcgagtgcgccggccgcggcgccgtcgcggtcagggagcacgtggcgggcgccacgctggggaactgggcccgcatggcggtcggggagtcgtggtcggactgctccggtagccccgagcccgaggcgttccggcgcacgctggacgaggcgttcgcggtcaccggccaggtcgagcacgtcggcgagtgggtcccgtggctcatctggctcgactaccagggctgcgtgcggctgatgaagcgcctcggcgcgcagtacgaccgcttcttcgagcagatcctcgacgaccacgaccacaagaagacgcggcgggagcgaggccgacccggcgccggcgactccgcggcggacgatgacctggtcgacgtgctgctgcggctggtcgaggaggacgaggacaggccggagacgacggaggccagcaggctcacgcgcgacggcgtgaaagcgttcgtccaggacatcgtcgccggcggcacggagagctcggcggtcacgatcgagtgggccatgtcggagctcctccgccggccggacgccttgcgggctgccaccgccgagctcgaccgcgtgattgggcacggccgctgggtcacagagcgcgacctcccggacctcccctacatcgacgccgtcgtgaaggagacgatgcggctgcacccggtcggcccgctcctcgtcccgcaccacgcccgcgagcacacggtggtggccggctacgacgtccccgccggtgcgcgcgtgctggtgaacgtgtgggccatcgctcgcgaccccgcgtcatggcctgacgcgcctgacgcgttccggccggagcggttcttgaacggcagctccggcgccagcgtcgacgtgcgcggcgcgcactttgagctgctgccgttcggggccgggcggcggatgtgccccgcgcacggcctcgcgatgaagctggtgaccgctggcgtggcgaacctggtgcacgggttcgcgtggcggctgccggacggtatggcgccggaggatgtgagcatggaggagctatttgggctttccacgcgccggaaggtcccgctcgtcgccgtcgcggagcccaggctgccggcgcacctctacactaatgtcacgccgccacagcaggtcgcgggctccacgattgcgaacttgtccaccaggccggagtacaagctcgtgttctga

SEQ ID NO: 194 - DNA, 1845 bp, Arabidopsis thaliana
atgtcttgcctagagatttataacaaagacacgatgaagaagaaagaaggagaagaagaaacaagagatgggacagtggattactatggtcgtccctctattcgttctaactcaggccaatgggttgctggcatcgtcattcttctgaaccaggggctggctacactagccttctttggagttggagtgaacttggtgctcttcctaactcgcgttttgcagcagaacaacgcagacgcagctaacaacgttagcaaatggacagggactgtttatatcttctcattggttggagcgtttctcagcgattcgtattggggtcgttacaagacttgtgctatcttccaagtcatttttgtcattggactttcatcgctatcgctatcatcatacatgttcttgattagaccaagaggttgtggggacgaagtcacgccttgtggttcacattccatgatggagatcacaatgttctacttctcgatctacttgatcgcattgggatatggcggttaccaaccaaacattgcaacgcttggagcggatcagttcgatgaggagcatcctaaagaagggtactcgaagattgcgtttttcagctacttttaccttgctttaaacctcggatcgctcttttcgaacaccatcttggggtattttgaggatgagggaatgtgggcactcgggttttgggcatccactggctctgctatcattgggttgattcttttccttgttggaacaccgagataccgatatttcaagcccacggggaatcctctttcgaggttttgccaagttttggtcgctgcaacgaagaaatcatcggtggaggcaccattaagagggagagaggagatgtatgacggagacagcgaagggaaaaatgcttcagttaacacagggagaaggatagtgcataccgatgaattcaagttcttggacaaagcagcgtacatcacagctagagatctagatgacaagaaacaagactcagtgaacccatggaggctctgtccagtgacacaagtcgaggaagtcaagtgtattcttagactgatgccaatttggctctgcactataatctactcagtcgtcttcactcaaatggcctctctctttgtggagcaaggcgctgcaatgaatacctctgtctcagatttcaaaatccccccggcaagtatgtccagcttcgacatccttagcgtcgctttgttcatattcctgtaccgcagagttctcgagccagtagccaacagattcaaaaagaatggatcaaaaggaatcaccgagcttcacaggatgggaatcggacttgtgattgctgtcatagctatgattgcagccgggattgtggaatgctataggcttaagtatgcagacaagagttgtactcactgtgatggctcaagctccttaagcatcttctggcaggctccacaatactcactcatcggggcatcagaagtgttcatgtacgtgggtcagcttgagttcttcaacgcgcaaacaccagacggactaaagagcttcgggagcgctctgtgtatgatgtcaatgtcaatggggaactttgttagtagcttgttggtaacaatggtggtgaagatctcaacagaggatcacatgcctggttggattccaaggaatctcaacaaaggtcacttagacagattctatttcctcctggctgcgttgacgagcattgacctggtggtatacattgcatgtgcaaaatggtacaaacctatacaactagaaggaaaagatgagatgcaagacatgagtgatgatgactatgacaccgagagtgaagaggaacgagagaaggattctaaagtctag

SEQ ID NO: 195 - DNA, 1356 bp, Zea mays
atggcgggcgcgggcgcgggcgggtggaagaagcgggtgggccgctacgaggtgggccggaccatcggccggggcaccttcgccaaggttaagttcgccgtcgacgccgacaccggcgcggctttcgccattaaggtgctcgacaaggagaccatcttcacccaccgcatgctccaccagatcaaaagggaaatatctatcatgaagatcgtaagacatcccaacatagttaggcttaatgaggtgttggccggcaggacaaagatatacatagtcttggaacttgtcactggaggtgaactgtttgatagaatagtccgccatgggaagctacgtgagaatgaagctaggaagtatttccagcagcttattgatgccattgattattgccacagcaaaggagtttatcatagagatttgaagcctcaaaacttgcttcttgactctcgtggaaacttgaaactttctgattttggacttagcacattgtctcaaaatggagtaggccttgtacacacgacatgtggaacaccaaattatgttgcacctgaggtgctaagtagcaatggatatgacggatctgcagcagacatttggtcgtgtggtgtcattctctatgttttaatggctggttaccttccctttgaggagaacgaccttccacatttgtatgaaaagataactgcagctcagtactcatgcccatattggttctctccaggagccaagtcattgatccagagaatacttgatccaaatccaagaactcgtatcactattgaagaaataagagaagacccatggtttaagaagaactacgtaactattagatgtggtgaagatgaaaatgtcagcctagacgatgttcaagctatttttgacaatattgaggacaagtatgtatcagacgaagtaacgcacaaggatggtggtcctcttatgatgaatgcctttgagatgattgcactatctcaaggtttggatctctcagcattgtttgataggcaacaggagtttgtcaagcgccaaacacgtttcgtctcaagaaagccagccaagactgtagtagctacaattgaggttgttgctgagtcaatgggtctcaaggtccactcccggaactacaaggtgaggcttgaaggtccagcgtcaaacagagcgagccaatttgctgttgttctagaggtctttgaagttgctccttctctgttcatggtcgatgttcgaaaggttgccggtgacactccggaataccacaggttttacgagaacctatgcagcaaactttgcagcataatctggaggccaaccgaagtttctgccaaatctacgccgctgaggacgaccacctgctag

SEQ ID NO: 196 - DNA, 1134 bp, Zea mays
atggctccacaaactgctactagagtggcttctggaaggcttgttttcggtgctccaactactactgatgggaagctcgttaagggtggaagtaggcttagagtgcgttctctcgataacaacggaaggcgtgttgctgttgaggctgttaacggtgctgctagaccaaatggtgctgctgctgttgctgatgttagacaggttccagctccaccaccaccagagggtgatggtgatggtgttgctttcaggcttggaaagttcgctgagggtagacttgtttaccgtcagcagttcgttgttaggtcttacgagatcggaccagatagaactgctaccatggaaacccttatgaacctcctccaagagactgctcttaaccacgttatgtgctctggacttgctggtgatggattcggagctactaggcagatgtctctcaggaagctcatctgggttgtcactaggatcaacatccaagtggatgagtactcaagatggggagatgttgtggagatcgatacttgggttgcatcttctggaaagaacgggatgagaagggattggatcatcagggataggaacaccaagaacatgatcgctagggctacttctaactgggtgatgatgaacagagagaccagaaggctttctaagatcccagatgaagtgaggcaagaggttttgccattctacccagatcgttctattatcgctgctgctactggtggaggaagaaagatcgagaagctcaccgattctactgctgaacacatcaggtctggtcttgctccaagatggtctgatatggatgtgaaccagcacgttaacaacgtgaagtacatcggatggatcttggagtctgtgccacttgatgtgcttgaggattaccacctcacttctatcactctcgattaccgtagagagtgccgtcaatctcagcttcttgagtctctcacttctatgaccacctcttcttcagctccagctgaaccaccacttacatcttcactctgcgggagtgatctctactctactcaccttatcaggcagcaggatgatagagctgagatcgttagagcttgcgctgagtggagaagaaaggaacacccacgttctatcgagcagctttag

SEQ ID NO: 197 - DNA, 3369 bp, Arabidopsis
atgtcaggctctaggccgactcagtcctctgagggctcaaggcgatcaaggcacagcgctaggatcattgcgcagaccactgtagatgcgaaactccatgctgattttgaggagtcaggcagctcctttgattactcaacctcagtgcgtgtcactggcccggttgtggagaatcagccaccaaggtctgacaaagttaccacgacttatcttcatcatatacagaagggaaagctgattcagcccttcggttgtttacttgccttggatgagaagaccttcaaagttattgcatacagcgagaatgcatctgagctgttgacaatggccagtcatgcagttcctagtgttggcgaacaccctgttctaggcattgggacagatataaggagtcttttcactgctcctagtgcgtctgcattgcagaaagcccttggatttggagatgtctctcttttgaatcccattcttgtgcactgcaggacttctgcaaagcccttttatgcgattatccacagggttacagggagcatcatcatcgactttgaacccgtgaagccttatgaagtccccatgacagctgctggtgccttacaatcatacaagctcgctgccaaagcaatcactaggctgcaatctttacccagcgggagtatggaaaggctttgtgatacaatggttcaagaggtttttgaactcacggggtatgacagggtgatggcttataagtttcatgaagatgatcacggtgaggttgtctccgaggttacaaaacctgggctggagccttatcttgggctgcattatcctgccaccgacatccctcaagcagcccgttttctgtttatgaagaacaaggtccggatgatagttgattgcaatgcaaaacatgctagggtgcttcaagatgaaaagctttcctttgaccttaccttgtgtggctccacccttagagcaccgcacagctgccatttgcagtacatggccaacatggattcaattgcatctctggttatggcggttgtagttaacgaggaagatggagaaggggatgctcctgatgctactacacagcctcaaaagagaaagagactatggggtttagtggtttgtcacaatacgactccgaggtttgttccatttcctctcaggtatgcctgtgagtttctagctcaagtgtttgccatacacgtcaataaggaggtggaactcgataaccagatggtggagaagaacattttgcgcacgcagacactcttgtgcgatatgctgatgcgtgatgctccactgggtattgtgtcgcaaagccccaacataatggaccttgtgaaatgtgatggagcagctctcttgtataaagacaagatatggaaactgggaacaactccaagtgagttccacctgcaggagatagcttcatggttgtgtgaataccacatggattcaacgggtttgagcactgatagtttgcatgacgccgggtttcctagggctctatctctcggggattcggtatgtgggatggcagctgtgaggatatcatcgaaagacatgattttctggttccgttctcataccgctggtgaagtgagatggggaggtgcgaagcatgatccagatgatagggatgatgcaaggagaatgcacccaaggtcatcgttcaaggctttccttgaagtggtcaagacaaggagtttaccttggaaggactatgagatggatgccatacactccttgcaacttattttgaggaatgctttcaaggatagtgaaactactgatgtgaatacaaaggtcatttactcgaagctaaatgatctcaaaattgatggtatacaagaactagaagctgtgaccagtgagatggttcgtttaattgagactgctacggtgccaatattggcggttgattctgatggactggttaatggttggaacacgaaaattgctgagctgactggtctttcggttgatgaagcaatcgggaagcatttcctcacacttgttgaagattcttcagtggaaatcgttaaaaggatgctagagaacgcattagaaggaactgaggagcagaatgtccagtttgagatcaagacacatctgtccagggctgatgctgggccaataagtttagttgtaaatgcatgcgcaagtagagatctccatgaaaacgtggttggggtgtgttttgtagcccatgatcttactggccagaagactgtgatggacaagtttacgcggattgaaggtgattacaaggcaatcatccaaaatccaaacccgctgatcccgccaatatttggtaccgatgagtttggatggtgcacagagtggaatccagcaatgtcaaagttaaccggtttgaagcgagaggaagtgattgacaaaatgctcttaggagaagtatttgggacgcagaagtcatgttgtcgtctaaagaatcaagaagcctttgtaaaccttgggattgtgctgaacaatgctgtgaccagtcaagatccagagaaagtatcgtttgctttctttacaagaggtggcaagtatgtggagtgtctgttgtgtgtgagtaagaaactggacagggaaggtgtagtgacaggtgtcttctgtttcctgcaacttgccagccatgagctgcagcaagcgctccatgttcaacgtttagctgagcgaaccgcagtgaagagactaaaggctctagcatacataaaaagacagatcaggaatccgctatctgggatcatgtttacaaggaaaatgatagagggtactgaattaggaccagagcaaagacggattttgcaaactagcgcgttatgtcagaagcaactaagcaagatcctcgatgattcggatcttgaaagcatcattgaaggatgcttggatttggaaatgaaagaattcaccttaaatgaagtgttgactgcttccacaagtcaagtaatgatgaagagtaacggaaagagtgttcggataacaaatgagaccggagaagaagtaatgtctgacactttgtatggagacagtattaggcttcaacaagtcttggcagatttcatgctgatggctgtaaactttacaccatccggaggtcagctaactgtttcagcttccctgaggaaggatcagctcgggcgttctgtgcatcttgctaatctagagatcaggttaacgcataccggagctgggatacctgagtttttactaaaccaaatgtttgggactgaggaagatgtgtcagaagaaggattgagcttaatggttagccggaaactggtgaagctgatgaatggagatgttcagtacttgagacaagctgggaaatcaagtttcattatcactgcggaactcgctgcagcaaacaagtag

SEQ ID NO: 198 - DNA, 3369 bp, Arabidopsis
atgtcaggctctaggccgactcagtcctctgagggctcaaggcgatcaaggcacagcgctaggatcattgcgcagaccactgtagatgcgaaactccatgctgattttgaggagtcaggcagctcctttgattactcaacctcagtgcgtgtcactggcccggttgtggagaatcagccaccaaggtctgacaaagttaccacgacttatcttcatcatatacagaagggaaagctgattcagcccttcggttgtttacttgccttggatgagaagaccttcaaagttattgcatacagcgagaatgcatctgagctgttgacaatggccagtcatgcagttcctagtgttggcgaacaccctgttctaggcattgggacagatataaggagtcttttcactgctcctagtgcgtctgcattgcagaaagcccttggatttggagatgtctctcttttgaatcccattcttgtgcactgcaggacttctgcaaagcccttttatgcgattatccacagggttacagggagcatcatcatcgactttgaacccgtgaagccttatgaagtccccatgacagctgctggtgccttacaatcatacaagctcgctgccaaagcaatcactaggctgcaatctttacccagcgggagtatggaaaggctttgtgatacaatggttcaagaggtttttgaactcacggggtatgacagggtgatggctcataagtttcatgaagatgatcacggtgaggttgtctccgaggttacaaaacctgggctggagccttatcttgggctgcattatcctgccaccgacatccctcaagcagcccgttttctgtttatgaagaacaaggtccggatgatagttgattgcaatgcaaaacatgctagggtgcttcaagatgaaaagctttcctttgaccttaccttgtgtggctccacccttagagcaccgcacagctgccatttgcagtacatggccaacatggattcaattgcatctctggttatggcggttgtagttaacgaggaagatggagaaggggatgctcctgatgctactacacagcctcaaaagagaaagagactatggggtttagtggtttgtcacaatacgactccgaggtttgttccatttcctctcaggtatgcctgtgagtttctagctcaagtgtttgccatacacgtcaataaggaggtggaactcgataaccagatggtggagaagaacattttgcgcacgcagacactcttgtgcgatatgctgatgcgtgatgctccactgggtattgtgtcgcaaagccccaacataatggaccttgtgaaatgtgatggagcagctctcttgtataaagacaagatatggaaactgggaacaactccaagtgagttccacctgcaggagatagcttcatggttgtgtgaataccacatggattcaacgggtttgagcactgatagtttgcatgacgccgggtttcctagggctctatctctcggggattcggtatgtgggatggcagctgtgaggatatcatcgaaagacatgattttctggttccgttctcataccgctggtgaagtgagatggggaggtgcgaagcatgatccagatgatagggatgatgcaaggagaatgcacccaaggtcatcgttcaaggctttccttgaagtggtcaagacaaggagtttaccttggaaggactatgagatggatgccatacactccttgcaacttattttgaggaatgctttcaaggatagtgaaactactgatgtgaatacaaaggtcatttactcgaagctaaatgatctcaaaattgatggtatacaagaactagaagctgtgaccagtgagatggttcgtttaattgagactgctacggtgccaatattggcggttgattctgatggactggttaatggttggaacacgaaaattgctgagctgactggtctttcggttgatgaagcaatcgggaagcatttcctcacacttgttgaagattcttcagtggaaatcgttaaaaggatgctagagaacgcattagaaggaactgaggagcagaatgtccagtttgagatcaagacacatctgtccagggctgatgctgggccaataagtttagttgtaaatgcatgcgcaagtagagatctccatgaaaacgtggttggggtgtgttttgtagcccatgatcttactggccagaagactgtgatggacaagtttacgcggattgaaggtgattacaaggcaatcatccaaaatccaaacccgctgatcccgccaatatttggtaccgatgagtttggatggtgcacagagtggaatccagcaatgtcaaagttaaccggtttgaagcgagaggaagtgattgacaaaatgctcttaggagaagtatttgggacgcagaagtcatgttgtcgtctaaagaatcaagaagcctttgtaaaccttgggattgtgctgaacaatgctgtgaccagtcaagatccagagaaagtatcgtttgctttctttacaagaggtggcaagtatgtggagtgtctgttgtgtgtgagtaagaaactggacagggaaggtgtagtgacaggtgtcttctgtttcctgcaacttgccagccatgagctgcagcaagcgctccatgttcaacgtttagctgagcgaaccgcagtgaagagactaaaggctctagcatacataaaaagacagatcaggaatccgctatctgggatcatgtttacaaggaaaatgatagagggtactgaattaggaccagagcaaagacggattttgcaaactagcgcgttatgtcagaagcaactaagcaagatcctcgatgattcggatcttgaaagcatcattgaaggatgcttggatttggaaatgaaagaattcaccttaaatgaagtgttgactgcttccacaagtcaagtaatgatgaagagtaacggaaagagtgttcggataacaaatgagaccggagaagaagtaatgtctgacactttgtatggagacagtattaggcttcaacaagtcttggcagatttcatgctgatggctgtaaactttacaccatccggaggtcagctaactgtttcagcttccctgaggaaggatcagctcgggcgttctgtgcatcttgctaatctagagatcaggttaacgcataccggagctgggatacctgagtttttactaaaccaaatgtttgggactgaggaagatgtgtcagaagaaggattgagcttaatggttagccggaaactggtgaagctgatgaatggagatgttcagtacttgagacaagctgggaaatcaagtttcattatcactgcggaactcgctgcagcaaacaagtag

SEQ ID NO: 199 - DNA, 3369 bp, Arabidopsis
atgtcaggctctaggccgactcagtcctctgagggctcaaggcgatcaaggcacagcgctaggatcattgcgcagaccactgtagatgcgaaactccatgctgattttgaggagtcaggcagctcctttgattactcaacctcagtgcgtgtcactggcccggttgtggagaatcagccaccaaggtctgacaaagttaccacgacttatcttcatcatatacagaagggaaagctgattcagcccttcggttgtttacttgccttggatgagaagaccttcaaagttattgcatacagcgagaatgcatctgagctgttgacaatggccagtcatgcagttcctagtgttggcgaacaccctgttctaggcattgggacagatataaggagtcttttcactgctcctagtgcgtctgcattgcagaaagcccttggatttggagatgtctctcttttgaatcccattcttgtgcactgcaggacttctgcaaagcccttttatgcgattatccacagggttacagggagcatcatcatcgactttgaacccgtgaagccttatgaagtccccatgacagctgctggtgccttacaatcatacaagctcgctgccaaagcaatcactaggctgcaatctttacccagcgggagtatggaaaggctttgtgatacaatggttcaagaggtttttgaactcacggggtatgacagggtgatggcttataagtttcatgaagatgatcacggtgaggttgtctccgaggttacaaaacctgggctggagccttatcttgggctgcattatcctgccaccgacatccctcaagcagcccgttttctgtttatgaagaacaaggtccggatgatagttgattgcaatgcaaaacatgctagggtgcttcaagatgaaaagctttcctttgaccttaccttgtgtggctccacccttagagcaccgcacagctgccatttgcagtacatggccaacatggattcaattgcatctctggttatggcggttgtagttaacgaggaagatggagaaggggatgctcctgatgctactacacagcctcaaaagagaaagagactatggggtttagtggtttgtcacaatacgactccgaggtttgttccatttcctctcaggtatgcctgtgaggctctagctcaagtgtttgccatacacgtcaataaggaggtggaactcgataaccagatggtggagaagaacattttgcgcacgcagacactcttgtgcgatatgctgatgcgtgatgctccactgggtattgtgtcgcaaagccccaacataatggaccttgtgaaatgtgatggagcagctctcttgtataaagacaagatatggaaactgggaacaactccaagtgagttccacctgcaggagatagcttcatggttgtgtgaataccacatggattcaacgggtttgagcactgatagtttgcatgacgccgggtttcctagggctctatctctcggggattcggtatgtgggatggcagctgtgaggatatcatcgaaagacatgattttctggttccgttctcataccgctggtgaagtgagatggggaggtgcgaagcatgatccagatgatagggatgatgcaaggagaatgcacccaaggtcatcgttcaaggctttccttgaagtggtcaagacaaggagtttaccttggaaggactatgagatggatgccatacactccttgcaacttattttgaggaatgctttcaaggatagtgaaactactgatgtgaatacaaaggtcatttactcgaagctaaatgatctcaaaattgatggtatacaagaactagaagctgtgaccagtgagatggttcgtttaattgagactgctacggtgccaatattggcggttgattctgatggactggttaatggttggaacacgaaaattgctgagctgactggtctttcggttgatgaagcaatcgggaagcatttcctcacacttgttgaagattcttcagtggaaatcgttaaaaggatgctagagaacgcattagaaggaactgaggagcagaatgtccagtttgagatcaagacacatctgtccagggctgatgctgggccaataagtttagttgtaaatgcatgcgcaagtagagatctccatgaaaacgtggttggggtgtgttttgtagcccatgatcttactggccagaagactgtgatggacaagtttacgcggattgaaggtgattacaaggcaatcatccaaaatccaaacccgctgatcccgccaatatttggtaccgatgagtttggatggtgcacagagtggaatccagcaatgtcaaagttaaccggtttgaagcgagaggaagtgattgacaaaatgctcttaggagaagtatttgggacgcagaagtcatgttgtcgtctaaagaatcaagaagcctttgtaaaccttgggattgtgctgaacaatgctgtgaccagtcaagatccagagaaagtatcgtttgctttctttacaagaggtggcaagtatgtggagtgtctgttgtgtgtgagtaagaaactggacagggaaggtgtagtgacaggtgtcttctgtttcctgcaacttgccagccatgagctgcagcaagcgctccatgttcaacgtttagctgagcgaaccgcagtgaagagactaaaggctctagcatacataaaaagacagatcaggaatccgctatctgggatcatgtttacaaggaaaatgatagagggtactgaattaggaccagagcaaagacggattttgcaaactagcgcgttatgtcagaagcaactaagcaagatcctcgatgattcggatcttgaaagcatcattgaaggatgcttggatttggaaatgaaagaattcaccttaaatgaagtgttgactgcttccacaagtcaagtaatgatgaagagtaacggaaagagtgttcggataacaaatgagaccggagaagaagtaatgtctgacactttgtatggagacagtattaggcttcaacaagtcttggcagatttcatgctgatggctgtaaactttacaccatccggaggtcagctaactgtttcagcttccctgaggaaggatcagctcgggcgttctgtgcatcttgctaatctagagatcaggttaacgcataccggagctgggatacctgagtttttactaaaccaaatgtttgggactgaggaagatgtgtcagaagaaggattgagcttaatggttagccggaaactggtgaagctgatgaatggagatgttcagtacttgagacaagctgggaaatcaagtttcattatcactgcggaactcgctgcagcaaacaagtag

SEQ ID NO: 200 - DNA, 1191 bp, Oryza sativa; identical to SEQ ID NO: 139

SEQ ID NO: 201 - DNA, 1191 bp, Oryza sativa; identical to SEQ ID NO: 139

SEQ ID NO: 202 - DNA, 213 bp, Escherichia coli
atgtctaataaaatgactggtttagtaaaatggtttaacgcagataaaggttttggctttatcactcctgatgatggcagcaaagacgttttcgtccatttcaccgccatccagagcaatgaattccgcacgctgaacgaaaatcagaaagttgaattttctattgagcaggggcaacgtggccccgcggcagcgaacgttgttacgctctag

SEQ ID NO: 203 - DNA, 1266 bp, Arabidopsis thaliana
atgctagagggagatgagaaacagagccgagctctggatttcaatcgactcgaggttttgtcattactaggtcgtggagctaaaggagttgtgtttcttgtccgcgacgacgacgctaaattgcttgctttaaaagttatacttaaggaagccatcgagaagaaaaagaagggtagagaaagtgaagatgatgagtataaacgcgtgagtttcgagcaaggagtattaagcagattcgaccatcctctctttccgtctcttcacggtgttttagctaccgataaagtcatcggttatgcgatcgattattgtccgggacagaatctcaattctttgaggaaaatgcaatcggaaagtatgttttccgacgagattatcagattttacgcggcggagcttgtattagcacttgactatttacataatcaaggaattgtgtatagagatttgaagccagacaatgtgatgatccaagaaaatggacatttaatgcttatagatttcgatctttctacaaatctagctccaagaacgccgcaaccgtcaccgtcactgtctaaaccatcgccgacgatgaagagaaagaaacgtctcttccgcttcaccagtttctgcaactcaggaatctcgccgcaagaatctatctcggttcactcatcatctacattggccgtgtcagattcttcaggtgagaagtcaaattctttcgtcggaacagaggaatacgttgcgccggaggttataagcggggacggtcacgattttgccgtcgattggtggtcgttaggggttgttttatatgagatgttgtatggagcgacgccgtttagaggatcgaaccggaaagagacattttaccggattttatctaaaccgccgaatctaactggtgaaacgacgtcgttgcgtgatttgattagaagattgttggagaaagatcctagccgtaggatcaacgttgaggaaatcaagggtcatgatttcttcagaggagtagattgggaaaaggtgattttggtttctagaccgccgtatatcccggcgccggacgacggtggtgataagggaaccgatgtaaatacgaagatggatgtggagaatatcgtccaagagatttttgctgcaagacaagaacgtgagaaacagagtggtgataacaataaaaacgctaatatgaaaattaaagataatactagtggggaatgggttaaggggttgaataataatcacgatttagaaagtgataacaattttttggtattttag

SEQ ID NO: 204 - DNA, 1044 bp, Zea mays
atgggctcgctcccggcgccggcctcggcggaattcgccccgcggccgcgggggcgcgccacggtggtggcgtcggacctggcgccgctcttctccgcgcagcgccggcacctggaccacttcttcgaccgcctcgacatggcgcaggcggcggcgttcgcgcaggcgctgctcgacgcgccgggcgccgtcttcttcacgggcgtcggcaagtcgggcatcgtggcgcgcaagaccgcgcagacgctggcgtcgctgggcctcgcgcgggccggcttcctcgcccccgtcgacgcgctccacggcgacatcggcgcgctcttccccggggacgtcctcgtgatcctctccaagtccggggcctccgacgagctgctcgcgctcgcgccctgcgcgcgcgccaagggcgcctacctcgtctcgctcacctccgcggcctcgggggatgactgcccgctcgccgcggcctgcgacctcaacgtccacctgccgctgcagggggaggtgtgcccctttggcctcgcgcccgtcacctccaccgccatccagatggtgtttggggacaccgtcatcgccgccatcatggaggcaaggcgactctccagggaccagtacgcttccaaccatcccgctggcaagatcggcaagaccctcatcttcaaggttaaggatgttatgaagaaacagaatgagcttcctctgtgcaaggagggagatatgataatggaccaactcaccgagctcaccagtaaaggttgtggttgtctgcttgtggttgatgaagagcatcatttgattgggaccttcactgatggtgatctccggcggacactgaaggcaagcgggccagctatcttcagtctcacagttggagagatgtgcaacaggaacccaaggacaatcactgcggaggcaatggcagttgaagccatggagaagatggaggcaccaccttcacccgtgcagttcttgcctgttgtcaacgagaacaacgtcgtgtgtggaatcatcacattgcatggattggtctctgccggattgtag

SEQ ID NO: 205 - DNA, 786 bp, Zea mays
atggccgccgcctccacctccacctcccttccccttggcttctctcaccaccgcccaactcccagaatccggccgcagccccagtcccagtcgcaaccactgaaggcaaaaccccctacccccctttgcctcagcctaaccctcaccccggcgaccgcgaagccccgcctcgctgcgatgcccgacgacgtcgccgtcgccaacttcgtggagaaggactggtcgtttctcgagtccgcgggcgcaaacctccagcgcgctctcgcctcgggggcgctcacgccggcgtcgcgggtgttggcattgacgcccacggcgtccttcgtgaggtcgctcctcgcgtcctcgccctgcgagctactggtggccgcgcatgagtcgatgtacgtgctggcaggggtcaaggaggcgcacgacgaggtgaggtgcttccacctcgagggtgggggcggcggcagaggcggcggcgtggtggaggccgtgccagagaggttcgacgacttcgatgttgtgttcgtgtgctacttccctggaatgggagtctccgcgggggcgctcctcaaatcgctggccaagaggtgctcaaaaggtgcaagagttgtcatgttcttagatcaaggcagacagaattttgagcaacaacggagagagcatcctgatgttgtaacttcggatttgcccagtatagccttcctggagaaggctgcatctgggaacaagtatgaaataacagagttcgttgacgagcctagcttttaccttgctgttttgcagtttcaaggatga

SEQ ID NO: 206 - DNA, 1533 bp, Desulfitobacterium hafniense
atggagggttttatgaaaagtgcaagcaaagtagataaaacgatagtatggagttcactgatcgtttcgtcagcctttatcatcgctacactggtgacgccatcgggtgtttcccaaatcctcaatgctattttttcttttttcactaagaatctgggttgggcctatatgttatcggcggctgcctttgttgcctttggtattggtctggccgtaagcaaatacggccatatcaagctcggtaaggatgatgaagagccggagtacagccggggcagctggtttgccatgctgtttgctacaggcatgggcgtcggtctggtgttctggggcgctgccgagccgattatgcattttgacacctctcctttcgcagccaacagaacgccggaagcagccagcattgccatgcgtacggtgtttttccactggggactgcatccctgggctttgtatggagtggtggcaatgtccctggcttattttcaattccgcaaaggcctgcccggcctaatcagctccacattttacccgttaatcggagagaagggcatcagaggcccgatcggcaaaatcattgatgtcattgccgttgtcgtaacgctattcggagtcgccacatccctcggactgggcacccaacagcttaccaccggaatgaattacgtctatggtctgccgaacaccacctctatggccctggtaataatcgcgatcatcaccattttgtttaccatcgcggctgccagcggaattgataaaggcattaaattcgtcagcaataccaatatggttcttgccttcctgctgatgcttttcctcctgatcgtcggaccgacaaaatatatcctgaatactttttttgaatcgatgggtaattatctgcaaaattttgtgtccctgagcttttttctggatacccagggagcagtggccgaacgtacaggttatgattggattggctcctggtcggttttttactgggcctggtggatcacctgggcaccctttgtgggaagctttattgcccggatttccagagggagaaccattcgtgaatttgtactgggtatccttgttgcgccccccttgttaagtgccatatggttcagcatcgtcgggggcagcgctcttcacatcgagttgtttggcagtggaggaatcagcgccgccgttgccgaagatgtctccagcggtatttttgccatgctcagtcatttccctttaagcggtcccgtggctttgctgacaatgatcttattggcgatattcttcatcacttcggctgagtccgcgaccttcgttgtcggcatgtttacttccggcggcgatcttaatccggatgccaggctgaaaatcgtctggggtgttgtggagggagctatagctgccatgctcctcgtagccggcgggctttccgcagttcagacagttgcctttatctttagttttccgttcatgcttattatgatcctgatggtagtgagcatggttaaggccttgggcgagggtgagaagaagccgctgcagtag

SEQ ID NO: 207 - DNA, 282 bp, Triticum aestivum
atggagcaccagggacacggcaccggcgagaagaagggcatcatggagaacatcaaggagaagctccccggtggccaaggtgaccaccagcagaccgctggcacccacgggcagcatggacacactggaatgacaggcacggagatgcatgacaccacggccaccggcggcacccatgggcagcaggggcttaccggaacgactggcactgggacacacggcaccggtgagaagaagagcctcatggacaaggtgaaggagaagctgcctggacagcactag

SEQ ID NO: 208 - DNA, 612 bp, Corynebacterium glutamicum; identical to SEQ ID NO: 161

SEQ ID NO: 209 - DNA, 291 bp, Arabidopsis thaliana
atggctttggtaagaggtttcatggctgcaaagaagattcttggtggctcagtagcaggaacgaggaaagaaacttcagcaccaaaagggtttcttgcagtgtacgtcggtgagagccagaggaagaagcagagacaccttgtgccggtctcatacttgaaccagcctttgtttcaagctctactcatcaaagctgaagaagagttcggattcaatcatccgatgggcggcttgacgatcccttgtcctgaagatactttcctcactgtaacgtctcagatccaaggatag

SEQ ID NO: 210 - DNA, 2496 bp, Arabidopsis
atgggagatggagatgagcaaagtaaagagttaggaggagtttcgtcttcgagtcgtcgttgttcttccggtactgctggtgctgcaaatgcagaagcaagaatgaagtttgctgctgttgatgctataacagaattagtgtggtctcctagcaacggtctaagcttaagatgtgcagatatcagtttcacgggaaaggcaaaattactctctcctaacttctttgatataggactaactaacatggcgattcactcaaatagcacaagtattgaagaccaagaagatcacgtagatgtcgaattgagaaaccgagatcaagtgaaccaagcaatgattggtggttctgttgaggatatgaaacctgaaatggttgaggataaggttgaaaccaatgatgatataaagaatgaagaagcaggatgttccaaaagatcttcagatagtccgaaagctatggaaggagaaaccagagacttgttggttaatgaacagttgaggatggaaagtgctggatctcaagaagaaggggataaggcgcataatagagttgatcgtttagaatcaatggatgagaacaacctcgcaactcttgctgttgtagcatgtgaaggtaaaggggactatttgccggagggtgaggctggacctagtggttcctacaggcgtcgtgagaaagcaaaagggaaagagaaagctttatctgatgaaaactttggtggtgatggtgaagatgaggatgaggagagttttggtagtgtagaaagttgcaatagtgcgggtttgctctcaaggggaaagaaaagaccaggctttgaggagcagctgatttttggaagcaaacggctcaaaacgttaaatcaagaatgtttggggtcaacttcaaagctcaagcaagatagttccttcatgaattggatatcaaatatgactaaaggaatctggaaaggtaatgaagaagacaattctccttttgtagctcttaccaccacctcaaatgctaatggtcatggccaagtcaatgccatcgttgaccaacaacaattgagtccatgctgtgtgaaggaaaatagtggatgcagaaacaccggtttccagtcttttttccagtctatatattgtccgaagaaacaaagtcaagatgtcgtcgacatggatttcccgaatgatgttaatgctgctcctttgcaggaacttccctggattcctgaacattgcgacatttccaaaggggatgacttgtcttcatctggtaatgagattggtccagtggctgaacccaacatttcatcaggaaaagttgtatttaatcagacaagcaaaacacagtcttcagagaacaaacgtgaggacaaagagccaaacatctcgttgatgtctcttagtaagtctaagccaaatgaagagccaaaaacatgcggtgaagctgatggaaaggttagtccatgtttaaccaacagaaactctggtcttaaaagtttgtggattagtcggttttcttctaaaggttcgttccctcagaaaaaggcaagtgaaacggctaaagaggccaatgcttcagcctcagacgcagctaaaacccgtgattcacggaaaatgctggcagacaagaatgttataagacccagtatcagctcggtagatgggcccgataaaccggacactgtccttcctatagtttcgtcaatgagaatagagtcttcagaagcaatggcttctttgtttgctagaagattagaagcaatgaaaagcatcatgccctcaggttctttagctgagaatgcagaggaggaacagagggatctaatttgtttctactgcggtaaaaagggtcattgtttacgggattgtttggaagtaactgatactgagctcagagatctagtacagaacataagtgtgcggaatggaagagaagaagcgtcaagtctatgcattagatgttttcagcttagtcactgggctgcaacatgcccgaatgctcccctgtatggttcaggagctgaaggtagagctatgaagaacgctttagcttctacctctggcatgaagctgcccataagtggtttcacagacgtaccaagggcggtctttgatgctgttcaagtgcttcgcctgagccgcacagacgttctcaaatggataaacaccaagaagtctgtatcgggtctcgaagggttcttcttgcggttaaggctcgggaaatgggaagaagggcttggaggaacagggtattatgtagctcgcatagatggggacacagagggacaaagctcaaggagacattcagagaaaagcttaatttcagttaaggttaaaggtgtgacttgccttgttgagtctcagtttatctcaaaccaagactttcttgaggaggagttaaaggcctggtggcagagcgcggggaaaagtgccagaacaagcggctacgacggcatcccgtcggcggaggaacttagtcggaaaattcagcagagaaaaatgttaggcttttag

SEQ ID NO: 211 - DNA, 1263 bp, Glycine max
atggacattaacgagatcgatgttccttcattctttctctgccccatttcgttagaaatcatgaaggatccagtgacggtctcaacaggcatcacctacgaccgtgaaagcatcgaaacatggctgttctcgaagaaaaacacgacatgccccatgaccaaacagcccttgatagattacaccgatctcacaccaaaccacacccttcggagactcatccaagcgtggtgtaccatgaacacttctcacggcatcgaaaggatcccaacccccaaaccccccattaacaaaaatcaaatttccaagcttctcaaggacgcttctcattcccctctcacatgcctcaggagactcaaatccatcgcttcaggaagcgaaacaaataagcggtgcatggaagcttctggtgttgttgaatttctagcatcaattgtaatcaacaacaacaacatcgtttcttcaaatgaggctgactcaaatgagggatctggattcgagttgagaacaagtgcaagcgatgaagcgttgagtttgcttcataatcttcatttatctgatcaagggttgaagactctcttgagcttcaaaaccggcgactttattgagtctttaacaagagttatgcaaaaggggttctttgaatcacgcgcttatgcagtgttcttgttgaaatccatgtccgaagtggctgagccagtgcaattattgcatctaagacaagacctttttgtcgaactagtacaagtcttgaaggatcaaatttctcaaaagacatcaaaagcaacacttcaaaccctgatccaattctctccttgggggaggaacaggatcaaagctgtggaagcaggtaccgttcctgttttggtagagcttcttctcgattgcaaggagagaaagccttgcgagatgatgctggtgttgttggaaattctatgccagtgtgctgagggaagagcagaacttttgaatcatgcagcaggtcttgccattgtgtccaaaaagattctaagggtttcgactttggccaatgatagagctgttaagattcttctgtctgtttcgagattctctgcgactccacatgttgttcaagaaatgcttaaacttggtgtggtcgcgaaattgtgcttggtgcttcaggtggatagtggaaacaaggctaaggaaaaggcaagagagattctcaaattgcatgctcgtgcgtggaggaattctccatgcataccgaacaatttgcttaattcatacccgaactatgtgtga

SEQ ID NO: 212 - DNA, 1074 bp, Oryza sativa
atggattttccgggagggagcgggaggcagcagcagctgccgccgatgacgccgctgccgttggcgaggcaggggtcggtgtactcgctcacgttcgacgagttccagagcacgctgggcggggtcgggaaggacttcgggtcgatgaacatggacgagctcctccgcagcatctggacggccgaggagtcgcacgccgtcggcgccgccacgacgacgacggcgacgacggcgtccgtggcggcggcggagcacgcggcggtgggggcgccgcccgttcagaggcaggggtcgctgaccctcccccgcacgctcagccagaagaccgtcgacgaggtctggcgcgacatgatgtgcttcggtggcggcggcgcctccaccgcgccggccgccgcggagcccccgccgccggcgcaccggcagcagacgctcggggagatcacgctggaggagttcctcgtgcgggccggcgtggtgagggaggacatgtcggtcccgcccgtcccgccggcgccgactcctacggcggctgctgtacctcccccgccgccgccgcagcagcagacgccgatgttgttcggtcagagcaatgtgttccctccgatggtgcctccgctctcgctgggaaatgggctggtctcgggagctgtcggacacggcggtggtggtgccgcgtcgttggtttcgccggtgaggccggtctcgtccaatggcttcggcaagatggaaggcggggacctgtcgtcgctgtcgccatcgccggtgccgtacgttttcaaaggtgggctgaggggaaggaaggcaccgggcatcgagaaggttgtcgagagaagacagcggcggatgatcaagaacagggagtctgccgcgaggtcgcgccagaggaaacaggcatatatgatggaattggaagctgaggtagcaaaacttaaggagctgaacgatgaactccagaaaaagcaggatgaaatgttggagcagcaaaagaatgaggttctagagagaatgagccgacaagttggaccgacagcaaagagaatttgccttcggaggactctgacgggtccatggtag

SEQ ID NO: 213 - DNA, 2004 bp, Arabidopsis thaliana
atgggttcaactccgttttgctactctatcaatccatctccatcaaagcttgatttcacgaggacccatgtgtttagtcctgtttctaaacagttttacttagatttatcatcgttttccggaaaacccggaggagtatctgggtttaggagccgtcgagctttgctcggagtaaaggcggcgacggcgttagttgagaaggaggagaagagagaggcggtgacggagaagaagaagaaatcgagggttttagttgccggaggtggaatcggaggattggtgtttgctttagcggctaagaagaaaggattcgatgtgttagtgtttgagaaagatttgagtgctataagaggagaaggaaaatacagaggcccgattcaaatacagagcaacgctttagctgctttggaagctattgatattgaagttgctgaacaagttatggaagctgggtgtatcactggtgatcggattaacggtctcgttgatggtatctctggtacttggtatgtaaagtttgatactttcactcctgcggcgtcacggggacttcctgtgactagagtaattagtagaatgactctgcagcagattctagcacgtgcggttggagaagatgtgattagaaacgagagtaatgttgttgattttgaagattctggagataaggttactgtggtactcgagaatggtcaacgctatgaaggtgatctgcttgtgggtgcagatggcatttggtctaaggtgagaaataatttgtttggccgtagtgaagctacttattcaggctacacttgttacacggggattgcagattttataccagcggatatcgagtctgttggctaccgggttttcttgggacacaaacagtactttgtttcttcggatgttggtggtggaaaaatgcaatggtatgcatttcacgaggaaccagctggtggggctgatgctccaaatggtatgaagaaaaggttgtttgaaatatttgacggttggtacgacaatgtactcgacttgttgcatgcgactgaggaggaagccattctgagaagagatatttatgatagaagtcctggttttacttggggtaaagggcgtgttacgctgctcggggattctatccatgcgatgcagccaaatatgggtcaaggtggatgcatggccattgaggatagttttcaactagcattggagcttgatgaagcatggaaacagagtgttgaaacgactacacctgttgatgttgtttcctctttgaaaagatatgaggaatctagaagactgagagtcgctattatccatgcaatggcgaggatggctgcaattatggcttccacttacaaagcatacttaggtgttgggcttggtcctctgtctttcttgacaaagtttagagtaccacatccaggaagagttggtggtagattcttcgttgacattgctatgccatcgatgcttgactgggtccttggaggtaacagtgaaaaactccaaggaaggccacctagttgcagactcactgacaaagccgatgaccggcttcgagagtggtttgaagatgacgatgctcttgaacgtactataaagggagaatggtatctaattccacacggcgacgattgttgcgtttcggaaacattatgtctaaccaaagatgaagatcaaccttgcatcgtcggaagcgaaccagatcaagattttcctggaatgcgcattgtgatcccttcgtctcaggtttcgaagatgcatgctcgtgtgatttacaaagacggagctttcttcttgatggatcttcgaagcgaacacggaacctatgtgaccgataacgaaggaagaagatatagagcaacaccgaattttcccgcgcggtttagatcgtccgacatcatcgagtttggttcagataagaaggcggcgtttagggtgaaagtaatcaggaaaactccgaaatcgacgaggaagaatgagagtaacaacgataaattacttcagacagcttga

SEQ ID NO: 214 - DNA, 591 bp, Glycine max
atggcatttgcaggaacaacacagaagtgtatggcctgtgacaaaaccgtttatctggttgataagttgaccgcggataaccgagttttccacaaagcttgcttcagatgccatcactgcaaaggaaccctcaagctgagcaactacaactcttttgagggagttctttattgtaagccacactttgaccaactgttcaaaagaacagggagccttgacaaaagctttgaaggaacaccaaaaattgccaagccagagaaaaatttggaagagaaacctgcagcagccaaagtctcaagtatgtttggaggaacaagggacaaatgtgctggttgtcagaaaacggtttatcccactgagaaggtgactgtgaatggaaccccttaccataagagttgtttcaaatgctgccatggagggtgtgttatcagtccttccaattacatagcacacgagggaaaactctactgcaaacaccaccatgtccaattgatcaaggagaagggcaatttaagccaacttgaaggtgacaatgagaagagtgcaactaatgggaaaatcaatggtgaagaagttgccacggagacatag

SEQ ID NO: 215 - DNA, 1050 bp, Glycine max
atggccgattcaacctcaagcgattcactctcactcgacatcgattccttttctccttcacctcaggaacatatcatcagaacacgtcatggttctgtatctgttgctgtatatggagaccaggataagccagctctaatcacatatccggatttggctttaaattatgtctcctgctttcaggggttattattttgtcccgaggcatattaccttctgctccacaatttctgcatttatcatattagtccacctgggcatgagttgggagctgctgcaatcgatcaagatcacccaattctttctgtagatgatttagctgatcaaatagccgaggttctcaacttttttggtcttagtgcagtcatgtgtatgggagtaactgctggggcttacattcttaccttatttgctatgaagtatagacaacgtgttcttggtttgatacttgtttctcctctatgtaaagaaccgtcttggactgaatggttgtacaacaaggtcatgtcaaatttactatacttttatggcatgtgtggggtggttaaggaaatattgctgaagcggtactttagcaaggaaattcgaggtggcactcaattgccggagtcagatatagttaaatcttgtcgaaggttgttggatgagaggcagagtttgaatgtgtggcgattcctggaagctattaacgagagacctgacataagtgaagggttgagaaaactacattgccgttcgcttatttttgttggggatatgtcaccatttcactcggaggctgttcacatgacttcaaagttagacagacgattcagtgccttagttgaggttcaagcatgtggatcaatggtaacagaggagcagcctcatgccatgttaataccaatggagtactttctcatgggatatggcttgtacaagccatccaagttgagtgtcagcccaagaagtcccttgagcccatcatgcatttcgcctgagctttattcaccagagagcatgggtttgaaattgaaacccataaagacacgaatttctctggaaatctag

SEQ ID NO: 216 - DNA, 1380 bp, Glycine max
atgttaaaggatacaagtatttcaaaatgtacctcttgtcgtgatgacatgttaagtaaaggggaagtgtctgcagctgttaccaacatacagcctcaggttcctacttcatcttcagaagtgaaattggagtcttctaagttggaaaagcaagagaaaaatacaagttctaaagcatcatcaggccttcgaaagagggcctatgaccctgaattgtttttcaaagtcaatggcaagctttatcaaaggcttggcaagataggtagtggtggaagcagtgaggtacacaaggtgatttcatcagactgtacaatctatgcacttaaaaggataaaattaaagggtcgtgattatgccactgcatatggcttttgtcaagagatcgagtatctaaataggctgaaaggaaagaataatattatccagcttatagattatgaggtgactgacaaggctttgtttgagggagtcataaatggctccttcagtaataaggatggtagagtcaaggatgatggatatatatacatggtacttgaatacggggaaattgatttggctcatatgttgtctcaaaagtggaaggaactggatggaagcaaccagaccatagatgagaactggcttcggttttattggcagcaaattcttcaagctgtcaacacaattcatgaagaacgtattgtgcattctgacttgaagccagctaacttcctccttgtcaaaggttccttaaaactgattgattttggaatagccaaagcaataatgagtgatacaacaaacatccaacgtgattcacaggttggtactctaagttacatgtcaccagaagcatttatgtgcaatgagagtgatgcaagtggaaacatcataaaatgtggtcggccatcagatatctggtcccttggctgcattctttatcaaatggtatatgggagaacaccatttgcagattacaagacattttgggcaaaattcaaagttataactgatccaaatcatgaaattacgtacgcaccagtttcaaatccatggcttctggatcttatgaaaaggtgtctagcatgggatcgcaatgaaaggtggagaattcctcagctgctacagcatccttttctagttcccccagtcccatgtcattcatctttttaccaagatcaaacctttaaattgctgcaacttatatctgaagcttgcataaatgacccagaatcatcacagctctgttgtcagctccaacaggtgcttggtaatcccatcaagtcaactagtattcattcattaaattcactagaccaacagcataaattgctgtcccgaatatcagaactttgtattctactacaggaacgattgacaaagacagataaactatag

SEQ ID NO: 217 - DNA, 768 bp, Glycine max
atggggaggggaagagtggagttgaagaggatagagaacaagataaacaggcaagtcacttttgcaaagaggagaaatgggcttctcaagaaagcctatgagctatctgttctctgtgatgctgaggttgccctcatcatcttctccaaccgaggcaagctttatgagttctgtagcagctctagcatgctcaaaacacttgaaaggtaccagaaatgcagctatggtgctgtggaagttagcaaacctgccaaagagctcgagcagagcagctaccgtgaatacttgaagctgaaagcaagatttgaatcacttcaaaggacccaaagaaaccttttaggggaagacttaggcccactgaatatcaaagaacttgagcatcttgaacggcaattggattcatctctaaagcaagtgaggtccacaaagacacaattcatgctggaccagttatctgatcttcaaaccaaggagcagatgttagtagaagcaaacagatccttgacagtgaagctggaagaaatcaattcaagaaaccactacaggcaatcatgggaagctggtgatcaaagtatgccatatggtggtggtggtccagagaattctcactctcattctcactctcagggcttcttccaaccattggaatgcaaccctacactacatattggtcctgattacaggtacaatgctgtagcttcagatcagataactgccacaactcaacctcaacaagtgagtggctttattccagggtggatgctttga

SEQ ID NO: 218 - DNA, 915 bp, Glycine max
atggcatcaagcaatctattctttgatgatatacggagcaaagtcgatgttgatcctcctcaaaatgaagagtcaacagatgttggtgaattattaaatgatcctgcccaaactgctcttaaacctaatgggactgtttcaagcagtgttcgtgagcttttagagtgccctgtatgcctgaatgccatgtaccctccaatccatcagtgttcaaatggtcacactatatgctcaggttgcaaacccagggtccataaccggtgccctacttgtaggcacgagcttggcaatatcagatgcctggcactggagaaagtggctgcgtctttggaacttccctgtaaatatcaaggttttgggtgcatcggtatatatccatattacagcaagctaaaacatgaatcgcaatgtgcacatagaccttacaactgtccatatgctggttcggaatgctctattatgggtgacataccctacctggtggcccatctgaaagatgaccataaagtggacatgcacaatggtagcacttttaatcatcgctacgtcaaatcaaatccacaagaagttgaaaatgccacatggatgttgacggtcttcagctgctttggtcagtattttggtctacattttgaagcttttcaactaggaatggctcctgtctacatagcctttttgcggtttatgggtgatgatgatgaggcaaagaattatagctacagtttagaggtaggtggaaatgggaggaagatgatttggcagggggtgcctagaagcatcagggacagccaccgcaaggttcgtgacagttttgatggtctcatcattcagaggaatatggccctctttttttccggtggtgaccggaaggaattgaagctaagggttactggtaggatctggaaagaacagtag

SEQ ID NO: 219 - DNA, 723 bp, Arabidopsis thaliana
atggtatcgaaaactccttctacatcgtctgatgaagcaaatgctactgcagatgaaagatgtagaaaaggtaaagtaccgaaaaggatcaacaaggccgttcgtgagaggcttaagcgtgagcatttgaatgagcttttcattgaattagccgatactcttgaactgaatcaacagaacagtgggaaagcttctatactatgcgaagctactcgattcttgaaggacgtgtttggtcaaattgagtctcttagaaaggagcatgcttctctcctatctgaatctagctatgtaaccacagagaagaatgagctcaaggaagaaacatcagtgcttgagactgagatttcgaaactacaaaacgagattgaagctagagcgaatcagtcgaaacctgacttgaacacctctcctgcacccgagtaccatcatcatcattatcaacaacaacatcctgaacgtgtatctcagttcccaggacttcccattttccaaggccccggctttcaacaatctgctacaactcttcatcctcctgcaacagttcttgtccttccaatacaacctgatccccagacacaagatatctcagaaatgactcaagcgcagcagcctttgatgtttaatagctcaaatgtgagtaagccatgtccaaggtatgctagcgcggctgactcgtggtcttctcggctacttggagagcggctgaaagccagtgaatag

SEQ ID NO: 220 - DNA, 420 bp, Arabidopsis thaliana
atggagggttcgtccaaagggttgaggaaaggtgcatggactgctgaagaagatagtctcttgaggcagtgtattggtaagtatggagaaggcaaatggcatcaagttcctttaagagctgggctaaatcggtgcaggaaaagttgtagactaagatggttaaactatttgaagccaagtatcaagagaggaaaatttagttctgatgaagttgatcttcttcttcgtcttcataagcttctaggaaataggtggtccttgattgctggtcgattacctggtcggaccgctaatgatgtcaagaactactggaacacccatctgagtaagaagcatgaaccgtgttgtaaaactaagataaaaaggataaatattataacccctcctaatacaccggcccaaaaagtcgatattttttag

SEQ ID NO: 221 - DNA, 768 bp, Arabidopsis thaliana
atgtcttctcaaccgaatcatcagacttcaatatcaagtttactccatgatcgcttgcatatccctcctgcagaaacaatcgttgagaaagagtctgcagagaaggacacttgtcaatcacaaagaaaaaggaaagaaccagttttgcatgaggttgatggctcaagtagtggtgcagcaaagaaacaagaccataacgctaaggagcgtttaaggaggatgagacttcatgcctcttacctcactcttggcactcttcttcctgaccattcttcttcttcttcaaaggttttgttttcactgttattattacaagttaggtatgttctgcttgttgttgagctatatataacttttcttgctgattggcagaagaaatggtctgcaccatctataatcgataatgtaatcacttacattcccaagctacagaatgaagttggagagctaactctaagaaagcagaagcttgtggagttagagagacgaggtccttctattcgagcaatctcggttcttgaattgggggaatcaggttatgaggctgttgtacagatatgcttgaagaaagaaaacgaagatgagttctccaacttgcttcatgtaatggaggtgcaaggtttgagtgttttaagtgcttctacttctcaagtttgccgagagcaaagggtggtttgctacaacttccatgtcaaggtactgtgtctcatcttatcttcttcatttctctttagtttatgttttgatagaatggagacaatgtgctag

SEQ ID NO: 222 - DNA, 1230 bp, Arabidopsis thaliana
atggaactatcattagcattaacatcaacagaccataatccatcgccttcagaggcacatccagatactatggactttctgtctcgagaatggtgtaatttcgctgttcaatcacttcatccagaccctatcctctacgatcgttccattgttcccgtcgagacatcgatcgccaagtttcaaggcgactcaagtcctgtttcttgtgctatgatggatacgagcatgaagatggacgatccagattttaagccctcgatgccttcatggaaaaccaatgatgtgaagtcatggatatggatgcaacaagcaatgcacccggaattgagctacgaaggctttttccgcaagaaacttgtaaaacccttttggccatttcgtttggttttgatttatcaaatcaacaatattggttttctaaaccaaaacaataatggttttgtagaaacttccatggaaaattacgccgtcgataaagaaatggtggaaagagataaaggcgaaacgaaaggaagaaagaacgctggaaaagatggtggaaacggtcgacctagcacgagggagactgctgtggcttctgctgcggctgtggtggcggcacaatgtgcgcaaatggcagagacaatgggagcaaacagagaccagctcagcacgatgattggttcagccatgaccgggacaagtgttagtgagatactcactctcactgcctcagctacaacttcgttgagaggtgccgcgacgctgaaagcaagaagaggttgcaagattaatagattgaatggctctgcacctgtgttgcctattgaagactcttcttatttgcctcctgaattcgataagaacacatctgttcttgctaagggaacagatctcttcgtcgagacaccagatggggatttcaaggctaggacggtttctatggtcttaaacaaagatggaaaggtgattcttaaaatgaagaaacataatctactcaggactaagaaagaaagtattgtgacgaatgttcatgtggaactttacaaagattcagatagcgaagacaacaacatagaggacacttgttatctcattgtcctgaggacgaacagaggagctatcaagttagacatggccgacgattacaatcgttacaagacatgggtcacaacgatccaacacatgctcactctctcttcttcctccttaagtacaaattacgctctcactttctacaacaaaaactaa

SEQ ID NO: 223 - DNA, 645 bp, Arabidopsis thaliana
atggtgaggggcaaaactcagatgaagagaatagagaatgcaacaagcagacaagtgactttctccaaaagaaggaatggtttgttgaagaaagcctttgagctctcagtgctttgtgatgctgaagtttctcttatcatcttctctcctaaaggcaaactttatgaattcgccagctccaatatgcaagataccatagatcgttatctgaggcatactaaggatcgagtcagcaccaaaccggtttctgaagaaaatatgcagcatttgaaatatgaagcagcaaacatgatgaagaaaattgaacaactcgaagcttctaaacgtaaactcttgggagaaggcataggaacatgctcaatcgaggagctgcaacagattgagcaacagcttgagaaaagtgtcaaatgtattcgagcaagaaagactcaagtgtttaaggaacaaattgagcagctcaagcaaaaggagaaagctctagctgcagaaaacgagaagctctctgaaaagtggggatctcatgaaagcgaagtttggtcaaataagaatcaagaaagtactggaagaggtgatgaagagagtagcccaagttctgaagtagagacgcaattgttcattgggttaccttgttcttcaagaaagtag

SEQ ID NO: 224 - DNA, 528 bp, Arabidopsis thaliana
atgtctttaagtcgtagagatcctcttgtggtcggcagtgttgttggagatgttcttgatcctttcacgaggttggtctctcttaaggtcacttatggccatagagaggttactaatggcttggatctaaggccttctcaagttctgaacaaaccaatagtggagattggaggagacgacttcagaaatttctacaccttggttatggtggatccagatgtgccgagtccaagcaaccctcaccaacgagaatatctccactggttggtgactgatatacctgccaccactggaaatgcctttggcaatgaggtggtgtgctacgagagtccacgtcccccctcgggaattcatcgtattgtgttggtattgttccggcaactcggaagacaaacggtttatgcaccggggtggcgccaacagttcaacactcgtgagtttgctgagatctacaatcttggtcttcctgtggctgcctcttacttcaactgccagagggagaatggctgtgggggaagaagaacgtag

SEQ ID NO: 225 - DNA, 1743 bp, Zea mays
atgggagaagttgaggacatgtacacccaagacgggaccgtggacatgaaagggaatcccgccgtgaagaagggcaccggcaactggcgcgcctgcccctacatcctcgcgaacgagtgctgcgagaggctggcttactatggcatgagcaccaacctggtgaactacatgaagacccgacttggccaggtgaactccgttgcctccaacaacgtcaccaactggcaagggacgtgctacatcacgccgctcatcggcgccttcttcgccgacgcgtacatggggaggttctggaccatcgccatcttcatgatcatctacattttcggcctggcgctgctgacgatggcttcgtcggtgaaggggctggtgcctacgtcgtgcggcgacaaggatgtgtgccacccgacggacgcgcaggcggcggtggtgttcgtggcgctgtacctcatcgcgctgggcacgggcgggatcaagccgtgcgtgtcctccttcggcgccgaccagttcgacgagaacgacgagcgggagaagaagagcaagagctccttcttcaactggttctacttctccatcaacatcggcgcgctggtggcgtccacagtgctggtgtacgtgcagacgcacgtgggctggggctggggcttcggcatccccgccgtggtcatggccatcgccgtcggcagcttcttcgtgggcacgccgctgtacaggcaccagaagcccgggggcagcccgctgacgcgcatcgcgcaggtgctcgtcgcgtgcgcgcgcaagtggaacgtggccgtgcccgcggacaagtcgcggctgcacgagacggtggacggggagtccgtcatcgaggggagccgcaagctggagcactcggagcagctggcgtgcctcgacagggctgccgtggtgacggccgaggacggcgcggaggcgagcccgtggcgcctgtgctcggtgacgcaggtggaggagctcaagagcgtgatccggctgctgcccatctgggccagcgggatcgtgttcgcggcggtgtactcgcagatgagcaccatgttcgtgctgcagggtaacacgctggaccagagcatggggccccggttcaagatcccctcggcgacgctgtccatggtggacaccatcagcgtcatcgtctgggtccccgtgtacgaccgcgccatcgtgcccctggtgcgctcctacaccgggaggccgcgcgggttcacgcagctgcagcgcatgggcatcggcctcgtcgtctccatcttctccatggtggcggcgggcgtgctggacatcgtgcggctgcgcgccatcgcgcggcacggcctgtacggcgaggacgacatcgtgcccatctccatcttctggcagataccgcagtacttcatcatcgggtgcgcggaggtgttcaccttcgtggggcagctggagttcttctacgaccaggcgcccgacgccatgaggagcatgtgctccgcgctgtcgctcaccaccgtcgcgctcggcaactacctcagcacggtcctggtgaccatcgtcacccacatcaccaccaggcacggccgcatcgggtggatcccggagaacctcaaccgcggccacctcgactacttcttctggctgctcgccgtgctcagccttctcaacttccttgcctacctcgtcatcgccagctggtacaagtacaagaagacggccgatgattaccctggcgccaaaggggagcacggtacagagcactga

SEQ ID NO: 226 - DNA, 1935 bp, Arabidopsis thaliana
atgggcaacaagaaactgttgactggtgggtcaagcaaaactcatggtagtggtagtagctacagagatcctctgttgcagaatcaggaggataaaccgaaagcgaatggaagcgagaatggtttgaatgatcttgagcatggtgtagttgaggcggcaaatgttggatttggcagagtctttgcgttggcaaagcccgatgcgggaaagctagtgattggtaccattgctttgttgataggttcaacaactaatctccttgttccaaagtttggtgggatgattatagacattgtatccagagatgtcaagacgcctgagcagcaaacggaatccttgattgctgttagaaacgccgtagtaatcattttgcttatcgttgtaatcggatcgatatgcacggctttgcgagcgtggctatttaattctgccagtgaaagagttgtggctcgactgagaaaggatttgttcagacacctaatgcatcaggaaatagcattttatgatgtcacaaaaaccggagaactcttaagtagattatccgaagacacccagatcataaaaaacgctgctactacaaatctttctgaagctcttcgtaacgtaacaactgcgcttataggagttggtttcatgtttacatcatcttggaaattaacattgttggcgttagtagtagttccggtaatttcagttgctgtgaaacagtttggtcgctatctacgtgaactttcacacacaactcaagctgcagctgctgttgctgcatcaattgctgaggaatcttttggtgcagtccgaactgttagatcgtttgcgaaagaaagctatatggtatcacaatattccaagaaagtcgatgagactctgaagctaggactcaaacaagctgtacttgtcgggttgttcttcggaggactaaacgcagctttcacattatctgttattacggttgttagttatggagcatacttaacaatatatggttccatgaccgttggagcactcacttccttcattctttatagcctcacagttggttcatcggtatcttctttatcgagtttgtacacaactgcaatgaaagctgcaggcgctagtagacgagtttttcagatcttggaccgtgtttctagcatgtcaagttcaggggataagtgtccagtcggtaatcctgatggagatgtggaattaaatgatgtctggtttgcttatccttctcgtcctagtcacatgatactcaagggaatatcgttgaggttgacaccaggctcaaaagttgcactagtaggaccaagcggtggaggaaaaacgaccatagctaatttgattgagagattctatgatcctctcaagggaaagattttgcttaatggagtttctttgatggaaatatcccatcaataccttcacaaacagatcagcattgtaagtcaggaaccaattcttttcaactgttcagtggaagagaacatcgcatatggatttgacggtgaagctagttttaccgatatagaaaatgcagcgaaaatggcgaatgcacacgagttcattgaagcgtttccggataagtacaacactgttgtaggagaacgtggattacggctctcaggaggacagaagcaaaggattgcaatcgcgagggcgcttcttacaaacccgagtgttttgctccttgatgaagccacgagtgcactcgacgctgaaagcgaatatcttgttcaggatgcgatggactcgttaatggcgggaagaacggtgttggtgatagctcataggttatcgacggtcaagactgcagactgtgtggcggttatatcagatggtgaggtggctgagaaaggcactcatgatgagcttctcagccttaatggaatctacacaaatcttgtcaagaggcagcttcagagttcttcctctgttaccaccttgtga

SEQ ID NO: 227 - DNA, 1680 bp, Cyanidium caldarium
atgtgcggcatcctagccgtgctaggctctagcctgcccgttgaggagctgagggaactcgttaagtcctgcactaagaagctctaccatcgcggccctgacgaggagcaatacttcatcagcgaggacggctggtgcggcctcggcttcgcccgcctcaagatcgtggaccctgagcacggcgtgcagcccatgttcaacgaccagcgcaccgtgtggtccgtgaccaacggcgaactctacaaccacgaggaaatccgcaagaccgagcttaacaacatgaccctccactcccactccgactgcgagatcatgatcccgctctacgagaagtatgtgtcttcccagcgctacgaccacgacatccagtatgtgtacaacctcctgcgcggcgtgttcgcctcctgcctcgtggacctcaaacgcggcttcttcatggctggccgcgaccctatcggcgtgagggccctcttctacggcacctccaaggacggagccgtgtggttcgcctccgaggccaaggccatcgtggacgtatgcgactacgtgaccgccttcatacccggcaccttcgtgaagggctaccgtggaagggaacaagccttctccttcactcgttactacgagcctgtgtactggcacgaccactggatgcctgtgtctcctgtggactaccagctcctgcacgacaccttcgtcctctcctgcaagaggcgtctcatgagcgacgtccctatcggtgtcttcatcagcggtgggcttggttcgtctctggtcgccagcgtcgccaagaggcttcttgaccctaactacgacttccacagcttcgcctgcggtctggagggtgctccggacgtcgccgcagcgcagagggtcgctgacttccttgggaccaagcaccatgtcctgactttcactgtcgaggagggtatccaggctctggaccaagtcatctaccacctggagacttacgacgtcactactgtcagggcgagcacgccgatgtacctattgtctggtctttgcaagaaatacgtcaaggtcgttctgtctggtgaaggtgctgacgaaatcttcggtggatacctttacttccacaacgctccgaacgagatcgctttccaccaggaggtcgttcgtagagtcaaactgctctacacggctgatgtccttcgtggagatagagctacggcagcgcagtctcttgagcttcgtgttccgttcctggatagagatttccttgatgttgcgatgtcgattcatccgcgtgagaaggttacgtcgaaacacagaattgagaagtacattattcggtatgcgtttagtaaggagttctgtggcgaggagtatttgccagatgacatcctttggcggcagaaggaacagtttagtgatggtgttggttacagttggattgatgggttgaaggcgtattgtgagaaggcggtttcggatgcggatttgcagaatgcggcacaacggtttccacatgatacaccaacaacaaaggaagcgtacgtctatcgggcgatcttcgagaaacacttcggaaattgtaaagcagttcaaggtttacgggaatcagttgcacgatgggttccaatgtggtcagattcaacagatccatcaggacgagcacagaaggtccatgtagcagcatactcgaatggaggagattga

SEQ ID NO: 228 - DNA, 1302 bp, Chlamydomonas reinhardtii
atgctggctggcaaagtgcctgtcgggtcggcagtgccaccgcgcaacaccgctccctccggcaaggggtcaaaggtgctcgtggtgaacgccggcagctccagcatcaagtttaaaatcttcacagcggagacgctgttgcccggcgccgctggcctgtttgaccgtatcggtgagggtgacccggccaactgcgtgttgaaggctagcgtgcccgacgatggcggcaagcccaagaagttcgagaagaagattcccgccaaggaccacctgacggcgatgcaggacatcatgagcttcattgacgagaacgtgtcgagcacctttgcgagcgaggtctgcgcggtgggccaccgcatcgtgcacggcctcgatatgtcgcagcccaagctgctcacgcccgacgtcatcagatgcatccaagacgcctccatgtttgcaccgctgcacaacccgccccacctgcaaggcatatatgcttcgcagaaggtgtttgggccagacgtgccgcaggtggctgtgtttgacacggccttccaccaaaccatgccgcccgagtcgtacgtgtacggcttgccgtacgacatgtacgagaagcacaagatccggcggtacggcttccacggcactagccacaagtacctggtggatcaggcggcggctatgctgggcaagaaggtttcggagaccaacgtcatcacctgccacttgggcaacggcagcagcgtggccgctgtgcgcggcgggcagtgtgtggacacaagcatgggcatgacgccgctggaggggctgctgatgggcacgcgctgcggcgacatcgacccggcggtggtgctgcacatccagaaccagctggggctgtcagccagcgaaacggacacgctgctcaataagaagtcaggcctgctggggctgaccggctccaacgacctgcgcacggtgattgagggcgcgggcaagggcgagccgcgctctcagctgggcctggacatgttcgtgcggcgcgtgcgcaagtacatcggagcctacatggccatgctggacggccaggtggacgcggtggtgttctccgcgggcatcggcgagaacagcgcgctggtgcggggactcatctgcgaccgcatgcaggcgctgggcatcgcagtggacaaggacgcgaacgcagcggccgtgggcgggaagcaggccgacatctcgggcccgggcgcgcgcatccgcgcactggtcatccccaccgatgaggagctttccatcgcgcagcagacattgcaggtggtgcgcggcgcggcgctggccgcttga

SEQ ID NO: 229 - DNA, 2379 bp, Chlamydomonas reinhardtii
atgtctctgaacagtagcactatgtcgcgccggcaggcggtggccggggccccggcagtggcgccgttccgacacgccgggctgttcccgcgcgtcaggctctgcgcgaaccgccgggtggcgcgtgtggcgccgaaggcagcgggcaacggcaatatcgcacagggcgagcagggctttgacaccctcttcctctcggacatctccctagtgggccagcgcacgcctctgctgctgggcttcttcaactacttcgagcgccacctcccgcatgtgggcttctttgagcccattgccgccgaggcgctagcgtcgtcggagctgcgtattgaccgccacgttgagctagtgtacaaggtgtttaacctcaagggcgacgtgcgcgccatgacgggcgtgcaggacgccgaggccgcgcggatgatcgccaacggccagcacagcgagctgctggacaagatctacagccagtacgcctcgtacaaggaggggcaggacctggtgctggtggaggggccaggcccgctcatgggcggcacggagctggacgcgcagatcgccgccgccctgaacgcgcccgtgctcatgactatgaccggccagcccaacgcgaccgttgccgactactacaaccgtgcgatggtgaagcggcaggtgttcctggaccaccacgtggaggtgctgggcctggtcatgaacgggctgccgcgccagtctcacgccatcctgtccggccagctccgggacaagttcgcggcggcggggctgcccttcgccggcgccatccccaccgacatcatgctgcgcaacgtccgcctggacgaggtccagaccgccatgggtgcccagcggctgtacggcgacagcctgctgacggacgtggagttcgacgacgtggtggtggccagccagcgcctggaggagctgctggagatcctggcggagaggcccatgggcaggccactcgtggtcacctccgcggaccgcctggacatcgtgctggggctgctggcggcacagctgtccgtgtcgggccccggcgtggccggcatcctgctgacgcaggccggctccgcccgctccggccgcaactacgcgcgtgacaccatcgaccgcatcttcgccggcctgtcaagcagcggcctgtacaagggcagcctgctgccggtgctggtgacggacatgccgctgcgtgacgccatcagaaagctggacaacctggacgccgccatcctgccctcatccacgcgcaagatctcgcagtgcaagcgcctgttcgagcagtacgtggacgccaacgcggtggtggcgcggcttcagaacatggtgcgccccaaccgcatgacgcccaagatgttcatgcacacgctcaagtccatgtgcaacgccacgccccagcacattgtgctgcccgagtcggaggacaagcgcgtgctggcggcggcggcggacgtggtgcagcgcggcctggccaagatcacgctgctgggagaccccaccaccatcctggccgaggcggccaagctgggcctggacctgtccggctgcaacatccacaaccccaacacctcggaccggtttgacaagtacgtggacatgctggtggaggcgaggaagaagaagggcatgacgcgcgaggtggcggccgacacgctgcacggcgacgtgaacttctttgccaccatgatgatcgtcgcgggcgacgccgacggcatggtgtcgggcgcggtgcacaccaccgcctccaccgtgcgccccgcgctgcaggtgctcaagagccccgacaccccgctggtgtcctcggtcttcatcatgtgcctgcccgaccgagtggtggtgtacggcgactgcgccgtcaacgtcaacccctccgccgccgacctggcgcagatcgccatcacctccaacgacaccgccgcggccttcggcatcgagccgcgcgtggccatgctgtcctactccacgctgggctccggctccggccccgacgtccagaaggtgagcgaggctgtggccatcgtgaagcagcggcggccggacatcaaggtggagggacccatccagtacgacgctgccattgaccccaaggtggcggcggtcaaggtgcagggcctaagcgaggtggcgggcaaggccaccgtgttcatcttccccgacctcaacaccggcaacaacacgtacaaagcggtgcagcagtccacgggtgccatcgccatgggccccgtcatgcagggtctactcaggcccgtgaacgacctgtcccgcggctgcacggtgcccgacatcatcaacaccatctgcgtcacctccatccaggcctcccgcatgtcatccgccgctcgcgccgcggctgccaaggctgccgtcgcggccgtttaa

SEQ ID NO: 230 - DNA, 1785 bp, Chlamydomonas reinhardtii
atgcaggagccggaccgcttgccgggcattgagtcggcgcatcgcggcggtggcacgccgcctcactttgcgtcgctcatgacggctggcggcagcggcaacggcgacggtgggctgacccctgcattctcgccattgcaatacgacttgactgaaatagcaggccttgactacctctcctcgcccagtggcgtcattgccgaggctcagcagcttgcggcgcaggccttcggcgcggaccgcacgtggtttctggtcaacggctgctccgccggcatccacgccgcagtcatggcggtagcggggccgggcgccggcagggcgcggcgccgccgccagcaagtgcaacacccacaagatatggacaacacatctggatctgcagatggacagactacgacatcagatgcgggcgggcagggggcggaacccgcttcggagaagccgggtgtgttgctggtggcgcgcaactgccacctgtcggtgttctcggcactggtgctgtcaggactggagcctgtgtggctggcaccggagctggacccacgggccggcgtggcgcactgcgtgacgcccggcacagtggcggcggcgctggcgggcgcggcggcggcggggcggcgggtcgcgggcgttatggtcgtgtcgcccacctacttcggagccgtggctgatgtgcgaggcatcgcccaggtgtgtgctgggtacgatgtgcctctgctggtggacgaggcgcatggcggccacttcgccttcctgccgccggcctcgctgccgccgccgcctccctccgcactgagctgcggcgccgacatggtcatgcagtccacacacaaggtgctgggagccatgacgcaggccgccatgctgcacctgcgcggcgagcgcgtgagcgcagcccgcacctcccgcgcgctgcagacgctgcagtcctcctcgccctcctacttgctgatggcgtcactggacgcggcgaggcagcaggcggcggcgggcggcgccttcgcggagccgtgtgcggcggcacaggtcatacgggaggctgtgtcgcgctgcagcctggtgcagctgctggacaaccagacggcacagggcgcatccaacagcggcagcagtactgaagtgggcggcagcagtcacgctggtacgagcagcagcaccctgcatgggcaccccggcagctcttgcaacgcggagtccatagcattcttcgacccgctgcggctgacattgttggtcgaccggatcgcggctgtaccagccgctgcagccgatggcagtagcaacagcgtgcgccggtgcagtggcagtagcgggttcgctgtgtcggagtggctggaggcaaggcacggcgtcgtgccggagctcgcaaccgcaaagacggtggtgctggcgctgggtcctggtagcacgctggcgcatgcgaggcaggcggtggcagcaattctggagctggaccggctggctgcagcggcaccgcaggactgggctggaggcggggtacaggcggagccgccacatgcaccactggcgccggacatggtgctgtcgccgcgagacgcctacttcgcggagacggaaagcgtgccagctgcagaggctgtgggccgtgccagtgctgagctgctatgcccctacccgcctggtgtgccggtgctgttccccggcgagcgaattacgccggcggcgctggcggcgctgcaggccacgttggcggcgggcggcactgtgactggggccagtgacagcagcctgatgcgcttcgaggtgctagtggttgactag

SEQ ID NO: 231 - DNA, 1146 bp, Arabidopsis thaliana
atggttgatcaagttcagcaccccactattgcgcagaaagctgccgggcagttcatgcgttcaagtgtttccaaggacgttcaagtgggttaccagaggccttctatgtatcaaagacatgcaacctacggaaactactccaatgctgcatttcaatttcctccgacatcccggatgttggcaacaactgcttctcccgtgtttgtccaaaccccaggagagaaggggttcactaactttgcccttgactttctgatgggtggtgtttctgctgccgtctccaagactgctgctgctcctattgaacgtgttaagcttttgatccagaaccaggatgagatgattaaagctggcaggctttctgaaccctacaagggtattggtgactgtttcggcaggacgattaaggatgaaggttttggttctctatggagaggaaacactgccaatgttatccgttatttccccactcaggccttgaactttgccttcaaagattacttcaaaagacttttcaactttaagaaggacagagatggttactggaagtggtttgctggtaacttggcatctggaggagcagctggtgcctcttcccttctgtttgtgtactcccttgactatgcccgtacccgtctagctaatgatgccaaggctgcaaagaaaggaggtggtggaagacagtttgatggtcttgttgatgtctacagaaagacacttaagactgatggtattgctggtctgtaccgtggattcaacatctcatgtgttggtatcattgtctaccgtggtctgtactttggactctatgactctgtgaagcctgttctcctcactggtgacttacaggacagtttcttcgctagtttcgctcttggatgggttattaccaatggtgcgggtcttgcatcctaccccattgacactgtccgcagaagaatgatgatgacgtctggtgaagctgtcaagtacaagagttctttggacgccttcaagcagatcctcaagaatgaaggagccaagtcactcttcaagggagctggtgccaacattctgcgtgctgttgcaggtgctggtgtgctttccggttacgacaaattgcagctgattgtcttcggtaagaagtacggatcaggaggtgcctaa

SEQ ID NO: 232 - DNA, 984 bp, Lycopersicon esculentum
atgtgtggtggttctataatctccgattacatagaccctagccggacttctcgccggctcaccgccgagtttctatggggtcgtttcgatctcggtaagaagcaaaaaaatcccaacaattatcactctaaagctaagcatttgcgatctgaagttgttgacgactttgaagccgattttcaggacttcaaagagttatccgatgatgaggatgttcaagtcgatgtcaagccatttgccttctctgcttccaaacactctactggttccaaatctttgaaaactgttgattcagacaaggatgctgctgctgataaatcctctaagagaaagaggaagaatcaatatagagggatcagacagagaccttggggtaagtgggcagctgaaatacgtgacccaaggaaaggggttcgggtctggctgggaaccttcaatactgcagaagaagctgccaaagcttatgatattgaggcgaggaggatcagaggcaagaaggctaaggtaaactttcctgatgaagctcccgcccctgcatcaagacacactgttaaggtgaatcctcagaaggtccttcctgaggagagcctgtattcacttcagtccgactcagcaatcatgaacagcgtggaggatgaccattatgattcttttggattttttgaagagaaacccatgacaaaacagtatggatatgagaatgggagcagtgcttctgcagatacgggatttggttcgttcgtcccttcagctggcggtgatatctacttcaactctgatgtaggaagcaactcttttgaatgctctgattttggttggggagagccatgctccaggactccagagatatcatctgttctgtcagctgctattgaatgtaatgaagctcaatttgttgaagatgccaattctcagaaaaagttgaaatcatgcaccaacaaccccgtagctgatgatggaaacccccgttactatggtacctga

SEQ ID NO: 233 - DNA, 390 bp, Glycine max
atgagaggtgttattgtcttattgttacattgtcacagaaaaatggcaaatagaattcccctagttgtgtcatacaaaaatttggtcaaacacctccactcaactagtgcgaaaaatgcaaatgctcgtgtgcatactcaaggtggtgattcaattgtaggagcatcagcacaaggggcagtgaaggcaacagaggtgttggagaatgtgggagaaagggctaaggagacagtggacacagctttggatgcagcaaagaagactacagagggtgtgacagagacaacaaccatggttgaggcagataacaatgttgtggacacagttgagtacagatgtactgaagatttgcggggccagcttggagatggccatgatagttataattga

SEQ ID NO: 234 - DNA, 327 bp, Zea mays
atgtcgggcgtgtgggtgttcaagaacggcgtggtgcgcctggtggagaacggcgcggcggtgggcggcgaggcggcggtgcggcggcggaaggcgctggtgcacacgccgagcgggcaggtggtgcggtcgtacgcggagctggaggcggagctgcgcgcgctgggctgggagcgctactacgaggacccggcgctgtaccagttccacaagcgcggctccctcgacctcatctccctccccgccgacttcgccaggttctcctccgtccacatgtacgacatcgtcatcaagaaccgcgactccttcagggtcgtcgacgtctga

SEQ ID NO: 235 - DNA, 1350 bp, Zea mays
atggcaaaggcgctactttcctcctccctcctccccgcgctgcccggcgctgccggaggcagccggagcgctgcgaggccgatgctgctcccaccgctccggttgcggcgcggccggcgcgccgcctccgcttgcgaggtgagggcgggcctgcacgggctcgactccgtcggcgggccccaccttcaggccgcgctggagcgcgccgaggcggcgctatacacactcgctgacgccgcggtcgccgccgcgggcgcgggggccgacgcaggccaggctgcggcggtccaaaagaacagcggctggttcggcttcatctccgaggccctcgaggtcgtgctcaaggtgctcaaggatggtctttctgcagtccatgtgccatactcctacgggtttgccatcattctgctcactatcattgttaaggctgcgacattgcctctaaccaaaaagcaggtggaatcaactctggcaatgcagaatttacagccgcagattaaggcaatccagcagagatacgcaggcaaccaggaaaggatacagctagagactgctcggttatacaagcaagctggtgtaaaccctttagcaggatgttttccaacgttagcaacaattcctgtatggattggtctttaccaggccctttcaaatgtagcaaatgaggggctattgacagaaggatttttctggattccatcactgggaggtcctacaacaattgcagctcggcaaagtggttctggaattacatggctcttcccatttgtggatggtcatcctccgctaggctggcatgacacgatatgctaccttgtattgcctgtgctacttgttgcttctcagtatgtatctatggagatcatgaagccacctcagagcgatgacccatcacagaagaacacaatgctcattttgaaatttcttccatttatgattggctggttctctttgtcagtgccatcaggattgtctatttactggtttacaaacaatgtcctcagcacagcccagcaggtgtggttacggaaaatgggaggagccaagcctgtagtgactgagggaggtagtggaataattaccgcaggacgagcaaaacgctctaatgctcaacctgccggagagaggtttaggcagctaaaggaagaagagaacaggagaaaattcagcaaagcactagctgcaggagattcagatgcatcgacatatgacatggatgatgaagagtcggatgagacgatagaagagggaggacctgtggaggaagcatctactagcagtgacaagaaacttccaagttactcagggaagaagggcaaaagatcgaagaggaagcgcatggtgcagtaa

SEQ ID NO: 236 - DNA, 558 bp, Arabidopsis thaliana
atggcgctacaaatccactctccgtgttccttctccacgagaccctatcatctcttcttcactaccagaaaccctagattcgcaatcaaatgtcaaaattcccaaatcgaatccgatacaacagaggatccatctcgttcaaagaattcaagctcttccggcgtaggattcggttcaccggcgtcttcttcttcgccggctaagaaattgagtgcggctacatcgggaaacaagaaagggaaaggtaagagagaggtgaatcggcgtgctcctgtggagaaacctgtgttcatgagcgaagaaggagcggccaaggcagaggagcagagacaaaacgaaaacgcgtttcttcttacttggcttgggcttggtatcgtcatcctcatcgaaggcattattctcgctgcttcaggattcctcccagaagagttggataagttgtttgtgaagtatgtgtatccagtgttcactccatcggttgtgttattcgtagctgggacaactgcatatggagttctgaagtacatacagaatgagaaaatgaagggtcaagagtag

SEQ ID NO: 237 - DNA, 822 bp, Zea mays
atggattccaaatccatggaagcatttgtggcaagtgaggcctccgtcttcatgaatcagccccctccacatatgtctagaccaacaattattatcaagctcattttgtggttgctgtggaccatcacccacttagcaatcagcattttaaatttatggtctcatctgatttatagtctagactgctatcttatttcatctggattgttgcggaagtatcagaatcttcatctgggtagactgaagtacttggctattgtggtagatagcaaagaagctaaaagtactgtgaaggtcaagcgactgttatgctggctctcatctatgggtgtgaagtatgtatgtctctacgacattgagggagttctgaagaaatcttttgaacctgctgtgaatgtttcaagagataggactgcaggagaacattttggcattggagcaaacatcaaagatctacactgtagccaaagagagatgatgatagattgtctttctggctctgatggcaaggagggtattgctaaagcagccagtttactttgctcaacttacctcaatggtgatactcatggagatgacaaaaggaaaccagcatttacagaagctgacatggctggtgcactgaaggctgtaggttgtggtggaccagaacctgatctccttctcatgtatggtcctgctagatgccatttaggatttcctacatggagattacggtatactgaaattatgtatatggggccactgaaatcaatgaaatatggtgcaattgtgaaagccttatataacttctcaaagaaacaccaaaattatgggaaatga

SEQ ID NO: 238 - DNA, 483 bp, Zea mays
atgtcggactcggaggagcaccacttcgaatcgaaggccgacgccggagcgtccaagacctacccgcagcaggctggcaccgtccgtaagaacggcttcatcgtcatcaagaaccgcccctgcaaggttgtggaggtttctacctcaaagactggtaagcatggccatgccaaatgccactttgttgccatagacatattcaacgggaaaaagctcgaagatattgttccttcgtcacacaactgtgatattccgcatgtgaaccgtactgagtaccagctgattgatatatcagaggatggatttgtgagccttcttacttcagatggcaacactaaggatgatcttagactcccaactgatgagactcttgtggcccagatcaaggaagggtttgaaagcggcaaggatcttgttgtgactgtccagtctgctatgggggaggagcagatctgcgcgctgaaggatgttggccccaagtaa

SEQ ID NO: 239 - DNA, 1428 bp, Vicia faba
atgacaatggaggagaaggaagaacactctacagaagctgcagttacttcacacaatgactccaaattgttcgacgatgacgaccgtgttaaacgaacaggaacggtttggacaacaagttcgcatataataacagcagtagtaggatcaggagtgttgtcgttggcatgggcgatagctcaattgggttggataattggtttatcagtcatgattttcttcagtctcatcacttggtatacttcatcactcctatccgaatgttatcgaacaggagatcctcatttcgggaaaagaaactatactttcatggaagctgttcacaccattctcgggggtttctatgacaccctttgtgggatagttcagtacagcaatctttatggaactgcagtaggatacacaattggtgcttccattagtatgatggcaataaaaaggtctaactgtttccattcctcgggaggaaaagatggatgtcgcatttcaagcaatccatacatgatcagttttggagtaatccaaattttcttttctcaaattccagattttcatgaaatgtggtggctctcaattgttgcagcaatcatgtctttcacctattcattaattggccttggtctcgcaattgccaaagttgcagaaaatggttccttcaaaggtagtatcacaggagtaagcattggaactgtgacagaagcccaaaaagtatggggagttttccaatctcttggcaacatagctttcgcgtattcatattcacaaattctcattgaaattcaggataccataaaaagtccaccttccgagatgaaaacaatgaagcaagccacaaagataagtataggcgtgacaacgatattttacatgctttgcggcggtatgggctatgctgcatttggagacttgtcaccaggaaacttactcactggatttggtttctataatccatattggctcattgatattgctaacgccgctctcataattcatcttgtgggagcataccaagtttacgcgcaacccttatttgctttcgtcgagaaaataatgataaaaagatggcctaaaataaaaaaggaatacaaacttacaattcctggttttcgtccttaccatctaaatctatttagattaatttggaggactatatttgtgatcacaacaacatttatatcaatgttgattcctttcttcaatgatgttttgggattaattggagcagctggattttggcctttaacagtttattttccagtggagatgtatatcaaacagaagaagattacaaaatggagttataaatggattagtatgcaaactttaagtgttatatgttttgtagtatcagttgtggcttttgttggatcagtgtcaagtattgtggttgatcttaagaaatacaaaccattcacaactgattattag

SEQ ID NO: 240 - DNA, 666 bp, Glycine max
atgaagaactgcgagttgtgcaagcttccggctcggactttctgcgagtcggaccaggctagcttatgctgggactgcgacgccaaggttcatggagccaacttcctcgtggaaagacacacgcgcacgctcctctgccacgcgtgccagtcgcccacgccgtggaaggcctccggcgccgccctcggaaacaccgtctcgctgtgcgagagatgcgccggcggaaccaccgaacaaggtcaagagagccaaggaggcaatgacgacgacatagacaccgacatagacaccgacgatgaggatgactacgatgagagcgaggacgaggttgccgccgacgaggaggacggagacaaccaggttgtcccttggtcctccgagccgccgccaccagccccgagctcttccagcagcgaagaatcggttagccggtgcaacaacgtggacgaggtttcgaccacattgaaacgccgtcgccaggaggacaatgattttcagggttggaattcgaataattggggatgtgaacggagcgaagtggagagaggaggttggttggttcggttgcggcggagaaccgccgatgatgtggcggttgagcaacggagtgctagagcggcgtctccagacggttgctgtggtgatagagcatctgaagacgtttga

SEQ ID NO: 241 - DNA, 1845 bp, Arabidopsis thaliana
atgtcttgcctagagatttataacaaagacacgatgaagaagaaagaaggagaagaagaaacaagagatgggacagtggattactatggtcgtccctctattcgttctaactcaggccaatgggttgctggcatcgtcattcttctgaaccaggggctggctacactagccttctttggagttggagtgaacttggtgctcttcctaactcgcgttttgcagcagaacaacgcagacgcagctaacaacgttagcaaatggacagggactgtttatatcttctcattggttggagcgtttctcagcgattcgtattggggtcgttacaagacttgtgctatcttccaagtcatttttgtcattggactttcatcgctatcgctatcatcatacatgttcttgattagaccaagaggttgtggggacgaagtcacgccttgtggttcacattccatgatggagatcacaatgttctacttctcgatctacttgatcgcattgggatatggcggttaccaaccaaacattgcaacgcttggagcggatcagttcgatgaggagcatcctaaagaagggtactcgaagattgcgtttttcagctacttttaccttgctttaaacctcggatcgctcttttcgaacaccatcttggggtattttgaggatgagggaatgtgggcactcgggttttgggcatccactggctctgctatcattgggttgattcttttccttgttggaacaccgagataccgatatttcaagcccacggggaatcctctttcgaggttttgccaagttttggtcgctgcaacgaagaaatcatcggtggaggcaccattaagagggagagaggagatgtatgacggagacagcgaagggaaaaatgcttcagttaacacagggagaaggatagtgcataccgatgaattcaagttcttggacaaagcagcgtacatcacagctagagatctagatgacaagaaacaagactcagtgaacccatggaggctctgtccagtgacacaagtcgaggaagtcaagtgtattcttagactgatgccaatttggctctgcactataatctactcagtcgtcttcactcaaatggcctctctctttgtggagcaaggcgctgcaatgaatacctctgtctcagatttcaaaatccccccggcaagtatgtccagcttcgacatccttagcgtcgctttgttcatattcctgtaccgcagagttctcgagccagtagccaacagattcaaaaagaatggatcaaaaggaatcaccgagcttcacaggatgggaatcggacttgtgattgctgtcatagctatgattgcagccgggattgtggaatgctataggcttaagtatgcagacaagagttgtactcactgtgatggctcaagctccttaagcatcttctggcaggctccacaatactcactcatcggggcatcagaagtgttcatgtacgtgggtcagcttgagttcttcaacgcgcaaacaccagacggactaaagagcttcgggagcgctctgtgtatgatgtcaatgtcaatggggaactttgttagtagcttgttggtaacaatggtggtgaagatctcaacagaggatcacatgcctggttggattccaaggaatctcaacaaaggtcacttagacagattctatttcctcctggctgcgttgacgagcattgacctggtggtatacattgcatgtgcaaaatggtacaaacctatacaactagaaggaaaagatgagatgcaagacatgagtgatgatgactatgacaccgagagtgaagaggaacgagagaaggattctaaagtctaa

SEQ ID NO: 242 - DNA, 483 bp, Physcomitrella patens
atgagctcgcgagggggcagcgacgacgaggacgaagggacggcgcgcaagaagctgcggctgtcgaaggagcagtcggcgctgctggaggagagcttcaaggagcacagcacgctgaacccgaagcagaagaacgcgctggcgaagcagctggggctgcggccgcggcaggtggaggtgtggttccagaacaggagggcgcggacgaagctgaaacagacggaagtggactgcgagctgttgaagcgatgtgtggagacattgacggaggagaacaggaggttgcagaaggagctgcaggagctgcgagcgatcaaggtggcgccaccgtgcgtgatatcgcacgatttctacatgcctctgcccgcggcgacgctgacgatgtgtccatcatgcgagagagtagcgacggtggacaacaggtcgctgacgtttgcgaagccaggattttcacatctttcacagtcaagcgcagcttgctag

SEQ ID NO: 243 - DNA, 819 bp, Arabidopsis thaliana
atggaatccaattcgtttttcttcgatccatctgcttcacacggcaacagcatgttcttccttgggaatctcaatcccgtcgtccaaggaggaggagcaagatcgatgatgaacatggaggaaacttcgaagcgaaggcccttctttagctcccctgaggatctctacgacgatgacttttacgacgaccagttgcctgaaaagaagcgtcgcctcactaccgaacaagtgcatctgctggagaaaagcttcgagacagagaacaagctagagcctgaacgcaagactcagcttgccaagaagcttggtctacagccaaggcaagtggctgtctggtttcagaatcgccgagctcgttggaaaacaaaacagcttgagagagactacgatcttctcaagtccacttacgaccaacttctttctaactacgactccatcgtcatggacaacgataagctcagatccgaggttacttccctgaccgaaaagcttcagggcaaacaagagacagctaatgaaccacctggtcaagtgcccgaaccaaaccaacttgatccggtttacattaatgcggcagcaatcaaaaccgaggaccggttaagttcagggagcgttgggagcgcggtactagacgacgacgcacctcaactactagacagctgtgactcttacttcccaagcatcgtacccatccaagacaacagcaacgccagtgatcatgacaatgaccggagctgtttcgccgacgtctttgtgcccaccacttcaccgtcgcacgatcatcacggtgaatcattggctttctggggatggccttag

SEQ ID NO: 244 - DNA, 819 bp, Arabidopsis thaliana; identical to SEQ ID NO: 243

SEQ ID NO: 245 - DNA, 819 bp, Arabidopsis thaliana; identical to SEQ ID NO: 243

SEQ ID NO: 246 - DNA, 885 bp, Zea mays
atgaagaggccgaccagcagaggttcttcaatggtcagcgggcaagcaaccacagatctacaagaagatagctgcaggtccatggagccgcacggagtggacggcgatgctacggccgcggctgagcgcgacgacgtggacgccggggcgtacgacgaggaggtggacgaagaagaggagctcgcagggtcccgcggcggcctcggggagaagaagcggcggctggcggcggatcaggtgcgcgccctggagcggagcttcgaggtagacaacaagctggacccagagcgcaaggcccggatcgcgcgcgacctcagcctccacccgcgccaggtcgccgtctggtttcagaaccgccgcgcgcgctggaagaccaagcagatcgagcgcgacttcgccgcgctccgcgtgcgccacgacgcactccgcgtcgagtgcgacgcgctccgccgcgacaaagacgccctcgccgccgagataaaggagctgaggggcatggtggaaaagcagatggaggtgaagctggagtccgcggcggaggagctgctgccggtggcgacgaggtcagcagcagcagccgctgtgtataacaaggacgggtcgacggacagcgactcgagcgccgtgttcaacgaggaggcgtcgccctacccttactccggcgcggccttagaccatcagcagcagcaagaaaccagccacccgctgggcttcacgggtttcacctccttcttgacgtcctctttcccttccgtataccatggggattcgcatttggaccaggaagcggacggcttcttcagcgccgccgccgccggcgacggattcttcgccgaggagcagagcgcaggcatcggcagctggtacggcggtgagggttggtag

SEQ ID NO: 247 - DNA, 1176 bp, Zea mays
atgagaggtttaagtcggtatctgccgttctgcggcggcgggtgctgctgcggtgacggcgccggtagggcagggggcgtggcggatgggctggtgtgggacgtggccctcaaggcgcacgcgtccggtgactactccatcgccgtggcgcaggcgaacgaggcgctcgaggaccaggcgcaggtggtcgcggctccggccgccacgctcgtcggcgtcttcgacgggcacggcgggcccgaggccgcgcgcttcgtcaacaggcgcctcttctcgcatatccaagcctttgcggctgagaacggtggcctgtcagcggaggtgttccagaaggccttcggcgcgacggaggaggagttcataggcctggtgcagaaatcatggccgtcgcagccgaggatcgtgtccgtgggctcctgctgcctggtgggcgccgtcgacatcgagaacgggacgctgtacgtggccaacctgggcgactcgcgcgccgtgctgggccgccgccggggcaaggggaggcgcgtggtggccgagcggctgtctcaggaccacaacgtggccgacgagggcgtgcggcgggaggtggccgagatgcacccggacgactcgcacatcgtgctcaacagccacggcgtgtggcggatcaaggggatcatccaggtgtccaggtccatcggcgatgtgtacctcaagaagcctgacatctgcaggggcaacccggtgctgcagcagtccatctgcccgttcccgctgcgccgccccgtcatgaccgccgtgccgtccatcaccacgcgggagctgcgccccggcgaccgcttcatcatcttcgcgtcggacgggctgtgggagcagctcagcgacgacgccgcggtggacgtcgtggcgagcagcccgaggaagggcgtggccatgcgcctggtgcgggccgcccagctggaggcggcgcgcaagaaggaggtcaagtacgacaagatccggaccatcgagaagggccagcgccggcacttccacgacgacatcaccgtcgtcgtgctcttcctcgacaagtgcaggggagctgccaggtccggccccgaggacatcgacggcacctacgcgccggtggacgtgttctcctgcagccccgccgccggcggcgatcacgaggacccgacgaagcccgtcctgcgtcgttag

SEQ ID NO: 248 - DNA, 1140 bp, Zea mays
atgctaggcccgctcctcaggctcctctcggcgtgcggcggggtctggcccacctcgccggcccccggcgccgcggcctcctcttccgcctcctccggggacgactctgagggccgcgacggccttctctggtggcgcgacctcgcgcgctgccacgccggcgacgtctccgtcgccgtcgcccaggccaaccaggtgctcgaggaccagtgccgcctcgactccgccccgtccatcggcaccgtcgtcggcgtcttcgacggccacggcggccccgacgccgcccgcttcgcctgcgaccaccttgtccccaacctccgagaggcgtcctccggcccgcggggcgtcaccgcagacgccatcagggaggccttcctggccacggaggaaggattcctcgcgctcgtgtcaagcctctgggaggcccagccggacatcgccacggccgggacatgctgccttgtcggcgtcgtgcacaacaggacccttttcgtcgccaacctcggcgactcccgggccgtcctcgggaagaaggcgggccgcgctggccagatcgccgcggagcagttgtccagcgagcacaatgccaaccaggaggctgtcaggcaggagctcatggcgcaacacccagatgatgctcagattgttgcgctcaagcatggggtctggagagtgaggggcctcatacaggtgtctagatcaatcggtgatgtatacctgaaacatgcaaagtataacacagaccagatcaaacccaagttcaggcttcccgaatcattcagcaagccactattgagtgccgatccatctatcatctcccgcgatcttgaaccaaatgactgtttcatcatattcgcatcagatggattgtgggagcacctcagcaatcaagaagccgttgagattgttcacagccatcaacgtgctggaagcgcaagaagactcattaaagccgctctacaagaagcagcgcggaagcgtgagatgcgttactcggatcttacaaagatcgataagaaagttcgcaggcatttccatgatgacattactgtcatcgtcttatttataaactatgacctattattgaaaggtgctccgcagggacaacccctctccatcagatgtgccctagattattga

SEQ ID NO: 249 - DNA, 1131 bp, Oryza sativa
atggttgggcagacggtcatgcggattgtgcgcccctgcttcaagcccgaccaccagctcgccgtcggcggcaccagggatggattgctctggtacaaggacaccgggaggcacgcttgcggcgacttctctatggccctcgtgcaggcaaacaaccttctcgaggatgccagccaggtcgaagctgcccctcttcttctctcccactcctcctccaccacttttgtcggcatctacgatggccatggtggcccggagactgctcatttcatcgcacaacatttcttccccaatctaaagaaatttgctacggaacagcaaactgtttcagttgatgtcattcgcaaatcctatgctgccacggaggaagggtttctcaatcttgtaaggaagcaatggctcatcaaaccgcagcttgcctccgttggttcctgctgtttggttggcatcatcaatgaaggagttctttatgtagcaaatactggtgattcccgtgctgttctagggagacttgaaaggggtgttattaaggcggttcagctgtcagccgagcataacgcaagcattgagtctgtaagggaggaattaagacagtttcacccagacgatccacgaatcgtggtcctaaagcacaacgtttggcgtgtcaaaggccttattcaggtttccagaacgttaggcgatgcttacctaaaaagtactgaatttaaccgagagcctcttttggcgagattccggctttcagaacccttccacaaaccaattctttctccagaaccatccatagaagtacataaactgtgtacagaagaccaatttgtgatatttgcctcagatgggctatgggagcacctgaccaatcaggaggctgtggatatagttaactgtgcgccaagaaatggtattgcaagaagactaataaaagcggctctgcgagaggcagcaaaaaaaagagaaatgaggtactcagacttgaaaaagattgatcgcggggtcaggagacactttcacgatgatattactgttgtagtactattcctggactctgctctagttggcaagagattctatggtggcccattactttcactgaggggtggtgatggtgcttcaacgcttacacagaaatag

SEQ ID NO: 250 - DNA, 1149 bp, Arabidopsis thaliana
atgccgatcaacgatcagtttcctagtgggttaagaatactcgttgtagacgatgatacttcatgcttgttcattctcgagaaaatgcttctccgtctcatgtaccaagttacaatttgctcacaagctgatgttgcgttaaccattctaagagaaagaaaagacagttttgatttggtgctaagtgatgttcatatgcctggtatgaatggttacaatcttcttcaacaagttggtcttcttgaaatggatcttcctgtcattatgatgtctgttgatggaagaacaactacagtcatgactggaatcaaccatggagcttgtgattatctaatcaaacctattcgtcctgaagagcttaagaacatttggcaacatgttgttagaaggaaatgtgtgatgaagaaagagcttcgaagttctcaagctttagaggataacaagaacagtggtagcctcgagactgttgttgtttcggttagtgaatgctcagaggaaagtttgatgaaatgtaggaataagaagaagaagaagaagagaagtgttgatagagatgataatgaagatgatcttcttcttgatcctggaaactcgaagaagtcacgcgttgtttggtctattgaattgcatcaacaattcgttaatgccgtaaacaaacttggaattgacaaagctgtaccaaagcggattctcgagttgatgaatgttcctggtttaagcagagaaaacgtggctagtcatttacagaagttccgattgtatttgaagagattaagcggtgaagcttcgcagagtaatgactctgagtctaccaaaagatatgaaaacattcaagctctggtttcctcaggacaattacatccacagacattagctgcattgtttggtcaaccaatagacaatcatcactctgctagttttggagtttggattcctaatgacaatcttggtagatctcaaaatgaacacttctcggttgatgtatcatccgcttctaaccgtcctgtttctgtggcggttcatggtctatcttcctcagcaaatttcagacagagaggtgacgttaacaacaacagaatcagacaagggtatggatcaaatgtcaatgaagaatcttggatcttggaaagatcttcaagacaaagatag

SEQ ID NO: 251 - DNA, 957 bp, Oryza sativa
atgacggcgcgaagcatgttgcggaaccacccggaggcgtcggtgctcgacaccatccggcagcacctgctggaggagccgcgcggcggcggcggtggcgaggcggcggaggcgagcttcgggagcctggtggccgacatgtggagcgactcgctgccgttccgcgacgacgacgccgacgacatggtggtgttcggcgcgatgcgggacgcgttctcgtgcgggtggctgcccgacggcgtgttcgcggaggtgaagccggagcccctgctctcgccggactcgtcgtcgtacgacgggtcctcttgctgcttcggcttcgcggacgtgtcggagccggtgacgccgagcgacgcggcgtcgggggcggcagaagcggcggccgcggcggcggcggcgacggcggagcacgggaaggaggaggaggccgcggctgcggtggcgagggggaagcactacaggggggtgaggcagcggccgtggggcaagttcgcggcggagatccgggaccccgccaagaacggcgcgcgcgtgtggctcggcacgttcgacaccgccgaggacgccgccctggcgtacgaccgcgccgcctaccgcatgcgtggctcccgcgcgctcctcaacttcccgctccgcatcggctcggagatcgcagccgccgccgccgccgcagcggcagcggcagccggcgacaagcggccgtcgccggagccggcgacctcggagtcgtccttctcctcctcatcctcctgcaccaccaccaccacctcctcctcaacctcctcctccggctccccgaaacggagaaagagaggcgaggccgcggccgcgtccatgtccatgcccctggtgcccccgccttcccagctgaactggccggtgcaggcatggtaccccgccgccgcaccggtcgagcaggtggcgatcaccccgcgcgtggagcagctcgtcatctaa

SEQ ID NO: 252 - DNA, 1149 bp, Arabidopsis thaliana
atggagcttccgttactctcgtatgctagctccgcgtcgttttcacggacaggcttatgctcttcttcttcttcctcctcaactagtatctatgagtttccggagagaagacggagtttaaaattgagattcaatggtggagaaaggtcacgaagcgttatagcttccgctgaacggagcagtgaagggattgagaagacaacagacaccgtcggtggcggaggaggaggaggagcaggcagatttgctggtactgccatggaggttactacacttgatcgtggttttgctaactccaccaccgttgattttccgatctgggacaaaatcggcgccgtcgttagacttacttatggaatcggaatatatggagcaatggctgtagcaggaagatttatatgttcagtgactggaattgattcatctggtggatttgatccttctcttgatgcactacttgctggacttggctatgcaacaccaccaatcatggctcttctcttcatactcgacgatgaagttgtgaagctatcaccgcatgctcgggccattagagatgtggaagatgaagaactaagaagctttttcttcggaatgtccccatggcagtttatactcattgtcgcggccagttcaataggagaagagctcttttaccgtgttgctgtacagggtgctctgtctgatatattcttgaaaggaacacagttgatgacagattctagaggcatggcatctctgaccggagtgtttcctccatttgtcccatttgctgaagtctttgcagctgtaatcaccgcgactctcacaggctctctctactttcttgctgcgtctccaaaagacccgacatacatagttgccccggttttaaggtcacggcgagatgattttaagaagcttttgtcagcttggtatgagaagagacagatgaagaagatttactctccactccttgaaggactcttagccctctatctcggtattgaatgggttcagacggataatatattagcaccgatgatgacgcatggtatatactcggcggtcatattagggcatgggctgtggaaaattcacgatcaccggagaaggttacgccggagaatcgaacacattagatcggaggccacggataagttgatttaa

SEQ ID NO: 253 - DNA, 1347 bp, Zea mays
atgccattccgtagcatcgtgcgtgatgtaagggatggtttcgggagcttgtctaggaggggatttgaggtcaggtttctgagtcatcgcagagggaaatctcatggtgctgtccatgagctgcacgacccagtgcttgtggtacagagtagctgctgggctagcttgcctcctgaattacttcgagatgtgattgagaggttggagaccagtgaggatacatggccttctaggaaacatgtagttgcttgtgcagctgtctgcagaacatggagagagatgtgtagagagattgtcaagagcccagagttttctggaaaaatcacttttcctgtttccttgaagcagcctgggcctcgagatggaactattcagtgttttattaagagggataaatctacccaaatctacagtctgtaccttagttttagctctgccgtgcctgtcgaaaatggcaaattccttctatccgcaaaaaggaactgccgtgcaacatatacagaatatataatatcaataaattctggtgatacatctaggtgtacaagtaacaacacatacattgggaaattaaggtcaaatttccttggcacaaaatttgtaatatacgatactcatccgccatacaatggaactagtcaaacagtggcagggaaaacaagtcagagattctactccaagaagggatcaaccaaggtttcttgcaggtggtacagtattgcacaaatctcatacgagctgaatgtcttgggaactcgaggcccaaggcggatgaactgtgtaatgcactccatcccagcttcatgccttgaggctggtggcagtgtcccttgccagccggacagcattgcagcccactctgttggcggatcattcagcagtgtgtccttgtcaaagtcatcgactatggaccactctatgcatttcaccagttcccggctctctgatgccataacaggagatggcattgtgaacagaggccaggcattgaatgatgctgacgatgaagagtgcaaggacatgcctttgatcctccgcaacaaggccccaaggtggcacgagcagcttcagtgctggtgcctcaacttccggggccgggtgactgtcgcctcggtcaagaacttccagctagtcgcggcgacacagcctgccgccggagccctgaccccatcacaggcagccccgcagccagctccgcctcctccgccggaccaagagaaggtcatactgcagtttgggaaggtcggcaaggacatcttcaccatggactactgctacccgctgtcagccttccaggccttcgccatctgcctgagcagcttcgacaccaagttggcctgcgaatag

SEQ ID NO: 254 - DNA, 1785 bp, Arabidopsis thaliana
atggcttcgggtggtggtgacgatgggcttcgtcggcgaggctgttcatgcacaaaagacgatttcttaccggaagaatcgttccaaagcatggggaattacctaaaagcccttaaagaaacaccgagtcggttcatggatcgtattatgactcggtcactagactccgacgagattaacgagatgaaggctcgtagtggtcacgagatgaagaagacgttgacgtggtgggatctcatgtggtttggtatcggtgcagtcatcggctctgggatattcgttctcactggactcgaagcacgtaatcattccggtccagccgtcgtgttgtcttacgttgtctctggtgtctccgccatgctctccgtcttttgttacaccgagttcgccgttgagattcccgtcgcaggcggttcttttgcctacttaagagtggagctcggcgacttcatggccttcatcgccgcgggaaacataatcctcgaatacgttgtcggtggagctgccgtggctcgatcgtggacctcttacttcgccactctcttaaaccataaacctgaagacttccgcatcatagttcacaaactcggcgaagactatagccacttagatccaatagccgtcggcgtttgcgccatcatttgtgttttagctgtcgttggcacaaaaggctcctcaagattcaattacattgcttctataatccacatggtcgtgattctctttgttatcatcgccggatttactaaagccgatgtgaaaaactacagcgatttcactccttacggcgttagaggagtgtttaaatccgccgcggttcttttctttgcctatattggatttgatgcggtttcaacgatggctgaggagacaaagaatccagggagagatattcctattggtcttgttggatcgatggtggttactacggtttgttattgtctcatggcggttacgttgtgtcttatgcagccgtatcaacagattgatccggacgcgccattctcggttgcgttttctgccgttggatgggattgggctaagtacattgtcgcctttggggctcttaaaggtatgacgacggttttgttagttggggccattggtcaagctaggtacatgacacacatagcccgagcccatatgatgcctccatggctagctcaagtcaacgcaaagaccggaacaccaattaacgcgaccgtggtaatgcttgccgcgacagctctcatagcattcttcacaaaactgaaaattttagccgatctcttgtctgtttccacacttttcatcttcatgttcgttgctgtggctcttctcgttagaagatattacgtcaccggagaaacatcgacccgtgaccgtaacaagtttttagtgttcttaggtttgattcttgcgtcctctaccgcgactgctgtttattgggctttggaagaagaaggttggattgggtattgcattacggttcctatatggtttctgtctacggttgccatgaagtttcttgtaccgcaagctagggctccgaaaatttggggtgttcctttggttccgtggttgccttctgcttccatcgctattaatatcttccttcttggttccatcgatacaaaatcgttcgttaggtttgcaatctggacaggtattctgctcatatattacgtcttgtttgggttgcacgcaacgtatgatacagctaaggcgacgttgaaggagaagcaggcattgcagaaagctgaggaaggtggtgttgttgctgataattcttgttctgcaacttaa

SEQ ID NO: 255 - DNA, 1752 bp, Arabidopsis thaliana
atggaggtccaaagcagcagcaacaatggtggtcactcttctttctccagtctccgcgtctacctcaactctctttccgcgacgccttctcgcttatcccgccgcgctatttccgtctccacctcttccgacgagatgagtcgcgtccgcgccgtctccggcgaacagatgcgccgtactctccggtggtacgatctcattggactcggaatcgggggaatggtcggcgccggtgtctttgtcaccaccggccgtgctagtcgtctcgacgccggtccttcaattgtcgtctcttacgccatcgccgggctctgcgctctcctctccgctttctgttacaccgaattcgccgtccatctcccggtcgccggcggtgccttcagctacatccgtatcacattcggtgaatttccagcatttttcaccggagcaaatcttgtaatggattacgtaatgtcaaacgcggccgtttcgagaagcttcaccgcttatttaggaacagctttcgggatctcaacttccaagtggcgattcgtcgtctccggtttaccgaaaggattcaacgagattgatccagtcgcagttctcgtcgtcctcgtaatcacagtcatcatctgttgcagtacaagagagagttccaaagtgaacatgataatgactgcatttcacatcgcattcatattcttcgtgatcgtgatgggattcataaaaggagattcaaagaatctatcctcaccggcgaatccagagcacccctcgggattttttccgttcggcgcggcgggagttttcaacggagctgccatggtttacttaagctacataggatacgacgccgtttcaaccatggcggaagaagttgaaaatccggtcaaagatatccccgtcggtgtttccggctccgtcgcaatcgtcaccgttctttactgtctcatggcagtctctatgtcaatgcttctgccatacgatctgatagatccggaggcgccgttttccgcggcgttcagaggatcgaacggctgggaatgggtgacgaaagtggtggggataggagcaagctttgggatattaacatcacttttggtggcaatgttaggtcaggctcgctacatgtgtgtcatcggacggtccagagtggtccccttttggttcgctaagattcatcccaaaacatctacgccagtcaacgcctccacttttcttggcattttcacggcggctcttgcgcttttcaccgacctaaacgtcctcctaaacctcgtatccattggaacactatttgtcttctacatggtcgcaaacgctctcatcttcagacgttacgtcccggttggacccaccaagccgtggcccacactctgcttcctcacactattctccataacctctctcgtcttcaccctcatctggaaacttgtgccggaaggtaagcctaaagctttcatgctcggtgccagtgcggtggtggctatagccatcgtgctgagctttcagtgcgtggttccccaggctaggaaacctgagttgtggggagtcccgttcatgccgtggaccccgtgcgtgtcgatattcttgaacatttttttgcttggttcgttggacgcaccctcttacgtccggtttggattcttctccggtttgatcgtgctcgtgtatttgttttatggcgttcatgcgagttctgatgctgaagcgaatggatcttttggtgtgaaagatggacaagtcatgaaagagctaattgaagtgtga

SEQ ID NO: 256 - DNA, 840 bp, Chlamydomonas reinhardtii
atgcagcagcagcagcaacaacaacaaccgacgtcggcactgtactcgatgagtatgctcgacccggcgcatcggcgggaccccgtggaaaagtcggaaccgttcacaaagctgcggatgttcctggactcggcgagcattaccaactgggagctatggatgagcacgcgtctgttctatggcatcaccactaaccctgccatcctagagaaggacggccagcgctgcacgctatccaacctgcaacggctgtgccacataggcgaggagctaggagtcaaggagatgcagttccaggcgtggggagacagcgctcagtccatggtgtcggtggctctggacctgtttgggatgaaccccgaactagtggtggtgaagctgccgtgcacgctggagggcttccaggcggcggcgctgctgcgggagagctccgtgcgcatcaccttgacaggcatctacacggcgtcccaggtgctgctggctcagtcggtgggggccgagtatgcagcgccgtacctgggccgcatgaacgacgcgtacggcaacaacaagggcttcaaggaggtggttgagatgcagcgcatcctgcacgcccagaaggcccgcacacggctgctggtggcgtcggtgcgtgagccgtcggccatggccagcctggccgcagagggctgtgacaccttcaccatctcgcccgccgttgccggcaagctgtttgcggtgagctacacactggatgctgttgaggccttcgaggcgtccgcgcgccgcatgggagcgtacgaccaggacgagggcgcaaccacctccacattgttccaccgccacggcaacaaccactag

SEQ ID NO: 257 - DNA, 1302 bp, Chlamydomonas reinhardtii; identical to SEQ ID NO: 228

SEQ ID NO: 258 - DNA, 1785 bp, Chlamydomonas reinhardtii; identical to SEQ ID NO: 230

SEQ ID NO: 259 - DNA, 468 bp, Arabidopsis thaliana
atggaaactttacaatgtcgtcatcagcatgtcttcattttgcttcttgtcctatttcattcctctctgtttgttttagcttcaaagatcgatgtttctgacgatgcacgaggcatcagaatcgacggtggccagaaacgttttctaactaattctcctcaacatggcaaggaacatgcagcgtgtacgaacgaagaacctgatctcggtccgctgacgcgtatttcttgcaatgaacctgaatatgttattacaaagatcaatttcgctgattatggcaatcccactggtacatgtggacactttagacgtgacaattgcggtgcacgagctaccatgaggatcgtcaaaaagaattgtcttggaaaagagaagtgtcaccttttggttacggatgagatgtttggtccgagcaagtgcaaaggagctcctatgctcgctgttgaaaccacttgtacaatagcttag

SEQ ID NO: 260 - DNA, 501 bp, Arabidopsis thaliana
atgcgtttgctagtagcagaagcagcttcaccattgtcctctgctgcaactccaacatgtaactctcatacttgcagatggaagccttactcaaactctactgacttcacagctaatgcatcagtccttctcatccttgtcatctctgctctcatttgtgctctctctctttacgctgcaattcgttgctttctccgaccaaccctcgagactgaagacgaccacaagcctgaccctgaagcagctgcttcatccactccaacaactcctacacttgtctactcctccgaccttgaactcgcaggagctgaagcagagtgtgccatttgcttgtcggaatttgaacaaggagaaagcattcaagtgctggagaaatgtcagcatggtttccatgttaagtgtatccacaaatggctctctactcgctcctcctgtcccacttgcagaacttctatcttctcacaacactctgaaactccttcaagccacatcaatgcttag

SEQ ID NO: 261 - DNA, 1311 bp, Arabidopsis thaliana
atgggttttcagaacgaagctagctcctcctcttatacccttaaaatacctccaccggccagagaggacacgcctcttctcggcaagggacctcccctctccagccagtttaagaccttcgccaacgtcttcatcgctgtcgtcggcgctggtgttcttggtcttccttacgccttcaagcgaaccggatggctcatgggtgtcctcctcctcgtctccgtctctgttttgacccatcactgtatgatgcttcttgtctatacccgccgcaagctcgactctttcaatgctggcatctccaagatcggctcttttggtgaccttggattcgccgtctgcggctccttggggaggatcgtcgttgacttatttatcattctgtctcaagctggtttttgtgtcggatatcttatcttcatcggcactactttagctaatctatccgatcctgaatcgcccaccagtctgaggcatcagtttacaaggctgggttctgaattcctgggcgtgtcttctaagagtctctacatatggggatgctttccctttcagctcggtttgaattcgatcaagacgctcactcacttggctcctctcagcatcttcgccgatattgttgatcttggcgctatggctgtggtcattgttgaggattccatgattatactcaagcaaaggcctgacgtggttgcctttggtggtatgtccctcttcttgtatggtatgggcgtcgctgtctattccttcgaaggcgttggaatggtcttgcctcttgaatcggagatgaaggacaaggacaagtttggcaaagtcttggctctcggcatgggattcatctctctcatatacatcgcatttggtatcttaggttacttggcttttggtgaggacaccatggacattatcactgctaacttgggggcaggacttgtcagcactgttgtccagcttggactgtgcatcaacctcttcttcaccttccccttgatgatgaatccagtgtttgagatagtggagaggcgtttctcacgcgggatgtactctgcgtggctcagatgggtactcgtcttagcagtgactctggtggctctttttgtgccaaactttgcagattttttgtcattggttggcagcagcacttgctgtgtgttaggctttgtgttacctgcattgtttcatttattggtgttcaaggaagagatggggtggctgcaatggagttcagacacagcgattgtggtactaggtgtggttcttgctgtgtcgggaacttggagttccctgagtgagatcttctctgtcaaagtgtag

SEQ ID NO: 262 - DNA, 510 bp, Arabidopsis thaliana
atgacattcttcatcgaagacactagtctcatcatcagccacgttctctacaaaacggcacttatcatcaccgttttacgatggatctttgcatggatcctccgttaccgctcaagatcatcatcatcatcatcatcatcatctcaatcgtcctcttctccttctatttcatcacaaaccatcaaagaaagcctagccgtgttcgctttccgcgacgcggtggagagatctcccgcggcgataaacgacatgtgtgccgtgtgtctaggagatcttgaagacgaggacgaaatcagagagcttaggaactgtactcacgtgtttcatcgtgattgtattgaccgatggctagattatgaatgttgcggcggtgatgatgataaccaccgtacttgtccgctatgtcgaacgccgttgcttccatctttcactgattattcaaccgttactcaaactagttgggctgttgaacgacttctttacctcttcggcgacgatcttcttccctag

SEQ ID NO: 263 - DNA, 477 bp, Arabidopsis thaliana
atggagttagcttctttccttggtagagctctgtttgtttccgtatttcttctctccgcatggcaagagttcaatgattttggtgaagatggtggccgatcagctaaatctttgaaaccaaaattcaatgcctttgtaaaccatgtgacaactcacactggccagcaattgccaccagtcgatatgaagattcttgttgctgctgctatagccttgaagggtattgggggactattgtttgtctttggcagctcattgggagcttatctcttgcttctgcatcaagccgttgccaccccaattctgtatgatttctacaactacgatgttgacagaaaggaattcggccaactattttcaaaatttacacagagcttggctcttcttggaggactgctcttcttcattggaatgaaaaactcaaggaaacacggtaggcaactcaggaaaaaggctccaaaggcaaaagcaaactag

SEQ ID NO: 264 - DNA, 876 bp, Triticum aestivum
atgcaagacttccagtccatcccgggcctcgccgggcggctgttcggcggcgcggccgcggcagacatccggcgcgtgcagggcccggcgtcccggtgcggcgtgttctcgcaggcggcgtccgcgcagccggaggcggccgtcaagtgcccgcggtgcgagtccaccaacaccaagttctgctactacaacaactacaacctgtcgcagccgcgccacttctgcaagagctgccgccggtactggaccaagggcggcgtcctccgcaacgtccccgtcggcggcggctgccgcaaggccaagcgcagctcctcgtcggcgtccgcaccgtcgacgcccgcggccacggacgccaagagccagcggcgcgcgtccgcgtcgtcctcctcccgctccaacagcggcagcggcagcgccagccccacggccgctgcggaagagacgacgacaacggagaccgagccccctcctccgcccacgccgtcgtccaactccaactccaacgcggtctccttcgccaaccgcatgacgaactaccccttcgcggcagacgtgccacctctggcgccgatattcgccgaccaggccgccgcgctcgcgtccctcttcgcgccgcctcctccaccgcctctcccggtgttcagcttctcggcggagcccaagatggaggaggcgatcgggtcactgctgctcccggggcaggaggcgtcgcaggagccagaggagcccacctgcacctccaccgtcgcggacatggcgccgttcatgtcgctggacgcggggatcttcgagctcggcgacgcgtcgccggccgattactggaacggcgggagctgctggacggacgtccaggacccgtccgtctacctaccctag

SEQ ID NO: 265 - DNA, 876 bp, Triticum aestivum
atgcaagacttccagtccatcccgggcctcgccgggcggctgttcggcggcgcggcggcggcggacatccggcgcgtgcagggcccggcgtcccggtgcggcgtgttctcgcaggcggcgtccgcgcagccggaggcggccgtcaagtgcccgcggtgcgagtccaccaacaccaagttctgctactacaacaactacaacctgtcgcagccgcgccacttctgcaagagctgccgccggtactggaccaagggcggcgtcctccgcaacgtccccgtcggcggcggctgccgcaaggccaagcgcagctcctcgtcggcgtccgcaccgtcgacgcccgcggccacggacgccaagagccagcggcgcgcgtccgcgtcgtcctcctcccgctccaacagcggcagcggcagcgccagccccacggccgctgcggaagagacgacgacaacggagaccgagccccctcctccgcccacgccgtcgtcaaactccaactccaacgcggtctccttcgccaaccgcatgacgaactaccccttcgcggcagacgtgccacctccggcgccgatattcgccgaccaggccgccgcgctcgcgtccctcttcgcgccgcctcctccaccgcctctcccggtgttcagcttctcggcggagcccaagatggaggaggcgatcgggtcactgctgctcccggggcaggaggcgtcgcaggagccagaggagcccacctgcacctccaccgtcgcggacatggcgccgttcatgtcgctggacgcggggatcttcgagctcggcgacgcgtcgccggccgattactggaacggcgggagctgctggacggacgtccaggacccgtccgtctacctaccctag

SEQ ID NO: 266 - DNA, 876 bp, Triticum aestivum
atgcaagacttccagtccatcccgggcctcgccgggcggctgttcggcggcgcggccgcggcagacatccggcgcgtgcagggcccggcgtcccggtgcggcgtgttctcgcaggcggcgtccgcgcagccggaggcggccgtcaagtgcccgcggtgcgagtccaccaacaccaagttctgctactacaacaactacaacttgtcgcagccgcgccacttctgcaagagctgccgccggtactggaccaagggcggcgtcctccgcaacgtccccgtcggcggcggctgccgcaaggccaagcgcagctcctcgtcggcgtccgcaccgtcgacgcccgcggccacggacgccaagagccagcggcgcgcgtccgcgtcgtcctcctcccgctccaacagcggcagcggcagcgccagccccacggccgctgcggaagagacgacgacaacggagaccgagccccctcctccgcccacgccgtcgtcaaactccaactccaacgcggtctccttcgccaaccgcatgacgaactaccccttcgcggcagacgtgccacctccggcgccgatattcgccgaccaggccgccgcgctcgcgtccctcttcgcgccgcctcctccaccgcctctcccggtgttcagcttctcggcggagcccaagatggaggaggcgatcgggtcactgctgctcccggggcaggaggcgtcgcaggagccagaggagcccacctgcacctccaccgtcgcggacatggcgccgttcatgtcgctggacgcggggatcttcgagctcggcgacgcgtcgccggccgattactggaacggcgggagctgctggacggacgtccaggacccgtccgtctacctaccctag

SEQ ID NO: 267 - DNA, 693 bp, Brassica napus
atggtgaaactctgtgagctgtgtggtgcagaagcacacctccactgcgacgcagactccgcttacctctgccgctcctgcgacgttaagttccacgcctctaacttccttttttcccgccatgtccgccgcatcatctgccctggttgcagttccctcaccggagatatcgtctctggttctctttccccttggcctgctaaaataacctgctcctgctgtggttgtggaacgtcttcgtcttcagcttcgtcttgctgctcgtctctggaccttatctccacctccgagctatcgtcgtcgacgacgaggaagaccaccgtgaacagagggccgcgaaggagggaaaagggagtcaatgccgtgggggatggcatttttgtaaattggtgtgatgagttaggactaaacggagattcaagaaacgaagtcgtttcgttggcgtcactcgctttggccgtggggaaaacaagagggacgaaagtgattttagcagctgcgttttggttcggtgttaggaacgcgcggaagacgatgacgtgtccgaggctaaagaaggtggaagatgtaaccggtgttgcagcaggaatgattcgagccggcgaaagcaagctggcgcgtgcagtgacgctacagctcagacggtgtcgtatggattcagaggaaggatgggccgaaaacgacaacgtttga

SEQ ID NO: 268 - DNA, 3369 bp, Arabidopsis
atgtcaggctctaggccgactcagtcctctgagggctcaaggcgatcaaggcacagcgctaggatcattgcgcagaccactgtagatgcgaaactccatgctgattttgaggagtcaggcagctcctttgattactcaacctcagtgcgtgtcactggcccggttgtggagaatcagccaccaaggtctgacaaagttaccacgacttatcttcatcatatacagaagggaaagctgattcagcccttcggttgtttacttgccttggatgagaagaccttcaaagttattgcatacagcgagaatgcatctgagctgttgacaatggccagtcatgcagttcctagtgttggcgaacaccctgttctaggcattgggacagatataaggagtcttttcactgctcctagtgcgtctgcattgcagaaagcccttggatttggagatgtctctcttttgaatcccattcttgtgcactgcaggacttctgcaaagcccttttatgcgattatccacagggttacagggagcatcatcatcgactttgaacccgtgaagccttatgaagtccccatgacagctgctggtgccttacaatcatacaagctcgctgccaaagcaatcactaggctgcaatctttacccagcgggagtatggaaaggctttgtgatacaatggttcaagaggtttttgaactcacggggtatgacagggtgatggcttataagtttcatgaagatgatcacggtgaggttgtctccgaggttacaaaacctgggctggagccttatcttgggctgcattatcctgccaccgacatccctcaagcagcccgttttctgtttatgaagaacaaggtccggatgatagttgattgcaatgcaaaacatgctagggtgcttcaagatgaaaagctttcctttgaccttaccttgtgtggctccacccttagagcaccgcacagctgccatttgcagtacatggccaacatggattcaattgcatctctggttatggcggttgtagttaacgaggaagatggagaaggggatgctcctgatgctactacacagcctcaaaagagaaagagactatggggtttagtggtttgtcacaatacgactccgaggtttgttccatttcctctcaggtatgcctgtgagtttctagctcaagtgtttgccatacacgtcaataaggaggtggaactcgataaccagatggtggagaagaacattttgcgcacgcagacactcttgtgcgatatgctgatgcgtgatgctccactgggtattgtgtcgcaaagccccaacataatggaccttgtgaaatgtgatggagcagctctcttgtataaagacaagatatggaaactgggaacaactccaagtgagttccacctgcaggagatagcttcatggttgtgtgaataccacatggattcaacgggtttgagcactgatagtttgcatgacgccgggtttcctagggctctatctctcggggattcggtatgtgggatggcagctgtgaggatatcatcgaaagacatgattttctggttccgttctcataccgctggtgaagtgagatggggaggtgcgaagcatgatccagatgatagggatgatgcaaggagaatgcacccaaggtcatcgttcaaggctttccttgaagtggtcaagacaaggagtttaccttggaaggactatgagatggatgccatacactccttgcaacttattttgaggaatgctttcaaggatagtgaaactactgatgtgaatacaaaggtcatttacgcgaagctaaatgatctcaaaattgatggtatacaagaactagaagctgtgaccagtgagatggttcgtttaattgagactgctacggtgccaatattggcggttgattctgatggactggttaatggttggaacacgaaaattgctgagctgactggtctttcggttgatgaagcaatcgggaagcatttcctcacacttgttgaagattcttcagtggaaatcgttaaaaggatgctagagaacgcattagaaggaactgaggagcagaatgtccagtttgagatcaagacacatctgtccagggctgatgctgggccaataagtttagttgtaaatgcatgcgcaagtagagatctccatgaaaacgtggttggggtgtgttttgtagcccatgatcttactggccagaagactgtgatggacaagtttacgcggattgaaggtgattacaaggcaatcatccaaaatccaaacccgctgatcccgccaatatttggtaccgatgagtttggatggtgcacagagtggaatccagcaatgtcaaagttaaccggtttgaagcgagaggaagtgattgacaaaatgctcttaggagaagtatttgggacgcagaagtcatgttgtcgtctaaagaatcaagaagcctttgtaaaccttgggattgtgctgaacaatgctgtgaccagtcaagatccagagaaagtatcgtttgctttctttacaagaggtggcaagtatgtggagtgtctgttgtgtgtgagtaagaaactggacagggaaggtgtagtgacaggtgtcttctgtttcctgcaacttgccagccatgagctgcagcaagcgctccatgttcaacgtttagctgagcgaaccgcagtgaagagactaaaggctctagcatacataaaaagacagatcaggaatccgctatctgggatcatgtttacaaggaaaatgatagagggtactgaattaggaccagagcaaagacggattttgcaaactagcgcgttatgtcagaagcaactaagcaagatcctcgatgattcggatcttgaaagcatcattgaaggatgcttggatttggaaatgaaagaattcaccttaaatgaagtgttgactgcttccacaagtcaagtaatgatgaagagtaacggaaagagtgttcggataacaaatgagaccggagaagaagtaatgtctgacactttgtatggagacagtattaggcttcaacaagtcttggcagatttcatgctgatggctgtaaactttacaccatccggaggtcagctaactgtttcagcttccctgaggaaggatcagctcgggcgttctgtgcatcttgctaatctagagatcaggttaacgcataccggagctgggatacctgagtttttactaaaccaaatgtttgggactgaggaagatgtgtcagaagaaggattgagcttaatggttagccggaaactggtgaagctgatgaatggagatgttcagtacttgagacaagctgggaaatcaagtttcattatcactgcggaactcgctgcagcaaacaagtag

SEQ ID NO: 269 - DNA, 3369 bp, Arabidopsis; identical to SEQ ID NO: 268

SEQ ID NO: 270 - DNA, 3369 bp, Arabidopsis; identical to SEQ ID NO: 268

SEQ ID NO: 271 - DNA, 1491 bp, Arabidopsis thaliana
atgtcaggagctattacttgctctgcggctgatctctcagccctactcggcccaaatgccacggcagcggctgactacatttgcggccagttgggttccgttaacaacaagtttaccgatgcagcctacgctatagacaacacgtacctcctcttctctgcctatcttgtctttgcgatgcagctcggcttcgctatgctttgtgctggctccgttagagctaagaacacgatgaacatcatgctcactaatgtccttgatgctgcagccggaggactcttctactacctctttggttatgcatttgcctttggtgaatcctccgatggattcattggaagacacaactttggtcttcaaaactttccgactctcacctcggattactccttcttcctctaccaatgggcgtttgcaatcgcagccgctggaatcaccagcggctccattgccgagaggactaagttcgtggcgtatttgatatactcttcttttttgaccgggtttgtttacccagttgtctctcactggttctggtctccggatggatgggctagtcccttccgttcagaagaccgtttgtttggcactggagccatcgactttgctgggtcaggtgttgttcacatggttggtggtatcgcaggattatggggtgcccttattgaaggccctcggattggtcggtttcctgatgggggtcatgctattgctctgcgaggccactctgcctcactcgtcgtcttagggaccttccttctctggtttggttggtacgggttcaaccctggttccttcaccaagatactcattccctacaattctggttccaactatggccaatggagtggaataggccgcaccgcggttacaactacactctcgggatgcacagcggctctaaccacactcttcggaaaacgtctcctatcaggccactggaacgtaactgacgtttgcaacgggttactcggagggtttgcggccataacggcaggttgctctgtggttgatccatgggcagcgatcgtatgtggcttcgtggcttccctcgtccttatcggatgcaacaagctcgcagagctcttaaaatatgacgatccacttgaggccgcacaactacacggagggtgtggtgcttggggtttgatatttgtaggactgtttgcaaaagagaagtatataaatgaggtttacggcgcgagcccaggaaggcactacgggctatttatgggcggaggagggaagctattgggagcacaactggttcaaataattgtgattgttggatgggttagtgccacaatgggaacactcttcttcatcctcaaaaagctcaatttgcttaggatctcggagcagcatgaaatgcgaggaatggatttagcaggtcatggtggttttgcttatatctaccatgataatgatgatgattccattggagtgcctggatctccagtacctcgtgcgcctaaccctccagccgtttga

SEQ ID NO: 272 - DNA, 717 bp, Arabidopsis thaliana
atggattcaaattttcattactcgatagatcttaacgaagatcaaaaccatcacgaacaaccctttttctatcctcttggatcctcttcctcgcttcatcatcatcatcatcatcatcatcatcaagtcccttctaattcttcatcttcttcttcgtccatttcatcgctctcctcttacctccctttcttgatcaactctcaagaagatcaacatgttgcctacaacaacacttatcacgctgatcatctccatctttctcaacccctcaagtctctttgtaacgcatgtggtatacggcaaagaaaggcaaggcgagccgctatggccgcggccgctgcagccggcgaccaagaggtggcggtagcgccccgagtgcaacaattaccgctgaaaaagaagttgcaaaataaaaaaaagagatcaaacggaggggaaaaatacaatcactctcctccaatggtggccaaggccaaaaagtgcaagatcaaagaggaagaggagaaggaaatggaagcggaaacggttgccggagattcagagatcagcaaatctacaacttcttctaattcttcgatttcgtcaaacaaattttgcttcgatgatttgacaataatgttgagcaaaagctcagcttatcaacaagtgttcccacaagatgagaaggaggctgctgttttgctcatggctctgtcgtatggaatggttcacggttga

SEQ ID NO: 273 - DNA, 1578 bp, Arabidopsis thaliana
atggcgaatagtaagtacgagtacgtgaagtcattcgaagtagaagacgaagttatgtttcccaatctgataattatccgtatcgatggccgtgatttttccagattttctcaagttcacaagtttgaaaagcctaatgatgagacatctctaaatttgatgaattcatgtgcatcttcggttttagtagagtatcctgatatagtctttgcatatggatatagtgacgagtacagctttgtattcaagaaagcatcaagattctaccagagacgagccagtaagattctgtctttggtagcctcattttttgctgcggtctatgtaacgaaatggaaagagttctttcctcatacaaaattagaatatgctccttcatttgcttcaaaagttgtaagttgtgcatcggtagaggttcttcaagcttaccttgcgtggagacaacatgactgccacatcagtaatcagtatgacacatgtctttggatgttagtaaaaagtggaaagaccttaagtgaaactcaggagattttgaaggatacacagaaacaacagagaaatgagcttctttttcaacaatttggtattaattataaaatgcttcctgtattatttcgtcaaggatcatgcctttttaagacaaagttggaagaaactgtaaagcatgatgagaatggaaagcctgtaaaacgattgaggagaagagaaactttagtgcattcagaaaatgttgctggaagaagcttttggaatgagcactcctctcttcataaagatcttggacattttgcaaaagacattggcaaaattgaaccagattatgttaagtcgtttcagtttgagagtagattattacctttaacttgggttgtggttaggattgatggctgccattttcacagattttctgaagttcatgaatttgagaagccaaatgatgagcaagctctgaaacttatgaattcatgtgcagtggctgttcttgaggagtttcaggatattgcctttgcctacggcgttagtgatgagttcagctttgttcttaagaataaatctgagctttacaaaagacagtccagtaagataatatctgcagtagtatccttcttcacatcgacttacatgatgagatggggagattttttccctcacaaaaaattgaagtaccctccatcattcgatggacgagctgtttgctatccaacatcagatattctcctggattatctagcttggagacaagtcgactgccatatcaacaatcagtataatacatgtttctggatgcttgttaagtctggaaaaagcaaaattcaagcccaggattacttaaagggtacccagacacgagaaaaaaacgagttacttagccagcaatttggaattgagtacaattcattacctgtaatcttccgcatgggttcttccgttttccgcctaaagacgcaggaaggtgttacagaggagaatggagaagtttcaggaaagcaagtggaagcagaagtgggcgtagactattcaaacattatcgaccaatgtttctggcaacaacatcctcacattcttagcttctcctaa

SEQ ID NO: 274 - DNA, 1827 bp, Arabidopsis thaliana
atgagttgttcttatctactttctggtgacgcttccgtcgtcgcttcacggcggtggagtgatgtttcttcccggcagcgtttatttctcccacggcaatcactccggcagccatcgggttcttcgttttcccgatgcgtccgattagtcgctaatgtaaatgatcatttcagtaaacaatcactcgcgacgagaaattgcttggcttcagtgtttagtgcagacttgggtggaagtaacggtaataatgataacggaaatggcggcggtggcggaggagacggcggcggcgataactctgatgattcttctttcgatttgagatacctctgctttcttttattgggcttgtcttgcttcttccatttccgattatcagctgcgtccgccatagctaaagatcaaaattcggatagtaatggagatgctgtgaaagagacggtttgggaagtgagaggaagtaaaaggaagagactagttcccgattttgtcaaagatgagttcgtctctgaagaatctgcttttgaattatcatcttctctaactcctgagaatctcctagctcaatgtagaaaccttctcactcaattccttcttcctgaaggttttcccaatagtgtaacttctgattacctcgattactctctctggagaggtgttcaaggtattgctagtcaaatcagcggcgttcttgccactcagtctttgctttatgcagttgggttaggtaaaggagcaattcctacagctgcagctatcaattgggtgcttaaagatggaattgggtatcttagtaagataatgttgtcgaaatacggacgacatttcgatgttcatcccaaaggatggaggctatttgctgatcttcttgaaaacgctgcttttggtatggagatgcttacgccagtcttccctcagtttttcgttatgatcggtgctgctgctggtgctggtcgatctgctgctgcattgattcaggctgctactagaagttgcttcaatgctggctttgcttctcaaaggaactttgctgaggtaattgccaagggtgaagctcaaggaatggtgagcaagtcagtgggtattctgctaggaatagtggttgccaattgcataggaacctctacaagtcttgcccttgctgcatttggagttgtgactacaatccatatgtataccaatctcaaatcttaccagtgtatccagctccggactctaaacccataccgtgcaagtttggtttttagtgaatatctaatcagcggccaagctcctctaatcaaggaggtcaacgatgaagaaccgctcttcccaacagttcggttttcaaacatgaaatctccagaaaagctgcaagattttgtcttatcatcagaagcaaaagcagcagccgcagacatagaggaacggcttcaactagggtcaaagctcagcgatgttatccacaacaaggaagaagcaatagcactgtttgatctatatcgcaatgaaggctacatccttacagaacacaaaggaagattctgcgtgatgctcaaggaaagctcaactccacaagacatgctcaggtcattgtttcaagtgaactacctctactggctagagaagaatgctgggatcgaacccgcaagcacttactcagactgcaaacccggtggtcgccttcacatttctttagattatgtgcgacgagagtttgaacacgccaaagaagacagcgaatcagtaggttgggtcactgaaggactgatagctagacctctaccaaccagaatccgtctaggtcatgatcgtgaactattattatcttctccaaacagctcataa

SEQ ID NO: 275 - DNA, 675 bp, Solanum lycopersicum
atgtcaagcccactagagatagatacttcattttcacattccaatttgttgtttttggaagatgaatcatcatggagtaatactcatgatccatttgttgatattgatgaatatctaccaataattataccatgtaatgatgaagaaatagtagtagaatcctcaaacgctagtactacaacaacaacaacaacaacatcaaaagtagcaagtatccaaaatattcatcatgatcaagaagaggtaacatccatagagaaaaaacatgaagatgatcaagaaaaacattatattggagttagaaagaggccatggggtaaatatgcatcagaaattagggattcaacgcgtaatggaattagggtttggttaggaacatttgatactgctgaagaagctgctttagcttatgatcaagccgcattatcaatgaggggtccttggtctctactcaattttccaatggaacatgttaaaaaatctcttgaaaatattgagtattcttgtaaagatggattatctccagctgctgttttaaaagctactcataaaactagaagagtcaagcacaagagaagtagtagaaagaagaagaatgagaatttggaaaatgtttttgtttttcaagacttgggagttgaattattagaagagcttttaatgacttcatcatag

SEQ ID NO: 276 - DNA, 501 bp, Capsicum annum
atgacaccgccaccaactagcactgttcctccttacgttagcctcatcgtgaggatccttacgttgatttgcttgttgatttcattcatcgtgattgccaccaacaatcagacggttagtaccgttgctggtgatgtcaaaatcaagtttaaggacttttatgcttacagatatttaattgctactgtgattattggaatggcatatactcttcttcaaattgccttttcaatttcccttttgactactggaaatcgcattggtggtgaaggttttcttctttttgacttctacggtgacaagtttatttcctacttcctagttaccggagcagcagcaagttttggtatgacacaagatttaaagcaacttgaaggaagtgataactatagtaaatttctcaacacttcaaatgctgcagcaagtctttgtctaattggattcttttttgctgttgcttcatcaattttctcatcttataatcttccaaagagaatttag

SEQ ID NO: 277 - DNA, 6456 bp, Zea mays
atggaaggggatgagcgaggagtcttacttgcttgtgtaatttcgggtacccttttcacggttttcggttcgggttcgttttggatactttgggctgttaattggcggccatggcgtctctacagttggatctttgctagaaaatggccaaaagtattgcaaggtcctcagcttgatatactatgtggtgttctatctctttttgcttggattgtggtagtatcccctattgcaatcttgataggatggggttcttggctgattgtgatattggatcgacatatcattgggctggcgataataatggctggaacagcccttttactggcattctactcaatcatgctttggtggaggacccagtggcaaagctcaagagctgtcgctttacttctccttcttggtgttgccttactatgtgcgtatgaactctgtgctgtctatgttacggctggtgcgcatgcatctcagcaatattctccttctggtttctttttcggtgtatcagcaatcgcgttggcaattaacatgctatttatctgccgcatggtctttaatggaaatggtttagatgtggacgaatatgtaaggagggcatataaatttgcttattcagattgtatagaagtgggtcctgtggcttgtttgcctgaacctcctgatcctaatgaattatatccccggcaaaccagcagggcttcacatcttggccttctgtacctgggctcactcgtagttctccttgcctactcagtcctatatggtctcacagctagggaatcacgttggcttggaggaatcacatcagctgcagttattgttcttgactggaatattggggcatgcttgtatgggtttaagcttcttcagaatcgtgttctggcactttttgttgctggcatatcccgtcttttcctaatatgttttggcatacactactggtacctagggcattgtattagttacattttcgtagcatcagttctatcaggtgctgctgtttctcggcatctatctataacagacccatcagctgcaagaagagatgccttacagagcacagtgatccgcttgagagaaggttttcggagaaaagagcagaatagttcttcaagttcttcagatggttgtggctcaagtataaaaagaagtagtagtatcgatgctggccatactggttgtactaatgaagcaaatcgtacggcagaatcttgcacggctgacaatctaactcgaacaggcagctctcaggagggaatcaatagcgacaaaagcgaagaaagtggaagaccaagcttaggtttacgtagtagttcatgtcgttctgtggtccaagagcccgaagcaggaacgtcttattttatggacaaagtttctgatcaaaataacactcttgttgtttgttcgagcagtggtctagatagccaaggttacgagtctagcacatcgaattctgcaaaccagcagcttttggatatgaatttggctcttgctttccaggaccagttaaacaatcctaggatagcctcgatacttaagaagaaagcaaaagaaggtgatcttgaactgactaatttgctgcaagacaaggggttggaccctaactttgctgtaatgttgaaggaaaaaaacttggatcctactatattggcactacttcagaggagtagtttggatgcagatagagatcaccgcgacaatactgatattacaatcattgactcaaacagtgttgacaatactttgccaaatcagatttctttatccgaagaattgagactccgtggactagagaagtggcttaagttgtctagacttcttctgcaccatgtagcggggacaccagagagagcatggggcctctttagtcttgtctttatccttgaaacaatcattgtggccatttttcgcccaaagaccatcacgattataaattctagtcatcaacagttcgaatttggtttctctgtgctgctattgtcacctgttgtctgttcaataatggcttttcttcggtctcttcaagttgaggaaatggccttgacatcaaaatctcgcaagtatggctttgttgcctggcttctgagcacatcagttggattgtcactctcgttcttgagtaaatcgtcagtacttctgggaatatccttgactgtgcccctcatggcagcatgcctgtctattgctgttcccatatggatgcataatgggtaccaattttgggttccacagttatcatgtggtgaccaggcaagagatttacgatctcccaggataaaggggtttattctttggatttgtgttgtgttgtttgcgggttctgtaatttctcttggtgcgattatatctgctaaacctttggatgatttaaagtataagctgtttagtgccagagaaaacaacgtcacgtcaccatatacatcttctgtataccttggttgggcaatgtcatctggaattgctttagtagttaccgccattctaccaatagtttcatggtttgcaacttataggttttcccactcttctgctgtctgtctcatgatattctcagttgttctcgtggcattttgtggaacttcatatttggaagttgtaaaatctagagatgatcagttgcccacaaagggtgatttccttgcggccttgcttccacttgcatgcattccggcgctgctttcactatgctgtgggatggttaaatggaaggacgattgttggatactctctcgaggtgtatatgttttcttttcaataggtcttcttcttctttttggtgcgatagcagctgtcattgcagtcaaaccatggacgataggcgtatcttttctcttagttcttttccttatggtggtaacaattggtgtaatccatctttgggcgtcaaacaatttctatttaaccaggaaacagacatcctttgtctgctttcttgctcttcttttgggtttggccgcattccttctcggatggcatcaagataaagcatttgctggagcatctgttggttactttacattcctgtctctgttggctggaagagcattagctgttcttctatccccaccaattgtagtatattctccaagggtgctaccagtatatgtctacgatgctcatgctgattgcggaaagaatgtcagtgctgcatttcttgtcctgtatggaattgctttggcaacagaaggctggggtgttgttgctagtctgataatttatcctccgtttgcgggtgctgctgtatcagctatcacccttgtagtagcctttgggtttgctgtttctcgcccatgtttgactcttgagatgatggaggttgctgtacgctttcttagcaaggatactatagtgcaagctatctctcgatctgccacgaaaacaagaaatgctctatccggcacgtattcagctccccaaaggtccgccagctctgcagctcttctggttggggatccctctgcaatgcgtgataaagcagggaactttgtgcttcctagagatgatgtcatgaaattaagggatcgtctcaggaacgaagaaagagttgctggatcaatcttctacaaaatgcaatgcaggaaaggattccgtcatgaaccacctacaaatgtagattatagaagagacatgtgtgcccatgcaagagttttggcactggaagaggcaattgatacagaatgggtgtatatgtgggacaaatttggtggttatttactactattgttaggtttgacagctaaggcggagagagttcaggatgaggtacggttgcggctcttcttagatagcattgggttctcggatttaagtgccagaaaaatcagtaaatggaagccagaggatagaagacaattcgaaattattcaagagagttatctgagagagaaagagatggaagaggaaagccttatgcagagacgtgaagaagaagggagaggtaaagaaagaaggaaagctcttttggagaaggaagagcgcaaatggaaggaaattgaagcgtcccttattccatctattcctaatgctggtagcagggaggcagcagccatggcagctgcaatacgtgctgttgggggtgattctgtccttgaggattccttcgcaagagagagggtctcgggtattgcacgtaggatacgcactgctcaactagaacgacgtgcacaacagactggaatatctggggcagtttgtgttcttgatgatgaaccaatgataagtggtaaacattgcggccaaatggactcaagtgtctgtcaaagtcagaagattagcttttccgttacagcaatgatccaatccgattctggacctgtatgtctttttggcactgaatttcaaaagaaagtatgttgggagattctggttgctggttctgagcaaggaattgaggctggccaagttgggcttaggttgataacaaaaggtgagaggcagacaaccgttgctagagagtggtatattggtgcaaccagcataactgatggaaggtggcatacagtgacaatcacaattgatgctgatgcgggggaagctacttgttacatagatggtgggtttgatggctaccagaatgggttacctctaagtattggcagtgccatttgggaacaaggagctgaagtttggttgggtgttaggccacctatagatgttgatgcattcgggagatcagatagtgatggcgtcgaatcaaagatgcatattatggatgttttcctttgggggaaatgcttaagtgaagaagaggccgcttctttgcatgcagccattggcatggctgacttagacatgattgatttgtctgatgacaattggcaatggacggattcaccccccagagtcgatggttgggatagtgatcctgccgatgttgatctctatgatagggatgacgtagattgggatggacaatattccagtgggaggaaaagaagatcaggtcgggattttgtaatgagtgtcgattcctttgccaggagacacaggaaacccaggatggagacacaagaagatataaatcaaagaatgcgttcagttgagttggctgtcaaagaagctctctctgcacgaggtgataagcaatttactgaccaggaatttcctccaaatgatcgctctttatttgtggatacacaaaatcccccatcaaaattgcaggttgtttctgaatggatgagacctgactccattgtgaaagaaaacggtagtgattcccgtccctgcctgttctctggggatgcaaatccttcagatgtttgccaggggcgtttgggggattgttggttcttaagcgccgttgcagttttgacagaggtttcacgaatatctgaagtgatcattactcctgaatacaacgaggaagggatctacactgttcgtttttgtattcagggtgagtgggttcctgttgttatcgatgactggattccatgtgaatcacctggtaaaccagcttttgctactagcagaaagctcaatgaactctgggtctccatggtggagaaagcatatgccaagctccatggttcttatgaggcactggaggggggactggttcaggatgctcttgtcgacctaactggaggagctggtgaggagattgacttgcggagtgctcaagcacaaatagatcttgcaagtggcagattgtggtctcaattgttacgttttaaacaagaggggttcttacttggtgctggaagtccatcaggatctgatgttcatgtatcttccagtggcattgtgcaagggcatgcttactccgtcttacaggtgagagaggttgatgggcacagacttgttcagattcgaaatccatgggctaatgaagttgagtggaatggtccctggtcagactcatccccagagtggactgataggatgaagcacaagctgaagcatgttccacagtcaaaagaaggtatattctggatgtcttggcaagatttccagattcatttcagatcaatatatgtgtgtcgggtttacccccgtgagatgcgctactctgtaaatggccaatggcgaggttatagtgccggtggctgccaagattatagctcatggcatcaaaatccacaattcaggctgagggcaactggttctgatgcatctttaccaattcatgtgttcatcaccttaactcagggcgtaggtttctcgagaacaactcctggatttcgtaactaccaatcaagccatgattcacagttgttctatatcggattgaggattcttaaaactcgtggacgtcgtgctgcttacaacatatttcttcatgaatctgttggtggaacagactatgtgaattcccgtgagatttcatgtgaaatggttcttgaccctgatcctaagggttatactattgtcccaaccacgatacacccaggggaagaagcaccttttgtcctttcagtcttcacaaaagcatccattgttcttgaagctttgtag

SEQ ID NO: 278 - DNA, 2007 bp, Glycine max
atggctggctcgtgggcacgccgttctctgattgttctggctatcatttccttcggatgtttatttgcaatttccattgctaaggaggaagccacaaaattggggacggtcatcgggattgatcttggaacgacctattcatgtgttggtgtttacaagaacggccatgttgaaatcatagccaataatcaaggtaaccgtatcaccccatcgtgggttgctttcaccgacagtgagagactaattggagaggctgccaagaatctggcagctgtcaacccagaaaggaccatctttgatgtcaagagacttattggaagaaagttcgaagataaggaagttcaaagagatatgaagcttgttccttataagattgtcaacaaggatggaaaaccttacatacaagtgaaaattaaggatggtgagaccaaggtgttcagccctgaggaaatcagtgccatgattctgactaagatgaaggaaactgcggaagcattccttggaaagaaaattaatgatgccgtggtcactgttccagcttacttcaatgatgctcagaggcaggccaccaaggatgctggtgtcattgctggtctcaatgttgctagaattatcaatgaacccactgctgctgccattgcctatggattggacaagaaaggtggcgagaagaacattctagtctttgatcttggtggtgggacctttgatgtcagtatcttgacaattgataatggtgtttttgaagttcttgccacaaatggagatactcatcttggaggtgaggactttggtcagagaataatggagtacttcattaaattgatcaagaaaaagcatggaaaggatattagcaaggacaacagagcacttggcaagctgaggagagaggctgagcgtgcaaagagggctctcagcagccagcaccaggtccgcgtggaaattgaatcactttttgatggtgttgatttttctgagccactcacccgagctcgttttgaggagttgaacaatgatttgttccggaagaccatggggccagtgaagaaggctatggaagatgcaggattacagaagagtcagattgatgagattgttcttgttggtggaagcacaaggattccaaaggtacaacagcttttgaaggactactttgatggaaaggagccaaacaagggtgtcaaccctgatgaagcagttgcctatggtgctgcagtgcaagaaggcattttaagtggagagggtggtgaagaaaccaaagacatccttctcctggatgtggctcccctcactctcggaattgaaactgttggtggagtcatgacaaagttgattcccagaaacactgttatcccaaccaagaaatctcaggtgttcaccacctatcaggaccagcagactacagtctccattcaggttttcgaaggcgagaggagtctcacaaaggattgccgccttcttgggaaatttgatctgtctggaattcctccagccccaaggggtacggctcaaattgaagtgaccttcgaagttgatgccaacggcattctaaatgtgaaggcagaagacaagggcactggtaaatcagaaaagatcaccattacaaacgaaaagggacgtcttagccaggaagaaattgagagaatggttcgcgaagagaaggactttgcagaggaagaaaagaaggtgaaggagaggatcgatgctcgcaacagtcttgaaacctatgtatacaacatgaagaaccaggtcagtgacaaggacaagctcgctgacaagttggagtctgatgaaaaggagaaaattgagactgctgtgaaagaagcactggaatggctggatgacaaccagagtatggagaaagaagattatgaagagaagctgaaggaggttgaagccgtttgcaacccaatcattagtgctgtgtatcagagatctggaggagccccaggcggtggtggtgcatcaggcgaagaagacgaggacgattctcacgatgagctctag

SEQ ID NO: 279 - DNA, 1029 bp, Triticum aestvum
atggatcggtacgaggtggtgagggacatcgggtccggcaacttcggggtggccaagctggtgcgggacgtcaggaccaaggagcacttcgccgtcaagttcatcgagcgaggccacaagattgatgaacatgttcaaagggagattatgaaccaccggtcactgaagcatccaaatattattcgattcaaggaggtcgtgctaactcagacacatttggcaatagttatggaatatgcctctggcggcgagctatttcaaaggatttgcaacgcagggagatttagcgaggatgagggaagattcttcttccaacaattgatttctggagtgagctattgtcactctatgcaagtatgtcatagagatttgaaactagaaaacactctattggatggtagtgtcgcacctcgactcaagatttgtgacttcggttactccaagtcttctgtcttgcactctcaaccgaagtcaactgtcggcacgccggcatacatcgccccggaggtcctctctagaagagagtatgatggaaaggtcgccgatgtttggtcttgtggagtaacgctctatgtgatgcttgtgggggcatatcctttcgaggaccctgatgagccaaggaacttccgcaaaactatcaccaggatactcagcgtacagtactccgttccggactacgttcgagtctcgatggattgcatacatctgttgtcccgcatcttcgttggaaatcctcagcagcgaataaccatcccggagatcaagaaccatccatggttcctcaagagattgcccgttgagatgaccgatgagtaccaaaggagcatgcatctggcagacatgaacacgccgtcacagagtctggaagaagccatggcgatcatccaggaggcgcagaaacctggcgataacgccctagggattgccgggcaggttgcctgcctggggagcatggatctagacgacatcgatttcgatatcgacgacattgatgttgagagcagcggggatttcgtgtgccctttgtag

SEQ ID NO: 280 - DNA, 1182 bp, Arabidopsis thaliana
atgtcttccacttctttcaccgaccttcttggttcttccggcgttgactgttacgaagatgatgaagacttgagagtttctgggtcgagttttggtgggtactatccagagagaaccgggtctggtttacctaagttcaagacggctcaaccaccacctcttccgatttcacaatcttctcataacttcactttctccgattaccttgattctcctctgcttctcagctcctcacacagtttgatatctccaacaacaggaacgtttccattgcaaggctttaatggaacaacaaacaatcactcagattttccctggcagctacaatctcaaccatcaaacgcttcttctgctttgcaagaaacatatggtgttcaagatcacgagaagaagcaggagatgattcctaatgagattgcaacacaaaacaacaatcaaagttttggaacagaacgtcagataaagataccagcatacatggtgagtaggaactctaatgatggttatggttggagaaaatacggtcagaaacaagtgaagaagagcgaaaaccctaggagttacttcaagtgtacgtatcctgattgtgtttccaagaagattgttgagacggcttctgatggacagatcactgagatcatttataaaggtggtcataatcatcctaagcctgagttcaccaagagaccatctcaatcttcattaccatcatcggttaatgggaggcgcttgtttaatcctgcttctgttgttagtgaacctcatgatcaatcagagaactcttcgatttcgtttgactatagtgatcttgagcagaaaagttttaaatcagagtatggtgagatagatgaagaggaggaacaacctgagatgaagaggatgaaaagagaaggtgaagatgaagggatgtctatagaagtaagcaaaggagttaaagagccaagagttgtggttcagacaataagtgatattgatgttcttatagatggctttagatggaggaaatatggtcaaaaagttgtcaaaggaaatactaatccaaggagctactacaagtgcacattccaaggttgtggagtgaagaagcaagtggaaagatccgcagcagacgagagagcagttctcactacctatgaaggaagacacaatcacgatatcccaaccgcgctacgtcgctcgtag

SEQ ID NO: 281 - DNA, 1560 bp, Arabidopsis thaliana
atggctgcttcttttcttacaatggacaatagcagaaccagacaaaacatgaatggttctgctaattggtcacaacaatccggaagaacatctacttcctctttggaagatcttgagataccaaagttcagatcttttgctccttcttcaatctctatctctccttctcttgtctctccttccacttgtttcagtccctctctttttctcgattcccctgcttttgtctcctcctctgctaacgttctagcttctccaaccacaggagctttaatcacaaacgtaactaaccagaaaggtataaatgaaggagacaagagcaacaacaacaactttaacttattcgatttctcattccacacacaatcatcaggagtttctgctccgaccacaactacaactacaactacaactacaacaacaacaaacagttctatctttcaatctcaggaacaacagaagaagaaccagtcagaacaatggagccaaaccgagactcgtccaaacaatcaagctgtatcttacaatggaagagagcaaaggaaaggagaggatggttacaattggagaaagtacggacaaaaacaggtgaaaggaagtgagaatcctcggagttactataagtgtactttccctaattgtccaacgaagaagaaagtggagagatctttggaaggtcagatcacagagattgtgtataaaggaagccacaaccatcctaaacctcagtctactagaagatcttcttcgtcttcttcgacttttcattcagctgtgtacaatgccagtttggatcataatcgtcaagcttcttctgatcagcctaattccaataatagctttcatcagtctgattcctttgggatgcaacaagaggataatactacttctgattctgttggtgacgatgagttcgaacaaggctcatcgattgtcagcagagacgaagaagattgtgggagtgaacctgaagcaaagagatggaaaggggacaatgaaacaaatggtgggaatggtggtggaagcaagacagtgagagagccgagaatcgtagtgcagacaacgagtgatattgacattcttgacgacggttacagatggagaaaatacggccagaaagtcgttaagggaaacccaaatccaagaagctactacaagtgcacaaccatcggttgtccagtgaggaaacatgtggagagagcatcacacgacatgagagcagtaatcacaacctacgaagggaaacacaaccacgatgttcctgcagctcgtggtagcggttacgccacaaacagagcaccacaggattcgtcttcagtcccgattagaccagctgctattgctggtcactccaactacactacttcttctcaagcaccatatacacttcagatgctgcacaacaacaacactaataccgggccttttggttacgccatgaacaacaataacaacaacagcaaccttcaaacgcaacaaaactttgttggtggtggattctctagagcaaaggaagaaccaaacgaggagacctcatttttcgattcgtttatgccctga

SEQ ID NO: 282 - DNA, 672 bp, Pisum sativum
atgaaattaaaaaacggtttattattattttttatgtttttagattgtattttttttaaagttgaatctaaatgtgttattggttgtgatattgctttagcttcttactacgttatgcctttagttcaattatctaacattaccacctttatgcaatctaaattagttaccaactcttttgaagttattgttcgttacaaccgtgatattgttttttctaacgataacttattttcttactttcgtgttaacattccttttccttgtgaatgtattggtggtgaatttttaggtcacgtttttgaatacaccgctaacgaaggtgatacctacgatttaattgctaacacctactacgcttctttaaccaccgttgaagttttaaaaaaatacaactcttacgatcctaaccacattcctgttaaagctaaagttaacgttaccgttaactgttcttgtggtaactctcaaatttctaaagattacggtttatttattacctaccctttacgtcctcgtgataccttagaaaaaattgctcgtcactctaacttagatgaaggtgttattcaatcttacaacttaggtgttaacttttctaaaggttctggtgttgttttttttcctggtcgtgataaaaacggtgaatacgttcctttataccctcgttaa

SEQ ID NO: 283 - DNA, 2775 bp, Medicago truncatula
atggagttacaagttattaggatatttagattggttgtggcatttgttctttgtttgtgtatatttatcagatcagcttcttctgcaactaaagggtttgagagcatagcatgttgtgctgattcaaattacacagatccaaaaaccaccctaacttatacaacagatcacatctggttctctgataaaagaagttgcagacaaatacccgaaattttgtttagccacagaagcaataaaaatgttcgaaaatttgaaatatatgaaggaaagagatgttataatttgccaacagttaaggatcaagtatatttgataaggggcatatttccctttgatagtttaaattcttcgttttatgtttcgatcggggtaacagaactaggcgaattaagatcgtctaggctcgaggacttggaaattgagggagtttttagagccaccaaagactacatagatttctgcttattgaaggaggatgtcaatcccttcatttctcagattgaattgaggccattacctgaagaatacctacatggtttcggtactagtgttttaaaactgataagcagaaacaatcttggtgacacaaatgatgatataaggttcccagatgaccaaaatgatagaatctggaaacggaaagaaacttcaactccaacatctgcccttccactgtctttcaatgtcagcaatgttgacctcaaagacagtgtcacacctcctctacaagtcctacaaacagctcttactcaccctgagcgattggagttcgtccatgatggcctcgagaccgatgattatgaatactctgtgtttctccactttcttgaactaaatggcactgtcagagcaggacaaagggtgtttgacatctatctaaacaatgagattaaaaaggagaaatttgatgttttggctggagggtccaagaacagttacactgccttgaacatttcagcaaatggatcactcaatataaccttagtcaaggcatctggatctgagtttggaccccttttgaatgcctatgaaatcctgcaggcacggtcgtggattgaagagaccaaccaaaaagatttggaagttattcagaagatgagagaagaactgctgctgcacaaccaagaaaatgaagcattggagagttggagtggagacccttgtatgattttcccctggaaaggaataacatgtgatgattcaactggttcatctattatcactaagctggatctttcttccaataatctcaagggagcaattccttccattgtcactaagatgaccaatttacaaatactgaacctgagccacaaccagttcgatatgttattcccctcgtttccaccgtcctccttgctgatatcattggatcttagctacaatgatctttcaggatggcttccagaatccattatctcactgccacatttaaaatcattatattttggctgcaatccatctatgagtgacgaagatacaacaaagttgaacagttcactaatcaatacagattatgggagatgcaaagcaaaaaaaccaaagtttggacaagtattcgtgattggagctattacaagtggatcacttttgattactttggctgttggaattctatttttttgccgttatagacacaagtcaattactttggaaggatttggaaagacctacccaatggcaacaaatataattttctctttgccaagcaaagacgatttcttcataaagtctgtatcagttaaaccgttcactttggagtatatagagcaggctacagaacagtacaaaactttaataggtgaaggaggatttggctctgtttacaggggcactctagacgatggtcaagaagtggcagtgaaagtgcggtcatccacatcaactcagggaacccgagaatttgataatgagctaaacctactttcagctatacaacatgagaacctggtgcctcttctgggttactgtaatgagtatgatcaacaaattctcgtgtatcctttcatgtccaatggctctttgctagatagactatacggggaagcatcaaagagaaaaatattagactggccaactagactctctattgctctcggtgcagctcgaggtttggcatatcttcacacatttccaggacgttctgtaatacacagggacgtaaaatcgagcaatatactgctggatcagagcatgtgtgctaaggttgcagattttggtttctcaaaatatgctcctcaggaaggagacagttatgtttcccttgaagtaagaggaactgcagggtatctggatcctgagtactacaaaacccagcaattatctgaaaaaagtgatgttttcagctttggtgtggttcttcttgaaattgtaagcggacgggaacctctcaacataaagagaccaaggatcgagtggagcttggttgaatgggctaaaccatacataagagcatcaaaggtggatgaaattgtagatcctggcatcaagggaggatatcatgcagaggcattgtggagagttgtggaagtagcactacaatgtctagaaccctactcaacatatcggccatgcatggttgatattgtccgcgagttggaggatgctctcattattgaaaacaatgcatctgaatacatgaaatccatagacagccttggaggatccaaccgctactcaattgttatggacaaacgggcgctgccttcaactacatctacagcagaatcaactatcacaacccaaaccttgtcacaccctcaaccgagatag

SEQ ID NO: 284 - DNA, 1755 bp, Phaseolus vulgaris
atgtgtggtattcttgctgttcttggttgttctgatcactctcgagccaaaagggttcgcgttctagagctctctcgcagattgaagcaccgtgggcctgattggagtgggctccatcaacatggtgactgctttttggcacatcaacgtttagcaattgtagatccagcttctggggatcaacctctcttcaacgaggacaaatccgtcattgtcacggtaaatggagagatttacaaccatgaagaactcaggaaacagcttcctggtcacaagttccgaactggaagtgactgtgatgttattgcacacttgtacgaggaacatggagaaggctttgtggacatgctggatggtatcttctcgtttgttcttctggatacccgtgacaacagttttatagtggctcgagatgctataggggtcacttccttgtacattggttggggattagatggctctgtttggatttcatctgaaatgaaaggcctgaatgatgactgtgaacattttgagtgttttccacctggtcacttgtactctagcaaagacagagggtttcgcagatggtacaaccctccttggttctctgaagctattccatctgccccttatgaccctctagttttgagacgtgcctttgagcaggcagtgataaaaaggttgatgactgatgtgcctttcggtgttctactttctggaggtttggactcttcactggtggcatccatcacttctcgctacttggccaacacaaaggctgctgagcagtggggatcaaagttacattcgttctgtgtaggacttgagggctcaccagatttaaaggctgcaaaagaagttgctgactatctaggcactgtccaccacgagtttcacttcactgttcaggatggaatagatgccattgaggatgttatataccatgttgaaacttatgatgtgaccacaattagagcaagcacgcccatgtttctcatgtctcggaagattaaatcactaggtgtcaaatgggttatctccggagaaggatcagatgagatctttggagggtatctgtactttcacaaggcacccaacaaggaggagtttcacagagaaacatgccgcaagatcaaagcactccaccaatatgactgcttgcgagcgaataaatcaacatttgcttggggtctagaagcccgagtaccatttttggacaaggagtttatcaatgctgcaatgaacattgaccccgagcataaaatgataaaaagagatgaaggacgaattgagaagtggattctgaggagagcctttgatgatgaagaccagccttatttgccaaagcacattttatacaggcagaaagaacaattcagtgatggagttggctatagttggattgatggccttaaggctcatgctgcaaaacatgtgactgacaaaatgatgcttaatgctggtaacatctatccccacaacaccccagtaaccaaggaagcatactactatagaatgatctttgagaggttcttccctcagaactcagctaggctcactgttcctggaggagcaagtgttgcatgcagcacagccaaagctgttgaatgggatgctgcttggtctaacaaccttgacccttctggtagagcagcacttggagtgcacatttcagcttatgagaaccagaacaatttagccaacaaaggtgtagaaatagagaagattatacctatggatgctgctcctcttggtgttgccatccagagctaa

SEQ ID NO: 285 - DNA, 1845 bp, Oryza sativa
atggctccggcggcggtggctgcggcggaggcggggtcgaaggcggcggcggtggcggggaaggccgtggcggcgtgcgagcgcgacgcggagaagctggagttcatcgaggagatgacgagggggttcgacgcggtgcaggagcgggtgctggcggcgatcctggcgcggaacaacggcgccgagtacctccgccgccacggcatggaagggcgcaccgaccgggaggcgttcaaggcgcgcgtccccgtcgtcacctacgaggacctccgcccggagatcgagcgcatcgccaacggcgaccgctccaacatcatctcctcccaccccatcaccgagttcctcaccagctcggggacttcggcgggggagaggaagctaatgccgacgatagaagatgagctggacaggaggcagatgctctacagcctcctcatgcccgtcatgaacttgtacgtgccagggctggacaagggcaaggggctctacttcctgttcatcaagtcggagacgaagacgcccggcgggctgccggcgaggccggtgctgaccagctactacaagagcgatcacttcaagcaccgccccttcgacccctacaacgtgtacacgagcccgacggcggccatcctgtgcaccgacgcgttccagtccatgtacgcgcagatgctgtgcggcctcgtggcgcgcgccgaggtgctccgcgtcggcgccgtcttcgcctcgggcctcctccgcgccatccgcttcctccagctccactggagggagctcgcccacgacatcaggaccgggacgctgagcgccaaggtgacggagccgtccatccgcgacgccgtggcggaggtgctcgcggcgcccgacgccgagctcgccgcgttcgtggaggccgagtgcgggaaggacaagtgggaggggatcatcaccaggatgtggcccaacaccaagtacctcgacgtgatcgtcacgggcgccatggcgcagtacatccccacgctcaagttctacagcggtgggctccccatggcgtgcaccatgtacgcgtcgtccgagtgctacttcggcctcaacctgcgccccatgtgcgacccgtcggaggtgtcgtacaccatcatgcccaacatgggctacttcgagcttatgccgcacgacccggacgcgccgccgctgccccgcgacgcgccgccgccgcggctcgtcgacctggccgacgccgaggtcgggagggagtacgagctggtgatcaccacctacgcggggctctgccgctaccgcgtgggcgacatcctgcaggtgaccgggttccacaacgcggcgccgcagttccggttcgtccgccgcaagaacgtgctcctcagcatcgactccgacaagacggacgaggcggagctgcaggccgcggtggagcgcgcgtccgcgctgctgtccccctacggcgccagcatcgtggagtacacgagccaggcggacgcgaccaccatcccggggcactacgtggtgtactgggagctgatggtgcgggagggcggcgcgtggccgccgccggcggaggaggagggccgcggcgtgttcgaacggtgctgcctcgagatggaggaggcgctcaacgccgtgtacaggcagggacgcaacggcgaggccatcgggccgctcgagatccgggtggtgcgcgccggcacgttcgaggaggtgatggactacgccatctcccgcggcgcctccatcaaccagtacaaggcgccgcgctgcgtctccttcggccccatcatcgagctgctcaactcgcgcgtcatctccaagcacttcagcccggcttgccccaaatacagcccgcacaagaagtag

SEQ ID NO: 286 - DNA, 1728 bp, Vitis vinifera
atggataactctgtagctccaatggtgattactgatgatggtcttcaagagaccgccatctcctccaagacaaatccctccaaaggtcgatggagagctgccattttcatcatctttgttgaaatggcagagaggtttgcttactacggggtggccggaaacctcttcacctacctcaccaatgtcctcggtgagcacaccgccaccgccgccaaaaatgtaaacacctgggtcggcgtctccgccatcttcccgttgctcggaggctttatcgctgattcctaccttggtcgcttcaagaccattatagcatcctctgttatttacctcgccggactactcttgatgactttgtcggtatcagtgcaatcactccgacatcaccgcgcagtgtttttcacggcgctgtacatactatccataggagaaggagggcacaaaccatgcgtgcagacctttgcagccgaccaattcgatgaagacaccgtggaggagaagaaggacaagagctccttcttcaattggtggtacgtggggatagtggtcggctccaccaccgccatcctcgtggtgatttatgtgcaggacaatgtggggtgggggctcggctttggaatgctggcggcggccgtagcagcagctctgctattattcctaattggaattagaagttaccggcgccagcgcccagtgggcagccctctgactagggtgatgcaagtgttggtggccaccgccaggaagctgcgcgtgaacgagacgcgctatggccgaggtgtttgtttggaggatgagggcgatgatggggtggaggagggtggcaggcgaggcaggagtttggctcctacaaatcaattcagatttttggataaggcaaccatcattgacgatattgatgcctcaaccaaggtgagaaaccactggaggctatgcccagcgacccaagtggaggaagtgaaacttctcttcagcctgtttcctatttggttgagttgcttgacatttgccactgtgatagcacaaatgagcacctacttcaccaagcaaggcagcactctggagagatcaattggctcccacttctccatacccccagcttcacttcaagtctgcactggcctcactatccttgtttccgtcggactatatgatcgggtccttgtcccggttgctagaaaattcactggactcccctctggtataacaatgctccagaggataggcactggaatattcttttccatgcttaccatggttgtagcagctcttgtagagaccaaaaggatcagcgttgccatagaccatggcctcacggattctcccagaacaactctccccatgaaaatatggtggttgctcccacaatacatgctgacgggaatgtgtgatgtgttcaccattgttgggatgcaggagcttttctacgaccaaatgcctgaagagatgagaagcattggagctgccttgtacatcagcacagtgggcgtggggagcctcatgagcagtgcagctatatcaattgtgcaggctataacatcaagagctggaggaaaatggctgggagataatctgaatcgtgcccacctcaattacttctactcggtgttggcaggatgtagtgctttgaatttgattgtttacatctgggttgctaagcgctttgtgtacaaaaaaactggatatgatgatccgaaaggagaacagaaaaaagcagcagagcttgcatag

SEQ ID NO: 287 - DNA, 558 bp, Oryza sativa
atggcgagattgatgtcgtccgccctcatcaggggtctcgtgagatcgagctgctcgccgaccgtagctgctgtggcccaaccaactatccatcagtttaggaactactcatcaggacttggtggcgattctactgcaactggggactcaagttcaacacgagttgctgctgatcctgatacacatcaagatttccagcctacaaccaaaagttccaacatgtcttttgatgacattgtttctcaggatatcaaggagaacccagtcctgatctacatgaagggttatcctgatgctcctaggtgtgggttcagtgcgttggcagttagagtcctcaagcaatatgatgtccctatcagtgctagggatattttgggagacctcaagctcaaagagagtgtcaaagcccacaccaactggcctacatttccacaaatatttatcaaaggagagtttgttgggggatctgatatcatattagatatgcatcagaagggtcagcttaaggatgtgcttggtgatattgcacaaaagcgtgaacaaaacgaatcatcatag

SEQ ID NO: 288 - DNA, 1077 bp, Oryza sativa
atggcacagcaaaatggagcttcttccactagtagtgcagaagatgcattgaacaagagattggagcagcttgtcaattcccatcccgtcttcttatttatgaagggaacccctgagcaaccaaggtgtggtttcagtcgaaaagtagttgacgttttgaagcaggaaggagttgaatttgggagctttgacatcctaacagataacgatgtacgtgaaggaatgaaaaagttctcaaactggccgacttttcctcagctctactgcaaaggtgagctgcttggtggatgtgatattgtgattgctatgcatgaaagcggtgaactgaaggatgtttttaaggagcacaacattccgctgcagccacagggaagcaaaaacgaggaggcagtgaaagccaagcctgatactgagaagagtggtgcagtttctgaaccagctttgcttactgcagctcagaaggaacgcttggaaagccttgttaatttcagcacagtgatggcatttataaaaggtacacctgaggagcccaagtgtggattcagtggaaaactagtgcatattcttaagcaagagaagatccctttctcaagttttgacattcttacggatgatgaggttaggcagggtctaaagcttctctcaaactggcctagttaccctcaactgtacataaacggtgaactggttggcggatcagacattgttatggagatgcataagagtggggagcttaagaaggttctatctgagaaagggatcgttgcgaaagaaagtctagaagaccgcctgaaggccctgatttcctctgccccagtgatgctcttcatgaagggcaccccagatgccccccgctgcggcttcagttcgaaggttgtgaatgcactgaagcaagcaggagtcagcttcggagcgttcgacatcctatccgacgaggaggttaggcaaggcttgaagacgtactccaactggcccacgttccctcagctgtactacaaatcagaactgattggaggctgtgacatcgttcttgagctggagaagagtggagagctgaagtccacgctttcggagtga

SEQ ID NO: 289 - DNA, 309 bp, Arabidopsis thaliana
atggacaaagtgatgagaatgtcttcagagaaaggagtggtgatcttcacgaagagctcatgttgtctctgctacgccgttcaaatcctgttccgtgaccttagggttcaaccaaccatccacgagatcgacaacgacccggactgccgtgagatcgagaaggctcttctccggctcggctgttccacggcggttccagctgtctttgtcggaggcaagcttgttggctccaccaatgaagtcatgtcccttcaccttagtggctctcttgtcccattgatcaaaccctatcagtccatcctttactag

SEQ ID NO: 290 - DNA, 2046 bp, Arabidopsis thaliana
atggcttccatatccattaactgtttcttcactcctcaagctctagcccgacccagtaggacgaggaagattttcgctaaacctgacaaagtctcgggaagaacccgaagccctagaaaaacgaagcttcaacgcgaagtcgagcttaaatctcgaggcggtgataaactccagccagtttctgatgccggcggcgaagccactacttatacacgtcttcctcctagggaagattactatgatgtctctcttttgtcttcatcttatttaaaagtttctgaagaagtgaagctatctgagtccaatgtcgcgagggttgaggaaaagattgaaactttgagggaaattgaggaagaagagaaagaaaaggaggtgaagagttatgatgatgatgatatttggggaaattacagaagattagatgtgtttgaagggagttcaagatcaattgatgaagatgatgaagattgggaagacgaagtgtttgagtatggtgatgaaactgatgcggagaaagatgatagtgaagggtctgaattgaaggatggagaagtgttatgtttctccggtgaagaggaagaggatgaaattggggtgaaggagaaaggagttccggctgtgatgaggtgtttcgatagagcgaagatatatgttagagccggagatggagggaatggtgtggtggcgtttaggagagaaaagtttgttccttttggaggaccttcaggtggagatggagggagaggagggaatgtgtatgtagaggttgatgggtctatgaattcgttgttgccatttcgcaagagtgtgcatttcagggcgggacgtggggaacatgggagagggaagatgcagagtggagctaaaggtgataatgtcgtggtgaaagtggctcctgggacggtggttagacaggctagagaggttgggagtgaggtggagggtgaggaaggggaggagaaggaggtgcttttggagttgttgcatccgggacagagggcgttgttgttgcctggagggagaggtggacgagggaatgcttcgtttaagtcggggatgaataaagttcctaggattgctgagaatggcgaagaaggtcctgaaatgtggctggacttagaactgaaactggtcgcagacgtaggtattgtgggtgctccaaatgcaggaaaaagcacattgttgagcgtgataagtgccgcacagccaaccatagcaaattacccattcaccacattacttcccaatctaggtgtggtttcatttgattacgattcaacaatggtggtcgcagatcttcctggtttgctcgaaggagcgcacagaggcttcggtttaggccatgagtttcttcggcacactgagagatgttcagcactggtacatgttgtggatggttcagctccacaacctgaacttgagtttgaagctgttcgtctcgaactcgaactattcagtcctgagatcgccgagaagccttacgtagtggcatacaacaaaatggacctcccagatgcttacgagaagtggccaatgtttcaagaaactctccgtgcccgtgggattgaacctttttgtatgagcgcagtacaaagagaaggtacacatgaagtaatctcgtccgtttatgaactcctgaagaagtacagagcagccaatgcagaacccaaagcattgttcgatcaagcaaatgagaatctggaccatgtagctaagaagattgataaggaacgacgagcagccattaatgagtttgaggtcttccgcgatagcggtactagggcttggcatgtagttggagccgggcttcaacgttttgtccagatgactaactggaggtacatggattcagacaaaaggtttcagcatgtacttgatgcttgtggtgtgaataaatcactgaagaatatgggcgttaaagaaggcgataccgtcatcgtaggagagatggagttgatatggcatgattcagccaatggctcgagccgtcccacagattcaaacaagacttcgacagactcagtcagatggcctcaatggaaatga

SEQ ID NO: 291 - DNA, 927 bp, Arabidopsis thaliana
atgactaatgctcaagagttggggcaagagggttttatgtggggcatatccaattctgatgattccggaggtggttgcaaaagaatcgagaaagaaccgcttccatcacatccgtctcatccgtcgccagagatccagactacgacggttaaaaagggaaaaaagagaacgaaaagaaatgataaaaaccatgaagaagaatcacctgatcatgaaatacatatatggaccgaaagagaaaggagaaagaagatgagggacatgttttctaaattacatgctttgcttccccaacttcctcctaaggcagacaaatcaacaattgtagatgaagcagtgagttcaatcaaatcccttgaacaaactttgcaaaaacttgaaatgcaaaagcttgagaagcttcagtattcttctgcctcaacaaacacaactcctactacaacttttgcttatgctccatcatcatcctcttctccaacagctctcctcacaccaatatcaaaccatcccatagacgccaccgcaacagattcttaccctcgcgcagctttcttggccgatcaggtatcttcttccagtgccgctgctgcgaacctgccttacccttgtaatgatccgatcgtgaatttcgatacttggtcctcacgtaacgtggtgctgactatctgtgggaatgaagctttcttcaatttgtgtgtccctaaacacaaaccaggggttttcacttctgtttgttacttgtttgagaagtacaacatggaggttttgtttgctaatgtctcctctaatgttttctggagcacctacgtgatccaagcacaggtaaatccgagttgtgagaatcagttactgggaaatggtcttggagttgtagacgttttcaagcaagtttctcaagaactggtgttatatttttcatctctataa

SEQ ID NO: 292 - DNA, 177 bp, Zea mays
atggcggggccagttgcggcggtgacggaggcgtgggacaagctcaccgtgttcctgtactcccagctctacgacgagaggaactgggccaaaaacaagaagttggcgaaggctcttggtgtgttcgctggatccatcctgttcatgcgcacctgtggtgatatggtggccatctag

SEQ ID NO: 293 - DNA, 2307 bp, Arabidopsis thaliana
atgagctttacaagatgggaagtgttctttggtctctctgttttagccttgacaatgcctttctcagctggagttactaatctacgagatgtttcggcgattaataacttgtatatcactttgggagcaccatctctacatcattggcttgcttttggaggagacccttgtggagaaaagtggcaaggtgtggtgtgtgactcctcaaacatcacagaaataaggatacctggcatgaaggtaggtggaggcttaagtgatactctggctgatttttcatctatccaagtcatggacttcagtagcaatcatatttcagggacaattccgcaggctttgccttcttccatccgaaacctatctctctcaagcaatcgcttcactgggaacattccctttacattgtcctttctatccgatttgtctgaactgtcattgggaagcaatcttctatcaggagagataccagattactttcagcagctatcaaaactgacaaaactggacttatcgtctaacatactggaggggcatttaccttcttccatgggagacttagcttctcttaagatattgtatttgcaggacaacaagctcacaggaacacttgatgttatagaggatcttttcttaaccgatttgaatgtagaaaacaacttattctcgggacctataccgccaaatctattgaaaattccaaacttcaaaaaagatggaactccgttcaatacatcgattataacaccaccgcctccgcctgtggttgatcctcctcccgctactcaccgtgctcctcctgttccccgtatccctcctgtttctggtgttcccccagcaccttttgctccttttgctccactgcaaccacaacaacatccaccaccatcaccacctctggtctggtcaccaccttcttctgataatggaggaggagatccctggaactctgtgtcagggcaacctaccttgcaaatatcacctccttcaggttcaggatcaggaaaattctggtccactcaaagaatcattctagtagtttcttcagtggccataattgttcttgtatccggtttgtgtgttacactttggagatgttgcagaagtaaaatatataaccgatattacagtggagctcgtaaagatttacaacgaccatacttcaataagcctccatctcaaccaacccccactatgggaaaagtttctcgggagcctatggttaagcctttcgatggatatggagctggagacaggaaatatgggtatccaatgccacagcgggctgaagagagccggagagcaatgcctcctacttcatattataataaggatgttaatacacctcaaaagccgctgcaacaaccaccgaggcagttccagtccaatgatactgcttcaaagagagcggctcatttccccccgggcttgaattcctcatcttctgctactgttttcaccattgcttcacttcagcaatacacaaataatttctcagaagagaatataatcggggaagggtcgattggtaatgtctacagagctgagcttcgtcatggaaagtttcttgcggtgaagaagctgagcaataccatcaacagaacacagagtgacggcgaattcctcaatctagtctccaatgtgttgaagcttaaacgcggtcatatattggagcttcttggttactgtaacgagtttggtcaaaggttacttgtgtatgagtactgtcctaatggatcacttcaagatgcactacatttggatcgcaagttgcacaagaagctcacttggaatgtacgtataaatattgcattaggagcttcaaaggcattgcagtttcttcatgaggtatgtcaaccgccggttgttcaccagaatttcaagtcttccaaggttcttcttgatggaaagctctcagtacgtgttgcagacagcggtttggcttatatgttaccaccacgcccaacgagtcagatggcgggttatgccgctcctgaggttgagtatggaagctacacttgtcagagcgacgtatttagccttggggttgtaatgttagaactgctcactggacgcagaccatttgacaggacaaggctgaggggacatcaaacactagctcagtgggcgattcctcggcttcatgacatcgatgcgttgacaagaatggttgatccgtcattacacggagcgtatccaatgaaatcattgtcacgttttgcagatatcatatcacgttcactgcagatggaaccaggatttagaccgccgatatcagaaatagtccaagatcttcaacatatgatctag

SEQ ID NO: 294 - DNA, 2277 bp, Arabidopsis thaliana
atgatctttaaaatcgaagacgtaactgtctacttcccttatgacaacatatatccagaacaatatgaatacatggttgaattgaagcgagccctagacgctaagggacattgtcttctcgagatgcctaccggaactggtaaaaccattgctcttctctctctaatcaccagctatcgactctctcgtcctgattctccgatcaagcttgtttactgtactcgtactgtccacgagatggagaaaacgttaggtgagcttaagctactacatgactaccaagtacgccatctcggcacccaggctaagatcctcgcccttggtctttcctctcggaagaatctttgcgttaatactaaggttttagcagccgagaatcgtgattctgttgatgcggcctgtaggaaacgaactgctagctgggttagggctttgtccacggagaatccaaatgtagaactctgtgacttctttgagaactatgaaaaggctgctgagaatgcgttgttgcctcctggtgtttatactttagaggatctaagggcgtttggtaagaatcgtggatggtgcccttactttctcgcgaggcatatgattcagttcgccaacgttattgtttacagctaccaatacctactggatcctaaggttgctgggttcatatcaaaggagttacaaaaagagtcagttgtagtgtttgacgaggcccataatatcgataacgtgtgtattgaagcactcagcgtcagtgtgaggagggttacacttgaaggagctaatcgaaatcttaataagataaggcaagaaattgataggttcaaggctactgatgcaggaagattgcgagctgaatacaaccggctggttgagggtttagcactgagaggggacttatctggaggtgatcaatggcttgcaaaccctgcactgcctcatgatattctaaaggaggctgtcccggggaatattagacgggctgagcattttgtgcatgttttacgccgattacttcagtacttgggggtacggctggacactgagaatgtagagaaagaaagccctgttagctttgtatcgtcactgaattctcaggctggaattgagcagaaaacactgaagttctgttatgaccggctccagtctctcatgctaacccttgaaattacagatacagatgagtttttgcctatccagacagtgtgcgactttgcaactcttgttgggacatatgcccggggattttccatcatcatcgagccttatgacgagagaatgccccatattccagatcctatattgcagttgagctgtcatgatgcgtctctggcgatcaaaccggtgtttgatcgtttccagtcagtcgtgattacatcaggcacattgagcccaattgatctttacccccgtcttcttaatttcactcctgttgttagtcgaagctttaagatgtcaatgacacgagactgcatctgccctatggttctaactcggggaagtgatcagcttcctgttagcaccaaatttgacatgagaagtgatcctggtgttgtgaggaattacggaaagcttttggtagagatggtatctattgttcctgatggagttgtctgcttctttgttagttactcatatatggatggcattattgctacatggaatgaaactggaattctgaaggaaataatgcaacagaagcttgttttcattgaaacacaagatgttgtagaaacaacattggcactggataattatcgcagggcttgcgattgcggaagaggtgcagttttcttctctgtggccagggggaaagttgctgaaggtatcgattttgatcgtcattatggaagactggttgtaatgtacggagtaccattccagtatacattaagcaagatattacgagcaagattggagtatttgcacgatacatttcaaataaaagaaggcgatttcctaacttttgatgccttgaggcaagcagctcaatgtgtagggcgagtaatccggtcaaaggctgattatgggatgatgatatttgcagacaaaagatacagccgtcatgataagcggtccaaactacctggttggatactttcgcatctgcgtgatgcacacttgaatctaagcactgatatggctattcacattgctcgagagtttcttcggaaaatggctcaaccgtatgataaggcgggtacaatgggaaggaaaactctgttgacacaagaagatttggagaagatggctgagactggtgtgcaagacatggcttattag

SEQ ID NO: 295 - DNA, 669 bp, Arabidopsis thaliana
atgtcttcaacaacaacagattctacagaattgcaaaatctgatcaaactgtttcaaaattgccaaactcatcctcgtcaacattttcctgcaaaatcttcagctgtattagtttgtctataccaagaacaaagagaagacaaaaacgagctacgcgtaatcttaaccaaacgatctactactctctcttctcatcctggggaagtagcattgcctggaggaaaaagagaccaagaagataaagatgatatagctactgcgttgagagaagctcgtgaagaaatcggtttagatccttctcttgttacaatcatttctgttcttgaaccatttgttaacaagaagggaatgtcggtagcaccagttatcggttttctacacgataagaaagcgtttaaacagttaccaaatccagctgaagtggaagagatctttgatgtgccattagagatgttcctcaaggacagaaacaggcgagcagaggaacgagagcatgaaggagagagatatcttcttcaatactttgattactattccgaagataaagagagaagctttatcatatgggcactcactgctggtattctgatcagagttgcctccattgtttatcagagattaccggagtttcaagaacgtaaaccgagtttctggaatcagcctaactag

SEQ ID NO: 296 - DNA, 1314 bp, Arabidopsis thaliana
atggcgacgaacggatcgtcggagcatcttctcccggagacgacaagaccaagcgcgatcatcaacaaacaacaaccggagtttcctgcatcacgattcacgttcatgtccctcgtgctctggttcgaccagtcaaatttcggtacggctctgctttcgtggtccgttttcttccttctcgtcgtcatcgttcctttgatctctcacttcttgctcgtttgctccgactgcgatttccatcaccgacgtccgtacgacgttattgtgcagctttcgttatcgattttcgcaggaatctcgttcgttagcttatcgatttggtcgagaaaatttgggatgcgacggtttttgttccttgataagctttgggatgttagcgacaaagttagaatcgaatacgaagctgaaattcagagatcactaaaacggctaatgatcttcgtcctcccatcactaacactcgaagcaacctacagaatctggtggtacatctctggcttcaaccagattccttacatcatcaatcctattcttagccacgtcgtcgcttgcactctccagctctcttcttggctttaccgtaactccttattcatcattgtctgcattctctacaaaatcacatgtcatctacaaactcttcgtcttgatgacttcgctcgttgcttcgcttctgagatcactgacgttagatcagctctcggcgagcatcaaaagattcgtcgtaatttgaggattgttagtcatcgattcaggagatttattcttttgtctttgattcttgttactgctactcagttcatggctttgcttactactacgagagctagtgttgctgttaatatctatgaagttggcgaactcgcgttatgttcgttgagtttggttacaggagtattcatatgtttgagaagtgcaacgaagataactcacaaagctcaatctgtaaccagccttgcagctaaatggaacgtttgcgcaacagttgactcgtttgatcatcttgatggcgaaactcctactggttccattattgaatctcaagtttccctacgcggcaatgcgatagagacgtctgatgatgaagaaggagaaggagacgatgatctcgataataccaagatacatcccatctatgccaatacaatttcttaccaaaaacgtcaagctctagtgacgtatctagagaacaacaaagctgggatcactgtgtatggattccttgtagatagatcatggttgaatacgattttcgggattgagctcgctcttctactatggttgctcaataaaacaatcgtgaatataccatga

SEQ ID NO: 297 - DNA, 660 bp, Capsicum annuum
atgcagaagtcaactgctacggcatttgagaattcttcgtcctcggggaatggcagcaatgatgctggtgattttgaatgcaacatctgctttgaattggcacaagaccctattgtgaccctctgtggtcacctctactgttggccatgtctttatagatggctaaggcttcactctcaatcccatgactgccctgtttgtaaggcccttatacaagaggagaagttagttcctctttatggaagagggaggacgtcaactgatcccagatcaaaaccagtacctggagttgaaattcctagaaggccagcagggcaaagacctgaaacggctcctccaccagaatcaaatacttttcctaattccgggtttggccttatgggaggactttttccaggagcaactgcaagttttggtaactttacaatgtctgctggtttcggtggatttatcccatccttgctcagttttcagtttcatggattccctggtccaactgcctttggtacaacaccaaattaccagtatgggtatcctcctgcctatcatggggcgaatgttcagaatgctgcacacccgtcccaaggacaggcagacaataatctgaagttcatgttcttgcttgttggatttcttgtattcctatatttgtttggttag

SEQ ID NO: 298 - DNA, 678 bp, Glycine max
atggtgaggggaaagactcagataaagcgtatagagaacgccacaagcaggcaagtaactttctcaaagcggcgaaatgggttgctgaagaaggcctttgagctatcagttctgtgtgatgctgaggttgctcttatcatcttctcttcaagtgggaagctctatgaatttgctagctccagcatacagtgttcaattgaacgataccgcaggcataccaagcatgataatccaactacattcagatcagttgaacaaaatatgcagcatttgaagcaagaggcagcaaacatgatgaagaagattggccttcttgaagctgcaaaacggaagttcttgggggaagggttgggggcttgctccattgaggaactgcaatggatagaacaacagttggagaggagtttaagtaatgttagaacaagaaagatccaggttttcaaggaacaaatcgagcaactaaaagaaaaggaaaaagtcctacttgatgaaaatgtcaagctcactgaaaatggcaggctctctgagaagcatggaatcaatctacaaacagaaacaaagaaacagaatgtgaatcaaccccaatacaatgcaggtagtccaagttcagatgtggagaccgaattgatcattggacttccggatacaagaacaaggcgcatcgttcatcaggtctag

SEQ ID NO: 299 - DNA, 666 bp, Gossypium hirsutum
atggtgaggggaaagactcaaatgaagcgcatagagaaccctacaagcaggcaagtgaccttctctaagcgtcgaaatggtttgctaaagaaggcgtttgagctatcagttctttgtgatgttgaggttgctcttataattttctctcccagaggcaagccctatgaatttgcaagctctagcatgcaggagacaatagcacgttacttgaggcataccaaggataatcgagtcaagccaactgaacaaagcatgcagtggcagcatctgaagactgaagcagaaaagatgctgaagaaaatagagcttcttgaagtttcaagacggaagctgctgggagagaatttgggttcatgcacactagaagaactacaacagattgaacaacaattggaaaggagcgtaacccgcgtcagagccagaaaggccaaagttttcaaggaccaaatagagaaattgaaagaaaaggaggaagtcctagccgctgaaaatgcaaagctttgtgaaaagtacggtctgttgccagggaaaggatcaaaggaggtgaatgagaatgaagaagcaaatgatgaaagcaatccgagctccgacgtggagactgaactattcatcggactaccagaagggagagctaaacggatcgtgcaacccaactcaacagattga

SEQ ID NO: 300 - DNA, 1437 bp, Glycine max
atgtctatagcattgggaaacttatttgatttggaatcacaagaaagtggtggttctcctttatttatgtcaccagccccctccacggatccacaaccaatctccggcgaaaaaaacggcggcgatggtggtaggattccggtagaagagtggctgccgatcacagaatcaagaaaaggaaatgtttatacggcgacgtttcatcttctctgttcgggaattggtctccaagtgattcttcttcctgcagctttcgcagcactcggatgggtatggggaacgataatcttaacggtagggtttgtatggaagctctacacgacgtggcttcttgttcaactccacgaagcggttccgggaattcgtatcagcagatacgtgagactcgcaattgcttcttttggtgtgaagcttgggaaacttctcggaatattccctgtgatgtatctctcaggaggagcttgtacgattctggttataaccggagggaaatcaatacaacaactgttacaaattatgtctgacgacaatacagcgccacttacttcagtgcaatgcttcttggtttttagttgcattgcgatgatcatgtctcagtttccgaatctaaattctctctttggagtctcgttgatcggtgcttttatgggaattgcgtattgcaccgtgatatggattttacctgtagctagtgactcacaaaggactcaagtcagtgtctcgtacgctacaatggataaaagtttcgttcacattttcaacgctattggattgatagctctagtatatcgcgggaacaatctcgtccttgagatacagggtactcttccttccgattcaaagaacccttcatgtaagacaatgtggagagcagtgatgatctctcatgctctcgtcgcgatttgtatgtttccattaacgtttgctgtatattgggcatacggagacaagattccggcgacgggaggtcccgtgggcaactatctgaaactttacacacaagagcactcgaagcgagcagcctgtttcatacacctcacgtttatcttctcttgcttatgttcatatccgataaacttaatgccggcgtgtgacaacatagagatggtgtacataaccaagaagaaaaagcctgcatccatcattgtccggatgatgttgcgtgtgtttttgagcttggtttgtttcactatagccgttggattcccgttcttgccttatctagcggttcttattggagcaatagccttgcttgtgacgtttacgtatccatgtttcatgtggatctctatcaaaaagccccaaaggaaaagcccaatgtggttgtttaacgttttggtgggttgcctaggtgcttctctcagcgttttgcttctggttgcctcggctatgcgtttggctcaaaagggtttgcatgctaacttcttcagaccctaa

SEQ ID NO: 301 - DNA, 1404 bp, Glycine max
atggacattaaagaagatgacgagtctcgagttataacaccaaccgagcttcaacttcatgattcagttactgcaagaacaggaacgttatggacggcggtggcacatataataacaggagtgataggagctggagtgttgtcgttggcttgggccacggcggagctcggctggatcgctggtccggccgcccttatagccttcgccggggtcacacttctctctgcttttcttctttccgattgctaccgtttccctgatcctaacaacggtcccctccgactcaattcttactctcaagccgttaaattgtatttagggaagaagaatgaaattgtatgtggagtcgttgtatacatttccctttttggttgtggcattgcttataccattgttatagctacatgcagtagagcaattatgaaatcgaattgttatcatagaaatggacacaatgcaacatgttcatatggagacaacaacaactacttcatggttttgtttggtttgactcagatatttatgtcacaaatacctaatttccacaacatggtatggctctctcttgtcgccgctattatgtcttttacttactcgttcattggcatcggcctcgcccttggcaaaatcatagagaatcgaaaaattgagggaagtataaggggaataccagcagaaaacagaggtgaaaaggtatggatagtgttccaagctcttgggaacattgccttttcatatcctttctcaatcatacttcttgagattcaggacacattgagatcaccaccggcagagaagcaaacgatgaagaaagcctcgacggttgcggtattcatccaaacattcttcttcttctgttgtggatgttttgggtacgcggcctttggagattccaccccgggaaatctcttgaccggtttcggcttctatgagccattctggctcgtcgatttcgccaacgcttgcattgttcttcatttagttggtggatatcaggtatacagtcaaccaattttcgcggctgcggagagatcgctaaccaagaaatatccggaaaataagtttatcgccagattctacggattcaaactgccattgttgcgaggagagacggtgagattgaacccaatgaggatgtgtttgagaacgatgtacgtgttgatcacaacgggagtggcagtgatgtttccctacttcaatgaagtattaggagtggtgggggcacttgcattttggcctctggcagtgtattttcctgtggagatgtgtatattgcagaagaaaatccgaagttggacgcgaccatggcttcttcttagaggtttcagctttgtgtgcttgctcgtctgtctcttgtctcttgttggatctatttatggacttgttggagctaaattcggatga

SEQ ID NO: 302 - DNA, 93 bp, Glycine max
atgaggcgagatccacttaccccaggcgtaactattagcatacttagtacttacatgctcaaacaacttcttatgaatgttaaattttattag

SEQ ID NO: 303 - DNA, 174 bp, Glycine max
atgccaccatcccctgaaaaggttaccctgcaacgccaacaacagctaccagttactgtacccataagtgatgatgccaatgataataataaagctcaattggtcataattggggatagaaaacgagacgacgtggaagccagaaccaccacggtcaatttatgtgggccttaa

SEQ ID NO: 304 - DNA, 411 bp, Glycine max
atggagaacactcaagatttctcgccaccacacatggatgcttctcggccgtcactaggattccctcttggcacagctctgcttcttatcatcattttcagcctctccggaatattctcttgttgttaccattgggacaaacatcgttctctccgccgctctttggccaatggtcgtccctccgccgacatcgagtctaatccttacaaacccaaacccccttttccggaaatgaagaaaccgcagaatctgagcgtaccggtgttaatgccaggagataatacacccaaattcatagcattgccgtgtccgtgtgcaccacctcgacctgaaaaactcaccgtagatgtccaaactccgccgcaatcaccgcctgttaagccggcgcgttttcctgttcctttgtattag

SEQ ID NO: 305 - DNA, 732 bp, Lycopersicon esculentum
atggataaattaatcaatcaagaaaataatattgataaagaaattatggagcttagaagaggtccatggactgttgaagaagatttagttcttatgaattatatttctcatcacggtgaaggtcgttggaattcactctcacgttgtgctggtttgaagaggacaggaaaaagttgcaggctaagatggcttaattatcttcgaccaaatgttcgacatggaaatattacgcttgaagaacaactcttgattcttcaacttcattctcgttggggcaataggtggtcaaaaatcacgcaacatttgccagggagaactgataacgagatcaaaaattattggagaactcgggttcaaaaacatgcgaaacaactaaaatgcgatgtgaatagcagacaattccaagatacattacgttatctttggattccaagactagttgagaggattgaagcatccaaaatttcgaattataattgtattaacgaagctcaacaatccattatgagaacacatattaataataattttagcactagcgttacactagaaaattcccgcgtggcaacttcatcaaaaaactctaatcaagattataatcaagttaatcaaagtgatcaattatggtatgaagattatcaagcaatggatcaacaaaataatatagaattatggatggataatgaagatgtttttaacaatttgtgcaacattgaagacatttggtcctaa

SEQ ID NO: 306 - DNA, 1260 bp, Triticum aestivum
atgtctgccgcggagggagccgtcgtcttcagcgaggagaaggaggcgctggtgctcaagtcatgggccatcatgaagaaggattccgccaacctcgggctccgcttcttcctcaagatctttgagatcgcgccgtccgcgaggcagatgttcccgttcctgcgcgactccgacgtgccgctggaaaccaaccccaagctcaagacccacgccgtgtccgtcttcgtcatgacgtgtgaggcggcagcccagctgcggaaagccgggaagatcaccgtgagggagaccaccctgaagaggctgggcgggacgcacttgaaatacggcgtggcagatggccactttgaggtgacgcggttcgctctgctcgagacgatcaaggaggcgcttccggcggacatgtgggggcccgagatgaggaacgcgtggggcgaagcctacgaccaactggtcgcggccatcaaacaagagatgaagccctccgagaacgagaacgctagcaaggctggcggttgggagggcacccgcgacttcaggattgtggctaagactcccaggtccgctctcattactagcttcgagctggagcccgtggacggcggtgctgtggctgagtaccgtcctggccagtacctcggcgtgtggctcaagcctgagggcttcccgcaccaggagattaggcagtattctctcactaggaagccggacggcaagggctaccggattgctgtgaagcgggaggaaggtgggcaggtctctaactggctgcacaatcacgctaatgtcggtgacgtcgttaagctggtcgctccggctggtgacttctttatggctgtcgcggacgatactccggtcactctgataagtgcgggtgtcggtcagacgccgatgctggcgatgctggacacgcttgcgaaggcggggcacacggcgcaggtcaattggttccacgcggcagagaatggggatgtccatgcgttcgcggatgaggttaaggagcttgggcagtctcttccaagattcacggcacatacctggtacagacagccatcggaagcagatcgagcaaaggggcagttcgattcggaagggcttatggatctttcaaagttagaaggagcattttcagatccaacaatgcaattttatctttgcggaccagttggattcatgcaattcacagcaaaacaacttgttgatttgggagttaaacaagaaaacatacactatgaatgctttggaccacataaggtattgtag

SEQ ID NO: 307 - DNA, 1209 bp, Physcomitrella patens
atgctgaacgagaagaccatccagatcattaagtccaccgtgcccgtgctagaggtgcacggcaccgccatcactaagcgcttctacgagcgcatgttcacccagcaccctgagctcctgcacatcttcaaccacgctaaccagaagcagggccgccagcaaaccgccctcgccaacgccgtgtacgccgctgccgtgcacatcgacaacctcgccgagatcctccccgtggtcaagcagatcggccacaagcaccgctccctcggcatcaagcccgagcactaccccatcgtgggcgagaacctcctggccgctatcaaggaggtgctcggcgacgccggcaccgacgagatcctcggcgcctgggccgaggcctacggcgtgatcgccgacgccttcatcggcatcgaggccgagatgtacgagcagtccagggagcaggtgggcggttgggccgacttcaggcccttcatcgtcgagaagaaagtccaggagtccgacgtcatcacctccttctacctcgtcccccaggacggtcaggctctggctactttcgagcctggtcagtacattagcgtcaagctggagattcctggtgagaggtacactcacattaggcagtacagcctgagcgacgctcctggtaggccttactatagaattagcgtcaagcgtgaggaagctaacgctgagaagcctgctggtattgtcagcacttacctgcacgagggtattcgtgagggggatgtcctgcagctgtctgctccggctggggatttcacgcttgagcagtctgaggctccggtcgttcttatttctgggggagttgggcttacgccgatgttctctatgcttgctagtcttgcggagaaccaggagcgtccggttacgttcatacatgcggttcagaatgggcaaaagcatgcgcttcgggcggaggttgagcggttggcgaaggataatccgcaaataagtgcgtactggtgctactcggagccaacagaacaagatagagaagcgggggcgttccataaggaaggatatttggatgcggaatggctagaacaagttgcaccagaaaagaatgcatcatattatttttgcggaccagttccatttatgtcagcagtaaaaaaagcattaacagaacggggaatatcggcagatcgaatgcattatgaattttttggaccagcagcatcgttgtga

SEQ ID NO: 308 - protein, 483 aa, Oryza sativa
MAAPSVAVDNLNPKVLNCEYAVRGEIVIHAQRLQQQLQTQPGSLPFDEILYCNIGNPQSLGQKPVTFFREVIALCDHPCLLEKEETKSLFSADAISRATTILASIPGRATGAYSHSQGIKGLRDAIAAGIASRDGYPANADDIFLTDGASPGVHMMMQLLIRNEKDGILCPIPQYPLYSASIALHGGALVPYYLNESTGWGLEISDLKKQLEDSRLKGIDVRALVVINPGNPTGQVLAEENQRDIVKFCKNEGLVLLADEVYQENIYVDNKKFNSFKKIARSMGYNEDDLPLVSFQSVSKGYYGECGKRGGYMEITGFSAPVREQIYKVASVNLCSNITGQILASLVMNPPKAGDASYASYKAEKDGILQSLARRAKALENAFNSLEGITCNKTEGAMYLFPQLSLPQKAIDAAKAANKAPDAFYALRLLEATGIVVVPGSGFGQVPGTWHIRCTILPQEEKIPAIISRFKAFHEGFMAAYRD

SEQ ID NO: 309 - protein, 213 aa, Glycine max
MAVLPSSSSSLELTISVPGFASSPTLLPSSSVKELDINQVPLEEDWMASNMEDEEESSNGEPPRKKLRLTKEQSLLLEESFRQNHTLNPKQKESLAMQLKLRPRQVEVWFQNRRARSKLKQTEMECEYLKRWFGSLTEQNRRLQREVEELRAIKVGPPTVISPHSCEPLPASTLSMCPRCERVTSTADKPPSAAATLSAKVPPTQSRQPSAAC

SEQ ID NO: 310 - protein, 191 aa, Glycine max
MSLPRPSEGKAPSQLKEGVAPAAAEASTSSSWNNRLNTFPPLSLHNKNSKIEDSDEDMFTVPDVEATPINVHSAVTLQNSNLNQRNVTDPQFQSGFPGKRRRGRNPADKEHRRLKRLLRNRVSAQQARERKKVYVNDLESRAKEMQDKNAILEERISTLINENTMLRKVLMNARPKNDDSIEQKQDQLSKS

SEQ ID NO: 311 - protein, 252 aa, Gossypium hirsutum
SVLPWEACRSSDHIFLRVFESETGFRRGVSSWEPYEYHMAEVEAQGLVSIRRERRRFCGLRLRRDRLKQGPRLSPWWTAASRSRAWRKMAMRWRRIRGARPKYCDRVNALSRYLLPHITNNINTHHSRRHPLDHYSHTTDLLIHAAACRSRPCSSYSSSSPSLHRHLPPGSATRRRPPRRQPWTLLPISSKSKTTKPTSFSTYRNKTLSLNLSHVIFIWFPRNPTSESLSLRLKDSQENMVRSSACFPREYR

SEQ ID NO: 312 - protein, 507 aa, Zea mays
MACSLSAPLARAVTAILLLASIICCCRSAPPGALVTRLPGFDGAKLPSKHYAGYVTVDEHVGSKLFYYLVESERDPARDPVVLWLNGGPGCSSMDGFVYEHGPFNFESGGSSGNLPKLHLNPYSWSKVSSVIYLDSPSGVGLSYSKNVSDYETGDLKTAADSHTFLLKWFQLYPEFQKNPFYIAGESYAGVYIPTLANQVVQGIHKGDNPVINFKGYMVGNGVCDVTFDGNALVPFAHGMGLISDDIYEQTNTACQGNYWNYSYSEKCADAVSNVDTVISGINIYNISEPCYHGTNTKEVISRRTINNRMPQSFKDLGVTSRPLPVRTRMFGRAWPLRAPVRDGRVPSWQELAAANNFPSVMCMNDEVATAWLNHDSVRSAIHAEPVSAIGPWILCTDQLLFHHDAGSMIIYHKNLTSQGYRAIIYSGDHDMCVPYTGSLAWTTSLRYGVIDSWRPWFVNGQVSGYTQGYENGLTFATIKGSGHAVPEYKPQEALAFYSRWLAGSKL

SEQ ID NO: 313 - protein, 431 aa, Zea mays
MDWDLNAAGAWDLAELEQDHAAAAPSSGGHAANAAAAGTGTESRPPAPGAAGAPAECSVDLKLGGMGECEPGAARREREAAAGAAKRPRPAGPGGQQQQQCPSCAVDGCRADLGKCRDYHRRHKVCEAHSKTPVVVVAGREMRFCQQCSRFHLLAEFDADKRSCRKRLDGHNRRRRKPQPDTMASASFIASQQGTRFSPFAHPRLEASWPPGVMKTEESPYHITHQIPLGSSSSSRQQHFVALGAATPAYAKEGRRFPFLQEGEISFATGVVLEPPAAAPACQPLLRTGAPSESSGAGGSKMFSDQGLARVLDSDCALSLLSAPANSSGIDVSRMVRPTEHVPMAQQPVVPGLQFGSASWFPRPQASTGGSFVPFCPAAVEGEQQLNAVLGPNDSEVSMNYGGMFHVGGGSGGGEGSSDGGTSSSMPFSWQ

SEQ ID NO: 314 - protein, 355 aa, Zea mays
MMRCAAAALAVALIAAVAAATAAGSPAAGTCARRGAPPFLDAVGSRCPFVRIDPSPPLEINEPSLLLAAAGHILIKVPCLYRLIKWNFCWCLECGWVILRIWKVVVSYIPCLLLKVRGETVDTELNLRRRGASYSILFYAAWCPFSSKLRPIFGTLSTMYPQIHHFTVEESSATPSLFSRYGVRGFPAILLVNETTMVRYRGSKDLNSLVDFYKETTGLDPIAYIDVVEQESTGSLSSVMPWDRSIREMAKDEMYLLVAVLFIIVKVVAHFIPVVMSHLRAFLVVRVQNLNLGIRRGSNQLLERALNVLDVRRLWSKLRLSNKATDLRKGASNARAWASSFPSVSLGEPSSSRQA

SEQ ID NO: 315 - protein, 823 aa, Zea mays
MHRLQFSSLPLSLGLKNPAPTRPPDAHCSPSPPRLLTSFSPHLPLLPSSQVAFLELQLLELRLSTLGWRQPAMGRSSRACSLLGSAAQLLLLLLLSLGSAAAQKGSTWKTLSGKAPVIVAKGGFSGLFPDSSDFAYRILGTISSPDTVMWCDVRLTKDGDGICLPSINMDNCTMIDNVFPEGKKTYNVNGVSTVGWFSVDYTSTDLLPNVTLKQSVLSRTPVYDGSMLINSVENVFTSFNASAVWLNVQQDSFYSQFKLSMRNYILSLSKQFITDYISSPEVNFLTSISGRVSKKTKLVFRFLDEGSIEPSTNQTYGSMLKNLTFVKTFASGILVPKSYIWPVTPDNYLLPYTSVVDDAHKAGLEIYAADFANDFTISYNYSFDPLAEYLSFIGNSAFSVDGVLTDFPITPSEAVGCFSNLNNSKIDHAKPLVISHNGASGDYPDCTDQAYEKAVADGADVIDCPVQVTKDGILICMSSVDLMDVTTVGKSSFTSQVTTINDLKAGPGVFTFNLTWDDISKNLQPMISNPMSTYKLYRNPRNKNAGNFMRLSDFLTFAKGKDLSGIMITVEHAAFMAEKLGFGVVDAVVKALDDSGYSKQTAQNVMIQSTNSSVLKKFKQETKYSLVYMIEEGVRDAAPSSLADIKKFANAVSVSTTSVLPQTHYYLTNQTNKLVTSLQSAGLQVYVYVLMNEFASQPNDFFADATSQINAYVQGAKVDGIITDFPGTAHRYKLNSCTSMGNSAPLFMQPPQPGSLLLTMAPDVQPPAAAPMPLLTDADVAEPALPPVSNTTTAASPSHAALRMRTDVSILIALLMLCASLLI

SEQ ID NO: 316 - protein, 230 aa, Zea mays
MVVGASSESGAAASGGTSSTAPPRKGKSCKGCLYYSSVLKSRGYNPICVGIPRSIPQVPNYVVDEPKEDATAQGHDLRRFRYGCAGYSIFVNRDGQGGEGEGKTLLPYCRGLELLVDSRLVERKPSAAEQAPAHVTKDAAATTRSHQQGQQRPANLSRQEFLERKVTVHSFSLSPAPTRIYCLADVYGWHRFKKSAGLVASGVAKNLNKTANYIKENIHDILYHDRRPPK

SEQ ID NO: 317 - protein, 282 aa, Synechocystis sp.
MASSMLSSATMVASPAQATMVAPFNGLKSSAAFPATRKANNDITSITSNGGRVNCMQVWPPIGKKKFETLSYLPDLTDSGGRVNCMQAMAAYLFNQENEPDESDSITLYDEAGRPLDCYVENSLEQEDAQYLLLMPVDIPVVIIAWEEDDDETEDAEAILLEDQEEISGIFADAKAVLAELDLSLKYTAYTLTVSGELPPIEDEDILTLEIEGNDPAGEMEEEELQFLASFYHEEERYSIYTPLAPLLFLAKAISETQIELVHPDNDELKHILEELLFEDAD

SEQ ID NO: 318 - protein, 478 aa, Xenorhabdus nematophila
MASSMLSSATMVASPAQATMVAPFNGLKSSAAFPATRKANNDITSITSNGGRVNCMQVWPPIGKKKFETLSYLPDLTDSGGRVNCMQAMVIQENPFSSRIANRAKNINASVAVGLADIVAKLKSEGRDIIGLNEGELDFSTGATIVNETLRALIDGRTRYSWLNGEPELREKICQKVFEDNRIKATPENVIVTNGSKQVIYEILQTVINPGDEVIIPVPCWATYLEAVKLAGGKAVLIENIGVDLDVEKIKQAITDNTKLIIINTPNNPTGAVYSKSALQTLCQIVKEKQIFVLSDEAYEQIVFDDEHHSLAAIDDNEYIITVQTFSKSFAMTGYRIGYMIAHPELICRVSDLHGHMTDNVCTFAQYGAIASLEKPKDLYQERLEILKKRRDRSYQYAREFFECELPAGAFYLFPNVEKYLNDRCRDATQFCEYLLTHAGVALIPAEACLYRGHVRISFAASMDAIEQGFERIANVLR

SEQ ID NO: 319 - protein, 571 aa, Corynebacterium glutamicum
MTQPGQTTTTSHEAIDAFKRIVGDEHVLTSERATMPFSKGYRFGGGPVFAVVRPGTLVEMWRALQVSVDNNLIVIPQASNTGLTGGSGPGFQDYDRPIVIISTHRIDEVHLINDAREAISLAGTPLTHLTDALAKHQREPHSVIGSTSIGASVIGGIANNSGGSQIRKGPAFTREAIFARVNDDGKVELVNHLGISLGDDPEVALDRLQRGEWSPEDVTPAPEDSNETEYAEHLRKIVPSPARYNANPEYLFEASGSAGKLMVFAVRTRTFPREVHPTVFYIGTNNTHELEEIRRLFLEADMPLPISGEYMGRSAFDLAEKYGKDTFVFLKFMSPALQTRMFSFKTWANGLFSKIPGIGPTFADTVSQAMFSVLPNQLPKRMMEYRNRFEHHLLLTVSESQKAASEKMLKEFFAEPEHTGEFFICTSDEEKSASLNRFGAASAATRYAALKRRHIAGLIPIDVALRRDDWNWLEVLPEEIDDQLEVKAYYGHFFCHVMHQDYVAKQGVDLEALHDRIQHLLEERGAKLPAEHNYGRIYKLPESMEEHFKELDPTNTFNAGIGGTSPHKDWA

SEQ ID NO: 320 - protein, 396 aa, Nostoc sp. PCC 7120
MPNQLSNQTLSNQTASSLITLAVAPAKVIRGCNILQVAATEIAKLGSRPLIVAGNSTVAISQEKLQPILEAQNLHVAQASYGADCAEVSLKALRKAAKEHKADTIIGIGGGKALDTAKLVAHQLDIPIVTIPTSAATCAAWTALSNVYSEDGAFLYDVALSRCPDLLILDYDLIQTAPQHTLVAGIGDAIAKWYEASVSSGHLEQTLIISAVQQARVLRDILFQKSAIALQQPGSEAWREVVDATVLLAGVIGGLGGAQCRTVAAHAVHNGLTHIAGHSSIHGEKVAYGILVQLRLEEMVQGNQLAAASRQQLLKFYAEIGLPQKLGDLGLGNITLGELQTAAEIALTPQSDIHRLPFKVVLEQLMAAMVSTTAPTDSRDSVHRVSTRGISDEVEE

SEQ ID NO: 321 - protein, 378 aa, Bacillus subtilis
MIIGVPKEIKNNENRVALTPGGVSQLISNGHRVLVETGAGLGSGFENEAYESAGAEIIADPKQVWDAEMVMKVKEPLPEEYVYFRKGLVLFTYLHLAAEPELAQALKDKGVTAIAYETVSEGRTLPLLTPMSEVAGRMAAQIGAQFLEKPKGGKGILLAGVPGVSRGKVTIIGGGVVGTNAAKMAVGLGADVTIIDLNADRLRQLDDIFGHQIKTLISNPVNIADAVAEADLLICAVLIPGAKAPTLVTEEMVKQMKPGSVIVDVAIDQGGIVETVDHITTHDQPTYEKHGVVHYAVANMPGAVPRTSTIALTNVTVPYALQIANKGAVKALADNTALRAGLNTANGHVTYEAVARDLGYEYVPAEKALQDESSVAGA

SEQ ID NO: 322 - protein, 407 aa, Medicago truncatula
MAPAAASSDSSIQPRDVCIVGVARTPMGAFLGTLSSVPATKLGSIAIEAALKRANVDPAIVEEVFFGNVLSANLGQAPARQAALGAGLSKSVVCTTVNKVCASGMKATMLAAQSIQLGINDVVVAGGMENMSSVPKYLAEARKGSRLGHDSLVDGMLKDGLWDVYKDVGMGVCAELCADNHSITREDQDNYAVQSFERGISAQENGYFGWEITPVEVSGGRGRPSTIVDKDEGLGKFDAAKLRKLRPSFKETGGSVTAGNASSISDGAAALVLVSGEKALKLGLQVIAKITGYADAAQDPELFTTAPAIAIPKAIANAGLETSKIDFYEINEAFAVVALANQKLLGLDSAKVNVHGGAVSLGHPLGCSGARILVTLLGVLKQKNGKYGVGGVCNGGGGASALVVELL

SEQ ID NO: 323 - protein, 407 aa, Gossypium hirsutum
MAPVAATSSDSIKPRDVCVVGVARTPMGGFLGSLSSLSATKLGSIAIEAALKRANVDPSLVQEVFFGNVLSANLGQAPARQAALGAGIPNSVICTTVNKVCASGMKATMLAAQSIQLGINDVVVAGGMESMSNVPKYLGEARKGSRLGHDTLVDGMLKDGLWDVYSDCGMGSCAELCAEKHAITREEQDNFAVQSFERGIAAQQGGAFAWEIAPVEVPGGRGKPSIIVDKDEGLGKFDAAKLRKLRPSFKDNGGTVTAGNASSISDGAAALILVSGEKALELGLQVIAKIAGYADAAQAPEFFTTAPALAIPKAISNAGLDASQVDYYEINEAFAVVALANQKLLGLNPEKVNVNGGAVSLGHPLGCSGARILVTLLGVLKQKNGKYGVGGVCNGGGGASALVVELL

SEQ ID NO: 324 - protein, 158 aa, Glycine max
MYKFSPYKSSCLALLFDYIQGKNNYKQKIEMTAPVITEVSPSDGPFCKSSFVVSFFVPKLNQANPPPAKGLHVQRWNNMYVAARQFGGHVNDSNVAVEAAVLRASIEGTKWSGAIDKNQKAGHASVYTVAQYNDPFEYQNRVNEIWFLFEMESERHAI

SEQ ID NO: 325 - protein, 545 aa, Glycine max
MASSMLSSATMVASPAQATMVAPFNGLKSSAAFPATRKANNDITSITSNGGRVNCMQVWPPIGKKKFETLSYLPDLTDSGGRVNCMQAMCAVSSTYPQYVVAKFGGTSVADFDAMNHCADIILANADVRVVVLSASAGVTNLLVALATGCDNDKRKKCLKQIRDIQYAIIDRLNDVNVICEEIDRLLENIEMLSEAASLATSEALTDELVSHGEVMSTLLFVELLRQRNVNAEWFDIRRVMRTNDHFGRAEPDSLQLHISAVELLQPRLNNTVVITQGFIGREEKGRTTTLGRGGSDYTAALLGEALNLQRVDIWTDVPGIYTTDPRVAPTAKRIDKIAFDEAAEMATFGAKILHPATLLPAIRCGIPVFVGSSKDPQAGGTLVCDKTENPPLFRALALRRKQTLLTLHSLKMLHARGFLAEVFTLLLRHNISVDLITTSEVSVALILDTTGSTSTNGSLLTNALLTELSTLCRVEVEEDLALVAIIGNELSQAKGLGKEIFGTLESFNIRMISYGASSHNVCLLVPGQDAESVIQKLHQNLFKV

SEQ ID NO: 326 - protein, 457 aa, Glycine max
MYAVSSPHSQYVVAKFGGTSVADFDAMNNCADIILANTKVRVVVLSASAGVTNLLIALAAGCDSDKRENHLKQIRDIQYAIIERLNTTDVIREEIDRLLENIETISEAASLATSDALTDELVSHGEIMSTLLFVELLRQRNTDAEWFDIRRIMRTNNIFGQAEPDTLQLHALTMEHLHSRLDNTIVITQGFIGREEKGRTTTLGRGGSDYTAALLGEALGLHRVDIWTDVPGIYTTDPRVAPTAKRIDRIAFDEAAEMATFGAKILHPATLLPAVRCGIPVFVGSSKDPKAGGTIVCDKIGNPPLYRALALRRKQTLLTLHSLKMLHARGFLAEVFTLLSRHNISVDLITTSEVSIALILDTTGSTSTNGSLLTNALLTELSTLCHVEVEEDMALVAIIGNELSRAKGLGKEIFGTLESFNIRMISCGASSHNVCLLVPGKDAEQVIQTLHRGLFES

SEQ ID NO: 327 - protein, 897 aa, Glycine max
MASSMLSSATMVASPAQATMVAPFNGLKSSAAFPATRKANNDITSITSNGGRVNCMQVWPPIGKKKFETLSYLPDLTDSGGRVNCMQASVIAQAGAKGRQLHKFGGSSLADVKCYLRVAGIMAEYSQPDDMMVVSAAGSTTNQLINWLKLSQTDRLSAHQVQQTLRRYQCDLISGLLPAEEADSLISAFVSDLERLAALLDSGINDAVYAEVVGHGEVWSARLMSAVLNQQGLPAAWLDAREFLRAERAAQPQVDEGLSYPLLQQLLVQHPGKRLVVTGFISRNNAGETVLLGRNGSDYSATQIGALAGVSRVTIWSDVAGVYSADPRKVKDACLLPLLRLDEASELARLAAPVLHARTLQPVSGSEIDLQLRCSYTPDQGSTRIERVLASGTGARIVTSHDDVCLIEFQVPASQDFKLAHKEIDQILKRAQVRPLAVGVHNDRQLLQFCYTSEVADSALKILDEAGLPGELRLRQGLALVAMVGAGVTRNPLHCHRFWQQLKGQPVEFTWQSDDGISLVAVLRTGPTESLIQGLHQSVFRAEKRIGLVLFGKGNIGSRWLELFAREQSTLSARTGFEFVLAGVVDSRRSLLSYDGLDASRALAFFNDEAVEQDEESLFLWMRAHPYDDLVVLDVTASQQLADQYLDFASHGFHVISANKLAGASDSNKYRQIHDAFEKTGRHWLYNATVGAGLPINHTVRDLIDSGDTILSISGIFSGTLSWLFLQFDGSVPFTELVDQAWQQGLTEPDPRDDLSGKDVMRKLVILAREAGYNIEPDQVRVESLVPAHCEGGSIDHFFENGDELNEQMVQRLEAAREMGLVLRYVARFDANGKARVGVEAVREDHPLASLLPCDNVFAIESRWYRDNPLVIRGPGAGRDVTAGAIQSDINRLAQLL

SEQ ID NO: 328 - protein, 394 aa, Glycine max
MTPSCEGSFNAKSARLSSLYSLMDFPVQRDSALDNSQPNSHQSNDQNSGKFAKAANSSSKGLDRSLVINSPKGSPGRQKNPLNSDTSNMVPRSEETTPPDEQSEAVGHDSIHGSRGQYFNQTSSSARHRAKGKAHDTKQKYCDEGLLESSSLCSIGASNNRNVCSRTHDDIDDSTYLSNNDEEPEDVVKEKPAWEGTGVKRSRNAEVHNLCERKRRDKINKRMRILKELIPNCNKTDKASMLDDAIEYLKTLKLQLQMMSMGAGFCMPFMMLPNAAHHMMNTPHLHQLMGLGMGFRPGTAMPCSLPQFPITPLHGITDNRVHMFGFPNQVPPMPISHAPFIPMLGNPSTQPTPLATSTNINLAENPASSQLTTLMASSPKNLFISGQAEYATKQ

SEQ ID NO: 329 - protein, 394 aa, Glycine max
MTPSCEGSFNAKSARLSSLYSLMDFPVQRDSALDNSQPNSHQSNDQNSGKFAKAANSSSKGLDRSLVINSPKGSPGRQKNPLNSDTSNMVPRSEETTPPDEQSEAVGHDSIHGSRGQYFNQTSSSARHRAKGKAHDTKQKYCDEGLLESSSLCSIGASNNRNVCSRTHDDIDDSTYLSNNDEEPEDVVKEKPAWEGTGVKRSRNAEVHNLCERKRRDKINKRMRILKELIPNCNKTDKASMLDDAIEYLKTLKLQLQMMSMGAGFCMPFMMLPNAAHHMMNTPHLHQLMGLGMGFRPGTAMPCSLPQFPITPLHGITDNRVHMFGFPNQVPPMPISHAPFIPMLGNPFTQPTPLATSTNINLAENPASSQLTTLMASSPKNLFISGQAEYATKQ

SEQ ID NO: 330 - protein, 430 aa, Arabidopsis thaliana
MEHQGWSFEENYSLSTNRRSIRPQDELVELLWRDGQVVLQSQTHREQTQTQKQDHHEEALRSSTFLEDQETVSWIQYPPDEDPFEPDDFSSHFFSTMDPLQRPTSETVKPKSSPEPPQVMVKPKACPDPPPQVMPPPKFRLTNSSSGIRETEMEQYSVTTVGPSHCGSNPSQNDLDVSMSHDRSKNIEEKLNPNASSSSGGSSGCSFGKDIKEMASGRCITTDRKRKRINHTDESVSLSDAIGNKSNQRSGSNRRSRAAEVHNLSERRRRDRINERMKALQELIPHCSKTDKASILDEAIDYLKSLQLQLQVMWMGSGMAAAAASAPMMFPGVQPQQFIRQIQSPVQLPRFPVMDQSAIQNNPGLVCQNPVQNQIISDRFARYIGGFPHMQAATQMQPMEMLRFSSPAGQQSQQPSSVPTKTTDGSRLDH

SEQ ID NO: 331 - protein, 430 aa, Arabidopsis thaliana; identical to SEQ ID NO: 330

SEQ ID NO: 332 - protein, 490 aa, Glycine max
MGGSVRDVKSKGEVDEVVASGSPVILHFWASWCEASKHMDQLFSHLSTDFPNARFLRVEAEEQPEISEAYSVSAVPFFAFCKDGKTFDTLEGADPSSLANKVAKVAGSINPGESASPASLGMAAGASVLETVKELAKDNDSSKEKNQVQPGLSGPLKKRIQQLVDSNPVMLFMKGTPEEPKCGFSRKVVVVLNEERVKFGSFDVLSDSEVREGLKKFSNWPTFPQLYCKGELLGGCDIAIAMHESGELKEVFKDHGIDTTNEAKEKESGNGKGGISKSTDLSTTLSSRLESLVNSSAVMLFMKGKPDEPKCGFSRKVVEILQQENVPFESFDILTDEEVRQGLKVYSNWSSYPQLYIKGELIGGSDIVLEMQKSGELRKNLHEKGILPAETIQDRLKNLIASSPVMLFMKGTPDAPRCGFSSRVADALRQEGLNFGSFDILTDEEVRQGLKVYSNWPTYPQLYYKSELIGGHDIVMELRNNGELKSTLSE

SEQ ID NO: 333 - protein, 425 aa, Ashbya gossypii
MRKCKVFMGTSHPELGKLVCEKLGIEPAPCTLKKFANGETSVQIGVSVRDEDVYVIQSGSSTINDHIMELLILVSACKGGSARKVTAVIPQFPYSKQCKMKKHRGAITARMLANLLIIAGADHVVSMDLHASQMQGFFTKPVDNLYGGPSLAKWIRENVEDYQHAVVVSKNPGGTKRVTALADSLKINFAMIHTDRRRSKDLYSQTKDMKQLRMRKQSMLRKNRPIVRPGAAEDEEENIILTNGIQTARIINGHVIDDDVDDAYHSDVVVSDQEGSLASDSYPIGGSYEAAADSEDEEAPQEKQEKLITLVGNVNGRSAIILDDMIDRPGSFISAAEHMVKNCGAKRVYVVATHGIFTGDCLEQLEQSDAVYQVIVTNTYPINRDRMKRSQKLVVIDTSSIFAECIRRDHYGESISVLFDSLASL

SEQ ID NO: 334 - protein, 595 aa, Arabidopsis thaliana
MGQCYGKVNQSKQNGEEEANTTTYVVSGDGNQIQPLTPVNYGRAKNTPARSSNPSPWPSPFPHGSASPLPSGVSPSPARTSTPRRFFRRPFPPPSPAKHIKASLIKRLGVKPKEGPIPEERGTEPEQSLDKSFGYGKNFGAKYELGKEVGRGHFGHTCSGRGKKGDIKDHPIAVKIISKAKMTTAIAIEDVRREVKLLKSLSGHKYLIKYYDACEDANNVYIVMELCDGGELLDRILARGGKYPEDDAKAIVVQILTVVSFCHLQGVVHRDLKPENFLFTSSREDSDLKLIDFGLSDFIRPDERLNDIVGSAYYVAPEVLHRSYSLEADIWSIGVITYILLCGSRPFWARTESGIFRTVLRTEPNYDDVPWPSCSSEGKDFVKRLLNKDYRKRMSAVQALTHPWLRDDSRVIPLDILIYKLVKAYLHATPLRRAALKALAKALTENELVYLRAQFMLLGPNKDGSVSLENFKTALMQNATDAMRESRVPEILHTMESLAYRKMYFEEFCAAAISIHQLEAVDAWEEIATAGFQHFETEGNRVITIEELARELNVGASAYGHLRDWVRSSDGKLSYLGFTKFLHGVTLRAAHARPR

SEQ ID NO: 335 - protein, 356 aa, Arabidopsis thaliana
MSLVSDLINLNLSDSTDKIIAEYIWVGGSGMDMRSKARTLPGPVTDPSQLPKWNYDGSSTGQAPGEDSEVILYPQAIFKDPFRRGNNILVMCDAYTPAGEPIPTNKRHAAAKVFSNPDVAAEVPWYGIEQEYTLLQKDVKWPVGWPIGGYPGPQGPYYCGIGADKSFGRDVVDSHYKACLYAGINISGINGEVMPGQWEFQVGPAVGISAADEIWVARYILERITEIAGVVVSFDPKPIPGDWNGAGAHCNYSTKSMREEGGYEIIKKAIDKLGLRHKEHIAAYGEGNERRLTGHHETADINTFLWGVANRGASIRVGRDTEKEGKGYFEDRRPASNMDPYIVTSMIAETTILWNP

SEQ ID NO: 336 - protein, 595 aa, Arabidopsis thaliana; identical to SEQ ID NO: 334

SEQ ID NO: 337 - protein, 291 aa, Glycine max
MSGREQKLISEEDLKKNRAFLKWAGGKYPLLDDIKRHLPKGECLVEPFVGAGSVFLNTDFSRYTLADINSDLISLYNIVKMRTDEYVQAARELFVPETNCAEVYYQFREEFNKSQDPFRRAVLFLYLNRYGYNGLCRYNLRGEFNVPFGRYKKPYFPEAELYHFAEKAQNAFFYCESYADSMARADDASVVYCDPPYAPLSATANFTAYHTNSFTLEQQAHLAEIAEGLVERHIPVLISNHDTMLTREWYQRAKLHVVKVRRSISSNGGTRKKVDELLALYKPGVVSPAKK

SEQ ID NO: 338 - protein, 459 aa, Glycine max
MSQEQATSSLAASSLPSSSERSSSSAPHLEIKEGIESDEEIRRVPEFGGEAVGKETSGRESGSATGQERTQATVGESQRKRGRTPAEKENKRLKRLLRNRVSAQQARERKKAYLSELENRVKDLENKNSELEERLSTLQNENQMLRHILKNTTGNKRGGGGGSNADASLSGREQKLISEEDLKKNRAFLKWAGGKYPLLDDIKRHLPKGECLVEPFVGAGSVFLNTDFSRYILADINSDLISLYNIVKMRTDEYVQAARELFVPETNCAEVYYQFREEFNKSQDPFRRAVLFLYLNRYGYNGLCRYNLRGEFNVPFGRYKKPYFPEAELYHFAEKAQNAFFYCESYADSMARADDASVVYCDPPYAPLSATANFTAYHTNSFTLEQQAHLAEIAEGLVERHIPVLISNHDTMLTREWYQRAKLHVVKVRRSISSNGGTRKKVDELLALYKPGVVSPAKK

SEQ ID NO: 339 - protein, 516 aa, Glycine max
MSVSFCELCGAEADLHCAADSAFLCRSCDAKFHASNFLFARHFRRVICPNCKSLTQNFVSGPLLPWPPRTTCCSESSSSSCCSSLDCVSSSELSSTTRDVNRARGRENRVNAKAVAVTVADGIFVNWCGKLGLNRDLTNAVVSYASLALAVETRPRATKRVFLAAAFWFGVKNTTTWQNLKKVEDVTGVSAGMIRAVESKLARAMTQQLRRWRVDSEEGWAENDNVSGREQKLISEEDLKKNRAFLKWAGGKYPLLDDIKRHLPKGECLVEPFVGAGSVFLNTDFSRYTLADINSDLISLYNIVKMRTDEYVQAARELFVPETNCAEVYYQFREEFNKSQDPFRRAVLFLYLNRYGYNGLCRYNLRGEFNVPFGRYKKPYFPEAELYHFAEKAQNAFFYCESYADSMARADDASVVYCDPPYAPLSATANFTAYHTNSFTLEQQAHLAEIAEGLVERHIPVLISNHDTMLTREWYQRAKLHVVKVRRSISSNGGTRKKVDELLALYKPGVVSPAKK

SEQ ID NO: 340 - protein, 543 aa, Rhodopseudomonas palustris
MPTLATALLDALKDHGAKEIFGIPGDFVLPFFKVIEESGSLPYFTLSHEPAVGFAADAASRYRGGIGVAVVTYGAGAFNLVNSIAGAYAERSPVVVIAGAPGARERTSGYLLHHQVRTVDTQLAVFKEVTCAQAVLNDPATAPAEIARVLRSSLELSLPVYIEFPRDMVDAKVEPVEKLPQRAADPGACAECSEEILDRIAKAKSPVVVVDVEIRRYGVEKQVAALARKLGLPVVTTFMGRGLLEGDDDVVAGTYMGAAGDPGLSALVEESDLVLMFGVILSDTNFALSTNMTDPRRTVLATGREVQIGHHVYRDLPLADLIAGLDAHATAHPPRPRNAGQGMVYPRKLVADSGAIAPSDIATAINDLFDKHGKMPMTADIGDCLFTAMEIDNTALAAPGYYAGMGFGVPAGVGVAATGLRPLILVGDGAFQMTGWELGNCKRYGLDPIVVLFNNCSWEMLRVFQPESKFNDLDDWHFADIAPSIGGHGVRVTTRAELAAALDAAVARRGQFSLIEVMLPRGATSHTLARFVKGFKAARERMK

SEQ ID NO: 341 - protein, 755 aa, Agrobacterium tumefaciens
MSASSLLDKQCDHFSTKIVDLIMVDKADELDRRVAAAFSEREASRERRISQISGECNAGLACKRLADGRFPEISAGQRVAVLSAYIYVGEEILRWILEPEASVRTRVSGLVAIDLAPSCMDISRAQLLQTMNLLSGKRCAPSDLSHFVAISISETARSRTLQMAPYEEGSLKSVTGFTVIIEEAVPFDMVAYGRNLMLKASAGSFPTIDLLYDYRLFLDKCSDSGRIGFFPEDVPRPKVAVIGAGISGLVVASELLHAGVDDVTIYEAGDRVGGKLWSHAFKDAPGVVAEMGAMRFPPAASCLFFFLERYGLSSMRPFPNPGTVDTDLVYEGCRYMWKAGQQPPKLFHRVYSGWHAFLKDGFLEGDIVLASPDAITEALKSGDIRRAHDSWQIWLNRFGRESFSSAIERIFLGTHPPGGETWSFPHDWDLFKLMGIGSGGFGPVFESGFTEILRLVINGYEENQRMCSEGISELPRRIASQVVNGVSVSQRIRHVQVRAIEKEKTKIKIRLKSGISELYDKVVVTSGLANIQLRHCLTCDTTIFRAPVNQAVDNSHMTGSSKLFLLTERKFWFDHMLPSCVLMDGFAKAVYCLDYEPQDPNGKGLVLISYTWEDDSHKLLAVPDKKERLCLLRDAISKSFPVFAQHLVPACADYDQNVVQHDWLTDENAGGRFKLNRRGEDFYSEELFFQALDTTNDTGVYLAGCSCSFTGGWVEGAIQTACNAVCAIIHNCGGILAKDNPLKHPWKRYNYRNRN

SEQ ID NO: 342 - protein, 560 aa, Pseudomonas fluorescens
MNKNNRHPADGKKPITIFGPDFPFAFDDWIEHPAGLGSIPEHNHGAEVAIVGAGIAGLVAAYELMKLGLKPVVYEASKLGGRLRSQAFNGTDGIVAELGGMRFPVSSTAFYHYVDKLGLETKPFPNPLTPASGSTVIDLEGKTHYAQSLKDLPALFQEVADAWADALEAGSQFADIQQAIRDRDVPRLKELWNTLVPLWDDRTFYDFVATSKAFAKLSFHHREVFGQVGFGTGGWDSDFPNSMLEIFRVVMTNCDDHQHLVVGGVEQVPQGIWRHAPERCVHWPAGTSLKSLHHGAPRSGVKKIAHAPDGRFAVTDNNGDTREYAAVLTTCQSWLLTTQIECDESLFSQKMWMALDRTRYMQSSKTFVMVDRPFWKDKDPETGRDLMSMTLTDRLTRGTYLFDNGDDKPGVICLSYSWMSDALKMLPHPVEKRVKLALDALKKIYPKVDIAARIIGDPITVSWEADPHFLGAFKGALPGHYRYNQRMYAHFMQDDMPQEQRGIFIAGDDVSWTPAWVEGAVQTSLNAVWGIMKHFGGSTHKENPGPGDVFNDIGPIALPE

SEQ ID NO: 343 - protein, 597 aa, Triticum aestivum
MASSASLQSFLPPSAHAATSSSRHRPSRARPFQCAAVSAPSSSAASPSASAVPAERLEPRVEQREGGYWVLKEKYRTSLNPQEKVKLGKEPMALFTEGGIKELAKLPMEQIDADKLTKEDVDVRLKWLGLFHRRKQQYGRFMMRLKLPNGVTTSEQTRYLASVIEKYGKEGCADVTTRQNWQIRGVTLPDVPEILEGLRSVGLTSLQSGMDNVRTPVGSPLAGIDPLEIVDTRPYTNLLSSYITNNSEGNLAITNLPRKWNVCVIGTHDLYEHPHINDLAYMPAEKDGKFGFNLLVGGFISPKRWGEALPLDAWVPGDDIIPVCKAVLEAFRDLGTRGNRQKTRMMWLIDELGMEAFRSEIEKRMPNGVLERAAAEDLIDKKWERRDYLGVHPQKQEGLSFVGLHVPVGRLQAADMFELARLADEYGSGELRLTVEQNIVLPNVKNEKVEALLAEPLLQKFSAHPSLLMKGLVACTGNQFCGQAIIETKARALQVTRDVEARVSVPRAVRMHWTGCPNSCAQVQVADIGFMGCLTKNSSGKIVEAADIFVGGRVGSDSHLTGVYKKAVPCEDLVPLVADLLVERFGAVPREREEDEE

SEQ ID NO: 344 - protein, 183 aa, Zea mays
LSLRSCMIKVLSLYESSPSVSNEIASSNACLARLQALSGEFRISKTEKLSASPSLMGVDASSANAISKYCDRVNALSRYLLPHITNNINTHHSRRHPLDHYSHTTDLLIHAAACRSGYCVGGTGIYSSHKTWTCTLLSFLLRDSELSRQSLQPCQAGVGYFSVGYAWRGFIQRHLDHAAPEGQ

SEQ ID NO: 345 - protein, 615 aa, Zea mays
MISLLRRALAASASASSPAATYRRLLVVAPLSPPAAPPGPCQAPAAGSPEPPRRAFHCSTPPLGFRSTPASWAGPCPGEGEGEGEGEGVDTGAEKGLEIARLGTSPRIVEKLAARGITRLFPIQRAVLEPAMQGKDMIGRARTGTGKTLAFGIPIMDKILSYNEKNGNGRNPLAIILAPTRELARQVEKEFRESAPLDTLCVYGGVPINQQMRALNYGVDIVVGTPGRVIDLLRRGVLNLSQIQFVVLDEADQMLAVGFDEDVEVIMEQLPQNRQSMLFSATMPSWIRKISNKYLKDPVIIDLVGDSDQKLPEGISLYSIASDNFGKPSIIGPLIKEHANVGKCIVFTQTKREADRLAYVMGRSYQCQALHGDISQNQRERTLSGFRDGRFNILVATDVAARGLDIPNVDLVVHYEIPNTSELFVHRSGRTARAGKKGSAILIYTYEQTRAVRVIEQDIGCRFTELPKMPVSDEAADMFNVMRDTRSRSVGSRRTGGPFSREGYGDFEDHRSRGFGDFDRFGGSSDRGGGFRDSGSRYHGGSGGFRRSSSDFGRPSLSRSDRSGDFGDSYFSRRGNADFGRSRSSDDSGSSHYPRGYSGTGTSDSGNFGGFKGSK

SEQ ID NO: 346 - protein, 154 aa, Zea mays
  misc_feature (154)..(154): Xaa can be any naturally occurring amino acid
  unsure (1)..(154): unsure at all Xaa locations
RRPSCCRCGTGPSHPTGCSSCAPSGRRRRGGTRASSWSSRPWAPCRRRRRAPVLRSRRFITIPSTTYHQHQHSSLSTTSTRSLLSHDRLTPHPRGRLQEQGARLLRRQGAQGREDQLDHARVPPRRRRPLGAQEEQPQVGLGPVPHLQQEGRRX

SEQ ID NO: 347 - protein, 989 aa, Glycine max
MEDNAFLLLFYVGRRNWKLLMSPLLLVLLLLSPLASPFSEEGQALMAMKASFGNMADTLLDWDDAHNDDFCSWRGVFCDNVSLTVVSLNLSSLNLGGEISPAIGDLGNLQSIDLQGSKLTGQIPDEIGNCAALVHLDLSDNQLYGDIPFSLSKLKQLEFLNLKSNQLTGPIPSTLTQIPNLKTLDLARNRLTGEIPRILYWNEVLQYLGLRGNMLSGTLSPDICQLTNLWYFDVRGNNLTGTVPDSIGNCTSFEILDISYNRITGEIPYNIGFLQVATLSLQGNRLTGEIPEVIGLMQALAILDLSENELVGPIPPILGNLTFTGKLYLHGNMLTGSIPPELGNMSKLSYLQLNDNHLEGNIPNEFGKLEHLFELNLANNHLDGTIPHNISSCTALNQFNVHGNQLSGSIPLSFRSLESLTYLNLSANNFKGIIPVELGHIINLDTLDLSSNNFSGNVPASVGFLEHLLTLNLSHNHLDGPLPAEFGNLRSIQILDLSFNNLSGIIPPEIGQLQNLMSLIMNNNDLHGKIPDQLTNCFSLTSLNLSYNNLSGVIPSMKNFSRFSADSFLGNSLLCGDWLGSICCPYVPKSREIFSRVAVVCLTLGIMILLAMVIVAFYRSSQSKRLRKGSSRTGQGPPKLVILHMDMAIHTLDDIMRSTENLNEKYIIGYGASSTVYKCVLKNSRPIAIKRLYNQQAHNLREFETELETVGSIRHRNLVTLHGYALTPYGNLLFYDYMANGSLWDLLHGPLKVKLDWETRLRIAVGAAEGLAYLHHDCNPRIVHRDIKSSNILLDETFEAHLSDFGTAKCISTTRTHASTYVLGTIGYIDPEYARTSRLNEKSDVYSFGIVLLELLTGKKAVDNESNLHQLILSKADSNTVMETVDPEVSITCIDLAHVKKTFQLALLCTKKNPSERPTMHEVARVLVSLLPSPLSKILAPPAKKFDYAHFVIEKGQQRKVEEQKPQQDNILPNAQWFVRFGDVISKST

SEQ ID NO: 348 - protein, 254 aa, Arabidopsis thaliana
MDYACVCMYKYKGIVTLQVCLFYIKLRVFLSNFTFSSSILALKNPNNSLIKIMAILPENSSNLDLTISVPGFSSSPLSDEGSGGGRDQLRLDMNRLPSSEDGDDEEFSHDDGSAPPRKKLRLTREQSRLLEDSFRQNHTLNPKQKEVLAKHLMLRPRQIEVWFQNRRARSKLKQTEMECEYLKRWFGSLTEENHRLHREVEELRAIKVGPTTVNSASSLTMCPRCERVTPAASPSRAVVPVPAKKTFPPQERDR

SEQ ID NO: 349 - protein, 275 aa, Arabidopsis thaliana
MASSLFTYICTYTYKLYALYHMDYACVCMYKYKGIVTLQVCLFYIKLRVFLSNFTFSSSILALKNPNNSLIKIMAILPENSSNLDLTISVPGFSSSPLSDEGSGGGRDQLRLDMNRLPSSEDGDDEEFSHDDGSAPPRKKLRLTREQSRLLEDSFRQNHTLNPKQKEVLAKHLMLRPRQIEVWFQNRRARSKLKQTEMECEYLKRWFGSLTEENHRLHREVEELRAIKVGPTTVNSASSLTMCPRCERVTPAASPSRAVVPVPAKKTFPPQERDR

SEQ ID NO: 350 - protein, 788 aa, Zea mays
MEPSRGGVGGGGRRWGEAEGDAAEEGRRGEDGGEVSLREWLDRPGRAVEAAECVHVFRQVAEAVAVAHAQGVAVGSARPSCFVVSPPFARVAFIESASGSDASGSCSGSDASEDADGDPDPDPDASPPLRRRDSAVPGEERAGRSFPLKSVLAMELSWYTSPEDADDSAATFASDVYRLGVLLFELFYTFETMEDKMRAMANLRHRVLPPQLLFKWPKEASFCQLLMHPVPETRPKMSEVLQSEFLNQSRNSLEEHEAALRLREEIEEQELLLDFLQQLQKRKQDIADSLQGTIAFLSSDINEVPHQQSAIGHCENFLSDWDKEVCSGTVEEQSDCGSRKRFRPELQGVDMEENNRSVEECSRTVPSSELIQESVLSKSSRLMKNFKKLETAYFLTRSKLMKQVGSQISSCDRVVKNTTGSAVGTEGSSLDDFSLERQYGTRQRGWVNSFLEGLCKYLSFSKLKVQAELKHCDLLNSSNLVCSVGFDRDREFFATAGVNKKIKVFEYNMIVNEHRDIHYPVVEMSNRSKLSCICWNSYMKSHIASSDFEGIVQVWDVTRSQVFVGMREHERRVWSVDFSIVDPTKLVSGSDDGSVKLWDMNQAGSIGTIRTRANVCSVQFQPDTARSIAIGSADHKIYCYDLRNIRAPYCTLVGHTKTVSYVKYLDASTILSASTDNSLKLWDLSMNPGRIIDSPVQTFTGHTNTKNFVGLSISDGYIATGSETNEVFVYHKEFPMPVLAYKFSVTDPISGQEIDDQSQFISCVCWRGQSSTLLSANSSGNIKILEMD

SEQ ID NO: 351 - protein, 574 aa, Zea mays
MAADPSSSSTGQQTADIRAAPPEDSRQMAMSGPLNVRGDRRPPPMQRAFSRQVSLGSGVTVLGMDRAGRSGGARGQRTLPRSGRSLGVLNHSGGLVQAAGDGAARRVGDFSMFRTKSTLSKQNSMLPTRIRESDLELPTHVEDPQSASSRPAEDPLNKSVPAGRYFAALRGPELDEVRDTEDILLPKDEVWPFLLRFPIGCFGVCLGLGSQAILWGALAASPAMRFLHVTPMINVALWLLAVAVLVATSVTYALKCIFYFEAIRREYFHPVRVNFFFAPWIAAMFVTIGLPRSYAPERPHPAVWCAFVLPLFALELKIYGQWLSGGKRRLCKVANPSSHLSVVGNFVGAILAARVGWTEAGKLLWAIGVAHYIVVFVTLYQRLPTNEALPKELHPVYSMFIATPSAASLAWAAIYGSFDAVARTFFFMAIFLYLSLVVRINFFRGFRFSLAWWSYTFPMTTASLATVKYAEAVPCFASRALALSLSLMSSTMVSMLLVSTLLHALVWRSLFPNDLAIAITKDRQNGAVKPNDRGKRASKRVHDIKRWAKQAPLSLVSSITKSHSADKEEEERTE

SEQ ID NO: 352 - protein, 363 aa, Solanum tuberosum
MGFRLSHLSLALSFVALALAGVAIYRNTYEAIIMNNGSLLQNASPHFDSLESGVASILTLNNKKRNSDMYLRQQLTPEACVFSAVRGVVDSAIDAETRMGASLIRLHFHDCFVDGCDGGILLDDINGTFTGEQNSPPNANSARGYEVIAQAKQSVIDTCPNISVSCADILAIAARDSVAKLGGQTYNVALGRSDARTANFTGALTQLPAPFDNLTVQIQKFNDKNFTLREMVALAGAHTVGFARCSTVCTSGNVNPAAQLQCNCSATLTDSDLQQLDTTPTMFDKVYYDNLNNNQGIMFSDQVLTGDATTAGFVTDYSNDVSVFLGDFAAAMIKMGDLPPSAGAQLEIRDVCSRVNPTSVASM

SEQ ID NO: 353 - protein, 363 aa, Solanum tuberosum; identical to SEQ ID NO: 352

SEQ ID NO: 354 - protein, 545 aa, Zea mays
MGLLTSAELNYLVFRYLQESGFIHAAFTLGYEAGIHKCGIDGNAVPPGALITIVQKGLQYIELEASSDENYDEVERDFALLEPLEIITKDVEELQQIVKRRKIERSQTELEKDKGKEKERNEEHERRPCGEREREQHEKEKEQVRDKDKSEKDRDHDKEKEKERKRKAACRAYMDVSTTAQEISNTDVTVLEGHSSEVFACAWSPTSSLLASGSGDSTARIWTIPYGPCGSDMQPYSPGVHVLKHFKGRTNEKSKDVTTLDWNGEGTLLATGSYDGQARIWSRDGDLKQTLFKHKGPIFSLKWNKKGDFLLSGSVDKTAIVWDTKTWECKQQFEFHSAPTLDVDWRNNNSFATCSTDNMIYVCKIGEQRPVKAFSGHQSEVNAIKWDPTGSLLASCSDDWTAKIWSMKQDKCVFDFKEHTKEIYTIRWSPTGPGTNNPNQQLLLASASFDSTIKLWEVEQGCLLYSLSGHRYRQPVYSVAFSPDGEYLASGSLDQCLHIWSVKEGRILKTYRGTGGIFEVCWNKEGSKIAACFSNNTVCVMDFRM

SEQ ID NO: 355 - protein, 413 aa, Zea mays
MASEMSKNVKALDEQEVTSQHSRAQTSDAAEEQQQQQQAVDPLARQSSIMSLTLEELQNSLCEPGRNFGSMNMDEFMANIWNAEEFQAATAGCNKEGAEREPVPVATTTGTGENGGGGGSGRGLVRQGSFALPPPLSRKTVEEVWAEISQGPADFQASAAPQPVAQPQAASGGGVAASGRQATLGEMTLEDFLVKAGVVRGAFAGHGHGVGMVPAGPMGMQHNAAPPMMYQVAAAAAPPPGAVYPVMGDGMGYHGGGYPGGVAVVPPPPPSQCVAAARQPGVVGRDERHDAGGDDELHWQRRGGPQRRRRARGSATSPRTGAPRRPWSDGSAALIKNRESAARSRARKQAYTVELEAELNHLKEENERLRAEERTILLSKKKMLVEKMMEQARENVSAKKVGPGLRRWGSAMW

SEQ ID NO: 356 - protein, 588 aa, Lycopersicon esculentum
MLRSFASKRSLQSLLHHHYRRCRQNPQFPIINPRPFSSSPGPPSSDAELRKYIGYTLLLLGSAAATYYSFPFSEDARDKKAQLFRYAPLPDDLHTVSNGSGTHEVRTRAFLQPESVEELEGIVKEANVRKHKIRPVGSGLSPNGIGLTRAGMVNLALMDKVLSVDKENKRVTVQAGIRVQQLVDEIKEFGITLQNFASIREQQIGGIVQVGAHGTGARLPPIDEQVISMKVVTPAKGTIEISKEKDPELFYLARCGLGGLGVVAEVTLQCVERQELVEHTFLSNMKDIKKNHKKFLSENKHVKYLYIPYTDAVVVVTCNPMSKEKGPPKNKPKYTAEEALQHVRDLYLESLTKYRDSGSPSEPEIVELSFTELRDKLLAMDPLNKEHVIKVNKAEAEYWRKSEGYRVGWSDEILGFDCGGHQWVSETCFPAGTLSKPSMKDLEYIEELMQLIEKESVPAPAPIEQRWTACSKSQMSPAYSSADDDIFSWVGIIMYLPTMDARQRRQITEEFFHYRHMTQSQLWDQYSAFDHWAKIEVPKDIEDLAGLQARLKKKFPVDAYNQARKELDPNRILSNNMLEKLFPSSEAV

SEQ ID NO: 357 - protein, 423 aa, Zea mays
  misc_feature (348)..(348): Xaa can be any naturally occurring amino acid
  unsure (1)..(423): unsure at all Xaa locations
SEHDTTEATPTKPDATGAALTQPAAAGASAPVPNATGARPDPAGARFTGSSSGKLVVEGGKSKKEEESLPPGFRFHPTDEELITYYLRQKIADASFTARAIAEVDLNKCEPWDLPEKAKLGEKEWYFFSLRDRKYPTGVRTNRATNAGYWKTTGKDKEIFTGQLPATPELVGMKKTLVFYKGRAPRGEKTNWVMHEYRLHHSSRSVPKSNKDEWVVCRVFAKSTGAKKYPSNNAHSRLHHHPYALDMVPPLLQHDPFARHHNYPYMTSADLAELARFARGTPGLHPHIQPAPHPGTSASAYMNPAAAGAPPSFALSGGLSLNLGASPAMPPSLPPTAFHATMSMAMSXRRRRRVVPAPVITIVIRWWRVSTSSSRWRRRGLGGCVIVPGADGGFVADAAAGGRYQSLDVEQLVERYWPAGYQV

SEQ ID NO: 358 - protein, 250 aa, Zea mays
MASRRCLLRFLSIRLVPQRSQPLAPISTATRTLTSLSEALGSPAPRALASPRLYYPSRCHFATRSSGDEDDGEDEEEHYDDEGSDGEWGDDEEVVAAKKPSGKTEEEKVAEAAEIGYKVLGPLGADDKPFKPYEPVFAVVQIGSHQFKVSNGDSIFTERLKFCDVNDKLVLNRVLMLGSQAQTVIGRPILPDAAVHAVVEEHALDAKVIIFKKKRRKNYRRTKGHRQELTKLRITNIEGIDKPESKVSVL

SEQ ID NO: 359 - protein, 369 aa, Zea mays
MATVAARRLLGTAAEARLLSMKWCTCSCSISVNHVLLNPGWMLFHQFEVCGDINSVLMRGSCTVLNFHQNMVLCPRCISVERNNKQTCVKLFAENTSSLKNGSSAPIASFIAKLIVSLPPNQQTIVHPGIFDKQLKYDGFVWTIDSTVTGRFVIEIEFLDLKVADPSGGEPASIWASRQVKQCSDSTALSSLARMLHEDVLTDITINAADGSVGAHRAVLATRSPVFRSMFSHDLREKELSTVDITDMSLDACRAFLSYIYGDVRGGEEFLANRLALLRAADKYDIGDLREACHESLLEDIDARNVLERLQTAHLYRLPRLKGGCLRFLVDFRKVYEMHDDDLNAFLQTADRELVAEVFHGVLAAWSGR

SEQ ID NO: 360 - protein, 423 aa, Zea mays
MRSVCQTLRVVTDREMEDETVLEMNELNSFTPHGKDKVELSFGCNSADRRGEASWTSLAGTSQQESELAALRMHGMFSPGGQGPSLSGVQATAEGSKAKRRTKAEKTVSLQILRQYFAGSLKDAARSLGVCPTTLKRICRQHGITRWPSRKIKKVDHSLRKLQQIIDSVHGAETAFQLNTLYKDITNTSISSDNNLSGSVTVPPTNQSNLTDVNKHQPHKSSSNVPSTSHSHSSCSHSSESSPSCSGGATKHAQQGIIDQMKSENPVKDSSIQTLQTENTSLFEHFSVNETPIDLLQDVTEKANGGHHSSRSPLSPNPKQNTDANMRVKATFGSEKVRFRLNPECNFQELKHEIAKRLSIVDTNPLVLKYLDDDSEWVLMTCDADLQECLHVYKLAGIQTIKISVHLAVSPATRVTTGHTGLS

SEQ ID NO: 361 - protein, 481 aa, Zea mays
MSSSSGTTMPLAYQTSASSPEWLNKGDNAWQLTAATLVGLQSFPGLVVLYGGVVKKKWAVNSAFMALYAFAAVWICWVTWAYNMSFGDRLLPLWGKARPALSQGGLVGQAGLPATAHHFASGALETPAAEPLYPMATVVYFQCVFAAITLVLVAGSLLGRMSFAAWMLFVPLWLTFSYTVGAFSVWGGGFLFQWGVIDYCGGYVIHLSAGFAGFTAAYWVGPRAQKDRERFPPNNILFTLTGAGLLWMGWAGFNGGGPYAANVVASMSVLNTNICTAMSLLVWTCLDVVFFKKPSVVGAVQGMITGLVCITPAAGLVQGWAAMVMGVLAGSVPWYTMMILHKRSRLLKHVDDTLGVIHTHGVAGLLGGLLTGLLADPTLCALFLPVTNSKGAFYGDGAQLGKQLAGALFIIGWNVAVTSIICVAINAVVPLRMTQDKLEVGDDAVHGEEAYALWGDGELYDVTDHGPRAAAAVAPMSTPPN

SEQ ID NO: 362 - protein, 369 aa, Zea mays; identical to SEQ ID NO: 359

SEQ ID NO: 363 - protein, 781 aa, Zea mays
MPHPPRATTTMASSPPPPRQEEDQQREEGHHHGDGGDDDQITTPLLVEAATTSSPSPSEGDDPENSPIEQVALTVPVGDDPSTPVLTFRMWVLGTASCALLSFLNQFFWYRKEPLTITAISAQIAVVPLGRLMAAALPARAVLRGTRWEFSLNPGPFSVKEHVLVTIFANSGAGTVYAIHVITAVRVFYGKHITFFVSLLVVLTTQVLGFGWAGIFRRYLVEPAAMWWPSNLVQVSLFRALHEKERRVKGGMTRNQFFLVAFVCSFAYYVFPGYLFQMLTSLSWLCWAFPRSVVAQQLGSGLSGLGVGAVGLDWSTISSYLGSPLASPWFATANVAAGFVLIMYVITPAAYYWLGLYGARSFPIFSDGLFTAAGQTYNISSIVDSNFRFDTEAYERNGPLYLSTFFAVTYGVGFASLTATVVHVFLFHGSEIWQLSRSAFQEKKVDVHTRLMRRYRQVPEWWFICILVANVAVTIFACEYYIEQLQLPWWGVLLACAIAFFFTLPIGIITATTNQTPGLNIITEYIMGYLYPGRPVANMCFKVYGYISMTQALAFLQDFKLGHYMKIPPRTMFMAQVVGTLIAALVYIGTAWWLMDSVPNICSTELLPADSPWTCPMDHVFYDASVIWGLIGPRRIFGDLGTYSAVNWFFLGGAVAPLLVWLAHRVFPSQSWILLVNMPVLIGSTGMMPPATAVNYTTWIIAGFLSGYVVYRYRRHWWERHNYLLSGALDAGLAFMAVLIYLCLGLENVGLNWWGNDLDGCPLASCPTAKGIVVEGCPVYT

SEQ ID NO: 364 - protein, 284 aa, Zea mays
MVMEETIDDSEMSLSNMVLGFLEDFERDERRPENDDDNNEEEGSSGGDTAESKAFWQTQHLQLREALAKGSPAESRIRADTEEAVKSMRAAACSCSCTGRPAARDCRPCMLRHVADRLRDAGYDSALCKSKWTRSPDIPSGEHSYVEVAVQTRSGKSVRVVVELSFRAEFEVARASAGYRALVTALPEVFVGRADRLRGVVKVMCAAAKQCMKDNNMHMGPWRKHKYMQAKWLGTPERGAAAVAAAETPVVAVPSVTVGSPEKQTKFRASMLTFDFGRTALEVA

SEQ ID NO: 365 - protein, 85 aa, Zea mays
MSASRSSSPNSISQWSQKENKMFEEALAYYGEGTSNRWDKVSRAMGGIKSAEEVRCHYEDLDYDVKMIESGHVPYPKYKTHGFWT

SEQ ID NO: 366 - protein, 308 aa, Physcomitrella patens
MAAQPLRRLHLACCKIYISDTRNAAALQEIESTFRAHPEAPLLHVFEDHEYNRVGYTLAGSVCSSESRNARTPLQSAVTDVVRTALRTIDLRQHSGSHPRLGVVDHICTHPLGTATMTDTTAIAEGIASEIGQELKVPAFLYGAAHRNGRPLDDIRRALGYFQPSNGGLWIGSNIFPATMQPDFGPRVAPPSSGIVVVGACPWVMNYNVPLTTIDLDKGKRIARKVSERGGGLAKVQAMALLHGTDCIEIACNLLDTDVSNPQAVQHLVAALAAKEGVQASNGYLTGHSKEDILRLASEKLNALDEKL

SEQ ID NO: 367 - protein, 301 aa, Zea mays
MMLRPPALACCKLYISEARNSGALRAIEHAAAALRPLAVLVNTFADDAYNRVGYTLVSPLAGGAASPPLRCAAFRVVAAAIEAVDLDAHAGAHPRLGVVDHIAFHPLASARLEDVTALARAVAADIGDRLQVPTYLYGAAHRDGRTLASIRRQLGYFTPTSPGGEQWHGAPDSLLPVAPDAGPRTSSASNGVVVVGATPWVDNYNVPLATTDVSVARRIARAVSERGGGLACVQAMGLAHGDGATEVACNLLHPDAVGADQVQERVSRLAAGLGVGVGQGYFTDFSREKVVELYLQAAQAA

SEQ ID NO: 368 - protein, 713 aa, Chlamydomonas reinhardtii
MANTNVAYPVLGVYLLLVLGAGLLAAFVNRIHLRKGHGDKVREHFMAGKGLGTFVWFWTMMATLFSGYSVSGIVNEAYGTGWMATRWIPGGVGLYIAFAVMAPRIHAVAKRRGYFTMSQVLFDRFSGPSSCHWIIPHIIALLAFFCLQLPVFTYLITQFQSLGREVRTFTAGDISATTAICVAASVLLICDLLGGMRAVAFTDVLQGVVLFCGSIIFLVIQKTELGGFEDAHNYWGNPANVAKPRVWNMQHVPNEVNQVSYFDFVFKTTAAATMFPHLTARLFAAKDAKVIRKGMSMMVFTFFVVQFSSMITGWVAIAALPVLPKGSSAFGAMLLLVAQQGTGQAVVSALLLASAICAMMSTADSALLACSSMWVRDLYTKYFRPHASEMEQLIFGKVVAIIALAIGVLLGNLSIETGKPDLSGLFALQNVTPIHVVPAVWLGLHWRGLRGEAVLVGFVTGLGVTLGIVFSDKNISRSVGSDMTASGLSSAWIGFCINIALVISIGSLMQFFPRLFPWIKPLPPPAEEEETAPDSGDTDAASQDSQDAIAIAANEAAIAAAKGIEAPELPPVPVDAAGHHTIPAGHHAGEQYSAFVPRWLDIGTRRDKTLNPYFWTFMGIVLLFTVPFYRPPGSKDGYVGSIGAWPFTSLFLSGILAICGSVTFLYFWTDYRPIKESVAPGMLPPQEVVVAEPGAENGAAVSVVAAAAEPIKA

SEQ ID NO: 369 - protein, 468 aa, Chlamydomonas reinhardtii
MLQRAACQLLQASRLVAPAMGNLALRGLSAAPQPAEDADAGQSRGPSTSGGGSGVIEKKGIALRGVPLYLDMQATTPMDPRVIDAMLPYMTEQFGNPHSRTHLYGWESEEAVEDARKQIAGLIGADPKEIIFTSGATESNNTAIKGVASYFKDKKKHVITTQTEHKCVLDSCRWLQQRGWDVTYLPVRPDGLLDLAVLEAAMRPDTALVSVMAVNNEIGVVQPVDEIGEMCRKRGVYFHTDGAQAVGKIPVDVNKSKIDLMSISGHKIYGPKGIGALYVRRRPRVRLEALMSGGGQERGLRSGTVPTPLVVGLGAACAVAGRELQADLAHVRRLEERLRTGITSQLQGVHLNGPADPARRYPGNLNLSFAYVEGESLIMGLKEIAVSSGSACTSASLEPSYVLRALGVEEELAHTSIRYGMGRFTTDAEVERAIDMTVSHVNKLREMSPLWEMVQEGVDIKSIQWAQH

SEQ ID NO: 370 - protein, 284 aa, Chlamydomonas reinhardtii
MAHQILRSSRIASSTRVAQRSSRVHAVSVRCAAAPADVMLEVKDLTASIAGTHTPILKGVNLTIRNGEVHAIMGKNGSGKSTLSKVLVGHPDYEVTGGTAVFKGKNLFEMEPEERSHAGLFLSFQTPIEVPGVSNVDFLRMACNSRRKALGHPELDPLEFYAYIMPKLEMLNMDPTFLNRNVNEGFSGGEKKRNEILQLAVLEADMAILDEIDSGLDIDALRDVAKAVNQLRSDDTGVLMVTHYKRLLDYIKPDFVHIMQAGEIVKTGDMSLVDQLEAGGYATL

SEQ ID NO: 371 - protein, 420 aa, Nitrosomonas europaea
MGIKNLYKRGVMGLYGVAYAVAALAMTVTLDVSTVAAHGERSQEPFLRMRTVQWYDIKWGPEVTKVNENAKITGKFHLAEDWPRAAAQPDFSFFNVGSPSPVFVRLSTKINGHPWFISGPLQIGRDYEFEVNLRARIPGRHHMHAMLNVKDAGPIAGPGAWMNITGSWDDFTNPLKLLTGETIDSETFNLSNGIFWHVVWMSIGIFWIGVFTARPMFLPRSRVLLAYGDDLLMDPMDKKITWVLAILTLALVWGGYRYTENKHPYTVPIQAGQSKVAALPVAPNPVSIVITDANYDVPGRALRVTMEVTNNGDIPVTFGEFTTAGIRFINSTGRKYLDPQYPRELIAVGLNFDDESAIQPGQTKELKMEAKDALWEIQRLMALLGDPESRFGGLLMSWDAEGNRHINSIAGPVIPVFTKL

SEQ ID NO: 372 - protein, 200 aa, Capsicum annuum
MEGGNFLTVCLILVALTTSNYLKSVSAARPAVGETNTEFIRTSCKSTTYPNLCFSSLSSRASAIGASPQLLAHESLTVSLETAQSTSSMMLKLAHGQGMTPREIGAMHDCVEELSDTVVGLRKSLGEMKQLRGKDFDLKMNDIQTWVSAALTDEDTCTEGFDGKVMNGKVKTVVRGKILEVAHLTSNALALINRLAALHG

SEQ ID NO: 373 - protein, 261 aa, Glycine max
MMPTPLQVRRRPVFEFDDEHLQNQKPTIPMELQIVSSQQHFRLPDGWVVEKKPRPSHESRFDKYYYEPGTGRKFRSLLSVQRHLAGETRDYVVANTMMSKNENTNFIESGAGRKFGSLKALENFLLEENACITTLKSAVKSGTGEQMACGVRSDLKPVHKGSSVGEEVQITPKSLKHTIQSALSEKSDSRKKTKSEKDNRASMHNLTVPPPAKVSWVLSGSGGFWSPFLDDSIVPEPEKMKWSKAFVLSIHDDGDINGLNS

SEQ ID NO: 374 - protein, 198 aa, Glycine max
MDEVDLDLENYEELFGMALSHSEELFENGGIDSLFGTKGMSAGDSNCQEAIAAEGSSVGQVNAMQPACSNAASADSILSTKTEPILCFTGRQTQSNLSFSGVTGESSAGDYQDCGASSMLLMGEPPWFAPCPENSLQSANRSNAVMRYKEKKKTRMFDKKVRYASRKARADVRRRVKGRFVKAGDVYDYDPLSTTRSC

SEQ ID NO: 375 - protein, 514 aa, Glycine max
MCKCGSCGTRKQTLSEWEKHTGCRAKKWKHSVKVKSTMLPLEKWMAENIPLDGIPEQLDQQQVLAFLQEKYEPVNVKWTTERCAVCRWVEDWEDNKIIICNRCQIAVHQECYGAKNVQDFTSWVCRVCETPDVERECCLCPVKGGALKPTDVEMLWVHVTCAWFRPQVVFQNHEAMEPAMGILKIPPNSFVKTCVTCKQSHGSCISCCKCSTYFHVMCASRAGYTMELHSMEKNGTQVTRKLIYCAIHRVPNPDSVLVVHTPLGIFSPRTSLQNQRGCFRGSGLILSKNIELNESSTTENDLVEPLSAARCRVYRRSPNKRADVPIIHLLGGPSLHSLGAITQLNIFKDADESKVFTSFKERLHHLWETEKFRVCFGKSGIHGWGLFARRDIQEGEMVVEYRGVHVRRSVADLREEKYRSEGKDCYLFKISEEVVVDATNRGNIARLINHSCMPNCYARIMSLGDQGSRIVLIAKTNVSAGEELTYDYLFDPDERDELKVPCLCKAPNCRRSMN

SEQ ID NO: 376 - protein, 259 aa, Glycine max
MDFDSSFFQYQNFNSSFVNSSVCAEPFSWENFLFFNEENTTTTTLNSFTITDHSSQSRIKESSSSDYSNSSGSLVSTESQLEVSSNLTHASHQLETHASPQPPKEGNKDKRPFRGVRRRPWGKFAAEIRDSTRNGVRVWIGTFDTAEAAALAYDQAALSTRGSMAVLNFPEEVVRESLKDMQNNNKPSLEDGSSPVLALKRKHTMRRKSKATNKKTKRGHGMELENIVLSQNVLVLEDLGSEYLEQLLSLTSSDDDFLC

SEQ ID NO: 377 - protein, 548 aa, Glycine max
MGENEEAMQRLHFLKQPLNMEQLSIPQFNPSQMRARQHHHQNQFDGGNSNKRAGIPPSHPHPIPPISPYSQIPVSRQHNNISPTPTHTRSLSQPSFFSLDSLPPLSPSPFRDSSSTSVSEAADVSMEDRDVSSHSLLPPSPFSRTLNNSNLPLPPRKAHRRSNSDIPFGFSTVLQSSPPLIPLRNPVSAKPAQLVKRETPWDRGVENNNNNNVEGSGEKKSPEGEVVDDLFSAYMNLDSFDALNSSGTDDKNGGENRDDLDSRASGTKTNGGDSSDNEAESSVNESGDGGVRQGGNEKREGMKRSAGGEIAPTTRHYRSVSMDSFIGKLNFDEESPKLPPSPGQRSALMSPAGGIDGNSAAFSLEFGNGEFSGPELKKIMANEKLAEIALIDPKRAKRILANRQSAARSKERKMRYISELEHKVQTLQTEATTLSAQLTLLQRDSAGLTNQNSELKFRLQSMEQQAKLRDALNEALTAEVQRLKLATAELSGDSHGSGCLIPQHSVNPLMFQQQQQPPTASQQNIHLQQQQQQQHQNGNANSNSDLKQ

SEQ ID NO: 378 - protein, 188 aa, Glycine max
MAPRDINRSNVVVAGGSNPTRKEIRYRGVRKRPWGRYAAEIRDPGKKTRVWLGTFDTAEEAARAYDAAAREFRGAKAKTNFPTHAELTHAAARSPSQSSTLDSSSPPTPPLDLTLAAPLAAGGALVFPVARPVVFFDAFERAEVRASFDLPVAAFSDSDSSTVMDYERGSRRRVLDLDLNVPPPPEVA

SEQ ID NO: 379 - protein, 334 aa, Glycine max
MSSGSVRRVSRQDIQLVQNLIERCLQLYMSQKEVVETLLAQAKIEPGFTELVWQKLEEENEEFFKAYYARLVLKQQIMQFNKLLDQQVQLMQLHSSTVASLPTSNGSHIPAVSSLPSSNGSHIPAIPENPACYTADRTQTSLKPENMQHHVDSRLSNVFNNGGSSLHTSMHAAVDMSAHGNRINGPSSMLSAQSANMGLIQGINGGGMIKSEPGYSGCSPYMFGTDGNVLETRPTIGGASVTSFTNVESNSHSLNEVVLDPDTSSFGFLGQIPRNFSLSDLTADFSQSSDILETYSRSPFLATDNENFLDRGEQDNNRLDSISEGLSYEDFGSE

SEQ ID NO: 380 - protein, 222 aa, Glycine max
MRKGRGGGASAAAVDVNGSILKEPRYRGVRKRPWGRFAAEIRDPLKKARVWLGTFNSAEDAARAYDAAARTLRGPKAKTNFPPLSPFCYPHPTTDPFFYTGFHDQHHHHNNNNLNNPQRPTSSGMSSTVESFSGPRPPTTTTTTTTTTATPFLTATRRYPRTPPLVPEDCHSDCDSSSSVVDDGDDNIVSSSFRPPLPFDLNALPFDDAAADDDLRRTALCL

SEQ ID NO: 381 - protein, 911 aa, Arabidopsis thaliana
MNPEKFTHKTNETIATAHELAVNAGHAQFTPLHLAGALISDPTGIFPQAISSAGGENAAQSAERVINQALKKLPSQSPPPDDIPASSSLIKVIRRAQAAQKSRGDTHLAVDQLIMGLLEDSQIRDLLNEVGVATARVKSEVEKLRGKEGKKVESASGDTNFQALKTYGRDLVEQAGKLDPVIGRDEEIRRVVRILSRRTKNNPVLIGEPGVGKTAVVEGLAQRIVKGDVPNSLTDVRLISLDMGALVAGAKYRGEFEERLKSVLKEVEDAEGKVILFIDEIHLVLGAGKTEGSMDAANLFKPMLARGQLRCIGATTLEEYRKYVEKDAAFERRFQQVYVAEPSVPDTISILRGLKEKYEGHHGVRIQDRALINAAQLSARYITGRHLPDKAIDLVDEACANVRVQLDSQPEEIDNLERKRMQLEIELHALEREKDKASKARLIEVRKELDDLRDKLQPLTMKYRKEKERIDEIRRLKQKREELMFSLQEAERRYDLARAADLRYGAIQEVESAIAQLEGTSSEENVMLTENVGPEHIAEVVSRWTGIPVTRLGQNEKERLIGLADRLHKRVVGQNQAVNAVSEAILRSRAGLGRPQQPTGSFLFLGPTGVGKTELAKALAEQLFDDENLLVRIDMSEYMEQHSVSRLIGAPPGYVGHEEGGQLTEAVRRRPYCVILFDEVEKAHVAVFNTLLQVLDDGRLTDGQGRTVDFRNSVIIMTSNLGAEHLLAGLTGKVTMEVARDCVMREVRKHFRPELLNRLDEIVVFDPLSHDQLRKVARLQMKDVAVRLAERGVALAVTDAALDYILAESYDPVYGARPIRRWMEKKVVTELSKMVVREEIDENSTVYIDAGAGDLVYRVESGGLVDASTGKKSDVLIHIANGPKRSDAAQAVKKMRIEEIEDDDNEEMIED

SEQ ID NO: 382 - protein, 378 aa, Arabidopsis thaliana
MKIVRRDFVRNGPGSVKMVAEDSDDLWYAYNLIAVGDSVMAVTFRKVQREIPGGGRDSERVKLKLEVQVEEVDYDKDGSVLRIRGKNILENEHVKIGAFHTLELELKRPFVLRKEMWDSMALDTLKQASDPAASADLAVVLMQEGLAQIFLVGRSVTSSRARIETSIPRKHGPAIAGYESALKKFFENVLQAFVKHVDFSVVRCAVVASPGFTKDQFHRHLLLEAERRQLRPIIENKSRIILVHTNSGYRHSLGEVLHAPNVMNMIKDTKAAKEVKALNDFHNMLSTEPDRACYGPKHVEVANERMAIQTLLITDELFRNSDVKTRKKYVNLVESVKDSGGDAFIFSAMHVSGEQLAQLTGIAALLRFPLPELEDIEM

SEQ ID NO: 383 - protein, 146 aa, Glycine max
MEEESIGLGKSLVVEKEGEIECEEEQEEGEEIEALRNEEVEDKEGVGTSSVAENCLMKEEGGDYERAEGDGKKKDLLEKMVEDNQKMVEMMTQLFQRNEMQTTLLTSLSQRVEQLERALACEKLRRKKKRKADAKIKRNNPKNGFI

SEQ ID NO: 384 - protein, 228 aa, Zea mays
ARRARSSPSSGASPSTAIALTLYHDTFYHISLTTSTLITLDDIHSITTLTRPINSSSTRPPAGAETHLMMETTGHGALKENYFLDDGAYMVVKIIIEMVRMKLAGVEGGVGSLIRDLQEPAESVLLRMDVMGEPKDAKERATHAVEAFKNYIQEDKLFGWVLDDCGDCSVAEGCLTDTNNDPINVDAHMYRAKLYDENQRAVGMVHIRQSVHNPNIALNMQSYAPGGC

SEQ ID NO: 385 - protein, 365 aa, Zea mays
QPPGADCMFSAMLGLCTLRMWTMPTALFSSYSFALYMCASTLMGSLFVSVRHPSATEQSPQSSSTQPKSLSSWMFLKASTACVALSLASLGSPMTSIRRSTDSAGSCRSLMRLPTPPSTPASFIRTISMMIFTTMAPSSRKFSLSAPCPVVSIIRCVSKYCDRVNALSRYLLPHITNNINTHHSRRHPLDHYSHTTDLLIHAAACRSRDAPDDGDDRARRAQGELLPRRRRLHGGEDHHDGPDEAGRGGGRGREPHQGSAGARRVRAPPDGRHGAQGCQGKGHTCSRGFELHPGGQTFRLGAGRLRGLLSCRGMSYGHKQSHQCCTHVQSKTIRRESESSRHGPHSSKCASQHSTKHAVLCSWWL

SEQ ID NO: 386 - protein, 142 aa, Zea mays
MKGKINGEEEDNNNVKATTESDISAVKEEEDPIPSSPPQFLEHSTGFNYRRSFTDLRDLMPNPVVEAGSSDSCDSSAVLNEETSSENGRLTPPATVAGGSFLQFVKTEDHDEFFSGEEACGGFFSDVQPPSLNWYSASDHWT

SEQ ID NO: 387 - protein, 386 aa, Zea mays
MMMMGEGVSVPPWSHHVPVSGVDAGVGGDEMTPYLLAALRQYLPCNDAGAAEADDEEAAAMAAGVDGYGCDEFRMYEFKVRRCARARSHDWTECPFAHPGEKARRRDPRRYHYSGAACPDFRKGGCRRGDACDFAHGVFECWLHPARYRTQPCKDGTACRRRVCFFAHTPDQLRVLPPTPQQSSASPRGAGALPESYDGSPLRRQAFESYLTKSIVSSSPTSTLLSPPKTPPSESPPLSPDGTAAAFRRGSWPGAGSPVNDVLASLRQLRLGTASSSPSGGWGGYPASAAAYGSPTAGGLYSLPSTPRATPTALATATASASGYMPNLEPLDVSFGGDEEPVERVESGRALRAKVFERLSREGAVSCYPAAGTGGPDVGWVSDLIN

SEQ ID NO: 388 - protein, 407 aa, Zea mays
MASLCDFCGKQRSMIYCRSDAASLCLSCDRNVHSANALSRRHTRTLLCDRCGSQPASVRCLEDNASLCQNCDWNGHDAESGASGHKRQAINCYSGCPSSAELSRIWSFITDIPTVAAEPDYEDGLSMMTIDGSDVTNRHDTSDDKRLLEIANTTLMSDPPSADKLKSPTGSSSGDGFDVMTLATDQPAGPVSATPKVPNARDDDKFNDGMYEDLCVDDADLTFEDYEELFGTSHIRTEELFDDAGIDGYFELKETPPFYFNEQPKAMQIECGNVVSADCAMSNPGARADSSLCIPVRQVRSSISHSLSGLTGESSAGDHHDCGVSPMLLMGEPPWHSPGGPEGSVAGGSRDSALTRYKEKKKRRKFDKKIRYASRKARADVRKRVKGRFIKAGEAYDYDPLSQTRSY

SEQ ID NO: 389 - protein, 305 aa, Zea mays
MASLFPQLAQMEHGVAGASHGAPSFLFCNGAGAATADSASLETSSGVLDTSPRGGGADSGGRKAPTKPREDSASASASFSFSSAHSKDSSSKGSTKNRGGKRGRSSKEVDEEEEPKGYIHVRARRGQATDSHSLAERVRRERISERMRVLQALVPGCDKVTGKALVLDEIINYVQSLQNQVEFLSMKIASLSPVLYGFGMDTTDAFSTDHTTQKIEGMLQLHHEALAVPSSALSRPPFEAIADSTHATASASSPRSYELHGDGGGGGASISFPQDGGGYMAQTVGGPRPELFNQVVFSNHMCSFQ

SEQ ID NO: 390 - protein, 450 aa, Arabidopsis thaliana
MAEISATSFPSSSSSALVIRSSHNGSLKCQNVAVPKTTSQFQELSLKRSQLVGNAVVTGHVTGSRSCKNQAIRAVLSGDGTALTTDSKEAGLRGKLKKVVLAYSGGLDTSVIVPWLKENYGCEVVCFTADVGQGIKELEGLEQKAKASGASQLVVKDLTEEFVKDFIFPCLRAGAIYERKYLLGTSMARPVIAKAMVDVAAEVGADAVAHGCTGKGNDQVRFELTFFSLNPELKVVAPWREWEIQGREDAIEYAKKHNVPVPVTKKSIYSRDRNLWHLSHEGDLLEDPANEPKKDMYMMSVDPEDAPDQPEYIEIGIESGLPVALNGKALSPATLLAELNTIGGKHGIGRIDMVENRLVGMKSRGRWFDPLRESMDAFMEKITETTTGSVTLKLYKGSVSVTGRQSPNSLYRQDISSFEGSEIYNQADAAGFIRLYGLPMKIRAMLKKIS

SEQ ID NO: 391 - protein, 361 aa, Zea mays
MVGRMTGEMGGLRSRILRTLQSFPTAAPAQSPNLLLAPLPPGAGPSPQPPAAPCVRLQEPAPQEPPLGDEARAAPGGGGDDDKENVSPGATPRKAKKMKLSSDHHDRSPGLGEEQRADGATRYRRPDLASATLFDPDLLAAFRRAVDAYAQALDAARRRDVDVDVDDGDGVPGGGGGGGGGGPGVTDPLDAFERRCPPGGERAVVLYTTSIRGVRRTFEDCARVRRLLGGLRVAFLERDVSMHAPYREELRALLRCGRGEGGGGAFPVPPRLFVDGRYLGGADEVVALHERSQLRPVLWRAARRGAAEVPCAVCGGAWFVVCGACGGSHWLHDASAGAAAPGRVTCSACNENGLVPCPLCS

SEQ ID NO: 392 - protein, 330 aa, Escherichia coli
MKTAYIAKQRQISFVKSHFSRQLEERLGLIEVQAPILSRVGDGTQDNLSGCEKAVQVKVKALPDAQFEVVHSLAKWKRQTLGQHDFSAGEGLYTHMKALRPDEDRLSPLHSVYVDQWDWERVMGDGERQFSTLKSTVEAIWAGIKATEAAVSEEFGLAPFLPDQIHFVHSQELLSRYPDLDAKGRERAIAKDLGAVFLVGIGGKLSDGHRHDVRAPDYDDWSTPSELGHAGLNGDILVWNPVLEDAFELSSMGIRVDADTLKHQLALTGDEDRLELEWHQALLRGEMPQTIGGGIGQSRLTMLLLQLPHIGQVQCGVWPAAVRESVPSLL

SEQ ID NO: 393 - protein, 368 aa, Zea mays
MAAVTAAAVSLPSSSSSPAAAKAKASASASPSSPCGHLQFPRRHGGPRAVRLRVQVSTTETAEAEPVKKLEKVSKKQEEGLVTNKYKPKEPYVGRCLLNTRITGDQAPGETWHMVFSTEGEVPYREGQSIGVIADGEDKNGKPHKLRLYSIASSALGDFGDSKTVSLCVKRLVYTNDQGEVVKGVCSNFLCDLKPGAEVKITGPVGKEMLMPKDPNATIIMLATGTGIAPFRSFLWKMFFEEHEDYKYTGLAWLFLGVPTSDTLLYKEELEKMKEMAPDNFRLDFAVSREQTNAAGEKMYIQTRMAEYKEELWELLKKDNTYVYMCGLKGMEKGIDDIMLDLAAKDGINWLDYKKQLKKSEQWNVEVY

SEQ ID NO: 394 - protein, 237 aa, Synechococcus sp. WH8102
MVASSGFSRYSPQQPQVAGAAERSRTLLDVIRDLDGASTELVERNKTIFFPGDPAERVYLIRRGAVRLSRVYESGEEITVALLRENSLFGVLSLLTGHRSDRFYHAVAFTRVEMVTAPAASVRAAIEADTGVGLRLLQGLSSRILQTETMIETLTHRDMSSRLVSFLLVLCRDFGVPDELGITIDLRLSHQAIAEAIGSTRVTITRLLGDLRQSGLVQIDRKKITVLDPIALAKRFS

SEQ ID NO: 395 - protein, 204 aa, Glycine max
MSDDVIATSLGVGHLGGKKKKKSNPSPITMLEQQGSDPTKPAAAATGFPATTEASSYAPVAPPQSKPTVDWSTGLCDCFSDCGNCCITWWCPCVTFGRVAEIVDRGSTSCGASGALYTLVCCGWPYSCFYRSKMRRQYGLKGNCCTDCLLHCCCESCALCQEYRELKQRGFDMIIGWHGNVEQRIQEVAMTAATPPSVEKGMSR

SEQ ID NO: 396 - protein, 150 aa, Medicago truncatula
MTLFDMDLSSVVNNFLNHVHETPSRDHENHESRRRASSIPVDILDTPKEYIFFLDVPGLSKSEIQVTIEDENTLVIKSNGKRKRQDGEDEGCKYIRLERRAPQKLLRKFRLPENANVSAITAKCENGVLTVNVEKHTPPPKSKTVEVAIA

SEQ ID NO: 397 - protein, 367 aa, Zea mays
MGRAPCCEKSGLKKGPWMPEEDEKLVAYIKKHGQGNWRTLPKNAGLARCGKSCRLRWTNYLRPDIKRGRFSFDEEETIIQLHSILGNKWSAIAARLPGRTDNEIKNYWNTHIRKRLLRMGIDPVTHAPRLDLLDLSALFKPAAAAAYYYPTQADLDTLRALEPLANYPDLLRLASALLSGPPAAPAIGDQQPRQLLPWILQAQMAQQAAAAVAQAQLQVAPQAEQFVQQRQAAGAACQMPDLVHTSPTVQQHQQVAAAQEQQHQPQGQDDMAAACHSMQPQPPTGGYAVDTLDIPALMQMVQADDASNLQQWSSMITSSTNNNNVGSGVSTPSSSPGAALESLHHRHHDVRRRERCRRRRAVQHAAI

SEQ ID NO: 398 - protein, 475 aa, Zea mays
MATTHLLTPPRVHHPSPSASSSVARVRATASLAHPLHLCRLRLAAPRSRSPSPRHGRRAMSVRSSLIDPDGGALVELVAPPDRLPALRAEAEALPRVRLAPVDLQWAHVLAEGWASPLRGFMREHEYLQSLHFNCVRLPDGGLVNMSLPIVLAIGDADKEQIGGKPDVALQGPDGGVVAILRRVEIYPHNKEERIARTWGTTAPGLPYVDEAIASAGNWLIGGDLEVLEPIKYNDGLDHYRLSPRQLRKEFDKRGADAVFAFQLRNPVHNGHALLMNDTRRRLLEMGYKNPILLLHPLGGYTKADDVPLPVRMEQHSKVLEDGVLDPETTIVSIFPSPMHYAGPTEVQWHAKARINAGANFYIVGRDPAGMGHPTEKRDLYNPDHGKKVLSMAPGLEKLNILPFKVAAYDTVAKEMAFFDPSRSQDFLFISGTKMRTYAKTGENPPDGFMCPGGWKVLVDYYNSLQAEEATPVPV

SEQ ID NO: 399 - protein, 563 aa, Zea mays
MPGQGHCLPKAREGVGGCRRCHMEVAVVEGPPPQVMKEEKRPDAKPEIAASMVGSALPIVFESFPSSTQRDAAGKKREEQEQRRLEAARAEMGEVREENERLKSTLSRIVSQYQSLQMHFLDVVKVHEQASAAKAEKLPVAPAPAPPPPATTGTDDPDDLVSLSLGTRANSGGGAPRRKGHERSASSSGTADEMTTAGADDEGHRLSLGLGFGRGSGLPASTVATDDDKASHASVRNLSSDSSGSADYNDNAKPADLAAAGTARKSPSAGAGDGSADDEVQQQAKKARVSVRVKCDTPTMPDGCQWRKYGQKISKGNPCPRAYYRCTVAPQCPVRKQVQRCAEDTSILITTYEGAHNHPLPPAATAMASTTSAAAAMLTSGSTSSAASASLVHGHHHPLAAAAAGLFGPTTMVSTAASCPTITLDLTSPATAPHTLMHSSPYGFESKAVPAAWSSGYLAYGGASAGAHPSSYYAKSSSPALGHHQLFGGNLSVPSRPEQMYAQSYLQRASSLGLGGGGGHGAVAPAVTDTLAKAITSDPSFQSALAAAITSVMGRGGAAAAHK

SEQ ID NO: 400 - protein, 442 aa, Zea mays
MIRLVLRGCCCDLSLLSNSNTTAITGVYHAAASNSSALSVVHRHGPCSPLLARGGEPSHAEILDRDQDRVDSIHRMTAGPWTAGQSSASKGVSLPAHRGLRLGTANYIVSVGLGTPRRDLLVVFDTGSDLSWVQCKPCNNCYKQHDPLFDPSQSTTYSAVPCGAQECLDSGTCSSGKCRYEVVYGDMSQTDGNLARDTLTLGPSSDQLQGFVFGCGDDDTGLFGRADGLFGLGRDRVSLASQAAARYGAGFSYCLPSSWRAEGYLSLGSAAAPPHAQFTAMVTRSDTPSFYYLDLVGIKVAGRTVRVAPAVFKAPGTVIDSGTVITRLPSRAYSALRSSFAGFMRRYKRAPALSILDTCYDFTGRTKVQIPSVALLFDGGATLNLGFGGVLYVANRSQACLAFASNGDDTSVGILGNMQQKTFAVVYDLANQKIGFGAKGCS

SEQ ID NO: 401 - protein, 577 aa, Chlamydomonas reinhardtii
MDLATALGLGIAPPPPADDSSHHSTTEACTLPAYLRAPEVTAQVMAEYIWLMGGTGQLRSKTKVLDAKPSCAEEAPIMIVESNPDGQLAEPNHELFLKPRKIFRDPFRGGDHILVLCDTFIVAQVVAEAGAAPSTVLQPSETNSRVACENVLRVAEQQEPVFAVEQEYAIIHPAYPTKVPLGPRRPSTSRASSCHSGSRRSSYVSSGSARGGIGKNSSHHGGKQSHAAAAAAAAAVAGIPWPSPDACEQTAQEASAARQKASRQLADSHLRCCLFAGVRVTGADVHSLDGLHSYKIGPSPGVDLGDDLWTSRYLLQRVAEQHSASVSWEPDSMPSERPLGCHFKYSTASTRQAPHGLNAIEQQLVRLQATHVQHQVAYNDGRLDRLSSPEASTFTHAVGSANASVVVPSLTFLQQGGYFTDRRPPSDADPYKVTLLLAATTLDIPLPKLPASSSAGNTAANCSGGMSAGPSSCPAAAALPFGSPMQSYLLAAAAAQRQQQQQHLMFDTESEECDSVDEDDAMTEDSAALLAKMDDDGGAAEASSCDSDFEDQDDASSSPITGTWADNDCTHMLGAGI

SEQ ID NO: 402 - protein, 1552 aa, Chlamydomonas reinhardtii
MEAVATVVANEPKVADMEEILAERDACGVGFIANLKNVQSHTVVKQALTALGCMEHRGACSADDDSGDGAGLMTQIPWKLLKKEMPALNETTTGVGMVFMPNDDALEAQCKQILEQVCAKEGVKVVGWRKVPVNHDIVGRFAKVTEPRIWQVLIEGKSGQVGDELERELFLVRKLVEKAKNAALPAEFAPDFYICTLSSRTIVYKGMLRSAVVGTFFRDLENPDFESAFAIYHRRFSTNTTPKWPLAQPMRVLGHNGEINTLQGNLNWVASREHELSNPIWKGREAELTPLCNAAQSDSANLDNVAELLVRTGTDPQDALMLLVPEAYRNHPDLMKEYPEVVDFYEFYEGLQEGWDGPALLVFSDGKRVGARLDRNGLRPARFWQTKDDMIYVASEVGVLGDAITNAENIVAKGRLGPGQMVCADLEKGIFSETSAISKLVAGRKPYKEWLAASLRRLTDLGESTFLNEPMYDAATMLRLQSAIGMDAENAQMVVESQAQTGVEPTYCMGDDIPLAVLSDKPHMLYDYFKQRFAQVTNPPIDPLREGLVMSLEMRLGARGNLLNPGADSYKQVLLDSPILLESEMQAISTDKVLGSKTFKLFFEAGKPGAMEAALKKLCSDVEAAVKAGCQCVVLSDRPDGGMDAGKAPIPALLATGAVHHHLIRTSLRSDTSIVVDTATCYSTHHAAMLIGFGAHAICPYLGYETSRQWRLSARTQSLIKAGKVPDISVKVAQKNFKKSLEKGVLKILSKMGISLLSCYHGAQIFEAYGLGKDVMDMCFKGTVSRIGGMSLADLQRESESLWAKGFPEKAMTKLEDYGFIQSKPKGEFHSNNQTMAKLLHKAIGLGNGSAADKDAYKAYQQHFADSPVAVLRDCLEFKSDRGPISIDQVEPAAAIMERFCTGGMSLGAISRETHETIAIAMNRIGGKSNSGEGGEDPIRWLHLSDVDGEGKSATASYLRGLRNGDTATSKIKQVASGRFGVTPEYIMNAEQMEIKIAQGAKPGEGGQLPGQKVSPYIAQLRRSKPGVPLISPPPHHDIYSIEDLAQLIYDLHQVNPRAKVSVKLVAEAGIGVVASGVAKANADIIQVSGHDGGTGASPISSIKHAGGPMEMGLAETHQTLVRNELRERVVLRVDGGVRNGRDVLMGALMGADEFGFGTVAMIATGCIMARVCHTNNCPVGVASQREELRARFPGAPEDLVNYFHFVAEEVRAELANMGYRSLDEVIGRADLLKQRSVKLAKTEGLDLSFLTTFAGASGKSSTRRAQEVHDNGPQLDDRILAEPEVMAAIKDHKTVSKAFEIVNVDRSSLGRVAGVIAKHHGDSGFQGKVKLTLTGSGGQSFGCFCVKGLEVKLVGEANDYVGKGMNGGEIAIVPPANSPFKPEEASLVGNTCLYGATGGRLFVNGRAGERFAVRNSLAEAVVEGAGDHCCEYMTGGCVIVLGSVGRNVAAGMTGGLGYFLDEDGSFTDKVNTEIVSVQRVITKAGEAQLRGLLEAHVAHTGSAKAKSLLANWEASLGKFWQLVPPAEKNTAEVNPSVAQPAAAGAKVAVSA

SEQ ID NO: 403 - protein, 355 aa, Chlamydomonas reinhardtii
MQQLCPSPKMNCPRHARLAVARVQRVQQRTGIAILSRSVVANAAAGIASVSQNGGSNGNGAHATLTPVTPIAAPAAPAPAPAAPAPGVLPPAAAFNAIVAAGAAKAAMPAWKTFLMGIMAGCYISFGGFMAVTAATMCAGLGATNPILTRLVMGALFPFGLLITLVCGAELYTGNTALVTAAVAEGKATPKDLAKNWFWSYAGNAVGSLLMVGLVAATGLLATSPVAANMAVAKSALPFGQALVRGLLCNWLVCSAVWMAAAATSLPGKALAAYLPVMAFITLGLEHSVANMFFCSLGIVQGAPVSWGAFLTNNLLPVTLGNTLAGVLCMAAAYCACFGAAGNKPAATAAPAAAK

SEQ ID NO: 404 - protein, 684 aa, Zea mays
MVFQKRSSSELEASGGGQVAEMPRVPKSARGKRSVRKKEAQNPPQMSAFDLLATVAGKLLDEGVGSLGNMSAGAPALTACAKDVRVKKEQCDEEMKQFKHEVTDQDSCNESAILPHIVFQRAVNNARNEDPKAKSEAQDKESSMISCTKAELGCNFGVIADRWSPESVESGAFTGDAVASLMPPAPAGFHKNAPEMYNLLDSMDVDVKPPPLVSSDSTGEMPLYGDKVHRSTSLPRVSKGVGFFAVDRDDDDDKSSGCTHPSTTTNKDFRSNCTAEYSRVRKLLTSKYRKVAPARVYKSDLSYSDVDRKPSFRNKKMHYTRQRTQRSTFKRRKLFDRHSVLASEFGTAHGKGNTKKVTGRDSHAVSLEANKGTSSTPFQKSRGSNDCHVKLKIKSFKVPELLVEIPESATVGSLKKTVLEAVTAILGGGLRVGVLHHGKKVRDDNKTLIQAGIGQEDMLDNLGFSLEPNCTQNPQVQAPEDISFLETIDTAEPLARIAPADSSSKHGEVDLSQEFALTPLAMNYQGSDHDSVHSPGGVSSPDKVSTNSRALVPVPAADPNAGAIVPANKSKRSPEQGQRRIRRPFSVAEVEALVLAVEKLGTGRWRDVKLRAFDNAKHRTYVDLKDKWKTLVHTASISPQQRRGEPVPQELLDRVLAAQAYWSQQQAKLQPKTPPLLAEARLLT

SEQ ID NO: 405 - protein, 561 aa, Arabidopsis thaliana
MALRTLSTFPSLPRRHTTTRREPNLTVIYRNPTTSIVCKSIANSEPPVSLSERDGFAAAAPTPGERFLENQRAHEAQKVVKKEIKKEKKKKKEEIIARKVVDTSVSCCYGCGAPLQTSDVDSPGFVDLVTYELKKKHHQLRTMICGRCQLLSHGHMITAVGGNGGYPGGKQFVSADELREKLSHLRHEKALIVKLVDIVDFNGSFLARVRDLVGANPIILVITKIDLLPKGTDMNCIGDWVVEVTMRKKLNVLSVHLTSSKSLDGVSGVASEIQKEKKGRDVYILGAANVGKSAFINALLKTMAERDPVAAAAQKYKPIQSAVPGTTLGPIQINAFVGGEKLYDTPGVHLHHRQAAVVHSDDLPALAPQNRLRGQSFDISTLPTQSSSSPKGESLNGYTFFWGGLVRIDILKALPETCFTFYGPKALEIHAVPTKTATAFYEKELGVLLTPPSGKNQMQEWKGLQSHRLLQIEINDAKRPASDVAISGLGWISIEPIRKTRGTEPRDLNEAEHEIHICVSVPKPVEVFLRPTLPIGTSGTEWYQYRELTDKEEEVRPKWYF

SEQ ID NO: 406 - protein, 343 aa, Arabidopsis thaliana
MALCSICPRIPLRFRPKPISPFLSKPQICLAYRVYSSLQSTTPSTRDELGTVSIGFLGMGIMGSPMAQNLIKAGCDVTVWNRTKSKCDPLVGLGAKYKSSPEEVTATCDLTFAMLADPESAIDVACGKNGAIFGISSGKGYVDVSTVDVASSILISKQIKDTGALFLEAPVSGSKKPAEDGQLIFLTAGDKPLYEKAAPFLDIMGKSKFYLGEVGNGAAMKLVVNMIMGSMMASFAEGILLSQKVGLDPNVLVEVVSQGAINAPMYSLKGPSMIKSVYPTAFPLKHQQKDMRLALGLAESVSQSTPIAAAANELYKVAKSYGLSDEDFSAVIEALKAAKSREA

SEQ ID NO: 407 - protein, 289 aa, Arabidopsis thaliana
MEVGFLGLGIMGKAMSMNLLKNGFKVTVWNRTLSKCDELVEHGASVCESPAEVIKKCKYTIAMLSDPCAALSVVFDKGGVLEQICEGKGYIDMSTVDAETSLKINEAITGKGGRFVEGPVSGSKKPAEDGQLIILAAGDKALFEESIPAFDVLGKRSFYLGQVGNGAKMKLIVNMIMGSMMNAFSEGLVLADKSGLSSDTLLDILDLGAMTNPMFKGKGPSMNKSSYPPAFPLKHQQKDMRLALALGDENAVSMPVAAAANEAFKKARSLGLGDLDFSAVIEAVKFSRE

SEQ ID NO: 408 - protein, 128 aa, Chlamydomonas reinhardtii
MLATRSAAFASVAGRRTLVTRAMATKLDSIRETVAKNKVVVYSKTHCPYCMKAKSSINQFLQPSQYTVIELDGRADMDEMQDALRELTGARSVPRVFVGGKFLGGGDDTAAAAANGTLKKLLQEAGAL

SEQ ID NO: 409 - protein, 148 aa, Chlamydomonas reinhardtii
MASLQCNMRPATTILTRRPAQVARKSIGVARSQTVRVTASGMAPDLKKSIDELIASNKVVVFMKGTRQFPMCGFSNTVVQILNVMDVPYQTVNILEDDAIRSGMKEYSQWPTFPQVYINGDFFGGCDIMMEAYQSGELKEQLEIALNS

SEQ ID NO: 410 - protein, 285 aa, Arabidopsis thaliana
MIKLLFTYICTYTYKLYALYHMDYACVCMYKYKGIVTLQVCLFYIKLRVFLSNFTFSSSILALKNPNNSLIKIMAILPENSSNLDLTISVPGFSSSPLSDEGSGGGRDQLRLDMNRLPSSEDGDDEEFSHDDGSAPPRKKLRLTREQSRLLEDSFRQNHTLNPKQKEVLAKHLMLRPRQIEVWFQNRRARSKLKQTEMECEYLKRWFGSLTEENHRLHREVEELRAIKVGPTTVNSASSLTMCPRCERVTPAASPSRAVVPVPAKKTFPPQERDRGSKKRRIKQD

SEQ ID NO: 411 - protein, 283 aa, Arabidopsis thaliana
MIKLLFTYICTYTYKLYALYHMDYACVCMYKYKGIVTLQVCLFYIKLRVFLSNFTFSSSILALKNPNNSLIKIMAILPENSSNLDLTISVPGFSSSPLSDEGSGGGRDQLRLDMNRLPSSEDGDDEEFSHDDGSAPPAKKLALTREQSRLLEDSFRQNHTLNPKQKEVLAKHLMLRPRQIEVWFQNRRARSKLKQTEMECEYLKRWFGSLTEENHRLHREVEELRAIKVGPTTVNSASSLTMCPRCERVTPAASPSRAVVPVPAKKTFPPQERDRLLWAMATL

SEQ ID NO: 412 - protein, 285 aa, Arabidopsis thaliana; identical to SEQ ID NO: 410

SEQ ID NO: 413 - protein, 127 aa, Zea mays
GRAVPVSSPARASSVGRFERGVRPNRRKIAPLLTAFHLALDPQMYCLYSAICSWVKSGMEYSRWKNGNICGLQQVSRMGVDDISLFSVFIILNTESACRRFQFTFMVCTHEKWEKAEEFDFFLSFNV

SEQ ID NO: 414 - protein, 299 aa, Zea mays
MSASSAACRVCGGVAECACHGGAGARCGAAVADLNRGFPGMWHHHHQQPEEEEEPSVAGGGAAAGLQEFQFFGHDDDHDSVAWLFNDPAPHLHRGPAPAAAGNGVVPEAAQRRAPLFDGYAHAQYGQLPGHGLMFDVPLSRGGGDDDAAVLEAGLGLGGAGAGDSNPATTSSATIILIWPITQVIIGNVKKPPICGPASLRLMSFCGSTFTDAAANGSASGADPAVDREAKVMRYKEKRKRRRYEKQIRYASRKAYAEMRPRVKGRFAKVPDGDAPAPPAPAAAGGYEPGRLDLGWFRS

SEQ ID NO: 415 - protein, 187 aa, Zea mays
  misc_feature (112)..(112): Xaa can be any naturally occurring amino acid
  misc_feature (137)..(137): Xaa can be any naturally occurring amino acid
  unsure (1)..(187): unsure at all Xaa locations
MSNGTDHAQPPSEKLSLPMESRPKKRASPGDNWAPPPGWTTEEKVRTSGTKAGLVDKFYYEPVTNRKFRSRTEVMYYLEHGTPKKKNKKSVNNSDTKSQRSEDPRSYKRLTXSTQSLTEQPPPQPTPTPMPLDFDFXDGPEKVIWTGTNGLQEAWCPFIGDYKIQESVSQDWDRAFTLLTANANMSV

SEQ ID NO: 416 - protein, 410 aa, Zea mays
MATGEEHVAAPAPAVEETPEKKQASTTELPAPSGWTKKLAPTRGGRGGRFEVIFVSPTGEEIKSKRQLTQYLKAHPGGPASSEFDWGTSDTPRRSARLSEKVKATESPEGEKTPKRARSSSKRGKKEEKVDAEDANEAGEDGAAAEGKGTDVEMKDAENAEDEKKDVPSAEKTEEVDDKKDAENVEMKDAAEKTEEVEDKKEEAPTVDAAENTVEGDDKKEEPPAEKTDEKEEAPAVDAAEKNEEGDDKKEEEPPAEKKTVEKEVVPAVDAAENTEQSTGGQAQPNDVAAPESENKGDGKPAESESAPLAFVDDAAPLVIVGEEKTEDSQAAESAVPSLASSEGEKKENGGATEPAAPLVVETKADAPPPADAEKGAENSGQVNTAPQEPTAANCDKGQIQPGASAVRCT

SEQ ID NO: 417 - protein, 285 aa, Zea mays
MSTSEVWSLSDFEISKYIGEGRFGKVYLAREKQSGYVVALKVIFKAKLQKYHFHAHLRREIEIQQSLDHPNVLRLFTWFHDEERVVLVLEYAARGELYKVLRAAGRFTERTSATYVASLAGALAYCHKKQVIHRDIKPENLLIDIEGRLKIADFGWAARSNAKRHTLCGTIDYLAPEMVEKKAHDHAVDNWTLGILCYEFLYGSPPFEADEQDDTLRRIVRVDLAFPSSPCVSSEAKDLISKLLVKDSSKRLCLEDIMKHPWIKKNADPSGSCIKQKDVTRSKLL

SEQ ID NO: 418 - protein, 329 aa, Arabidopsis thaliana
MKQASSSSSCNPTSLTNRLKTIFKKAEELSILCAIDVCVIYYGPDGDLRTWPKDRETVKNMALRYKEDRKRKKCLNLHEFLEKEKVKDKDKYKGKTNYVKNPNWYPNFDHYSPQQLSQLIQSLERTLSTLQKRLRIVESQKKQNTNLVHQSLTPSYLNQTQHLDPSKFSLYMYNHGDATLSQLPLSASQSNQLINYQMQHGFGQNMCLDNITNNNNFQHPGVSNTQDYSPLLSANNYGLNNHLMQQQDQLHGFDQNLCMMSEIINNNNGLQHPNLSNTVPHEFPYGNTSFSQDMFSSYDGSSLLQTSSLPPLHNIPNSYCFSDNSRLLC

SEQ ID NO: 419 - protein, 322 aa, Arabidopsis thaliana
MGGVKRKISIELIEKKDSRAVAFSKRSRGLYSKASDLCLLSDAQIAIIATPVSSKSNVSFYTFGHSSVDNVVAAFLTNQRPREGLGLDYWWEDERLSKSEDLEELRDAMDSMSKMLKDLKDLQNQRDCEEDVKKKGVLHGTHQKQTFNPESCSVNFDGFNKNTEEFDLDEIFDYVSTAEALSMNLDMDDVSVVTTNQNPVSASETVEDRELVVHKNMDEDNIHVSDMDDKDTMLMISDKNNVLPENLDEFDQELDLDQLLDFETNYESLLKSCEMEDYASMVTTKQNLCSNPEAVEDGGLMIQKDLPEDNLCFSDYFSDLHC

SEQ ID NO: 420 - protein, 159 aa, Populus deltoides
MSDEEQHFESKADAGASKTYPQQAGTIRKSGYIVIKNRPCEVVEVSTSKTGRHGHAKCHFVAIDIFNGRKLEDIVPSSHNCDVPHVTRTDYQLIDISEDGFVSLLTENGNTKDDLRLPTDESLLSQIKDGFGEGKDLVVTVMSSMGEEQICALKDVGPK

SEQ ID NO: 421 - protein, 722 aa, Arabidopsis thaliana
MSFVVGVGGSGSGSGGDGGGSHHHDGSETDRKKKRYHRHTAQQIQRLESSFKECPHPDEKQRNQLSRELGLAPRQIKFWFQNRRTQLKAQHERADNSALKAENDKIRCENIAIREALKHAICPNCGGPPVSEDPYFDEQKLRIENAHLREELERMSTIASKYMGRPISQLSTLHPMHISPLDLSMTSLTGCGPFGHGPSLDFDLLPGSSMAVGPNNNLQSQPNLAISDMDKPIMTGIALTAMEELLRLLQTNEPLWTRTDGCRDILNLGSYENVFPRSSNRGKNQNFRVEASRSSGIVFMNAMALVDMFMDCVKWTELFPSIIAASKTLAVISSGMGGTHEGALHLLYEEMEVLSPLVATREFCELRYCQQTEQGSWIVVNVSYDLPQFVSHSQSYRFPSGCLIQDMPNGYSKVTWVEHIETEEKELVHELYREIIHRGIAFGADRWVTTLQRMCERFASLSVPASSSRDLGGVILSPEGKRSMMRLAQRMISNYCLSVSRSNNTRSTVVSELNEVGIRVTAHKSPEPNGTVLCAATTFWLPNSPQNVFNFLKDERTRPQWDVLSNGNAVQEVAHISNGSHPGNCISVLRGSNATHSNNMLILQESSTDSSGAFVVYSPVDLAALNIAMSGEDPSYIPLLSSGFTISPDGNGSNSEQGGASTSSGRASASGSLITVGFQIMVSNLPTAKLNMESVETVNNLIGTTVHQIKTALSGPTASTTG

SEQ ID NO: 422 - protein, 722 aa, Arabidopsis thaliana; identical to SEQ ID NO: 421

SEQ ID NO: 423 - protein, 722 aa, Arabidopsis thaliana; identical to SEQ ID NO: 421

SEQ ID NO: 424 - protein, 722 aa, Arabidopsis thaliana; identical to SEQ ID NO: 421

SEQ ID NO: 425 - protein, 340 aa, Zea mays
MGGAAAGTKWIHHIQRLSAAKVSAEAVERGQSRVIDASLTLIRERAKLKAELLRALGGVKASASLLGVPLGHNSSFLQGPAFAPPRIREAIWCGSTNSSTEEGKELNDPRVLTDVGDVPIHEIRDCGVEDDRLMHVISESVKTVMEEEPLRPLVLGGDHSISYPVVRAVSEKLGGPVDILHLDAHPDIYDCFEGNTYSHASSFARIMEGGYARRLLQVGLRSITKEGREQGKRFGVEQYEMRTFSKDREKLENLKLGEGVKGVYVSVDVDCLDPAFAPGVSHIEPGGLSFRNVLNILQNLQGDVVAADVVEFNPQRDTVDGMTAMVAAKLVRELTAKISK

SEQ ID NO: 426 - protein, 354 aa, Zea mays
  misc_feature (354)..(354): Xaa can be any naturally occurring amino acid
  unsure (1)..(354): unsure at all Xaa locations
TCGLGRETPEGGRPSPSLRGDGLCAAAAHSFLPSSVSEHRDGVEMEEQEAPWRSPCPQVPGNCSSLEKEVAQTLPRSQHFQGHNHHQEGPHCPLHRFHRGDQEDISFLHLQQICIGKLLLGVPAKENDLSQIFAWLFLISSYPMILQHIHSFLQGSKVLRSRRFITIPSTTYHQHQHSSLSTTSTRSLLSHDRLTPHPRGRLQELDPWRKECICRIMGLEIKKSHAKIWERSFSFAGTPSRSLPIQICCRWRKEMSSSPLNRCNGQCGPSCLCPKCERGRVATSFSRLLQFPGTGQGLRQGASCSSISTPSRCSLTELGRKLCAAAAHSPQSPLHREGLGRPPSGVSRPNPQVX

SEQ ID NO: 427 - protein, 267 aa, Glycine max
MNCLCEKDSGLFSSHSTAPYVLGCPSWATSEFEVQRSSMSRSLSSKVDVLPQQCHNSKTFNFQFQEQDASSTKSTDQSYPEVGQISVQHSSTDSTLIRNEGKSMGCVIRSFMGSQDFPFPPPLLDHRPILPVETAPVRIPLQLDFAEEPIYVNSKQYHAILRRRQYRAKLEALNKPIKDRKPYLHESRHQHALKRARGAGGRFLNTKKQLQSNHTPGNIAESKMHHIENYRDGADVSYAFNSDARNMQNDAADKGGGTTQQPLFVYM

SEQ ID NO: 428 - protein, 303 aa, Glycine max
MPGKPDTDDWRVERGEQIQFQSSIYSHHQPWWRGVGENASKSSSDDQLNGSIVNGITRSETNDKSGEGVAKEYQNIKHAVLSTPFTMDKHLAPNPQMELVGHSVVLTSPYSDAQHGQILTTYGQQVMINPQLYGMYHARMPLPPEMEEEPVYVNAKQYHGILRRRQSRAKAEIEKKVIKNRKPYLHESRHLHAMRRARGNGGRFLNTKKLENNNSNSTSDKGNNTRANPSTNSPNTQLLFTNNLNLGSSNVSQATVQHMHTEQSFTIGYHNGNGLTALYRSQANGKKEGNCFGKERDPNGAFK

SEQ ID NO: 429 - protein, 249 aa, Glycine max
MVSRSLRPMISEGVAKEYQNIKHAVLSTPFTMDKHLAPNPQMELVGHSVVLTSPYSDAQHGQILTTYGQQVMINPQLYGMYHARMPLPPEMEEEPVYVNAKQYHGILRRRQSRAKAELEKKVIKNRKPYLHESRHLHAMRRARGNGGRFLNKKKLENYNSDATSDIGQNTGANPSTNSPNTQHLFTNNENLGSSNASQATVQDMHRVESFNIGYHNGNGLAELYHSQANGKKEGNCFGKERDPNNGAFK

SEQ ID NO: 430 - protein, 228 aa, Glycine max
MKPFLFLNLPNTEFNSSQVDCNHSMAHSSYPYGDPIFAYGPQAISHPQMIPPMLGLASTRVALPLDLAEDGPIYVNAKQYHGILRRRQSRAKLEAQNKLIKNRKPYLHESRHRHALNRVRGSGGRFLSTKQLAQSNAEFVTGAHSGSDPTNRYQKEHLSEVESHSSKDGDNSSFITTCSDRPCLSGNNVNFRQQECMFLGNSANMGGSPQFSGGLTFGGAKQRTSVVR

SEQ ID NO: 431 - protein, 213 aa, Glycine max
MKPFLSNHTDSMYNCSQVGCSHPMAHTSYPCGDPYFGSSIVAYGPQAINQQMVPQMLGLASTRIALPVDLAEDGPIYVNAKQYHGILRRRQSRAKLEAQNKLIKSRKPYLHESRHRHALNRVRGSGGRFLSAKQLPQSNAELVTDAYQKKDASEAENHPSSTGENASITFTAISALTSMSSNSVNFPNMAGSSQCSGGLTFGAGALQCTSVGR

SEQ ID NO: 432 - protein, 1172 aa, Arabidopsis thaliana
MVSGVGGSGGGRGGGRGGEEEPSSSHTPNNRRGGEQAQSSGTKSLRPRSNTESMSKAIQQYTVDARLHAVFEQSGESGKSFDYSQSLKTTTYGSSVPEQQITAYLSRIQRGGYIQPFGCMIAVDESSFRIIGYSENAREMLGIMPQSVPTLEKPEILAMGTDVRSLFTSSSSILLERAFVAREITLLNPVWIHSKNTGKPFYAILHRIDVGVVIDLEPARTEDPALSIAGAVQSQKLAVRAISQLQALPGGDIKLLCDTVVESVRDLTGYDRVMVHKFHEDEHGEVVAESKRDDLEPYIGLHYPATDIPQASRFLFKQNRVRMIVDCNATPVLVVQDDRLTQSMCLVGSTLRAPHGCHSQYMANMGSIASLAMAVIINGNEDDGSNVASGRSSMRLWGLVVCHHTSSRCIPFPLRYACEFLMQAFGLQLNMELQLALQMSEKRVLRTQTLLCDMLLRDSPAGIVTQSPSIMDLVKCDGAAFLYHGKYYPLGVAPSEVQIKDVVEWLLANHADSTGLSTDSLGDAGYPGAAALGDAVCGMAVAYITKRDFLFWFRSHTAKEIKWGGAKHHPEDKDDGQRMHPRSSFQAFLEVVKSRSQPWETAEMDAIHSLQLILRDSFKESEAAMNSKVVDGVVQPCRDMAGEQGIDELGAVAREMVRLIETATVPIFAVDAGGCINGWNAKIAELTGLSVEEAMGKSLVSDLIYKENEATVNKLLSRALRGDEEKNVEVKLKTFSPELQGKAVFVVVNACSSKDYLNNIVGVCFVGQDVTSQKIVMDKFINIQGDYKAIVHSPNPLIPPIFAADENTCCLEWNMAMEKLTGWSRSEVIGKMIVGEVFGSCCMLKGPDALTKFMIVLHNAIGGQDTDKFPFPFFDRNGKFVQALLTANKRVSLEGKVIGAFCFLQIPSPELQQALAVQRRQDTECFTKAKELAYICQVIKNPLSGMRFANSLLEATDLNEDQKQLLETSVSCEKQISRIVGDMDLESIEDGSFVLKREEFFLGSVINAIVSQAMFLLRDRGLQLIRDIPEEIKSIEVFGDQIRIQQLLAEFLLSIIRYAPSQEWVEIHLSQLSKQMADGFAAIRTEFRMACPGEGLPPELVRDMFHSSRWTSPEGLGLSVCRKILKLMNGEVQYIRESERSYFLIILELPVPRKRPLSTASGSGDMMLMMPY

SEQ ID NO: 433 - protein, 152 aa, Glycine max
MKGGKSKTESKRADPKLAVNKKGAATKARKPAGKGKAAKDPNKPKRPPSAFFVFMEEFRKVFNKEHPENKAVSAVGKAAGAKWKTMSDAEKAPYVAKSEKRKVEYEKNMRAYNKKQAEGPTGGDEEESEKSVSEVNDEDDDEEGSGEEEDDD

SEQ ID NO: 434 - protein, 625 aa, Zea mays
MASPDDESAQPPSKRPRRDAEPEVDAAEPSPRVVLNPADCDLDFDVGGGGLRGSALHEGGFAYCWSGARATVGARGGGRYCFGCRIVAEQPVEMDPTTSGERHLCRIGVSRGDDPVGALGESQHSFGFGGTGKFSHQRRFVNYGVKFGVGDTVVCAVDLDSKPMASIGFARNGEWLGIARHFDAGEKGLGLVDAPLRPMRWGSALFPHVLLKNVIVEMQFSREDGLLPVDGYEPWASAFSQRNSVFGPSFEQNKCEVMMMVGLPASGKSTWAEKWVKEHQEKRYILLGTNLVLEQMKVPGLLRKNNYGERFERLMDCATWIFNKLLTRAANTPRNFIIDQTNVYKNARIRKLRPFANYRKTAVVMFPTPSELKSRAAKRFNEMGKEIPAEAVNEMTANFVLPLSKDMPHSKEPFDEYSSTYAGTAAPLDPSARSSMPGFYPPTANSYGVGDLRSSAATFSTGVHTEGNPTHGQTPCSVRSFRSPTGNQHGIHSSYPSAPNQYQMPSSYLSNSNQYEVRASYRSTPLPGYGQSTYASRKNPSPYNSEMYQGIQAPMSSRNLYRAPGSAEAYLAPCYAAGNLIGRPHQVLSPSTFPAHGPQPAAQWVPNQGSSRSWSSDSYRPYYGQ

SEQ ID NO: 435 - protein, 625 aa, Zea mays; identical to SEQ ID NO: 434

SEQ ID NO: 436 - protein, 279 aa, Zea mays
MRPVFCGNLDYDVRISEVERLFGKYGRVERVDLKTGFAFVYMEDERDAEDAISRLDGIDFGRKGRRIRVEWTKEDRTVGRKSSSRRSPTNTKPTKTLFVINFDPINTRIRDLERHFDKYGRVANVRIKKNFAFIQFEVQEDATRALEGTNGSHFMDRVISVEYALRDDDEKGERGNGYSPDRRGRERSPGRRRSPSPYGRGRERGSPDYGRSKERGSPDYGRGGRSPDNGRGVSPAGGGRGDHARGGGRSPDYDRQRREASPPGYDRSPSRSPGREARE

SEQ ID NO: 437 - protein, 279 aa, Zea mays; identical to SEQ ID NO: 436

SEQ ID NO: 438 - protein, 253 aa, Zea mays
MARVYVGNLDPRVTAREIEDEFRMFGVLRSVWVARKPPGFAFIDFDDRRDAQDAIRELDGKNGWRVELSTKVGGGRGRDRNGSDMKCYECGEAGHFARECRLRIGSGGLGSGRRRSRSPRYRSRSRSRSPRYRRSPSYSRSPRDRSPRRRSYSRSPLGSPARSLSRSPPLPPPPPRNNSRSPPGAREVSRSPPPPPPRNNSRSPPAARDVSRSPPAARDVSRSPPPPPDARRSYSGSPGQQPQRDESPYANDA

SEQ ID NO: 439 - protein, 253 aa, Zea mays; identical to SEQ ID NO: 438

SEQ ID NO: 440 - protein, 173 aa, Zea mays
MARVYVGNLDSRVTSGELEDEFRVFGVLRSVWIARKPPGFAFIDFDDRRDAEDAIRDLDGKNGWRVELSRNSSGRGGRDRYGGSESKCYECGETGHFARECRLRIGSGGLGSGRRRSRSRSRSRSRSRSRSRSRSPRYRRSPSYSRRSYSPRYRSPRRRSPSPARARSYSRSP

SEQ ID NO: 441 - protein, 173 aa, Zea mays; identical to SEQ ID NO: 440

SEQ ID NO: 442 - protein, 416 aa, Zea mays
MELGLALRLVAPPPLLPCLSRRALSLPPDFVSSRVLRGRRIHASRLKHGAGVVCNAIMTYSGVEEEEMVEEEMEEEAEPAVSTRPRLELIEKPDRSLALLDEYESEELGTSLCANHRSGYVAVLGKPNVGKSTLINQMVGQKLSIVTDKPQTTRHRILGICSEPEYQIILYDTPGVIKKEMHKLDSMMMKNVRSAIGSADCVLVVADACKTPEKIDEMLEEGVGNKDIGLPVLLVLNKKDLIKPGEIAKKLEWYQKFTNVDDVIPISAKFGHGVDDIKEWILSKLPLGPAYYPKDIASEHPERFFVGEIVREKIFVQYRQEIPYSCQVNVVSYKSRPAAKDFIQVEILVEKESQRGIILGKDGKSIKMLATASRLDIEDFLQKKVYLEVEVKVKENWRQDERLLKRYGYGGEIQAL

SEQ ID NO: 443 - protein, 416 aa, Zea mays; identical to SEQ ID NO: 442

SEQ ID NO: 444 - protein, 416 aa, Zea mays; identical to SEQ ID NO: 442

SEQ ID NO: 445 - protein, 396 aa, Oryza sativa
MVAAVAASLRSLAPLSAYRSPSHGIHAVVRDSSAYTTRPPPPPPTADGGGNGGRISPAVLFIIVILAVIFFISGLLHLLVRLLMKKQHRRGGAENAAPSPHSRHVGRDAAMDRQLQQLFHLHDSGLDQAFIDALPVFAYRDIVGGDKEPFDCAVCLCEFDGEDRLRLLPVCGHAFHLHCIDTWLLSNSTCPLCRGTLYVPGLTIESLMFDFDERLEEGRLSEECEDGFQSSRQKKPMDEEQTVTEKRVFPVRLGKFKNVGNTGVGGVDNGNAAGIVSREPGESSSSSLDTRRCFSMGTYQYVLGASELRVALQPGRNKNGVGSRLKGRATGISSVNAEIMEGKRICAKSKGESFSMSKIWQWSNVKGKLPAGSDNCSETASFPWMKRDATGDKSNM

SEQ ID NO: 446 - protein, 396 aa, Oryza sativa; identical to SEQ ID NO: 445

SEQ ID NO: 447 - protein, 396 aa, Oryza sativa; identical to SEQ ID NO: 445

SEQ ID NO: 448 - protein, 396 aa, Oryza sativa; identical to SEQ ID NO: 445

SEQ ID NO: 449 - protein, 653 aa, Zea mays
MLSVSTAATSSPSSPPSAAATPTGAGAAAAAGAGAAGEDYIASEEEFQMQLAMALSASSNSDCVGDLDGEQIRKAKLISLDRFAAHRDEGHTAESLSRRYWDYNFLDYHEKVIDGFYDIFGSSIESSRQGKMPSLADLQTGIGDLGFEVIVVNRAIDSTLQEMEQVAQCILLDFPVANIALMLVQRIAELVTDNMGGPVKDANDMLTRWLEKSTELRTSLQTSLLPIGCIKIGLSRHRALLFKILADSVGIPCKLVKGSNYTGGDDDDAINIIKMDNEREFLVDLMAAPGALIPADILSWKGNSLNSNRKLGLNRTAGSSSTVDANVDPTVLPLEPKGGQLPLFSSGDWMSDIDSGYEAAEIAASTQTSSGVTPSVSAGSVFGSSWMLVNHDQSDGPSTSAGTSSQQKVVPQSEHQRNLNRLPDLQEIPESKYLFADLVPSGDNKSKKTSVPFKGPDHRNNELQKRRENIVPNAGRPQQRLVMKNWSPYNDVSNNKQYNYVEDSFARRNVGNNAASSSSQMPRPAVRSNLNSGLHNDASYHNYDSIMAGTSAMKITSTAETGKVPERVLRGDLDKGQTNYRLEDQHVIVQPPQGRLPWGNPAEGRVPMNRVQSQAKQHLENMDAKQDHKKLLPDPKKSPLDRFMDTSLPSRNM

SEQ ID NO: 450 - protein, 328 aa, Rhodobacter sphaeroides
MPGERLTVVVTRRLPDVVEARMKELFRVELRDPDTQMSREDLIEAMGRADVLVPCLTDDIDANMLAQAGPRLKLIANYGAGVDHIDVASARQRGILVSNTPDVVTEDTADMALALILAVTRRIPEGLTEMQSGDWPGWSPMAHLGGRLRGRRLGILGMGRIGQAVARRAHAFGMQIHYHNRKRLRPEIEAEVGATFWESLDQMVTRMDIISVNCPHTPSTFHLLNARRLKLLKPTAVIVNTSRGEVIDENALTRGLRAGEIAGAGLDVFEHGHEINPRLRELPNVVLLPHMGSATLEGRIEMGEKVILNIKTFADGHRPPDQVLPSML

SEQ ID NO: 451 - protein, 378 aa, Bacillus halodurans
MIIGVPKEIKNNENRVAMTPASVMSFVQAGHQVLIERGAGSGSGFDDIDYGEAGATIENDAASVWAKADMIMKVKEPLPQEYGYFRKGLLLFTYLHLAAEPELAKALVENEVTAIAYETVQVGRSLPLLTPMSEVAGRMAAQIGAQFLEKPKGGRGILLSGVPGVTRGKVTIIGGGVVGTNAAKVAMGLGADVTIVDLSPERLRQLDDLYGTDIQTLMSNPMNIAEAVAASDLVIGAVLIPGAKAPKLVTEQMVEQMKPGSVIVDVAIDQGGIVETVDRITTHDAPTYTKHGVVHYAVANMPGAVPRTSTIALTNVTVPYALQLANNGVKRAIAENTALAKGVNTANGWVTYEAVARDLGYDYQSVESALSGLSVENV

SEQ ID NO: 452 - protein, 378 aa, Bacillus halodurans; identical to SEQ ID NO: 451

SEQ ID NO: 453 - protein, 796 aa, Zea mays
MGTGGDGSKAGPALPLEALLALGLDQRTAENALVNAKVTANLASVIAEAGIKECDKSVGNLLYAVATKYPTNALVHRPVLISYVLSTKIKNPAQLDAALSFLTNTGPDSLDVVKFEEACGVGVVVSIEEIKSTVTDVLEENMEAIKEQRYHINVGTLCGQVRKRHPWGDAKAIKEEIDKRLAEILGPKTEADNIKPVKKKKEKPAKVEEKKVAVATAAPPSEEELNPYTIFPQPEENFKVHTEIFFSDGNIWRAHNTKEILEKHLKATGGKVMTRFPPEPNGYLHIGHAKAMFIDFGLAKERNGHCYLRFDDTNPEAEKKEYIDHIQEIVHWMGWEPYKVTYTSDYFQALYEHAVELIQKGLAYVDHQTAEEIKEYREKKMDSPWRGRPIEESLKLFEDMRRGLIAEGAATLRMKQDMQNENKNMSDLIAYRIKFTPHPHAGDKWCVYPSYDYAHCMVDSLENITHSLCTLEFDIRRPSYYWLLVALGLYQPYVWEYSRLNISNTVMSKRKLNRLVTEKWVDGWDDPRLLTLAGLRRRGVSSTAINSFIRGIGITRSDNSLIRVDRLEYHIREELNKTAPRTMVVLRPLKVVITNLEEGKVLDLDGKMWPDASDTDASSHYKVPFSRTVYIEKTDFRLKDSKDYYGLAPGKSVMLRYAFPIKCTDVISGDSPDDIVEIRAEYDPLKTSKLKGVLHWIAEPAPGVEPLKVEVRLFEKLFMSENPAELEDWLGDLNPHSKEVIKDAYAVPSLATAVLGDKFQFERLGYFAVDTDSTPEKLVFNRTVTLRDSFGKAGPK

SEQ ID NO: 454 - protein, 296 aa, Brassica napus
MFNKVINFLPMGKFFCFFTYTTLSMRSLIVASCLLFLIPGLTVSATAQTMVLETNGIAMTSREVSLEAIRQRGKLRVGVKDNLRPLGFRDGQGELTGLEIALARRLALALLGDETAVELVPVQNQDRLPLLLNGDVDLIIAQMGQNPARDRLVDFSPPYYMDGVGLISKNSSLKNIDRNQAHTIAVLNNSGTIPVIKQAFPQATLVGVDSYDQAYQILEQGQAMAFAGDNSVLSGWAQSQSDYYHLPLQLTVNPLAIAMAKGLQHQALQREVNQTLLQLRASGWLRQQWQAWGLPF

SEQ ID NO: 455 - protein, 356 aa, Arabidopsis thaliana; identical to SEQ ID NO: 335

SEQ ID NO: 456 - protein, 149 aa, Arabidopsis thaliana
MSLQRPNGNSSSSSSHKKHKTEEADEELLMVPDMEAAGSTCVLSSSADDGVNNPELDQTQNGVSTAKRRRGRNPVDKEYRSLKRLLRNRVSAQQARERKKVYVSDLESRANELQNNNDQLEEKISTLTNENTMLRKMLINTRPKTDDNH

SEQ ID NO: 457 - protein, 149 aa, Arabidopsis thaliana
MSLQRPNGNSSSSSSHKKHKTEESDEELLMVPDMEAAGSTCVLSSSADDGVNNPELDQTQNGVSTAKRRRGRNPVDKEYRSLKRLLRNRVSAQQARERKKVYVSDLESRANELQNNNDQLEEKISTLTNENTMLRKMLINTRPKTDDNH

SEQ ID NO: 458 - protein, 372 aa, Synechocystis sp. PCC 6803
MNFGYLIFLITSAATYGIFALGLNLQWGFAGLINFGHVAFMTLGAYATTLLSLRGLPIPLAVLVGMGLAMALGLLIGTSTLRLREDYLAIVTIGVSELIRLIANNEEWLTQGTFGVQSFPWPMDFNPTLLSRIVFVIWLTVLTIYAESILIKSLLKQWKEGKKIQGKSYQPRKPLALLIWGIITTALILTAYVPGVVSLYNYSGKAGLMLLALTLLALTYAGLEFWVHSPWGRILKAIREDEEIPRALGKNVFWYKLQAFMGGGAIAGLAGALFAWQLTSIYPSNFDTLLTFNAWIIVVLGGAGSNAGTVLGTIIFWAYDSLTRFLLPQIAFLDQSQAGALRVMVIGLILMVLMVWRPQGILGKKEELTLGR

SEQ ID NO: 459 - protein, 449 aa, Synechocystis sp. PCC 6803
MAQVSRICNGVQNPSLISNLSKSSQRKSPLSVSLKTQQHPRAYPISSSWGLKKSGMTLIGSELRPLKVMSSVSTAEKMNFGYLIFLITSAATYGIFALGLNLQWGFAGLINFGHVAFMTLGAYATTLLSLRGLPIPLAVLVGMGLAMALGLLIGTSTLRLREDYLAIVTIGVSELIRLIANNEEWLTQGTFGVQSFPWPMDFNPTLLSRIVFVIWLTVLTIYAESILIKSLLKQWKEGKKIQGKSYQPRKPLALLIWGIITTALILTAYVPGVVSLYNYSGKAGLMLLALTLLALTYAGLEFWVHSPWGRILKAIREDEEIPRALGKNVFWYKLQAFMGGGAIAGLAGALFAWQLTSIYPSNFDTLLTFNAWIIVVLGGAGSNAGTVLGTIIFWAYDSLTRFLLPQIAFLDQSQAGALRVMVIGLILMVLMVWRPQGILGKKEELTLGR

SEQ ID NO: 460 - protein, 145 aa, Synechocystis sp. PCC 6803
MGSIRLMHAKLHRVCVTEANVNYVGSITIDPVMLERVGLLPLEEVDIINLSNGNRFSTYVLPGQAHSKEICPNGGAALLCQPGDRLIIFAYELCDRREVLQKGHQAKVLVTNESNETVDFYLQELIPKEDGVKFINNICSEAIPH

SEQ ID NO: 461 - protein, 161 aa, Synechocystis sp. PCC 6803
MQLPAGAGEALTQWQKAGYLLIVITNQAGIGRGYFDHGDVAAVHTKIRQEYGKEGVKFTDFFLCPHHPEDGCDCRKPSPEMLLRAAEQYQISLQESYFIGDAPSDVGAAIAAGCQPVVLMTGRGEETCQQLDKFRLQLAGPIPVFANLGETVSLLASLSSK

SEQ ID NO: 462 - protein, 402 aa, Synechocystis sp. PCC 6803
METIQFNIRQTIIVAILVLYIGKYLTKKIKFLQSFNIPDAVSGGVLASLFFGLIYGIFRTEVAFNFPIRDAFLIIFFTCIGLSSKLKVLLQGGKPLLILLATAVSFLVIQNFVGVGMASLLGQALPVGLLSGSISLSGGHGTAIAWSPVFYDNHGIRNASEIAIACATFGLVFGGIVGGPIAKFLIIRNKLEPDCDTKDLTIGIRRDQDNVQIDYNTMLHTILVIGVTIGLGYEINDLVAKLGLMLPAFVSCLLAGIVLTNTIPLAFKKFPWPAETPSLALISDVSLGLFLAISLMSLQLWTLADIGGVIALILLVQFMATVLYSIAVVFPLMGRDYNAAVVCSGYSGLTLGATPTAIANMTAVTEKFGAAPQAFIVVPLVGAFFIDIANAFVIQQFLNFLG

SEQ ID NO: 463 - protein, 402 aa, Synechocystis sp. PCC 6803; identical to SEQ ID NO: 462

SEQ ID NO: 464 - protein, 296 aa, Synechocystis sp. PCC 6803; identical to SEQ ID NO: 454

SEQ ID NO: 465 - protein, 296 aa, Synechocystis sp. PCC 6803; identical to SEQ ID NO: 454

SEQ ID NO: 466 - protein, 440 aa, Nostoc sp. PCC 7120
MTHVSRRKFLFTTGAAAAASILVHGCTSNGSQSATTGEQAPSAAPAANVSAANAPKVETTKAKLGFIPLTDAAPLIIAKEKGFFAKYGMTDIEVIKQKSWPVTRDNLKIGSSGGGIDGAHILSPMPYLMTINDKVPMYILARLNTNGQAISVAEKFKELNVNLESKSLKDAAIKAKADKKALKMGITFPGGTHDLWMRYWLAAGGINPDQDVVLEAVPPPQMVANMKVNTVDGFCVGEPWNAQLVNQKIGYSALVTGELWKDHPEKAFSMRQDWIEQNPNAAQAILMAILEAQQWCDKAENKEEMCKICSDRKYFNVAAADIIERAKGNIDYGDGRKEQNFAHRMKFWADNASYPYKSHDIWFLTEDIRWGYLPKDTKVQDIVNQVNKEDLWKKAAKAIGVADAEIPASSSRGVETFFDGVKFDPEKPEEYLNSLKIKKV

SEQ ID NO: 467 - protein, 360 aa, Synechocystis sp. PCC 6803
MEIGVPKEIKDQEFRVGLTPSSVRALLSQGHQVFVEEGAGVGSGFPDGAYAKAGAELVATAKEAWNRELVVKVKEPLPEEYEYLTLPKLLFTYLHLAAERTLTEALIKSGITAIAYETVELADGQLPLLAPMSRIAGRLAVQMGAHYLEKQQGGRGVLLGGVPGVKAGQVTILGGGVVGTEAAKMAIGLGAMVTILDINVDRLNQLGELFGSRVDLRYSNASQIEDLLPHTDLLIGAVLITGKRAPVLVSRQEVEQMLPGAVIMDVAIDQGGCVETLRVTSHSQPSYIEAEVVHVGIPNMPGATPWTATQALNNSTLRYVLKLANLGEQAWENDLPLAKGVNVQAGKLVQGAVKTVFPDL

SEQ ID NO: 468 - protein, 203 aa, Corynebacterium glutamicum
MTTVTQDLLALDEDAQNLLFREARTANAFTDEPISDEQIEAIFDLVKWAPTAMNSQPLRVVIVRSEEAKARLVPLMAEGNQAKVAAAPAVALLAADIDFHEEMPKLFPPFPGARDMFEADEASRASSAELNAGLQIGYAIIGIRAAGLAAGPMTGMDADAISKEFFPDGRHRVLVAINMGKPADNAWYDRLPRLEQDEVVETL

SEQ ID NO: 469 - protein, 223 aa, Zea mays
MLGGHYRRDSRVVIDEAIAYAEGLKLGGNGKEVWVFDIDETSLSNLPYYATHGFGTKLYNATSFNEYVLEGSAPVLPETQRLFKKLVSLGIKPVFLTGRTEDQRAITVTNLRRQGYSGWMTLLLKPRRPQGHRHRPTSPASARSSRTPGTSSSATSATSGATSSARRRARAPSSCLTPSTTLAKQRCQRRGAALHQPIHQPVTRLQCLCSTTLCLLPLTSYHH

SEQ ID NO: 470 - protein, 149 aa, Arabidopsis thaliana; identical to SEQ ID NO: 457

SEQ ID NO: 471 - protein, 105 aa, Brassica napus
MSATQEEDKKPGGDGGVHINLKVKGQDGNEVFFRIKRSTQLKKLMNAYCDRQSVDMNAIAFLFDGRRLRAEQTPDELDMEDGDEIDAMLHQTGGCGDGGLTLSRV

SEQ ID NO: 472 - protein, 532 aa, Arabidopsis thaliana
MGWFNKIFKGSNQRLRVGNNKHNHNVYYDNYPTASHDDEPSAADTDADNDEPHHTQEPSTSEDNTSNDQENEDIDRAIALSLLEENQEQTSISGKYSMPVDEDEQLARALQESMVVGNSPRHKSGSTYDNGNAYGAGDLYGNGHMYGGGNVYANGDIYYPRPITFQMDFRICAGCNMEIGHGRFLNCLNSLWHPECFRCYGCSQPISEYEFSTSGNYPFHKACYRERYHPKCDVCSHFIPTNHAGLIEYRAHPFWVQKYCPSHEHDATPRCCSCERMEPRNTRYVELNDGRKLCLECLDSAVMDTMQCQPLYLQIQNFYEGLNMKVEQEVPLLLVERQALNEAREGEKNGHYHMPETKGLCLSEEQTVSTVRKRSKHGTGKWAGNITEPYKLTRQCEVTAILILFGLPRLLTGSILAHEMMHAWMRLKGFRTLSQDVEEGICQVMAHKWLDAELAAGSTNSNAASSSSSSQGLKKGPRSQYERKLGEFFKHQIESDASPVYGDGFRAGRLAVHKYGLRKTLEHIQMTGRFPV

SEQ ID NO: 473 - protein, 508 aa, Zea mays
MGWLTKFFRGSTHNISEEQYHSRPAEDTAWNEPSSSPVVTDILSEFNNEDIDRAIALSLSEEEQRKEKAIDKDMHLEEDEQLARAIQESLNVESPPRRNGSANGGTMYHPPRETGNAYQPPRENGSANGGNAYHPLPFMFSSGFRACAGCHREIGHGRFLSCMGAVWHPECFRCHACSQPIYDYEFSMSGNHPYHKTCYKEQFHPKCVVCKQFIPTNMNGLIEYRAHPFWVQKYCPSHEMDGTPRCCSCERMEPRESKYVLLDDGRKLCLECLDSAVMDTNDCQPLYLEIQEFYEGLNMKVEQQVPLLLVERQALNEAMEGEKAGHHHLPETKGLCLSEEQTVSTILRPRMAGNKIMGMITEPYRLTRRCEVTAILILYGLPRLLTGSILAHEMMHAWLRLKGYRTLSPDVEEGICQVLAHMWIESEIMAGSGSSAASSSSGSSSSTSSKKGGRSQFEHRLGDFFKHQIETDTSMAYGDGFRTGNRAVLHYGLKRTLEHIRLTGTFPF

SEQ ID NO: 474 - protein, 249 aa, Zea mays
MTSSRQMELHYINTGFPYTITESFMDFFEGLTYAHADFALMDGFQDQGNPYWTMMHTNSYKYGYSGSGNYYSYAHAYDIDDYMHRTDGGRRTWDNTTPVNNVDSANVVLQGGEAPRTTANTTSEDCIQQVHQSPGSPQVVWQDNIDPDNMTYEELLDLGEAVGTQSRGLSQECISLLPITKYKCGFFSRKKTRRERCVICQMEYRRGNLQITLPCKHVYHASCVTRWLSINKVCPVCFAEVPGEDSLRQ

SEQ ID NO: 475 - protein, 469 aa, Zea mays
MAAPPRATAVLAWCAHSRAFSLVREGRGGQLRFSRRGGPLIALVLVLYRGSGEDGQLGMGGNEEKDWAHCVEALGSYAVTAVVAGSRNSLAICEDGRLFTWGWNQRGTLGHPPKTKTESSPGPVHALAGLKIVQAAIGGWHCLAVDDNGHAYAWGRGTRFPAFSVTGGNEYGQCGEEPERKEDGTRALRRDILTPQGCAPKLKVRQVAAGGTHSVVLTQEGHVWTWGQPWPPGDIKQISTPVRVQGLEKVRVIAVGAFHNLALTEDGILWAWGNNEYGQLGTGDTQPRSHPIRVEGLSDLSLVDIAAGGWHSTALTIQGEINSLPCYLFRACFKDVQIRKYQKYKYYTMQVYAWGRGEHGRLGFGDDKSSRMVPLKVEFLAGEDIVQVSCGGTHSVALTRDGRRFFYGRGDHGRLGYGRKLTTGQPMGVDIDLPPPKTRSSRDGQWQAKYVACGGRHTLAIVVWAETTD

SEQ ID NO: 476 - protein, 667 aa, Zea mays
MEASAAVESSAAVSVFEVVSSKQRRPPDTAKLVLNSPSPPSLREELVGVVGKAFRPRAHAGAAAGAGGRPPPRRAWVLTALQCVFPVLQWGRSYTLESFRSDVMAGLTLASLGIPQSIGYANLAKLDPQYGLYTSVVPPLIYAVMGTSREIAIGPVAVVSLLLSSMIQKVVDPAADPATYRSLVFTVTFLAGVFQVSFGLFRLGFLVDFLSHAAIVGFMGGAAIVIGMQQLKGLLGLAHFTNSTDVVSVLKAVCSALRHDPWHPGNFLIGCSFLIFILTTRFIGRRYKKLFWLSAISPLLSVILSTAAVYATRADRHGVKIIQKVHAGLNPSSVKQIHLNGPHTTECAKIAVICAVIALTEAIAVGRSFASVRGYRLDGNKEMLAMGFSNVAGSLSSCYVATGSFSRTAVNFSAGARSTVSNIVMSITVFVTLELFMKLLYYTPMAVLASIILSALPGLIDIKEACSIWKIDKMDFLTCLGAFVGVLFGSVEIGLAVALGISFAKIIIQSLRPQVEILGRLQGTDIFCSVRQYPVACLTPTVLPIRVDTSFLCFINATSVKERITEWVWEGVETSNGKARERIQAVVLDMSSVVNIDTSGLTALEEIHKELVSLGLQMAIASPGWKAVQKMKVSQVVDRVGQDWIFMTVGEAVEACLAAHKGTALAC

SEQ ID NO: 477 - protein, 469 aa, Zea mays; identical to SEQ ID NO: 475

SEQ ID NO: 478 - protein, 336 aa, Zea mays
MSSLGGQQQHGRGDEARARLRWTRQLHGRFVLAVAQLGGADSEFLSSKSSAHELAARACPVLSLTACLNATTTDVGFRYQNIAEATPKSVMRAMAVSGLTLYHLKSHLQRYRLAVSQGTASPVGEGDNGGGANERSSSSESQLDEYDDGSVADLHGDSSGSMAARVQREAKRKRHEQMQIEVQRHLQLRIEAQGRYMQSVLRRAQEALADHILGSPATGAEAELSELASAVETGTGCLSSTSCCSTSPSPMRHRSADSCVTSSSSSSSSEAESQAPAGANTCAGTRDCSVERPVQGEESTFLQRHEDEDEAEEADVGAAAAAEDEDGTSSEIDLNR

SEQ ID NO: 479 - protein, 865 aa, Zea mays
MVSKSYSNLLDLTSGDGFDFRQPFKSLPRVVTSPGIISDTDWDTISDGDSVGSASSTERKIIVANFLPLNCTRDETGVLSFSLDHDALLMQLKDSFSNETDVVYVGSLKVQVDPGEQDQVAQKLLREYRCIPTFLPSDLQQQFYHGFCKQQLWPLFHYMLPICLDKGELFDRSLFQAYVRANKLFADKVMEAINADDDFVWVHDYHLMLLPTFLRKRLHRIKIGFFLHSPFPSSEIYRTLPVRDEILKSLLNADLIGFQTFDYARHFLSCCSRLLGLHYESKRGYIGIEYFGRTVSLKILSVGVHIGRLESVLKLPATVSKVQEIEQRYKGKILMLGVDDMDIFKGISLKFLGLELLLDRNPKLREKVVLVQIINPARSTGKDVQEAITEAVSVAERINTNYGSSSYKPVVLIDHHIPFYEKIAFYAASDCCIVNAVRDGMNLVPYEYTVCRQGNEEIDKLRGLGKDTHHTSTLIVSEFVGCSPSLSGAFRVNPWSVDDVADALCRATDLTESEKRLRHEKHYRYVSTHDVAYWARSFAQDLERACKDHYSRRCWAIGFGLNFRVIALSPGFRKLSSEHFVSSYNKASRRAIFLDYDGTLVPQSSINKAPSEEVISVLNTLCNDPKNIVFIVSGRGRDSLDEWFSPCEKLGLAAEHGYFIRWSKEAAWESSYSRPQQEWKHIAEPVMQVYTETTDGSSIESKESALVWHYLDADHDFGSFQAKELQGHLERVLSNEPVVVKCGHYIVEVKPQGVSKGLAVNKLIHTLVKNGKAPDFLMCVGNDRSDEDMFESINSMTSNAVLSPTTPELFACSVGQKPSKAKYYVDDTSEVIRLLKNVTRIPSQRQDVSASHGRVTFRGVLDYVD

SEQ ID NO: 480 - protein, 464 aa, Zea mays
MPPGSATQFRYTQTPSKVLHLRNMPWECTEEELVDLCKPFGRVVNTMCNVGANRNQAFVEFADQNQAISMVSYYASSSEPAQVRGKTVYIQYSNRQEITNNKGTGDSSGNVLLVTFEGVQPNDVTIEVIHLVFSAFGFVHKIATFEKAAGFQALIQYTDAPTALEAKNSLDGRSIPKYLLPEHIGACHMRITFSAHKDLNIKFQSHRSRDYTNPYLPVNQTAIEGIVQPTVGPDGKVKEPESNVLLASIENMQYAVTVDVLHTVFSAFGAVQKIAMFEKNGGMQALIQYPDITTAAVAKQALEGHCIYDGGYCKLHLSYSRHTDLNVKAHDERSRDYTLSDPNVQLQAAAQTPVLRSPGVAWQNTASVPAAPFYASTATSTPIGVGQVAAWNPNMQAGSFASASTAYPNQPLMANSMPHYPAIGSSSGAPPVSFQASQQMTQYSMPPGAPPHAPPAGQSIYFPK

SEQ ID NO: 481 - protein, 443 aa, Zea mays
MPSLAAFLVLLLPPLLLSAAGAAEAEELIGFKATLRHVDADAGYTEEQLLSRALRRSSARVATLQSLAALAPGDAITAARILVLASDGEYLMEMGIGTPTRYYSAILDTGSDLIWTQCAPCLLCVDQPTPYFDPARSATYRSLGCASPACNALYYPLCYQKVCVYQYFYGDSASTAGVLANETFTFGTNETRVSLPGISFGCGNLNAGSLANGSGMVGFGRGSLSLVSQLGSPRFSYCLTSFLSPVPSRLYFGVYATLNSTNASSEPVQSTPFVVNPALPTMYFLNMTGISVGGYLLPIDPAVFAINDTDGTGGTIIDSGTTITYLAEPAYDAVRAAFASQITLPLLNVTDASVLDTCFQWPPPPRQSVTLPQLVLHFDGADWELPLQNYMLVDPSTGGGLCLAMASSSDGSIIGSYQHQNFNVLYDLENSLMSFVPAPCHLM

SEQ ID NO: 482 - protein, 562 aa, Zea mays
MERQSSIRLGALEKLRSFRGMEKQKSFRGIMSLERRSRDSPGKRGDTPLHLAARAGSVAHAQRILAELDRALAAEMAARQNQDGETPLYVAAEKGHAEVVREILKVCGVQTAGIKASNSFDAFHIAAKQGHLEVLKEMLQALPALAMTTNSVNATALDTAAIQGHVDIVNLLLETDASLARITRNNGKTVLHSAARMGHVEVVRSLLNKDPRIGLRTDKKGQTALHMASKAQNAEIVVELLKPDVSVIHIEDNKGNRPLHVATRKGNIIIVQTLLSVEGIDVNAVNRSGETAFAIAEKMDSVELVNILKEAGGEAAKQQQVHPPNSAKQLKETVSDIRHDVQSQFKQTRQTKMQVNQIKKRLEKLHIGGLNNAINSNTVVAVLIATVAFAAIFTVPGNFVEELSQAPPGMSLGQAYVASNPAFIVFLVFDALALFISLAVVVVQTSLIMVERRAKKRMVFVMNKLMWLACLFISVAFIALTYVVVGRDDWWLAWCTMGIGAAIMLTTLGSMCYCIVAHRLEEKNTRKIRRASASQSRGSWSRSVDSDEEILNSEYKTKMYAL

SEQ ID NO: 483 - protein, 66 aa, Zea mays
LVEKLKHGAMDLSLFVLMLSLYCVLIWINADTDRSSHAASCILIWMNQCRQIIDEKGSIQPHVHVS

SEQ ID NO: 484 - protein, 280 aa, Zea mays
MAAMANTSRLPTPCSLPTISIGAKSRRLAVAAVRCGPGGSRSHRRSLGVLLCRSSSTAGAQGSTRMEDYNTAMKRMMRNPYEYHHDLGMNYAVISESLIVGSQPQKPEDIDHLKNEERVAYILCLQQDKDIEYWGIDFQSIVNRCKELGIQHIRRPAVDFDPDSLRSQLPKAVSALEWATSQRKGRVYVHCTAGLGRAPAVAIAYMFWFENMDLNTAYQKLTSIRPCGPSKRAIRAATYDLAKNDPSKEPFENLPEHAFEGVADWERKLIHDRVRALHEA

SEQ ID NO: 485 - protein, 164 aa, Zea mays
MAAAGADGERRIGVAIDYSESAKKALDWAIDNLLHHGDTLVVVHVLHHGAEETKHTLWAKSGSPLIPLSEFREPEVMQGYGVRPDAEVLDAIDTAARQKQLKVVAKLYWGDAREKLCDAVEDLKIDSLVMGSRGLGPIQRILLGSVTNYVLSNASCPVTVVKGK

SEQ ID NO: 486 - protein, 448 aa, Zea mays
MERARARAPALALAPVEVPKFFVCPISLEVMRDPVTLSSGITYDRDSIERWLFTDGHGDCPVTKLPLGADDLEPTPNHTLRRLIQSWCAAHAVERFPTPRPPVDADRVAAIVGCAKKGGQQEVLAALRELADIIGESDRNRRCVEGVPEAVEFLVSVVKKHAAGTSSSKPLGGCRSQEEPMCGVPDSPKACSPEEAALSILHSLKLSEASLKRALESSDGFVDTLASVLRWPPNYRARTYAMHLLKAALSAMQPSQLSSASTDLVEGVVRVVADRTLSPKAIKVALHVLCRLCPWGRNRVKAVEAGAVAAVVELLLNEGCGCGGSNGKRAVELAVVAIDHLCGCAEGRLELVAHPAGLAVVARAATRLSPTATESAVRALHAVARHSATPAVLQEMLAVGVVARLLYLVQAGASGERPRERAREMLKMHARVWRGSPCLASHMASYPC

SEQ ID NO: 487 - protein, 424 aa, Zea mays
MEEDPQPQVEVPCYFLCPISLAIMRDPVTLPTGITYDRDGIERWLLTATTCPLTKQPVPADCDPTPNHTLRRLIQSWCALHDADSADRVHTPKPRVDRTAVTALVSRVHSAATGSAPPQRPQLLAALRELRDVAAESDRNRKLVAAVPGAVDVLAAVFAASANKSSEGTGTADAVRDDALEVIALLPVPEQCLRRLEETNEALVSALVSALQWSSAPSRARAALLLERVTAALPPSRLASLPEQVFREAVELLRDRPVSRPATKAALQVLVRTAAWGRNRVKAVDAGAVPVLVDMLFDDGAERRACELVLAALDRLCGCADGRAELVAHAAGVAAVGRKALRVSEVATDKAVRVLRSVARHAGTSAVVQEMAQAGVAAMLCVVAQSEQYGKRTRERARETLRLHARAWRTSPCLNHHLQAVYPC

SEQ ID NO: 488 - protein, 110 aa, Arabidopsis thaliana
MDSKSFLLLLLLFCFLFLHDASGLTLSFTPLYVYNSYLTQAHAHVQGLSNRKMMMMKMESEWVGANGEAEKAKTKGLGLHEELRTVPSGPDPLHHHVNPPRQPRNNFQLP

SEQ ID NO: 489 - protein, 15 aa, Arabidopsis thaliana
MLRTVPSGPDPLHHH

SEQ ID NO: 490 - protein, 76 aa, Arabidopsis thaliana
MRRHDIIIKLLLLMCLLLSRFVTRECQEVHFKIGPAKIIAKPNNARVMPTWGEEKKWHKHPSGPNPTGNRHPPVKH

SEQ ID NO: 491 - protein, 76 aa, Arabidopsis thaliana; identical to SEQ ID NO: 490

SEQ ID NO: 492 - protein, 15 aa, Arabidopsis thaliana
MWHKHPSGPNPTGNR

SEQ ID NO: 493 - protein, 439 aa, Gossypium hirsutum
MYSNFKEQAIEYVKQAVQEDNAGNYSKAFPLYMNALEYFKTHLKYEKNPKIREAITQKFTEYLRRAEEIRAVLDEGGPGPASNGDAAVATRPKSKPKNGGGGGEGGDGEDPEQAKLRAGLDSAIIREKPNVKWNDVAGLESAKQALQEAVILPVKFPQFFTGKRRHGELFFLYGPPGTGKSYLAKAVATEADSTFFSVSSSDLVSKWMGESEKLVSNLFQMARDSAPSIIFNEIYSLCGQRGEGNESEASRRIKTELLVQMHGVGHSDQKVLMLAATNTPYALDHAIRRRFDKRIYIPLPDLKARQHMFKVHLGDTPHNLTESDFESLARRTEGFSGSDISVCVKDVLFEPVRKTQDAMFFYKTPNDMWMPCGPKQPGVVQITMQELAAKGLAAQILPPPISRSDFDKVLARQRPTVSKADLEVHERFTNEFGEEGRRL

SEQ ID NO: 494 - protein, 218 aa, Arabidopsis thaliana
MDPFLIQSPFSGFSPEYSIGSSPDSFSSSSSNNYSLPFNENDSEEMFLYGLIEQSTQQTYIDSDSQDLPIKSVSSRKSEKSYRGVRRRPWGKFAAEIRDSTRNGIRVWLGTFESAEEAALAYDQAAFSMRGSSAILNFSAERVQESLSEIKYTYEDGCSPVVALKRKHSMRRRMTNKKTKDSDFDHRSVKLDNVVVFEDLGEQYLEELLGSSENSGTW

SEQ ID NO: 495 - protein, 428 aa, Zea mays
MYGVGGGFNAPSTAASRRRNPGDEEEDEEDEGGEGRVLEAWERAYADERSWESLQEDESGLLRPVDTKTLVHAQYRRRLLLRSAAAAAARIQKGLIRYLYIVIDLSRAASEMDYRPSRMAVVAKHAEAFIREFFDQNPLSHVGLVTIKDGIAHRLTEIGGSPESQIKALMGKLECSGDSSLQNALDLVHGYLDQVPSYGHKEVLILYSALNTFDPGDITETIAKCKKSKIRCSVIGLAAEIFICKHLCEETGGSYTVALDESHFKELLLEHAPPPPAIAEYAAANLIKMGFPQRGAEELISICSCHKKIKSGAEGYICPRCKVNVCELPTECRTCGLTLVSSPHLARSYHHLFPVPPFDEVTPVPNRIQRGGQICFSCQQSLYNPDGQSNLHVRCPKCNQHFCLDCDIYIHESLHNCPGCESQRSIAS

SEQ ID NO: 496 - protein, 474 aa, Zea mays
MRSCFASGDGSVISSADAPFFHVPEYTLHGGGGFGFGEPAADVAASSFLADGSVLLAGQLLRATALQSVSPEERHGAYYGVTGGSSSYGPSPWDVTVAHAPSRMTKQPVAGEPEGGWIHESSYYCPATWFSGDGFRDPFAGAAASELSLRLRAGSSPTAGAASVSLPDQSSEVSCSGLTHWSSGGGPGMFQLPCGGAGQVAVAARPGPMHFSQVLSRWSGYADVTQQVLDEFVIRLLQDVAGFAGGGEASCPLPSSSYCSKTTSSNPNPSVFVSSEEHHNELKNDLQKLLQIMDQRCKQCLDEIQNAASKYGSLVRPGGGGGALSTLFAQRAVSATHRRLRARITGEIAAATRGGNQPSSSSSLSLADRERSWESAFIQKHWALRQLRRGDQQSWRPQRGLPEKSVAVLKAWMFENFLRPYPRDKEKEMLAARSGLSRSQVSNWFINARVRLWKPMIEEMYEDLKKASAGIMEA

SEQ ID NO: 497 - protein, 506 aa, Zea mays
MSAEVPHFHHPGVLLDQGGFGFGGLGNAAVVGGAATAADLGAHYAANNIVLASFASQLLANAPAPPRDDRAGGRTPPDEMDEELYGVAGCDSRVAASLRCPSQSGAMAVWSSPSSSKKPYGIWTSAGGPAHEPYHLAAAGLSDAGGLRYPLAACSGGNASAAAASELSLTLCSNSIASSDSALNATEQCSSGASRSALTELPRARSRMALHFAAVVARSRYAAVVQDLLNDVVGHMLDGVADVTDDSCSGIGSVGAPSAVSSNRFMASTEDAGARWGQAQRVRSNLLKTLQLMDEKYNQCLDEIQSTTARFNTLMHSPPGGGGGGGGICAPFAHRAVSTMYRGLRRRLAGEIMAAASRASCWGESSSSVTVAAGGDVERSWESAFIQKHWSAQQLRRTEQQCWRPQRGLPEKSVAVLKAWMFENFLHPYPKDHEKDVLAARSGLTRNQVSNWFINARVRLWKPMIEEMYQDLKRSSGAGGGGHGPAMEPQQHLSKRRICELEDGGQ

SEQ ID NO: 498 - protein, 365 aa, Zea mays
MGSIMEQRCNNDQQALLDAQLELWHSTFAFIKSMAFKSALELGIADAIHCHGGTATLTQIATKAALHPSKTPCLRRLMRALTVAGIFSVAKNSSDDDGDQHVYGLTPASRLLVGSSQNLAPTLSLILNNVFVAPFLDLGTWFESALPATDLPLFELSHRKNVWDVVGHDPSVSQLFNAGMVADTRFLMDIAVRECGDVFQGIRSLVDVGGGHGAAAQAISAAFPAIQCTVLDLAHVVATAPACAGLSFVAGDMFEAIPPANAVFLKWIMHDWGDTECVTILKNCKKAIPPRDAGGKVIIVDTVVGAGPPNLKNKETQVMSDLFFMIVNGLERDEQEWRNVIFEAGFSDYIIIPVLGVRSIIELYP

SEQ ID NO: 499 - protein, 259 aa, Zea mays
MSTSGARSWSPPPRPSRYESQKRRDWQTFTRYLGAHRPPLELCRCSGAHVLEFLRYLDRFGKTRVHAPSCAAYGGGGGGRPVEPAVACQCPLRQAWGSLDALVGRLRAAFEERHGARGIWTSSQQPDGGVGVGVGVGGGDGANPFAARAVRLYLRDVRDAQSRARGISYSRKKKKRSKQLVDGAAAAGCARPPVTSVTLMPAAALPHAPPPPCPPPPLPPPYCLTGVPFEFCDYGSVLGGVTANGAPGFYLPSLFNTFG

SEQ ID NO: 500 - protein, 516 aa, Zea mays
MPVIGSLGALAGALPPHRALAALAARHGPLMHLRLGSYHAVVASSADTARLVLKVHDLAFADRPRTAAGEVASYGYLGIVHTPYGAYWRMARKLCATELFSARRVDSFERVRAQEMRALARGLFECAGRGAVAVREHVAGATLGNWARMAVGESWSDCSGSPEPEAFRRTLDEAFAVTGQVEHVGEWVPWLIWLDYQGCVRLMKRLGAQYDRFFEQILDDHDHKKTRRERGRPGAGDSAADDDLVDVLLRLVEEDEDRPETTEASRLTRDGVKAFVQDIVAGGTESSAVTIEWAMSELLRRPDALRAATAELDRVIGHGRWVTERDLPDLPYIDAVVKETMRLHPVGPLLVPHHAREHTVVAGYDVPAGARVLVNVWAIARDPASWPDAPDAFRPERFLNGSSGASVDVRGAHFELLPFGAGRRMCPAHGLAMKLVTAGVANLVHGFAWRLPDGMAPEDVSMEELFGLSTRRKVPLVAVAEPRLPAHLYTNVTPPQQVAGSTIANLSTRPEYKLVF

SEQ ID NO: 501 - protein, 614 aa, Arabidopsis thaliana
MSCLEIYNKDTMKKKEGEEETRDGTVDYYGRPSIRSNSGQWVAGIVILLNQGLATLAFFGVGVNLVLFLTRVLQQNNADAANNVSKWTGTVYIFSLVGAFLSDSYWGRYKTCAIFQVIFVIGLSSLSLSSYMFLIRPRGCGDEVTPCGSHSMMEITMFYFSIYLIALGYGGYQPNIATLGADQFDEEHPKEGYSKIAFFSYFYLALNLGSLFSNTILGYFEDEGMWALGFWASTGSAIIGLILFLVGTPRYRYFKPTGNPLSRFCQVLVAATKKSSVEAPLRGREEMYDGDSEGKNASVNTGRRIVHTDEFKFLDKAAYITARDLDDKKQDSVNPWRLCPVTQVEEVKCILRLMPIWLCTIIYSVVFTQMASLFVEQGAAMNTSVSDFKIPPASMSSFDILSVALFIFLYRRVLEPVANRFKKNGSKGITELHRMGIGLVIAVIAMIAAGIVECYRLKYADKSCTHCDGSSSLSIFWQAPQYSLIGASEVFMYVGQLEFFNAQTPDGLKSFGSALCMMSMSMGNFVSSLLVTMVVKISTEDHMPGWIPRNLNKGHLDRFYFLLAALTSIDLVVYIACAKWYKPIQLEGKDEMQDMSDDDYDTESEEEREKDSKV

SEQ ID NO: 502 - protein, 451 aa, Zea mays
MAGAGAGGWKKRVGRYEVGRTIGRGTFAKVKFAVDADTGAAFAIKVLDKETIFTHRMLHQIKREISIMKIVRHPNIVRLNEVLAGRTKIYIVLELVTGGELFDRIVRHGKLRENEARKYFQQLIDAIDYCHSKGVYHRDLKPQNLLLDSRGNLKLSDFGLSTLSQNGVGLVHTTCGTPNYVAPEVLSSNGYDGSAADIWSCGVILYVLMAGYLPFEENDLPHLYEKITAAQYSCPYWFSPGAKSLIQRILDPNPRTRITIEEIREDPWFKKNYVTIRCGEDENVSLDDVQAIFDNIEDKYVSDEVTHKDGGPLMMNAFEMIALSQGLDLSALFDRQQEFVKRQTRFVSRKPAKTVVATIEVVAESMGLKVHSRNYKVRLEGPASNRASQFAVVLEVFEVAPSLFMVDVRKVAGDTPEYHRFYENLCSKLCSIIWRPTEVSAKSTPLRTTTC

SEQ ID NO: 503 - protein, 377 aa, Zea mays
MAPQTATRVASGRLVFGAPTTTDGKLVKGGSRLRVRSLDNNGRRVAVEAVNGAARPNGAAAVADVRQVPAPPPPEGDGDGVAFRLGKFAEGRLVYRQQFVVRSYEIGPDRTATMETLMNLLQETALNHVMCSGLAGDGFGATRQMSLRKLIWVVTRINIQVDEYSRWGDVVEIDTWVASSGKNGMRRDWIIRDRNTKNMIARATSNWVMMNRETRRLSKIPDEVRQEVLPFYPDRSIIAAATGGGRKIEKLTDSTAEHIRSGLAPRWSDMDVNQHVNNVKYIGWILESVPLDVLEDYHLTSITLDYRRECRQSQLLESLTSMTTSSSAPAEPPLTSSLCGSDLYSTHLIRQQDDRAEIVRACAEWRRKEHPRSIEQL

SEQ ID NO: 504 - protein, 1122 aa, Arabidopsis
MSGSRPTQSSEGSRRSRHSARIIAQTTVDAKLHADFEESGSSFDYSTSVRVTGPVVENQPPRSDKVTTTYLHHIQKGKLIQPFGCLLALDEKTFKVIAYSENASELLTMASHAVPSVGEHPVLGIGTDIRSLFTAPSASALQKALGFGDVSLLNPILVHCRTSAKPFYAIIHRVTGSIIIDFEPVKPYEVPMTAAGALQSYKLAAKAITRLQSLPSGSMERLCDTMVQEVFELTGYDRVMAYKFHEDDHGEVVSEVTKPGLEPYLGLHYPATDIPQAARFLFMKNKVRMIVDCNAKHARVLQDEKLSFDLTLCGSTLRAPHSCHLQYMANMDSIASLVMAVVVNEEDGEGDAPDATTQPQKRKRLWGLVVCHNTTPRFVPFPLRYACEFLAQVFAIHVNKEVELDNQMVEKNILRTQTLLCDMLMRDAPLGIVSQSPNIMDLVKCDGAALLYKDKIWKLGTTPSEFHLQEIASWLCEYHMDSTGLSTDSLHDAGFPRALSLGDSVCGMAAVRISSKDMIFWFRSHTAGEVRWGGAKHDPDDRDDARRMHPRSSFKAFLEVVKTRSLPWKDYEMDAIHSLQLILRNAFKDSETTDVNTKVIYSKLNDLKIDGIQELEAVTSEMVRLIETATVPILAVDSDGLVNGWNTKIAELTGLSVDEAIGKHFLTLVEDSSVEIVKRMLENALEGTEEQNVQFEIKTHLSRADAGPISLVVNACASRDLHENVVGVCFVAHDLTGQKTVMDKFTRIEGDYKAIIQNPNPLIPPIFGTDEFGWCTEWNPAMSKLTGLKREEVIDKMLLGEVFGTQKSCCRLKNQEAFVNLGIVLNNAVTSQDPEKVSFAFFTRGGKYVECLLCVSKKLDREGVVTGVFCFLQLASHELQQALHVQRLAERTAVKRLKALAYIKRQIRNPLSGIMFTRKMIEGTELGPEQRRILQTSALCQKQLSKILDDSDLESIIEGCLDLEMKEFTLNEVLTASTSQVMMKSNGKSVRITNETGEEVMSDTLYGDSIRLQQVLADFMLMAVNFTPSGGQLTVSASLRKDQLGRSVHLANLEIRLTHTGAGIPEFLLNQMFGTEEDVSEEGLSLMVSRKLVKLMNGDVQYLRQAGKSSFIITAELAAANK

SEQ ID NO: 505 - protein, 1122 aa, Arabidopsis
MSGSRPTQSSEGSRRSRHSARIIAQTTVDAKLHADFEESGSSFDYSTSVRVTGPVVENQPPRSDKVTTTYLHHIQKGKLIQPFGCLLALDEKTFKVIAYSENASELLTMASHAVPSVGEHPVLGIGTDIRSLFTAPSASALQKALGFGDVSLLNPILVHCRTSAKPFYAIIHRVTGSIIIDFEPVKPYEVPMTAAGALQSYKLAAKAITRLQSLPSGSMERLCDTMVQEVFELTGYDRVMAHKFHEDDHGEVVSEVTKPGLEPYLGLHYPATDIPQAARFLFMKNKVRMIVDCNAKHARVLQDEKLSFDLTLCGSTLRAPHSCHLQYMANMDSIASLVMAVVVNEEDGEGDAPDATTQPQKRKRLWGLVVCHNTTPRFVPFPLRYACEFLAQVFAIHVNKEVELDNQMVEKNILRTQTLLCDMLMRDAPLGIVSQSPNIMDLVKCDGAALLYKDKIWKLGTTPSEFHLQEIASWLCEYHMDSTGLSTDSLHDAGFPRALSLGDSVCGMAAVRISSKDMIFWFRSHTAGEVRWGGAKHDPDDRDDARRMHPRSSFKAFLEVVKTRSLPWKDYEMDAIHSLQLILRNAFKDSETTDVNTKVIYSKLNDLKIDGIQELEAVTSEMVRLIETATVPILAVDSDGLVNGWNTKIAELTGLSVDEAIGKHFLTLVEDSSVEIVKRMLENALEGTEEQNVQFEIKTHLSRADAGPISLVVNACASRDLHENVVGVCFVAHDLTGQKTVMDKFTRIEGDYKAIIQNPNPLIPPIFGTDEFGWCTEWNPAMSKLTGLKREEVIDKMLLGEVFGTQKSCCRLKNQEAFVNLGIVLNNAVTSQDPEKVSFAFFTRGGKYVECLLCVSKKLDREGVVTGVFCFLQLASHELQQALHVQRLAERTAVKRLKALAYIKRQIRNPLSGIMFTRKMIEGTELGPEQRRILQTSALCQKQLSKILDDSDLESIIEGCLDLEMKEFTLNEVLTASTSQVMMKSNGKSVRITNETGEEVMSDTLYGDSIRLQQVLADFMLMAVNFTPSGGQLTVSASLRKDQLGRSVHLANLEIRLTHTGAGIPEFLLNQMFGTEEDVSEEGLSLMVSRKLVKLMNGDVQYLRQAGKSSFIITAELAAANK

SEQ ID NO: 506 - protein, 1122 aa, Arabidopsis
MSGSRPTQSSEGSRRSRHSARIIAQTTVDAKLHADFEESGSSFDYSTSVRVTGPVVENQPPRSDKVTTTYLHHIQKGKLIQPFGCLLALDEKTFKVIAYSENASELLTMASHAVPSVGEHPVLGIGTDIRSLFTAPSASALQKALGFGDVSLLNPILVHCRTSAKPFYAIIHRVTGSIIIDFEPVKPYEVPMTAAGALQSYKLAAKAITRLQSLPSGSMERLCDTMVQEVFELTGYDRVMAYKFHEDDHGEVVSEVTKPGLEPYLGLHYPATDIPQAARFLFMKNKVRMIVDCNAKHARVLQDEKLSFDLTLCGSTLRAPHSCHLQYMANMDSIASLVMAVVVNEEDGEGDAPDATTQPQKRKRLWGLVVCHNTTPRFVPFPLRYACEALAQVFAIHVNKEVELDNQMVEKNILRTQTLLCDMLMRDAPLGIVSQSPNIMDLVKCDGAALLYKDKIWKLGTTPSEFHLQEIASWLCEYHMDSTGLSTDSLHDAGFPRALSLGDSVCGMAAVRISSKDMIFWFRSHTAGEVRWGGAKHDPDDRDDARRMHPRSSFKAFLEVVKTRSLPWKDYEMDAIHSLQLILRNAFKDSETTDVNTKVIYSKLNDLKIDGIQELEAVTSEMVRLIETATVPILAVDSDGLVNGWNTKIAELTGLSVDEAIGKHFLTLVEDSSVEIVKRMLENALEGTEEQNVQFEIKTHLSRADAGPISLVVNACASRDLHENVVGVCFVAHDLTGQKTVMDKFTRIEGDYKAIIQNPNPLIPPIFGTDEFGWCTEWNPAMSKLTGLKREEVIDKMLLGEVFGTQKSCCRLKNQEAFVNLGIVLNNAVTSQDPEKVSFAFFTRGGKYVECLLCVSKKLDREGVVTGVFCFLQLASHELQQALHVQRLAERTAVKRLKALAYIKRQIRNPLSGIMFTRKMIEGTELGPEQRRILQTSALCQKQLSKILDDSDLESIIEGCLDLEMKEFTLNEVLTASTSQVMMKSNGKSVRITNETGEEVMSDTLYGDSIRLQQVLADFMLMAVNFTPSGGQLTVSASLRKDQLGRSVHLANLEIRLTHTGAGIPEFLLNQMFGTEEDVSEEGLSLMVSRKLVKLMNGDVQYLRQAGKSSFIITAELAAANK

SEQ ID NO: 507 - protein, 396 aa, Oryza sativa; identical to SEQ ID NO: 445

SEQ ID NO: 508 - protein, 396 aa, Oryza sativa; identical to SEQ ID NO: 445

SEQ ID NO: 509 - protein, 70 aa, Escherichia coli
MSNKMTGLVKWFNADKGFGFITPDDGSKDVFVHFTAIQSNEFRTLNENQKVEFSIEQGQRGPAAANVVTL

SEQ ID NO: 510 - protein, 421 aa, Arabidopsis thaliana
MLEGDEKQSRALDFNRLEVLSLLGRGAKGVVFLVRDDDAKLLALKVILKEAIEKKKKGRESEDDEYKRVSFEQGVLSRFDHPLFPSLHGVLATDKVIGYAIDYCPGQNLNSLRKMQSESMFSDEIIRFYAAELVLALDYLHNQGIVYRDLKPDNVMIQENGHLMLIDFDLSTNLAPRTPQPSPSLSKPSPTMKRKKRLFRFTSFCNSGISPQESISVHSSSTLAVSDSSGEKSNSFVGTEEYVAPEVISGDGHDFAVDWWSLGVVLYEMLYGATPFRGSNRKETFYRILSKPPNLTGETTSLRDLIRRLLEKDPSRRINVEEIKGHDFFRGVDWEKVILVSRPPYIPAPDDGGDKGTDVNTKMDVENIVQEIFAARQEREKQSGDNNKNANMKIKDNTSGEWVKGLNNNHDLESDNNFLVF

SEQ ID NO: 511 - protein, 347 aa, Zea mays
MGSLPAPASAEFAPRPRGRATVVASDLAPLFSAQRRHLDHFFDRLDMAQAAAFAQALLDAPGAVFFTGVGKSGIVARKTAQTLASLGLARAGFLAPVDALHGDIGALFPGDVLVILSKSGASDELLALAPCARAKGAYLVSLTSAASGDDCPLAAACDLNVHLPLQGEVCPFGLAPVTSTAIQMVFGDTVIAAIMEARRLSRDQYASNHPAGKIGKTLIFKVKDVMKKQNELPLCKEGDMIMDQLTELTSKGCGCLLVVDEEHHLIGTFTDGDLRRTLKASGPAIFSLTVGEMCNRNPRTITAEAMAVEAMEKMEAPPSPVQFLPVVNENNVVCGIITLHGLVSAGL

SEQ ID NO: 512 - protein, 261 aa, Zea mays
MAAASTSTSLPLGFSHHRPTPRIRPQPQSQSQPLKAKPPTPLCLSLTLTPATAKPRLAAMPDDVAVANFVEKDWSFLESAGANLQRALASGALTPASRVLALTPTASFVRSLLASSPCELLVAAHESMYVLAGVKEAHDEVRCFHLEGGGGGRGGGVVEAVPERFDDFDVVFVCYFPGMGVSAGALLKSLAKRCSKGARVVMFLDQGRQNFEQQRREHPDVVTSDLPSIAFLEKAASGNKYEITEFVDEPSFYLAVLQFQG

SEQ ID NO: 513 - protein, 510 aa, Desulfitobacterium hafniense
MEGFMKSASKVDKTIVWSSLIVSSAFIIATLVTPSGVSQILNAIFSFFTKNLGWAYMLSAAAFVAFGIGLAVSKYGHIKLGKDDEEPEYSRGSWFAMLFATGMGVGLVFWGAAEPIMHFDTSPFAANRTPEAASIAMRTVFFHWGLHPWALYGVVAMSLAYFQFRKGLPGLISSTFYPLIGEKGIRGPIGKIIDVIAVVVTLFGVATSLGLGTQQLTTGMNYVYGLPNTTSMALVIIAIITILFTIAAASGIDKGIKFVSNTNMVLAFLLMLFLLIVGPTKYILNTFFESMGNYLQNFVSLSFFLDTQGAVAERTGYDWIGSWSVFYWAWWITWAPFVGSFIARISRGRTIREFVLGILVAPPLLSAIWFSIVGGSALHIELFGSGGISAAVAEDVSSGIFAMLSHFPLSGPVALLTMILLAIFFITSAESATFVVGMFTSGGDLNPDARLKIVWGVVEGAIAAMLLVAGGLSAVQTVAFIFSFPFMLIMILMVVSMVKALGEGEKKPLQ

SEQ ID NO: 514 - protein, 93 aa, Triticum aestivum
MEHQGHGTGEKKGIMENIKEKLPGGQGDHQQTAGTHGQHGHTGMTGTEMHDTTATGGTHGQQGLTGTTGTGTHGTGEKKSLMDKVKEKLPGQH

SEQ ID NO: 515 - protein, 203 aa, Corynebacterium glutamicum; identical to SEQ ID NO: 468

SEQ ID NO: 516 - protein, 96 aa, Arabidopsis thaliana
MALVRGFMAAKKILGGSVAGTRKETSAPKGFLAVYVGESQRKKQRHLVPVSYLNQPLFQALLIKAEEEFGFNHPMGGLTIPCPEDTFLTVTSQIQG

SEQ ID NO: 517 - protein, 831 aa, Arabidopsis
MGDGDEQSKELGGVSSSSRRCSSGTAGAANAEARMKFAAVDAITELVWSPSNGLSLRCADISFTGKAKLLSPNFFDIGLTNMAIHSNSTSIEDQEDHVDVELRNRDQVNQAMIGGSVEDMKPEMVEDKVETNDDIKNEEAGCSKRSSDSPKAMEGETRDLLVNEQLRMESAGSQEEGDKAHNRVDRLESMDENNLATLAVVACEGKGDYLPEGEAGPSGSYRRREKAKGKEKALSDENFGGDGEDEDEESFGSVESCNSAGLLSRGKKRPGFEEQLIFGSKRLKTLNQECLGSTSKLKQDSSFMNWISNMTKGIWKGNEEDNSPFVALTTTSNANGHGQVNAIVDQQQLSPCCVKENSGCRNTGFQSFFQSIYCPKKQSQDVVDMDFPNDVNAAPLQELPWIPEHCDISKGDDLSSSGNEIGPVAEPNISSGKVVFNQTSKTQSSENKREDKEPNISLMSLSKSKPNEEPKTCGEADGKVSPCLTNRNSGLKSLWISRFSSKGSFPQKKASETAKEANASASDAAKTRDSRKMLADKNVIRPSISSVDGPDKPDTVLPIVSSMRIESSEAMASLFARRLEAMKSIMPSGSLAENAEEEQRDLICFYCGKKGHCLRDCLEVTDTELRDLVQNISVRNGREEASSLCIRCFQLSHWAATCPNAPLYGSGAEGRAMKNALASTSGMKLPISGFTDVPRAVFDAVQVLRLSRTDVLKWINTKKSVSGLEGFFLRLRLGKWEEGLGGTGYYVARIDGDTEGQSSRRHSEKSLISVKVKGVTCLVESQFISNQDFLEEELKAWWQSAGKSARTSGYDGIPSAEELSRKIQQRKMLGF

SEQ ID NO: 518 - protein, 420 aa, Glycine max
MDINEIDVPSFFLCPISLEIMKDPVTVSTGITYDRESIETWLFSKKNTTCPMTKQPLIDYTDLTPNHTLRRLIQAWCTMNTSHGIERIPTPKPPINKNQISKLLKDASHSPLTCLRRLKSIASGSETNKRCMEASGVVEFLASIVINNNNIVSSNEADSNEGSGFELRTSASDEALSLLHNLHLSDQGLKTLLSFKTGDFIESLTRVMQKGFFESRAYAVFLLKSMSEVAEPVQLLHLRQDLFVELVQVLKDQISQKTSKATLQTLIQFSPWGRNRIKAVEAGTVPVLVELLLDCKERKPCEMMLVLLEILCQCAEGRAELLNHAAGLAIVSKKILRVSTLANDRAVKILLSVSRFSATPHVVQEMLKLGVVAKLCLVLQVDSGNKAKEKAREILKLHARAWRNSPCIPNNLLNSYPNYV

SEQ ID NO: 519 - protein, 357 aa, Oryza sativa
MDFPGGSGRQQQLPPMTPLPLARQGSVYSLTFDEFQSTLGGVGKDFGSMNMDELLRSIWTAEESHAVGAATTTTATTASVAAAEHAAVGAPPVQRQGSLTLPRTLSQKTVDEVWRDMMCFGGGGASTAPAAAEPPPPAHRQQTLGEITLEEFLVRAGVVREDMSVPPVPPAPTPTAAAVPPPPPPQQQTPMLFGQSNVFPPMVPPLSLGNGLVSGAVGHGGGGAASLVSPVRPVSSNGFGKMEGGDLSSLSPSPVPYVFKGGLRGRKAPGIEKVVERRQRRMIKNRESAARSRQRKQAYMMELEAEVAKLKELNDELQKKQDEMLEQQKNEVLERMSRQVGPTAKRICLRRTLTGPW

SEQ ID NO: 520 - protein, 667 aa, Arabidopsis thaliana
MGSTPFCYSINPSPSKLDFTRTHVFSPVSKQFYLDLSSFSGKPGGVSGFRSRRALLGVKAATALVEKEEKREAVTEKKKKSRVLVAGGGIGGLVFALAAKKKGFDVLVFEKDLSAIRGEGKYRGPIQIQSNALAALEAIDIEVAEQVMEAGCITGDRINGLVDGISGTWYVKFDTFTPAASRGLPVTRVISRMTLQQILARAVGEDVIRNESNVVDFEDSGDKVTVVLENGQRYEGDLLVGADGIWSKVRNNLFGRSEATYSGYTCYTGIADFIPADIESVGYRVFLGHKQYFVSSDVGGGKMQWYAFHEEPAGGADAPNGMKKRLFEIFDGWYDNVLDLLHATEEEAILRRDIYDRSPGFTWGKGRVTLLGDSIHAMQPNMGQGGCMAIEDSFQLALELDEAWKQSVETTTPVDVVSSLKRYEESRRLRVAIIHAMARMAAIMASTYKAYLGVGLGPLSFLTKFRVPHPGRVGGRFFVDIAMPSMLDWVLGGNSEKLQGRPPSCRLTDKADDRLREWFEDDDALERTIKGEWYLIPHGDDCCVSETLCLTKDEDQPCIVGSEPDQDFPGMRIVIPSSQVSKMHARVIYKDGAFFLMDLRSEHGTYVTDNEGRRYRATPNFPARFRSSDIIEFGSDKKAAFRVKVIRKTPKSTRKNESNNDKLLQTA

SEQ ID NO: 521 - protein, 196 aa, Glycine max
MAFAGTTQKCMACDKTVYLVDKLTADNRVFHKACFRCHHCKGTLKLSNYNSFEGVLYCKPHFDQLFKRTGSLDKSFEGTPKIAKPEKNLEEKPAAAKVSSMFGGTRDKCAGCQKTVYPTEKVTVNGTPYHKSCFKCCHGGCVISPSNYIAHEGKLYCKHHHVQLIKEKGNLSQLEGDNEKSATNGKINGEEVATET

SEQ ID NO: 522 - protein, 349 aa, Glycine max
MADSTSSDSLSLDIDSFSPSPQEHIIRTRHGSVSVAVYGDQDKPALITYPDLALNYVSCFQGLLFCPEAYYLLLHNFCIYHISPPGHELGAAAIDQDHPILSVDDLADQIAEVLNFFGLSAVMCMGVTAGAYILTLFAMKYRQRVLGLILVSPLCKEPSWTEWLYNKVMSNLLYFYGMCGVVKEILLKRYFSKEIRGGTQLPESDIVKSCRRLLDERQSLNVWRFLEAINERPDISEGLRKLHCRSLIFVGDMSPFHSEAVHMTSKLDRRFSALVEVQACGSMVTEEQPHAMLIPMEYFLMGYGLYKPSKLSVSPRSPLSPSCISPELYSPESMGLKLKPIKTRISLEI

SEQ ID NO: 523 - protein, 459 aa, Glycine max
MLKDTSISKCTSCRDDMLSKGEVSAAVTNIQPQVPTSSSEVKLESSKLEKQEKNTSSKASSGLRKRAYDPELFFKVNGKLYQRLGKIGSGGSSEVHKVISSDCTIYALKRIKLKGRDYATAYGFCQEIEYLNRLKGKNNIIQLIDYEVTDKALFEGVINGSFSNKDGRVKDDGYIYMVLEYGEIDLAHMLSQKWKELDGSNQTIDENWLRFYWQQILQAVNTIHEERIVHSDLKPANFLLVKGSLKLIDFGIAKAIMSDTTNIQRDSQVGTLSYMSPEAFMCNESDASGNIIKCGRPSDIWSLGCILYQMVYGRTPFADYKTFWAKFKVITDPNHEITYAPVSNPWLLDLMKRCLAWDRNERWRIPQLLQHPFLVPPVPCHSSFYQDQTFKLLQLISEACINDPESSQLCCQLQQVLGNPIKSTSIHSLNSLDQQHKLLSRISELCILLQERLTKTDKL

SEQ ID NO: 524 - protein, 255 aa, Glycine max
MGRGRVELKRIENKINRQVTFAKRRNGLLKKAYELSVLCDAEVALIIFSNRGKLYEFCSSSSMLKTLERYQKCSYGAVEVSKPAKELEQSSYREYLKLKARFESLQRTQRNLLGEDLGPLNIKELEHLERQLDSSLKQVRSTKTQFMLDQLSDLQTKEQMLVEANRSLTVKLEEINSRNHYRQSWEAGDQSMPYGGGGPENSHSHSHSQGFFQPLECNPTLHIGPDYRYNAVASDQITATTQPQQVSGFIPGWML

SEQ ID NO: 525 - protein, 304 aa, Glycine max
MASSNLFFDDIRSKVDVDPPQNEESTDVGELLNDPAQTALKPNGTVSSSVRELLECPVCLNAMYPPIHQCSNGHTICSGCKPRVHNRCPTCRHELGNIRCLALEKVAASLELPCKYQGFGCIGIYPYYSKLKHESQCAHRPYNCPYAGSECSIMGDIPYLVAHLKDDHKVDMHNGSTFNHRYVKSNPQEVENATWMLTVFSCFGQYFGLHFEAFQLGMAPVYIAFLRFMGDDDEAKNYSYSLEVGGNGRKMIWQGVPRSIRDSHRKVRDSFDGLIIQRNMALFFSGGDRKELKLRVTGRIWKEQ

SEQ ID NO: 526 - protein, 240 aa, Arabidopsis thaliana
MVSKTPSTSSDEANATADERCRKGKVPKRINKAVRERLKREHLNELFIELADTLELNQQNSGKASILCEATRFLKDVFGQIESLRKEHASLLSESSYVTTEKNELKEETSVLETEISKLQNEIEARANQSKPDLNTSPAPEYHHHHYQQQHPERVSQFPGLPIFQGPGFQQSATTLHPPATVLVLPIQPDPQTQDISEMTQAQQPLMFNSSNVSKPCPRYASAADSWSSRLLGERLKASE

SEQ ID NO: 527 - protein, 139 aa, Arabidopsis thaliana
MEGSSKGLRKGAWTAEEDSLLRQCIGKYGEGKWHQVPLRAGLNRCRKSCRLRWLNYLKPSIKRGKFSSDEVDLLLRLHKLLGNRWSLIAGRLPGRTANDVKNYWNTHLSKKHEPCCKTKIKRINIITPPNTPAQKVDIF

SEQ ID NO: 528 - protein, 255 aa, Arabidopsis thaliana
MSSQPNHQTSISSLLHDRLHIPPAETIVEKESAEKDTCQSQRKRKEPVLHEVDGSSSGAAKKQDHNAKERLRRMRLHASYLTLGTLLPDHSSSSSKVLFSLLLLQVRYVLLVVELYITFLADWQKKWSAPSIIDNVITYIPKLQNEVGELTLRKQKLVELERRGPSIRAISVLELGESGYEAVVQICLKKENEDEFSNLLHVMEVQGLSVLSASTSQVCREQRVVCYNFHVKVLCLILSSSFLFSLCFDRMETMC

SEQ ID NO: 529 - protein, 409 aa, Arabidopsis thaliana
MELSLALTSTDHNPSPSEAHPDTMDFLSREWCNFAVQSLHPDPILYDRSIVPVETSIAKFQGDSSPVSCAMMDTSMKMDDPDFKPSMPSWKTNDVKSWIWMQQAMHPELSYEGFFRKKLVKPFWPFRLVLIYQINNIGFLNQNNNGFVETSMENYAVDKEMVERDKGETKGRKNAGKDGGNGRPSTRETAVASAAAVVAAQCAQMAETMGANRDQLSTMIGSAMTGTSVSEILTLTASATTSLRGAATLKARRGCKINRLNGSAPVLPIEDSSYLPPEFDKNTSVLAKGTDLFVETPDGDFKARTVSMVLNKDGKVILKMKKHNLLRTKKESIVTNVHVELYKDSDSEDNNIEDTCYLIVLRTNRGAIKLDMADDYNRYKTWVTTIQHMLTLSSSSLSTNYALTFYNKN

SEQ ID NO: 530 - protein, 214 aa, Arabidopsis thaliana
MVRGKTQMKRIENATSRQVTFSKRRNGLLKKAFELSVLCDAEVSLIIFSPKGKLYEFASSNMQDTIDRYLRHTKDRVSTKPVSEENMQHLKYEAANMMKKIEQLEASKRKLLGEGIGTCSIEELQQIEQQLEKSVKCIRARKTQVFKEQIEQLKQKEKALAAENEKLSEKWGSHESEVWSNKNQESTGRGDEESSPSSEVETQLFIGLPCSSRK

SEQ ID NO: 531 - protein, 175 aa, Arabidopsis thaliana
MSLSRRDPLVVGSVVGDVLDPFTRLVSLKVTYGHREVTNGLDLRPSQVLNKPIVEIGGDDFRNFYTLVMVDPDVPSPSNPHQREYLHWLVTDIPATTGNAFGNEVVCYESPRPPSGIHRIVLVLFRQLGRQTVYAPGWRQQFNTREFAEIYNLGLPVAASYFNCQRENGCGGRRT

SEQ ID NO: 532 - protein, 580 aa, Zea mays
MGEVEDMYTQDGTVDMKGNPAVKKGTGNWRACPYILANECCERLAYYGMSTNLVNYMKTRLGQVNSVASNNVTNWQGTCYITPLIGAFFADAYMGRFWTIAIFMIIYIFGLALLTMASSVKGLVPTSCGDKDVCHPTDAQAAVVFVALYLIALGTGGIKPCVSSFGADQFDENDEREKKSKSSFFNWFYFSINIGALVASTVLVYVQTHVGWGWGFGIPAVVMAIAVGSFFVGTPLYRHQKPGGSPLTRIAQVLVACARKWNVAVPADKSRLHETVDGESVIEGSRKLEHSEQLACLDRAAVVTAEDGAEASPWRLCSVTQVEELKSVIRLLPIWASGIVFAAVYSQMSTMFVLQGNTLDQSMGPRFKIPSATLSMVDTISVIVWVPVYDRAIVPLVRSYTGRPRGFTQLQRMGIGLVVSIFSMVAAGVLDIVRLRAIARHGLYGEDDIVPISIFWQIPQYFIIGCAEVFTFVGQLEFFYDQAPDAMRSMCSALSLTTVALGNYLSTVLVTIVTHITTRHGRIGWIPENLNRGHLDYFFWLLAVLSLLNFLAYLVIASWYKYKKTADDYPGAKGEHGTEH

SEQ ID NO: 533 - protein, 644 aa, Arabidopsis thaliana
MGNKKLLTGGSSKTHGSGSSYRDPLLQNQEDKPKANGSENGLNDLEHGVVEAANVGFGRVFALAKPDAGKLVIGTIALLIGSTTNLLVPKFGGMIIDIVSRDVKTPEQQTESLIAVRNAVVIILLIVVIGSICTALRAWLFNSASERVVARLRKDLFRHLMHQEIAFYDVTKTGELLSRLSEDTQIIKNAATTNLSEALRNVTTALIGVGFMFTSSWKLTLLALVVVPVISVAVKQFGRYLRELSHTTQAAAAVAASIAEESFGAVRTVRSFAKESYMVSQYSKKVDETLKLGLKQAVLVGLFFGGLNAAFTLSVITVVSYGAYLTIYGSMTVGALTSFILYSLTVGSSVSSLSSLYTTAMKAAGASRRVFQILDRVSSMSSSGDKCPVGNPDGDVELNDVWFAYPSRPSHMILKGISLRLTPGSKVALVGPSGGGKTTIANLIERFYDPLKGKILLNGVSLMEISHQYLHKQISIVSQEPILFNCSVEENIAYGFDGEASFTDIENAAKMANAHEFIEAFPDKYNTVVGERGLRLSGGQKQRIAIARALLTNPSVLLLDEATSALDAESEYLVQDAMDSLMAGRTVLVIAHRLSTVKTADCVAVISDGEVAEKGTHDELLSLNGIYTNLVKRQLQSSSSVTTL

SEQ ID NO: 534 - protein, 559 aa, Cyanidium caldarium
MCGILAVLGSSLPVEELRELVKSCTKKLYHRGPDEEQYFISEDGWCGLGFARLKIVDPEHGVQPMFNDQRTVWSVTNGELYNHEEIRKTELNNMTLHSHSDCEIMIPLYEKYVSSQRYDHDIQYVYNLLRGVFASCLVDLKRGFFMAGRDPIGVRALFYGTSKDGAVWFASEAKAIVDVCDYVTAFIPGTFVKGYRGREQAFSFTRYYEPVYWHDHWMPVSPVDYQLLHDTFVLSCKRRLMSDVPIGVFISGGLGSSLVASVAKRLLDPNYDFHSFACGLEGAPDVAAAQRVADFLGTKHHVLTFTVEEGIQALDQVIYHLETYDVTTVRASTPMYLLSGLCKKYVKVVLSGEGADEIFGGYLYFHNAPNEIAFHQEVVRRVKLLYTADVLRGDRATAAQSLELRVPFLDRDFLDVAMSIHPREKVTSKHRIEKYIIRYAFSKEFCGEEYLPDDILWRQKEQFSDGVGYSWIDGLKAYCEKAVSDADLQNAAQRFPHDTPTTKEAYVYRAIFEKHFGNCKAVQGLRESVARWVPMWSDSTDPSGRAQKVHVAAYSNGGD

SEQ ID NO: 535 - protein, 433 aa, Chlamydomonas reinhardtii
MLAGKVPVGSAVPPRNTAPSGKGSKVLVVNAGSSSIKFKIFTAETLLPGAAGLFDRIGEGDPANCVLKASVPDDGGKPKKFEKKIPAKDHLTAMQDIMSFIDENVSSTFASEVCAVGHRIVHGLDMSQPKLLTPDVIRCIQDASMFAPLHNPPHLQGIYASQKVFGPDVPQVAVFDTAFHQTMPPESYVYGLPYDMYEKHKIRRYGFHGTSHKYLVDQAAAMLGKKVSETNVITCHLGNGSSVAAVRGGQCVDTSMGMTPLEGLLMGTRCGDIDPAVVLHIQNQLGLSASETDTLLNKKSGLLGLTGSNDLRTVIEGAGKGEPRSQLGLDMFVRRVRKYIGAYMAMLDGQVDAVVFSAGIGENSALVRGLICDRMQALGIAVDKDANAAAVGGKQADISGPGARIRALVIPTDEELSIAQQTLQVVRGAALAA

SEQ ID NO: 536 - protein, 792 aa, Chlamydomonas reinhardtii
MSLNSSTMSRRQAVAGAPAVAPFRHAGLFPRVRLCANRRVARVAPKAAGNGNIAQGEQGFDTLFLSDISLVGQRTPLLLGFFNYFERHLPHVGFFEPIAAEALASSELRIDRHVELVYKVFNLKGDVRAMTGVQDAEAARMIANGQHSELLDKIYSQYASYKEGQDLVLVEGPGPLMGGTELDAQIAAALNAPVLMTMTGQPNATVADYYNRAMVKRQVFLDHHVEVLGLVMNGLPRQSHAILSGQLRDKFAAAGLPFAGAIPTDIMLRNVRLDEVQTAMGAQRLYGDSLLTDVEFDDVVVASQRLEELLEILAERPMGRPLVVTSADRLDIVLGLLAAQLSVSGPGVAGILLTQAGSARSGRNYARDTIDRIFAGLSSSGLYKGSLLPVLVTDMPLRDAIRKLDNLDAAILPSSTRKISQCKRLFEQYVDANAVVARLQNMVRPNRMTPKMFMHTLKSMCNATPQHIVLPESEDKRVLAAAADVVQRGLAKITLLGDPTTILAEAAKLGLDLSGCNIHNPNTSDRFDKYVDMLVEARKKKGMTREVAADTLHGDVNFFATMMIVAGDADGMVSGAVHTTASTVRPALQVLKSPDTPLVSSVFIMCLPDRVVVYGDCAVNVNPSAADLAQIAITSNDTAAAFGIEPRVAMLSYSTLGSGSGPDVQKVSEAVAIVKQRRPDIKVEGPIQYDAAIDPKVAAVKVQGLSEVAGKATVFIFPDLNTGNNTYKAVQQSTGAIAMGPVMQGLLRPVNDLSRGCTVPDIINTICVTSIQASRMSSAARAAAAKAAVAAV

SEQ ID NO: 537 - protein, 594 aa, Chlamydomonas reinhardtii
MQEPDRLPGIESAHRGGGTPPHFASLMTAGGSGNGDGGLTPAFSPLQYDLTEIAGLDYLSSPSGVIAEAQQLAAQAFGADRTWFLVNGCSAGIHAAVMAVAGPGAGRARRRRQQVQHPQDMDNTSGSADGQTTTSDAGGQGAEPASEKPGVLLVARNCHLSVFSALVLSGLEPVWLAPELDPRAGVAHCVTPGTVAAALAGAAAAGRRVAGVMVVSPTYFGAVADVRGIAQVCAGYDVPLLVDEAHGGHFAFLPPASLPPPPPSALSCGADMVMQSTHKVLGAMTQAAMLHLRGERVSAARTSRALQTLQSSSPSYLLMASLDAARQQAAAGGAFAEPCAAAQVIREAVSRCSLVQLLDNQTAQGASNSGSSTEVGGSSHAGTSSSTLHGHPGSSCNAESIAFFDPLRLTLLVDRIAAVPAAAADGSSNSVRRCSGSSGFAVSEWLEARHGVVPELATAKTVVLALGPGSTLAHARQAVAAILELDRLAAAAPQDWAGGGVQAEPPHAPLAPDMVLSPRDAYFAETESVPAAEAVGRASAELLCPYPPGVPVLFPGERITPAALAALQATLAAGGTVTGASDSSLMRFEVLVVD

SEQ ID NO: 538 - protein, 381 aa, Arabidopsis thaliana
MVDQVQHPTIAQKAAGQFMRSSVSKDVQVGYQRPSMYQRHATYGNYSNAAFQFPPTSRMLATTASPVFVQTPGEKGFTNFALDFLMGGVSAAVSKTAAAPIERVKLLIQNQDEMIKAGRLSEPYKGIGDCFGRTIKDEGFGSLWRGNTANVIRYFPTQALNFAFKDYFKRLFNFKKDRDGYWKWFAGNLASGGAAGASSLLFVYSLDYARTRLANDAKAAKKGGGGRQFDGLVDVYRKTLKTDGIAGLYRGFNISCVGIIVYRGLYFGLYDSVKPVLLTGDLQDSFFASFALGWVITNGAGLASYPIDTVRRRMMMTSGEAVKYKSSLDAFKQILKNEGAKSLFKGAGANILRAVAGAGVLSGYDKLQLIVFGKKYGSGGA

SEQ ID NO: 539 - protein, 327 aa, Lycopersicon esculentum
MCGGSIISDYIDPSRTSRRLTAEFLWGRFDLGKKQKNPNNYHSKAKHLRSEVVDDFEADFQDFKELSDDEDVQVDVKPFAFSASKHSTGSKSLKTVDSDKDAAADKSSKRKRKNQYRGIRQRPWGKWAAEIRDPRKGVRVWLGTFNTAEEAAKAYDIEARRIRGKKAKVNFPDEAPAPASRHTVKVNPQKVLPEESLYSLQSDSAIMNSVEDDHYDSFGFFEEKPMTKQYGYENGSSASADTGFGSFVPSAGGDIYFNSDVGSNSFECSDFGWGEPCSRTPEISSVLSAAIECNEAQFVEDANSQKKLKSCTNNPVADDGNPRYYGT

SEQ ID NO: 540 - protein, 129 aa, Glycine max
MRGVIVLLLHCHRKMANRIPLVVSYKNLVKHLHSTSAKNANARVHTQGGDSIVGASAQGAVKATEVLENVGERAKETVDTALDAAKKTTEGVTETTTMVEADNNVVDTVEYRCTEDLRGQLGDGHDSYN

SEQ ID NO: 541 - protein, 108 aa, Zea mays
MSGVWVFKNGVVRLVENGAAVGGEAAVRRRKALVHTPSGQVVRSYAELEAELRALGWERYYEDPALYQFHKRGSLDLISLPADFARFSSVHMYDIVIKNRDSFRVVDV

SEQ ID NO: 542 - protein, 449 aa, Zea mays
MAKALLSSSLLPALPGAAGGSRSAARPMLLPPLRLRRGRRAASACEVRAGLHGLDSVGGPHLQAALERAEAALYTLADAAVAAAGAGADAGQAAAVQKNSGWFGFISEALEVVLKVLKDGLSAVHVPYSYGFAIILLTIIVKAATLPLTKKQVESTLAMQNLQPQIKAIQQRYAGNQERIQLETARLYKQAGVNPLAGCFPTLATIPVWIGLYQALSNVANEGLLTEGFFWIPSLGGPTTIAARQSGSGITWLFPFVDGHPPLGWHDTICYLVLPVLLVASQYVSMEIMKPPQSDDPSQKNTMLILKFLPFMIGWFSLSVPSGLSIYWFTNNVLSTAQQVWLRKMGGAKPVVTEGGSGIITAGRAKRSNAQPAGERFRQLKEEENRRKFSKALAAGDSDASTYDMDDEESDETIEEGGPVEEASTSSDKKLPSYSGKKGKRSKRKRMVQ

SEQ ID NO: 543 - protein, 185 aa, Arabidopsis thaliana
MALQIHSPCSFSTRPYHLFFTTRNPRFAIKCQNSQIESDTTEDPSRSKNSSSSGVGFGSPASSSSPAKKLSAATSGNKKGKGKREVNRRAPVEKPVFMSEEGAAKAEEQRQNENAFLLTWLGLGIVILIEGIILAASGFLPEELDKLFVKYVYPVFTPSVVLFVAGTTAYGVLKYIQNEKMKGQE

SEQ ID NO: 544 - protein, 273 aa, Zea mays
MDSKSMEAFVASEASVFMNQPPPHMSRPTIIIKLILWLLWTITHLAISILNLWSHLIYSLDCYLISSGLLRKYQNLHLGRLKYLAIVVDSKEAKSTVKVKRLLCWLSSMGVKYVCLYDIEGVLKKSFEPAVNVSRDRTAGEHFGIGANIKDLHCSQREMMIDCLSGSDGKEGIAKAASLLCSTYLNGDTHGDDKRKPAFTEADMAGALKAVGCGGPEPDLLLMYGPARCHLGFPTWRLRYTEIMYMGPLKSMKYGAIVKALYNFSKKHQNYGK

SEQ ID NO: 545 - protein, 160 aa, Zea mays
MSDSEEHHFESKADAGASKTYPQQAGTVRKNGFIVIKNRPCKVVEVSTSKTGKHGHAKCHFVAIDIFNGKKLEDIVPSSHNCDIPHVNRTEYQLIDISEDGFVSLLTSDGNTKDDLRLPTDETLVAQIKEGFESGKDLVVTVQSAMGEEQICALKDVGPK

SEQ ID NO: 546 - protein, 475 aa, Vicia faba
MTMEEKEEHSTEAAVTSHNDSKLFDDDDRVKRTGTVWTTSSHIITAVVGSGVLSLAWAIAQLGWIIGLSVMIFFSLITWYTSSLLSECYRTGDPHFGKRNYTFMEAVHTILGGFYDTLCGIVQYSNLYGTAVGYTIGASISMMAIKRSNCFHSSGGKDGCRISSNPYMISFGVIQIFFSQIPDFHEMWWLSIVAAIMSFTYSLIGLGLAIAKVAENGSFKGSITGVSIGTVTEAQKVWGVFQSLGNIAFAYSYSQILIEIQDTIKSPPSEMKTMKQATKISIGVTTIFYMLCGGMGYAAFGDLSPGNLLTGFGFYNPYWLIDIANAALIIHLVGAYQVYAQPLFAFVEKIMIKRWPKIKKEYKLTIPGFRPYHLNLFRLIWRTIFVITTTFISMLIPFFNDVLGLIGAAGFWPLTVYFPVEMYIKQKKITKWSYKWISMQTLSVICFVVSVVAFVGSVSSIVVDLKKYKPFTTDY

SEQ ID NO: 547 - protein, 221 aa, Glycine max
MKNCELCKLPARTFCESDQASLCWDCDAKVHGANFLVERHTRTLLCHACQSPTPWKASGAALGNTVSLCERCAGGTTEQGQESQGGNDDDIDTDIDTDDEDDYDESEDEVAADEEDGDNQVVPWSSEPPPPAPSSSSSEESVSRCNNVDEVSTTLKRRRQEDNDFQGWNSNNWGCERSEVERGGWLVRLRRRTADDVAVEQRSARAASPDGCCGDRASEDV

SEQ ID NO: 548 - protein, 614 aa, Arabidopsis thaliana; identical to SEQ ID NO: 501

SEQ ID NO: 549 - protein, 160 aa, Physcomitrella patens
MSSRGGSDDEDEGTARKKLRLSKEQSALLEESFKEHSTLNPKQKNALAKQLGLRPRQVEVWFQNRRARTKLKQTEVDCELLKRCVETLTEENRRLQKELQELRAIKVAPPCVISHDFYMPLPAATLTMCPSCERVATVDNRSLTFAKPGFSHLSQSSAAC

SEQ ID NO: 550 - protein, 272 aa, Arabidopsis thaliana
MESNSFFFDPSASHGNSMFFLGNLNPVVQGGGARSMMNMEETSKRRPFFSSPEDLYDDDFYDDQLPEKKRRLTTEQVHLLEKSFETENKLEPERKTQLAKKLGLQPRQVAVWFQNRRARWKTKQLERDYDLLKSTYDQLLSNYDSIVMDNDKLRSEVTSLTEKLQGKQETANEPPGQVPEPNQLDPVYINAAAIKTEDRLSSGSVGSAVLDDDAPQLLDSCDSYFPSIVPIQDNSNASDHDNDRSCFADVFVPTTSPSHDHHGESLAFWGWP

SEQ ID NO: 551 - protein, 272 aa, Arabidopsis thaliana; identical to SEQ ID NO: 550

SEQ ID NO: 552 - protein, 272 aa, Arabidopsis thaliana; identical to SEQ ID NO: 550

SEQ ID NO: 553 - protein, 294 aa, Zea mays
MKRPTSRGSSMVSGQATTDLQEDSCRSMEPHGVDGDATAAAERDDVDAGAYDEEVDEEEELAGSRGGLGEKKRRLAADQVRALERSFEVDNKLDPERKARIARDLSLHPRQVAVWFQNRRARWKTKQIERDFAALRVRHDALRVECDALRRDKDALAAEIKELRGMVEKQMEVKLESAAEELLPVATRSAAAAAVYNKDGSTDSDSSAVFNEEASPYPYSGAALDHQQQQETSHPLGFTGFTSFLTSSFPSVYHGDSHLDQEADGFFSAAAAGDGFFAEEQSAGIGSWYGGEGW

SEQ ID NO: 554 - protein, 391 aa, Zea mays
MRGLSRYLPFCGGGCCCGDGAGRAGGVADGLVWDVALKAHASGDYSIAVAQANEALEDQAQVVAAPAATLVGVFDGHGGPEAARFVNRRLFSHIQAFAAENGGLSAEVFQKAFGATEEEFIGLVQKSWPSQPRIVSVGSCCLVGAVDIENGTLYVANLGDSRAVLGRRRGKGRRVVAERLSQDHNVADEGVRREVAEMHPDDSHIVLNSHGVWRIKGIIQVSRSIGDVYLKKPDICRGNPVLQQSICPFPLRRPVMTAVPSITTRELRPGDRFIIFASDGLWEQLSDDAAVDVVASSPRKGVAMRLVRAAQLEAARKKEVKYDKIRTIEKGQRRHFHDDITVVVLFLDKCRGAARSGPEDIDGTYAPVDVFSCSPAAGGDHEDPTKPVLRR

SEQ ID NO: 555 - protein, 379 aa, Zea mays
MLGPLLRLLSACGGVWPTSPAPGAAASSSASSGDDSEGRDGLLWWRDLARCHAGDVSVAVAQANQVLEDQCRLDSAPSIGTVVGVFDGHGGPDAARFACDHLVPNLREASSGPRGVTADAIREAFLATEEGFLALVSSLWEAQPDIATAGTCCLVGVVHNRTLFVANLGDSRAVLGKKAGRAGQIAAEQLSSEHNANQEAVRQELMAQHPDDAQIVALKHGVWRVRGLIQVSRSIGDVYLKHAKYNTDQIKPKFRLPESFSKPLLSADPSIISRDLEPNDCFIIFASDGLWEHLSNQEAVEIVHSHQRAGSARRLIKAALQEAARKREMRYSDLTKIDKKVRRHFHDDITVIVLFINYDLLLKGAPQGQPLSIRCALDY

SEQ ID NO: 556 - protein, 376 aa, Oryza sativa
MVGQTVMRIVRPCFKPDHQLAVGGTRDGLLWYKDTGRHACGDFSMALVQANNLLEDASQVEAAPLLLSHSSSTTFVGIYDGHGGPETAHFIAQHFFPNLKKFATEQQTVSVDVIRKSYAATEEGFLNLVRKQWLIKPQLASVGSCCLVGIINEGVLYVANTGDSRAVLGRLERGVIKAVQLSAEHNASIESVREELRQFHPDDPRIVVLKHNVWRVKGLIQVSRTLGDAYLKSTEFNREPLLARFRLSEPFHKPILSPEPSIEVHKLCTEDQFVIFASDGLWEHLTNQEAVDIVNCAPRNGIARRLIKAALREAAKKREMRYSDLKKIDRGVRRHFHDDITVVVLFLDSALVGKRFYGGPLLSLRGGDGASTLTQK

SEQ ID NO: 557 - protein, 382 aa, Arabidopsis thaliana
MPINDQFPSGLRILVVDDDTSCLFILEKMLLRLMYQVTICSQADVALTILRERKDSFDLVLSDVHMPGMNGYNLLQQVGLLEMDLPVIMMSVDGRTTTVMTGINHGACDYLIKPIRPEELKNIWQHVVRRKCVMKKELRSSQALEDNKNSGSLETVVVSVSECSEESLMKCRNKKKKKKRSVDRDDNEDDLLLDPGNSKKSRVVWSIELHQQFVNAVNKLGIDKAVPKRILELMNVPGLSRENVASHLQKFRLYLKRLSGEASQSNDSESTKRYENIQALVSSGQLHPQTLAALFGQPIDNHHSASFGVWIPNDNLGRSQNEHFSVDVSSASNRPVSVAVHGLSSSANFRQRGDVNNNRIRQGYGSNVNEESWILERSSRQR

SEQ ID NO: 558 - protein, 318 aa, Oryza sativa
MTARSMLRNHPEASVLDTIRQHLLEEPRGGGGGEAAEASFGSLVADMWSDSLPFRDDDADDMVVFGAMRDAFSCGWLPDGVFAEVKPEPLLSPDSSSYDGSSCCFGFADVSEPVTPSDAASGAAEAAAAAAAATAEHGKEEEAAAAVARGKHYRGVRQRPWGKFAAEIRDPAKNGARVWLGTFDTAEDAALAYDRAAYRMRGSRALLNFPLRIGSEIAAAAAAAAAAAAGDKRPSPEPATSESSFSSSSSCTTTTTSSSTSSSGSPKRRKRGEAAAASMSMPLVPPPSQLNWPVQAWYPAAAPVEQVAITPRVEQLVI

SEQ ID NO: 559 - protein, 382 aa, Arabidopsis thaliana
MELPLLSYASSASFSRTGLCSSSSSSSTSIYEFPERRRSLKLRFNGGERSRSVIASAERSSEGIEKTTDTVGGGGGGGAGRFAGTAMEVTTLDRGFANSTTVDFPIWDKIGAVVRLTYGIGIYGAMAVAGRFICSVTGIDSSGGFDPSLDALLAGLGYATPPIMALLFILDDEVVKLSPHARAIRDVEDEELRSFFFGMSPWQFILIVAASSIGEELFYRVAVQGALSDIFLKGTQLMTDSRGMASLTGVFPPFVPFAEVFAAVITATLTGSLYFLAASPKDPTYIVAPVLRSRRDDFKKLLSAWYEKRQMKKIYSPLLEGLLALYLGIEWVQTDNILAPMMTHGIYSAVILGHGLWKIHDHRRRLRRRIEHIRSEATDKLI

SEQ ID NO: 560 - protein, 448 aa, Zea mays
MPFRSIVRDVRDGFGSLSRRGFEVRFLSHRRGKSHGAVHELHDPVLVVQSSCWASLPPELLRDVIERLETSEDTWPSRKHVVACAAVCRTWREMCREIVKSPEFSGKITFPVSLKQPGPRDGTIQCFIKRDKSTQIYSLYLSFSSAVPVENGKFLLSAKRNCRATYTEYIISINSGDTSRCTSNNTYIGKLRSNFLGTKFVIYDTHPPYNGTSQTVAGKTSQRFYSKKGSTKVSCRWYSIAQISYELNVLGTRGPRRMNCVMHSIPASCLEAGGSVPCQPDSIAAHSVGGSFSSVSLSKSSTMDHSMHFTSSRLSDAITGDGIVNRGQALNDADDEECKDMPLILRNKAPRWHEQLQCWCLNFRGRVTVASVKNFQLVAATQPAAGALTPSQAAPQPAPPPPPDQEKVILQFGKVGKDIFTMDYCYPLSAFQAFAICLSSFDTKLACE

SEQ ID NO: 561 - protein, 594 aa, Arabidopsis thaliana
MASGGGDDGLRRRGCSCTKDDFLPEESFQSMGNYLKALKETPSRFMDRIMTRSLDSDEINEMKARSGHEMKKTLTWWDLMWFGIGAVIGSGIFVLTGLEARNHSGPAVVLSYVVSGVSAMLSVFCYTEFAVEIPVAGGSFAYLRVELGDFMAFIAAGNIILEYVVGGAAVARSWTSYFATLLNHKPEDFRIIVHKLGEDYSHLDPIAVGVCAIICVLAVVGTKGSSRFNYIASIIHMVVILFVIIAGFTKADVKNYSDFTPYGVRGVFKSAAVLFFAYIGFDAVSTMAEETKNPGRDIPIGLVGSMVVTTVCYCLMAVTLCLMQPYQQIDPDAPFSVAFSAVGWDWAKYIVAFGALKGMTTVLLVGAIGQARYMTHIARAHMMPPWLAQVNAKTGTPINATVVMLAATALIAFFTKLKILADLLSVSTLFIFMFVAVALLVRRYYVTGETSTRDRNKFLVFLGLILASSTATAVYWALEEEGWIGYCITVPIWFLSTVAMKFLVPQARAPKIWGVPLVPWLPSASIAINIFLLGSIDTKSFVRFAIWTGILLIYYVLFGLHATYDTAKATLKEKQALQKAEEGGVVADNSCSAT

SEQ ID NO: 562 - protein, 583 aa, Arabidopsis thaliana
MEVQSSSNNGGHSSFSSLRVYLNSLSATPSRLSRRAISVSTSSDEMSRVRAVSGEQMRRTLRWYDLIGLGIGGMVGAGVFVTTGRASRLDAGPSIVVSYAIAGLCALLSAFCYTEFAVHLPVAGGAFSYIRITFGEFPAFFTGANLVMDYVMSNAAVSRSFTAYLGTAFGISTSKWRFVVSGLPKGFNEIDPVAVLVVLVITVIICCSTRESSKVNMIMTAFHIAFIFFVIVMGFIKGDSKNLSSPANPEHPSGFFPFGAAGVFNGAAMVYLSYIGYDAVSTMAEEVENPVKDIPVGVSGSVAIVTVLYCLMAVSMSMLLPYDLIDPEAPFSAAFRGSNGWEWVTKVVGIGASFGILTSLLVAMLGQARYMCVIGRSRVVPFWFAKIHPKTSTPVNASTFLGIFTAALALFTDLNVLLNLVSIGTLFVFYMVANALIFRRYVPVGPTKPWPTLCFLTLFSITSLVFTLIWKLVPEGKPKAFMLGASAVVAIAIVLSFQCVVPQARKPELWGVPFMPWTPCVSIFLNIFLLGSLDAPSYVRFGFFSGLIVLVYLFYGVHASSDAEANGSFGVKDGQVMKELIEV

SEQ ID NO: 563 - protein, 279 aa, Chlamydomonas reinhardtii
MQQQQQQQQPTSALYSMSMLDPAHRRDPVEKSEPFTKLRMFLDSASITNWELWMSTRLFYGITTNPAILEKDGQRCTLSNLQRLCHIGEELGVKEMQFQAWGDSAQSMVSVALDLFGMNPELVVVKLPCTLEGFQAAALLRESSVRITLTGIYTASQVLLAQSVGAEYAAPYLGRMNDAYGNNKGFKEVVEMQRILHAQKARTRLLVASVREPSAMASLAAEGCDTFTISPAVAGKLFAVSYTLDAVEAFEASARRMGAYDQDEGATTSTLFHRHGNNH

SEQ ID NO: 564 - protein, 433 aa, Chlamydomonas reinhardtii; identical to SEQ ID NO: 535

SEQ ID NO: 565 - protein, 594 aa, Chlamydomonas reinhardtii; identical to SEQ ID NO: 537

SEQ ID NO: 566 - protein, 155 aa, Arabidopsis thaliana
METLQCRHQHVFILLLVLFHSSLFVLASKIDVSDDARGIRIDGGQKRFLTNSPQHGKEHAACTNEEPDLGPLTRISCNEPEYVITKINFADYGNPTGTCGHFRRDNCGARATMRIVKKNCLGKEKCHLLVTDEMFGPSKCKGAPMLAVETTCTIA

SEQ ID NO: 567 - protein, 166 aa, Arabidopsis thaliana
MRLLVAEAASPLSSAATPTCNSHTCRWKPYSNSTDFTANASVLLILVISALICALSLYAAIRCFLRPTLETEDDHKPDPEAAASSTPTTPTLVYSSDLELAGAEAECAICLSEFEQGESIQVLEKCQHGFHVKCIHKWLSTRSSCPTCRTSIFSQHSETPSSHINA

SEQ ID NO: 568 - protein, 436 aa, Arabidopsis thaliana
MGFQNEASSSSYTLKIPPPAREDTPLLGKGPPLSSQFKTFANVFIAVVGAGVLGLPYAFKRTGWLMGVLLLVSVSVLTHHCMMLLVYTRRKLDSFNAGISKIGSFGDLGFAVCGSLGRIVVDLFIILSQAGFCVGYLIFIGTTLANLSDPESPTSLRHQFTRLGSEFLGVSSKSLYIWGCFPFQLGLNSIKTLTHLAPLSIFADIVDLGAMAVVIVEDSMIILKQRPDVVAFGGMSLFLYGMGVAVYSFEGVGMVLPLESEMKDKDKFGKVLALGMGFISLIYIAFGILGYLAFGEDTMDIITANLGAGLVSTVVQLGLCINLFFTFPLMMNPVFEIVERRFSRGMYSAWLRWVLVLAVTLVALFVPNFADFLSLVGSSTCCVLGFVLPALFHLLVFKEEMGWLQWSSDTAIVVLGVVLAVSGTWSSLSEIFSVKV

SEQ ID NO: 569 - protein, 169 aa, Arabidopsis thaliana
MTFFIEDTSLIISHVLYKTALIITVLRWIFAWILRYRSRSSSSSSSSSQSSSSPSISSQTIKESLAVFAFRDAVERSPAAINDMCAVCLGDLEDEDEIRELRNCTHVFHRDCIDRWLDYECCGGDDDNHRTCPLCRTPLLPSFTDYSTVTQTSWAVERLLYLFGDDLLP

SEQ ID NO: 570 - protein, 158 aa, Arabidopsis thaliana
MELASFLGRALFVSVFLLSAWQEFNDFGEDGGRSAKSLKPKFNAFVNHVTTHTGQQLPPVDMKILVAAAIALKGIGGLLFVFGSSLGAYLLLLHQAVATPILYDFYNYDVDRKEFGQLFSKFTQSLALLGGLLFFIGMKNSRKHGRQLRKKAPKAKAN

SEQ ID NO: 571 - protein, 291 aa, Triticum aestivum
MQDFQSIPGLAGRLFGGAAAADIRRVQGPASRCGVFSQAASAQPEAAVKCPRCESTNTKFCYYNNYNLSQPRHFCKSCRRYWTKGGVLRNVPVGGGCRKAKRSSSSASAPSTPAATDAKSQRRASASSSSRSNSGSGSASPTAAAEETTTTETEPPPPPTPSSNSNSNAVSFANRMTNYPFAADVPPLAPIFADQAAALASLFAPPPPPPLPVFSFSAEPKMEEAIGSLLLPGQEASQEPEEPTCTSTVADMAPFMSLDAGIFELGDASPADYWNGGSCWTDVQDPSVYLP

SEQ ID NO: 572 - protein, 291 aa, Triticum aestivum
MQDFQSIPGLAGRLFGGAAAADIRRVQGPASRCGVFSQAASAQPEAAVKCPRCESTNTKFCYYNNYNLSQPRHFCKSCRRYWTKGGVLRNVPVGGGCRKAKRSSSSASAPSTPAATDAKSQRRASASSSSRSNSGSGSASPTAAAEETTTTETEPPPPPTPSSNSNSNAVSFANRMTNYPFAADVPPPAPIFADQAAALASLFAPPPPPPLPVFSFSAEPKMEEAIGSLLLPGQEASQEPEEPTCTSTVADMAPFMSLDAGIFELGDASPADYWNGGSCWTDVQDPSVYLP

SEQ ID NO: 573 - protein, 291 aa, Triticum aestivum; identical to SEQ ID NO: 572

SEQ ID NO: 574 - protein, 230 aa, Brassica napus
MVKLCELCGAEAHLHCDADSAYLCRSCDVKFHASNFLFSRHVRRIICPGCSSLTGDIVSGSLSPWPAKITCSCCGCGTSSSSASSCCSSLDLISTSELSSSTTRKTTVNRGPRRREKGVNAVGDGIFVNWCDELGLNGDSRNEVVSLASLALAVGKTRGTKVILAAAFWFGVRNARKTMTCPRLKKVEDVTGVAAGMIRAGESKLARAVTLQLRRCRMDSEEGWAENDNV

SEQ ID NO: 575 - protein, 1122 aa, Arabidopsis
MSGSRPTQSSEGSRRSRHSARIIAQTTVDAKLHADFEESGSSFDYSTSVRVTGPVVENQPPRSDKVTTTYLHHIQKGKLIQPFGCLLALDEKTFKVIAYSENASELLTMASHAVPSVGEHPVLGIGTDIRSLFTAPSASALQKALGFGDVSLLNPILVHCRTSAKPFYAIIHRVTGSIIIDFEPVKPYEVPMTAAGALQSYKLAAKAITRLQSLPSGSMERLCDTMVQEVFELTGYDRVMAYKFHEDDHGEVVSEVTKPGLEPYLGLHYPATDIPQAARFLFMKNKVRMIVDCNAKHARVLQDEKLSFDLTLCGSTLRAPHSCHLQYMANMDSIASLVMAVVVNEEDGEGDAPDATTQPQKRKRLWGLVVCHNTTPRFVPFPLRYACEFLAQVFAIHVNKEVELDNQMVEKNILRTQTLLCDMLMRDAPLGIVSQSPNIMDLVKCDGAALLYKDKIWKLGTTPSEFHLQEIASWLCEYHMDSTGLSTDSLHDAGFPRALSLGDSVCGMAAVRISSKDMIFWFRSHTAGEVRWGGAKHDPDDRDDARRMHPRSSFKAFLEVVKTRSLPWKDYEMDAIHSLQLILRNAFKDSETTDVNTKVIYAKLNDLKIDGIQELEAVTSEMVRLIETATVPILAVDSDGLVNGWNTKIAELTGLSVDEAIGKHFLTLVEDSSVEIVKRMLENALEGTEEQNVQFEIKTHLSRADAGPISLVVNACASRDLHENVVGVCFVAHDLTGQKTVMDKFTRIEGDYKAIIQNPNPLIPPIFGTDEFGWCTEWNPAMSKLTGLKREEVIDKMLLGEVFGTQKSCCRLKNQEAFVNLGIVLNNAVTSQDPEKVSFAFFTRGGKYVECLLCVSKKLDREGVVTGVFCFLQLASHELQQALHVQRLAERTAVKRLKALAYIKRQIRNPLSGIMFTRKMIEGTELGPEQRRILQTSALCQKQLSKILDDSDLESIIEGCLDLEMKEFTLNEVLTASTSQVMMKSNGKSVRITNETGEEVMSDTLYGDSIRLQQVLADFMLMAVNFTPSGGQLTVSASLRKDQLGRSVHLANLEIRLTHTGAGIPEFLLNQMFGTEEDVSEEGLSLMVSRKLVKLMNGDVQYLRQAGKSSFIITAELAAANK

SEQ ID NO: 576 - protein, 1122 aa, Arabidopsis; identical to SEQ ID NO: 575

SEQ ID NO: 577 - protein, 1122 aa, Arabidopsis; identical to SEQ ID NO: 575

SEQ ID NO: 578 - protein, 496 aa, Arabidopsis thaliana
MSGAITCSAADLSALLGPNATAAADYICGQLGSVNNKFTDAAYAIDNTYLLFSAYLVFAMQLGFAMLCAGSVRAKNTMNIMLTNVLDAAAGGLFYYLFGYAFAFGESSDGFIGRHNFGLQNFPTLTSDYSFFLYQWAFAIAAAGITSGSIAERTKFVAYLIYSSFLTGFVYPVVSHWFWSPDGWASPFRSEDRLFGTGAIDFAGSGVVHMVGGIAGLWGALIEGPRIGRFPDGGHAIALRGHSASLVVLGTFLLWFGWYGFNPGSFTKILIPYNSGSNYGQWSGIGRTAVTTTLSGCTAALTTLFGKRLLSGHWNVTDVCNGLLGGFAAITAGCSVVDPWAAIVCGFVASLVLIGCNKLAELLKYDDPLEAAQLHGGCGAWGLIFVGLFAKEKYINEVYGASPGRHYGLFMGGGGKLLGAQLVQIIVIVGWVSATMGTLFFILKKLNLLRISEQHEMRGMDLAGHGGFAYIYHDNDDDSIGVPGSPVPRAPNPPAV

SEQ ID NO: 579 - protein, 238 aa, Arabidopsis thaliana
MDSNFHYSIDLNEDQNHHEQPFFYPLGSSSSLHHHHHHHHHQVPSNSSSSSSSISSLSSYLPFLINSQEDQHVAYNNTYHADHLHLSQPLKSLCNACGIRQRKARRAAMAAAAAAGDQEVAVAPRVQQLPLKKKLQNKKKRSNGGEKYNHSPPMVAKAKKCKIKEEEEKEMEAETVAGDSEISKSTTSSNSSISSNKFCFDDLTIMLSKSSAYQQVFPQDEKEAAVLLMALSYGMVHG

SEQ ID NO: 580 - protein, 525 aa, Arabidopsis thaliana
MANSKYEYVKSFEVEDEVMFPNLIIIRIDGRDFSRFSQVHKFEKPNDETSLNLMNSCASSVLVEYPDIVFAYGYSDEYSFVFKKASRFYQRRASKILSLVASFFAAVYVTKWKEFFPHTKLEYAPSFASKVVSCASVEVLQAYLAWRQHDCHISNQYDTCLWMLVKSGKTLSETQEILKDTQKQQRNELLFQQFGINYKMLPVLFRQGSCLFKTKLEETVKHDENGKPVKRLRRRETLVHSENVAGRSFWNEHSSLHKDLGHFAKDIGKIEPDYVKSFQFESRLLPLTWVVVRIDGCHFHRFSEVHEFEKPNDEQALKLMNSCAVAVLEEFQDIAFAYGVSDEFSFVLKNKSELYKRQSSKIISAVVSFFTSTYMMRWGDFFPHKKLKYPPSFDGRAVCYPTSDILLDYLAWRQVDCHINNQYNTCFWMLVKSGKSKIQAQDYLKGTQTREKNELLSQQFGIEYNSLPVIFRMGSSVFRLKTQEGVTEENGEVSGKQVEAEVGVDYSNIIDQCFWQQHPHILSFS

SEQ ID NO: 581 - protein, 608 aa, Arabidopsis thaliana
MSCSYLLSGDASVVASRRWSDVSSRQRLFLPRQSLRQPSGSSFSRCVRLVANVNDHFSKQSLATRNCLASVFSADLGGSNGNNDNGNGGGGGGDGGGDNSDDSSFDLRYLCFLLLGLSCFFHFRLSAASAIAKDQNSDSNGDAVKETVWEVRGSKRKRLVPDFVKDEFVSEESAFELSSSLTPENLLAQCRNLLTQFLLPEGFPNSVTSDYLDYSLWRGVQGIASQISGVLATQSLLYAVGLGKGAIPTAAAINWVLKDGIGYLSKIMLSKYGRHFDVHPKGWRLFADLLENAAFGMEMLTPVFPQFFVMIGAAAGAGRSAAALIQAATRSCFNAGFASQRNFAEVIAKGEAQGMVSKSVGILLGIVVANCIGTSTSLALAAFGVVTTIHMYTNLKSYQCIQLRTLNPYRASLVFSEYLISGQAPLIKEVNDEEPLFPTVRFSNMKSPEKLQDFVLSSEAKAAAADIEERLQLGSKLSDVIHNKEEAIALFDLYRNEGYILTEHKGRFCVMLKESSTPQDMLRSLFQVNYLYWLEKNAGIEPASTYSDCKPGGRLHISLDYVRREFEHAKEDSESVGWVTEGLIARPLPTRIRLGHDRELLLSSPNSS

SEQ ID NO: 582 - protein, 224 aa, Solanum lycopersicum
MSSPLEIDTSFSHSNLLFLEDESSWSNTHDPFVDIDEYLPIIIPCNDEEIVVESSNASTTTTTTTTSKVASIQNIHHDQEEVTSIEKKHEDDQEKHYIGVRKRPWGKYASEIRDSTRNGIRVWLGTFDTAEEAALAYDQAALSMRGPWSLLNFPMEHVKKSLENIEYSCKDGLSPAAVLKATHKTRRVKHKRSSRKKKNENLENVFVFQDLGVELLEELLMTSS

SEQ ID NO: 583 - protein, 166 aa, Capsicum annum
MTPPPTSTVPPYVSLIVRILTLICLLISFIVIATNNQTVSTVAGDVKIKFKDFYAYRYLIATVIIGMAYTLLQIAFSISLLTTGNRIGGEGFLLFDFYGDKFISYFLVTGAAASFGMTQDLKQLEGSDNYSKFLNTSNAAASLCLIGFFFAVASSIFSSYNLPKRI

SEQ ID NO: 584 - protein, 2151 aa, Zea mays
MEGDERGVLLACVISGTLFTVFGSGSFWILWAVNWRPWRLYSWIFARKWPKVLQGPQLDILCGVLSLFAWIVVVSPIAILIGWGSWLIVILDRHIIGLAIIMAGTALLLAFYSIMLWWRTQWQSSRAVALLLLLGVALLCAYELCAVYVTAGAHASQQYSPSGFFFGVSAIALAINMLFICRMVFNGNGLDVDEYVRRAYKFAYSDCIEVGPVACLPEPPDPNELYPRQTSRASHLGLLYLGSLVVLLAYSVLYGLTARESRWLGGITSAAVIVLDWNIGACLYGFKLLQNRVLALFVAGISRLFLICFGIHYWYLGHCISYIFVASVLSGAAVSRHLSITDPSAARRDALQSTVIRLREGFRRKEQNSSSSSSDGCGSSIKRSSSIDAGHTGCTNEANRTAESCTADNLTRTGSSQEGINSDKSEESGRPSLGLRSSSCRSVVQEPEAGTSYFMDKVSDQNNTLVVCSSSGLDSQGYESSTSNSANQQLLDMNLALAFQDQLNNPRIASILKKKAKEGDLELTNLLQDKGLDPNFAVMLKEKNLDPTILALLQRSSLDADRDHRDNTDITIIDSNSVDNTLPNQISLSEELRLRGLEKWLKLSRLLLHHVAGTPERAWGLFSLVFILETIIVAIFRPKTITIINSSHQQFEFGFSVLLLSPVVCSIMAFLRSLQVEEMALTSKSRKYGFVAWLLSTSVGLSLSFLSKSSVLLGISLTVPLMAACLSIAVPIWMHNGYQFWVPQLSCGDQARDLRSPRIKGFILWICVVLFAGSVISLGAIISAKPLDDLKYKLFSARENNVTSPYTSSVYLGWAMSSGIALVVTAILPIVSWFATYRFSHSSAVCLMIFSVVLVAFCGTSYLEVVKSRDDQLPTKGDFLAALLPLACIPALLSLCCGMVKWKDDCWILSRGVYVFFSIGLLLLFGAIAAVIAVKPWTIGVSFLLVLFLMVVTIGVIHLWASNNFYLTRKQTSFVCFLALLLGLAAFLLGWHQDKAFAGASVGYFTFLSLLAGRALAVLLSPPIVVYSPRVLPVYVYDAHADCGKNVSAAFLVLYGIALATEGWGVVASLIIYPPFAGAAVSAITLVVAFGFAVSRPCLTLEMMEVAVRFLSKDTIVQAISRSATKTRNALSGTYSAPQRSASSAALLVGDPSAMRDKAGNFVLPRDDVMKLRDRLRNEERVAGSIFYKMQCRKGFRHEPPTNVDYRRDMCAHARVLALEEAIDTEWVYMWDKFGGYLLLLLGLTAKAERVQDEVRLRLFLDSIGFSDLSARKISKWKPEDRRQFEIIQESYLREKEMEEESLMQRREEEGRGKERRKALLEKEERKWKEIEASLIPSIPNAGSREAAAMAAAIRAVGGDSVLEDSFARERVSGIARRIRTAQLERRAQQTGISGAVCVLDDEPMISGKHCGQMDSSVCQSQKISFSVTAMIQSDSGPVCLFGTEFQKKVCWEILVAGSEQGIEAGQVGLRLITKGERQTTVAREWYIGATSITDGRWHTVTITIDADAGEATCYIDGGFDGYQNGLPLSIGSAIWEQGAEVWLGVRPPIDVDAFGRSDSDGVESKMHIMDVFLWGKCLSEEEAASLHAAIGMADLDMIDLSDDNWQWTDSPPRVDGWDSDPADVDLYDRDDVDWDGQYSSGRKRRSGRDFVMSVDSFARRHRKPRMETQEDINQRMRSVELAVKEALSARGDKQFTDQEFPPNDRSLFVDTQNPPSKLQVVSEWMRPDSIVKENGSDSRPCLFSGDANPSDVCQGRLGDCWFLSAVAVLTEVSRISEVIITPEYNEEGIYTVRFCIQGEWVPVVIDDWIPCESPGKPAFATSRKLNELWVSMVEKAYAKLHGSYEALEGGLVQDALVDLTGGAGEEIDLRSAQAQIDLASGRLWSQLLRFKQEGFLLGAGSPSGSDVHVSSSGIVQGHAYSVLQVREVDGHRLVQIRNPWANEVEWNGPWSDSSPEWTDRMKHKLKHVPQSKEGIFWMSWQDFQIHFRSIYVCRVYPREMRYSVNGQWRGYSAGGCQDYSSWHQNPQFRLRATGSDASLPIHVFITLTQGVGFSRTTPGFRNYQSSHDSQLFYIGLRILKTRGRRAAYNIFLHESVGGTDYVNSREISCEMVLDPDPKGYTIVPTTIHPGEEAPFVLSVFTKASIVLEAL

SEQ ID NO: 585 - protein, 668 aa, Glycine max
MAGSWARRSLIVLAIISFGCLFAISIAKEEATKLGTVIGIDLGTTYSCVGVYKNGHVEIIANNQGNRITPSWVAFTDSERLIGEAAKNLAAVNPERTIFDVKRLIGRKFEDKEVQRDMKLVPYKIVNKDGKPYIQVKIKDGETKVFSPEEISAMILTKMKETAEAFLGKKINDAVVTVPAYFNDAQRQATKDAGVIAGLNVARIINEPTAAAIAYGLDKKGGEKNILVFDLGGGTFDVSILTIDNGVFEVLATNGDTHLGGEDFGQRIMEYFIKLIKKKHGKDISKDNRALGKLRREAERAKRALSSQHQVRVEIESLFDGVDFSEPLTRARFEELNNDLFRKTMGPVKKAMEDAGLQKSQIDEIVLVGGSTRIPKVQQLLKDYFDGKEPNKGVNPDEAVAYGAAVQEGILSGEGGEETKDILLLDVAPLTLGIETVGGVMTKLIPRNTVIPTKKSQVFTTYQDQQTTVSIQVFEGERSLTKDCRLLGKFDLSGIPPAPRGTAQIEVTFEVDANGILNVKAEDKGTGKSEKITITNEKGRLSQEEIERMVREEKDFAEEEKKVKERIDARNSLETYVYNMKNQVSDKDKLADKLESDEKEKIETAVKEALEWLDDNQSMEKEDYEEKLKEVEAVCNPIISAVYQRSGGAPGGGGASGEEDEDDSHDEL

SEQ ID NO: 586 - protein, 342 aa, Triticum aestvum
MDRYEVVRDIGSGNFGVAKLVRDVRTKEHFAVKFIERGHKIDEHVQREIMNHRSLKHPNIIRFKEVVLTQTHLAIVMEYASGGELFQRICNAGRFSEDEGRFFFQQLISGVSYCHSMQVCHRDLKLENTLLDGSVAPRLKICDFGYSKSSVLHSQPKSTVGTPAYIAPEVLSRREYDGKVADVWSCGVTLYVMLVGAYPFEDPDEPRNFRKTITRILSVQYSVPDYVRVSMDCIHLLSRIFVGNPQQRITIPEIKNHPWFLKRLPVEMTDEYQRSMHLADMNTPSQSLEEAMAIIQEAQKPGDNALGIAGQVACLGSMDLDDIDFDIDDIDVESSGDFVCPL

SEQ ID NO: 587 - protein, 393 aa, Arabidopsis thaliana
MSSTSFTDLLGSSGVDCYEDDEDLRVSGSSFGGYYPERTGSGLPKFKTAQPPPLPISQSSHNFTFSDYLDSPLLLSSSHSLISPTTGTFPLQGFNGTTNNHSDFPWQLQSQPSNASSALQETYGVQDHEKKQEMIPNEIATQNNNQSFGTERQIKIPAYMVSRNSNDGYGWRKYGQKQVKKSENPRSYFKCTYPDCVSKKIVETASDGQITEIIYKGGHNHPKPEFTKRPSQSSLPSSVNGRRLFNPASVVSEPHDQSENSSISFDYSDLEQKSFKSEYGEIDEEEEQPEMKRMKREGEDEGMSIEVSKGVKEPRVVVQTISDIDVLIDGFRWRKYGQKVVKGNTNPRSYYKCTFQGCGVKKQVERSAADERAVLTTYEGRHNHDIPTALRRS

SEQ ID NO: 588 - protein, 519 aa, Arabidopsis thaliana
MAASFLTMDNSRTRQNMNGSANWSQQSGRTSTSSLEDLEIPKFRSFAPSSISISPSLVSPSTCFSPSLFLDSPAFVSSSANVLASPTTGALITNVTNQKGINEGDKSNNNNFNLFDFSFHTQSSGVSAPTTTTTTTTTTTTTNSSIFQSQEQQKKNQSEQWSQTETRPNNQAVSYNGREQRKGEDGYNWRKYGQKQVKGSENPRSYYKCTFPNCPTKKKVERSLEGQITEIVYKGSHNHPKPQSTRRSSSSSSTFHSAVYNASLDHNRQASSDQPNSNNSFHQSDSFGMQQEDNTTSDSVGDDEFEQGSSIVSRDEEDCGSEPEAKRWKGDNETNGGNGGGSKTVREPRIVVQTTSDIDILDDGYRWRKYGQKVVKGNPNPRSYYKCTTIGCPVRKHVERASHDMRAVITTYEGKHNHDVPAARGSGYATNRAPQDSSSVPIRPAAIAGHSNYTTSSQAPYTLQMLHNNNTNTGPFGYAMNNNNNNSNLQTQQNFVGGGFSRAKEEPNEETSFFDSFMP

SEQ ID NO: 589 - protein, 223 aa, Pisum sativum
MKLKNGLLLFFMFLDCIFFKVESKCVIGCDIALASYYVMPLVQLSNITTFMQSKLVTNSFEVIVRYNRDIVFSNDNLFSYFRVNIPFPCECIGGEFLGHVFEYTANEGDTYDLIANTYYASLTTVEVLKKYNSYDPNHIPVKAKVNVTVNCSCGNSQISKDYGLFITYPLRPRDTLEKIARHSNLDEGVIQSYNLGVNFSKGSGVVFFPGRDKNGEYVPLYPR

SEQ ID NO: 590 - protein, 924 aa, Medicago truncatula
MELQVIRIFRLVVAFVLCLCIFIRSASSATKGFESIACCADSNYTDPKTTLTYTTDHIWFSDKRSCRQIPEILFSHRSNKNVRKFEIYEGKRCYNLPTVKDQVYLIRGIFPFDSLNSSFYVSIGVTELGELRSSRLEDLEIEGVFRATKDYIDFCLLKEDVNPFISQIELRPLPEEYLHGFGTSVLKLISRNNLGDTNDDIRFPDDQNDRIWKRKETSTPTSALPLSFNVSNVDLKDSVTPPLQVLQTALTHPERLEFVHDGLETDDYEYSVFLHFLELNGTVRAGQRVFDIYLNNEIKKEKFDVLAGGSKNSYTALNISANGSLNITLVKASGSEFGPLLNAYEILQARSWIEETNQKDLEVIQKMREELLLHNQENEALESWSGDPCMIFPWKGITCDDSTGSSIITKLDLSSNNLKGAIPSIVTKMTNLQILNLSHNQFDMLFPSFPPSSLLISLDLSYNDLSGWLPESIISLPHLKSLYFGCNPSMSDEDTTKLNSSLINTDYGRCKAKKPKFGQVFVIGAITSGSLLITLAVGILFFCRYRHKSITLEGFGKTYPMATNIIFSLPSKDDFFIKSVSVKPFTLEYIEQATEQYKTLIGEGGFGSVYRGTLDDGQEVAVKVRSSTSTQGTREFDNELNLLSAIQHENLVPLLGYCNEYDQQILVYPFMSNGSLLDRLYGEASKRKILDWPTRLSIALGAARGLAYLHTFPGRSVIHRDVKSSNILLDQSMCAKVADFGFSKYAPQEGDSYVSLEVRGTAGYLDPEYYKTQQLSEKSDVFSFGVVLLEIVSGREPLNIKRPRIEWSLVEWAKPYIRASKVDEIVDPGIKGGYHAEALWRVVEVALQCLEPYSTYRPCMVDIVRELEDALIIENNASEYMKSIDSLGGSNRYSIVMDKRALPSTTSTAESTITTQTLSHPQPR

SEQ ID NO: 591 - protein, 584 aa, Phaseolus vulgaris
MCGILAVLGCSDHSRAKRVRVLELSRRLKHRGPDWSGLHQHGDCFLAHQRLAIVDPASGDQPLFNEDKSVIVTVNGEIYNHEELRKQLPGHKFRTGSDCDVIAHLYEEHGEGFVDMLDGIFSFVLLDTRDNSFIVARDAIGVTSLYIGWGLDGSVWISSEMKGLNDDCEHFECFPPGHLYSSKDRGFRRWYNPPWFSEAIPSAPYDPLVLRRAFEQAVIKRLMTDVPFGVLLSGGLDSSLVASITSRYLANTKAAEQWGSKLHSFCVGLEGSPDLKAAKEVADYLGTVHHEFHFTVQDGIDAIEDVIYHVETYDVTTIRASTPMFLMSRKIKSLGVKWVISGEGSDEIFGGYLYFHKAPNKEEFHRETCRKIKALHQYDCLRANKSTFAWGLEARVPFLDKEFINAAMNIDPEHKMIKRDEGRIEKWILRRAFDDEDQPYLPKHILYRQKEQFSDGVGYSWIDGLKAHAAKHVTDKMMLNAGNIYPHNTPVTKEAYYYRMIFERFFPQNSARLTVPGGASVACSTAKAVEWDAAWSNNLDPSGRAALGVHISAYENQNNLANKGVEIEKIIPMDAAPLGVAIQS

SEQ ID NO: 592 - protein, 614 aa, Oryza sativa
MAPAAVAAAEAGSKAAAVAGKAVAACERDAEKLEFIEEMTRGFDAVQERVLAAILARNNGAEYLRRHGMEGRTDREAFKARVPVVTYEDLRPEIERIANGDRSNIISSHPITEFLTSSGTSAGERKLMPTIEDELDRRQMLYSLLMPVMNLYVPGLDKGKGLYFLFIKSETKTPGGLPARPVLTSYYKSDHFKHRPFDPYNVYTSPTAAILCTDAFQSMYAQMLCGLVARAEVLRVGAVFASGLLRAIRFLQLHWRELAHDIRTGTLSAKVTEPSIRDAVAEVLAAPDAELAAFVEAECGKDKWEGIITRMWPNTKYLDVIVTGAMAQYIPTLKFYSGGLPMACTMYASSECYFGLNLRPMCDPSEVSYTIMPNMGYFELMPHDPDAPPLPRDAPPPRLVDLADAEVGREYELVITTYAGLCRYRVGDILQVTGFHNAAPQFRFVRRKNVLLSIDSDKTDEAELQAAVERASALLSPYGASIVEYTSQADATTIPGHYVVYWELMVREGGAWPPPAEEEGRGVFERCCLEMEEALNAVYRQGRNGEAIGPLEIRVVRAGTFEEVMDYAISRGASINQYKAPRCVSFGPIIELLNSRVISKHFSPACPKYSPHKK

SEQ ID NO: 593 - protein, 575 aa, Vitis vinifera
MDNSVAPMVITDDGLQETAISSKTNPSKGRWRAAIFIIFVEMAERFAYYGVAGNLFTYLTNVLGEHTATAAKNVNTWVGVSAIFPLLGGFIADSYLGRFKTIIASSVIYLAGLLLMTLSVSVQSLRHHRAVFFTALYILSIGEGGHKPCVQTFAADQFDEDTVEEKKDKSSFFNWWYVGIVVGSTTAILVVIYVQDNVGWGLGFGMLAAAVAAALLLFLIGIRSYRRQRPVGSPLTRVMQVLVATARKLRVNETRYGRGVCLEDEGDDGVEEGGRRGRSLAPTNQFRFLDKATIIDDIDASTKVRNHWRLCPATQVEEVKLLFSLFPIWLSCLTFATVIAQMSTYFTKQGSTLERSIGSHFSIPPASLQVCTGLTILVSVGLYDRVLVPVARKFTGLPSGITMLQRIGTGIFFSMLTMVVAALVETKRISVAIDHGLTDSPRTTLPMKIWWLLPQYMLTGMCDVFTIVGMQELFYDQMPEEMRSIGAALYISTVGVGSLMSSAAISIVQAITSRAGGKWLGDNLNRAHLNYFYSVLAGCSALNLIVYIWVAKRFVYKKTGYDDPKGEQKKAAELA

SEQ ID NO: 594 - protein, 185 aa, Oryza sativa
MARLMSSALIRGLVRSSCSPTVAAVAQPTIHQFRNYSSGLGGDSTATGDSSSTRVAADPDTHQDFQPTTKSSNMSFDDIVSQDIKENPVLIYMKGYPDAPRCGFSALAVRVLKQYDVPISARDILGDLKLKESVKAHTNWPTFPQIFIKGEFVGGSDIILDMHQKGQLKDVLGDIAQKREQNESS

SEQ ID NO: 595 - protein, 358 aa, Oryza sativa
MAQQNGASSTSSAEDALNKRLEQLVNSHPVFLFMKGTPEQPRCGFSRKVVDVLKQEGVEFGSFDILTDNDVREGMKKFSNWPTFPQLYCKGELLGGCDIVIAMHESGELKDVFKEHNIPLQPQGSKNEEAVKAKPDTEKSGAVSEPALLTAAQKERLESLVNFSTVMAFIKGTPEEPKCGFSGKLVHILKQEKIPFSSFDILTDDEVRQGLKLLSNWPSYPQLYINGELVGGSDIVMEMHKSGELKKVLSEKGIVAKESLEDRLKALISSAPVMLFMKGTPDAPRCGFSSKVVNALKQAGVSFGAFDILSDEEVRQGLKTYSNWPTFPQLYYKSELIGGCDIVLELEKSGELKSTLSE

SEQ ID NO: 596 - protein, 102 aa, Arabidopsis thaliana
MDKVMRMSSEKGVVIFTKSSCCLCYAVQILFRDLRVQPTIHEIDNDPDCREIEKALLRLGCSTAVPAVFVGGKLVGSTNEVMSLHLSGSLVPLIKPYQSILY

SEQ ID NO: 597 - protein, 681 aa, Arabidopsis thaliana
MASISINCFFTPQALARPSRTRKIFAKPDKVSGRTRSPRKTKLQREVELKSRGGDKLQPVSDAGGEATTYTRLPPREDYYDVSLLSSSYLKVSEEVKLSESNVARVEEKIETLREIEEEEKEKEVKSYDDDDIWGNYRRLDVFEGSSRSIDEDDEDWEDEVFEYGDETDAEKDDSEGSELKDGEVLCFSGEEEEDEIGVKEKGVPAVMRCFDRAKIYVRAGDGGNGVVAFRREKFVPFGGPSGGDGGRGGNVYVEVDGSMNSLLPFRKSVHFRAGRGEHGRGKMQSGAKGDNVVVKVAPGTVVRQAREVGSEVEGEEGEEKEVLLELLHPGQRALLLPGGRGGRGNASFKSGMNKVPRIAENGEEGPEMWLDLELKLVADVGIVGAPNAGKSTLLSVISAAQPTIANYPFTTLLPNLGVVSFDYDSTMVVADLPGLLEGAHRGFGLGHEFLRHTERCSALVHVVDGSAPQPELEFEAVRLELELFSPEIAEKPYVVAYNKMDLPDAYEKWPMFQETLRARGIEPFCMSAVQREGTHEVISSVYELLKKYRAANAEPKALFDQANENLDHVAKKIDKERRAAINEFEVFRDSGTRAWHVVGAGLQRFVQMTNWRYMDSDKRFQHVLDACGVNKSLKNMGVKEGDTVIVGEMELIWHDSANGSSRPTDSNKTSTDSVRWPQWK

SEQ ID NO: 598 - protein, 308 aa, Arabidopsis thaliana
MTNAQELGQEGFMWGISNSDDSGGGCKRIEKEPLPSHPSHPSPEIQTTTVKKGKKRTKRNDKNHEEESPDHEIHIWTERERRKKMRDMFSKLHALLPQLPPKADKSTIVDEAVSSIKSLEQTLQKLEMQKLEKLQYSSASTNTTPTTTFAYAPSSSSSPTALLTPISNHPIDATATDSYPRAAFLADQVSSSSAAAANLPYPCNDPIVNFDTWSSRNVVLTICGNEAFFNLCVPKHKPGVFTSVCYLFEKYNMEVLFANVSSNVFWSTYVIQAQVNPSCENQLLGNGLGVVDVFKQVSQELVLYFSSL

SEQ ID NO: 599 - protein, 58 aa, Zea mays
MAGPVAAVTEAWDKLTVFLYSQLYDERNWAKNKKLAKALGVFAGSILFMRTCGDMVAI

SEQ ID NO: 600 - protein, 768 aa, Arabidopsis thaliana
MSFTRWEVFFGLSVLALTMPFSAGVTNLRDVSAINNLYITLGAPSLHHWLAFGGDPCGEKWQGVVCDSSNITEIRIPGMKVGGGLSDTLADFSSIQVMDFSSNHISGTIPQALPSSIRNLSLSSNRFTGNIPFTLSFLSDLSELSLGSNLLSGEIPDYFQQLSKLTKLDLSSNILEGHLPSSMGDLASLKILYLQDNKLTGTLDVIEDLFLTDLNVENNLFSGPIPPNLLKIPNFKKDGTPFNTSIITPPPPPVVDPPPATHRAPPVPRIPPVSGVPPAPFAPFAPLQPQQHPPPSPPLVWSPPSSDNGGGDPWNSVSGQPTLQISPPSGSGSGKFWSTQRIILVVSSVAIIVLVSGLCVTLWRCCRSKIYNRYYSGARKDLQRPYFNKPPSQPTPTMGKVSREPMVKPFDGYGAGDRKYGYPMPQRAEESRRAMPPTSYYNKDVNTPQKPLQQPPRQFQSNDTASKRAAHFPPGLNSSSSATVFTIASLQQYTNNFSEENIIGEGSIGNVYRAELRHGKFLAVKKLSNTINRTQSDGEFLNLVSNVLKLKRGHILELLGYCNEFGQRLLVYEYCPNGSLQDALHLDRKLHKKLTWNVRINIALGASKALQFLHEVCQPPVVHQNFKSSKVLLDGKLSVRVADSGLAYMLPPRPTSQMAGYAAPEVEYGSYTCQSDVFSLGVVMLELLTGRRPFDRTRLRGHQTLAQWAIPRLHDIDALTRMVDPSLHGAYPMKSLSRFADIISRSLQMEPGFRPPISEIVQDLQHMI

SEQ ID NO: 601 - protein, 758 aa, Arabidopsis thaliana
MIFKIEDVTVYFPYDNIYPEQYEYMVELKRALDAKGHCLLEMPTGTGKTIALLSLITSYRLSRPDSPIKLVYCTRTVHEMEKTLGELKLLHDYQVRHLGTQAKILALGLSSRKNLCVNTKVLAAENRDSVDAACRKRTASWVRALSTENPNVELCDFFENYEKAAENALLPPGVYTLEDLRAFGKNRGWCPYFLARHMIQFANVIVYSYQYLLDPKVAGFISKELQKESVVVFDEAHNIDNVCIEALSVSVRRVTLEGANRNLNKIRQEIDRFKATDAGRLRAEYNRLVEGLALRGDLSGGDQWLANPALPHDILKEAVPGNIRRAEHFVHVLRRLLQYLGVRLDTENVEKESPVSFVSSLNSQAGIEQKTLKFCYDRLQSLMLTLEITDTDEFLPIQTVCDFATLVGTYARGFSIIIEPYDERMPHIPDPILQLSCHDASLAIKPVFDRFQSVVITSGTLSPIDLYPRLLNFTPVVSRSFKMSMTRDCICPMVLTRGSDQLPVSTKFDMRSDPGVVRNYGKLLVEMVSIVPDGVVCFFVSYSYMDGIIATWNETGILKEIMQQKLVFIETQDVVETTLALDNYRRACDCGRGAVFFSVARGKVAEGIDFDRHYGRLVVMYGVPFQYTLSKILRARLEYLHDTFQIKEGDFLTFDALRQAAQCVGRVIRSKADYGMMIFADKRYSRHDKRSKLPGWILSHLRDAHLNLSTDMAIHIAREFLRKMAQPYDKAGTMGRKTLLTQEDLEKMAETGVQDMAY

SEQ ID NO: 602 - protein, 222 aa, Arabidopsis thaliana
MSSTTTDSTELQNLIKLFQNCQTHPRQHFPAKSSAVLVCLYQEQREDKNELRVILTKRSTTLSSHPGEVALPGGKRDQEDKDDIATALREAREEIGLDPSLVTIISVLEPFVNKKGMSVAPVIGFLHDKKAFKQLPNPAEVEEIFDVPLEMFLKDRNRRAEEREHEGERYLLQYFDYYSEDKERSFIIWALTAGILIRVASIVYQRLPEFQERKPSFWNQPN

SEQ ID NO: 603 - protein, 437 aa, Arabidopsis thaliana
MATNGSSEHLLPETTRPSAIINKQQPEFPASRFTFMSLVLWFDQSNFGTALLSWSVFFLLVVIVPLISHFLLVCSDCDFHHRRPYDVIVQLSLSIFAGISFVSLSIWSRKFGMRRFLFLDKLWDVSDKVRIEYEAEIQRSLKRLMIFVLPSLTLEATYRIWWYISGFNQIPYIINPILSHVVACTLQLSSWLYRNSLFIIVCILYKITCHLQTLRLDDFARCFASEITDVRSALGEHQKIRRNLRIVSHRFRRFILLSLILVTATQFMALLTTTRASVAVNIYEVGELALCSLSLVTGVFICLRSATKITHKAQSVTSLAAKWNVCATVDSFDHLDGETPTGSIIESQVSLRGNAIETSDDEEGEGDDDLDNTKIHPIYANTISYQKRQALVTYLENNKAGITVYGFLVDRSWLNTIFGIELALLLWLLNKTIVNIP

SEQ ID NO: 604 - protein, 219 aa, Capsicum annuum
MQKSTATAFENSSSSGNGSNDAGDFECNICFELAQDPIVTLCGHLYCWPCLYRWLRLHSQSHDCPVCKALIQEEKLVPLYGRGRTSTDPRSKPVPGVEIPRRPAGQRPETAPPPESNTFPNSGFGLMGGLFPGATASFGNFTMSAGFGGFIPSLLSFQFHGFPGPTAFGTTPNYQYGYPPAYHGANVQNAAHPSQGQADNNLKFMFLLVGFLVFLYLFG

SEQ ID NO: 605 - protein, 225 aa, Glycine max
MVRGKTQIKRIENATSRQVTFSKRRNGLLKKAFELSVLCDAEVALIIFSSSGKLYEFASSSIQCSIERYRRHTKHDNPTTFRSVEQNMQHLKQEAANMMKKIGLLEAAKRKFLGEGLGACSIEELQWIEQQLERSLSNVRTRKIQVFKEQIEQLKEKEKVLLDENVKLTENGRLSEKHGINLQTETKKQNVNQPQYNAGSPSSDVETELIIGLPDTRTRRIVHQV

SEQ ID NO: 606 - protein, 221 aa, Gossypium hirsutum
MVRGKTQMKRIENPTSRQVTFSKRRNGLLKKAFELSVLCDVEVALIIFSPRGKPYEFASSSMQETIARYLRHTKDNRVKPTEQSMQWQHLKTEAEKMLKKIELLEVSRRKLLGENLGSCTLEELQQIEQQLERSVTRVRARKAKVFKDQIEKLKEKEEVLAAENAKLCEKYGLLPGKGSKEVNENEEANDESNPSSDVETELFIGLPEGRAKRIVQPNSTD

SEQ ID NO: 607 - protein, 478 aa, Glycine max
MSIALGNLFDLESQESGGSPLFMSPAPSTDPQPISGEKNGGDGGRIPVEEWLPITESRKGNVYTATFHLLCSGIGLQVILLPAAFAALGWVWGTIILTVGFVWKLYTTWLLVQLHEAVPGIRISRYVRLAIASFGVKLGKLLGIFPVMYLSGGACTILVITGGKSIQQLLQIMSDDNTAPLTSVQCFLVFSCIAMIMSQFPNLNSLFGVSLIGAFMGIAYCTVIWILPVASDSQRTQVSVSYATMDKSFVHIFNAIGLIALVYRGNNLVLEIQGTLPSDSKNPSCKTMWRAVMISHALVAICMFPLTFAVYWAYGDKIPATGGPVGNYLKLYTQEHSKRAACFIHLTFIFSCLCSYPINLMPACDNIEMVYITKKKKPASIIVRMMLRVFLSLVCFTIAVGFPFLPYLAVLIGAIALLVTFTYPCFMWISIKKPQRKSPMWLFNVLVGCLGASLSVLLLVASAMRLAQKGLHANFFRP

SEQ ID NO: 608 - protein, 467 aa, Glycine max
MDIKEDDESRVITPTELQLHDSVTARTGTLWTAVAHIITGVIGAGVLSLAWATAELGWIAGPAALIAFAGVTLLSAFLLSDCYRFPDPNNGPLRLNSYSQAVKLYLGKKNEIVCGVVVYISLFGCGIAYTIVIATCSRAIMKSNCYHRNGHNATCSYGDNNNYFMVLFGLTQIFMSQIPNFHNMVWLSLVAAIMSFTYSFIGIGLALGKIIENRKIEGSIRGIPAENRGEKVWIVFQALGNIAFSYPFSIILLEIQDTLRSPPAEKQTMKKASTVAVFIQTFFFFCCGCFGYAAFGDSTPGNLLTGFGFYEPFWLVDFANACIVLHLVGGYQVYSQPIFAAAERSLTKKYPENKFIARFYGFKLPLLRGETVRLNPMRMCLRTMYVLITTGVAVMFPYFNEVLGVVGALAFWPLAVYFPVEMCILQKKIRSWTRPWLLLRGFSFVCLLVCLLSLVGSIYGLVGAKFG

SEQ ID NO: 609 - protein, 30 aa, Glycine max
MRRDPLTPGVTISILSTYMLKQLLMNVKFY

SEQ ID NO: 610 - protein, 57 aa, Glycine max
MPPSPEKVTLQRQQQLPVTVPISDDANDNNKAQLVIIGDRKRDDVEARTTTVNLCGP

SEQ ID NO: 611 - protein, 136 aa, Glycine max
MENTQDFSPPHMDASRPSLGFPLGTALLLIIIFSLSGIFSCCYHWDKHRSLRRSLANGRPSADIESNPYKPKPPFPEMKKPQNLSVPVLMPGDNTPKFIALPCPCAPPRPEKLTVDVQTPPQSPPVKPARFPVPLY

SEQ ID NO: 612 - protein, 243 aa, Lycopersicon esculentum
MDKLINQENNIDKEIMELRRGPWTVEEDLVLMNYISHHGEGRWNSLSRCAGLKRTGKSCRLRWLNYLRPNVRHGNITLEEQLLILQLHSRWGNRWSKITQHLPGRTDNEIKNYWRTRVQKHAKQLKCDVNSRQFQDTLRYLWIPRLVERIEASKISNYNCINEAQQSIMRTHINNNFSTSVTLENSRVATSSKNSNQDYNQVNQSDQLWYEDYQAMDQQNNIELWMDNEDVFNNLCNIEDIWS

SEQ ID NO: 613 - protein, 419 aa, Triticum aestivum
MSAAEGAVVFSEEKEALVLKSWAIMKKDSANLGLRFFLKIFEIAPSARQMFPFLRDSDVPLETNPKLKTHAVSVFVMTCEAAAQLRKAGKITVRETTLKRLGGTHLKYGVADGHFEVTRFALLETIKEALPADMWGPEMRNAWGEAYDQLVAAIKQEMKPSENENASKAGGWEGTRDFRIVAKTPRSALITSFELEPVDGGAVAEYRPGQYLGVWLKPEGFPHQEIRQYSLTRKPDGKGYRIAVKREEGGQVSNWLHNHANVGDVVKLVAPAGDFFMAVADDTPVTLISAGVGQTPMLAMLDTLAKAGHTAQVNWFHAAENGDVHAFADEVKELGQSLPRFTAHTWYRQPSEADRAKGQFDSEGLMDLSKLEGAFSDPTMQFYLCGPVGFMQFTAKQLVDLGVKQENIHYECFGPHKVL

SEQ ID NO: 614 - protein, 402 aa, Physcomitrella patens
MLNEKTIQIIKSTVPVLEVHGTAITKRFYERMFTQHPELLHIFNHANQKQGRQQTALANAVYAAAVHIDNLAEILPVVKQIGHKHRSLGIKPEHYPIVGENLLAAIKEVLGDAGTDEILGAWAEAYGVIADAFIGIEAEMYEQSREQVGGWADFRPFIVEKKVQESDVITSFYLVPQDGQALATFEPGQYISVKLEIPGERYTHIRQYSLSDAPGRPYYRISVKREEANAEKPAGIVSTYLHEGIREGDVLQLSAPAGDFTLEQSEAPVVLISGGVGLTPMFSMLASLAENQERPVTFIHAVQNGQKHALRAEVERLAKDNPQISAYWCYSEPTEQDREAGAFHKEGYLDAEWLEQVAPEKNASYYFCGPVPFMSAVKKALTERGISADRMHYEFFGPAASL

SEQ ID NO: 615 - protein, 243 aa, Arabidopsis thaliana
MNISRTEFANCKTLINHKEEVEEVEKKMEIEIRRGPWTVEEDMKLVSYISLHGEGRWNSLSRSAGLNRTGKSCRLRWLNYLRPDIRRGDISLQEQFIILELHSRWGNRWSKIAQHLPGRTDNEIKNYWRTRVQKHAKLLKCDVNSKQFKDTIKHLWMPRLIERIAATQSVQFTSNHYSPENSSVATATSSTSSSEAVRSSFYGGDQVEFGTLDHMTNGGYWFNGGDTFETLCSFDELNKWLIQ

SEQ ID NO: 616 - protein, 202 aa, Arabidopsis thaliana
MAKQYLFLILSISYLLSLELTAATAASQTGASKKAINFIQSSCKTTTYPALCVHSLSVYANDIQTSPKRLAETAIAVTLSRAQSTKLFVSRLTRMKGLKKREVEAIKDCVEEMNDTVDRLTRSVQELKLCGSAKDQDQFAYHMSNAQTWTSAALTDENTCSDGFSGRVMDGRIKNSVRARIMNVGHETSNALSLINAFAKTY

SEQ ID NO: 617 - protein, 394 aa, Arabidopsis thaliana
MASIVQPSPTFPALNLRRSSLIRPPSSVRFPLKCNAADPYKFDGGNSAGFHLLTGDTVPASFSRTRLEDSIYQNTTRLRIFSGTANPILAQEISCYLGLDLGKIKIKRFADGEIYVQLQESVRGCDVFLVQPTCPPANENLMELLVMIDACRRASAKTITAVIPYFGYARADRKTQGRESIAAKLVANLITQSGADRVLACDLHSGQSMGYFDIPVDHVYGQPVILDYLASKAISSEDLVVVSPDVGGVARARAFAKKLSDAPLAIVDKRRHGHNVAEVMNLIGDVKGKVAIMVDDMIDTAGTISKGAALLHQEGAREVYACTTHAVFSPPAISRLSSGLFQEVIITNTIPLSEKNYFPQLTVLSVANLLGETIWRVHDDCSGAIEPFSTLGID

SEQ ID NO: 618 - protein, 226 aa, Arabidopsis thaliana
MSSSDSVNNGVNSRMYFRNPSFSNVILNDNWSDLPLSVDDSQDMAIYNTLRDAVSSGWTPSVPPVTSPAEENKPPATKASGSHAPRQKGMQYRGVRRRPWGKFAAEIRDPKKNGARVWLGTYETPEDAAVAYDRAAFQLRGSKAKLNFPHLIGSCKYEPVRIRPRRRSPEPSVSDQLTSEQKRESHVDDGESSLVVPELDFTVDQFYFDGSLLMDQSECSYSDNRI

SEQ ID NO: 619 - protein, 328 aa, Arabidopsis thaliana
MPTLYKKAGFMGERDDGLGLSLSLGNSQQKEPSLRLNLMPLTTSSSSSSFQHMHNQNNNSHPQKIHNISWTHLFQSSGIKRTTAERNSDAGSFLRGFNVNRAQSSVAVVDLEEEAAVVSSPNSAVSSLSGNKRDLAVARGGDENEAERASCSRGGGSGGSDDEDGGNGDGSRKKLRLSKDQALVLEETFKEHSTLNPKQKLALAKQLNLRARQVEVWFQNRRARTKLKQTEVDCEYLKRCCDNLTEENRRLQKEVSELRALKLSPHLYMHMTPPTTLTMCPSCERVSSSAATVTAAPSTTTTPTVVGRPSPQRLTPWTAISLQQKSGR

SEQ ID NO: 620 - protein, 936 aa, Arabidopsis thaliana
MEGGRGGGDGNFLPNSNFGVFSDSAMDMDFMDELLFDGCWLETTDGKSLKQTMGQQVSDSTTMNDNNNNSYLYGYQYAENLSQDHISNEETGRNSAQAEKFLLEESEGGRRYWIAPRTSQGPSSSVKERLVQAIEGLNEEVQDKDFLIQIWLPIQQEGKNFLTTSEQPHFFNPKYSSLKRYRDVSVAYNFLADEDSKESVGLPGRVFLKKLPEWTPDVRFFRSEEYPRIKEAEQCDVRGSLALPVFERGSGTCLGVVEIVTTTQKMNYRPELDNICKALESVNLRSSRSLNPPSREFLQVYNEFYYAALPEVSEFLTLVCRVYDLPLALTWAPCARQGKVGSRHSDENFSECVSTVDDACIVPDHQSRHFLEACSEHHLLQGEGIVGKAFNATKLFFVPEVTTFSKTNYPLAHHAKISGLHAALAVPLKNKFNSSVEFVLEFFFPKACLDTEAQQDMLKSLSATLQQDFRSLNLFIDKELELEVVFPVREEVVFAENPLINAGTGEDMKPLPLEEISQEDSSWISHMIKANEKGKGVSLSWEYQKEEPKEEFMLTSGWDNNQIGSGHNNFLSEAEQFQKVTNSGLRIDMDPSFESASFGVGQTLLGSRRPGEKRRTKTEKTIGLEVLRQYFAGSLKDAAKSIGVCPTTLKRICRQHGITRWPSRKIKKVGHSLKKLQLVIDSVQGVQGSIQLDSFYTSFPELSSPHMSGTGTSFKNPNAQTENGVSAQGTAAAPKSPPSSSCSHSSGSSTCCSTGANQSTNTGTTSNTVTTLMAENASAILKRARSEVRLHTMNQDETKSLSRTLSHKTFSEHPLFENPPRLPENSSRKLKAGGASKVKATFGEAKVRFTLLPTWGFRELQHEIARRFNIDNIAPFDLKYLDDDKEWVLLTCEADLEECIDIYRSSQSRTIKISVHEASQVKLGGSFGSIGLGPSL

SEQ ID NO: 621 - protein, 270 aa, Arabidopsis thaliana
MASLRCFRELSRRATTVFSINQTRSISSFHGIEFSGTSISHGTVIPNRSLTRNLPWYSHWYRSQDRCFSSNTKDTDEDEESSEGEDDDEEEGEDFEDSADMEVEREYSPAEKVEEAEEIGYKVMGPLKPSERLFKPYEPVFAIVQIGSHQFKVSNGDSIFTEKLKFCDINDKLELTKVLLLGSASQTIIGRPILPDATVHAVVEEHALDEKVLIFKKKRRKNYRRTRGHRQELTKLRITDIQGIEKPEPKIVHKPSKEAVTEQTKAELVA

SEQ ID NO: 622 - protein, 288 aa, Arabidopsis thaliana
MSKKSTESDAGNTEKQWSLADFEIGRPLGKGKFGRVYLAREAKSKYIVALKVIFKEQIEKYKIHHQLRREMEIQTSLRHPNILRLFGWFHDNERIFLILEYAHGGELYGVLKQNGHLTEQQAATYIASLSQALAYCHGKCVIHRDIKPENLLLDHEGRLKIADFGWSVQSSNKRKTMCGTLDYLAPEMVENRDHDYAVDNWTLGILCYEFLYGNPPFEAESQKDTFKRILKIDLSFPLTPNVSEEAKNLISQLLVKDPSKRLSIEKIMQHPWIVKNADPKGVCASIDI

SEQ ID NO: 623 - protein, 214 aa, Arabidopsis thaliana; identical to SEQ ID NO: 530

SEQ ID NO: 624 - protein, 205 aa, Arabidopsis thaliana
MKPSLHQPLFFFFLATVLPLILTVHSQSDDSDFIRTSCNTTLYPDLCFSSLSSFSSSVHNDPALLARAAISITLTKTLDLASYLANITTLQPESQDDGAHHPTAAAVFHDCFDNLKDAVEEMKGSMKQMRELVSTGSLESFRFQMSNVQTWLSAALTDEETCTDGFKDIHDEPRKDDICARVDDVKKMTSNALALVNRCVDKAIH

SEQ ID NO: 625 - protein, 871 aa, Arabidopsis thaliana
  misc_feature (24)..(24): Xaa can be any naturally occurring amino acid
  unsure (1)..(871): unsure at all Xaa locations
MERHCLFFVIFSLILHLVQAQDPXRFINLDCGLSIQGSPYKESSTGLTYTSDDGFVQSGKIGKITKELESLYKKPERTLRYFPDGVRNCFSLNVTRGTKYLIKPTFLYGNYDGRNVIPDFDLYIGPNMWITVNTDNTIKEILHVSKSNTLQVCLVKTGTSIPYINTLELRPLADDIYTNESGSLNYLFRVYYSNLKGYIEYPDDVHDRIWKQILPYQDWQILTTNLQINVSNDYDLPQRVMKTAVTPIKASTTTMEFPWNLEPPTSQFYLFLHFAELQSLQANETREFNVVLNGNVTFKSYSPKFLEMQTVYSTAPKQCDGGKCLLQLVKTSRSTLPPLINAMEAYTVLDFPQIETNVDEVIAIKNIQSTYGLSKTTWQGDPCVPKKFLWDGLNCNNSDDSTPPIITSLNLSSSGLTGIIVLTIQNLANLQELDLSNNNLSGGVPEFLADMKSLLVINLSGNNLSGVVPQKLIEKKMLKLNIEGNPKLNCTVESCVNKDEEGGRQIKSMTIPIVASIGSVVAFTVALMIFCVVRKNNPSNDEAPTSCMLPADSRSSEPTIVTKNKKFTYAEVLTMTNNFQKILGKGGFGIVYYGSVNGTEQVAVKMLSHSSAQGYKQFKAEVELLLRVHHKNLVGLVGYCEEGDKLALIYEYMANGDLDEHMSGKRGGSILNWGTRLKIALEAAQGLEYLHNGCKPLMVHRDVKTTNILLNEHFDTKLADFGLSRSFPIEGETHVSTVVAGTIGYLDPEYYRTNWLTEKSDVYSFGVVLLVMITNQPVIDQNREKRHIAEWVGGMLTKGDIKSITDPNLLGDYNSGSVWKAVELAMSCMNPSSMTRPTMSQVVFELKECLASESSREVSMTFGTEVAPMAR

SEQ ID NO: 626 - protein, 675 aa, Arabidopsis thaliana
MTVFFINDCVRFPDDVYDRKWYPIFQNSWTQVTTNLNVNISTIYELPQSVMSTAATPLNANATLNITWTIEPPTTPFYSYIHFAELQSLRANDTREFNVTLNGEYTIGPYSPKPLKTETIQDLSPEQCNGGACILQLVETLKSTLPPLLNAIEAFTVIDFPQMETNEDDVTGINDVQNTYGLNRISWQGDPCVPKQYSWDGLNCNNSDISIPPIIISLDLSSSGLNGVITQGIQNLTHLQYLDLSDNNLTGDIPKFLADIQSLLVINLSGNNLTGSVPLSLLQKKGLKLNVEGNPHLLCTDGLCVNKGDGHKKKSIIAPVVASIASIAILIGALVLFFVLKKKTQSKEPAIVTKNKRFTYSEVMQMTNNFQRVLGKGGFGIVYHGLVNGTEQVAIKILSHSSSQGYKQFKAEVELLLRVHHKNLVGLVGYCDEGENLALIYEYMANGDLKEHMSGTRNHFILNWGTRLKIVVESAQGLEYLHNGCKPLMVHRDIKTTNILLNEQFDAKLADFGLSRSFPIEGETHVSTAVAGTPGYLDPEYYRTNWLTEKSDVYSFGVVLLEIITNQPVIDPRREKPHIAEWVGEVLTKGDIKNIMDPSLNGDYDSTSVWKAVELAMCCLNPSSARRPNMSQVVIELNECLTSENSRGGAIRDMDSEGSIEVSLTFGTEVTPLAR

SEQ ID NO: 627 - protein, 865 aa, Arabidopsis thaliana
MERHCVLVATFLLMLHIVHAQDQIGFISVDCGLAPRESPYNEAKTGLTYTSDDGLVNVGKPGRIAKEFEPLADKPTLTLRYFPEGVRNCYNLNVTSDTNYLIKATFVYGNYDGLNVGPNFDLYFGPNLWTTVCLIKTGISIPFINVLELRPMKKNMYVTQGESLNYLFRVYISNSSTRIRFPDDVYDRKWYPYFDNSWTQVTTTLDVNTSLTYELPQSVMAKAATPIKANDTLNITWTVEPPTTKFYSYMHFAELQTLRANDAREFNVTMNGIYTYGPYSPKPLKTETIYDKIPEQCDGGACLLQVVKTLKSTLPPLLNAIEAFTVIDFPQMETNGDDVDAIKNVQDTYGISRISWQGDPCVPKLFLWDGLNCNNSDNSTSPIITSLDLSSSGLTGSITQAIQNLTNLQELDLSDNNLTGEIPDFLGDIKSLLVINLSGNNLSGSVPPSLLQKKGMKLNVEGNPHLLCTADSCVKKGEDGHKKKSVIVPVVASIASIAVLIGALVLFFILRKKKSPKVEGPPPSYMQASDGRSPRSSEPAIVTKNRRFTYSQVAIMTNNFQRILGKGGFGMVYHGFVNGTEQVAVKILSHSSSQGYKEFKAEVELLLRVHHKNLVGLVGYCDEGENMALIYEYMANGDLKEHMSGTRNRFTLNWGTRLKIVVESAQGLEYLHNGCKPPMVHRDVKTTNILLNEHFQAKLADFGLSRSFPIEGETHVSTVVAGTPGYLDPEYYKTNWLTEKSDVYSFGIVLLELITNRPVIDKSREKPHIAEWVGVMLTKGDINSIMDPNLNEDYDSGSVWKAVELAMSCLNPSSARRPTMSQVVIELNECIASENSRGGASRDMDSKSSIEVSLTFDTELSPTAR

SEQ ID NO: 628 - protein, 640 aa, Arabidopsis thaliana
MVVKRKLNCGGSNGFDFPNIPKAPRSSRRKVSGKRSDDESEICAIDLLASLAGKLLEESESSSTSTYASEADNLDHLGGLIKQELEDGYTTKPCKSEFFDPGNPASKSTSENTSVTCLPFSSFENDCILEQTPVSDCKRASGLKSLVGSITEETCVVNEDAGSEQGANTFSLKDPSQLHSQSPESVLLDGDVKLAPCTDQVPNDSFKGYRNHSKLVCRDDDENYCKYYKFSDKCKSYRPLSRVGNRRIMQSVRAISKLKCFEDTRTDGRLKALYRKRKLCYGYNPWKRETIHRKRRLSDKGLVVNYDGGLSSESVSNSPEKGESENGDFSAAKIGLLSKDSRVKFSIKSLRIPELVIEVPETATVGLLKRTVKEAVTALLGGGIRIGVLVQGKKVRDDNNTLSQTGLSCRENLGNLGFTLEPGLETLPVPLCSETPVLSLPTDSTKLSERSAASPALETGIPLPPQDEDYLINLGNSVENNDELVPHLSDIPADEQPSSDSRALVPVLALESDALALVPVNEKPKRTELSQRRTRRPFSVTEVEALVSAVEEVGTGRWRDVKLRSFENASHRTYVDLKDKWKTLVHTASISPQQRRGEPVPQELLDRVLGAHRYWTQHQMKQNGKHQVATTMVVEAGSSM

SEQ ID NO: 629 - protein, 248 aa, Arabidopsis thaliana
MEGSSKGLRKGAWTTEEDSLLRQCINKYGEGKWHQVPVRAGLNRCRKSCRLRWLNYLKPSIKRGKLSSDEVDLLLRLHRLLGNRWSLIAGRLPGRTANDVKNYWNTHLSKKHEPCCKIKMKKRDITPIPTTPALKNNVYKPRPRSFTVNNDCNHLNAPPKVDVNPPCLGLNINNVCDNSIIYNKDKKKDQLVNNLIDGDNMWLEKFLEESQEVDILVPEATTTEKGDTLAFDVDQLWSLFDGETVKFD

SEQ ID NO: 630 - protein, 285 aa, Arabidopsis thaliana
MPTLYKKAGFMIKLLFTYICTYTYKLYALYHMDYACVCMYKYKGIVTLQVCLFYIKLRVFLSNFTFSSSILALKNPNNSLIKIMAILPENSSNLDLTISVPGFSSSPLSDEGSGGGRDQLRLDMNRLPSSEDGDDEEFSHDDGSAPPRKKLRLTREQSRLLEDSFRQNHTLNPKQKEVLAKHLMLRPRQIEVWFQNRRARSKLKQTEMECEYLKRWFGSLTEENHRLHREVEELRAIKVGPTTVNSASSLTMCPRCERVTPAASPSRAVVPVPAKKTFPPQERDR

SEQ ID NO: 631 - protein, 837 aa, Arabidopsis thaliana
MKSLHFCLLFMIVSFTVSRPVEAQDQAGFISLDCGLVPKETTYVETSTNITYKSDANYTDSGLVGKINDAHKTLVQQPLWALRSFPEGERNCYNFNLTVNSTYLIRGTFLYGNYDGLNQSPSFDLHIGASKWTSVNIVGVTDTVMPEIIHVLTQKRLQVCLVKTGKTTPFISSLELRPLINNIYIAESGSMVLQNRVYFPSDSTSIVRYDEDIHDRVWNPVSDDDSSSISTDLQVQTNNLYDVPQFVMKTAAIPKDASAPWSLVWTIDNTTALSYVYMHFAEIQDLKANDLREFDITYNGGKLWFSQFRPNKLSILTMFSQVPLTSSNGEYNFTFEMTSNSTLPPLINALEIYTGLEILQLQTDKDEVSAMMNIKTTYDLSKKISWQGDPCAPQLYRWEGLDCSYPDTEASRIISLNLNASGLNGTITSDITKLTQLSELLGEKVKMNPTAKKESKKVPIVPIAASVAGVFALIVILAIFFIVKGKKGKSAEGPPLSVTSGTAKSETRSSNPSIMRKDRKITYPQVLKMTNNFERVLGKGGFGTVYHGNMEDAQVAVKMLSHSSAQGYKEFKAEVELLLRVHHRHLVGLVGYCDDGDNLALIYEYMANGDLRENMLGKRGGNVLTWENRMQIAVEAAQGLEYLHNGCTPPMVHRDVKTTNILLNAQCGAKLADFGLSRSFPIDGECHVSTVVAGTPGYLDPEYYRTNWLSEKSDVYSFGVVLLEIVTNQPVINQTRERPHINEWVGFMLSKGDIKSIVDPKLMGDYDTNGAWKIVELGLACVNPSSNLRPTMAHVVIELNECVAFENARRQGSEEMYTRSSTNFSHTSASEFSPGAR

SEQ ID NO: 632 - protein, 208 aa, Arabidopsis thaliana
MTSSSSSPITFTLLLLLSLLVALNPNPSLASTGSNINTNDIVTQYSTYVRNACNVTRYNRLCVRTLWPFAIVARNNTSKWARGSVAVTITDTKRMLRLLLKTQRSAVGERERIALSDCRELFVDSLDNLYKSLAVLRTLNADEFQRQISDLATWLSAALTDDDTCLDGFEETSSRTRTVRMVRRKATKCMRLCSNALALLKKLAFDGL

SEQ ID NO: 633 - protein, 399 aa, Arabidopsis thaliana
MSSSGQTQFRYTQTPSKVVHLRNLPWECVEEELIDLCKRFGKIVNTKSNVGANRNQAFVEFADLNQAISMVSYYASSSEPAQIRGKTVYIQYSNRHEIVNNQSPGDVPGNVLLVTFEGVESHEVSIDVIHLVFSAFGFVHKIATFEKAAGFQALVQFTDVETASAARSALDGRSIPRYLLSAHVGSCSLRMSYSAHTDLNIKFQSHRSRDYTNPYLPVNQTAMDGSMQPALGADGKKVESQSNVLLGLIENMQYAVTVDVLHTVFSAYGTVQKIAIFEKNGSTQALIQYSDIPTAAMAKEALEGHCIYDGGYCKLRLSYSRHTDLNVKAFSDKSRDYTLPDLSLLVAQKGPAVSGSAPPAGWQNPQAQSQYSGYGGSPYMYPSSDPNGASPSGQPPYYG

SEQ ID NO: 634 - protein, 329 aa, Arabidopsis thaliana
MTDSAYRVDTISRLAQWRIHNLSSSTYRKSDPFKMGLWNWHLSVEKSKMLLNVKLYPEVSNLTRENPPVASFALRVVSSTGERKALSHPEVIDKRIKTNEDFIWTIEVPLTGKIIIDVEFLDLKVLSQDSGELYSIWANGSTENQSQVTAVTSLGRMLTESIYTDITINASDGSIGAHRAVLAARSPVFRSMFLHDLKEKELSEINVLDMPLDACQAFLSYIYGNIQNEDFLIHRLALLQAAEKYDIADLKEACHLSLLDDIDTKNVLERLQNAYLYQLPELKASCMRYLVKFGKIFEIRDEFNIFMQCADRDLISEIFHEVLSTWKGF

SEQ ID NO: 635 - protein, 206 aa, Arabidopsis thaliana
METTMKKKGRVKATITSQKEEEGTVRKGPWTMEEDFILFNYILNHGEGLWNSVAKASGLKRTGKSCRLRWLNYLRPDVRRGNITEEEQLLIIQLHAKLGNRWSKIAKHLPGRTDNEIKNFWRTKIQRHMKVSSENMMNHQHHCSGNSQSSGMTTQGSSGKAIDTAESFSQAKTTTFNVVEQQSNENYWNVEDLWPVHLLNGDHHVI

SEQ ID NO: 636 - protein, 530 aa, Arabidopsis thaliana
  misc_feature (322)..(322): Xaa can be any naturally occurring amino acid
  misc_feature (345)..(345): Xaa can be any naturally occurring amino acid
  misc_feature (410)..(410): Xaa can be any naturally occurring amino acid
  unsure (1)..(530): unsure at all Xaa locations
MRRFLINQAKGLVDHSRRQHHHKSPSFLSPQPRPLASSPPALSRFFSSTSEMSASDSTSSLPVTLDSINPKVLKCEYAVRGEIVNIAQKLQEDLKTNKDAYPFDEIIYCNIGNPQSLGQLPIKFFREVLALCDHASLLDESETHGLFSTDSIDRAWRILDHIPGRATGAYSHSQGIKGLRDVIAAGIEARDGFPADPNDIFLTDGASPAVHMMMQLLLSSEKDGILCPIPQYPLYSASIALHGGSLVPYYLDEATGWGLEISDLKKQLEEARSKGISVRALVVINPGNPTGQVLAEENQRDIVNFCKQEGLVLLADEVYQEXNVYVPDKKFHSFKKVARSLGYGXKDISLVSFQSVSKGYYGECGKRGGYMEVTGFTSDVREQIYKMASVNLCSNISGQILASLVMSPPXERDGILSSMAKRAKTLEDALNSLEGVTCNRAEGAMYLFPRINLPQKAIEAAEAEKTAPDAFYCKRLLNATGVVVVPGSGFGQVPGTWHFRCTILPQEDKIPAIVNRLTEFHKSFMDEFRN

SEQ ID NO: 637 - protein, 218 aa, Arabidopsis thaliana
MDPLLIQSPFSGFSPEYSIGSSPESFSSSSSNNYSLPFNENDSEEMFLYGLIEQSTQQTYIDSELQDLPIKSVSSRKSEKSYRGVRRRPWGKFAAEIRDSTRNGIRVWLGTFESAEEAALAYDQAAFSMRGSSAILNFSAERVQESLSEIKCTYEDGCSPVVALKRKHSMRRRMTNKKTKDSDFDHRSVKLDNVVVFEDLGEQYLEELLGSSENSGTW

SEQ ID NO: 638 - protein, 215 aa, Arabidopsis thaliana
MGKKKCELCCGVARMYCESDQASLCWDCDGKVHGANFLVAKHMRCLLCSACQSHTPWKASGLNLGPTVSICESCLARKKNNNSSLAGRDQNLNQEEEIIGCNDGAESYDEESDEDEEEEEVENQVVPAAVEQELPVVSSSSSVSSGEGDQVVKRTRLDLDLNLSDEENQSRPLKRLSRDEGLSRSTVVMNSSIVKLHGGRRKAEGCDTSSSSSFY

SEQ ID NO: 639 - protein, 702 aa, Arabidopsis thaliana
MFRRLITCISLWEHHLYIIGLLLEETLVEKSGKVWCVTPQTSQKWTIPQALPSSIRNLSLSSNRFTGNIPFTLSFLSDLSELSLGSNLLSGEIPDYFQQLSKLTKLDLSSNILEGHLPSSMGDLASLKILGSFLNRFECRKQLILGTYTAKSIENSKLQPFMLHCHYNRRKDGTPFNTSIITPPPPPVVDPPPATHRAPPVPRIPPVSGVPPAPFAPFAPLQPQQHPPPSPPLVWSPPSSDNGGGDPWNSVSGQPTLQISPPSGSGSGKFWSTQRIILVVSSVAIIVLVSGLCVTLWRCCRSKIYNRYYSGARKDLQRPYFNKPPSQPTPTMGKVSREPMVKPFDGYGAGDRKYGYPMPQRAEESRRAMPPTSYYNKDVNTPQKPLQQPPRQFQSNDTASKRAAHFPPGLNSSSSATVFTIASLQQYTNNFSEENIIGEGSIGNVYRAELRHGKFLAVKKLSNTINRTQSDGEFLNLVSNVLKLKRGHILELLGYCNEFGQRLLVYEYCPNGSLQDALHLDRKLHKKLTWNVRINIALGASKALQFLHEVCQPPVVHQNFKSSKVLLDGKLSVRVADSGLAYMLPPRPTSQMAGYAAPEVEYGSYTCQSDVFSLGVVMLELLTGRRPFDRTRPRGHQTLAQWAIPRLHDIDALTRMVDPSLHGAYPMKSLSRFADIISRSLQMEPGFRPPISEIVQDLQHMI

SEQ ID NO: 640 - protein, 559 aa, Arabidopsis thaliana
MAASMQFYGVKTPELALNSKRIEFSSKGLNFSALVSSARVFSRNVDRSCKNIALRVTCEAGRVELLERKASETFKLNKTEKKLTCVMKFGGSSVASAERMIQVAKLILSFPDEKPVVVLSAMAKTTNKLLMAGEKAVCCGVTNVDTIEELSYIKELHIRTAHELGVETAVIAEHLEGLEQLLKGVAMMKELTLRSRDYLVSFGECMSTRLFAAYLNKIGHKARQYDAFEIGIITTDDFTNADILEATYPAVSKKLLGDWSKENALPVVTGFLGKGWRSCAVTTLGRGGSDLTATTIGKALGLREIQVWKDVDGVLTCDPNIYCGAQPVPHLTFDEAAELAYFGAQVLHPLSMRPAREGNIPVRVKNSYNPTAPGTVITRSRDMSKAVLTSIVLKRNVTMLDITSTRMLGQYGFLAKVFSTFEKLGISVDVVATSEVSISLTLDPSKFCSRELIQHELDQVVEELEKIAVVNLLRHRSIISLIGNVQRSSFILEKGFRVLRTNGINVQMISQGASKVNISLIVNDDEAEHCVKALHSAFFETDTCEAVSECPTGYIAASS

SEQ ID NO: 641 - protein, 250 aa, Arabidopsis thaliana
MGRGRVELKRIENKINRQVTFAKRRNGLLKKAYELSVLCDAEVSLIVFSNRGKLYEFCSTSNMLKTLERYQKCSYGSIEVNNKPAKELENSYREYLKLKGRYENLQRQQRNLLGEDLGPLNSKELEQLERQLDGSLKQVRCIKTQYMLDQLSDLQGKEHILLDANRALSMKLEDMIGVRHHHIGGGWEGGDQQNIAYGHPQAHSQGLYQSLECDPTLQIGYSHPVCSEQMAVTVQGQSQQGNGYIPGWML

SEQ ID NO: 642 - protein, 112 aa, Arabidopsis thaliana
MSGVWVFNNGVIRLVENPNQSGGVSTQSHGRRNVLVYLPTGEAVSSYSSLEQILRSLGWERYFSGDSDLIQYHKRSSIDLISLPRDFSKFNSVYMYDIVVKNPNSFHVRDFN

SEQ ID NO: 643 - protein, 314 aa, Arabidopsis thaliana
MVPRSGSAGSDSVSGGSGEDGQLGIGTNEEKEWACVVEALEPYSVRSVVSGSRNSLAICDDGTMFTWGWNQRGTLGHQPETKTENIPSRVKALANVKITQAAIGGWHCLAVDDQGRAYAWGKRMPFHTLSDLLGLENVRLIAVGAFHNLALEEDGRLLAWGNNEYGQLGTGDTQPTSHPVPVQGLDDLTLVDIAAGGWHSTALTDKGEVYGWGRGEHGRLGLGDNDKSSKMVPQKVNLLAEEDIIQFGRGDHGRLGYGRKVTTGQPLELPIKIPPPEGSFNHTDEEEEGKWSAKSIACGGRHTLAIVEWKSDDI

SEQ ID NO: 644 - protein, 1170 aa, Arabidopsis thaliana
  misc_feature (784)..(784): Xaa can be any naturally occurring amino acid
  misc_feature (804)..(804): Xaa can be any naturally occurring amino acid
  unsure (1)..(1170): unsure at all Xaa locations
MKQSAGVLFLCIVLISFVTGNANSGMISDLCKHSDDPNLCLSSITSRPESGEFAGTSNQIEIIAISAASANASATSSYIKQKLSNEDLEPAIEDTLEDCQKDYQDAVEQLDDSISAMLADAHTDVDVWLSAAISAIESCGSALGSRAGNDAELSQRNEKKRANLGKSGENLLEGLLDCIHDITAALAFARMTDSAYRVDTISRLAQWRIHNLSSSTYRKSDPFKMGLWNWHLSVEKSKMLLNVKLYPEVSNLTRENPPVASFALRVVSSTGERKALSHPEVIDKRIKTNEDFIWTIEVPLTGKIIIDVEFLDLKVLSQDSGELYSIWANGSTENQSQVTAVTSLGRMLTESIYTDITINASDGSIGAHRAVLAARSPVFRSMFLHDLKEKELSEINVLDMPLDACQAFLSYIYGNIQNEDFLIHRLALLQAAEKYDIADLKEACHLSLLDDIDTKNVLERLQNAYLYQLPELKASCMRYLVKFGKIFEIRDEFNIFMQCADRDLISEIFHEVLRFVGLYVQIKVLGVLTQNPSIVLTRIRQQHAHEMSDGKVQFREVAVPPNRYSPLKKAWSDIYTPLDMAGGQIEKLVKYKSTVKDPGTPGFLRIREGMLLFVPNDPKSDSKLKVLTQNIKSQKYTKEGSNKPPWLNLTNKQAKSHIFEFENYPDMHACRDFITKALAKCELEPNKSVVSTSSEQLSIKELELRFKLLRENSELQRLHKQFVESKVLTEDEFWATRKKLLGKDSIRKSKQQLGLKSMMVSGIKPSTDGRTNRVTFNLTPEIIXRFLLRSQLFGRHSSIMFRVXMTEKDFWTKYFRAEYLYSTKNTAVAAAEAAEDEELAVFLKPDEILARETRHKIRRVDPTLDMEADQGDDYTHLMDHGIQRDGTMDVVEPQNDQFKRSLLQDLNRHAAVVLEGRSIDVESEDTRIVAEALTRVKQVSKADGETTKDANQERLERMSRVAGMEDLQAPQNFPLAPLSIKDPRDYFESQQGNVLNVPRGAKGLKRNVHEAYGLLKESILEIRATGLSDPLIKPEVSFEVFSSLTRTIATAKNINGKNPRESFLDRLPKSTKDEVLHHWTSIQELLKHFWSSYPITTTYLHTKVGKLKDAMSNTYSKLEAMKESVQSDLRHQVSLLVRPMQQALDAAFHHYEVDLQRRTAKSGERPNGYV

SEQ ID NO: 645 - protein, 808 aa, Arabidopsis thaliana
MENNSLPMDPAMDSSFMDGLLLEGCWLETTDASEFLNFSPSTSVAPFDPSSFMWSPTQDTSNSLSQMYGQDCPERSSLEDQNQGRDLSTFNRRWWIGPSGHHGFSVMERLVQAVTHIKDFTSERGSLIQLWVPVDRGGKRVLTTKEQPFSHDPMCQRLAHYREISENYQFSTEQEDSDSSSRDLVGLPGRVFLGKVPEWTPDVRFFKNEEYPRVQHAQDCDVRGTLAIPVFEQGSQICLGVIEVVMTTQMVKLSPDLESICRALQAVDLRSTEIPIPPSLKGPDFSYQAALPEIRNLLRCACETHKLPLAQTWVSCLKQSKTGCRHNDENYIHCVSTIDDACYVGDPTVREFHEACSEHHLLKGQGVVGEAFLTNGPCFSSDVSSYKKSEYPLSHHATMFGLHGTVAIRLRCIHTGSVDFVLEFFLPKNCRDIEEQRKMLNALSTIMAHVPRSLRTVTQKELEEEGDSMVSEVIEKGVTLPKIENTTEVHQSISTPQNVGLVFDGGTTEMGELGSEYGKGVSVNENNTFSSASGFNRVTEKKRTKAEKNITLDVLRQYFAGSLKDAAKSIGVCPTTLKRICRQHGIQRWPSRKIKKVGHSLQKIQRVIDSVEGVSGHHLPIGSFYASFPNLAASPEASSLQQQSKITTFLSYSHSPPAKSPGSSCSHSSSCSSETQVIKEDPTDKTRLVSRSFKETQTTHLSPSSQEDDFLRVKVSYEEEKIRFKMRNSHRLKDLLWEIAKRFSIEDVSRYDLKYLDEDNEWVLLRCDDDVEECVDVCRSFPGQTIKLLLQLSSSYLPERSSVSGCLS

SEQ ID NO: 646 - protein, 307 aa, Arabidopsis thaliana
  misc_feature (37)..(37): Xaa can be any naturally occurring amino acid
  misc_feature (244)..(244): Xaa can be any naturally occurring amino acid
  unsure (1)..(307): unsure at all Xaa locations
MELALSLGDNTKKQFSFMEKNSKIKNPSVSSTSISEXDLGFCMALDVAFGGHRSLSSSSSPSVEDEKKKPAPRTKTSDEFRVSSSVDPPLQLQLHFPNWLPENSKGRQGGRIPLGAATVVEEEEEEEEAVPSMSVSPPDSVTSSFQLDFGIKSYGYERRSNKRDIDDEVERSASRASNEDNDDENGSTRKKLRLSKDQSAFLEDSFKEHSTLNPKQKIALAKQLNLRPRQVEVWFQNRRARTKXELRTLKTSTPFYMQLPATTLTMCPSCERVATSAAQPSTSAAHNLCLSTSSLIPVKPRPAKQVS

SEQ ID NO: 647 - protein, 444 aa, Arabidopsis thaliana
  misc_feature (122)..(122): Xaa can be any naturally occurring amino acid
  unsure (1)..(444): unsure at all Xaa locations
MSFRGIVQDLRDGFGSLSRRSFDFRLSSLHKGKAQGSSFREYSSSRDLLSPVIVQTSRWANLPPELLFDVIKRLEESESNWPARKHVVACASVCRSWRAMCQEIVLGPEICGKLTFPVSLKXGPRDAMIQCFIKRDKSKLTFHLFLCLSPALLVENGKFLLSAKRTRRTTRTEYIISMDADNISRSSNSYLGKLRSNFLGTKFLVYDTQPPPNTSSSALITDRTSRSRFHSRRVSPKVPSGSYNIAQITYELNVLGTRGPRRMHCIMNSIPISSLEPGGSVPNQPEKLVPAPYSLDDSFRSNISFSKSSFDHRSLDFSSSRFSEMGISCDDNEEEASFRPLILKNKQPRWHEQLQCWCLNFRGRVTVASVKNFQLVAARQPQPQGTGAAAAPTSAPAHPEQDKVILQFGKVGKDMFTMDYRYPLSAFQAFAICLSSFDTKLACE

SEQ ID NO: 648 - protein, 1118 aa, Arabidopsis thaliana
MNSQQSTRTKQMLQQSSTHLLCGVVLLQLFAAQVDAQRSTSPWQTLSGDAPLVIARGGFSGLFPDSSLAAYQFAMVVSVADVVLWCDVQLTKDGHGICFPDLNLANASNSEEVYPNRQKSYPVNGVTTKGWFPIDFSLTELQKVLFSLIRGILSRSGKFDENGYSISTVQNVATQMKPALFWLNVQHDEFYEQHNLSMSSFLLSTSRTVSIDFISSPEVNFFRKIAGGFGNNGPSFVFQFMGKEDFEPTTNRTYGSILSNLSFVKTFASGILVPKSYILPLDDKQYLLPHTSLVQDAHKAGLKLYASGFANDVDIAYNYSWDPVSEYLSFVDNGNFSVDGMLSDFPLTASASVDCFSHIGRNATKQVDFLVISKNGASGEYPGCTKLAYEKAIKDGSDVIDCPVQMSSDGIPFCSSSIDLVNSTTVGQTHLRNRSIIVPEISSVAGIFTFSLTWHEIQSLTPAISNPFRENGMSRNPNERNSGNLISLYEFLNLAKNSTSLSGILISLENVVYLREKKGLDVVKVVLNRLTETGYIVGTLKVMIQSTTRLVLVDFKNQSTYKTVYKIKETIGNITDSAIEDIKKFANAVVINKASVFPNSDSFLTGQTTNVLERLQKFQLPVYVELFQNEFVSQPFDFFADETVEINAYIFGAGINGTITEFPYTAARYKRNRCLGREEVPPYMLPVNPGGVLTLISTSSLPPAQDPNPIFTHDDVTEPPLPPVIAKSPTSTLGTPSTIAKPLRNFLKVIRIVSWSVAGVVLFLVLLTLVFCFHRKRETRLRQQKLKALIPLEHYTYAQVKRITKSFAEVVGRGGFGIVYKGTLSDGRVVAVKVLKDTKGNGEDFINEVATMSRTSHLNIVSLLGFCSEGSKRAIIYEFLENGSLDKFILGKTSVNMDWTALYRIALGVAHGLEYLHHSCKTRIVHFDIKPQNVLLDDSFCPKVSDFGLAKLCEKKESILSMLDTRGTIGYIAPEMISRVYGNVSHKSDVYSYGMLVLEIIGARNKEKANQACASNTSSMYFPEWVYRDLESCKSGRHIEDGINSEEDELAKKMTLVGLWCIQPSPVDRPAMNRVVEMMEGSLEALEVPPRPVLQQIPISNLHESSILSEDVSVYTEG

SEQ ID NO: 649 - protein, 95 aa, Arabidopsis thaliana
MALVRGLLSAKKNLGRSVVGINKATSAPKGFLAVYVGENPKKQRYLVPVSYLNQPLFQDLLIKAEEEFGFNHAMGGLTIPCPEDTFLNVTSRIQE

SEQ ID NO: 650 - protein, 357 aa, Arabidopsis thaliana
MKPVFCGNFEYDARESDLERLFRKYGKVERVDMKAGFAFVYMEDERDAEDAIRALDRFEYGRTGRRLRVEWTKNDRGGAGRSGGSRRSSSGLRPSKTLFVINFDAQNTRTRDLERHFEPYGKIVNVRIRRNFAFIQYEAQEDATRALDATNSSKLMDKVISVEYAVKDDDSRGNGYSPERRRDRSPDRRRRSPSPYRRERGSPDYGRGASPVAHKRERTSPDYGRGRRSPSPYKRARLSPDYKRDDRRRERVASPENGAVRNRSPRKGRGESRSPPPYEKRRESRSPPPYEKRRESRSPPPYEKRRERSRSRSKSSPENGQVESPGQIMEVEAGRGYDGADSPIRESSPSRSPPAEE

SEQ ID NO: 651 - protein, 92 aa, Arabidopsis thaliana
MALVRSIFSAKKILGGSLARTSKAPKGFLAVYVGENQEKKQRYFVPVSYLKQPSFQALLSKCEEEFGFDHPMGGLTICCPEYTFISITSRIQ

SEQ ID NO: 652 - protein, 95 aa, Arabidopsis thaliana
MALVRSLFVSNKILGGSLAGMRKSTSAPKGFLAVYVGESQKKQRYLVLVSYLSQPLFQDLLSKSEEEFGFDHPMGGLTIPCPEDTFLTVTSRIQG

SEQ ID NO: 653 - protein, 300 aa, Arabidopsis thaliana
MDSRVSILFVCAIAVSCFTSGSASSPVDFSVCNYEFELFRFDLEAKCPPSLYPTPPIEVDGDSLDRLMASQHGNAYMSVLFYASWCPFSRAVRPKFDMLSSMFPQIQHLAVEHSQALPSVFSRYGIHSLPSILMVNQTLNARYHGRKDLISLIEFYEEATGLQPVQYVAEGEPTGLNAGDGNLITWLRKGTSIREIFKQDPFLVLSLLFICLQMAILVFPIAESRMRALWASYVANLNLGRFGEISQLFNRGIHMVDVRRLWLKLSLVKTRNFHERAKNAQAWASSLASVSLGQTSSDQS

SEQ ID NO: 654 - protein, 669 aa, Arabidopsis thaliana
MARSFGANSTVVLAIIFFGCLFALSSAIEEATKLGSVIGIDLGTTYSCVGVYKNGHVEIIANDQGNRITPSWVGFTDSERLIGEAAKNQAAVNPERTVFDVKRLIGRKFEDKEVQKDRKLVPYQIVNKDGKPYIQVKIKDGETKVFSPEEISAMILTKMKETAEAYLGKKIKDAVVTVPAYFNDAQRQATKDAGVIAGLNVARIINEPTAAAIAYGLDKKGGEKNILVFDLGGGTFDVSVLTIDNGVFEVLSTNGDTHLGGEDFDHRVMEYFIKLIKKKHQKDISKDNKALGKLRRECERAKRALSSQHQVRVEIESLFDGVDFSEPLTRARFEELNNDLFRKTMGPVKKAMDDAGLQKSQIDEIVLVGGSTRIPKVQQLLKDFFEGKEPNKGVNPDEAVAYGAAVQGGILSGEGGDETKDILLLDVAPLTLGIETVGGVMTKLIPRNTVIPTKKSQVFTTYQDQQTTVSIQVFEGERSLTKDCRLLGKFDLNGIPPAPRGTPQIEVTFEVDANGILNVKAEDKASGKSEKITITNEKGRLSQEEIDRMVKEAEEFAEEDKKVKEKIDARNALETYVYNMKNQVNDKDKLADKLEGDEKEKIEAATKEALEWLDENQNSEKEEYDEKLKEVEAVCNPIITAVYQRSGGAPGGAGGESSTEEEDESHDEL

SEQ ID NO: 655 - protein, 850 aa, Arabidopsis thaliana
MSGKTRILFFLTCLSFLLVFPTRSNGQDLALSCGTSEASADQDKKKWEPDTKFLKTGNSIHATATYQDPSLLSTVPYMTARIFTAPATYEIPIKGDKRHLLRLYFYPSTYTGLNISNSYFTVEANDVTLLSNFSAAITCQALTQAYLVKEYSLAPTDKDVLSIKFTPSDKYRDAFAFINGIEVIQMPELFDTAALVGFTDQTMDAKTANLQSMFRLNVGGQDIPGSQDSGGLTRTWYNDAPYIFSAGLGVTLQASNNFRINYQNMPVSIAPADIYKTARSQGPNGDINLKSNLTWMFQIDKNFTYILRLHFCEFQLSKINQKVFNIYINNRTAQADTTPADIIGWTGEKGIPMYKDYAIYVDANNGGEEITLQMTPSTFGQPEYYDSSLNGLEIFKMDTMKNLAGPNPEPSPMQAEEEVKKEFKNEKRHAFIIGSAGGVLAVLIGALCFTAYKKKQGYQGGDSHTSSWLPIYGNSTTSGTKSTISGKSNNGSHLSNLAAGLCRRFSLPEIKHGTQNFDDSNVIGVGGFGKVYKGVIDGTTKVAVKKSNPNSEQGLNEFETEIELLSRLRHKHLVSLIGYCDEGGEMCLVYDYMAFGTLREHLYNTKKPQLTWKRRLEIAIGAARGLHYLHTGAKYTIIHRDVKTTNILVDENWVAKVSDFGLSKTGPNMNGGHVTTVVKGSFGYLDPEYFRRQQLTEKSDVYSFGVVLFEILCARPALNPSLPKEQVSLGDWAMNCKRKGNLEDIIDPNLKGKINAECLKKFADTAEKCLNDSGLERPTMGDVLWNLEFALQLQETADGTRHRTPNNGGSSEDLGRGGMAVNVAGRDDVSDLSSEDNTEIFSQIVNPKGR

SEQ ID NO: 656 - protein, 402 aa, Arabidopsis thaliana
MAKPVSIEVYNPNGKYRVVSTKPMPGTRWINLLVDQGCRVEICHLKKTILSVEDIIDLIGDKCDGVIGQLTEDWGETLFSALSKAGGKAFSNMAVGYNNVDVEAANKYGIAVGNTPGVLTETTAELAASLSLAAARRIVEADEFMRGGLYEGWLPHLFVGNLLKGQTVGVIGAGRIGSAYARMMVEGFKMNLIYFDLYQSTRLEKFVTAYGQFLKANGEQPVTWKRASSMEEVLREADLISLHPVLDKTTYHLVNKERLAMMKKEAILVNCSRGPVIDEAALVEHLKENPMFRVGLDVFEEEPFMKPGLADTKNAIVVPHIASASKWTREGMATLAALNVLGRVKGYPIWHDPNRVDPFLNENASPPNASPSIVNSKALGTTQHLHSCLRLFQTLIYACISC

SEQ ID NO: 657 - protein, 251 aa, Arabidopsis thaliana
MGRGRVELKRIENKINRQVTFAKRRNGLLKKAYELSVLCDAEVALIIFSNRGKLYEFCSSSNMLKTLDRYQKCSYGSIEVNNKPAKELENSYREYLKLKGRYENLQRQQRNLLGEDLGPLNSKELEQLERQLDGSLKQVRSIKTQYMLDQLSDLQNKEQMLLETNRALAMKLDDMIGVRSHHMGGGGGWEGGEQNVTYAHHQAQSQGLYQPLECNPTLQMGYDNPVCSEQITATTQAQAQQGNGYIPGWML

SEQ ID NO: 658 - protein, 351 aa, Arabidopsis thaliana
  misc_feature (208)..(208): Xaa can be any naturally occurring amino acid
  unsure (1)..(351): unsure at all Xaa locations
MKPVFCGNFEYDAREGDLERLFRKYGKVERVDMKAGFAFVYMEDERDAEDAIRALDRFEFGRKGRRLRVEWTKSERGGDKRSGGGSRRSSSSMRPSKTLFVINFDADNTRTRDLEKHFEPYGKIVNVRIRRNFAFIQYEAQEDATRALDASNNSKLMDKVISVEYAVKDDDARGNGHSPERRRDRSPERRRRSPSPYKRERGSPDYGXRGASPVAAYRKERTSPDYGRRRSPSPYKKSRRGSPEYGRDRRGNDSPRRRERVASPTKYSRSPNNKRERMSPNHSPFKKESPRNGVGEVESPIERRERSRSSPENGQVESPGSIGRRDSDGGYDGAESPMQKSRSPRSPPADE

SEQ ID NO: 659 - protein, 543 aa, Arabidopsis thaliana
MGITTALLLVMLMSVHTSSYETTILKPYKEDNFRSLVAKACQFIDAHELCVSNIWTHVKESGHGLNPHSVLRAAVKEAHDKAKLAMERIPTVMMLSIRSREQVAIEDCKELVGFSVTELAWSMLEMNKLHGGGGIDLDDGSHDAAAAGGNLKTWLSAAMSNQDTCLEGFEGTERKYEELIKGSLRQVTQLVSNVLDMYTQLNALPFKASRNESVIASPEWLTETDESLMMRHDPSVMHPNTVVAIDGKGKYRTINEAINEAPNHSTKRYVIYVKKGVYKENIDLKKKKTNIMLVGDGIGQTIITGDRNFMQGLTTFRTATVAVSGRGFIAKDITFRNTAGPQNRQAVALRVDSDQSAFYRCSVEGYQDTLYAHSLRQFYRDCEIYGTIDFIFGNGAAVLQNCKIYTRVPLPLQKVTITAQGRKSPNQNTGFVIQNSYVLATQPTYLGRPWKLYSRTVYMNTYMSQLVQPRGWLEWFGNFALDTLWYGEYNNIGPGWRSSGRVKWPGYHIMDKRTALSFTVGSFIDGRRWLPATGVTFTAGLAN

SEQ ID NO: 660 - protein, 823 aa, Arabidopsis thaliana
MVRGKTEMKRIENATSRQVTFSKRRNGLLKKAFELSVLCDAEVALVIFSPRSKLYEFSSSSIAATIERYQRRIKEIGNNHKRNDNSQQARDETSGLTKKIEQLEISKRKLLGEGIDACSIEELQQLENQLDRSLSRIRAKKIVRIFNYFQYQLLREEIEKLKAEERNLVKENKDLKEKWLGMGTATIASSQSTLSSSEVNIDDNMEVETVCVCVLHFRYSLSNFIIIFIHNVSLCNTFSAVAFKLLVNMGCIISYRRNKPAAPTGLPENRPRFHTLPSERRIANDQAQKVTELLKMSDKLGPKELKREESILVVNVHPRSSELAASGWPPWLISVAGEALVGWTPGRESHFEKQEQIGGGTFSKVFKARDLLRNKTVALKRIRFDINNSESIKCIAREIIILRKLDHPNVIKLEGLMLVDHDSSTLYLIFEYMEHDLLGLSSLLGVHFSEPQVKCYMRQLLRGLDHCHTNHVLHRDMKSSNLLINGDGVLKIADFGLATFFDPHNSVPLTTHVATLWYRPPELLLGASHYGIGVDLWSTGCVIGELYAGKPILPGKNEISKASDFCSLYSHVKTDQLHKIFKLCGSPSDDYWTKLKLQLSTPLRPIYPYGSHIAETFKQFPASVISLLETLLSIDPDFRGTAASALKSKYFKTEPLACDPSCLPKYPSSKEINIKMRDNTRKQASQIRRTDEAQAVQPILADSSPTKPMQRKSSNSKSRDSSLTKSYEEDKTSSLPDHSAGKMQTSTDMITEDETNAKVSYMDPSTEEPNLGGSVNMEERIPWPMSPSTLHPTAFLPSLYENGTSSSGGLGIRPTLIENYTVI

SEQ ID NO: 661 - protein, 413 aa, Arabidopsis thaliana
MGLEEQGRAREDTPLLGKGRPLSSKFKTFANVFIAIVGAGVLGLPYAFKRTGWLMGLLTLFSVAALINHCMMLLVHIRRKLGVSNIGSFGDLGFAACGNLGRFVVDILIILSQAGFCVGYLIFIGNTLANLSKPTKSTTLMSLRHLMGVSPKSLYIWGCFPFQLGLNSIKTLTHLAPLSIFADVVDLGAMAVVIVEDIKITVVQRPQVVAFGGMSVFFYGMGVAVYAFEGVGMVLPLESETKDKDKFGKVLALSMLFIAVMYGSFGVLGYMAFGDDTMDIITANLGAGVVSSLVQLGLCINLFFTFPLMMNPVFEIVERRFWSGMYCVWLRWLLVLAVTLVALLVPNFADFLSLVGSSVCCALGFVLPSLFHLMVFKDEMEWKQRALDVGILLLGVILGVSGTWSSLTEIFQE

SEQ ID NO: 662 - protein, 323 aa, Arabidopsis thaliana
MDEKGRSLKNNNMEDEMDLKRGPWTAEEDFKLMNYIATNGEGRWNSLSRCAGLQRTGKSCRLRWLNYLRPDVRRGNITLEEQLLILELHSRWGNRWSKIAQYLPGRTDNEIKNYWRTRVQKHAKQLKCDVNSQQFKDTMKYLWMPRLVERIQSASASSAAAATTTTTTTTGSAGTSSCITTSNNQFMNYDYNNNNMGQQFGVMSNNDYITPENSSVAVSPASDLTEYYSAPNPNPEYYSGQMGNSYYPDQNLVSSQLLPDNYFDYSGLLDEDLTAMQEQSNLSWFENINGAASSSDSLWNIGETDEEFWFLQQQQQFNNNGSF

SEQ ID NO: 663 - protein, 131 aa, Arabidopsis thaliana
MGKKCDLCNGVARMYCESDQASLCWDCDGKVHGANFLVAKHTRCLLCSACQSLTPWKATGLRLGPTFSVCESCVALKNAGGGRGNRVLSENRGQEEVNSLCSDDEIGSSSAQGSNYSRPLKRSAFKSTVVV

SEQ ID NO: 664 - protein, 203 aa, Arabidopsis thaliana
MSGDNGGGERRKGSVKWFDTQKGFGFITPDDGGDDLFVHQSSIRSEGFRSLAAEEAVEFEVEIDNNNRPKAIDVSGPDGAPVQGNSGGGSSGGRGGFGGGRGGGRGSGGGYGGGGGGYGGRGGGGRGGSDCYKCGEPGHMARDCSEGGGGYGGGGGGYGGGGGYGGGGGGYGGGGRGGGGGGGSCYSCGESGHFARDCTSGGR

SEQ ID NO: 665 - protein, 226 aa, Arabidopsis thaliana
MEKRGGGSSGGSGSSAEAEVRKGPWTMEEDLILINYIANHGDGVWNSLAKSAGLKRTGKSCRLRWLNYLRPDVRRGNITPEEQLIIMELHAKWGNRWSKIAKHLPGRTDNEIKNFWRTRIQKYIKQSDVTTTSSVGSHHSSEINDQAASTSSHNVFCTQDQAMETYSPTPTSYQHTNMEFNYGNYSAAAVTATVDYPVPMTVDDQTGENYWGMDDIWSSMHLLNGN

SEQ ID NO: 666 - protein, 385 aa, Arabidopsis thaliana
MVEQTQHPTILQKVSGQLLSSSVSQDIRGYASASKRPATYQKHAAYGNYSNAAFQYPLVAASQIATTTSPVFVQAPGEKGFTNFAIDFMMGGVSAAVSKTAAAPIERVKLLIQNQDEMLKAGRLTEPYKGIRDCFGRTIRDEGIGSLWRGNTANVIRYFPTQALNFAFKDYFKRLFNFKKDKDGYWKWFAGNLASGGAAGASSLLFVYSLDYARTRLANDSKSAKKGGGERQFNGLVDVYKKTLKSDGIAGLYRGFNISCAGIIVYRGLYFGLYDSVKPVLLTGDLQDSFFASFALGWLITNGAGLASYPIDTVRRRMMMTSGEAVKYKSSFDAFSQIVKKEGAKSLFKGAGANILRAVAGAGVLAGYDKLQLIVFGKKYGSGGA

SEQ ID NO: 667 - protein, 338 aa, Arabidopsis thaliana
MQNRSISQVATMATSSSTEKLPRVLIVKRPDAMAVLGDGFVASTKFEILKAFESPLPLPEFLAYHSDSISAIIAPVAAPVTADLIRILPNLRLVVTTSAGVDHVDLVECRRRGISVANAGSSFSEDVADTAVGLLIDVFRRISAANRFVKQRFWPLKGDYPLGSKLGRKRIGIVGLGSIGSKVATRLDAFGCQISYSSRNRKPYDVPYHYYMDIEEMAANSDALIICCELNEKTLRLINKDVLSALGKRGVIVNVARGAIIDEEEMVRCLREGEIGGAGLDVFEDEPNVPKELFELDNVVFSPHSAFMTLEGLEELGKVVVGNIEAFFSNKPLLTPVL

SEQ ID NO: 668 - protein, 323 aa, Arabidopsis thaliana
MAESSEPPVVLLHRPPSLTFMDEILTREFRTLITDTSSSESLPSFFPRHASSARAFVISGRLPVTDELLSHLPSLQILVCTSVGIDHIDLAACKRRGIVITNAGNAFSDDVADCAVGLLISVLRRIPAADRYVRSGNWAKFGDFQLGSKVSGKRVGIVGLGSIGSFVAKRLESFGCVISYNSRSQKQSSPYRYYSDILSLAENNDVLVLCCSLTDETHHIVNREVMELLGKDGVVINVGRGKLIDEKEMVKCLVDGVIGGAGLDVFENEPAVPQELFGLDNVVLSPHFAVATPGSLDNVAQIALANLKAFFSNRPLLSPVQLD

SEQ ID NO: 669 - protein, 876 aa, Arabidopsis thaliana
MTRLRLLSWISITSCVCLVFAQDQSGFISIDCGIPDDSSYTDEKTNMKYVSDLGFVESGTSHSIVSDLQTTSLERQFQNVRSFPEGKRNCYDIRPQQGKGFKYLIRTRFMYGNYDGFSKTPEFDLYIGANLWESVVLINETAIMTKEIIYTPPSDHIHVCLVDKNRGTPFLSVLEIRFLKNDTYDTPYEALMLGRRWDFGTATNLQIRYKDDFYDRIWMPYKSPYQKTLNTSLTIDETNHNGFRPASIVMRSAIAPGNESNPLKFNWAPDDPRSKFYIYMHFAEVRELQRNETREFDIYINDVILAENFRPFYLFTDTRSTVDPVGRKMNEIVLQRTGVSTLPPIINAIEIYQINEFLQLPTDQQDVDAMTKIKFKYRVKKNWQGDPCVPVDNSWEGLECLHSDNNTSPKSIALNLSSSGLTGQIDPAFANLTSINKLDLSNNSLTGKVPDFLASLPNLTELNLEGNKLTGSIPAKLLEKSKDGSLSLRFGGNPDLCQSPSCQTTTKKKIGYIVPVVASLAGLLIVLTALALIWHFKKRSRRGTISNKPLGVNTGPLDTAKRYFIYSEVVNITNNFERVLGKGGFGKVYHGFLNGDQVAVKILSEESTQGYKEFRAEVELLMRVHHTNLTSLIGYCNEDNHMALIYEYMANGNLGDYLSGKSSLILSWEERLQISLDAAQGLEYLHYGCKPPIVHRDVKPANILLNENLQAKIADFGLSRSFPVEGSSQVSTVVAGTIGYLDPEYYATRQMNEKSDVYSFGVVLLEVITGKPAIWHSRTESVHLSDQVGSMLANGDIKGIVDQRLGDRFEVGSAWKITELALACASESSEQRPTMSQVVMELKQSIFGRVNNRSDHKDPVRMVTMNLDTEMVPRAR

SEQ ID NO: 670 - protein, 843 aa, Arabidopsis thaliana
MERHFVFIATYLLIFHLVQAQNQTGFISVDCGLSLLESPYDAPQTGLTYTSDADLVASGKTGRLAKEFEPLVDKPTLTLRYFPEGVRNCYNLNVTSDTNYLIKATFVYGNYDGLNVGPNFNLYLGPNLWTTVCLVKTGISIPFINMLELRPMKKNMYVTQSGSLKYLFRGYISNSSTRIRFPDDVYDRKWYPLFDDSWTQVTTNLKVNTSITYELPQSVMAKAATPIKANDTLNITWTVEPPTTQFYSYVHIAEIQALRANETREFNVTLNGEYTFGPFSPIPLKTASIVDLSPGQCDGGRCILQVVKTLKSTLPPLLNAIEAFTVIDFPQMETNENDVAGIKNVQGTYGLSRISWQGDPCVPKQLLWDGLNCKNSDISTPPIITSLDLSSSGLTGIITQAIKNLTHLQILDLSDNNLTGEVPEFLADIKSLLVINLSGNNLSGSVPPSLLQKKGMKLNVEGNPHILCTTGSCVKKKEDGHKKKSVIVPVVASIASIAVLIGALVLFLILRKKRSPKVEGPPPSYMQASDGRLPRSSEPAIVTKNRRFSYSQVVIMTNNFQRILGKGGFGMVYHGFVNGTEQVAVKILSHSSSQGYKQFKAEVELLLRVHHKNLVGLVGYCDEGDNLALIYEYMANGDLKEHMSGLEYLHNGCKPPMVHRDVKTTNILLNEHFEAKLADFGLSRSFLIEGETHVSTVVAGTPGYLDPEYHRTNWLTEKSDVYSFGILLLEIITNRHVIDQSREKPHIGEWVGVMLTKGDIQSIMDPSLNEDYDSGSVWKAVELAMSCLNHSSARRPTMSQVVIELNECLASENARGGASRDMESKSSIEVSLTFGTEVSPNAR

SEQ ID NO: 671 - protein, 213 aa, Arabidopsis thaliana
  misc_feature (26)..(26): Xaa can be any naturally occurring amino acid
  unsure (1)..(213): unsure at all Xaa locations
MYGQCNIESDYALLESITRHLLGGGXDMLVYGLLKDAFHFDTSSSDLSCLFDFPAVKVEPTENFTAMEEKPKKAIPVTETAVKAKHYRGVRQRPWGKFAAEIRDPAKNGARVWLGTFETAEDAALAYDIAAFRMRGSRALLNFPLRVNSGEPDPVRITSKRSSSSSSSSSSSTSSSENGKLKRRRKAENLTSEVVQVKCEVGDETRVDELLVS

SEQ ID NO: 672 - protein, 860 aa, Arabidopsis thaliana
MEAKPLASSSSEPNMISPSSNIKPKLKDEDYMELVCENGQILAKIRRPKNNGSFQKQRRQSLLDLYETEYSEGFKKNIKILGDTQVVPVSQSKPQQDKETNEQMNNNKKKLKSSKIEFERNVSKSNKCVESSTLIDVSAKGPKNVEVTTAPPDEQSAAVGRSTELYFASSSKFSRGTSRDLSCCSLKRKYGDIEEEESTYLSNNSDDESDDAKTQVHARTRKPVTKRKRSTEVHKLYERKRRDEFNKKMRALQDLLPNCYKDDKASLLDEAIKYMRTLQLQVQMMSMGNGLIRPPTMLPMGHYSPMGLGMHMGAAATPTSIPQFLPMNVQATGFPGMNNAPPQMLSFLNHPSGLIPNTPIFSPLENCSQPFVVPSCVSQTQATSFTQFPKSASASNLEDAMQYRGSNGETFLYWNGTEPRICISDPELAKTMLSNKLGFFVKSKARPEAVKLVGSKGLVFIEGADWVRHRRILNPAFSIDRLKIMTTVMVDCTLKMLEEWRKESTKEETEHPKIKKEMNEEFQRLTADIIATSAFGSSYVEGIEVFRSQMELKRCYTTSLNQVSIPGTQYLPTPSNIRVWKLERKMDNSIKRIISSRLQSKSDYGDDLLGILLKAYNTEGKERKMSIEEIIHECRTFFFGGHETTSNLLAWTTMLLSLHQDWQEKLREEIFKECGKEKTPDSETFSKLKLVMFIFFKGSLVRQCFLRLKKPVYFLQMNMVIMESLRLYGPVSALAREASVNIKLGDLEIPKGTTVVIPLLKMHSDKTLWGSDADKFNPMRFANGVSRAANHPNALLAFSVGPRACIGQNFVMIEAKTVLTMILQRFRFISLCDEYKHTPVDNVTIQPQYGLPVMLQPLED

SEQ ID NO: 673 - protein, 362 aa, Arabidopsis thaliana
MARSPCCEKNGLKKGPWTSEEDQKLVDYIQKHGYGNWRTLPKNAGTCLQRCGKSCRLRWTNYLRPDIKRGRFSFEEEEAIIQLHSFLGNKWSAIAARLPGRTDNEIKNFWNTHIRKKLLRMGIDPVTHSPRLDLLDISSILASSLYNSSSHHMNMSRLMMDTNRRHQQQHPLVNPEILKLATSIFSQNQNQNHNQNQNQNQNLVVDHEKQTVYHHHDVNQTGVNQYQTDQYFENAITQELQSSMPPFPNEAHQFNDMDHHFNGFGEQNLVSTSTTSVQDCYNPSFNDYSSSNFVLDHSYSDQSFNFANSVLNTPSSSPSPTTLNSSYINSSSCSTEDEIESYCSNLMKFDIPDFLDVNGFII

SEQ ID NO: 674 - protein, 598 aa, Arabidopsis thaliana
MGYERLGPSGATGSVTTSTTTAPILNQVSTSEQPENNNRRSKKKLVVSSIVLAISLILAAAIFAGVRSRLKLNQSVPGLARKPSQAISKACELTRFPELCVDSLMDFPGSLAASSSKDLIHVTVNMTLHHFSHALYSSASLSFVDMPPRARSAYDSCVELLDDSVDALSRALSSVVSSSAKPQDVTTWLSAALTNHDTCTEGFDGVDDGGVKDHMTAALQNLSELVSNCLAIFSASHDGDDFAGVPIQNRRLLGVEEREEKFPRWMRPKEREILEMPVSQIQADIIVSKDGNGTCKTISEAIKKAPQNSTRRIIIYVKAGRYEENNLKVGRKKINLMFVGDGKGKTVISGGKSIFDNITTFHTASFAATGAGFIARDITFENWAGPAKHQAVALRIGADHAVIYRCNIIGYQDTLYVHSNRQFFRECDIYGTVDFIFGNAAVVLQNCSIYARKPMDFQKNTITAQNRKDPNQNTGISIHASRVLAASDLQATNGSTQTYLGRPWKLFSRTVYMMSYIGGHVHTRGWLEWNTTFALDTLYYGEYLNSGPGSGLGQRVSWPGYRVINSTAEANRFTVAEFIYGSSWLPSTGVSFLAGLSI

SEQ ID NO: 675 - protein, 278 aa, Arabidopsis thaliana
MGLDDSCNTGLVLGLGLSPTPNNYNHAIKKSSSTVDHRFIRLDPSLTLSLSGESYKIKTGAGAGDQICRQTSSHSGISSFSSGRVKREREISGGDGEEEAEETTERVVCSRVSDDHDDEEGVSARKKLRLTKQQSALLEDNFKLHSTLNPKQKQALARQLNLRPRQVEVWFQNRRARTKLKQTEVDCEFLKKCCETLTDENRRLQKELQDLKALKLSQPFYMHMPAATLTMCPSCERLGGGGVGGDTTAVDEETAKGAFSIVTKPRFYNPFTNPSAAC

SEQ ID NO: 676 - protein, 324 aa, Arabidopsis thaliana
MSSGTVRRVSRQDIQLVQNLIERCLQLYMNQKEVVDTLLEQAKIEPGFTELVWQKLEEENREFFKAYYLRLMVKHQIMEFNKLLEQQVHHMRQMHPTGVASVQNTNGSHLQSMNQKQLCYPSEHTDQSLKSESAHHPMASSLSNAFLNGSSTLNTNVPSSINISTHARRVDASPNMLSSQTTNMPMMQGMNGGMIKSETAFTNPASFMYGGERNALEGHSAVGDTSIPNFSNESNNQPLSDPLLEAEASTFGFLGQIPRNFSLSDLTADFSQSSEILESYDRSPFLVPNAENFLDSRDRGEYQGDNKRLDTISEGFSYDNIGSE

SEQ ID NO: 677 - protein, 158 aa, Arabidopsis thaliana
MGEIGFTEKQEALVKESWEILKQDIPKYSLHFFSQILEIAPAAKGLFSFLRDSDEVPHNNPKLKAHAVKVFKMTCETAIQLREEGKVVVADTTLQYLGSIHLKSGVIDPHFEVVKEALLRTLKEGLGEKYNEEVEGAWSQAYDHLALAIKTEMKQEES

SEQ ID NO: 678 - protein, 584 aa, Arabidopsis thaliana
MEAQYRNHDGDTSFSSLRVYLNSLSDTPSRFSRRAVSVSTSYDEMSRVRAVSGEQMRRTLRWYDLIGLGIGGMIGAGVFVTTGRASRLYAGPSIVVSYAIAGLCALLSAFCYTEFAVHLPVAGGAFSYIRITFGEFPAFITGANLIMDYVLSNAAVSRGFTAYLGSAFGISTSEWRFIVSGLPNGFNEIDPIAVIVVLAVTFVICYSTRESSKVNMVLTALHIAFIVFVIVMGFSKGDVKNLTRPDNPENPSGFFPFGVSGVFNGAAMVYLSYIGYDAVSTMAEEVKDPVKDIPMGISGSVAIVIVLYCLMAISMSMLLPYDLIDAEAPYSAAFSKSEGWEWVTRVVGIGASFGILTSLIVAMLGQARYMCVIGRSRVVPIWFAKVHPKTSTPVNASAFLGIFTAVLALFTDLNVLLNLVSIGTLFVFYMVANAVIFRRYVTVGYTEPWPTLSFLCLFSITSILFTLVWQLAPSGPPKWFILGASTVTAIAIVQIFHCVVPQARIPEFWGVPLMPWTPCVSIFLNIFLLGSLDAPSYIRFGFFSGLVVLVYVFYSVHASYDAEGDGSLDFKDVESLERINRVLS

SEQ ID NO: 679 - protein, 356 aa, Arabidopsis thaliana; identical to SEQ ID NO: 335

SEQ ID NO: 680 - protein, 338 aa, Arabidopsis thaliana
MAGVNLQLRHAYSIAQFVPTVSFPPPLPTQRVRLGTSPSRVLLCNLRANSAAAPILRTTRRSVIVSASSVSSAVDSDSLVEDRDDVGRIPLLEVRDLRAVIAESRQEILKGVNLVVYEGEVHAVMGKNGSGKSTFSKVLVGHPDYEVTGGSIVFKGQNLLDMEPEDRSLAGLFMSFQSPVEIPGVSNMDFLNMAFNARKRKLGQPELDPIQFYSHLVSKLEVVNMKTDFLNRNVNEGFSGGERKRNEILQLAVLGAELAILDEIDSGLDVDALQDVAKAVNGLLTPKNSVLMITHYQRLLDYIKPTLIHIMENGRIIKTGDNSLAKLLEKEGYKAISG

SEQ ID NO: 681 - protein, 282 aa, Arabidopsis thaliana
MSVIGSKSCIFSVARYTRENEKSSCFTSINKKSSLDLRFPRNLAGVSCKFSGENPGTNGVSLSSKNKMEDYNTAMKRLMRSPYEYHHDLGMNYTLIRDELIVGSQPQKPEDIDHLKQEQNVAYILNLQQDKDIEYWGIDLDSIVRRCKELGIRHMRRPAKDFDPLSLRSQLPKAVSSLEWAVSEGKGRVYVHCSAGLGRAPGVSIAYMYWFCDMNLNTAYDTLVSKRPCGPNKGAIRGATYDLAKNDPWKEPFESLPENAFEDIADWERKLIQERVRALRGT

SEQ ID NO: 682 - protein, 494 aa, Arabidopsis thaliana
MAEISATSFPSSSSSALVIRSSHNGSLKCQNVAVPKTTSQFQELSLKRSQLVGNAVVTGHVTGSRSCKNQAIRAVLSGDGTALTTDSKEAGLRGKLKKVVLAYSGGLDTSVIVPWLKENYGCEVVCFTADVGQGIKELEGLEQKAKASGASQLVVKDLTEEFVKDFIFPCLRAGAIYERKYLLGTSMARPVIAKAMVDVAAEVGADAVAHGCTGKGNDQVRFELTFFSLNPELKVVAPWREWEIQGREDAIEYAKKHNVPVPVTKKSIYSRDRNLWHLSHEGDLLEDPANEPKKDMYMMSVDPEDAPDQPEYIEIGIESGLPVALNGKALSPATLLAELNTIGGKHGIGRIDMVENRLVGMKSRGVYETPGGTILFAAVQELESLTLDRESIQVKDTLALKYAEMVYAGRWFDPLRESMDAFMEKITETTTGSVTLKLYKGSVSVTGRQSPNSLYRQDISSFEGSEIYNQADAAGFIRLYGLPMKIRAMLKKIS

SEQ ID NO: 683 - protein, 111 aa, Arabidopsis thaliana
MAMQKAKEIVNSESVVVFSKTYCPYCVRVKELLQQLGAKFKAVELDTESDGSQIQSGLAEWTGQRTVPNVFIGGNHIGGCDATSNLHKDGKLVPLLTEAGAIAGKTATTSA

SEQ ID NO: 684 - protein, 470 aa, Arabidopsis thaliana
MNIYTYTKSYVFPQMDQEEEEIEIPNYFICPISLEIMKDPVTTVSGITYDRQNIVKWLEKVPSCPVTKQPLPLDSDLTPNHMLRRLIQHWCVENETRGVVRISTPRVPPGKLNVVEEIKNLKKFGQEALGREETLQKLEVLAMDGNNRRLMCECGVHKSLILFVVKCTSEDEDGRRRIKGLDESLRLLHLIGIPSNDAKTILMENDRVMESLTWVLHQEDFLSKAYTIVLLRNLTEYTSSHIVERLNPEIFKGIIGFLKDVVNSVNRTSPTVRETVQSSSRPSLGKTEPSKLDHSLVIKQAVTAALMILLETSSWSRNRSLLVDLGAVSELIELEISYTGEKRITELMLGVLSRLCCCANGRAEILAHRGGIAVVTKRLLRVSPAADDRAISILTTVSKFSPENMVVEEMVNVGTVEKLCSVLGMDCGLNLKEKAKEILKDHFDEWKKFPCIDITLLTKLLSISPKGPKI

SEQ ID NO: 685 - protein, 1123 aa, Arabidopsis thaliana
MSLSQNAPKSKGIKREELKKQYEDVEDEEEIGSDDDLTRGKRRKTEKEKQKLEESELVEMKKLENLIFGSLYSPVTFGKEEEEDGSALFHVDRSAVRQIPDYEDDGDDDEELSDEENGQVVAIRKGEAAWEDEEEKQINVDIASVNRLRKLRKEENEGLISGSEYIARLRAHHAKLNPGTDWARPDSQIVDGESSDDDDTQDGGVDDILRTNEDLVVKSRGNKLCAGRLEYSKLVDANAADPSNGPINSVHFHQNAQLLLTAGLDRRLRFFQIDGKRNTKIQSIFLEDCPIRKAAFLPNGSQVIVSGRRKFFYSFDLEKAKFDKIGPLVGREEKSLEYFEVSQDSNTIAFVGNEGYILLVSTKTKELIGTLKMNGSVRSLAFSEDGKHLLSSGGDGQVYVWDLRTMKCLYKGVDEGSTCGTSLCSSLNGALFASGTDRGIVNIYKKSEFVGGKRKPIKTVDNLTSKIDFMKFNHDAQILAIVSTMNKNSVKLVHVPSLTVFSNWPPPNSTMHYPRCLDFSPGSGFMAMGNAAGKVLLFPHCTAVPFVEITTRKSLRFSKLMASLQLYGVKTPGLALSSKRLEFASKGACFSVTLPSSSAVFRDVEHSCRNIGLRVSCEALRVDLLQRKEPETCDSSGTGKELTCVMKFGGSSVESAERMKEVANLILSFPDERPVIVLSAMGKTTNKLLKAGEKAVTCGVTNVESIEELSFIKELHLSVHSPNLALFSWEIKFSMFRTAHELGVETTVIEKHLEGLHQLLKGISMMKELTLRTRDYLVSFGECMSTRLFSAYLNKIGHKARQYDAFEIGFITTDDFTNADILEATYPAVSKTLVGDWSKENAVPVVTGYLGKGWRSCAITTLGRGGSDLTATTIGKALGLREIQVWKDVDGVLTCDPNIYPGAQSVPYLTFDEAAELAYFGAQVLHPLSMRPARDGDIPVRVKNSYNPTAPGTVITRSRDMSKAVLTSIVLKRNVTMLDIASTRMLGQYGFLAKVFTTFEDLGISVDVVATSEVSISLTLDPAKLWGRELIQRVNELDNLVEELEKIAVVKLLQRRSIISLIGNVQKSSLILEKVFQVFRSNGVNVQMISQGASKVNISLIVNDEEAEQCVRALHSAFFETDP

SEQ ID NO: 686 - protein, 306 aa, Arabidopsis thaliana
MPSSDSTMMKKGTKRKIEIKKRETKEQRAVTCSKRRQTVFSKAADLCLISGANIAVFVTSPSDSSDVVYSFSGYSSAYEIADCYLNRKPPPKIVNPAGSKLGFWWEDPDLYHSCDDLSELSIIEDRLQRMKKHVMACLEKEEKSQLVSSFDQNPNSTCSLDVEDCDGSSYSQIASTFTPNSVNEYCSDQTFSSFHGDQNPNLSSPSFDQDCYSSLYQICGESSSQVASFDQNPSSEIQGFETEEEINQINLLLQETQTEANVNLDDEICFWNDLSNDDVFGLNSYFGLDNTNAMINFGDSDFRRHV

SEQ ID NO: 687 - protein, 619 aa, Arabidopsis thaliana
MVFKRKLDCLSVGFDFPNIPRAPRSCRRKVLNKRIDHDDDNTQICAIDLLALAGKILQESESSSASSNAFEEIKQEKVENCKTIKSESSDQGNSVSKPTYDISTEKCVVNSCFSFPDSDGVLERTPMSDYKKIHGLMDVGCENKNVNNGFEQGEATDRVGDGGLVTDTCNLEDATALGLQFPKSVCVGGDLKSPSTLDMTPNGSYARHGNHTNLGRKDDDEKFYSYHKLSNKFKSYRSPTIRRIRKSMSSKYWKQVPKDFGYSRADVGVKTLYRKRKSCYGYNAWQREIIYKRRRSPDRSSVVTSDGGLSSGSVSKLPKKGDTVKLSIKSFRIPELFIEVPETATVGSLKRTVMEAVSVLLSGGIRVGVLMHGKKVRDERKTLSQTGISCDENLDNLGFTLEPSPSKVPLPLCSEDPAVPTDPTSLSERSAASPMLDSGIPHADDVIDSRNIVDSNLELVPYQGDISVDEPSSDSKELVPLPELEVKALAIVPLNQKPKRTELAQRRTRRPFSVTEVEALVQAVEELGTGRWRDVKLRAFEDADHRTYVDLKDKWKTLVHTASISPQQRRGEPVPQELLDRVLRAYGYWSQHQGKHQARGASKDPDMNRGGAFESGVSV

SEQ ID NO: 688 - protein, 436 aa, Arabidopsis thaliana
MGFQNEASSSSYTLKIPPPAREDSPLLGKGPPLSSQFKTFANVFIAVVGAGVLGLPYAFKRTGWLMGVLLLVSVSVLTHHCMMLLVYTRRKLDSFNAGISKIGSFGDLGFAVCGSLGRIVVDLFIILSQAGFCVGYLIFIGTTLANLSDPESPTSLRHQFTRLGSEFLGVSSKSLYIWGCFPFQLGLNSIKTLTHLAPLSIFADIVDLGAMAVVIVEDSMIILKQRPDVVAFGGMSLFLYGMGVAVYSFEGVGMVLPLESEMKDKDKFGKVLALGMGFISLIYIAFGILGYLAFGEDTMDIITANLGAGLVSTVVQLGLCINLFFTFPLMMNPVFEIVERRFSRGMYSAWLRWVLVLAVTLVALFVPNFADFLSLVGSSTCCVLGFVLPALFHLLVFKEEMGWLQWSSDTAIVVLGVVLAVSGTWSSLSEIFSVKV

SEQ ID NO: 689 - protein, 767 aa, Arabidopsis thaliana
MVGPFKKILHAHNQRFPPSSSSSLDPVVDDSSRKQTRIILSYLLHLSLSLHITYSLCLLHFFFGSSNPFSPMEESNNSAVVDFPDNFMDQLLWEECWEEEATQHDQALSSPSGLKERVACAMGHLQEVMGERELLIQLWVPVETRSGRVLSTEEQPYSINTFSQSQSLALYRDASAGYSFAAEVGSEQLVGLPGRVFLRRMPEWTPDVRFFRKEEYPRIGYARRYQVRATLALPLFQGTSGNCVAVMEMVTTHRNLEYASQLSTICHALEAFDLRTSQTSIVPASLKVTSSSSSSSRTEVASILQGICSSHGLPLAVTWGHQDSSSCLSALISASYAADHGSRCFLAACSEHHLLGGEGIAGRAFATKKQCFATDVAIFSKWSYPLSHYAKMFDLHAALAVPILTRGNRTVQFVLELFFPRDCLDIQTHSLTLASQLKLRFQSSPHLMVDDNQIAEEVRDAATPPLTQEDPKGKQVSFSFSSASSLENRKRKTKAEKDITLDTLRQHFAGSLKDAAKNIGVCPTTLKRICRQNGISRWPSRKIKKVGHSLRKLQVVMDSVEGVQGSLHLASFYSSFPQLQSSSSSSFPFINPTQTVHVPPKSPPSSSGSQSSSGSSTCCSSEEQQLGGFQKPALSHPQLLTLSSMHEDQRPVRVTSSLPPLPSATTPRKAKDGMKVKAMFGDSMLRMSLLPHSRLTDLRREIAKRFGMDDVLRSNFSLKYLDDDQEWVLLTCDADLEECIQVYKSSSLKETIRILVHHPLSRPSFGS

SEQ ID NO: 690 - protein, 283 aa, Arabidopsis thaliana
MSNITKKKCNGNEEGAEQRKGPWTLEEDTLLTNYISHNGEGRWNLLAKSSGLKRAGKSCRLRWLNYLKPDIKRGNLTPQEQLLILELHSKWGNRWSKISKYLPGRTDNDIKNYWRTRVQKQARQLNIDSNSHKFIEVVRSFWFPRLINEIKDNSYTNNIKANAPDLLGPILRDSKDLGFNNMDCSTSMSEDLKKTSQFMDFSDLETTMSLEGSRGGSSQCVSEVYSSFPCLEEEYMVAVMGSSDISALHDCHVADSKYEDDVTQDLMWNMDDIWQFNEYAHFN

SEQ ID NO: 691 - protein, 2151 aa, Arabidopsis thaliana
MYYHSLSSYSILFFLFSLFHHLPCASSNQGLGWCESLFQCGNITADFPFWGGNRHKPCGHPLLELHCNNNNITSLYISNQEFYVRQINQTSNTLTLARSDLLGSFCSSYAYNTTTLPPEIFELSPTYKSLTVLYHCDPKLSYRSSYTCPALGTFSMSQSVDYQYSCQNSFTVNVPTSFHPEERGLNLTNLESALRKGFEVKLVIDEIPCQQCSSTRGICSFNGTTQSCCNATSPSGGVSCVPYQHSADEVYRRCSESFSCGSQRDLNYPLWKPGREECGHPNFKLNCSGGFAEINIASVKFRILDSYRSLIRLARSDYIGDLCPANPLTAPFIEKFLPVLELTGETELLTLYYGCRFNSSDIPANIYVGELGCDEGRSYYVTRNLSSPLLDSSRGVLNNLREMCKRNVSVPASGPALFDLQTRPNQDNLKMALDQGFRMLITSDCERCRGSGGACGYNQTSSGFGCYCKDGKCGYEYDALGALTGVVIVFLVLLCPCFRVQIFRKRKTSDEVRLQKLKALIPLKHYTYAEVKKMTKSFTEVVGRGGFGIVYSGTLSDSSMVAVKVLKDSKGTDGEDFINEVASMSQTSHVNIVSLLGFCCEGSRRAIIYEFLGNGSLDKFISDKSSVNLDLKTLYGIALGVARGLEYLHYGCKTRIVHFDIKPQNVLLDDNLCPKVSDFGLAKLCEKKESILSLLDTRGTIGYIAPEMISRLYGSVSHKSDVYSYGMLVLEMIGARKKERFDQNSRSDGSSIYFPEWIYKDLEKANIKDIEKTENGGLIENGISSEEEEIARKMTLVGLWCIQSSPSDRPPMNKVVEMMEGSLDALEVPPRPVLQQISASSVSDSFWNSEESSSASDILVFSTNSKLESSNLYFSPVITLPTLNSTNNILQREETVKTENKSQESIPEVKTPIIVSWNETERLSQRLASFCPKVSEFGLAKLCEEKESILSMLDTRGTVGYIAPEMISRVYGNVSDKSDAYSYGMLVLEIIGARNKEKANQACASNTIQCTFLNGHIEDGINSEENELAKKMTLLFAAQVDAQRSTSPWQTLSGDAPLVIARGGFSGLFPDSSLAAYQFAMVLTKDGHGICFPDLNLANASNSEEVYPNRQKSYPVNGVTTKGWFPIDFSLTELQKVLFSLIRGILSRSGKFDENGYSISTVQNVATQMKPALFWLNVQHDEFYEQHNLSMSSFLLSTSRTVSIDFISSPEVNFFRKIAGGFGNNGPSFVFQFMGKEDFEPTTNRTYGSILSNLSFVKTFASGILVPKSYILPLDDKQYLLPHTSLVQDAHKAGLKLYASGFANDVDIAYNYSWDPVSEYLSFVDNGNFSVDGMLSDFPLTASASVDCFSHIGRNATKQEQKHYHLPMVRASVDFLVISKNGASGEYPGCTKLAYEKAIKDGSDVIDCPVQMSSDGIPFCSSSIDLVNSTTVGQTHLRNRSIIVPEISSVAGIFTFSLTWHEIQSLTPAISNPFRENGMSRNPNERNSGNLISLYEFLNLAKNSTSLSGILISLENVVYLREKKGLDVVKVVLNRLTETGYIVGTLKVMIQSTTRLVLVDFKNQSTYKTVYKIKETIGNITDSAIEDIKKFANAVVINKASVFPNSDSFLTGQTTNVLERLQKFQLPVYVELFQNEFVSQPFDFFADETVEINAYIFGAGINGTITEFPYTAARYKRNRCLGREEVPPYMLPVNPGGVLTLISTSSLPPAQDPNPIFTHDDVTEPPLPPVIAKSPTSTLGTPSTIAKPLSLFITFLLLLDQVWFHSDNFFLLNGCTGNFLKVIRIVSWSVAGVVLFLVLLTLVFCFHRKRETRLRQQKLKALIPLEHYTYAQVKRITKSFAEVVGRGGFGIVYKGTLSDGRVVAVKVLKDTKGNGEDFINEVATMSRTSHLNIVSLLGFCSEGSKRAIIYEFLENGSLDKFILGKTSVNMDWTALYRIALGVAHGLEYLHHSCKTRIVHFDIKPQNVLLDDSFCPKVSDFGLAKLCEKKESILSMLDTRGTIGYIAPEMISRVYGNVSHKSDVYSYGMLVLEIIGARNKEKANQACASNTSSMYFPEWVYRDLESCKSGRHIEDGINSEEDELAKKMTLVGLWCIQPSPVDRPAMNRVVEMMEGSLEALEVPPRPVLQQIPISNLHESSILSEDVSVYTEG

SEQ ID NO: 692 - protein, 205 aa, Arabidopsis thaliana
MAPPQNLFLVAIAFAVIFTASIVHGRHNGAEDIVHSSCGHASYPSLCVRTLSSYSGPTITNRRDLAQAAIKISLSHAQSAAKKLAVVRDSVGKKKQEKAALVDCVEMIGDSVDELSRTLGVLKHLRVSGGSAKEFRWQMSNAQTWASAALTDDDTCLDGFQGMDDGEIKTEVKQWMTKVARVTSNALYMINQLDETRGKPHDVHL

SEQ ID NO: 693 - protein, 160 aa, Arabidopsis thaliana
MESEGKIVFTEEQEALVVKSWSVMKKNSAELGLKLFIKIFEIAPTTKKMFSFLRDSPIPAEQNPKLKPHAMSVFVMCCESAVQLRKTGKVTVRETTLKRLGASHSKYGVVDEHFEVAKYALLETIKEAVPEMWSPEMKVAWGQAYDHLVAAIKAEMNLSN

SEQ ID NO: 694 - protein, 672 aa, Arabidopsis thaliana
MAANNKLFFVLLSLFPLIIFSATATSSKDYDTKAYVHSWCRTTLYPKLCVRSMSRYVRSRAVQNPRDLARFALKASLYRAKYTKAFLLKEVKNLETTLRPQYYASVHDCLDQIRDSVNQLSLAIAELDRVSRRQGKSQGDLHWHINNLQTWTSTALTDAETCVSQFPGRRMSKLKATIKGKVKNVEETTSNALAFIEHYAAARKVLSLKQARKYLCRIQRLLPLLSTSQNVARLAQLVERKALNLVVVVGIASVILGALIAVLFFGSYFRKRTSEVQSMAKAEPQDPIRNPKSNHPAPKKNHPKSQASDKNQNKRHHPLDLNTLKGHGDAVTGLCFSSDGKSLATACADGVIRVFKLDDASSKSFKFLRINLPAGGHPTAVAFADDASSIVVACHHMSGSSLYMYGEDKQKDQQGKLPLPSIKWDHHHIHEKRSVLTISGATATYGTADGSVVIASCSEGTDIVLWHGKTGRNLGHVDTNQLKNHMAAVSPNGRFLAAAAFTADVKVWEIVYQKDGSVKEVSRVMQLKGHKSAVTWLCFSPNSEQIITASKDGSIRVWNINVRYHLDEDPKTLKVFPIPLCDSGGNPLHYDRLSLCPEGKILAASHGSTLQWLCAETGNVLDTAEKAHEGDITCISWAPKAITVGERHAMVLGTSGDDKKVKLWEAPKSQSL

SEQ ID NO: 695 - protein, 592 aa, Arabidopsis thaliana
MAPSMKEIFSKDNFKKNKKLVLLSAAVALLFVAAVAGISAGASKANEKRTLSPSSHAVLRSSCSSTRYPELCISAVVTAGGVELTSQKDVIEASVNLTITAVEHNYFTVKKLIKKRKGLTPREKTALHDCLETIDETLDELHETVEDLHLYPTKKTLREHAGDLKTLISSAITNQETCLDGFSHDDADKQVRKALLKGQIHVEHMCSNALAMIKNMTDTDIANFEQKAKITSNNRKLKEENQETTVAVDIAGAGELDSEGWPTWLSAGDRRLLQGSGVKADATVAADGSGTFKTVAAAVAAAPENSNKRYVIHIKAGVYRENVEVAKKKKNIMFMGDGRTRTIITGSRNVVDGSTTFHSATVAAVGERFLARDITFQNTAGPSKHQAVALRVGSDFSAFYNCDMLAYQDTLYVHSNRQFFVKCLIAGTVDFIFGNAAVVLQDCDIHARRPNSGQKNMVTAQGRTDPNQNTGIVIQKCRIGATSDLQSVKGSFPTYLGRPWKEYSQTVIMQSAISDVIRPEGWSEWTGTFALNTLTYREYSNTGAGAGTANRVKWRGFKVITAAAEAQKYTAGQFIGGGGWLSSTGFPFSLGL

SEQ ID NO: 696 - protein, 256 aa, Arabidopsis thaliana
SFSVLNLKFSYFQRFTLTDLFLQFYPNKVGSVKKTEVVFVAPTGEEISNRKQLEQYLKSHPGNPAIAEFDWTTSGTPRRSARISEKTKATPSPDKEPPKKRGRTKSPVSKKDAEGEKSEGGGEENSHVKDTEMNPPEGIAENENVTDKNGSGETERVNDAKENIVAEETPNAAPVQEEGESMKEKALDSVDDKSKETDKEKDTGSIEKNSVDVEKKTVEASDEKKNSEAETRNHEENGLTTEAEGKEKTAEGEATG

SEQ ID NO: 697 - protein, 373 aa, Arabidopsis thaliana
MGYMCDFCGEQRSMVYCRSDAACLCLSCDRNVHSANALSKRHSRTLVCERCNAQPASVRCSDERVSLCQNCDWSGHDGKNSTTTSHHKRQTINCYSGCPSSAELSSIWSFCMDLNISSAEESACEQGMGLMTIDEDGTGEKSGVQKINVEQPETSSAAQGMDHSSVPENSSMAKELGVCEDDFNGNLISDEVDLALENYEELFGSAFNSSRYLFEHGGIGSLFEKDEAHEGSMQQPALSNNASADSFMTCRTEPIICYSSKPAHSNISFSGITGESNAGDFQDCGASSMKQLSREPQPWCHPTAQDIIASSHATTRNNAVMRYKEKKKARKFDKRVRYVSRKERADVRRRVKGRFVKSGEAYDYDPMSPTRSY

SEQ ID NO: 698 - protein, 547 aa, Arabidopsis thaliana
MGDTEKCNSDMIQRLHSSFGTTSSSIPKNPISQLDLNPNFIRSSAPQFSKPFSDSGKRIGVPPSHPNLIPPTSPFSQIPTTRQPGSHNFNPGGANHSRSMSQPNSFFSFDSLPPLSPSPFRDHDVSMEDRDSGVFNSNHSLPPSPFTRCNSTSSSSLRVGESLPPRKSHRRSNSDIPSGFNSMPLIPPRPLERSFSGGECADWSKSNPFVKKESSCEREGVGEREAMDDLFSAYMNLENIDVLNSSEADDSKNGNENRDDMESSRASGTKTNGSDTEGESSSVNESANNNMNSSGEKRESVKRRAAGGDIAPTTRHYRSVSVDSCFMEKLSFGDESLKPPPSPGSMSRKVSPTNSVDGNSGAAFSIEFNNGEFTAAEMKKIMANDKLAEMAMSDPKRVKRILANRQSAARSKERKMRYIVELEHKVQTLQTEATTLSAQLTLLQRDMMGLTNQNNELKFRLQAMEQQARLRDALNEALNGEVQRLKLAIGESSQNESERSKMQSLNAEMFQQLNISQLRQQPQQMQQQSHQQNHQNGTMATKSESNE

SEQ ID NO: 699 - protein, 1074 aa, Arabidopsis thaliana
MLSVLFKVYGAMVDSGFPEHEIAASDKEKVSNLVPLVSTHGIIQSSEAEYCGICSNPILYKYPGCMILKRTLTTFENQNLKRCKIDSEIEYGRKKGEIIVYKKRQRATVDQPCSKEPELLTSSSSSLTSKEESQQVCSDQSKSSRGRVRAVPSRFKDSIVGTWKSSRRKGESTESSHDDDDVSLGKKVKGFSGSSKLHRSKDSKVFPRKDNGDSSEVDCDYWDVQISYDDANFGMPKKSDASRKGVYKPEEFTVGDLVWAKCGKRFPAWPAVVIDPISQAPDGVLKHCVPGAICVMFFGYSKDGTQRDYAWVRQGMVYPFTEFMDKFQDQTNLFNYKASEFNKALEEAVLAENGNFGDAEIISPDSSATESDQDYGPASRFQARFLDTYSFSFFWLDVQVCSSNCFGKTKGSYHEDIRTCDGCGSVMPLKSLKRTKDSQPEELLCKHCSKLRKSNQYCGICKRIWHPSDDGDWVCCDGCDVWVHAECDNITNERFKELEHNNYYCPDCKVQHELTPTILEEQNSVFKSTEKTTETGLPDAITVVCNGMEGTYIRKFHAIECKCGSCGSRKQSPSEWERHTGCRAKKWKYSVRVKDTMLPLEKWIAEFSTYTLETQMLDKQKMLSLLEEKYEPVRAKWTTERCAVCRWVEDWEENKMIICNRCQVAVHQECYGVSKSQDLTSWVCRACETPDIERDCCLCPVKGGALKPSDVEGLWVHVTCAWFRPEVGFLNHENMEPAVGLFKIPANSFLKVCTICKQTHGSCVHCCKCATHFHAMCASRAGYNMELHCLEKNGVQRTRKSVYCSFHRKPDPDSVVVVHTPSGVFGSRNLLQNQYGRAKGSRLVLTKKMKLPGFQTQTQAEQSRVFDSLSAARCRIYSRSNTKIDLEAISHRLKGPSHHSLSAIENLNSFKATDFTSFRERLKHLQRTENFRVCFGKSGIHGWGLFARKSIQEGEMIIEYRGVKVRRSVADLREANYRSQGKDCYLFKISEEIVIDATDSGNIARLINHSCMPNCYARIVSMGDGEDNRIVLIAKTNVAAGEELTYDYLFEVDESEEIKVPCLCKAPNCRKFMN

SEQ ID NO: 700 - protein, 2289 aa, Arabidopsis thaliana
MAGVNLQLRHAYSIAQFVPTVSSPPPLPTQRVRLGTSPSRVLLCNLRANSAAAPILRTTRRSVIVSASSVSSAVDSDSLVEDRDDVGRIPLLEVRDLRAVIAESRQEILKGVNLVVYEGEVHAVMGKNGSGKSTFSKVLVGHPDYEVTGGSIVFKGQNLLDMEPEDRSLAGLFMSFQSPVEIPGVSNMDFLNMAFNARKRKLGQPELDPIQFYSHLVSKLEVVNMKTDFLNRNVNEGFSGGERKRNEILQLAVLGAELAILDEIDSGLDVDALQDVAKAVNGLLTPKNSVLMITHYQRLLDYIKPTLIHIMENGRIIKTGDNSLAKLLEKEGYKAISDILMGNACVGPNISGNGFLQTVTAAMWRPRIGAEQASSSSHGNGQVSKEAASEPATDQVQNKPPEPITMPSSKTNPETKLKPDLEIQPEEKKEKVLAEETKQKVVPEESKQEVPPEESKREVVVQPESAKPETKSESKPETTKPETTSETKPETKAEPQKPKHMRRVSSAGLRTESVLQRKTENFKEFYSLGRKLGQGQFGTTFLCLEKGTGNEYACKSISKRKLLTDEDVEDVRREIQIMHHLAGHPNVISIKGAYEDVVAVHLVMELCSGGELFDRIIQRGHYTERKAAELARTIVGVLEACHSLGVMHRDLKPENFLFVSREEDSLLKTIDFGLSMFFKPDEVFTDVVGSPYYVAPEVLRKRYGPESDVWSAGVIVYILLSGVPPFWAETEQGIFEQVLHGDLDFSSDPWPSISESAKDLVRKMLVRDPKRRLTAHQVLCHPWVQIDGVAPDKPLDSAVLSRMKQFSAMNKFKKMALRVIAESLSEEEIAGLKQMFKMIDADNSGQITFEELKAGLKRVGANLKESEILDLMQAADVDNSGTIDYKEFIAATLHLNKIEREDHLFAAFSYFDKDESGFITPDELQQACEEFGVEDARIEEMMRDVDQDKDGRIDYNEFVAMMQKGSIMGGPIRSQFSCWLMASAARGESSNPYGGGLGTGGKFRKPTARRSQKTPYDRPTTSVRNAGLGGGDVRGGGWLSKLVDPAQRLITYSAQRLFGSLSRKRLGSGETPLQSPEQQKQLPERGVNQETKVGHKEDVSNLSMKNGLIRMEDTNASVDPPKDGFTDLEKILQGKTFTRSEVDRLTTLLRSKAADSSTMNEEQRNEVGMVVRHPPSHERDRTHPDNGSMNTLVSTPPGSLRTLDECIASPAQLAKAYMGSRPSEVTPSMLGLRGQAGREDSVFLNRTPFPQKSPTMSLVTKPSGQRPLENGFVTPRSRGRSAVYSMARTPYSRPQSSVKIGSLFQASPSKWEESLPSGSRQGFQSGLKRRSSVLDNDIGSVGPVRRIRQKSNLSSRSLALPVSESPLSVRANGGEKTTHTSKDSAEDIPGSSFNLVPTKSSEMASKILQQLDKLVSTREKSPSKLSPSMLRGPALKSLQNVEAPKFLGNLPEKKANSPDSSYQKQEISRESVSREVLAQSEKTGDAVDGTSKTGSSKDQDMRGKGVYMPLTNSLEEHPPKKRSFRMSAHEDFLELDDDLGAASTPCEVAEKQNAFEVEKSHISMPIGEKPLTPSEAMPSTSYISNGDASQGTSNGSLETERNKFVAFPIEAVQQSNMASEPTSKFIQGTEKSSISSGKPTSEEKRIPLEEPKKPAAVFPNISFSPPATGLLNQNSGASADIKLEKTSSTAFGVSEAWAKPTESKKTFSNSASGAESSTSAAPTLNGSIFSAGANAVTPPPSNGSLTSSPSFPPSISNIPSDNSVGDMPSTVQSFAATHNSSSIFGKLPTSNDSNSQSTSASPLSSTSPFKFGQPAAPFSAPAVSESSGQISKETEVKNATFGNTSTFKFGGMASADQSTGIVFGAKSAENKSRPGFVFGSSSVVGGSTLNPSTAAASAPESSGSLIFGVTSSSTPGTETSKISASSAATNTGNSVFGTSSFAFTSSGSSMVGGVSASTGSSVFGFNAVSSASATSSQSQASNLFGAGNAQTGNTGSGTTTSTQSIPFQFGSSPSAPSFGLSGNSSLASNSSPFGFSKSEPAVFTSVSTPQLSSTNSSASSSSTMSSPLFGTSWQAPNSSPNSGPVFSSSFTTSSTPTTFSFGGSSAATVSSTTTPIFGASTNNTPSPSPIFGFGSTPPTTPQQPVFGNSGTPSQSLFGNSTPGFAFGAPNNGNGINNNQQVSMEDSMAEDTDQANRASMVAPMFGQAAVSMPQPNFAFGGGAATQPPSMANPFQFGGQPMASTLQNASPFQASQSLEFQGGGSFSLGSTGGGDKSGRRIFKAKKSTRKK

SEQ ID NO: 701 - protein, 895 aa, Arabidopsis thaliana
MLFWVLLSSFCVFCFSSPDGFLSLSCGGSSYTAAYNISWVSDNDYIETGNTTTVTYAEGNSTSSVPIRLFPDPQGRQCYKLPVRKDLSSVLIRATFVYRNYDSQNSPPAFHVSLGRRITSTVDLRTNDPWIEELVWPVNNDSLLLCLLAVKGRGIPVISSLEVRPLPLGSYKYSLEGSPDIILRRSYRINSGYTNGTIRYPSDPFDRIWDPDQSYSPFHASWSFNGLTKLNSFNITENPPASVLKTARILARKESLSYTLSLHTPGDYYIILYFAGILSLSPSFSVTINDEVKQSDYTVTSSEAGTLYFTQKGISKLNITLRKIKFNPQVSALEVYEILQIPPEASSTTVSALKVIEQFTGQDLGWQDDPCTPLPWNHIECEGNRVTSLFLSKINLRSISPTFGDLLDLKTLDLHNTSLTGAIQNVGSLKDLQKLNLSFNQLESFGSELEDLVNLEVLDLQNNSLQGSVPETLGKLKKLRLLNLENNNLVGPLPQSLNITGLEVRITGNPCLSFSSISCNNVSSTIDTPQVTIPINKKQRKQNRIAILLGVSGGALFATFLVFVFMSIFTRRQRNKERDITRAQLKMQNWNASRIFSHKEIKSATRNFKEVIGRGSFGAVYRGKLPDGKQVAVKVRFDRTQLGADSFINEVHLLSQIRHQNLVSFEGFCYEPKRQILVYEYLSGGSLADHLYGPRSKRHSLNWVSRLKVAVDAAKGLDYLHNGSEPRIIHRDVKSSNILLDKDMNAKVSDFGLSKQFTKADASHITTVVKGTAGYLDPEYYSTLQLTEKSDVYSFGVVLLELICGREPLSHSGSPDSFNLVLWARPNLQAGAFEIVDDILKETFDPASMKKAASIAIRCVGRDASGRPSIAEVLTKLKEAYSLQLSYLAASAHTD

SEQ ID NO: 702 - protein, 677 aa, Arabidopsis thaliana
MQLSSLSHTSITHKDKKKKMGIELQNHQSHHEEASPAEEPMSRWLINTPEPPSMWQELIGYIRTNVLAKKKHKRNKTKNSSSNLVYSCLKSAFPILSWGRQYKLNLFKKDLMAGLTLASLCIPQSIGYANLAGLDPEYGLYTSVVPPLIYSTMGTSRELAIGPVAVVSLLLSSMVRDLQDPVTDPIAYRKIVFTVTFFAGAFQAIFGLFRLGFLVDFLSHAALVGFMAGAAIVIGLQQLKGLFGLTHFTNKTDVVSVLSSVFHSLHHPWQPLNFVIGSSFLIFILLARFIGKRNNKLFWIPAMAPLISVVLATLIVYLSNAESRGVKIVKHIKPGFNQLSVNQLQFKSPHLGQIAKIGLISAIIALTEAIAVGRSFATIKGYRLDGNKEMMAMGFMNIAGSLSSCYVATGSFSRTAVNFSAGCETVVSNIVMAITVMISLEVLTRFLYFTPTAILASIILSALPGLIDVSGALHIWKLDKLDFLVLIAAFFGVLFASVEIGLLLAVGISFARIMLSSIRPSIEALGRLSKTDIFGDINQYPMANKTAGLLTLRISSPLLCFANANFIRDRILNSVQEIEGEENEQEVLKENGLQVVILDMSCVMGVDTSGVFALEELHQELASNDIRLVIASPRWRVLHKLKRAKLDEKIKTENIYMTVGEAVDIYVRARSTSHELC

SEQ ID NO: 703 - protein, 752 aa, Arabidopsis thaliana
MKLLPNPSLTLFPFFTPYTSKHIFRPIKVSVSVQTPPPDFDFRNDIASESRAAIAKTYPELLDLADNGTLILLQKQSFGPVPAWRKEFVEPEAIWLVGTSHISPESASIVERVVRTVKPDNVAVELCRSRKVQFFIQTKFGAGIMYTSSVGGEVDQNLKSGELSLTGTGFLGAVGRSLDLGGQTALALRLLLAVFSSKLSSVADRPFGDEFRAARKASEEVGAQLVLGDRPIEITLQRAWNSLKWGEKFNLVMAVTRVITSSSGISAAELKEQETDENSGSLQLYERLSFSYPALLMPLIHERDTYLAWSLKRSKAVNGCKTVVGVIGKGHMNGVIYALVSDSGDLRFRDLVGRGDSYNGGTGTTSNGIMKPVFCGNFEYDARESDLERLFRKYGKVERVDMKADAHASLVDLYQPLTAEAANQMEFAPPRFAFVYMEDERDAEDAIRALDRFEYGRTGRRLRVEWTKNDRGGAGRSGGSRRSSSGLRPSKTLFVINFDAQNTRTRDLERHFEPYGKIVNVRIRRNFAFIQYEAQEDATRALDATNSSKLMDKVISVEYAVKDDDSRGNGYSPERRRDRSPDRRRRSPSPYRRERGSPDYGRGASPVAHKRERTSPDYGRGRRSPSPYKRARLSPDYKRDDRRRERVASPENGAVRNRSPRKGRGESRSPPPYEKRRESRSPPPYEKRRESRSPPPYEKRRERSRSRSKSSPENGQVESPGQIMEVEAGRGYDGADSPIRESSPSRSPPAEE

SEQ ID NO: 704 - protein, 169 aa, Arabidopsis thaliana
MAASLSSRLIKGIANLKAVRSSRLTSASVYQNGMMRFSSTVPSDSDTHDDFKPTQKVPPDSTDSLKDIVENDVKDNPVMIYMKGVPESPQCGFSSLAVRVLQQYNVPISSRNILEDQELKNAVKSFSHWPTFPQIFIKGEFIGGSDIILNMHKEGELEQKLKDVSGNQD

SEQ ID NO: 705 - protein, 1157 aa, Arabidopsis thaliana
MVSHKVLEFGDDGYKLPAQARAPRSLRKKRIYEKKIPGDDKMCAIDLLATVAGSLLLESKSPVNACLVVQNTVKNEYPADENPVKAVPYSESPSLFDNGKCGFSSVITNPNHLLVGDKVGKEVEGFSSLGVSGDVKPDVVASIGSNSSTEVGACGNGSPNESRDDVNLFSRNDDDENFSGYIRTRMTRPVPRIGDRRIRKILASRHWKGGSKNNTDAKPWYCSKRSYYLHHHQRSYPIKKRKYFDSVYDSNSDDYRLQGKTHKGSRTISSMKSRNASFVSRDHHVKLRIKSFRVPELFVEIPETATVGSLKRMVMEAVTTILGDGLRVGLMVQGKKVRDDGKTLLQTGISEENNHLDSLGFSLEPSLETTPQPLLSSYLSDHACDDVTLCHDNALDSSHEPEPSPADSFGKLGTSDHSRALIPVASAAMLAPRPPNRKFKRTEQQLAAQRRIRRPFSVTEVEALVQAVEKLGTGRWRDVKVRAFEDADHRTYVDLKDKWKTLVHTARISPQQRRGEPVPQELLDRVLKAHAYWSQHLMHQLQTEPPSTQFMVHMCPILGKNTQKLVLVSERFCFMDAILPVPVDGFRFDTGSGSCCKPRNNLESGTTNRFTCFNESESQSNPSPTESKVCSDYLPVFKYINDMLMEEDLEGQSCMLEDSLALQAAERSFFEVLQDQTPISGDLEDGSLGNFSSITSLHQPEVSEESTRRYRHRDDDEDDDLESGRKSKLPAISTVDELAEKFEEVLLVCQKNDQGEATEKKTRHVKGSSNRYKQQKSDQPVDMRNLLMQCAQAVASFDQRRAFEKLKEIREHSSRHGDATQRLGYHFAEALEARITGTMTTPISATSSRTSMVDILKAYKGFVQACPTLIMCYFTANRTINELASKATTLHIIDFGILYGFQWPCLIQALSKRDIGPPLLRVTGIELPQSGFRPSERVEETGRRLKRFCDKFNVPFEYSFIAKNWENITLDDLVINSGETTVVNCILRLQYTPDETVSLNSPRDTALKLFRDINPDLFVFAEINGTYNSPFFLTRFREALFHCSSLFDMYETTLSEDDNCRTLVERELIIRDAMSVIACEGSERFARPETYKQWQVRILRAGFRPAKLSKQIVKDGKEIVKERYHKDFVIDNDNHWMFQGWKGRVLYAVSCWKPAKK

SEQ ID NO: 706 - protein, 363 aa, Arabidopsis thaliana
  misc_feature (113)..(113): Xaa can be any naturally occurring amino acid
  misc_feature (127)..(127): Xaa can be any naturally occurring amino acid
  unsure (1)..(363): unsure at all Xaa locations
MAAAISAAVSLPSSKSSSLLTKISSVSPQRIFLKKSTVCYRRVVSVKAQVTTDTTEAPPVKVVKESKKQEEGIVVNKFKPKNPYTGRCLLNTKITGDDAPGETWHIVFTTEGXEVPYREGQSIGVIXPEGIDKNRGSPHKLRLYSIASSAIGDFGDSKTVSLCVKRLVYTNDGGEIVKGVCSNFLCDLKPGDEAKITGPVGKEMLMPKDPNATIIMLGTGTGIAPFRSFLWKMFFEEHEDYKFNGLAWLFLGVPTSSSLLYKEEFEKMKEKNPDNFRLDFAVSREQTNEKGEKMYIQTRMAEYAEELWELLKKDNTFVYMCGLKGMEKGIDDIMVSLAAKDGIDWLEYKKQLKRSEQWNVEVY

SEQ ID NO: 707 - protein, 390 aa, Arabidopsis thaliana
  misc_feature (115)..(115): Xaa can be any naturally occurring amino acid
  unsure (1)..(390): unsure at all Xaa locations
MSGSLMNLFSLCFKPFGHVCDNSEAGSGGGGGVSGGTGGEGKDGLLWFRDLGKYCGGDFSMAVIQANQVLEDQSQVESGNFGTFVGVYDGHGGPEAARYVCDHLFNHFRGFMVMXEISAETQGVVTRETIERAFHATEEGFASIVSELWQEIPNLATVGTCCLVGVIYQNTLFVASLGDSRVVLGKKGNCGGLSAIQLSTEHNANNEDIRWELKDLHPDDPQIVVFRHGVWRVKGIIQVSRSIGDMYMKRPEFNKEPISQKFRIAEPMKRPLMSATPTILSHPLHPNDSFLIFASDGLWEHLTNEKAVEIVHNHPRAGSAKRLIKAALHEAARKREMRYSDLRKIDKKVRRHFHDDITVIVVFLNHDLISRGHINSTQDTTVSIRSALEH

SEQ ID NO: 708 - protein, 248 aa, Arabidopsis thaliana
MGRGRVELKRIENKINRQVTFAKRRNGLLKKAYELSVLCDAEVALIIFSNRGKLYEFCSSSNMLKTLDRYQKCSYGSIEVNNKPAKELENSYREYLKLKGRYENLQRQQRNLLGEDLGPLNSKELEQLERQLDGSLKQVRSIKTQYMLDQLSDLQNKEQMLLETNRALAMKLDDMIGVRSHHMGGWEGGEQNVTYAHHQAQSQGLYQPLECNPTLQMGYDNPVCSEQITATTQAQAQPGNGYIPGWML

SEQ ID NO: 709 - protein, 380 aa, Arabidopsis thaliana
  misc_feature (12)..(12): Xaa can be any naturally occurring amino acid
  unsure (1)..(380): unsure at all Xaa locations
MCGGAIISDFIXPPPRSLRVTNEFIWPDLKNKVKASKKRSNKRSDFFDLDDDFEADFQGFKDDSAFDCEDDDDVFVNVKPFVFTATTKPVASAFVSTGIYLVGSAYAKKTVESAEQAEKSSKRKRKNQYRGIRQRPWGKWAAEIRDPRKGSREWLGTFDTAEEAARAYDAAARRIRGTKAKVNFPEEKNPSVVSQKRPSAKTNNLQKSVAKPNKSVTLVQQPTHLSQQYCNNSFDNSFGDMSFMEEKPQMYNNQFGLTNSFDAGGNNGYQYFSSDQGSNSFDCSEFGWSDHGPKTPEISSMLVNNNEASFVEETNAAKKLKPNSDESDDLMAYLDNALWDTPLEVEAMLGADAGAVTQEEENPVELWSLDEINFMLEGDF

SEQ ID NO: 710 - protein, 885 aa, Arabidopsis thaliana
MERHCVFVATFLLMLHLVHAQDQTGFISVDCGLAPRESPYDAPQTGLTYTSDAGLVAGGKPGRLAKEFEPLADKPTLTLRYFPEGVRNCYNLNVTSDTNYLIKATFVYGNYDGLNVGPNFDLYLGPNLWTTVSSNDTIEEIILVTRSNSLQVCLVKTGISIPFINVLELRPMKKNMYVTQGGSLKYLFRGYISNSSTRIRFPDDVYDRKWYPLFDDSWTQVTTTLDVNTSLTYELPQSVMAKAATPIKANDTLNITWTVEPPTTQFYSYVHFAELQALRANEAREFNVTLNGVYTFGPFSPIPLKTASIVDLSPGQCDGGACLLQVVKTLKSTLPPLLNAIEAFTVIDFPQMETNGDDVAAIKNVQGTYGLSRISWQGDPCVPKLFLWDGLNCNNSDISTPPIITSLDLSSSGLTGSITQAIQNLTHLQVLDLSDNNLTGEVPEFLADIKSLLVINLSGNNLSGSVPPSLLQKKGMKLNVEGNPHLLCTAGSCVKKGEDGHKKKSVIVPVVASIASIAVLIGALVLFLILRKKRSPKVEGPPPSYMQASDGRSPRSSEPAIVTKNRRFSYSQVAIMTNNFQRILGKGGFGMVYHGFVNGTEQVAVKILSHSSSQGYKQFKAEVELLLRVHHKNLVGLVGYCDEGENLALIYEYMANGDLKEHMSGTRNRFTLNWGTRLKIVVESAQGLEYLHNGCKPPMVHRDVKTTNILLNEHFQAKLADFGLSRSFPIEGETHVSTVVAGTPGYLDPEYHRTNWLTEKSDVYSFGILLLELITNRPVIDQSREKPHIAEWVGVMLTKGDIHSIMDPSLNEDYDSGSVWKAVELAMSCLNPSSARRPTMSQVVIELNECLASENARGGASRDMDSKSSIEVSLTFGTELSPTAR

SEQ ID NO: 711 - protein, 225 aa, Arabidopsis thaliana
MSDSVAGDFPPDPLLASGAFISSAGDGTLDSSAKRRPIQGGIGISGSGESVRIGMANGTDQVNHQTESKSRKRAAPGDNWLPPGWRVEDKIRTSGATAGSVDKYYYEPNTGRKFRSRTEVLYYLEHGTSKRGTKKAENTYFNPDHFEGQGSNRVTRTATVPPPPPPPLDFDFKNPPDKVSWSMANAGEEGWIPNIGDVKVQDSVRRDWSTAFTFITSRNPSKVSA

SEQ ID NO: 712 - protein, 149 aa, Arabidopsis thaliana; identical to SEQ ID NO: 457

SEQ ID NO: 713 - protein, 806 aa, Arabidopsis thaliana
MTRGAGGETVAWSYFCRDVVPFTAMVAVECVTVGSNTLFKAATLRGLSFYVFVFYTYVVATLVLLPLSLIFGRSKRLPSAKTPVFFNIFLLALVGFMSLIVGCKGIEYSSPTLASAISNLTPAFTFTLAVIFRMEQIVLRSSATQAKIIGTIVSISGALVVILYKGPKVLTDASLTPPSPTISLYQHLTSFDSSWIIGGLLLATQYLLVSVWYILQTRVMELYPEEITVVFLYNLCATLISAPVCLFAEKDLNSFILKPGVSLASVMYSGGLVSSFGSVIHTWGLHLKGPVYISLFKPLSIVIAVAMGVMFLGDALYLGSVIGSLILSLGFYTVIWGKAREDSIKTVAESLSSKSTIMTMRSSLPSSSSAYSLASTSLSNRLETIFKKASELCTLCDIEACVIYYGPDGELKTWPPEREKVRDIALRYSQLNEALRRKKSVNLHGFLNKKKKNKGLKNTDKKRKTSLKKVNVLKYPLADHYPPDQVSPLIQSLELHVSKFHERLEFLESRKQNETQPDHHSLASSSLNHQTQSLNPSQFSLFMYNHGDNTLSQIPVSASNFNQDYFSALLEQSELKNQLMKQEICGNDQNQNMWMGNITNNNFQLPCVSVQESVNNFGLMHKEFYGCDHNMSVGNINSNSCEHPCVSSTQHYSAVEESVNNPWLNQLMQNELYGYGRKVLDAASFTSFESSWIIGGLLITSQYLLVSVWYILQSQVMEIYPEEITVVFFYNLCGMLISPPVCRKRLDLLGVFDSSLCSVIHTWGLHLNGPVYVSLFKPLFIAVAVVMGAIFLGDALHLWMCHIFQL

SEQ ID NO: 714 - protein, 1336 aa, Arabidopsis thaliana
MNSISSSSMRRNWIHDVFPSFHGADVRKSFLSHTLKELRSKGIDLFIDNDILRGEFIGPELKKAIHGSRLAIVLLSKRYASSSWCLDELAEIMKCKEAFGQTVMAIFYEVDPTDVEKQTGGFGEVFTETCEGKTAEDIEKWSQALAKVATVTSYLSSSWDTETEMIEEIATDVSNMLTKSTQSRDFVGIIGMGSHMEKMKPLLCLESEEVRMIGIWGPPGIGKTTIARFLFNQLFGNFGLIVFMDNIKAMYTIPIGSDDYSAKLDLQQKFMSQIINEKDIKIPHLGVAQERLKDEKVLVVLDGVDQLFQLEAMAKETRWFGHGSRIIITTPDLKLLKAHGITHIYKVDFPPPAEALEIFCMYAFEQKSPKEGFEMLAWEATILACQLPLGLRVIGSYFRGKYSKKMWEEALPELRSHLDGEIETVLKFNYDALSEKDKSLFLHLTCFFNFGSIENIEVYLAKTFSDFRQRLDLLVERFLISIPGKRQFLVAAGDICQVLSDDTAGSSTVIGIDLTLPEKADEDEEFYISERAFENMTNLQFLKISGDCSRLYFPPRLNSISRKLILLSWGQFPMTLLPSNFNPQSLVNLTMRRSKLEKLWDGNKPLRNLKMMDLESSIDLKELPDLSTATNLETLILEGCSSLTKLPDLLTATSLKTLNLDSCSSLMELPSLPGNANATNLTYLSLRGCSSLVELPSSIGNATNIKELVLDDCSNLVELPFSIGNLHKLLRLIMRGCSKLEVLPTNINLESLEELYLQNCSLLKTFPEISTNIKLLHLTRTAVEEVPLGIRSWSRLEELHMSYCENLKNSPHALDSITDLHLTDTEIQELGPWIKGFSRLRRLVLNGSQKLVSLPQLPDSLLFLDAENCESLEKLDCSFCNPDMSLNFYNCFKLNQEARDLIIQASNRPVSVVPGGEVPAYFSDRATGSIVTVKLNERPPHKPLRFKACVMLVDNVDNPPCGGTYSMYLQYKIMDKQNGVIVPCPPGYLSLPRAVTFVGHLYTFNLEVDVTSNELCFELTVYCKEWDDPSFSGSCTTSSFMDSRVSILFVCAIAVSCFTSGSASSPVDFSVCNYEFELFRFDLEAKCPPSLYPTPPIEVDGDSLDRLMASQHGNAYMSVLFYASWCPFSRAVRPKFDMLSSMFPQIQHLAVEHSQALPSYGIHSLPSILMVNQTLNARYHGRKDLISLIEFYEEATGLQPVQYVAEGEPTGLNAGDGNLITWLRKGTSIREIFKQDPFLVLSLLFICLQMAILVFPIAESRMRALWASYVANLNLGRFGEISQLFNRGIHMVDVRRLWLKLSLVKTRNFHERAKNAQAWASSLASVSLGQTSSDQS

SEQ ID NO: 715 - protein, 401 aa, Arabidopsis thaliana
MITTSSFNSQRIYTTMASSSSSSLSFSTSKKNKTFFKKPNSAFSSSRATSLIKRQQTVFKKAKELSILCDIDVCVICYGSNGELKTWPEEREKVKAIARRYGELSETKRRKGSVDLHEFLEKMNKDDPEKEEKKKIKVRRVPKVKYPVWDPRFDNYSVEQLMGLVQSLERNLTRIQHRTCAVVEAQGQRRVQYTNMANQELMMANTMNQLQQHSNQVSMYLWNHGNGAFSQIPVSALASNQTQSLAPIPPELMIYPNSDAGNYSGSLGVQGTGINGLQNMNMLTYNNINSVNDFSKQFDQNSRAESYSSLLGVHEDGNNEFENPNMSSRNNFNVQDCAGLLGMQGAGTNGLQSMNMHDYSNNNSINSNGLSHQYVQFPTYNSQHQDRVFNLDQNGNNTRSL

SEQ ID NO: 716 - protein, 853 aa, Arabidopsis thaliana
MVSHKCVEEFGYASYLVPSNARAPRSARKRRSIEKRISKEDDNMCAIDLLATVAGHLSFESGSSLMSIDKLIEDHRVKEEFPEEEKPLMPVALSPYRGSLSPCGFSSVINGKVENEVDGFSYSGGSDACQVGNFSQDVKPDIDGDAVVLDARPNVVVSLGSSSRTEVPSIGNCVSHGVRDDVNLFSRDDDENFSKYIHPRVTKHSPRTVPRIGDRRIRKILASRHWKGGSRHSDTKPWRNYYLHQQRSYPIKKRKNFDHISDSVTDDYRMRTKMHRGSRKGQGASFVASDSHGNNGVSSEFFVGLFLSPPIKKRMVMEAVSTLLSDGHRVGLMVQGKKVRDDNKTLHQTGISQDNSHLDSLDFSLEPSSEMPQLLTSHPLGHACEELLPVCQATKIDNVLESDHHDSALFPSDSLGNNNVTEDSKAMISVALNELSSQSQPPSRKSRRSEQQQQQAAQRRIRRPFSVAEVEALVQAVEKLGTGRWRDVKLCAFEDADHRTYVDLKDKWKTLVHTAKISPQQRRGEPVPQELLNRVLNAHGYWTQQQMQQLQQNVNKLEQETQSQTTEALEVVSPLCITTTIDDYVLANKGMKRICSVSSVQLFSRSFRALASPRSLNYPLQCIKRSSVRMESSNFSSGVRTESSVKPRGALIVLEGLDRSGKSTQCAKLLSFLNGLGHPTELWRFPDRETSVGQMISAYLSNKSQLDDHTIHLLFSANRWEKRSLMEEKLKTGTTLIVDRYSYSGVAFSSAKGLDIEWCKAPEIGLLAPDSVLYLDISPERAAERGGYGDERYERVEFQKKVADFYQTLGDSSWKIINASDAMEEVEKKIQQVVLDQVKECTEGKPLSLLWSS

SEQ ID NO: 717 - protein, 247 aa, Arabidopsis thaliana
MEPKLTHLCYCLLLFLPLLCQSTIAKPSSSPNPSSSINFIVSSCRVTRYQTLCVKCLAAFADKIRRNENQLAQTALAVTLVRVQSTTIYVGKLTKARRIKRREYLAVKDCVENLGDGLEMLAQSMRELKQVGRSGRDRDEFLWRLSNVETWVSAALTDETTCLDGFDGKVMDGVVKSAIRRRVVHVARVTSNALALAWDVYAFVMVSTRDNDDFNGFMEKKNWPQKLDELLHFNIVTVSDISNGWPQ

SEQ ID NO: 718 - protein, 208 aa, Arabidopsis thaliana
MGESFRLFNHHHFLTTFLIIIAMLKLVHTTTTTTTTTTTTTTTTNTEFVKSSCTFTTYPRLCFSSLSTHASLIQTSPKLMAHAALNITLASAKVTSAMMVRLSNSRLKPKEVSAMRDCVEELGDTLEELRKSIGEMCQLSGSNYEVYISDIQTWVSAALTDVNTCTDGFEGEDMDGKVKVLVRGRILVIAHLTSNALALINHFASIHG

SEQ ID NO: 719 - protein, 244 aa, Arabidopsis thaliana
MRKGRGSSVVGPALPVTAGGSVKEPRYRGVRKRPWGRFAAEIRDPLKKSRVWLGTFDSAVDAARAYDTAARNLRGPKAKTNFPIDCSPSSPLQPLTYLHNQNLCSPPVIQNQIDPFMDHRLYGGGNFQEQQQQQIISRPASSSMSSTVKSCSGPRPMEAAAASSSVAKPLHAIKRYPRTPPVAPEDCHSDCDSSSSVIDDGDDIASSSSRRKTPFQFDLNFPPLDGVDLFAGGIDDLHCTDLRL

SEQ ID NO: 720 - protein, 979 aa, Arabidopsis thaliana
MGLYWAILMSTMNSCPNYLGTVLGCKRVDIACANGFKDPAFTEVVVSVGLEHHLFIMITRPAREIFLTSSSLSFSSMSSSVSWDDAVERSTKESKASSEDTSQQNWELSNASSSKGSDISGVTHVRMQPSSSSQGSEISGLTHLRMQPAPSPPSRLRPVHLMNNGIANYDPGRIPASVFSKNGDVDWSEISNESLFSLKIDGYRKSNAQGSRHSNLKPDEVLMSGEFLRYSPSLVVKPEDAKEKTSEVEEVKNNEETRLQSHNHREKYPSFPDVPLSSIPNNFYCLYAPRTKPVSFSLPVGEKKSMKRKKRRKNKKKKNKKEKKKKKCCTCMWTWLCSVFSKDPYNGWGMNNNFSGHRNKGKSFQSERKRRNSSGCVGCYREHRSTAASLKDPPSNSIARPCKKPSVSEDFWSTSTVDMDNITFPSQGSLSSSNQTFDSQSAARNSNAPPEYVNQGLLLWNQTRERWVGKDKPNNPVDHNQGAKLNWNTATYDSLLGSNKLFPQPIPLTEMVDFLVDIWEQEGIRLVPTRESEPKSIKAKKMFRIVIGLLIWAFSMESSSRRVGIKQKKNIRRENSSGHVPDLNTTLHSTLLSGKQILPYPSMKRRPHWIRVVLKEFYPKRAGTPRKTEIVFVAPTGEEISSRKQLEQYLKAHPGNPVISEFEWTTGETPRRSSRISQKVKATTPTPDKEPLLKKRRSSLTKKDNKEAAEKNEEAAVKENMDVDKDGKTENAEAEKEKEKEGVTEIAEAEKENNEGEKTEAEKVNKEGEKTEAGKEGQTEIAEAEKEKEGEKAEAENKEAEVVRDKKESMEVDTSELEKKAGSGEGAEEPSKVEGLKDTEMKEAQEVVTEADVEKKPAEEKTENKGSVTTEANGEQNVTLGEPNLDADAEADKGKESKEYDEKTTEAEANKENDTQESDEKKTEAAANKENETQESDVKKTEAAVAEEKSNDMKAEDTNRSLEANQVQQQQGAAASVSC

SEQ ID NO: 721 - protein, 214 aa, Arabidopsis thaliana
MFDCKEKGYVFSKINFADYGHSSGDCGNFRRGTCGAPDTLRLVKKNCLGKWQCILLLGEGTRCLVRLIARVLLGSLLKLLVQKLRARGIKINGDQKRVLSNSNHPRSDFRKSLQHGKEHSACTNHKSVRGPITRIFCQDGYVITNINFADYGNPTGTCEHFRHGKCGAPATLRLVKKNCLGKPKCVFLVTDEMFGPSHCKGPPTLAVDATCTKT

SEQ ID NO: 722 - protein, 125 aa, Arabidopsis thaliana
MGSMFSGNRMSKEEMEVVVNKAKEIVSAYPVVVFSKTYCGYCQRVKQLLTQLGATFKVLELDEMSDGGEIQSALSEWTGQTTVPNVFIKGKHIGGCDRVMETNKQGKLVPLLTEAGAIADNSSQL

SEQ ID NO: 723 - protein, 1431 aa, Arabidopsis thaliana
MAQILAASPTCQMRVPKHSSVIASSSKLWSSVVLKQKKQSNNKVRGFRVLALQSDNSTVNRVETLLNLDTKPYSDRIIAEYIWIGGSGIDLRSKSRTIEKPVEDPSELPKWNYDGSSTGQAPGEDSEVILYPQAIFRDPFRGGNNILVICDTWTPAGEPIPTNKRAKAAEIFSNKKVSGEVPWFGIEQEYTLLQQNVKWPLGWPVGAFPGPQGPYYCGVGADKIWGRDISDAHYKACLYAGINISGTNGEVMPGQWEFQVGPSVGIDAGDHVWCARYLLERITEQAGVVLTLDPKPIEGDWNGAGCHTNYSTKSMREEGGFEVIKKAILNLSLRHKEHISAYGEGNERRLTGKHETASIDQFSWGVANRGCSIRVGRDTEAKGKGYLEDRRPASNMDPYIVTSLLAETTLLWEPTLEAEALAAQKLSLNNCMDNVHPFILVLLTVRACPMVEFKLRKHLSQHRQEKKREREGETKTETKEDRSGQNKLSDSSWSFWRRFSVRPELFRNHRRWFLIQKVLGKLSEPSKPSEKTKEADASTVNGASTGFSWDINRCSAGAAATSVWWDINRCPLPNDVDVRRVSPFIKRALEKLGYTGALTTTAIGILTDVPHDFLTQVYSSGIAIHHIPLDIFELSSAVIYWTWDNLPPSNIMLISNELIFSSLLDKLCGFGYNVALEEDKCSETCETAFPCAQFIVVVQGFENFSTHLKSEEHRKNKFSRKWTKKDLLSPFVKVRTGFHGSPSVAPTEDLTVEELPPRLFALDRYPSETKMNAYSKPEYISYIANVLKGKPEMQFLLDSPFGELFKIPKNKASFNAKLVLGLICRQLVTKKVNEMWIVFGGHPIKFGLREFSILTGLECGKYPKKKDVEDVISVKPECESVWKTLFDERFGDTVPTIADLVSWLQEEESMEGWKQLALSLIILVDGVVAAHSNPNRATSKTVEKTKNLEFFCKYPWGRVSFTRTLGRIAKFQTPYDAQQLIRGLLIGFYLFETIPSIAKLGPDDVPNMTFAERSIHRLASLRAIRTSRILECEAADEVEVNYIVKPADNVCPPSLSWDDEVDDPRVDYIEALLIDGHQWQEDEWVGGYARVPKQRKRNAPGPSPKEPAMKKQKSQMDCDNEENAEDCFGEPVPERIIVEMRRSFKELEDQMYQMQEDMKDFVREQIRVALDPKGKRPEQTILSHDSREPPTSMDKAPVTAKKPSRRMSTKGSTGTRKSSRLTRVSHDVDTFALSVGCNSKEEDLDVPGVHTTAVGGRRKPSKPKKNVSFAVDTTELSDSNKEDMQGFIDEQYGANNESDFTTNDGLDSSAAEEEILDTGFLIVPYAGSTQSHLERRPVEEATVDTEMEEVPSNVSARVSEVDLVDNGPKDVVEPGLVGTHTGADEIADADTEMVDNPSGLPSTSAQEETRDVSVATEANGSESEETYEQCF

SEQ ID NO: 724 - protein, 1587 aa, Arabidopsis thaliana
MKIHLLLAMIGTFVVIIGAQDQEGFISLDCGLPSDESPYDDSFNGLTFTSDSTFIQTGKIDSVDKDLNINLSKQYLTLRYFPEGKRNCYSLDVKRGTTYLIVVSFVYGNYDGLNRDPNFDIHLGPNKWKRIDLDGEKEGTREEIIHKARSNSLDICLVKTGETLPIISAIEIRPLRNNTYVTQSGSLMMSFRVYLSNSDASIRYADDVHDRIWSPFNGSSHTHITTDLNINNSNAYEIPKNILQTAAIPRNASAPLIITWDPLPINAEVYLYMHFAEIQTLEANETRQFDVILRGNFNHSGFSPTKLKLVKTPNSTLPPLINAIEAYSVIEFSQLETSLSDVDAIKNIKNTYKLNKITWQGDPCLPQDLSWESIRCTYVDGSTSPTIISLDLSNNSLTGPVPIFLANMKTLSLINLSGNNLSGSVPQALLDKEKEGLVLKLEGNPDLCKSSFCNTEKKNKFLLPVIASAASLVIVVVVVALFFVFRKKKASPSNLHAPPSMPVSNPGHNSQSESSFTSKKIRFTYSEVQEMTNNFDKALGEGGFGVVYHGFVNVIEQVAVKLLSQSSSQGYKHFKAEVELLMRVHHINLVSLVGYCDEGEHLALIYEYMPNGDLKQHLSGKHGGFVLSWESRLKIVLDAALGLEYLHTGCVPPMVHRDIKTTNILLDQHLQAKLADFGLSRSFPIGNEKNVSTVVAGTPGYLDPEYYQTNWLTEKSDIYSFGIVLLEIISNRPIIQQSREKPHIVEWVSFMITKGDLRSIMDPNLHQDYDIGSVWKAIELAMSCVSLSSARRPNMSRVVNELKECLISETSRIGEGRDMESKGSMEFSRDIYNEDLSAWIVVYPPKSLLIPKAQQAWYSPLMQILSQGTNYLIRASFVYGNYDGRNIMPRFDLYIGPNIWAVVSELDLYSPEEEIIHMTKSTSLQICLVKTGPTTPFISTLELRPLRNDNYITQSGSLKLMQRMCMTETVSTLRYPDDVYDRLWYTDATPVNSSEPITVEYGGYSSGDQVYLYLHFAEIQTLKASDNREFDIVWANNIKKLAYKPKVSQIDTLLNTSPNKCDNTFCKAFLVRTQRSTLPPLLNAYEVYILVEFPYSETHPDDVVAIKKIKAAYGLKIISWQGDPCLPREYKWEYIECSYTNNSIPPRIISLDLSNRGLKGIIEPVLQNLTQLEKLDLSINRLSGEVPEFLANMKSLSNIWNNLKGLIPPALEEKRKNGLKLNTQGNQNLCPGDECKRSIPKFPVTTVVSISAILLTVVVLLIVFIYKKKKTSKEVEAVTNKFERVIGEGGFGIVYHGHLNDTEQVAVKLLSHSSTQGYKQFKAEVELLLRVHHTNLVNLVGYCNEEDHLALVYEYAANGDLKQHLSGESSSAALNWASRLGIATETAQGLEYLHIGCEPPMIHRDVKTTNILLDEHFHAKLADFGLSRSFPVGVESHVSTNVAGTPGYLDPEYYRTNWLTEKSDVYSMGIVLLEIITNQPVIQQVREKPHIAEWVGLMLTKGDIKSIMDPKLNGEYDSSSVWKALELAMSCVNPSSGGRPTMSQVISELKECLIYENSRKEGRSEVDSKSSIELSTSFTAEVTPDAR

SEQ ID NO: 725 - protein, 225 aa, Arabidopsis thaliana
MVSFCELCGAEADLHCAADSAFLCRSCDAKFHASNFLFARHFRRVICPNCKSLTQNFVSGPLLPWPPRTTCCSESSSSSCCSSLDCVSSSELSSTTRDVNRARGRENRVNAKAVAVTVADGIFVNWCGKLGLNRDLTNAVVSYASLALAVETRPRATKRVFLAAAFWFGVKNTTTWQNLKKVEDVTGVSAGMIRAVESKLARAMTQQLRRWRVDSEEGWAENDNV

SEQ ID NO: 726 - protein, 94 aa, Arabidopsis thaliana
MSGPVQQLFHCFSCHEKYLYILLWCAKHSKMLFNWQMMMMKMESEWVGANGEAEKAKTKGLGLHEELRTVPSGPDPLHHHVNPPRQPRNNFQLP

SEQ ID NO: 727 - protein, 899 aa, Arabidopsis thaliana
MEYHPQAIRLCALIFISFYALLHLVEAQDQKGFISLDCGSLPNEPPYNDPSTGLTYSTDDGFVQSGKTGRIQKAFESIFSKPSLKLRYFPDGFRNCYTLNVTQDTNYLIKAVFVYGNYDGLNNPPSFDLYLGPNLWVTVDMNGRTNGTIQEIIHKTISKSLQVCLVKTGTSSPMINTLELRPLKNNTYNTQSGSLKYFFRYYFSGSGQNIRYPDDVNDRKWYPFFDAKEWTELTTNLNINSSNGYAPPEVVMASASTPISTFGTWNFSWLLPSSTTQFYVYMHFAEIQTLRSLDTREFKVTLNGKLAYERYSPKTLATETIFYSTPQQCEDGTCLLELTKTPKSTLPPLMNALEVFTVIDFPQMETNPDDVAAIKSIQSTYGLSKISWQGDPCVPKQFLWEGLNCNNLDNSTPPIVTSLNLSSSHLTGIIAQGIQNLTHLQELDLSNNNLTGGIPEFLADIKSLLVINLSGNNFNGSIPQILLQKKGLKLILEGNANLICPDGLCVNKAGNGGAKKMNVVIPIVASVAFVVVLGSALAFFFIFKKKKTSNSQDLGPSSYTQVSEVRTIRSSESAIMTKNRRFTYSEVVTMTNNFERVLGKGGFGMVYHGTVNNTEQVAVKMLSHSSSQGYKEFKAEVELLLRVHHKNLVGLVGYCDEGENLALIYEYMANGDLREHMSGKRGGSILNWETRLKIVVESAQGLEYLHNGCKPPMVHRDVKTTNILLNEHLHAKLADFGLSRSFPIEGETHVSTVVAGTPGYLDPEYYRTNWLNEKSDVYSFGIVLLEIITNQLVINQSREKPHIAEWVGLMLTKGDIQNIMDPKLYGDYDSGSVWRAVELAMSCLNPSSARRPTMSQVVIELNECLSYENARGGTSQNMNSESSIEVSMNFDIGATPDAR

SEQ ID NO: 728 - protein, 509 aa, Arabidopsis thaliana
MAVTAFNTLKLVSSSLDPIPSVSCSSYSFSLIYVGSPYKRCLKQSCSVRAMTSSSSAASSSSSSFGSRMEESIRKTVTENTVVIYSKTWCSYCTEVKTLFKRLGVQPLVVELDQLGPQGPQLQKVLERLTGQHTVPNVFVCGKHIGGCTDTVKLNRKGDLELMLAEANGEVAENLARPMATLVSSQTYIYHCHISKQALYQAKESYSHRRISRHNHRERLDFSHRNHRLTITRKQQPLSFNTVCFAADEPSEISADARIRSEVLSPFRSVRMFFYLAFIASGSLGGLIATSRLIGALANPARSGEVLEIVKGLGVDIGAASLFAFLYFNENKTKNAQMARLSREENLGKLKMRVEENNKVISVGDLRGVARLVICAGPAEFIEEAFKRSKEYTQGLVERGVVVVAYATDGNSPVLEFDETDIADEEMSQRRKKLWRVTPVFVPEWEKWLNEQKKLANVSSDSPVYLSLRLDGRVRASGVGYPPWQAFVAQLPPVKGMWTGLLDGMDGRV

SEQ ID NO: 729 - protein, 378 aa, Arabidopsis thaliana
MPTLYKKAGCMSPSMEPKCDHCATSQALIYCKSDLAKLCLNCDVHVHSANPLSHRHIRSLICEKCFSQPAAIRCLDEKVSYCQGCHWHESNCSELGHRVQSLNPFSGCPSPTDFNRMWSSILEPPVSGLLSPFVGSFPLNDLNNTMFDTAYSMVPHNISYTQNFSDNLSFFSTESKGYPDMVLKLEEGEEDLCEGLNLDDAPLNFDVGDDIIGCSSEVHIEPDHTVPNCLLIDKTNTSSFTGSNFTVDKALEASPPGQQMNINTGLQLPLSPVLFGQIHPSLNITGENNAADYQDCGMSPGFIMSEAPWETNFEVSCPQARNEAKLRYKEKKLKRSFGKQIRYASRKARADTRKRVKGRFVKAGDSYDYDPSSPTTNN

SEQ ID NO: 730 - protein, 1427 aa, Arabidopsis thaliana
MSGKQQNHRSTSSRPRSKTLILIGSLFTVSLLVILYTSSSSSRASISNPNPSDRPETSFVTSLEHFLIYKAPKLSLPVRDDTVRGESDDDVRKLDEMVFERENRWLNEDPGYPVEFPIKVYVYEMPKKFTFDLLWLFHNTYKETSNATSNGSPVHRLIEQHSIDYWLWADLISPESERRLKSVVRVQKQQDADFFYVPFFTTISFFLLEKQQCKALYRVKPASMGDVLVEKHEMPDFTALKWVTDQPAWKRSEGRDHIFPIHHPWSFKSVRKFVKNAIWLLPDMDSTGNWYKPGQVSLEKDLILPYVPNVDICDTKCLSESAPMRTTLLFFRGRLKRNAGGKIRAKLGAELSGIKDIIISEGTAGEGGKLAAQRGMRRSLFCLCPAGDTPSSARLFDAIVSGCIPVIVSDELEFPFEGILDYKKVAVLVSSSDAIQPGWLVNHLRSLTPFQVKGLQNNLAQYSRHFLYSSPAQPLGPEDLTWRMSIKTSPFVLYNGKVSSLIILIVQHHIAGKLVNIKLHTRRSQRVVKGSRKHWRFFEVAEMEDRHRYLFFIFAIIHYVQAQQGFISLDCGLPSNEPPYIEPVTGLVFSSDADHIPSGISGRIQKNLEAVHIKPYLFLRYFPDGLRNCYTLDVLQNRRYMIKAVFVYGNYDGYNDYPSFDLYLGPNKWVRVDLEGKVNGSVEEIIHIPSSNSLQICLVKTGNSLPFISALELRLLRNDTYVVQDVSLKHLFRRYYRQSDRLIRYPDDVYDRVWSPFFLPEWTQITTSLDVNNSNNYEPPKAALTSAATPGDNGTRLTIIWTLDNPDEQIHLYVHFAELEPVGENTDEALRTLFTRTFYFVVNGKISYDESITPLDLAVSTVETVVNKCDGGNCSLQLVRSEASPGVRVPLVNAMEAFTAIKFPHSETNPDDVISIKVIQATYELSRVDWQGDPCLPQQFLWTGLNCSYMNMSTSPRIISLDLSSHKLTGKIVPDIQNLTQLQKLDLSNNKLTGGVPEFLANMKSLLFIFFHDRNLSNNNLVGSIPQALLDRKNLKLEFEGNPKLCATGPCNSSSGNKETTVIAPVAAAIAIFIAVLVLIIVFIKKRPSSIRALHPSRANLSLENKKRRITYSEILLMTNNFERVIGEGGFGVVYHGYLNDSEQVAVKVLSPSSSQGYKEFKAEVILLQTLNMELTTKVELLLRVHHINLVSLVGYCDEQAHLALIYEYMANGDLKSHLSGKHGDCVLKWENRLSIAVETALGLEYLHSGCKPLMVHRDVKSMNILLDEHFQAKLADFGLSRSFSVGEESHVSTGVVGTPGYLDPEYYRTYRLTEKSDVYSFGIVLLEIITNQPVLEQANENRHIAERVRTMLTRSDISTIVDPNLIGEYDSGSVRKALKLAMSCVDPSPVARPDMSHVVQELKQCIKSENLRLRTGLNQVIDSKSS

SEQ ID NO: 731 - protein, 804 aa, Arabidopsis thaliana
MSGVWVFNNGVIRLVENPNQSGGVSTQSHGRRNVLVYLPTGEAVSSYSSLEQILRSLGWERYFSGDSDLIQYHKRSSIDLISLPRDFSKFNSVYMYDIVVKNPNSFHKQTMPRKGLSNFDDYDDGFDDDDDAFDYDYDVDIDEHEEEAAAEPKEEIAKTQGLWRCAICTYDNVETMFVCDICGVLRHPVAGNQSINKNTAVRVVSLFAIVVLQRRYSDSSFSTYVAPFKFDAPSPDDLVSNGLTSSKTGPKGSGDASMRQKEKQDSVEQKPLKKGGDSSETSSRGRHDKLDDKGGAGGIKSGKSLPKAKADMSNETSSSSKYMETSESLTGTMNKMSLIGETENSSDIKIRGPKSQSKHKPEEWMLLDKESDALSQLNLAIVGHVDSGKSTLSGRLLHLLGRISQKQMHKYEKEAKLQGKGSFAYAWALDESAEERERGITMTVAVAYFNSKRHHVVLLDSPGHKDFVPNMIAGATQADAAILVIDASVGAFEAGFDNLKGQTREHARVLRGFGVEQVIVAINKMDIVGYSKERFDLIKQHVGSFLQSCRFKDSSLTWIPLSAMENQNLVAAPSDNRLSSWYQGPCLLDAVDSVKSPDRDVSKPLLMPICDAVRSTSQGQVSACGKLEAGAVRPGSKVMVMPSGDQGTIRSLERDSQACTIARAGDNVALALQGIDANQVMAGDVLCHPDFPVSVATHLELMVLVLEGATPILLGSQLEFHVHHAKEAATVVKLVAMLDPKTGQPTKKSPRCLTAKQSAMLEVSLQNPVCVETFSESRALGRVFLRSSGRTVAMGKVTRIIQDS

SEQ ID NO: 732 - protein, 610 aa, Arabidopsis thaliana
MISTVLRRSILGTSRRTLAASVTSINAALFHNLAPAAATVSDLANGATNVKSLPSNSSPFGVKVRDFHVKSVPSEFRSSIVSSAGFAAQEYAPSYENDGGIGDSESVGSSGGGDGLAIADLGISPEIVKALKGRGIEKLFPIQKAVLEPAMEGRDMIGRARTGTGKTLAFGIPIIDKIIKFNAKHGRGKNPQCLVLAPTRELARQVEKEFRESAPSLDTICLYGGTPIGQQMRELNYGIDVAVGTPGRIIDLMKRGALNLSEVQFVVLDEADQMLQVGFAEDVEIILQKLPAKRQSMMFSATMPSWIRSLTKKYLNNPLTIDLVGDSDQKLADGITMYSIAADSYGRASIIGPLVKEHGKGGKCIVFTQTKRDADRLAFGLAKSYKCEALHGDISQAQRERTLAGFRDGNFSILVATDVAARGLDVPNVDLVIHYELPNNTETFVHRTGRTGRAGKKGSAILIHGQDQTRAVKMIEKEVGSRFNELPSIAVERGSASMFEGVGARSGGSFGGGRSGGGGYGSYGSSSGRSGGGSYGGYGGSSGRSGGGGGSYGGSGGSSSRYSGGSDRSSGFGSFGSGGSSGGFGSDRSSQSSGRSSFGGFGSNDGKRSY

SEQ ID NO: 733 - protein, 440 aa, Arabidopsis thaliana
MYLDINGVMIKQFSFKASLLPFSSNFRQSSAKIHRPIGATMTTVSTQNESTQKPVQVAKRLEKFKTTIFTQMSILAVKHGAINLGQGFPNFDGPDFVKEAAIQAIKDGKNQYARGYGIPQLNSAIAARFREDTGLVVDPEKEVTVTSGCTEAIAAAMLGLINPGDEVILFAPFYDSYEATLSMAGAKVKGITLRPPDFSIPLEELKAAVTNKTRAILMNTPHNPTGKMFTREELETIASLCIENDVLVFSDEVYDKLAFEMDHISIASLPGMYERTVTMNSLGKTFSLTGWKIGWAIAPPHLTWGVRQAHSYLTFATSTPAQWAAVAALKAPESYFKELKRDYNVKKETLVKGLKEVGFTVFPSSGTYFVVADHTPFGMENDVAFCEYLIEEVGVVAIPTSVFYLNPEEGKNLVRFAFCKDEETLRGAIERMKQKLKRKV

SEQ ID NO: 734 - protein, 195 aa, Arabidopsis thaliana
MDHIIGFMGTTNMSHNTNLMIAAAATTTTTSSSSSSSSGGSGTNQLSRYENQKRRDWNTFGQYLRNHRPPLSLSRCSGAHVLEFLRYLDQFGKTKVHTHLCPFFGHPNPPAPCACPLRQAWGSLDALIGRLRAAFEENGGSPETNPFGARAVRLYLREVRDSQAKARGISYEKKKRKRPPPPLPPAQPAISSSPN

SEQ ID NO: 735 - protein, 946 aa, Arabidopsis thaliana
MGSKSFGNLLDLASGDLLDIPQTPRYLPRVMTVPGIISDVDGYGISDGDSDVISLPCRERKIIVANFLPLNGKKDSETGKWKFSLDNDSPLLHLKDGFSPETEVIYVGSLKTHVDVSEQDEVSHNLFEEFNCVATFLPQDVHKKFYLGFCKQQLWPLFHYMLPMCPDHGERFDRGLWQAYVSANKIFADKVMGVINLEEDYIWIHDYHLMVLPTFLRRRFHRVKLGFFLHSPFPSSEIYRTLPVREELLRGLLNCDLIGFHTFDYARHFLSCCCRMLGLEYESKRGHIALDYLGRTVFLKILPIGIHMGRLESVLNLPATAEKLKEIQEKYRGKKIILGVDDMDIFKGLSLKILAFEHLLQQYPSMLGKIVLIQIVNPARGSGKDVQEARKETYDTVKRINERYGSHDYEPVVLIDRPVPRFEKSAYYALAECCIVNAVRDGMNLVPYKYTVCRQGTPSMNKSLGVSDDLPRTSTLVLSEFIGCSPSLSGAIRVNPWDVDAVADSLYSAITMSDFEKQLRHKKHFHYISTHDVGYWARSFSQDLERASRDHYSKRCWGVGWGLGFRLVALSPNFRRLSIEQTVSAYRRSSKRAIFLDYDGTLVPETSIVKDPSAEVISALKALCSDPNNTIFIVSGRGKVSLSEWLAPCENLGIAAEHGYFTRWNKSSDWETSGLSDDLEWKKVVEPIMRLYTETTDGSNIEAKESALVWHHQDADPDFGSCQAKELLDHLETVLVNEPVIVNRGHQIVEVKPQGVSKGLVTGKILSRMLEDGIAPDFVVCIGDDRSDEEMFENISTTLSAQSSSMSTEIFACTVGRKPSKAKYFLDEVSDVVKLLQGLANTSSPKPRYPSHLRVSFESVKTRKNREAKPNVARFGPVLVQPLWKFLSFVLDHIISSQKVEFMGSYTRSKCPQEWTESIYRKIYLTLGPFAKRSMDHAVTTWDTRL

SEQ ID NO: 736 - protein, 520 aa, Arabidopsis thaliana
  misc_feature (494)..(494): Xaa can be any naturally occurring amino acid
  unsure (1)..(520): unsure at all Xaa locations
MSGAITCSAADLATLLGPNATAAADYICGQLGTVNNKFTDAAFAIDNTYLLFSAYLVFAMQLGFAMLCAGSVRAKNTMNIMLTNVLDAAAGGLFYYLFGYAFAFGGSSEGFIGRHNFALRDFPTPTADYSFFLYQWAFAIAAAGITSGSIAERTQFVAYLIYSSFLTGFVYPVVSHWFWSPDGWASPFRSADDRLFSTGAIDFAGSGVVHMVGGIAGLWGALIEGPRRGRFEKGGRAIALRGHSASLVVLGTFLLWFGWYGFNPGSFTKILVPYNSGSNYGQWSGIGRTAVNTTLSGCTAALTTLFGKRLLSGHWNVTDVCNGLLGGFAAITAGCSVVEPWAAIVCGFMASVVLIGCNKLAELVQYDDPLEAAQLHGGCGAWGLIFVGLFAKEKYLNEVYGATPGRPYGLFMGGGGKLLGAQLVQILVIVGWVSATMGTLFFILKRLNLLRISEQHEMQGMDMTRHGGFAYIYHDNDDESHRVDPGSPFPRSAXLLLAFNFQLFGNLLPFKYCLGFGFEI

SEQ ID NO: 737 - protein, 242 aa, Arabidopsis thaliana
MDHLQESFRGSELCILCDIEACVIYYGPDGELKTWPKEREKVEDIALRYSQLNEALRRKKSVTLYDFLNKKKDKTNLEKKAMITDNDDLKTCLKNVNVLKSPIADHYFNDQISQLIQSLEPHVSKVQERIRFVESQKHKETKLDHQSLASIYSLNQSLNPSQFTLFLYNHGDNTMSQIPNMFMNNNNFQHSFVSNTQDYSALQESVNNNYGLMPNVLCGYDQNLFTSDITNNNLLIDNSMYL

SEQ ID NO: 738 - protein, 159 aa, Arabidopsis thaliana
  misc_feature (114)..(114): Xaa can be any naturally occurring amino acid
  misc_feature (146)..(146): Xaa can be any naturally occurring amino acid
  unsure (1)..(159): unsure at all Xaa locations
KKMHTRQRTQRSTFKRRKLFDRHLALASEFGTANGKGNTKVAGRNSNAVSLEANKGTNSMPFQKSCGSNDCHVKLRIKSFNVPELLVEIPDSATVGSLKKTVLEAVTAILGGGXRVGVLHHGKKVRDDSKTLIQGLGLGQDDMLDXNLGFSLEPNCTQN

SEQ ID NO: 739 - protein, 331 aa, Arabidopsis thaliana
  misc_feature (54)..(54): Xaa can be any naturally occurring amino acid
  misc_feature (208)..(208): Xaa can be any naturally occurring amino acid
  unsure (1)..(331): unsure at all Xaa locations
CSQTGPPLSRDQGERPIYLDMQATTPVDPRVLDKMLPYYCGLYGNPHSRTHAYXWETEKAVEDARKNIADLIGADPKEIIFTSGATESNNMSIKGVARFCSRSDKKNHIITTQTEHRGVLDSCRHLQDEQFAITYLPVQSNGLIDLKVLEKAFRPETALVSIMSVNNEIGVIQPMEEIGQMCRERKVFFHTDAAQAVGKIPIDVTNLXLELMSISSHKIYGPKGIGACYVRRRPRVRLEPLFSGGGQERGLRSGTLAPALSVGFGEACRIAKEEMDYDSKRIKMLSDRLLKGLLSMEHTVQNGDPKTFYPGCVNVSFSYVEGESLLMALKD

SEQ ID NO: 740 - protein, 226 aa, Arabidopsis thaliana
MSSLTTISGGAMEESQEVEELVDTRLSLVIGAASRPPPTVLALLPAASPENEAAARGKRKGVKGPENGAGGAAAASREHSKRSKTVHDSSDVDDDDRGDAAGGDGTRKKLRLTVEQAALLEESFRAHNVLSHGEKHDLARQLGLKPRQVEVWFQNRRARTKLKQTELDCELLRRWCERLSDDNARLRRELAETLSSSPAFLSRLTMANDKAVCSSCNKLTSARMPG

SEQ ID NO: 741 - protein, 505 aa, Arabidopsis thaliana
MGRLVEAIIASILLSLCFTITKSAPKSALITNLPGFNGTFPSKHYAGYVAIDKHRNKNLWYYFVESERNASVDPVVLWLNGGPGCSSMDGFVYEHGPFNFEPKKKNSHLLHLNPYSWSKVSNIIYLDSPVGVGFSYSNDNADYTTDDTKTASDTHTFLLEWFKMFPEFQSNPFFISGESYAGIYVPTLAAEVVKGHKNVTKPVINFKGYLVGNGVTDEVFDGNALVPFTHGMGLISDELYEETKLVCNGTYYTGGQSGVSKECAGKLKTVSDTVNLLNLYNILEPCYHGTSLSALDIEFLPKSLLTLGKTEKPMAVRKRMFGRAWPLGAVVRPGIVPSWSQLLAGFGVPCIDDTVATKWLNDPAVRKAVHAKEVSIQFIIFLSISISIGNWELCSSNLEYRHDTGSMIEYHRNLTLSGFRALIFSGDHDMCVPYTGSEAWTKAMGYKVVDEWRPWMSNNQVAGFTQGYANNLTFLTIKGAGHTVPEYKPRESLDFYSRFLAGEKI

SEQ ID NO: 742 - protein, 210 aa, Arabidopsis thaliana
MVRGKIEMKKIENATSRQVTFSKRRNGLLKKAYELSVLCDAQLSLIIFSQRGRLYEFSSSDMQKTIERYRKYTKDHETSNHDSQIHLQQLKQEASHMITKIELLEFHKRKLLGQGIASCSLEELQEIDSQLQRSLGKVRERKAQLFKEQLEKLKAKEKQLLEENVKLHQKNVINPWRGSSTDQQQEKYKVIDLNLEVETDLFIGLPNRNC

SEQ ID NO: 743 - protein, 152 aa, Arabidopsis thaliana
MASQHLQANPHAEGEWSTGFCDCFSDCQNCCITWLCPCITFGQVADIVDRGNTSCGTAGALYVLLAAITGCGCLYSCIYRGKIRAQYNIRGDGCTDCLKHFCCELCALTQEYRELKHRGFDMSLGWAGNVEKQQNQGGVAMGAPAFQGGMSR

SEQ ID NO: 744 - protein, 235 aa, Arabidopsis thaliana
MPTLYKKAGCLGIREFMVRGKIEIKKIENVTSRQVTFSKRRSGLFKKAHELSVLCDAQVAAIVFSQSGRLHEYSSSQMEKIIDRYGKFSNAFYVAERPQVERYLQELKMEIDRMVKKIDLLEVHHRKLLGQGLDSCSVTELQEIDTQIEKSLRIVRSRKAELYADQLKKLKEKERELLNERKRLLEEQNRERLMRPVVPATLQICDKGNTEGGHRTKHSSEVETDLFIGLPVTRL

SEQ ID NO: 745 - protein, 628 aa, Arabidopsis thaliana
MLHCITTIFLSISRMTMEDGPIAESYFTAYADVCFREFGNHVKFWTTINEANVFTIGGYNDGTSPPGRCSNCSSGNSSTETYIVGHNLLLAHASVSRLYQQKYKDKQGGSVGFSLYAFEFIPQTSSSKDDEIAIQRAKDFFYGWILGPLTFGDYPDEMKRAVGSRLPIFSKEESEQVKGSSDFIGIMHYFPALVENIKLKPSLSRNTDFYSDMGVSLTYLGNFSGFGYDVFPWAMESVLEYIKQTYGNPPVYILENGTPMKPDLELQQKDTRRIEYLQAYIGAVLKAVSGYELSYGLYPVNFSDPYRKRSPKLSAHWIGGSGLDMRSKARTLPGPVTDPSQLPKWNYDGSSTGQAPGDDSEVMCDAYTPAGEPIPTNKRHAAAKIFEDPSVVAEETWYGIEQEYTLLQKDIKWPVGWPVGGFPGPQGPYYCGVGADKAFGRDIVDSHYKACLYAGINVSGTNGEVMPGQWEFQVGPTVGIAAADQVWVARYILERITELAGVVLSLDPKPIPGDWNGAGAHTNYSTKSMREDGGYEVIKKAIEKLGLRHKEHIAAYGEGNERRLTGKHETADINTFLWGVANRGASIRVGRDTEQAGKGYFEDRRPASNMDPYTVTSMIAESTILWKP

SEQ ID NO: 746 - protein, 736 aa, Arabidopsis thaliana
MGEIATEFTPVMDDDDDRCVVPEVELTVPKTDDSTLPVLTFRMWVLGIGACIVLSFINQFFWYRTMPLSITGISAQIAVVPLGHLMARVLPTKRFLEGTRFQFTLNPGAFNVKEHVLITIFANSGAGSVYATHILSAIKLYYKRSLPFLPAFLVMITTQILGFGWAGLFRKHLVEPGEMWWPSNLVQVSLFGALHEKEKKSRGGMSRTQFFLIVLVASFAYYIFPGYLFTMLTSISWVCWLNPKSILVNQLGSGEHGLGIGSIGFDWVTISAYLGSPLASPLFASVNVAIGFVLVMYIVTPVCYWLNIYDAKTFPIFSSQLFMGNGSRYDVLSIIDSKFHLDRVVYSRTGSINMSTFFAVTYGLGFATLSATIVHVLVFNGSDLWKQTRGAFQKNKKMDIHTRIMKKNYREVPLWWFLVILLLNIALIMFISVHYNATVQLPWWGVLLACAIAISFTPLIGVIAATTNQAPGLNIITEYVIGYIYPERPVANMCFKVYGYISMTQALTFISDFKLGHYMKIPPRSMFMAQVAGTLVAVVVYTGTAWWLMEEIPHLCDTSLLPSDSQWTCPMDRVFFDASVIWGLVGPRRVFGDLGEYSNVNWFFLVGAIAPLLVWLATKMFPAQTWIAKIHIPVLVGATAMMPPATAVNFTSWLIVAFIFGHFIFKYRRVWWTKYNYVLSGGLDAGSAFMTILLFLALGRKGIEVQWWGNSGDRDTCPLASCPTAKGVVVKGCPVF

SEQ ID NO: 747 - protein, 97 aa, Arabidopsis thaliana
MSSSDKKPLIPSSHITVKVKNQDDICVYFRIKRDVELRKMMHAYSDKVGVEMSTLRFLFDGNRIKLNQTPNELGLEDEDEIEAFGEQLGGFSFFHRH

SEQ ID NO: 748 - protein, 876 aa, Arabidopsis thaliana
MKTHPQAILLCVLFFITFGLLHVVEAGNQEGFISLDCGLSPNEPPYVDAATDLTYTTDNDFVQSGKTGTIDKELESTYNKPILQLRYFPEGVRNCYTLNVTLGTNYLIRASFVYGNYDGLNKELEFDLYLGPNLWANVNTAVYLMNGVTTEEIIHSTKSKVLQVCLIKTGESIPIINSLELRPLINDTYNTQSGSLKYLFRNYFSTSRRIIRYPNDVNDRHWYPFFDEDAWTELTTNLNVNSSNGYDPPKFVMASASTPISKNAPFNFTWSLIPSTAKFYSYMHFADIQTLQANETREFDMMLNGNLALERYRPKTFATGTIYFIKPQICEGGQCIIELLKTSKSTLPPLCSALEVFTVIDFPELETNQDDVIAIKNIQNTYGVSKTSWQGDPCVPKRFMWDGLNCNNSYISTPPTITFLNLSSSHLTGIIASAIQNLTHLQNLDLSNNNLTGGVPEFLAGLKSLLVINLSGNNLSGSVPQTLLQKKGLKLNKDGNGGAKKKNVVVLVVVSIALVVVLGSALALFLVFRKRKTPRNEVSRTSRSLDPTITTKNRRFTYSEVVKMTNNFEKILGKGGFGMVYHGTVNDAEQVAVKMLSPSSSQGYKEFKAEVELLLRVHHKNLVGLVGYCDEGENLSLIYEYMAKGDLKEHMLGNQGVSILDWKTRLKIVAESAQGLEYLHNGCKPPMVHRDVKTTNILLDEHFQAKLADFGLSRSFPLEGETRVDTVVAGTPGYLDPEYYRTNWLNEKSDVYSFGIVLLEIITNQHVINQSREKPHIAEWVGVMLTKGDIKSIIDPKFSGDYDAGSVWRAVELAMSCVNPSSTGRPTMSQVVIELNECLASENSRRGMSQNMESKGSIQYTEVSTNFGTEYTPEAR

SEQ ID NO: 749 - protein, 131 aa, Arabidopsis thaliana
MMSDEEHHFESSDAGASKTYPQQAGNIRKGGHIVIKGRPCKVVEVSTSKTGKHGHAKCHFVAIDIFTAKKLEDIVPSSHNCDVPHVNRVDYQLIDISEDGFVSLLTDSGGTKDDLKLPTDDNLSALMKSGF

SEQ ID NO: 750 - protein, 1211 aa, Arabidopsis thaliana
MADGEDIQPLVCDNGTGMVKAGFAGDDAPRAVFPSIVGRPRHTGVMVGMGQKDAYVGDEAQSKRGILTLKYPIEHGIVNNWDDMEKIWHHTFYNELRVAPEEHPVLLTEAPLNPKANREKMTQIMFETFNTPAMYVAIQAVLSLYASGRTTGIVLDSGDGVSHTVPIYEGYALPHAILRLDLAGRDLTDHLMKILTERGYSFTTTAEREIVRDMKEKLSYIALDFEQELETSKTSSSVEKSFELPDGQVITIGAERFRCPEVLFQPSMIGMENPGIHETTYNSIMKCDVDIRKDLYGNIVLSGGTTMFGGIGDRMSKEITALAPSSMKIKVVAPPERKYSVWIGGSILASLSTFQQMWIAKAEYDESGPSIKQKLRRRIHFSRSSPLKSAISLLIGEDKSLIRMSDSVAGDFPPDPLLASGAFISSAGDGTLDSSAKRRPIQGGIGISGSGESVRIGMANGTDQVNHQTESKSRKRAAPGDNWLPPGWRVEDKIRTSGATAGSVDKYYYEPNTGRKFRSRTEVLYYLEHGTSKRGTKKAENTYFNPDHFEGQGSNRVTRTATVPPPPPPPLDFDFKNPPDKVSWSMANAGEEGWIPNIGDVKVQDSVRRDWSTAFTFITSRNPRKDLVLCETSVVIQELMLDMSHLLSFKMEKNQQKQEFLAETSEMKNTKNNDDCSVQQQQRFVWPWVGLVANIPTEVEPSGRRVGKSGSTLRDEFTMKGFNPTRVQPIWDFKGHSGFALVEFAKDFEGFESAMNFERSFNLDRHGKRDWEKGHRLRDNKLYGWVAREDDYNRSDTVGKNVKKKRDLKSISQIVEEDERKMVHLVENMSQTIEKKKQSKQELEQKVDETSRFLESLELHNVLLNKNYQEGFQKMQMKMEELYQQVLDGHEKSLAELEAKREKLDERARLIEQRAIINEEEMEKSRLEREMNQKAMCEQNEANEEAMKLAEKHQASSSLKEKEKLHKRIMEMEAKLNETQELELEIEKLKGTTNVMKHMVGSDGDKDIVEKIAKTQIQLDAQETALHEKMMTLARKERATNDEYQDVLKEMIQVWNANEELMKQEKIRVKRMGQLNPAPFLPAVMKKHKVTQSKAENKAMKLCSVWEANIGDVQWTPFRVDESDGTPKRVVDENDEKLRTLKNQYGEEVYNEVVRTKLEIEEHNASGSYVILELWNYEENRKATMEEATDVMLKIRSKLAAMKNKRKRLEV

SEQ ID NO: 751 - protein, 312 aa, Arabidopsis thaliana
MNILSQTQILHLSIAILLFITTSSSSLSPSSSSPSLSPSPPSSSPSSAPPSSLSPSSPPPLSLSPSSPPPPPPSSSPLSSLSPSLSPSPPSSSPSSAPPSSLSPSSPPPLSLSPSSPPPPPPSSSPLSSLSPSSSSSTYSNQTNLDYIKTSCNITLYKTICYNSLSPYASTIRSNPQKLAVIALNLTLSSAKSASKFVKNISHGGGLTRLEVVAVADCVEEIGDSVTSLQDSIRELDSINYKDSAKFEMVMSDVETWVSAALTNDDTCMDGFSLVKTAVKDLVRRHVVEVARLTSNALALINMYASTQENFS

SEQ ID NO: 752 - protein, 152 aa, Arabidopsis thaliana
MEAQHLHAKPHAEGEWSTGFCDCFSDCKNCCITFWCPCITFGQVAEIVDRGSTSCGTAGALYALIAVVTGCACIYSCFYRGKMRAQYNIKGDDCTDCLKHFCCELCSLTQQYRELKHRGYDMSLGWAGNVERQQNQGGVAMGAPVFQGGMTR

SEQ ID NO: 753 - protein, 151 aa, Arabidopsis thaliana
MEAQLHAKPHAQGEWSTGFCDCFSDCRNCCITLCCPCITFGQVAEIVDRGSKSCCAAGALYMLIDLITSCGRMYACFYSGKMRAQYNIKGDGCTDCLKHFCCNLCALTQQYRELKHRGFDMSLGWAGNAEKQQNQGGVAMGAPAFQGGMTR

SEQ ID NO: 754 - protein, 598 aa, Arabidopsis thaliana
GRGRSDSDGVESKMHIMDVFLWGKCLSEEEAASLHAAIGMADLDMIDLSDDNWQWTDSPPRVDGWDSDPADVDLYDRDDVDWDGQYSSGRKRRSGRDFVMSVDSFARRHRKPRMETQEDINQRMRSVELAVKEALSARGDKQFTDQEFPPNDRSLFVDTQNPPSKLQVVSEWMRPDSIVKENGSDSRPCLFSGDANPSDVCQGRLGDCWFLSAVAVLTEVSRISEVIITPEYNEEGIYTVRFCIQGEWVPVVIDDWIPCESPGKPAFATSRKLNELWVSMVEKAYAKLHGSYEALEGGLVQDALVDLTGGAGEEIDLRSAQAQIDLASGRLWSQLLRFKQEGFLLGAGSPSGSDVHVSSSGIVQGHAYSVLQVREVDGHRLVQIRNPWANEVEWNGPWSDSSPEWTDRMKHKLKHVPQSKEGIFWMSWQDFQIHFRSIYVCRVYPREMRYSVNGQWRGYSAGGCQDYSSWHQNPQFRLRATGSDASLPIHVFITLTQGVGFSRTTPGFRNYQSSHDSQLFYIGLRILKTRGRRAAYNIFLHESVGGTDYVNSREISCEMVLDPDPKGYTIVPTTIHPGEEAPFVLSVFTKASIVLEAL

SEQ ID NO: 755 - protein, 219 aa, Arabidopsis thaliana
MLTRNKEEINRVKNLKLKMGRQLYTTTVLYLVTLLFICRTISAVRFPPEQPTTDDLDFIRTSCNTTLYPDVCYTSLAGYASAVQDNPARLAKLAIGVSLSRAKYTAAYLSKLSRRAASAAVHDCVSNVGDAVDQMRGSLRQLREMNHRRPGDPAFRFQMSNVQTWMSAALTDEETCTDGVTEEMEDGETKTAICDRVADVKRFTSNALALVNTYANNGA

SEQ ID NO: 756 - protein, 199 aa, Arabidopsis thaliana
MLRFVILSLTIMVFINSSNFPNTAATPPGTYQNHTTYVKTACNSTTYPTMCYNCLSSYSSTIKSDPIKLCTTSLNLNVKSAKNATLVVSNLLQKAKATKSHEVSILKDCVDEIKDTIDELKQAVAEMKYVRGGGKTTEEHLKNVKTWVSSALTDEGTCTDGFEEGRVNVETKKKVKKAVSELSKTTSNTLALLTHYLSY

SEQ ID NO: 757 - protein, 152 aa, Arabidopsis thaliana
  misc_feature (115)..(115): Xaa can be any naturally occurring amino acid
  misc_feature (123)..(123): Xaa can be any naturally occurring amino acid
  misc_feature (140)..(140): Xaa can be any naturally occurring amino acid
  unsure (1)..(152): unsure at all Xaa locations
MADEIQTEFDSADAGASLTFPMQCSALRKNGFVVIKGRPCKIVDMSTSKTGKHGHAKVHLVATDIFTGKKYEDLSPSTHNMDVPHVQRKEFQLLDVADDGFLSIMGDDGAIRDDXKKPDGEIXDKIDKFFAEGKDTNVVXLTAMGEQLAIEA

SEQ ID NO: 758 - protein, 70 aa, Arabidopsis thaliana
  misc_feature (27)..(27): Xaa can be any naturally occurring amino acid
  misc_feature (35)..(35): Xaa can be any naturally occurring amino acid
  unsure (1)..(70): unsure at all Xaa locations
ITEDGFVSLLTDSGGTKDYLKLPTDDXLTAQMRAXFDEGKDIVVSVMSSHGRGSRILWPVKGKVWLVGPS

SEQ ID NO: 759 - protein, 291 aa, Arabidopsis thaliana
  misc_feature (37)..(37): Xaa can be any naturally occurring amino acid
  unsure (1)..(291): unsure at all Xaa locations
MMMGKEDLGLSLSLGFSQNHNPLQHWKKPSLWEKAPXNSSLSNNLQRLPWNQTFDPTSDLRKIDVNSFPSTVNCEEDTGVSSPNSTISSTISGKRSEREGISGTGVGSGDDHDEITPDRGYSRGTSDEEEDGGETSRKKLRLSKDQSAFLEETFKEHNTLNPKQKLALAKKLNLTARQVEVWFQNRRARTKLKQTEVDCEYLKRCVEKLTEENRRLQKEAMELRTLKLSPQFYGQMTPPTTLIMCPSCERVGGPSSSNHHHNHRPVSINPWVACAGQVAHGLNFEALRPRS

SEQ ID NO: 760 - protein, 614 aa, Arabidopsis thaliana
MSCSYLLSGDASVVASRRWSDVSSRQRLFLPRQSLRQPSGSSFSRCVRLVANVNDHFSKQSLATRNCLASVFSADLGGSNGNNDNGNGGGGGGDGGGDNSDDSSFDLRYLCFLLLGLSCFFHFRLSAASAIAKDQNSDSNGDAVKETVWEVRGSKRKRLVPDFVKDEFVSEESAFELSSSLTPENLLAQCRNLLTQFLLPEGFPNSVTSDYLDYSLWRGVQGIASQISGVLATQSLLYAVGLGKGAIPTAAAINWVLKDGIGYLSKIMLSKYGRHFDVHPKGWRLFADLLENAAFGMEMLTPVFPQFFVMIGAAAGAGRSAAALIQAATRSCFNAGFASQRNFAEVYNNFYMALVLITYQQLFVFLNYSGSLVYASTTSFVGIVVANCIGTSTSLALAAFGVVTTIHMYTNLKSYQCIQLRTLNPYRASLVFSEYLISGQAPLIKEVNDEEPLFPTLQDFVLSSEAKAAAADIEERLQLGSKLSDVIHNKEEAIALFDLYRNEGYILTEHKGRFCVMLKESSTPQDMLRSLFQVNYLYWLEKNAGIEPASTYSDCKPGGRLHISLDYVRREFEHAKEDSESVGWVTEGLIARPLPTRIRLGHDRELLLSSPNSS

SEQ ID NO: 761 - protein, 939 aa, Arabidopsis thaliana
MKEKMQRMVLSLAMVGFMVFGVASAMNNEGKALMAIKGSFSNLVNMLLDWDDVHNSDLCSWRGVFCDNVSYSVVSLNLSSLNLGGEISPAIGDLRNLDLQGNKLAGQIPDEIGNCASLVYLDLSENLLYGDIPFSISKLKQLETLNLKNNQLTGPVPATLTQIPNLKRLDLAGNHLTGEISRLLYWNEVLQYLGLRGNMLTGTLSSDMCQLTGLWYFDVRGNNLTGTIPESIGNCTSFQILDISYNQITGEIPYNIGFLQVATLSLQGNRLTGRIPEVIGLMQALAVLDLSDNELVGPIPPILGNLSFTGKLYLHGNMLTGPIPSELGNMSRLSYLQLNDNKLVGTIPPELGKLEQLFELNLANNRLVGPIPSNISSCAALNQFNVHGNLLSGSIPLAFRNLGSLTYLNLSSNNFKGKIPVELGHIINLDKLDLSGNNFSGSIPLTLGDLEHLLILNLSRNHLSGQLPAEFGNLRSIQMIDVSFNLLSGVIPTELGQLQNLNSLILNNNKLHGKIPDQLTNCFTLVNLNVSFNNLSGIVPPMKNFSRFAPASFVGNPYLCGNWVGSICGPLPKSRVYKSMQQKKILQGSSKQAEGLTKLVILHMDMAIHTFDDIMRVTENLNEKFIIGYGASSTVYKCALKSSRPIAIKRLYNQYPHNLREFETELETIGSIRHRNIVSLHGYALSPTGNLLFYDYMENGSLWDLLHGSLKKVKLDWETRLKIAVGAAQGLAYLHHDCTPRIIHRDIKSSNILLDENFEAHLSDFGIAKSIPASKTHASTYVLGTIGYIDPEYARTSRINEKSDIYSFGIVLLELLTGKKAVDNEANLHQLILSKADDNTVMEAVDPEVTVTCMDLGHIRKTFQLALLCTKRNPLERPTMLEVSRVLLSLVPSLQVAKKLPSLDHSTKKLQQENEVRNPDAEASQWFVQFREVISKSSI

SEQ ID NO: 762 - protein, 814 aa, Arabidopsis thaliana
MEGSSNSNSRGFNTSGVSDRNTEFLPVERLTTRSKPSSHVDEYVRSLFGSTSTHKSGEDDSLGIDPFVRSLEWGDVSLRQWLDKPERSVDVFECLHVFRQIVEIVNAAHSQGIVVHNVRPSCFVMSSFNHVSFIESASCSDSGSDSLEDGPISQKEIGSSRREEAVSKAIAIEEKGVYNKLLERKIEKLEEEKTQPFPMKHILAMETSWYTSPEEDFGSSSTCASDVYRLGVLLFELFCPVPSREEKSRTMSSLRHRVLPPQILLKCPKEASFCLWLLHPEPTCRPSMSDLLQSEFITEPRDNLEEREAAIELRDRIEEQESLLEFLLLIQQRKQESAYRLQDTVSLLSSDIEQVVKRQLILKKRGSSLSDFSKDDHQYTSGQPLMSFQANEEPSAFLASRKRVRQGILALENGVEVDEESQGSTLLESSRLMRNFKKLESVYFLTRRRQMKAAASGKSLTRHSPLSSENGRGSMIVSEKNPFLEGLCRYLSFSQLRVKADLKQGDLLNSSNLVCALAFDREGELFATAGVNKKIKIFECNSIVNDNRDIHYPVVELAGRSKLSSLCWNSYIKSQIASSNFDGVVQIWDVARSQLVTEMKEHKKRVWSIDISSADPTLLASGSDDGTGVSIGTIKTKANVCCVQFPSDSGRSLAFGSADHKVYYYDLRNPKIPLCTMIGHSKTVSYVKFVDSSTLVSSSTDNTLKLWDLSMSASGINESPLHSFTGHTNLKNFVGLSVSDGYIATGSETNEVFVYHKAFPMPVMSYMFNNTDSMSGLEVDDASQFISSICWRGQSSTLVAANSNGNIKILEMMT

SEQ ID NO: 763 - protein, 304 aa, Arabidopsis thaliana
  misc_feature (99)..(99): Xaa can be any naturally occurring amino acid
  misc_feature (139)..(139): Xaa can be any naturally occurring amino acid
  misc_feature (171)..(171): Xaa can be any naturally occurring amino acid
  misc_feature (188)..(188): Xaa can be any naturally occurring amino acid
  unsure (1)..(304): unsure at all Xaa locations
MDSRVSILFVCAIALSCFTSGSASSPVDFSVCNYEFELFRFDLEAKCPPSLYPTPPIEVDGDSLDRLMASQHGNAYMSVLFYASWCPFSRTVRPKLDMXSSMFPQIQHLTVEHSQALPSVFSRYGIHSLPSILMVNQTXLNARYHGRKDLISLIEFYEEATGLQPVQYVAXKGNPIGFRMPADGNLIXTWLGNGTSIREIFNQDPFLVLSLLFICLQMAILVFPIAESRMRALWASYVANLNLGRFGEISQLFNRGIHMVDVRRLWLKLSLVKTRNFHERAKNAQAWASSLASVSLGQTSSDQS

SEQ ID NO: 764 - protein, 158 aa, Arabidopsis thaliana
MSDEEHHFESSDAGASKTYPQQAGTIRKNGYIVIKNRPCKVVEVSTSKTGKHGHAKCHFVAIDIFTSKKLEDIVPSSHNCDVPHVNRTDYQLIDISEDGYVSLLTDNGSTKDDLKLPNDDTLLQQIKSGFDDGKDLVVSVMSAMGEEQINALKDIGPK

SEQ ID NO: 765 - protein, 862 aa, Arabidopsis thaliana
MEDDGGSDGGEGNGGFSPNSSFGAFADTAMDLDFMDELLFDGCWLETTDSKSLKQTEQSPSASTAMNDNSPFLCFGENPSQDNFSNEETERMFPQAEKFLLEEAEVGKSWWIAPSASEGPSSSVKERLLQAISGLNEAVQDKDFLVQIWVPIQQEGKSFLTTWAQPHLFNQEYSSLAEYRHVSETYNFPADEGMKDFVGLPGRVFLQKFPEWTPDVRFFRRDEYPRIKEAQKCDVRGSLALPVFERGSGTCLGVVEIVTTTQKMNYRQELEKMCKALEFLQVYSDFYCAALPEIKDFLATICRSYDFPLALSWAPCARQGKVGSRHSDENFSECVSTIDSACSVPDEQSKSFWEACSEHHLLQGEGIVGKAFEATKLFFVPEVATFSKTNYPLAHHAKISGLHAALAVPLKSKSGLVEFVLEFFFPKACLDTEAQQEMLKSLCVTLQQDFRKTVESLTEIQMQESSWIAHMIKANEKGKDVSLSWEYQKEDPKELSSGRENSQLDPVPNNVPLEAEQLQQASTPGLRVDIGPSTESASTGGGNMLSSRRPGEKKRAKTEKTIGLEVLRQYFAGSLKDAAKSIGVCPTTLKRICRQHGIMRWPSRKIKKVGHSLKKLQLVMDSVQGAQGSIQLDSFYTSFPELNSPNMSSNGPSLKSNEQPSHLNAQTDNGIMAEENPRSPSSSCSKSSGSSNNNENTGNILVAEDADAVLKRAHSEAQLHNVNQEETKCLARTQSHKTFKEPLVLDNSSPLTGSSNTSLRARGAIKVKATFGEARIRFTLLPSWGFAELKQEIARRFNIDDISWFDLKYLDDDKEWVLLTCEADLVECIDIYRLTQTHTIKISLNEASQVKLSGSFGNTGLS

SEQ ID NO: 766 - protein, 461 aa, Arabidopsis thaliana
MASSSSSSLLFPFFLILFSCLISVSSSRRSLIDRTLPKNLPRSGFRLSLRHVDSGKNLTKIQKIQRGINRGFHRLNRLGAVAVLAVASKPDDTNNIKAPTHGGSGEFLMELSIGNPAVKYSAIVDTGSDLIWTQCKPCTECFDQPTPIFDPEKSSSYSKVGCSSGLCNALPRSNCNEDKDACEYLYTYGDYSSTRGLLATETFTFEDENSISGIGFGCGVENEGDGFSQGSGLVGLGRGPLSLISQLKETKFSYCLTSIEDSEASSSLFIGSLASGIVNKTGASLDGEVTKTMSLLRNPDQPSFYYLELQGITVGAKRLSVEKSTFELAEDGTGGMIIDSGTTITYLEETAFKVLKEEFTSRMSLPVDDSGSTGLDLCFKLPDAAKNIAVPKMIFHFKGADLELPGENYMVADSSTGVLCLAMGSSNGMSIFGNVQQQNFNVLHDLEKETVSFVPTECGKL

SEQ ID NO: 767 - protein, 819 aa, Arabidopsis thaliana
MKNLCWVFLSLFWFGVFLIIRFAEGQNQEGFISLDCGLPLNEPPYIESETGIQFSSDENFIQSGKTGRIPKNLESENLKQYATLRYFPDGIRNCYDLRVEEGRNYLIRATFFYGNFDGLNVSPEFDMHIGPNKWTTIDLQIVPDGTVKEIIHIPRSNSLQICLVKTGATIPMISALELRPLANDTYIAKSGSLKYYFRMYLSNATVLLRYPKDVYDRSWVPYIQPEWNQISTTSNVSNKNHYDPPQVALKMAATPTNLDAALTMVWRLENPDDQIYLYMHFSEIQVLKANDTREFDIILNGETINTRGVTPKYLEIMTWLTTNPRQCNGGICRMQLTKTQKSTLPPLLNAFEVYSVLQLPQSQTNEIEESGASRKFVSIVSTDLSNNSLSGIVPEFLATMKSLLVINLSGNKLSGAIPQALRDREREGLKLNVLGNKELCLSSTCIDKPKKKVAVKVVAPVASIAAIVVVILLFVFKKKMSSRNKPEPWIKTKKKRFTYSEVMEMTKNLQRPLGEGGFGVVYHGDLNGSEQVAVKLLSQTSAQGYKEFKAEVELLLRVHHINLVNLVGYCDEQDHFALIYEYMSNGDLHQHLSGKHGGSVLNWGTRLQIAIEAALGLEYLHTGCKPAMVHRDVKSTNILLDEEFKAKIADFGLSRSFQVGGDQSQVSTVVAGTLGYLDPEYYLTSELSEKSDVYSFGILLLEIITNQRVIDQTRENPNIAEWVTFVIKKGDTSQIVDPKLHGNYDTHSVWRALEVAMSCANPSSVKRPNMSQVIINLKECLASENTRISRNNQNMDSGHSSDQLNVTVTFDTDVKPKAR

SEQ ID NO: 768 - protein, 916 aa, Arabidopsis thaliana
MEFPHSVLLVVLIIATFAISNLVQAEEDQEGFISLDCGLPPNEVSPYIEPFTGLRFSSDSSFIQSGKIGKVDKSFEATTLKSYMTLRYFPDGKRNCYNLIVKQGKTYMIRATALYGNYDGLNISPKFDLYIGANFWTTLDAGEYLSGVVEEVNYIPRSNSLDVCLVKTDTSTPFLSLLELRPLDNDSYLTGSGSLKTFRRYYLSNSESVIAYPEDVKDRIWEPTFDSEWKQIWTTLKPNNSNGYLVPKNVLMTAAIPANDSAPFRFTEELDSPTDELYVYLHFSEVQSLQANESREFDILWSGEVAYEAFIPEYLNITTIQTNTPVTCPGGKCNLELKRTKNSTHPPLINAIEFYTVVNFPQLETNETDVVAIKDIKATYELNRITWQGDPCVPQKFIWEGLDCNSKDALTLPRITSLNLSSTGLTGNIAAGIQNLTHLDKLDLSNNNLTGGVPEFLASMKSLSFINLSKNNLNGSIPQALLKREKDGLKLSVDEQIRCFPGSCVITKKKFPVMIVALVSSAVVVILVVLVLIFVFKKKKPSNLEDLPPSSNTPRENITSTSISDTSIETKRKRFSYSEVMEMTKNLQRPLGEGGFGVVYHGDINGSSQQVAVKLLSQSSTQGYKEFKAEVELLLRVHHINLVSLVGYCDERDHLALIYEYMSNKDLKHHLSGKHGGSVLKWNTRLQIAVDAALGLEYLHIGCRPSMVHRDVKSTNILLDDQFTAKMADFGLSRSFQLGDESQVSTVVAGTPGYLDPEYYRTGRLAEMSDVYSFGIVLLEIITNQRVIDPAREKSHITEWTAFMLNRGDITRIMDPNLQGDYNSRSVWRALELAMMCANPSSEKRPSMSQVVIELKECIRSENKTQGMDSHSSFEQSMSFDTKAVPSARSPFTVSGGSEMVAVMERHQHRAIRLRE

SEQ ID NO: 769 - protein, 871 aa, Arabidopsis thaliana
MNSSHELLLTALIATFAIFHLVQAQEQEGFISLDCGLAPTEPSPYTEPVTTLQYSSDSNFIQSGKLGRIDTSLQTFFLKQQTTLRYFPDGIRNCYNLTVKQGTNYLIRARFTYGNYDGRNMSPTFDLYLGPNLWKRIDMTKLQNKVSTLEEITYIPLSNSLDVCLVKTNTTIPFISALELRPLPSNSYITTAGSLRTFVRFCFSNSVEDIRFPMDVHDRMWESYFDDDWTQISTSLTVNTSDSFRLPQAALITAATPAKDGPSYIGITFSTSSEERFFIYLHFSEVQALRANETREFNISINGESVADLYRPLSRTQSSTHPPMINAIEIFLVSELLQSETYENDVIAIKKIKDTYGLQLISWQGDPCVPRLYKWDGLDCTDTDTYIAPRITSLKLSSKGLTGTIAADIQYLTSLEKLDLSDNKLVGVVPEFLANMKSLMFINLTKNDLHGSIPQALRDREKKGLKILFDGDKNDPCLSTSCNPKKKFSVMIVAIVASTVVFVLVVSLALFFGLRKKKTSSHVKAIPPSPTTPLENVMSTSISETSIEMKRKKFSYSEVMKMTNNFQRALGEGGFGTVYHGDLDSSQQVAVKLLSQSSTQGYKEFKAEVDLLLRVHHINLLNLVGYCDERDHLALIYEYMSNGDLKHHLSGEHGGSVLSWNIRLRIAVDAALGLEYLHIGCRPSMVHRDVKSTNILLDENFMAKIADFGLSRSFILGGESHVSTVVAGSLGYLDPEYYRTSRLAEMSDVYSFGIVLLEIITNQRVIDKTREKPHITEWTAFMLNRGDITRIMDPNLNGDYNSHSVWRALELAMSCANPSSENRPSMSQVVAELKECLISENSLRSKNQDMSSQRSLDMSMNFDTKDVPSAR

SEQ ID NO: 770 - protein, 880 aa, Arabidopsis thaliana
MESHHRFLLVVLILVSSNIHRVQAQAGFISFDCGLSPDEQSPYNEETGLQFLSDSSVIQSGQIGKIDASVEWKYPKSQTTLRYFPDGMRNCYNLSVHKETKYLIRVTSNYGNYDGRNEPPRFDLYLGPNFWVTIDLGKHVNGDTWKEIIHIPKSNSLDVCLIKTGTTTPIISTLELRSLPKYSYNAISGSLKSTLRAFLSESTEVIRYPNDFYDRMWVPHFETEWKQISTNLKVNSSNGYLLPQDVLMTAAIPVNTSARLSFTENLEFPHDELYLYFHFSEVQVLQANQSREFSILWNGMVIYPDFIPDYLGAATVYNPSPSLCEVGKCLLELERTQKSTLPPLLNAIEVFTVMNFPQSETNDDDVIAITKIKDTHRLNRTSWQGDPCVPQLFSWAGLSCIDTNVSTPPRIISLNLSSSGLTGNIATGIQNLTKLQKLDLSNNNLTGVVPEFLANMKSLLFIDLRKNKLNGSIPKTLLDRKKKGLQLFVDGDDDKGDDNKCLSGSCVPKMKFPLMIVALAVSAVVVIAVVMILIFLFRKKKKSSLGITSAAISEESIETKRRRFTYSEVVEMTKNFQKTLGEGGFGTVYYGNLNGSEQVAVKVLSQSSSQGYKHFKAEVELLLRVHHINLVSLVGYCDERNHLALIYECMSNGDLKDHLSGKKGNAVLKWSTRLRIAVDAALGLEYLHYGCRPSIVHRDVKSTNILLDDQLMAKIADFGLSRSFKLGEESQASTVVAGTLGYLDPEYYRTCRLAEMSDVYSFGILLLEIITNQNVIDHAREKAHITEWVGLVLKGGDVTRIVDPNLDGEYNSRSVWRALELAMSCANPSSEHRPIMSQVVIDLKECLNTENSMKIKKNDTDNDGSLELSSSDTEAVPCAR

SEQ ID NO: 771 - protein, 883 aa, Arabidopsis thaliana
MESSHRFLLVALTVASSIIHLVQAQAGFISLDCGLSPNEQSPYVELETGLQFLSDSSFIQSGKIGRIDASLESKYPRSQTTLRYFPDGIRNCYNVNVYKGTNYLIRATINYGNYDGLNISPRFDLYIGPNFWVTIDLEKHVGGDTWEEIIHIPKSNSLDVCLIKTGTSTPIISVLELRSLPNNTYITESGSLKSILRSYLSVSTKVIRYPDDFYDRKWVPYFESEWRQISTILKVNNTINGFLAPQEVLMTAAVPSNASVPLSFTKDLEFPKDKLYFYFHFSEIQPLQANQSREFSILWNGEIIIPTLSPKYLKASTLYSVSPFVCEVGKCLLELKRTQNSTLPPLLTAIEVFTVIDFPQSKTNEDDVSAIKNIKDTHGLSRVSWQGDPCVPRQFLWEGLSCNDKNVSASPRITSLNLSSSGLVGTIPSGIQNFTLLEKLDLSNNNLTGLVPEFLAKMETLLFIDLRKNKLNGSIPNTLRDREKKGLQIFVDGDNTCLSCVPKNKFPMMIAALAASAIVVAILVLILIFVFTKKKWSTHMEVILPTMDIMSKTISEQLIKTKRRRFAYSEVVEMTKKFEKALGEGGFGIVYHGYLKNVEQVAVKVLSQSSSQGYKHFKAEVELLLRVHHINLVSLVGYCDEKDHLALIYEYMPNGDLKDHLSGKQGDSVLEWTTRLQIAVDVALGLEYLHYGCRPSMVHRDVKSTNILLDDQFMAKIADFGLSRSFKVGDESEISTVVAGTPGYLDPEYYRTSRLAEMSDVYSFGIVLLEIITNQRVFDQARGKIHITEWVAFMLNRGDITRIVDPNLHGEYNSRSVWRAVELAMSCANPSSEYRPNMSQVVIELKECLTTENSMKVKKNDTDAGSSLELSLSFDTEVVPTAR

SEQ ID NO: 772 - protein, 838 aa, Arabidopsis thaliana
MESLKKLLLVALIATSAIHLVQAQNQDGFISVDCGLSPNEVSPYIEPFTGLQFTTDSNFIETGKLGRIQASLEPKYRKSQTTLRYFPDGIRNCYNLTVTQGTNYLIRARAIYGNYDGLNIYPKFDLYIGPNFWVTIDLGKYVNGTWEEIIYIPKSNMLDVCLVKTGPSTPLISSLVLRPLANATYITQSGWLKTYVRVYLSDSNDVIRYPDDVYDRIWGSYFEPEWKKISTTLGVNSSSGFLPPLKALMTAASPANASAPLAIPGVLDFPSDKLYLFLHFSEIQVLKANETREFEIFWNKKLVYNAYSPVYLQTKTIRNPSPVTCERGECILEMIKTERSTLPPLLNAVEVFTVVEFPQPETDASDVVAIKNIKAIYGLTRVTWQGDPCVPQQFLWNGLNCNSMETSTPPRITSLDLSSSGLTGSISVVIQNLTHLEKLDLSNNNLTGEVPDFLANMKFLVFINLSKNNLNGSIPKALRDRENKGLKLIVDKNVDNCSSGSCTQKKKFPLLIVALTVSLILVSTVVIDMTNNFQRALGEGGFGVVYHGYLNGSEQVAVKLLSQSSVQGYKEFKAEVELLLRVHHINLVSLVGYCDDRNHLALVYEYMSNGDLKHHLSGRNNGFVLSWSTRLQIAVDAALGLEYLHIGCRPSMVHRDVKSTNILLGEQFTAKMADFGLSRSFQIGDENHISTVVAGTPGYLDPEYYRTSRLAEKSDIYSFGIVLLEMITSQHAIDRTRVKHHITDWVVSLISRGDITRIIDPNLQGNYNSRSVWRALELAMSCANPTSEKRPNMSQVVIDLKECLATENSTRSEKDMSSHSSDLDRSMNFYTDMVPRAR

SEQ ID NO: 773 - protein, 182 aa, Arabidopsis thaliana
MSNGTDQAQPPPENPATPVDSKSRKRATPGDDNWLPPDWRTEIRVRTSGTKAGTVDKFYYEPITGRKFRSKNEVLYYLEHGTPKKKSVKTAENGDSHSEHSEGRGSARRQTKSNKKVTEPPPKPLNFDFLNVPEKVTWTGINGSEEAWLPFIGDYKIQESVSQDWDRVFTLVTSQNAGKTMF

SEQ ID NO: 774 - protein, 553 aa, Arabidopsis thaliana
MVSHKVLEFGDDGYKLPAQARAPRSLRKKRIYEKKIPGDDKMCAIDLLATVAGSLLLESKSPVNACLVVQNTVKNEYPADENPVKAVPYSESPSLFDNGKCGFSSVITNPNHLLVGDKVGKEVEGFSSLGVSGDVKPDVVASIGSNSSTEVGACGNGSPNESRDDVNLFSRNDDDENFSGYIRTRMTRPVPRIGDRRIRKILASRHWKGGSKNNTDAKPWYCSKRSYYLHHHQRSYPIKKRKYFDSVYDSNSDDYRLQGKTHKGSRTISSMKSRNASFVSRDHHVKLRIKSFRVPELFVEIPETATVGSLKRMVMEAVTTILGDGLRVGLMVQGKKVRDDGKTLLQTGISEENNHLDSLGFSLEPSLETTPQPLLSSYLSDHACDDVTLCHDNALDSSHEPEPSPADSFGKLGTSDHSRALIPVASAAMLAPRPPNRKFKRTEQQLAAQRRIRRPFSVTEVEALVQAVEKLGTGRWRDVKVRAFEDADHRTYVDLKDKWKTLVHTARISPQQRRGEPVPQELLDRVLKAHAYWSQHLMHQLQTEPPSTQVEAL

SEQ ID NO: 775 - protein, 359 aa, Arabidopsis thaliana
MDWNFKLSSGYLSGFDQEPDLSPMDGSISFGGSSQSKADFSFDLKLGRNIGNSSSVFGDTEQVISLSKWKDSALAKPEGSRSSSSKRTRGNGVGTNQMPICLVDGCDSDFSNCREYHKRHKVCDVHSKTPVVTINGHKQRFCQQCSRFHALEEFDEGKRSCRKRLDGHNRRRRKPQPEHIGRPANFFTGFQGSKLLEFSGGSHVFPTTSVLNPSWGNSLVSVAVAANGSSYGQSQSYVVGSSPAKTGIMFPISSSPNSTRSIAKQFPFLQEEESSRTASLCERMTSCIHDSDCALSLLSSSSSSVPHLLQPPLSLSQEAVETVFYGSGLFENASAVSDGSVISGNEAVRLPQTFPFHWE

SEQ ID NO: 776 - protein, 202 aa, Arabidopsis thaliana
MAKQIFYTLFLFLLSTAILTASSSAPRAAITSKRAINFIQASCKATTYPTVCVNSLTGYANSIQTSPRRLAETALNVTVTQAQSTKVFVWRLGRFTSLKKREIQAVKDCIEEIHDAVDRLTMSIHEVKMCGSAKGRDQFWFHMSNAQTWTSAALTNANTCSDGFAGRVMDGRVKNSVRARILNLGRGTSNALALINAFAKKY

SEQ ID NO: 777 - protein, 569 aa, Arabidopsis thaliana
MALRTLSTFPSLPRRHTTTRREPNLTVIYRNPTTSIVCKSIANSEPPVSLSERDGFAAAAPTPGERFLENQRAHEAQKVVKKEIKKEKKKKKEEIIARKVVDTSVSCCYGCGAPLQTSDVDSPGFVDLVTYELKKKHHQLRTMICGRCQLLSHGHMITAVGGNGGYPGGKQFVSADELREKLSHLRHEKALIVKLVDIVDFNGSFLARVRDLVGANPIILVITKIDLLPKGTDMNCIGDWVVEVTMRKKLNVLSVHLTSSKSLDGVSGVASEIQKEKKGRDVYILGAANVGKSAFINALLKTMAERDPVAAAAQKYKPIQSAVPGTTLGPIQINAFVGGEKLYDTPGVHLHHRQAAVVHSDDLPALAPQNRLRGQSFDISPLPSRPSSTLPTQSSSSPKGESLNGYTFFWGGLVRIDILKALPETCFTFYGPKALEIHAVPTKTATAFYEAKLGVLLTPPSGKNQMQEWKGLQSHRLLQIEINDAKRPASDVAISGLGWISIEPIRKTRGTEPRDLNEAEHEIHICVSVPKPVEVFLRPTLPIGTSGTEWYQYRELTDKEEEVRPKWYF

SEQ ID NO: 778 - protein, 276 aa, Arabidopsis thaliana
MQQSFTFQLLPVDFFSPKITDSSSSNFLRSKNHYPSMESINTLKGYDKVSDQENQIHHHHHSPLPKPSSFSRKTLIATGSVVSLLLILSVVALTAGAFTHSPPHHPPISSASLKSLCSVTRYPETCFNSLSSSLNESDSKLNPESILELSLRVAAKEISNLSISFRSINDMPEDAAVGDCVKLYTDALSQLNDSITEIERKKKKGGNNWLTEEVVGDVKTWISAAMTDGETCSDGIEEMGTIVGNEIKKKMEMANQMMSISLAIVSQMKKLLLIFH

SEQ ID NO: 779 - protein, 160 aa, Arabidopsis thaliana
  misc_feature (133)..(133): Xaa can be any naturally occurring amino acid
  unsure (1)..(160): unsure at all Xaa locations
MEAQHLHAKPHAEGEWSTGFCDCFSDCKNCCITFWCPCITFGQVAEIVDRGSTSCGTAGALYALIAVVTGCACIYSCFYRGKMRAQYNIKGDDCTDCLKHFCCELCSLTQQYRELKHRGYDMSLGNLFLRYTXWAGNVERQQNQGGVAMGAPVFQGGMTR

SEQ ID NO: 780 - protein, 974 aa, Arabidopsis thaliana
MEGGRGGGDGNFLPNSNFGVFSDSAMDMDFMDELLFDGCWLETTDGKSLKQTMGQQVSDSTTMNDNNNNSYLYGYQYAENLSQDHISNEETGRKFPPIPPGFLKIEDLSNQVPFDQSAVMSSAQAEKFLLEESEGGRRYWIAPRTSQGPSSSVKERLVQAIEGLNEEVQDKDFLIQIWLPIQQEGKNFLTTSEQPHFFNPKYSSLKRYRDVSVAYNFLADEDSKESVGLPGRVFLKKLPEWTPDVRFFRSEEYPRIKEAEQCDVRGSLALPVFERGSGTCLGVVEIVTTTQKMNYRPELDNICKALESVNLRSSRSLNPPSREVCKNGLLNQTLTSSIHRNNEFWLLNVICPFCFSFCRVYDLPLALTWAPCARQGKVGSRHSDENFSECVSTVDDACIVPDHQSRHFLEACSEHHLLQGEGIVGKAFNATKLFFVPEVTTFSKTNYPLAHHAKISGLHAALAVPLKNKFNSSVEFVLEFFFPKACLDTEAQQDMLKSLSATLQQDFRSLNLFIDKELELEVVFPVREEVVFAENPLINAGTGEDMKPLPLEEISQEDSSWISHMIKANEKGKGVSLSWEYQKEEPKEEFMLTSGWDNNQIGSGHNNFLSEAEQFQKVTNSGLRIDMDPSFESASFGVGQTLLGSRRPGEKRRTKTEKTIGLEVLRQYFAGSLKDAAKSIGVCPTTLKRICRQHGITRWPSRKIKKVGHSLKKLQLVIDSVQGVQGSIQLDSFYTSFPELSSPHMSGTGTSFKNPNAQTENGVSAQGTAAAPKSPPSSSCSHSSGSSTCCSTGANQSTNTGTTSNTVTTLMAENASAILKRARSEVRLHTMNQDETKSLSRTLSHKTFSEHPLFENPPRLPENSSRKLKAGGASKVKATFGEAKVRFTLLPTWGFRELQHEIARRFNIDNIAPFDLKYLDDDKEWVLLTCEADLEECIDIYRSSQSRTIKISVHEASQVKLGGSFGSIGLGPSL

SEQ ID NO: 781 - protein, 83 aa, Arabidopsis thaliana
  misc_feature (4)..(4): Xaa can be any naturally occurring amino acid
  misc_feature (9)..(9): Xaa can be any naturally occurring amino acid
  misc_feature (12)..(13): Xaa can be any naturally occurring amino acid
  misc_feature (18)..(18): Xaa can be any naturally occurring amino acid
  misc_feature (23)..(23): Xaa can be any naturally occurring amino acid
  misc_feature (67)..(67): Xaa can be any naturally occurring amino acid
  unsure (1)..(83): unsure at all Xaa locations
KLEXIVPSXHNXXQLIDXTEDGXVSLLTDSGGTKDDLKLPTDDGLTAQMRLGFDEGKDILVSFMSSXGEEQICAVKEGWWWPK

SEQ ID NO: 782 - protein, 610 aa, Arabidopsis thaliana
MLRSLLLRRSVGHSLGTLSPSSSTIRSSFSPHRTLCTTGQTLTPPPPPPPRPPPPPPATASEAQFRKYAGYAALAIFSGVATYFSFPFPENAKHKKAQIFRYAPLPEDLHTVSNWSGTHEVQTRNFNQPENLADLEALVKESHEKKLRIRPVGSGLSPNGIGLSRSGMVNLALMDKVLEVDKEKKRVTVQAGIRVQQLVDAIKDYGLTLQNFASIREQQIGGIIQVGAHGTGARLPPIDEQVISMKLVTPAKGTIELSREKDPELFHLARCGLGGLGVVAEVTLQCVARHELVEHTYVSNLQEIKKNHKKLLSANKHVKYLYIPYTDTVVVVTCNPVSKWSGPPKDKPKYTTDEAVQHVRDLYRESIVKYRVQDSGKKSPDSSEPDIQELSFTELRDKLLALDPLNDVHVAKVNQAEAEFWKKSEGYRVGWSDEILGFDCGGQQWVSESCFPAGTLANPSMKDLEYIEELKKLIEKEAIPAPAPIEQRWTARSKSPISPAFSTSEDDIFSWVGIIMYLPTADPRQRKDITDEFFHYRHLTQKQLWDQFSAYEHWAKIEIPKDKEELEALQARIRKRFPVDAYNKARRELDPNRILSNNMVEKLFPVSTTA

SEQ ID NO: 783 - protein, 97 aa, Arabidopsis thaliana
SNNGRLTPPVTVTGGSFLQFVKTEQTEDHEDFLSGEEACGFFSDEQPPSLHWVLCLSRSIWTFEEICFIPKFGCLLFLVLPNWGKNQKKRGAKRVGN

SEQ ID NO: 784 - protein, 670 aa, Arabidopsis thaliana
MAAATTTTTTSSSISFSTKPSPSSSKSPLPISRFSLPFSLNPNKSSSSSRRRGIKSSSPSSISAVLNTTTNVTTTPSPTKPTKPETFISRFAPDQPRKGADILVEALERQGVETVFAYPGGASMEIHQALTRSSSIRNVLPRHEQGGVFAAEGYARSSGKPGICIATSGPGATNLVSGLADALLDSVPLVAITGQVPRRMIGTDAFQETPIVEVTRSITKHNYLVMDVEDIPRIIEEAFFLATSGRPGPVLVDVPKDIQQQLAIPNWEQAMRLPGYMSRMPKPPEDSHLEQIVRLISESKKPVLYVGGGCLNSSDELGRFVELTGIPVASTLMGLGSYPCDDELSLHMLGMHGTVYANYAVEHSDLLLAFGVRFDDRVTGKLEAFASRAKIVHIDIDSAEIGKNKTPHVSVCGDVKLALQGMNKVLENRAEELKLDFGVWRNELNVQKQKFPLSFKTFGEAIPPQYAIKVLDELTDGKAIISTGVGQHQMWAAQFYNYKKPRQWLSSGGLGAMGFGLPAAIGASVANPDAIVVDIDGDGSFIMNVQELATIRVENLPVKVLLLNNQHLGMVMQWEDRFYKANRAHTFLGDPAQEDEIFPNMLLFAAACGIPAARVTKKADLREAIQTMLDTPGPYLLDVICPHQEHVLPMIPSGGTFNDVITEGDGRIKY

SEQ ID NO: 785 - protein, 272 aa, Arabidopsis thaliana
MSLLADLVNLDISDNSEKIIAEYIWVGGSGMDMRSKARTLPGPVTDPSKLPKWNYDGSSTGQAPGQDSEVILYPQAIFKDPFRRGNNILVMCDAYTPAGEPIPTNKRHAAAEIFANPDVIAEVPWYGIEQEYTLLQKDVNWPLGWPIGGFPGPQGPYYCSIGADKSFGRDIVDAHYKASLYAGINISGINGEVMPGQWEFQVGPSVGISAADEIWIARYILERITEIAGVVVSFDPKPIPGDWNGAGAHTNYRDTLRIGGQLQTWTLTLLLP

SEQ ID NO: 786 - protein, 204 aa, Arabidopsis thaliana
MSGDNGGGERRKGSVKWFDTQKGFGFITPDDGGDDLFVHQSSIRSEGFRSLAAEEAVEFEVEIDNNNRPKAIDVSGPDGAPVQGNSGGGSSGGRGGFGGGRGGGRGSGGGYGGGGGGYGGRGGGGRGGSDCYKCGEPGHMARDCSEGGGGYGGGGGGYGGGGGYGGGGGGYGGGGRLLSLYYPLFAYYDGSLSLLVGFFLMVSD

SEQ ID NO: 787 - protein, 386 aa, Arabidopsis thaliana
MAKPVSIEVYNPNGKYRVVSTKPMPGTRWINLLVDQGCRVEICHLKKTILSVEDIIDLIGDKCDGVIGQLTEDWGETLFSALSKAGGKAFSNMAVGYNNVDVEAANKYGIAVGNTPGVLTETTAELAASLSLAAARRIVEADEFMRGGLYEGWLPHLFVGNLLKGQTVGVIGAGRIGSAYARMMVEGFKMNLIYFDLYQSTRLEKFVTAYGQFLKANGEQPVTWKRASSMEEVLREADLISLHPVLDKTTYHLVNKERLAMMKKEAILVNCSRGPVIDEAALVEHLKENPMFRVGLDVFEEEPFMKPGLADTKNAIVVPHIASASKWTREGMATLAALNVLGRVKGYPIWHDPNRVDPFLNENASPPNASPSIVNSKALGLPVSKL

SEQ ID NO: 788 - protein, 902 aa, Arabidopsis thaliana
MEKYFHGVLCVFIITVAFIHVVQAQDPNGFITLDCGLLPDGSPYTNPSTGLTFTSDSSFIESGKNGRVSKDSERNFEKAFVTLRYFPDGERNCYNLNVTQGTNYLIRAAFLYGNYDGLNTVPNFDLFIGPNKVTTVNFNATGGGVFVEIIHMSRSTPLDICLVKTGTTTPMISTLELRPLRSDTYISAIGSSLLLYFRGYLNDSGVVLRYPDDVNDRRWFPFSYKEWKIVTTTLNVNTSNGFDLPQGAMASAATRVNDNGTWEFPWSLEDSTTRFHIYLHFAELQTLLANETREFNVLLNGKVYYGPYSPKMLSIDTMSPQPDSTLTCKGGSCLLQLVKTTKSTLPPLINAIELFTVVEFPQSETNQDEVIAIKKIQLTYGLSRINWQGDPCVPEQFLWAGLKCSNINSSTPPTITFLNLSSSGLTGIISPSIQNLTHLQELDLSNNDLTGDVPEFLADIKSLLIICLLVLYISFLYLNRNLSGNNFSGQLPQKLIDKKRLKLNVEGNPKLLCTKGPCGNKPGEGGHPKKSIIVPVVSSVALIAILIAALVLFLVLRKKNPSRSKENGRTSRSSEPPRITKKKKFTYVEVTEMTNNFRSVLGKGGFGMVYHGYVNGREQVAVKVLSHASKHGHKQFKAEVELLLRVHHKNLVSLVGYCEKGKELALVYEYMANGDLKEFFSGKRGDDVLRWETRLQIAVEAAQGLEYLHKGCRPPIVHRDVKTANILLDEHFQAKLADFGLSRSFLNEGESHVSTVVAGTIGYLDPEYYRTNWLTEKSDVYSFGVVLLEIITNQRVIERTREKPHIAEWVNLMITKGDIRKIVDPNLKGDYHSDSVWKFVELAMTCVNDSSATRPTMTQVVTELTECVTLENSRGGKSQNMGSTSSSEVTMTFDTEVNPVAR

SEQ ID NO: 789 - protein, 164 aa, Arabidopsis thaliana
MTRVYVGNLDPRVTERELEDEFKAFGVLRNVWVARRPPGYAFLEFDDERDALDAISALDRKNGWRVELSHKDKGGRGGGGGRRGGIEDSKCYECGELGHFARECRRGRGSVRRRSPSPRRRRSPDYGYARRSYSRSPPYRGSRRDSPRRRDSPYGRRSPYANGV

SEQ ID NO: 790 - protein, 570 aa, Arabidopsis thaliana
  misc_feature (112)..(112): Xaa can be any naturally occurring amino acid
  unsure (1)..(570): unsure at all Xaa locations
MAMYSLSNDPFIHVHGLMMVMYSLSNDLFIRILWKKVIMVTNRRRWVECYKIHDRDPFQATYPCVRLIKVMQKAFGSFIYKMLAFYEYMTRGLNRFHLLLVAYKNPKCRNLXASLSFQVKKSKPLQILFLNPTMEESSNQQILNSETRPDPIQKPPESPATKLSFPRLFLWFDQSNRIKTLLSWSIFFLLAVIVPMISHFVLICADCDFKHRRPYDGLVQLSLSIFAGISFVSLSDWSKKYGIRRFLFFDKLKDVSDKVRIGYEAKIQRSMKLLAIFVLPSTTLQAIYRIWWYASGFNQIPYIINPTLSHVLACTLQLSSWLYRTSLFIIACILYQNICHLQVLRLDEFARCFASEIKDFSSILAEHLKIRRELKIVSHRFRRFILLSLFFVTATQFMALLTTIRASVPFNIYEVGELALCSTSLVSGLFICLKSATQMTHKAQSVTSIATKWNVCASLDTFDVLYDGETPKCPTTTQHSQILSRRRNVVQSSDDDEEGEGDDNDLEIHPIFARAISSQKRQALVTYLENNRAGITVYGFLVDKTWLRMIFSIELALLLWLLKKTIMNIT

SEQ ID NO: 791 - protein, 266 aa, Arabidopsis thaliana
MFSLSFPSSSSALLPSLVAFDSSRRLSLQPKKLNRLQSHLFSPQHLSFSQSNVSRYRAFCVSSSSPPEGTVSVVDFHEKDWSFLESMEIDSTEHTQKIERIIKAGELSESSRVLVSISSETFVDRLVESSPSQLLLIVHDSLFTLACIKEKYDKVKCWQGEMIYVPEKWSPLDAVFLYFLPALPFDLDELFKTLSQRCSSGARVVISHPQGRLGLEQQRKEFSDVVVSDLPDESTLSNVAEKHSFELTQFVDEQGLYLAVLKSSKQ

SEQ ID NO: 792 - protein, 435 aa, Arabidopsis thaliana
MDQEIEIPSFFLCPISLDIMKDPVIVSTGITYDRESIEKWLFSGKKNSCPVTKQVITETDLTPNHTLRRLIQSWCTLNASYGIERIPTPKPPICKSEIEKLIKESSSSHLNQVKCLKRLRQIVSENTTNKRCLEAAEVPEFLANIVSNSVDTYNSPSSSLSSSNLNDMCQSNMLENRFDSSRSLMDEALSVLYHLDTSETALKSLLNNKKGTNLVKTLTKIMQRGIYESRAYAALLLKKLLEVADPMQIILLERELFGEVIQILHDQISHKATRSAMQILVITCPWGRNRHKAVEGGTISMIIELLMDDTFSSERRNSEMAMVVLDMLCQCAEGRAEFLNHGAAIAVVSKKILRVSQITSERAVRVLLSVGRFCATPSLLQEMLQLGVVAKLCLVLQVSCGNKTKEKAKELLKLHARVWRESPCVPRNLYDSYPA

SEQ ID NO: 793 - protein, 405 aa, Arabidopsis thaliana
MAPPVSDDSLQPRDVCVVGVARTPIGDFLGSLSSLTATRLGSIAIQAALKRAHVDPALVEEVFFGNVLTANLGQAPARQAALGAGIPYSVICTTINKVCAAGMKSVMLASQSIQLGLNDIVVAGGMESMSNVPKYLPDARRGSRLGHDTVVDGMMKDGLWDVYNDFGMGVCGEICADQYRITREEQDAYAIQSFERGIAAQNTQLFAWEIVPVEVSTGRGRPSVVIDKDEGLGKFDAAKLKKLRPSFKEDGGSVTAGNASSISDGAAALVLVSGEKALELGLHVIAKIRGYADAAQAPELFTTTPALAIPKAIKRAGLDASQVDYYEINEAFSVVALANQKLLGLDPERLNAHGGAVSLGHPLGCSGARILVTLLGVLRAKKGKYGVASICNGGGGASALVLEFM

SEQ ID NO: 794 - protein, 887 aa, Arabidopsis thaliana
  misc_feature (21)..(21): Xaa can be any naturally occurring amino acid
  unsure (1)..(887): unsure at all Xaa locations
MLSSIGCNMFVPSTFCSVSSXEFVSIDCGCSSNYTDPRTGLGWVSDSEIIKQGKPVTLANTNWNSMQYRRRRDFPTDNKKYCYRLSTKERRRYIVRTTFLYGGLGSEEAYPKFQLYLDATKWATVTIQEVSRVYVEELIVRATSSYVDVCVCCAITGSPFMSTLELRPLNLSMYATDYEDNFFLKVAARVNFGAPNMDALRYPDDPYDRIWESDINKRPNYLVGVAPGTTRINTSKTINTLTREYPPMKVMQTAVVGTQGLISYRLNLEDFPANARAYAYFAEIEELGANETRKFKLVQPYFPDYSNAVVNIAENANGSYTLYEPSYMNVTLDFVLTFSFGKTKDSTQGPLLNAIEISKYLPISVKTDRSDVSVLDAIRSMSPDSDWASEGGDPCIPVLCALSRKNLRGEIPPGINYMEALTELHLENNQLSGSLPPYLAHLPNLQELSIENNSFKGKIPSALLKGKVLFKYNNNPELQNEAQRKHFWQILGISIAAVAILLLLVGGSLVLLCALRKTKRADKGDSTETKKKGLVAYSAVRGGHLLDEGVAYFISLPVLEEATDNFSKKVGRGSFGSVYYGRMKDGKEVAVKITADPSSHLNRQFVTEVALLSRIHHRNLVPLIGYCEEADRRILVYEYMHNGSLGDHLHGSSDYKPLDWLTRLQIAQDAAKGLEYLHTGCNPSIIHRDVKSSNILLDINMRAKVSDFGLSRQTEEDLTHVSSVAKGTVGYLDPEYYASQQLTEKSDVYSFGVVLFELLSGKKPVSAEDFGPELNIVHWARSLIRKGDVCGIIDPCIASNVKIESVWRVAEVANQCVEQRGHNRPRMQEVIVAIQDAIRIERGNENGLKSSSSSSSKAQSSRKTLLTSFLELESPDISRNSLAPAAR

SEQ ID NO: 795 - protein, 110 aa, Arabidopsis thaliana
AAQRRIRRPFSVAEVEALVQPVEKLGTGRWRDVKLCAFEDADHRTYVDLKDKWKTLVHTAKISPQQRRGEPVPQELLNRVLNAHGYWTQQQMQPWRSSLLCVLLLLLMIM

SEQ ID NO: 796 - protein, 811 aa, Arabidopsis thaliana
MSGKTRILFFLTCLSFLLVFPTRSNGQDLALSCGTSEASADQDKKKWEPDTKFLKTGNSIHATATYQDPSLLSTVPYMTARIFTAPATYEIPIKGDKRHLLRLYFYPSTYTGLNISNSYFTVEANDVTLLSNFSAAITCQALTQAYLVKEYSLAPTDKDVLSIKFTPSDKYRDAFAFINGIEVIQMPELFDTAALVGFTDQTMDAKTANLQSMFRLNVGGQDIPGSQDSGGLTRTWYNDAPYIFSAGLGVTLQASNNFRINYQNMPVSIAPADIYKTARSQGPNGDINLKSNLTWMFQIDKNFTYILRLHFCEFQLSKINQKVFNIYINNRTAQMTPSTFGQPEYYDSSLNGLEIFKMDTMKNLAGPNPEPSPMQAEEEVKKEFKNEKRHAFIIGSAGGVLAVLIGALCFTAYKKKQGYQGGDSHTSSWLPIYGNSTTSGTKSTISGKSNNGSHLSNLAAGLCRRFSLPEIKHGTQNFDDSNVIGVGGFGKVYKGVIDGTTKVAVKKSNPNSEQGLNEFETEIELLSRLRHKHLVSLIGYCDEGGEMCLVYDYMAFGTLREHLYNTKKPQLTWKRRLEIAIGAARGLHYLHTGAKYTIIHRDVKTTNILVDENWVAKVSDFGLSKTGPNMNGGHVTTVVKGSFGYLDPEYFRRQQLTEKSDVYSFGVVLFEILCARPALNPSLPKEQVSLGDWAMNCKRKGNLEDIIDPNLKGKINAECLKKFADTAEKCLNDSGLERPTMGDVLWNLEFALQLQETADGTRHRTPNNGGSSEDLGRGGMAVNVAGRDDVSDLSSEDNTEIFSQIVNPKGR

SEQ ID NO: 797 - protein, 230 aa, Arabidopsis thaliana
THTLRREVVLIVFSFPKHTDYFLSCYPGPQGPYYCGVGADKAIGRDIVDAHYKACLYAGIGISGINGEVMPGQWEFQVGPVEGISSGDQVWVARYLLERITEISGVIVSFDPKPVPGDWNGAGAHCNYSTKTMRNDGGLEVIKKAIGKLQLKHKEHIAAYGEGNERRLTGKHETADINTFSWGVANRGASVRVGRDTEKEGKGYFEDRRPASNMDPYVVTSMIAETTILG

SEQ ID NO: 798 - protein, 354 aa, Arabidopsis thaliana
MSLLSDLVNLNLTDATGKIIAEYIWIGGSGMDIRSKARTLPGPVTDPSKLPKWNYDGSSTGQAAGEDSEVILYPQAIFKDPFRKGNNILVMCDAYTPAGDPIPTNKRHNAAKIFSHPDVAKEEPWYGIEQEYTLMQKDVNWPIGWPVGGYPGPQGPYYCGVGADKAIGRDIVDAHYKACLYAGIGISGINGEVMPGQWEFQVGPVEGISSGDQVWVARYLLERITEISGVIVSFDPKPVPGDWNGAGAHCNYSTKTMRNDGGLEVIKKAIGKLQLKHKEHIAAYGEGNERRLTGKHETADINTFSWGVANRGASVRVGRDTEKEGKGYFEDRRPASNMDPYVVTSMIAETTILG

SEQ ID NO: 799 - protein, 400 aa, Arabidopsis thaliana
MVDCGVDIYQLPVVPRACRSPRGRRLKIMRKQRSEFEVLAQVAGRFSGERKNRIVIGSLAHETKETKDDNVVVNNFLETMEVEVKPQPGLENLSQVLLSKDWLALGPSMPNSPITQEENFDSRSKIDSKRKVSHLKERGSCISQESQNMYPLKKRKLFYQNHSSESHDTPCTVKFGIKSLNISELLVDVPESATVGSLKLAVLEAVTQILKGGLNIGVLFQGKTIVDDSKTLLQIGIPYDDDDDENLGSLGFMLEPQKSETTTITTFTTVSPRTRLRQNQVLGSVDSTEAVAAKSVVPVRMKPAWQPEMVQRRIRRPFTVSEVEALVQAVERLGTGRWRDVKSHAFNHVNHRTYVDLKDKWKTLVHTAKISARQRRGEPVPQDLLDRVLAAHAFWSDRTG

SEQ ID NO: 800 - protein, 858 aa, Arabidopsis thaliana
MKSIHGFLLFLITAYVILESVQAQDQLGFISLDCGLVPKNATYTEKTTNITYKSDANYIDSGLVGRISAEYKAQLQQQTWTVRSFPEGERNCYNFNLTAKSRYLIRATFTYGNYDGLRQVPKFDIHIGPSKWTSVKLDGVGNGAVLEMIHVLTQDRLQICLVKTGKGIPFISSLELRPLNNNTYLTQSGSLIGYDEDIHDRVWVRQFGNGLKSISTDLLVDTSNPYDVPQAVAKTACVPSNASQPLIFDWTLDNITSQSYVYMHFAEIQTLKDNDIREFNITYNGGQNVYSYLRPEKFEISTLFDSKPLSSPDGSFSLSFTKTGNSTLPPLINGLEIYKVLDLLELETDQDEVSAMINIKATYDLSKKVSWQGDPCAPKSYQWEGLNCSYPNSDQPRIISLNLAENKLTGTITPEISKLTQLIELDLSKNDLSGEIPEFFADMKLLKLINLSGNLGLNSTIPDSIQQRLDSKSLILILSKTVTKTVTLKGKSKKVPMIPIVASVAGVFALLVILAIFFVVRRKNGESNKGTNPSIITKERRITYPEVLKMTNNFERVLGKGGFGTVYHGNLEDTQVAVKMLSHSSAQGYKEFKAEVELLLRVHHRNLVGLVGYCDDGDNLALIYEYMANGDLKENMSGKRGGNVLTWENRMQIAVEAAQGLEYLHNGCTPPMVHRDVKTTNILLNERYGAKLADFGLSRSFPVDGESHVSTVVAGTPGYLDPEYYRTNWLSEKSDVYSFGVVLLEIVTNQPVTDKTRERTHINEWVGSMLTKGDIKSILDPKLMGDYDTNGAWKIVELALACVNPSSNRRPTMAHVVTELNECVALENARRQGREEMHTSGYVDFSRSSASEFSPGAR

SEQ ID NO: 801 - protein, 570 aa, Arabidopsis thaliana
MEEKDVYTQDGTVDIHKNPANKEKTGNWKACRFILGNECCERLAYYGMGTNLVNYLESRLNQGNATAANNVTNWSGTCYITPLIGAFIADAYLGRYWTIATFVFIYVSGMTLLTLSASVPGLKPGNCNADTCHPNSSQTAVFFVALYMIALGTGGIKPCVSSFGADQFDENDENEKIKKSSFFNWFYFSINVGALIAATVLVWIQMNVGWGWGFGVPTVAMVIAVCFFFFGSRFYRLQRPGGSPLTRIFQVIVAAFRKISVKVPEDKSLLFETADDESNIKGSRKLVHTDNLKFFDKAAVESQSDSIKDGEVNPWRLCSVTQVEELKSIITLLPVWATGIVFATVYSQMSTMFVLQGNTMDQHMGKNFEIPSASLSLFDTVSVLFWTPVYDQFIIPLARKFTRNERGFTQLQRMGIGLVVSIFAMITAGVLEVVRLDYVKTHNAYDQKQIHMSIFWQIPQYLLIGCAEVFTFIGQLEFFYDQAPDAMRSLCSALSLTTVALGNYLSTVLVTVVMKITKKNGKPGWIPDNLNRGHLDYFFYLLATLSFLNFLVYLWISKRYKYKKAVGRAH

SEQ ID NO: 802 - protein, 553 aa, Arabidopsis thaliana
DSTSLINKRTKGGWNAALFIIVVEIAERFAFYGLASNLITFLTNELGQSTATAAKNINTWIGVSCMFPILGAFLADSILGRFKTVLLTSFIYLLGIVMLPLSVTVVARRMREKVFFMALYVMAVGEGGHKPCVMTFAADQFGEANAEEKAAKTSFFNYWYMAIVLASSIAVLALIFIQERVSWSLGFSIIAGSVVIAIVIFLIGIPKYRKQVPVGSPFTRVAQVMVAALKKWRLSSTRHHYGLCYEEEDEHKLESTNSNQVYLLARTNQFRFLDKATIIDEIDHNKNRNPWRLCTVNQVEEVKLILRLIPIWISLIMFCATLTQLNTFFLKQGSMMDRTIGNHFTIPPAAFQSIVGVTILILIPLYDRVFVPMVRKITNHHSGITSLQRIGVGLFVATFNMVICGLVEAKRLKVARDHGLIDSPKEVVPMSSLWLLPQYILVGIGDVFTIVGMQELFYDQMPETMRSIGAAIFISVVGVGSFVSTGIISTVQTISKSHGEEWLVNNLNRAHLDYYYWIIASLNAVSLCFYLFIANHFLYKKLQDKDDDVESER

SEQ ID NO: 803 - protein, 350 aa, Arabidopsis thaliana
MGSLPPPSLDFSSIDHNSLKNGGSSHQEISHDNLLNLFKSQQDLLNHFFKHLDLSQTLDFSRILLSTTGTVFFTGVGKSAFVANKVSQTLVSLSFRSSFLSPLDALHGDIGALSPRDVLVFFSKSGATEELLRLVPCARAKGAFLVSLTSVSGNPLAGVCDMNVHLPLQRELCPFNLAPVTSTAIQMVFGDTIAVALMAARNLSKEEYAANHPAGRIGKSLIFKVKDVMKKQEELPVCKEGDLIMDQLVELTSKGCGCLLVVDEHSRLIGTFTDGDLRRTLKASGEAIFKLSVGEMCNRKPRTIGPETMAVEAMKKMESPPSPVQFLPVVNEDNTLIGIVTLHGLVSAGL

SEQ ID NO: 804 - protein, 177 aa, Arabidopsis thaliana
  misc_feature (27)..(27): Xaa can be any naturally occurring amino acid
  unsure (1)..(177): unsure at all Xaa locations
MALRSVKTPTLITSVAVVSSSVAEDGXNKPHSIRFSLKPTSALVVHNHQLSFYGSNLKLKPTKFRCSASALTPQLKDTLEKLVNSEKVVLFMKGTRDFPMCGFSNTVVQILKNLNVPFEDVNILENEMLRQGLKEYSNWPTFPQLYIGGEFFGGCDITLEAFKTGELQEEVEKAMCS

SEQ ID NO: 805 - protein, 876 aa, Arabidopsis thaliana
MRFLSFLIFVFAVLGLVQAQDQSGFISLDCGLVPTEITYVEKSTNITYRSDATYIDSGVPGKINEVYRTQFQQQIWALRSFPEGQRNCYNFSLTAKRKYLIRGTFIYGNYDGLNQLPSFDLYIGPNKWTSVSIPGVRNGSVSEMIHVLRQDHLQICLVKTGETTPFISSLELRPLNNNTYVTKSGSLIVVARLYFSPTPPFLRYDEDVHDRIWIPFLDNKNSLLSTELSVDTSNFYNVPQTVAKTAAVPLNATQPLKINWSLDDITSQSYIYMHFAEIENLEANETREFNITYNGGENWFSYFRPPKFRITTVYNPAAVSSLDGNFNFTFSMTGNSTHPPLINGLEIYQVLELPQLDTYQDEVSAMMNIKTIYGLSKRSSWQGDPCAPELYRWEGLNCSYPNFAPPQIISLNLSGSNLSGTITSDISKLTHLRELDLSNNDLSGDIPFVFSDMKNLTLINLSGNKNLNRSVPETLQKRIDNKSLTLIRDETGKNSTNVVAIAASVASVFAVLVILAIVFVVIRKKQRTNEASGPRSFTTGTVKSDARSSSSSIITKERKFTYSEVLKMTKNFERVLGKGGFGTVYHGNLDDTQVAVKMLSHSSAQGYKEFKAEVELLLRVHHRHLVGLVGYCDDGDNLALIYEYMEKGDLRENMSGKHSVNVLSWETRMQIAVEAAQGLEYLHNGCRPPMVHRDVKPTNILLNERSQAKLADFGLSRSFPVDGESHVMTVVAGTPGYLDPEYYRTNWLSEKSDVYSFGVVLLEIVTNQPVMNKNRERPHINEWVMFMLTNGDIKSIVDPKLNEDYDTNGVWKVVELALACVNPSSSRRPTMPHVVMELNECLALEIERKQGSQATYIKESVEFSPSSASDFSPLAR

SEQ ID NO: 806 - protein, 935 aa, Arabidopsis thaliana
GLFGSVSGNFTFFTFLGSHLAFFGSFILISLLLLCLLVSTCLFTSSSAQAPGFVSLDCGGAEPFTDELGLKWSPDNHLIYGETANISSVNETRTQYTTLRHFPADSRKYCYTLNVTSRNRYLIRATFLYGNFDNSNNVYPKFDISLGATHWATIVISETYIIETAELVFLASSPTVSVCLSNATTGQPFISTLELRQLSGSMYGSMLSEDRFYLSVAARINFGAESEASVRYPDDPYDRIWESDLQKKPNYLVDVAAGTVRVSTTLPIESRVDDRPPQKVMQTAVVGTNGSLTYRMNLDGFPGFGWAFTYFAEIEDLAEDESRKFRLVLPEQPEYSKSVVNIKENTQRPYRVYAPGYPNITLPFVLNFRFAKTADSSRGPILNAMEISKYLRKSDGSVDATVMANVASLYSSTEWAQEGGDPCSPSPWSWVQCNSDPQPRVVAIKLSSMNLTGNIPSDLVKLTGLIIHLENNRLTGKIPSSLTKLPNLKELYLQNNVLTGTIPSDLAKDVISNFSGNLNLEKSGDKGKKLGVIIGASVGAFVLLIATIISCIVMCKSKKNNKLGKTSAELTNRPLPIQRVSSTLSEAHGDAAHCFTLYEIEEATKKFEKRIGSGGFGIVYYGKTREGKEIAVKVLANNSYQGKREFANEVTLLSRIHHRNLVQFLGYCQEEGKNMLVYEFMHNGTLKEHLYGVVPRDRRISWIKRLEIAEDAARGIEYLHTGCVPAIIHRDLKTSNILLDKHMRAKVSDFGLSKFAVDGTSHVSSIVRGTVGYLDPEYYISQQLTEKSDVYSFGVILLELMSGQEAISNESFGVNCRNIVQWAKMHIDNGDIRGIIDPALAEDDYSLQSMWKIAEKALLCVKPHGNMRPSMSEVQKDIQDAIRIEKEALAARGGISDEFSRSSAHSSSLNMGMLDLAGSQSYVSIDESVLQPTAR

SEQ ID NO: 807 - protein, 300 aa, Arabidopsis thaliana
MRTSSDRNRIASTDISPMSSLTVRRVQNLIERCLQLYMNQKEVVDTLLEQAKIEPGFTELVWQKLEEENREFFKAYYLRLMVKHQIMEYNELLEQQINHMRQMHPTAGASVRNRNGSHVPPMNQQQLLYERKEPDQSSPNLSSPYLNGGSAINTNIPSYVDFSSHSRRVDPSPNSLSLQATNMPLMQGMIKSETAYQNCAPYMYGGEAQSTVGDVTIASFSNDSSNQSLNDPLVDPDAPTFGSLGQIPQNFSLSDLTADFSQSSDILESYEGSPFLLADAENFLDSSERVEHQGEHLKLC

SEQ ID NO: 808 - protein, 854 aa, Arabidopsis thaliana
METRSKLMLLACATFSIISLVKSQNQQGFISLYCGLPSNESPYIEPLTNLTYISDVNFVRGGKTGNIKNNSDIDFTSRPYKVLRYFPEGIRNCYSLSVKQGTKYLIRTLFFYGNYDGLNTSPRFDLFLGPNIWTSVDVQKVDGGDGVIEEIIHVTRCNILDICLVKTGTTTPMISAIELRPLRYDTYTARTGSLKKIFYPEDVYDRVWIPHSQPEWTQINTTRNVSGFSDGYNPPQDVIKTASIPTNVSEPLTFTWMSESSDDETYAYLYFAEIQQLKANETRQFKILVNGVYYIDYIPRKFEAETLITPAALKCGGGVCRVQLSKTPKSTLPPQMNAIEIFSVIQFPQSDTNTDEVIAIKNIQSTYKVSRISWQGDPCVPIQFSWMGVSCNVIDISTPPRIISLDLSSSGLTGVITPSIQNLTMLRELDLSNNNLTGEVPEFLATIKPLHLRGNNLRGSVPQALQDRENNDGLKLFVDPNITRRGKHQPKSWLVAIVASISCVAVTIIVLVLIFIFRRRKSSTRKVIRPSLEMKNRRFKYSEVKEMTNNFEVVLGKGGFGVVYHGFLNNEQVAVKVLSQSSTQGYKEFKTEVELLLRVHHVNLVSLVGYCDKGNDLALIYEFMENGNLKEHLSGKRGGPVLNWPGRLKIAIESALGIEYLHIGCKPPMVHRDVKSTNILLGLRFEAKLADFGLSRSFLVGSQTHVSTNVAGTLGYLDPEYYQKNWLTEKSDVYSFGIVLLEIITGQPVIEQSRDKSYIVEWAKSMLANGDIESIMDRNLHQDYDTSSSWKALELAMLCINPSSTLRPNMTRVAHELNECLEIYNLTKRRSQDQNSSKSSGHTVTFISDIPSAR

SEQ ID NO: 809 - protein, 827 aa, Arabidopsis thaliana
MERSLELLLLLIRTLAIIHISQAQSQQGFISLDCGLPANEPSPYTEPRTGLQFSSDAAFIQSGKIGRIQANLEADFLKPSTTMRYFPDGKRNCYNLNVEKGRNHLIRARFVYGNYDGRDTGPKFDLYLGPNPWATIDLAKQVNGTRPEIMHIPTSNKLQVCLVKTGETTPLISVLEVRPMGSGTYLTKSGSLKLYYREYFSKSDSSLRYPDDIYDRQWTSFFDTEWTQINTTSDVGNSNDYKPPKVALTTAAIPTNASAPLTNEWSSVNPDEQYYVYAHFSEIQELQANETREFNMLLNGKLFFGPVVPPKLAISTILSVSPNTCEGGECNLQLIRTNRSTLPPLLNAYEVYKVIQFPQLETNETDVSAVKNIQATYELSRINWQSDPCVPQQFMWDGLNCSITDITTPPRITTLDLSNNNLTGEVPEFLSNMKSLNLSGNDLNGTIPQSLQRKGLELLYQGNPRLISPGSTETKSGKSFPVTIVASVGSAAILIVVLVLVLFLRKKKPSAVEEVTKMTNNFGRVVGEGGFGVVCHGTVNGSEQVAVKLLSQSSTQGYKEFKAEVDLLLRVHHTNLVSLVGYCDEGDHLALIYEFVPNGDLRQHLSGKGGKPIVNWGTRLRIAAEAALGLEYLHIGCTPPMVHRDVKTTNILLDEHYKAKLADFGLSRSFPVGGESHVSTVIAGTPGYLDPEYYHTSRLSEKSDVYSFGIVLLEMITNQAVIDRNRRKSHITQWVGSELNGGDIAKIMDLKLNGDYDSRSAWRALELAMSCADPTSARRPTMSHVVIELKECLVSENSRRNMSRGMDTLSSPEVSMIFDAEMIPRAR

SEQ ID NO: 810 - protein, 269 aa, Arabidopsis thaliana
IFLYLSPFEVAHPRISFFFFFFDNKRIFLLTFFFFEESYNHPTKKNQNYKTNKQSPRATSTTSHFTESWGDLPLKENDSEDMLVYGILNDAFHGGWEPSSSSSDEDRSSFPSVKIETPESFAAVDSVPVKKEKTSPVSAAVTAAKGKHYRGVRQRPWGKFAAEIRDPAKNGARVWLGTFETAEDAALAYDRAAFRMRGSRALLNFPLRVNSGEPDPVRIKSKRSSFPSSNENGAPKKRRTVAAGGGMDKGLTVKCEVVEVARGDHLLVL

SEQ ID NO: 811 - protein, 320 aa, Arabidopsis thaliana
  misc_feature (216)..(216): Xaa can be any naturally occurring amino acid
  unsure (1)..(320): unsure at all Xaa locations
MSERDDGLGLSLSLSLGFNQKDPSSRLNPMPLASYASSSHMQHMQQSNYNHPQKIQNTWINMFQSSERNSDMRSFLRGIDVNRAPSTVVVDVEDEGAGVSSPNSTVSSVMSGKKSERELMAAAGAVGGGGRVEDNEIERASCSLGGGSDDEDGSGNGDDSSRKKLRLSKEQALVLEETFKEHSTLNPKQKMALAKQLNLRTRQVEVWFQNRRARTXKLKQTEVDCEYLKRCCENLTDENRRLQKEVSELRALKLSPHLYMHMKPPTTLTMCPSCERVAVTSSSSSVAPPVMNSSSPMGPMSPMSPWAAMPLRQRPAAGSH

SEQ ID NO: 812 - protein, 407 aa, Arabidopsis thaliana
SRSPPAMASNGIAPRDVCVVGVARTPLGGFLGALSSLPATKLGSIAIEAALKRANVDPALVQEVFFGNVLSANLGQAPARQAALGAGIPNTVVCTTVNKVCASGMKATMFAAQSIQLGINDIVVAGGMESMSNAPKYIAEARKGSRFGHDTLVDAMLKDGLWDVYNDCAMGMCAELCADNHALTREDQDAFAIQSNQRGIAARDSDAFAWEIVPIEVPVGRGKPPVLIEKDESLDKFDPAKLKKLRPSFKENGGTVTAGNASSISDGAAALVLVSGQKAQELGLQVLARIRGYADAAQAPELFTTTPALAIPKAISNAGLESSHVDFFEINEAFSAVALANQKLLGIPSEKINVHGGAVSLGHPLGCSGARILVTLLGVLREKGGKIGVAGVCNGGGGASALVLELA

SEQ ID NO: 813 - protein, 326 aa, Arabidopsis thaliana
MDLDSMDCTSTMDVTDDEEIHQDRHSYASVSKHHHTNNNTTNVNAAASGLLPTTTSVHELLECPVCTNSMYPPIHQCHNGHTLCSTCKARVHNRCPTCRQELGDIRCLALEKVAESLELPCKHMSLGCPEIFPYYSKLKHETVCNFRPYSCPYAGSECSVTGDIPFLVAHLRDDHKVDMHSGCTFNHRYVKSNPREVENATWMLTVFHCFGQYFCLHFEAFQLGMAPFYMAFLRFMGDETEARNYNYSLEVGGYGRKLIWEGTPRSVRDSHRKVRDSHDGLIIQRNMALFFSGGDRKELKLRVTGRIWKEQQQSGEGGGACIPNLS

SEQ ID NO: 814 - protein, 194 aa, Arabidopsis thaliana
MKTPMSSSITFALVFFLLSLNPTSSLPSKRESYVQNACSVTRYQDLCAKTLLPFASVAKNSPSKWARAGVSVAITDNKDVLRHLLKTRLSTIGKRDRIALSDCRELLQDSLDSLHKSLAVLRTLRASEFQQQMSDLATWLSSSLTDKDTCLDGFEKTSTRSSSTVRMIRKRVTTSMYLSSNSLALLNKLAANGL

SEQ ID NO: 815 - protein, 291 aa, Arabidopsis thaliana
  misc_feature (258)..(258): Xaa can be any naturally occurring amino acid
  unsure (1)..(291): unsure at all Xaa locations
MVTATSIIAWGSGEDGQLGIGTNEEKEWACVVEALEPYSVRSVVSGSRNSLAICDDGTMFTWGWNQRGTLGHQPETKTENIPSRVKALANVKITQAAIGGWHCLAVDDQGRAYAWGGNEYGQCGEEPLRDEMGRPVRRDIVIPKRCAPKLTVRQVAAGGTHSVVLTREGHVWTWGQPWPPGDIKQISVPVRVQGLENVRLIAVGAFHNLALEEDGRLLAWGNNEYGQLGTGDTQPTSHPVPVQGLDDLTLVDIAAGGXAFTALTDKGEVRFSYAQNVFFLLILTFLNLFRY

SEQ ID NO: 816 - protein, 209 aa, Arabidopsis thaliana
MAANNKLFFVLLSLFPLIIFSATATSSKDYDTKAYVHSWCRTTLYPKLCVRSMSRYVRSRAVQNPRDLARFALKASLYRAKYTKAFLLKEVKNLETTLRPQYYASVHDCLDQIRDSVNQLSLAIAELDRVSRRQGKSQGDLHWHINNLQTWTSTALTDAETCVSQFPGRRMSKLKATIKGKVKNVEETTSNALAFIEHYAAARYRARRP

SEQ ID NO: 817 - protein, 204 aa, Arabidopsis thaliana
MGESFRLFNHHHFLTTFLIIIAMLKLVHTTTTTTTTTTTTNTEFVKSSCTFTTYPRLCFSSLSTHASLIQTSPKLMAHAALNITLASAKVTSAMMVRLSNSRLKPKEVSAMRDCVEELGDTLEELRKSIGEMCQLSGSNYEVYISDIQTWVSAALTDVNTCTDGFEGEDMDGKVKVLVRGRILVIAHLTSNALALINHFASIHG

SEQ ID NO: 818 - protein, 866 aa, Arabidopsis thaliana
MAFSSCFLLVLLQIFSALLLCLAQDQSGFISLDCGSPRETSFREKTTNITYISDANFINTGVGGSIKQGYRTQFQQQTWNLRSFPQGIRNCYTLNLTIGDEYLIRANFLHGGYDDKPSTQFELYLGPNLWSTVTTTNETEASIFEMIHILTTDRLQICLVKTGNATPFISALELRKLMNTTYLTRQGSLYGIDVFDRVWTPYNFGNWSQISTNQSVNINNDYQPPEIAMVTASVPTDPDAAMNISLVGVERTVQFYVFMHFAEIQELKSNDTREFNIMYNNKHIYGPFRPLNFTTSSVFTPTEVVADANGQYIFSLQRTGNSTLPPLLNAMEIYSVNLLPQQETDRKEVDAMMNIKSAYGVNKIDWEGDPCVPLDYKWSGVNCTYVDNETPKIISLDLSTSGLTGEILEFISDLTSLEVLDLSNNSLTGSVPENLSGNELNGSIPATLLDKERRGSITLSIEGNTGLCSSTSCATTKKKKKNTVIAPVAASLVSVFLIGAGIVTFLILKRKKRTKLGLNPNSGTGTTPLHSRSHHGFEPPVIAKNRKLTYIDVVKITNNFERVLGRGGFGVVYYGVLNNEPVAVKMLTESTALGYKQFKAEVELLLRVHHKDLTCLVGYCEEGDKMSLIYEFMANGDLKEHLSGKRGPSILTWEGRLRIAAESAQGLEYLHNGCKPQIVHRDIKTTNILLNEKFQAKLADFGLSRSFPLGTETHVSTIVAGTPGYLDPEYYRTNWLTEKSDVFSFGVVLLELVTNQPVIDMKREKSHIAEWVGLMLSRGDINSIVDPKLQGDFDPNTIWKVVETAMTCLNPSSSRRPTMTQVVMDLKECLNMEMARNMGSRMTDSTNDSSIELSMNFTTELNPGAR

SEQ ID NO: 819 - protein, 543 aa, Arabidopsis thaliana
MRRFVIGQAKNLIDQSRRRQLHHHKNLSFVSLIPPFSAPSDSSSRHLSSSSSSDMSASDSSSSLPVTLDTINPKVIKCEYAVRGEIVNIAQKLQEDLKTNKDAYPFDEIIYCNIGNPQSLGQQPITFFREVLALCSYTALLDESATHGLFSSDSIERAWKILDQIPGRATGAYSHSQGIKGLRDAIADGIEARDGFPADPNDIFMTDGASPGVHMMMQLLITSEKDGILCPIPQYPLYSASIALHGGTLVPYYLDEASGWGLEISELKKQLEDARSKGITVRALAVINPGNPTGQVLSEENQRDVVKFCKQEGLVLLADEVYQENVYVPDKKFHSFKKVARSMGYGEKDLALVSFQSVSKGYYGECGKRGGYMEVTGFTSDVREQIYKMASVNLCSNISGQILASLIMSPPKPGDDSYESYIAEKDGILSSLARRAKTLEEALNKLEGVTCNRAEGAMYLFPCLHLPQKAIAAAEAEKTAPDNFYCKRLLKATGIVVVPGSGFRQVPGTWHFRCTILPQEDKIPAIVDRLTAFHQSFMDEFRD

SEQ ID NO: 820 - protein, 444 aa, Arabidopsis thaliana
MTIYIRFSTCIETNLHESVNTPDDLLRRVGCGGDRDESMNRCETDSSSHKHTNRVKSSDSVPKAKQLPKKIKSENVRSTLIPFYYYYYCYYITSYNSVCRIMERYEIVKDIGSGNFGVAKLVRDKFSKELFAVKFIERGQKIDEHVQREIMNHRSLIHPNIIRFKEVLLTATHLALVMEYAAGGELFGRICSAGRFSEDEARFFFQQLISGVNYCHSLQICHRDLKLENTLLDGSEAPRVKICDFGYSKSGVLHSQPKTTVGTPAYIAPEVLSTKEYDGKIADVWSCGVTLYVMLVGAYPFEDPSDPKDFRKTIGRILKAQYAIPDYVRVSDECRHLLSRIFVANPEKRITIEEIKNHSWFLKNLPVEMYEGSLMMNGPSTQTVEEIVWIIEEARKPITVATGLAGAGGSGGSSNGAIGSSSMDLDDLDTDFDDIDTADLLSPL

SEQ ID NO: 821 - protein, 946 aa, Arabidopsis thaliana
MAIKASFSNVANMLLDWDDVHNHDFCSWRGVFCDNVSLNVVSLNLSNLNLGGEISSALGDLMNLQSIDLQGNKLGGQIPDEIGNCVSLAYVDFSTNLLFGDIPFSISKLKQLEFLNLKNNQLTGPIPATLTQIPNLKTLDLARNQLTGEIPRLLYWNEVLQYLGLRGNMLTGTLSPDMCQLTGLWYFDVRGNNLTGTIPESIGNCTSFEILDVSYNQITGVIPYNIGFLQVATLSLQGNKLTGRIPEVIGLMQALAVLDLSDNELTGPIPPILGNLSFTGKLYLHGNKLTGQIPPELGNMSRLSYLQLNDNELVGKIPPELGKLEQLFELNLANNNLVGLIPSNISSCAALNQFNVHGNFLSGAVPLEFRNLGSLTYLNLSSNSFKGKIPAELGHIINLDTLDLSGNNFSGSIPLTLGDLEHLLILNLSRNHLNGTLPAEFGNLRSIQIIDVSFNFLAGVIPTELGQLQNINSLILNNNKIHGKIPDQLTNCFSLANLNISFNNLSGIIPPMKNFTRFSPASFFGNPFLCGNWVGSICGPSLPKSQADISLTTFLALDQPVFTRVAVICMVLGFITLICMIFIAVYKSKQQKPVLKGSSKQPEGSTKLVILHMDMAIHTFDDIMRVTENLDEKYIIGYGASSTVYKCTSKTSRPIAIKRIYNQYPSNFREFETELETIGSIRHRNIVSLHGYALSPFGNLLFYDYMENGSLWDLLHGPGKKVKLDWETRLKIAVGAAQGLAYLHHDCTPRIIHRDIKSSNILLDGNFEARLSDFGIAKSIPATKTYASTYVLGTIGYIDPEYARTSRLNEKSDIYSFGIVLLELLTGKKAVDNEANLHQMILSKADDNTVMEAVDAEVSVTCMDSGHIKKTFQLALLCTKRNPLERPTMQEVSRVLLSLVPSPPPKKLPSPAKVQEGEERRESHSSDTTTPQWFVQFREDISKSSL

SEQ ID NO: 822 - protein, 279 aa, Arabidopsis thaliana
  misc_feature (174)..(174): Xaa can be any naturally occurring amino acid
  unsure (1)..(279): unsure at all Xaa locations
MQSSNVTDCTMRKRGTKRKIEIEKRMTKQQRSVACSKRRPTLFSKAADLCLLSGANIAVFVTSPDENSDVVYSFSGYSHASEIVDCYLNNKSPPKTTINPESAKFWWEEPDLYRDCDDLSELRIIEDRLMRTKKHLMDYLEKKEKSHSVSKSDQNPNNDSGSSSSSSQIASDFXESSSDQSRYLVNEDSGFVDGLLCETEEENNGMRLPQETQTQPMFTEEDQSFWENLDVDDVFGLFKDDNNLEVPLQDHSSTNEDDELLIDISEYLSEEAMECPCFS

SEQ ID NO: 823 - protein, 138 aa, Arabidopsis thaliana
MEGSSKGLRKGAWTAEEDSLLRQCIGKYGEGKWHQVPLRAGLNRCRKSCRLRWLNYLKPSIKRGKFSSDEVDLLLRLHKLLGNRWSLIAGRLPGRTANDVKNYWNTHLKAAATEKEGTLAFDVEQLWNLFDGETVIFD

SEQ ID NO: 824 - protein, 759 aa, Arabidopsis thaliana
MESLKKLLLVALIATSAIHLVQAQNQDGFISVDCGLSPNEVSPYIEPFTGLQFTTDSNFIETGKLGRIQASLEPKYRKSQTTYPDDVYDRIWGSYFEPEWKKISTTLGVNSSSGFLPPLKALMTAASPANASAPLAIPGVLDFPSDKLYLFLHFSEIQVLKANETREFEIFWNKKLVYNAYSPVYLQTKTIRNPSPVTCERGECILEMIKTERSTLPPLLNAVEVFTVVEFPQPETDASDVVAIKNIKAIYGLTRVTWQGDPCVPQQFLWNGLNCNSMETSTPPRITSLDLSSSGLTGSISVVIQNLTHLEKLDLSNNNLTGEVPDFLANMKFLVNLSKNNLNGSIPKALRDRENKGLNVDKNVDNCSSGSCTQKKKFPLLIVALTVSLILVSTVVLVLICMLKKKNTSNVKDLPSQSIPPEANHTLDGVSETMIETKRKRFSYSEVIDMTNNFQRALGEGGFGVVYHGYLNGSEQVAVKLLSQSSVQGYKEFKAEVELLLRVHHINLVSLVGYCDDRNHLALVYEYMSNGDLKHHLSGRNNGFVLSWSTRLQIAVDAALGLEYLHIGCRPSMVHRDVKSTNILLGEQFTAKMADFGLSRSFQIGDENHISTVVAGTPGYLDPEYYRTSRLAEKSDIYSFGIVLLEMITSQHAIDRTRVKHHITDWVVSLISRGDITRIIDPNLQGNYNSRSVWRALELAMSCANPTSEKRPNMSQVVIDLKECLATENSTRSEKDMSSHSSDLDRSMNFYTDMVPRAR

SEQ ID NO: 825 - protein, 362 aa, Arabidopsis thaliana
MEESKRNLLDEEAKASLDIWRYVFGFADIAAAKCAIDLKIPEAIENHPSSQPVTLSELSSAVSASPSHLRRIMRFLVHQGLFKEVPTKDGLATGYTNTPLSRRMMITKPPLLLLETSPEMLAPWLKLSSVVSSPVNVSTPPPFDAVHGKDLWAFAQDNLCHSQLINEAMACDARRVVPRVAGACQGLYDGVATVVDVGGGTGETMGILVKEFPWIKGFNFDLPHVIEVAQVLDGVENVEGDMFDSIPASDAVIIKWVLHDWGDKDCIKILKNCKEAVLPNIGKVLIVECVIGEKKNTMIAEERDDKLEHVRLQLDMVMMVHTSTGKERTLKEWDFVLTEAGFARYEVRDFDDVQSLIIAYRS

SEQ ID NO: 826 - protein, 448 aa, Arabidopsis thaliana
  misc_feature (144)..(144): Xaa can be any naturally occurring amino acid
  unsure (1)..(448): unsure at all Xaa locations
MSSVSSQPQFRYTQPPSKVLHLRNLPWECTEEELIELGKPFGTVVNTKCNVGANRNQAFIEFEDLNQAIQMISYYASSSEPAQVRGKTVYLQYSNRQEIVNNKTTADVVGNVLLVTIEGDDARMVSIDVLHLGHVKAISSVAAXALGERAHVFSAFGFVHKITTFEKTAGYQALVQFTDAETATAAKLALDGRSIPRYLLAETVGQCSLKITYSAHTDLTVKFQSHRSRDYTNPYLPVAPSAIDSTGQVAVGVDGKKMEPESNVLLASIENMQYAVTLDVLHMVFAAFGEVQKIAMFDKNGGVQALIQYSDVQTAVVAKEALEGHCIYDGGFCKLHITYSRHTDLSIKVNNDRSRDYTMPNPPVPMPQQPVQNPYAGNPQQYHAAGGSHHQQQQQPQGGWVQPGGQGSMGMGGGGHNHYMAPPSSSSMHQGPGGHMPPQHYGGPGPMH

SEQ ID NO: 827 - protein, 423 aa, Arabidopsis thaliana
MDPLCEFCRVVRAVVYCKSDSARLCLHCDGCVHSANSLSRRHSRSLLCDKCNSQPAMIRCMNHKLSLCQGCDWNPNDCSALGHRRLALNCYTGCPSLAEFSRLWSFVFDANSSLGGWESVGTLPKSESCTSQCLEQTDHNGGYFGLVSDKLDEIESCVRYQPRMDQSQIIPSNPNYTPYCKDEAFFFPQDSNQPKLQECPNLGIHDGNELCEGFNVDNVQLNFEIADEIFYCSQVATRYHLEDGGMDCLLMDKNIAVTESSSLIESAMEASSSIQQDCVAFQSSRAGGSASVMQVINSNTNCALMNPSCTKNISLGFPQGLVHSNMPLQFPNIVGENNSTEYQDCGLSRVGESPWESNLEGTCPQARDKAKMRYNEKKKTRTFGKQIRYASRKARADTRKRVKGRFVKAGEAYDYDPLGTRDI

SEQ ID NO: 828 - protein, 520 aa, Arabidopsis thaliana
MANSKYEYVKSFELEDEVMLPNLMVVRIDGRDFSRFSQVHEFEKPNDETALNLMNSCSAAVLEEFPDIIFAYGYSDEYSFVFKKTSRFYQRRASKILSLVASFFAAVYVTKWKEFFPQRKLLYAPSFSSKVVSCASAEVLQAYLAWRQQDCHANNQYDTCFWMLVKSGKSVSETQEILKDTQKQQKNELLFQKFGINYKTLPELFRQGSCLFKKKVEETVKHDENGNPVKRLRRKAVFVHSENIAGRSFWNEQPSLYNDLGHFTKDIGKIEPDFIRSFQFENKLLPLTWVVVRIDGCHFHRFSDVHEFEKPNDEQALKLMNSCAVAVLEEFEDIHFAYGVSDEYSFVLKKESELYKRQSSKIISAVASFFTSTYVLQWGEFFPHKELKYPPSFDGRAVCYPTYNILLDYLAWRQVDCHINNQYNTCFWMLVKSGKNKTQSQDYLKGTQTREKNELLSRQFGIEYNSLPVIFRMGSSVFRLKEAENGVVSGKKLEGEVVVDHCNIIERCFWEEHLHILSYS

SEQ ID NO: 829 - protein, 354 aa, Arabidopsis thaliana
MKSSRMKFAKKLKSIRAGEYLNQDRILQVLSAADEFLPKISNHIPQITSAASIWRTPQKSENQIANVTELLENVRQGEEEASGNFVGDEENVRPPVNQIPRVPCDRKESKLAVSCGSDTGIGRKSFGSGFRRPDLNSTTLFDPKLLEAFELAALCFRKIKDFSREARVNDEDDIVFPEEEEIRKDGNNGNTLMDPLLEFEERCPPGGEESVVFYTTTLRGIRKTFDDCNMIRFLLDSFKVKYYERDVSMHREYREELRRISAAETEVLPPVLFVKGRCIGGAQRVLGLHEQGKFKILFEGIPITGDERCRRCDGFRFLMCDGCRGSRRIISGDGSRIQCLICNENGLIVCVGCS

SEQ ID NO: 830 - protein, 393 aa, Arabidopsis thaliana
MVTATSIIAWGSGEDGQLGIGTNEEKEWACVVEALEPYSVRSVVSGSRNSLAICDDGTMFTWGWNQRGTLGHQPETKTENIPSRVKALANVKITQAAIGGWHCLAVDDQGRAYAWGGNEYGQCGEEPLKDEMGRPVRRDIVIPKRCAPKLTVRQVAAGGTHSVVLTREGHVWTWGQPWPPGDIKQISVPVRVQGLENVRLIAVGAFHNLALEEDGRLLAWGNNEYGQLGTGDTQPTSHPVPVQGLDDLTLVDIAAGGWHSTALTDKGEVYGWGRGEHGRLGLGDNDKSSKMVPQKVNLLAEEDIIQVSCGGTHSVALTRDGRIFSFGRGDHGRLGYGRKVTTGQPLELPIKIPPPEGSFNHTDEEEEGKWSAKSIACGGRHTLAIVEWKSDDI

SEQ ID NO: 831 - protein, 192 aa, Arabidopsis thaliana
  misc_feature (170)..(170): Xaa can be any naturally occurring amino acid
  misc_feature (182)..(182): Xaa can be any naturally occurring amino acid
  unsure (1)..(192): unsure at all Xaa locations
CRGCQRMVMEAVTTILGDGLRVGLMVQGKKVRDDGKTLLQTGISEENNHLDSLGFSLEPSLETTPQPLLSSYLSDHACDDVTLCHDNALDSSHEPEPSPADSFGKLGTSDHSRALIPVASAAMLAPRPPNRKFKRTEQQLAAQRRIRRPFSVTEVEALVQAVEKLGTGRXEDVKVRAFEDAXHRTYVDLKVS

SEQ ID NO: 832 - protein, 750 aa, Arabidopsis thaliana
MNSRPSNPTKLVIRSSTLLFCGVVLIHLFAAQIDAQRSTSRWQTLNGDAPLVIARGGFSGLYPDSSIAAYQLATLTSVADVVLWCDLQLTKDGLGICFPDLNLANASTIDRVYPNREKSYSVNGVTTKGWFPNDFSLTELQNFLLIRGILSRTDRFDGNGYLISTIEDVVTTLNREGFWLNVQHDAFYEQQNLSMSSFLLSVSRTVSIDFISSPEVNFFKKITGSFGRNGPTFVFQFLGKEDFEPTTNRTYGSILSNLTFVKTFASGILVPKSYILPLDDEQYLVPHTSLVQDAHKAGLQVYVSGFANDVDIAYNYSSDPVSEYLSFVDNGDFSVDGVLSDFPITASAAVVDFLVISKDGASGDYPGCTDLAYEKAIKDGADVIDCSVQMSSDGVPFCLRSIDLRNSIAALQNTFSNRSTSVPEISSVPGIFTFSLTWPEIQSLTPAISNPFRVYRIFRNPREKNSGKLISLSQFLDLAKTYTSLSGVLISVENAAYLREKQGLDVVQAVLDTLTEAGYSNGTTTTKVMIQSTNSSVLVDFKKQSKYETVYKIEETIGNIRDSAIEDIKKFANAVVINKDSVFPNSDSFLTGQTNVVERLQKSQLPVYVELFRNEFVSQAYDFFSDATVEINAYIYGAGINGTITEFPFTAARYKRNRCLGREEVPPYMLPVNPGGLLNVMSPLSLPPAQAPNQDFIEADVTEPPLSPVIAKAPTSTPGTPSTIAQAPSGQTRLKLSLLLSVFFLSLLLL

SEQ ID NO: 833 - protein, 372 aa, Arabidopsis thaliana
MGYMCDFCGEQRSMVYCRSDAACLCLSCDRSVHSANALSKRHSRTLVCERCNAQPATVRCVEERVSLCQNCDWSGHNNSNNNNSSSSSTSPQQHKRQTISCYSGCPSSSELASIWSFCLDLAGQSICEQELGMMNIDDDGPTDKKTCNEDKKDVLVGSSSIPETSSVPQGKSSSAKDVGMCEDDFYGNLGMDEVDMALENYEELFGTAFNPSEELFGHGGIDSLFHKHQTAPEGGNSVQPAGSNDSFMSSKTEPIICFASKPAHSNISFSGVTGESSAGDFQECGASSSIQLSGEPPWYPPTLQDNNACSHSVTRNNAVMRYKEKKKARKFDKRVRYASRKARADVRRRVKGRFVKAGEAYDYDPLTPTRSY

SEQ ID NO: 834 - protein, 379 aa, Arabidopsis thaliana
MKVYTKTYPFHINIATYSQYKYENSQYFAYVLPSSSMHVSVSRTSRSLDPTITTKNRRFTYSEVVKMTNNFEKILGKGGFGMVYHGTVNDAEQVAVKMLSPSSSQGYKEFKAEVELLLRVHHKNLVGLVGYCDEGENLSLIYEYMAKGDLKEHMLGNQGVSILDWKTRLKIVAESAQGLEYLHNGCKPPMVHRDVKTTNILLDEHFQAKLADFGLSRSFPLEGETRVDTVVAGTPGYLDPEYYRTNWLNEKSDVYSFGIVLLEIITNQHVINQSREKPHIAEWVGVMLTKGDIKSIIDPKFSGDYDAGSVWRAVELAMSCVNPSSTGRPTMSQVVIELNECLASENSRRGMSQNMESKGSIQYTEVSTNFGTEYTPEAR

SEQ ID NO: 835 - protein, 624 aa, Arabidopsis thaliana
MAFSSSCSSVKAVNSRWTSPSPSPSSRFAVLPAFLHRRYATSVKLTAISAALKTVEQTTLTEDNRFSTVGSDSDEYNPTLPKPRILVTEKLGEAGVNLLREFGDVDCSYDLSPEDLKKKVAESDALIVRSGTKVTREVFEAAKGRLKVVGRAGVGIDNVDLQAATEHGCLVVNAPTANTVAAAEHGIALLASMARNVAQADASIKAGKWERSKYVGVSLVGKTLAVMGFGKVGTEVARRAKGLGMTVISHDPYAPADRARALGVDLVSFDQAISTADFVSLHMPLTPATKKVFNDETFSKMKKGVRLINVARGGVIDEDALVRALDAGIVAQAALDVFCEEPPSKDSRLIQHENVTVTPHLGASTKEAQEGVAIEIAEAVAGALKGELSATAVNAPMVAPEVLSELTPYIVLAEKLGRLAVQLASGGKGVQSIRVVYRSARDRDDLDTRLLRAMITKGIIEPISDSYVNLVNADFIAKQKGLRISEERMVVDSSPEYPVDSIQVQILNVESNFAGAVSDAGDISIEGKVKYGVPHLTCVGSFGVDVSLEGNLILCRQVDQPGMIGQVGNILGEQNVNVNFMSVGRTVLRKQAIMAIGVDEEPDNKTLERIGGVSAIEEFVFLKL

SEQ ID NO: 836 - protein, 1538 aa, Arabidopsis thaliana
MVGGRGKPGGKGRRSVKKQEEKEVERGRDEFLSKSKTPHPKGFPPMQDLSTNVVTNRGGLQPMKELWDVEYVHIPKKLSLKTVLDNMKQTMAQRGFYIRSVDAYVRKRFLTENKPLIKRLRRSDVNIIESQEYPEEYLVLRDPSPSSKMSGTVKDIVSKAELDNLRQSGAPVVLHFWASWCDASKQMDQVFSHLATDFPRAHFFRVEAEEHPEISEAYSVAAVPYFVFFKDGKTVDTLEGADPSSLANKVGKVAGSSTSAEPAAPASLGLAAGPTILETVKENAKASLQDRAQPVSTADALKSRLEKLTNSHPVMLFMKGIPEEPRCGFSRKVVDILKEVNVDFGSFDILSDNEVREGLKKFSNWPTFPQLYCNGELLGGADIAIAMHESGELKDAFKDLGITTVGSKESQDEAGKGGGVSSGNTGLSETLRARLEGLVNSKPVMLFMKGRPEEPKCGFSGKVVEILNQEKIEFGSFDILLDDEVRQGLKVYSNWSSYPQLYVKGELMGGSDIVLEMQKSGELKKVLTEKGITGEQSLEDRLKALINSSEVMLFMKGSPDEPKCGFSSKVVKALRGENVSFGSFDILTDEEVRQGIKNFSNWPTFPQLYYKGELIGGCDIIMELSESGDLKATLSEAIGYITSTVPFSVQRLGTETFVTVSVGKAFQIYNCAKLNLVIISPQLPKKIRALASYRDYTFVAFGNEIAVFRRAHQVATWSKHVAKVDLLLVFGEHVLSLDVEGNMFIWAFKGIEEHLAPIGNLQLTGKFTPTSIVHPDTYLNKVLVGSQEGPLQLWNINTKKMLYQFKGWGSSVTSCVSSPALDVVAIGCADGKIHVHNIKLDEEIVTFEHASRGAVTALSFSTDGRPLLASGGSFGVISIWNLNKKRLQSVIRDAHDSSIISLNFLANEPVLMSASADNSLKMWIFDTNDGDPRLLRFRSGHSAPPLCIRFYSNGRHILSAGQDRAFRLFSVIQEQQSRELSQRHISRRAKKLRLKEEELKLKPVVSFDCAEIRERDWCNVVTCHMDTAEAYVWRLQNFVLGEHILKPCPENPTPIKACAISACGNFAVVGTAGGWIERFNLQSGISRGSYFDMSEKRRYAHDGEVIGVACDSTNTLMISAGYHGDLKVWDFKKRELKSQWDVGCSLVKIVYHRVNGLLATVADDFVIRLYDVVTLKMVREFRGHTDRITDLCFSEDGKWVISSSMDGSLRIWDVILAKQIDGVHVDVPITALSLSPNMDVLATAHSDQNGVYLWVNQSMFSGLPSVESYASGKDVVNVKLPSVSALTSSEADDDMDRQVLENSEALQASSFSISQKQIPELVTLSLLPKSQWQSLINLDIIKARNKPIEPPKKPEKAPFFLPSIPSLSGDILFKANDSEADGENEENNKKDQNSMKNFDALESPFSKHLKSSWDSKHFLDFTNYMKSLSPSALDMELRMLEIIDEDVEEELIKRPEFILIGQLLDYFINEVSCKNDFEFMQAVVKLFLKIHGETIRCHPSLQEKAKKLLETQSLVWQKMEKLFQSTRCIVTFLSNSQF

SEQ ID NO: 837 - protein, 488 aa, Arabidopsis thaliana
MSGTVKDIVSKAELDNLRQSGAPVVLHFWASWCDASKQMDQVFSHLATDFPRAHFFRVEAEEHPEISEAYSVAAVPYFVFFKDGKTVDTLEGADPSSLANKVGKVAGSSTSAEPAAPASLGLAAGPTILETVKENAKASLQDRAQPVSTADALKSRLEKLTNSHPVMLFMKGIPEEPRCGFSRKVVDILKEVNVDFGSFDILSDNEVREGLKKFSNWPTFPQLYCNGELLGGADIAIAMHESGELKDAFKDLGITTVGSKESQDEAGKGGGVSSGNTGLSETLRARLEGLVNSKPVMLFMKGRPEEPKCGFSGKVVEILNQEKIEFGSFDILLDDEVRQGLKVYSNWSSYPQLYVKGELMGGSDIVLEMQKSGELKKVLTEKGITGEQSLEDRLKALINSSEVMLFMKGSPDEPKCGFSSKVVKALRGENVSFGSFDILTDEEVRQGIKNFSNWPTFPQLYYKGELIGGCDIIMELSESGDLKATLSE

SEQ ID NO: 838 - protein, 324 aa, Arabidopsis thaliana
MGRSPCCEKKNGLKKGPWTPEEDQKLIDYINIHGYGNWRTLPKNAGLQRCGKSCRLRWTNYLRPDIKRGRFSFEEEETIIQLHSIMGNKWSAIAARLPGRTDNEIKNYWNTHIRKRLLKMGIDPVTHTPRLDLLDISSILSSSIYNSSHHHHHHHQQHMNMSRLMMSDGNHQPLVNPEILKLATSLFSNQNHPNNTHENNTVNQTEVNQYQTGYNMPGNEELQSWFPIMDQFTNFQDLMPMKTTVQNSLSYDDDCSKSNFVLEPYYSDFASVLTTPSSSPTPLNSSSSTYINSSTCSTEDEKESYYSDNITNYSFDVNGFLQFQ

SEQ ID NO: 839 - protein, 223 aa, Arabidopsis thaliana
MGKKCDLCNGVARMYCESDQASLCWDCDGKVHGANFLVAKHTRCLLCSACQSLTPWKATGLRLGPTFSVCESCVALKNAGGGRGNRVLSENRGQEEVNSFESEEDRIREDHGDGDDAESYDDDEEEDEDEEYSDDEDEDDDEDGDDEEAENQVVPWSAAAQVPPVMSSSSSDGGSGGSVTKRTRARENSDLLCSDDEIGSSSAQGSNYSRPLKRSAFKSTVVV

SEQ ID NO: 840 - protein, 334 aa, Arabidopsis thaliana
MVKKGGTKRKIAIETIQKRDSLRVTCTKRREGLYSKASQLCLLSDAQIAILATPPSSESNVSFYSFGHSSVDAVVSAFLSGQRPVPKDNKETREDVGICLTRNNLGLGFWWNDESLARSENPQEISEAIDSMRTLLRNLKELRADEALACNQAFVNDREDLKNNDKCDFVSDHETHDQTLILQSASPICCIPENLNEITQEPNQTLNIQSSTSAICCVPDNSPENFNEITEEQDQIRSICETFCVMDNNAALPEMNLDYDQDIGFDTPFESALNDWFSDNTTHQEISASILNAVVDDQVSVDLTPFSYFQRCLDGDNLRFSDCFKDFANTISAL

SEQ ID NO: 841 - protein, 777 aa, Arabidopsis thaliana
MGDGDEQSKELGGVSSSSRRCSSGTAGAANAEARMKFAAVDAITELVWSPSNGLSLRCADISFTGKAKLLSPNFFDIGLTNMAIHSNSTSIEDQEDHVDVELRNRDQVNQAMIGGSVEDMKPEMVEDKVETNDDIKNEEAGCSKRSSACEGKGDYLPEGEAGPSGSYRRREKAKGKEKALSDENFGGDGEDEDEESFGSVESCNSAGLLSRGKKRPGFEEQLIFGSKRLKTLNQECLGSTSKLKQDSSFMNWISNMTKGIWKGNEEDNSPFVALTTTSNANGHGQVNAIVDQQQLSPCCVKENSGCRNTGFQSFFQSIYCPKKQSQDVVDMDFPNDVNAAPLQELPWIPEHCDISKGDDLSSSGNEIGPVAEPNISSGKVVFNQTSKTQSSENKREDKEPNISLMSLSKSKPNEEPKTCGEADGKVSPCLTNRNSGLKSLWISRFSSKGSFPQKKASETAKEANASASDAAKTRDSRKMLADKNVIRPSISSVDGPDKPDTVLPIVSSMRIESSEAMASLFARRLEAMKSIMPSGSLAENAEEEQRDLICFYCGKKGHCLRDCLEVTDTELRDLVQNISVRNGREEASSLCIRCFQLSHWAATCPNAPLYGSGAEGRAMKNALASTSGMKLPISGFTDVPRAVFDAVQVLRLSRTDVLKWINTKKSVSGLEGFFLRLRLGKWEEGLGGTGYYVARIDGDTEGQSSRRHSEKSLISVKVKGVTCLVESQFISNQDFLEEELKAWWQSAGKSARTSGYDGIPSAEELSRKIQQRKMLGF

SEQ ID NO: 842 - protein, 344 aa, Arabidopsis thaliana
MWKIGQRGVPYFQRLIAAPFTTLRSLPTSLVETGQNRVIDASLTLIRERAKLKGELVRLIGGAKATTALLGVPLGHNSSFLEGPALAPPHVREAIWCGSTNSTTEEGKELKDPRVLSDVGDIPVQEIREMGVDDDRLMKVVSESVKLVMEEEPLRPLVIGGDHSISYPVVRAVSEKLGGPVDILHLDAHPDIYDRFEGNYYSHASSFARIMEGGYARRLLQVGIRSINKEGREQGKRFGVEQYEMRTFSKDRQMLENLKLGEGVKGVYISIDVDCLDPGFAHGVSHFEPGGLSFRDVLNILHNLQGDLVGADVVEYNPQRDTADDMTAMVAAKFVRELAAKMSK

SEQ ID NO: 843 - protein, 342 aa, Arabidopsis thaliana
MSRIIGRKGINYIHRLNSASFTSVSASSIEKGQNRVIDASLTLIRERAKLKGELVRLLGGAKASTSLLGVPLGHNSSFLQGPAFAPPRIREAIWCGSTNSATEEGKELKDPRVLTDVGDVPVQEIRDCGVDDDRLMNVISESVKLVMEEEPLRPLVLGGDHSISYPVVRAVSEKLGGPVDILHLDAHPDIYDCFEGNKYSHASSFARIMEGGYARRLLQVGIRSINQEGREQGKRFGVEQYEMRTFSKDRPMLENLKLGEGVKGVYISIDVDCLDPAFAPGVSHIEPGGLSFRDVLNILHNLQADVVGADVVEFNPQRDTVDGMTAMVAAKLVRELAAKISK

SEQ ID NO: 844 - protein, 196 aa, Arabidopsis thaliana
MPTLYKKAGCLGIREFAMFKKALELSTLCDIEVCVIYYGRDGELIKTWPEDQSKVRDMAERFSKLHERERRKKRTNLSLFLRKKILDDNKLSEKVLEMKDSLESGLRVLQDKLLLLQPENQTELGQSRAVSSTTNPLSSPEDHHHQQWTEPLVTGVSNTEQDLSTSPLSNHQSKYSVFVYNHDSGSFYQVPDSICF

SEQ ID NO: 845 - protein, 219 aa, Arabidopsis thaliana
MVRGKTEMKRIENATSRQVTFSKRRNGLLKKAFELSVLCDAEVALVIFSPRSKLYEFSSSSIAATIERYQRRIKEIGNNHKRNDNSQQARDETSGLTKKIEQLEISKRKLLGEGIDACSIEELQQLENQLDRSLSRIRAKKYQLLREEIEKLKAEERNLVKENKDLKEKWLGMGTATIASSQSTLSSSEVNIDDNMEVETGLFIGPPETRQSKKFPPQN

SEQ ID NO: 846 - protein, 1622 aa, Arabidopsis thaliana
MAMQSLSPVPKLLSTTPSSVLSSDKNFFFVDFVGLYCKSKRTRRRLRGDSSSSSRSSSSLSRLSSVRAVIDLERVHGVSEKDLSSPSALRPQVANLEDILSERGACGVGFIANLDNIPSHGVVKDALIALGCMEHRGGCGADNDSGDGSGLMSSIPWDFFNVWAKEQSLAPFDKLHTGVGMIFLPQDDTFMQEAKQVIENIFEKEGLQVLGWREVPVNVPIVGKNARETMPNIQQVFVKIAKEDSTDDIERELYICRKLIERAVATESWGTELYFCSLSNQTIVYKGMLRSEALGLFYLDLQNELYESPFAIYHRRYSTNTSPRWPLAQPMRFLGHNGEINTIQGNLNWMQSREASLKAAVWNGRENEIRPFGNPRGSDSANLDSAAEIMIRSGRTPEEALMILVPEAYKNHPTLSVKYPEVVDFYDYYKGQMEAWDGPALLLFSDGKTVGACLDRNGLRPARYWRTSDNFVYVASEVGVVPVDEAKVTMKGRLGPGMMIAVDLVNGQVYENTEVKKRISSFNPYGKWIKENSRFLKPVNFKSSTVMENEEILRSQQAFGYSSEDVQMVIESMASQGKEPTFCMGDDIPLAGLSQRPHMLYDYFKQRFAQVTNPAIDPLREGLVMSLEVNIGKRGNILELGPENASQVILSNPVLNEGALEELMKDQYLKPKVLSTYFDIRKGVEGSLQKALYYLCEAADDAVRSGSQLLVLSDRSDRLEPTRPSIPIMLAVGAVHQHLIQNGLRMSASIVADTAQCFSTHHFACLVGYGASAVCPYLALETCRQWRLSNKTVAFMRNGKIPTVTIEQAQKNYTKAVNAGLLKILSKMGISLLSSYCGAQIFEIYGLGQDVVDLAFTGSVSKISGLTFDELARETLSFWVKAFSEDTTKRLENFGFIQFRPGGEYHSNNPEMSKLLHKAVREKSETAYAVYQQHLSNRPVNVLRDLLEFKSDRAPIPVGKVEPAVAIVQRFCTGGMSLGAISRETHEAIAIAMNRIGGKSNSGEGGEDPIRWKPLTDVVDGYSPTLPHLKGLQNGDIATSAIKQVASGRFGVTPTFLVNADQLEIKVAQGAKPGEGGQLPGKKVSAYIARLRSSKPGVPLISPPPHHDIYSIEDLAQLIFDLHQINPNAKVSVKLVAEAGIGTVASGVAKGNADIIQISGHDGGTGASPISSIKHAGGPWELGLTETHQTLIANGLRERVILRVDGGLKSGVDVLMAAAMGADEYGFGSLAMIATGCVMARICHTNNCPVGVASQREELRARFPGVPGDLVNYFLYVAEEVRGILAQLGYNSLDDIIGRTELLRPRDISLVKTQHLDLSYLLSSVGTPSLSSTEIRKQEVHTNGPVLDDDILADPLVIDAIENEKVVEKTVKICNVDRAACGRVAGVIAKKYGDTGFAGQVNLTFLGSAGQSFGCFLIPGMNIRLIGESNDYVGKGMAGGEIVVTPVEKIGFVPEEATIVGNTCLYGATGGQIFARGKAGERFAVRNSLAEAVVEGTGDHCCEYMTGGCVVVLGKVGRNVAAGMTGGLAYLLDEDDTLLPKINREIVKIQRVTAPAGELQLKSLIEAHVEKTGSSKGATILNEWEKYLPLFWQLVPPSEEDTPEASAAYVRTSTGEVTFQSA

SEQ ID NO: 847 - protein, 613 aa, Arabidopsis thaliana
MSSLTSVELNFLVFRYLQESGFTHAAFTLGYEAGINKSNIDGNMVPPGALIKFVQKGLQYMEMEANLSNSEVDIDEDFSFFQPLDLISKDVKELQDMLREKKRKERDMEKERDRSKENDKGVEREHEGDRNRAKEKDRHEKQKEREREREKLEREKEREREKIEREKEREREKMEREIFEREKDRLKLEKEREIEREREREKIEREKSHEKQLGDADREMVIDQTDKEIAGDGSTGAEPMDIVMTPTSQTSHIPNSDVRILEGHTSEVCACAWSPSASLLASGSGDATARIWSIPEGSFKAVHTGRNINALILKHAKGKSNEKSKDVTTLDWNGEGTLLATGSCDGQARIWTLNGELISTLSKHKGPIFSLKWNKKGDYLLTGSVDRTAVVWDVKAEEWKQQFEFHSGPTLDVDWRNNVSFATSSTDSMIYLCKIGETRPAKTFTGHQGEVNCVKWDPTGSLLASCSDDSTAKIWNIKQSTFVHDLREHTKEIYTIRWSPTGPGTNNPNKQLTLASASFDSTVKLWDAELGKMLCSFNGHREPVYSLAFSPNGEYIASGSLDKSIHIWSIKEGKIVKTYTGNGGIFEVCWNKEGNKIAACFADNSVCVLDFRM

SEQ ID NO: 848 - protein, 1331 aa, Arabidopsis thaliana
MLVAGPEEFISYLHFPEEEFLASFGTSTPLVNFPGSKQRMMNRQLLFTLLVVFAIIQLIFAQEPEGFISLDCGLSANEPPYVDGDLGLTYSSDAKFVEGGKIGQIQKDLEPGVLKTYATLRYFPNGIRNCYNLNVTQDTRYLVRAGFMYGNYNGLDSPPEFDLYIEQRGYGTSSEIIHTPKSNTLQICLVRTNDGIPFISVLELRPLSNNIYATRSGSLNRFVRVYFTESSNYVRYPDDVHDRKWVPFSEDELMTVNNTVDTDFDNPYDPPKAVISTAAIPTNASSSLILTWLTSNPEDQIYIYIHFLELQVLRGNETRIFDILMNGIITSPAYSPTDSVVDTVYNKEPLRCNASVCSLELRKTLGSTLPPLINAIEIFTVLEFPETATYEDDFSAIENIRAAYALSNGSGDPCVPKPSHYLKCSNFTDTSVVQLRIISLNLSSMRLSGVISPSIQTLTKLQVLDLSNNNLTGGVPGFLSNMVSLLSIDLSNNSLSGPIPQALLDRRKEGLDLKFHGNTKLYEFISHRKKNFPLVAVVASASAIAIVLVVLGVLFICLRRKPPSREAPHSSIETVKRRFTYSEVMAMTNNFKKIIGEGGFGIIYHGHLNDGQQVAVKVLSESSSQGYKQFKAEVELLMRVHHVNLVNLAGYCDDSNHLALIYEFMENRDLKEHLSGKEGSSFLDWPCRLKIAAEAALGLEYLHTGCKPPMIHRDVKSTNILLNEDFQAKLGDFGLSRSFPIGGETHVSTVVVGTHGFLDPEYYQTQRLSEKSDVYSFGIVLLEIITNKLVIDQTRERPHIAEWVRYMLSIGDIESVMDPNLKGKYDSSSAWKVLELAMLCSKLSLAERPNMAQIVHELNEYLLYENSRREISQDVRSKNSSEVSTNTEMAPMALNLLEKASPFSNSFSYANATDASLRAGRKGLSFSVSYLVDSLGLPKKVAESISKKVSFEDKGNPDSVLSLLRSHGFTDSQISSIITDYPQLLVADAEKSIGPKLQFLQSRGASRSELTHIVSTVPEILGKRGDKTISIYYDFVKEIIEADKSSKFEKLCHSLPEGSKQENKIRNVLVLRELGVPQRLLFPLLISDHQPVCGKENFEESLKKVVEMGFDPTTSKFVKALRVVYRFRDKTIEAKVNVCKSLGFSVGDVWAMFKKCPSFLNFSENKIVQTWETLKKCGLLEDDVLSVLKKFPQCINASEQKIMNSIETFLGLGFSRDEVAMIAKRFPQCLILSAETVKKKTEFLVKKMNWPLKAVVSTPAVLGYSLEKRTIPRCNVIKALMSKGSLGSELPGMSSVLVCTNEEFLCRYVKNHDDKKIVPELMAIFTGDRVS

SEQ ID NO: 849 - protein, 767 aa, Arabidopsis thaliana
  misc_feature (248)..(248): Xaa can be any naturally occurring amino acid
  unsure (1)..(767): unsure at all Xaa locations
MEESEQVLPLLTNPKDLTNPSYASSSSSSSEPRDETEDLLLPISDENEEEEEENSPIRQVALTVPTTDDPSLPVLTFRMWVLGTLSCILLSFLNQFFWYRTEPLTISAISAQIAVVPLGRLMAAKITDRVFFQGSKWQFTLNPGPFNVKEHVLITIFANAGAGSVYAIHVVTVVKAFYMKNITFFVSFIVIVTTQVLGFGWAGIFRKYLVEPAAMWWPANLVQVSLFRALHEKEERTIGGLPRAHLLXVIAFVCSFAYYVFPGYLFQIMTSLSWVCWFFPSSVMAQQIGSGLHGLGVGAIGLDWSTISSYLGSPLASPWFATANVGVGFVLVIYVLVPICYWLDVYKAKTFPIFSSSLFSSQGSKYNITSIIDSNFHLDLPAYERQGPLYLCTFFAISYGVGFAGLSATIMHVALFHGREIWEQSKESFNDKRSDVHARLMRRYKQVPEWWFGCILVTNVGATIFACEYYNDQLQLPWWGVLLACTVAIIFTLPIGIITAITNQAPGLNIITEYIIGYIYPGYPVANMCFKVYGYISMQQAITFLQDFKLGHYMKIPPRTMFMAQIVGTLISCFVYLTTAWWLMETIPNICDSVTNSVWTCPSDKVFYDASVIWGLIGPRRIFGDLGLYKSVNWFFLVGAIAPILVWLASRMFPRQEWIKLINMPVLISATSSMPPATAVNYTTWVLAGFLSGFVVFRYRPNLWQRYNYVLSGALDAGLAFMGVLLYMCLGLENVSLDWWGNELDGCPLASCPTAPGIIVEGCPLYT

SEQ ID NO: 850 - protein, 315 aa, Arabidopsis thaliana
MNGDNRPVEDAHYTETGFPYAATGSYMDFYGGAAQGPLNYDHAATMHPQDNLYWTMNTNAYKFGFSGSDNASFYGSYDMNDHLSRMSIGRTNWDYHPMVNVADDPENTVARSVQIGDTDEHSEAEECIANEHDPDSPQVSWQDDIDPDTMTYEELVELGEAVGTESRGLSQELIETLPTKKYKFGSIFSRKRAGERCVICQLKYKIGERQMNLPCKHVYHSECISKWLSINKRGLWGAQHSLIGTRGSSSSFLFGFLYRGSSSNCFSVVKTPKNSLKDVHTILSHVQSFSVHVIFLLVPFSLVCALSLTVTRIVY

SEQ ID NO: 851 - protein, 553 aa, Arabidopsis thaliana
MGDTEKCNSDMIQRLHSSFGTTSSSIPKNPISQLDLNPNFIRSSAPQFSKPFSDSGKRIGVPPSHPNLIPPTSPFSQIPTTRQPGSHNFNPGGANHSRSMSQPNSFFSFDSLPPLSPSPFRDHDVSMEDRDSGVFNSNHSLPPSPFTRCNSTSSSSLRVGESLPPRKSHRRSNSDIPSGFNSMPLIPPRPLERSFSGGECADWSKSNPFVKKESSCEREGVGEREAMDDLFSAYMNLENIDVLNSSEADDSKNGNENRDDMESSRASGTKTNGSDTEGESSSVNESANNNMNSSGEKRESVKRRAAGGDIAPTTRHYRSVSVDSCFMEKLSFGDESLKPPPSPGSMSRKVSPTNSVDGNSGAAFSIEFNNGEFTAAEMKKIMANDKLAEMAMSDPKRVKRNDPLFRILANRQSAARSKERKMRYIVELEHKVQTLQTEATTLSAQLTLLQRDMMGLTNQNNELKFRLQAMEQQARLRDALNEALNGEVQRLKLAIGESSQNESERSKMQSLNAEMFQQLNISQLRQQPQQMQQQSHQQNHQNGTMATKSESNE

SEQ ID NO: 852 - protein, 667 aa, Arabidopsis thaliana
MGSTPFCYSINPSPSKLDFTRTHVFSPVSKQFYLDLSSFSGKPGGVSGFRSRRALLGVKAATALVEKEEKREAVTEKKKKSRVLVAGGGIGGLVFALAAKKKGFDVLVFEKDLSAIRGEGKYRGPIQIQSNALAALEAIDIEVAEQVMEAGCITGDRINGLVDGISGTWYVKFDTFTPAASRGLPVTRVISRMTLQQILARAVGEDVIRNESNVVDFEDSGDKVTVVLENGQRYEGDLLVGADGIWSKVRNNLFGRSEATYSGYTCYTGIADFIPADIESVGYRVFLGHKQYFVSSDVGGGKMQWYAFHEEPAGGADAPNGMKKRLFEIFDGWCDNVLDLLHATEEEAILRRDIYDRSPGFTWGKGRVTLLGDSIHAMQPNMGQGGCMAIEDSFQLALELDEAWKQSVETTTPVDVVSSLKRYEESRRLRVAIIHAMARMAAIMASTYKAYLGVGLGPLSFLTKFRVPHPGRVGGRFFVDIAMPSMLDWVLGGNSEKLQGRPPSCRLTDKADDRLREWFEDDDALERTIKGEWYLIPHGDDCCVSETLCLTKDEDQPCIVGSEPDQDFPGMRIVIPSSQVSKMHARVIYKDGAFFLMDLRSEHGTYVTDNEGRRYRATPNFPARFRSSDIIEFGSDKKAAFRVKVIRKTPKSTRKNESNNDKLLQTA

SEQ ID NO: 853 - protein, 238 aa, Arabidopsis thaliana
MATSAFLQRSRTSEEMNQTSISSLLHDRLHIPPAETIVEKESAEKDTCQSQRKRKEPVLHEVDGSSSGAAKKQDHNAKERLRRMRLHASYLTLGTLLPDHSSSSSKKKWSAPSIIDNVITYIPKLQNEVGELTLRKQKLVELERRGPSIRAISVLELGESGYEAVVQICLKKENEDEFSNLLHVMEVQGLSVLSASTSQVCREQRVVCYNFHVKNGDNVLVFMDMNNDVTFLLQTIHV

SEQ ID NO: 854 - protein, 355 aa, Arabidopsis thaliana
KCDMPESLNVGNGNPSIPIINERTLPKFLESARMEKSVNRTNTRLKLFSGTANPALAQEIAWYMGLDLGKVNIKRFADGEIYVQLQESVRGCDVYLVQPTCTPTNENLMELLIMVDACRRASAKKVTAVIPYFGYARADRKTQGRESIAAKLVANLITEAGADRVLACDLHSGQSMGYFDIPVDHVYCQPVILDYLASKSIPSEDLVVVSPDVGGVARARAFAKKLSDAPLAIVDKRRSGHNVAEVMNLIGDVRGKVAIMVDDMIDTAGTIVKGAALLHQEGAREVYACCTHAVFSPPAIERLSGGLLQEVIVTNTLPVAEKNYFPQLTILSVANLLGETIWRVHDDSSVSSIFL

SEQ ID NO: 855 - protein, 693 aa, Arabidopsis thaliana
MVLQKRPDYGFNGYEVPHTPRAARSPRKSAFKKKSENHQISSFDLLAAVAGKLLLEGGNSSSSSNNTSGNNEDQCAVKKEPLNGGDIMVEEETTNSDHDNNNAERSFFVSEILQKSHEMQSFNRSPSPLKEFHFGSSSGITSDSSEKFETQELAYDESKINNGDCYRSESNDKKSMLGGLNFEAKLSRNVVGKDEKHIGSGFRKPIPQNPSTCSDDVDLHGKENDDGENFSACYRTKSFRSTLRIGDRRIRKVWASKYCKVPPKLKDTTVTNSGEHYGPFVSKSYVLFKMLWFIYVSLSENVLDLDLKSDYYSKKHCLKSLRSERNYPIKKRRYFDGYTASQSEETNKNEGQSGSPRKASAFLSSIACQKQPAAFQSPRDSNNVKLGIKSFRVPELFIEIPETATVGSLKRTVLEAVTSILGGGLRIGVLVHGKKVRDDSKMLLQTGLSLDTLSDTLGFCLEPNPPQSTKPLSPEDSDFARPCNVPHTLTRSVSIQRSMYAASFFSVEKNSVSDVFQNFFDIIRCLPSPGKHAKPSNSVESDLDSKPSAPNRGKTIYSRALIPVSPLHAQALTVVPPRKTKRSEVAQRRIRRPFSVAEVEALVQAVERLGTGRWRDVKLRAFDNAKHRTYVDLKDKWKTLVHTARISPQQRRGEPVPQELLDRVLTAHAYWSQQQGKHQLLEGPQQLETSLGL

SEQ ID NO: 856 - protein, 766 aa, Arabidopsis thaliana
MEESEQVLPLLTNPKDLTNPSYASSSSSSSEPRDETEDLLLPISDENEEEEEENSPIRQVALTVPTTDDPSLPVLTFRMWVLGTLSCILLSFLNQFFWYRTEPLTISAISAQIAVVPLGRLMAAKITDRVFFQGSKWQFTLNPGPFNVKEHVLITIFANAGAGSVYAIHVVTVVKAFYMKNITFFVSFIVIVTTQVLGFGWAGIFRKYLVEPAAMWWPANLVQVSLFRALHEKEERTKGGLTRTQFFVIAFVCSFAYYVFPGYLFQIMTSLSWVCWFFPSSVMAQQIGSGLHGLGVGAIGLDWSTISSYLGSPLASPWFATANVGVGFVLVIYVLVPICYWLDVYKAKTFPIFSSSLFSSQGSKYNITSIIDSNFHLDLPAYERQGPLYLCTFFAISYGVGFAALSATIMHVALFHGREIWEQSKESFKEKKLDVHARLMQRYKQVPEWWFWCILVTNVGATIFACEYYNDQLQLPWWGVLLACTVAIIFTLPIGIITAITNQAPGLNIITEYIIGYIYPGYPVANMCFKVYGYISMQQAITFLQDFKLGHYMKIPPRTMFMAQIVGTLISCFVYLTTAWWLMETIPNICDSVTNSVWTCPSDKVFYDASVIWGLIGPRRIFGDLGLYKSVNWFFLVGAIAPILVWLASRMFPRQEWIKLINMPVLISATSSMPPATAVNYTTWVLAGFLSGFVVFRYRPNLWQRYNYVLSGALDAGLAFMGVLLYMCLGLENVSLDWWGNELDGCPLASCPTAPGIIVEGCPLYT

SEQ ID NO: 857 - protein, 155 aa, Arabidopsis thaliana
  misc_feature (77)..(77): Xaa can be any naturally occurring amino acid
  unsure (1)..(155): unsure at all Xaa locations
MESEGKIVFTEEQEALVVKSWSVMKKNSAELGLKLFIKIFEIAPTTKKMFSFLRDSPIPAEQNPKLKPHAMSVFVMXQLRKTGKVTVRETTLKRLGASHSKYGVVDEHFEVAKYALLETIKEAVPEMWSPEMKVAWGQAYDHLVAAIKAEMNLSN

SEQ ID NO: 858 - protein, 340 aa, Arabidopsis thaliana
MMHQMLNKKDSATHSTLPYLNTSISWGVVPTDSVANRRGSAESLSLKVDSRPGHIQTTKQISFQDQDSSSTQSTGQSYTEVASSGDDNPSRQISFSAKSGSEITQRKGFASNPKQGSMTGFPNIHFAPAQANFSFHYADPHYGGLLAATYLPQAPTCNPQMVSMIPGRVPLPAELTETDPVFVNAKQYHAIMRRRQQRAKLEAQNKLIRARKPYLHESRHVHALKRPRGSGGRFLNTKKLLQESEQAAAREQEQDKLGQQVNRKTNMSRFEAHMLQNNKDRSSTTSGSDITSVSDGADIFGHTEFQFSGFPTPINRAMLVHGQSNDMHGGGDMHHFSVHI

SEQ ID NO: 859 - protein, 221 aa, Arabidopsis thaliana
MVRGKTEMKRIENATSRQVTFSKRRNGLLKKAFELSVLCDAEVALIIFSPRGKLYEFSSSSSIPKTVERYQKRIQDLGSNHKRNDNSQQSKDETYGLARKIEHLEISTRKMMGEGLDASSIEELQQLENQLDRSLMKIRAKKYQLLREETEKLKEKERNLIAENKMLMEKCEMQGRGIIGRISSSSSTSELDIDDNEMEVVTDLFIGPPETRHFKKFPPSN

SEQ ID NO: 860 - protein, 206 aa, Arabidopsis thaliana
MEPKLTHLCYCLLLFLPLLCQSTIAKPSSSPNPSSSINFIVSSCRVTRYQTLCVKCLAAFADKIRRNENQLAQTALAVTLVRVQSTTIYVGKLTKARRIKRREYLAVKDCVENLGDGLEMLAQSMRELKQVGRSGRDRDEFLWRLSNVETWVSAALTDETTCLDGFDGKVMDGVVKSAIRRRVVHVARVTSNALALVNRFAARHKS

SEQ ID NO: 861 - protein, 453 aa, Arabidopsis thaliana
MSNHLLPPENKIPTLNFDHLEIFSALGRGSKGVVFLVKADNKWLALKVILRESIESKKAKDEYKRISFEQGVLSRFDHPLFPRLHGVISTDKVIGYAIDYCPGRDLNSLRKKQSEEMFSDEIIRFYAAELVIALEYLHNQGIVYRDLKPDNVMIQENGHLMLVDFDLSTNLPPRTPQSSFSSSPRLSTATKKERSIFAFSGLCNSGISPDDSVSRSSESEFSGEKSNSFVGTEEYVAPEVITGSGHDFAVDWWSLGVVLYEMLYGATPFRGSNRKETFLKILTEPPSLVGETTSLRDLVRKLLEKDPSRRINVEGIKGHDFFKGLDWDLVLKVSRPPYIPAPENYEISKIDVEKFVHEIFTKCEHNDDMLIVGADLHEISKLKMVYNNCGQECMFFSVAVLEKEAMRGGTPLHLKSKIDELIKSLLDLCFCTSYEEDLEIVENNLKHFEENPT

SEQ ID NO: 862 - protein, 468 aa, Arabidopsis thaliana
MRCFDRAKIYVRAGDGGNGVVAFRREKFVPFGGPSGGDGGRGGNVYVEVDGSMNSLLPFRKSVHFRAGRGEHGRGKMQSGAKGDNVVVKVAPGTVVRQAREVGSEVEGEEGEEKEVLLELLHPGQRALLLPGGRGGRGNASFKSGMNKVPRIAENGEEGPEMWLDLELKLVADVGIVGAPNAGKSTLLSVISAAQPTIANYPFTTLLPNLGVVSFDYDSTMVVADLPGLLEGAHRGFGLGHEFLRHTERCSALVHVVDGSAPQPELEFEAVRLELELFSPEIAEKPYVVAYNKMDLPDAYEKWPMFQETLRARGIEPFCMSAVQREGTHEVISSVYELLKKYRAANAEPKALFDQANENLDHVAKKIDKERRAAINEFEVFRDSGTRAWHVVGAGLQRFVQMTNWRYMDSDKRFQHVLDACGVNKSLKNMGVKEGDTVIVGEHVLDAFVSLLMNIHNVCVCVCVNRWS

SEQ ID NO: 863 - protein, 289 aa, Arabidopsis thaliana
MPTLYKKAGCQFQLTTMSWWGVKGGGWGMVEEVWRKGPWTAEEDRLLIEYVRVHGEGRWNSVSKLAGLKRNGKSCRLRWVNYLRPDLKRGQITPHEESIILELHAKWGNRWSTIARSLPGRTDNEIKNYWRTHFKKKAKPTTNNAEKIKSRLLKRQHFKEQREIELQQEQQLFQFDQLGMKKIISLLEENNSSSSSDGGGDVFYYPDQITHSSKPFGYNSNSLEEQLQGRFSPVNIPDANTMNEDNAIWDGFWNMDVVNGHGGNLGVVAATAACGPRKPYFHNLVIPFC

SEQ ID NO: 864 - protein, 205 aa, Arabidopsis thaliana
MAPTQNLFLVAIAFAVIFTASTVHGRHNGAEDIVHSSCEHASYPSLCVRTLSSYSGPTITNRRDLAQAAIKISLSHAQSAAKKLAVVRDSVGKKKQEKAALVDCVEMIGDSVDELSRTLGVLKHLRVSGGSAKEFRWQMSNAQTWASAALTDDDTCLDGFQGMDDGEIKTEVKQWMTKVARVTSNALYMVNQLDETRGKPHDVHL

SEQ ID NO: 865 - protein, 343 aa, Arabidopsis thaliana
MERYEIVKDIGSGNFGVAKLVRDKFSKELFAVKFIERGQKIDEHVQREIMNHRSLIHPNIIRFKEVLLTATHLALVMEYAAGGELFGRICSAGRFSEDEARFFFQQLISGVNYCHSLQICHRDLKLENTLLDGSEAPRVKICDFGYSKSGVLHSQPKTTVGTPAYIAPEVLSTKEYDGKIADVWSCGVTLYVMLVGAYPFEDPSDPKDFRKTIGRILKAQYAIPDYVRVSDECRHLLSRIFVANPEKRITIEEIKNHSWFLKNLPVEMYEGSLMMNGPSTQTVEEIVWIIEEARKPITVATGLAGAGGSGGSSNGAIGSSSMDLDDLDTDFDDIDTADLLSPL

SEQ ID NO: 866 - protein, 228 aa, Arabidopsis thaliana
CQLCTKKQATCAPFLIQSPFSGFSPEYSIGSSPDSFSSSSSNNYSLPFNENDSEEMFLYGLIEQSTQQTYIDSDSQDLPIKSVSSRKSEKSYRGVRRRPWGKFAAEIRDSTRNGIRVWLGTFESAEEAALAYDQAAFSMRGSSAILNFSAERVQESLSEIKYTYEDGCSPVVALKRKHSMRRRMTNKKTKDSDFDHRSVKLDNVVVFEDLGEQYLEELLGSSENSGTW

SEQ ID NO: 867 - protein, 223 aa, Arabidopsis thaliana
MAFAGTTQKCMACDKTVYLVDKLTADNRVYHKACFRCHHCKGTLKLSNYNSFEGVLYCRPHFDQNFKRTGSLEKSFEGKLPKTDQNVKSFVSGDFKFGIIYLKFDSYICTGTPKIGKPDRPLEGERPAGTKVSNMFGGTREKCVGCDKTVYPIEKVSVNGTLYHKSCFKCTHGGCTISPSNYIAHEGKLYCKHHHIQLIKEKGNLSQLEGGGENAAKDKVVAA

SEQ ID NO: 868 - protein, 184 aa, Arabidopsis thaliana
MGGLKRRISIEKIQKKESRAVCFSKRRTGLYSKAAELLCLLSSDSQVAILTTPCSSNSHVSFYSFGHSSVDSVVSAFLKDQGLVRKENLGDHQEDVKINNDIKIKNLVSHETLNLQLSSATFGVPDDDRLKEETEMVVFDDQILAIFESNDKPTGNLEDQEIDLDQFLDFDQLIDFEGLIDGDY

SEQ ID NO: 869 - protein, 229 aa, Arabidopsis thaliana
MGKKKCELCCGVARMYCESDQASLCWDCDGKVHGANFLVAKHMRCLLCSACQSHTPWKASGLNLGPTVSICESCLARKKNNNSSLAGRDQNLNQEEEIIGCNDGAESYDEESDEDEEEEEVENQVVPAAVEQELPVVSSSSSVSSGEGDQVVKRTRLDLDLNLSDEMIKKSETILFEMQEENQSRPLKRLSRDEGLSRSTVVMNSSIVKLHGGRRKAEGCDTSSSSSFY

SEQ ID NO: 870 - protein, 347 aa, Arabidopsis thaliana
MSNAFLLTPTLYKKAGCMEARCDFCGTEKALIYCKSDSAKLCLNCDVNVHSANPLSQRHTRSLLCEKCSLQPTAVHCMNENVSLCQGCQWTASNCTGLGHRLQSLNPYSDCPSPSDFGKIWSSTLEPSVTSLVSPFSDTLLQELDDWNGSSTSVVTQTQNLKDYSSFFPMESNLPKVIEEECSGLDLCEGINLDDAPLNFNASNDIIGCSSLDNTKCYEYEDSFKEENNIGLPSLLLPTLSGNVVPNMSLSMSNLTGESNATDYQDCGISPGFLIGDSPWESNVEVSFNPKLRDEAKKRYKQKKSKRMFGKQIRYASRKARADTRKRVKGRFVKSGETFEYDPSLVM

SEQ ID NO: 871 - protein, 92 aa, Arabidopsis thaliana
MDSYKSQHNFFLLFTISPDLTQAHAHVQGLSNRKMMMMKMESEWVGANGEAEKAKTKGLGLHEELRTVPSGPDPLHHHVNPPRQPRNNFQLP

SEQ ID NO: 872 - protein, 377 aa, Arabidopsis thaliana
MGYERLGPSGATGSVTTSTTTAPILNQVSTSEQPENNNRRSKKKLVVSSIVLAISLILAAAIFAGVRSRLKLNQSVPGLARKPSQAISKACELTRFPELCVDSLMDFPGSLAASSSKDLIHVTVNMTLHHFSHALYSSASLSFVDMPPRARSAYDSCVELLDDSVDALSRALSSVVSSSAKPQDVTTWLSAALTNHDTCTEGFDGVDDGGVKDHMTAALQNLSELVSNCLAIFSASHDGDDFAGVPIQNRRLLGVEEREEKFPRWMRPKEREILEMPVSQIQADIIVSKDGNGTCKTISEAIKKAPQNSTRRIIIYVKAGRYEENNLKVGRKKINLMFVGDGKGKTVISGGKSIFDNITTFHTASFGEFFLTSLFLF

SEQ ID NO: 873 - protein, 528 aa, Arabidopsis thaliana
MEKDDFLRSGHGREESHDEMRKLDSSHDDSHQEHDHIIRSKLDSTKVEMDEAKEENRRLKSSLSKIKKDFDILQTQYNQLMAKHNEPTKFQSKGHHQDKGEDEDREKVNEREELVSLSLGRRLNSEVPSGSNKEEKNKDVEEAEGDRNYDDNEKSSIQGLSMGIEYKALSNPNEKLEIDHNQETMSLEISNNNKIRSQNSFGFKNDGDDHEDEDEILPQNLVKKTRVSVRSRCETPTMNDGCQWRKYGQKIAKGNPCPRAYYRCTIAASCPVRKQVQRCSEDMSILISTYEGTHNHPLPMSATAMASATSAAASMLLSGASSSSSAAADLHGLNFSLSGNNITPKPKTHFLQSPSSSGHPTVTLDLTTSSSSQQPFLSMLNRFSSPPSNVSRSNSYPSTNLNFSNNTNTLMNWGGGGNPSDQYRAAYGNINTHQQSPYHKIIQTRTAGSSFDPFGRSSSSHSPQINLDHIGIKNIISHQVPSLPAETIKAITTDPSFQSALATALSSIMGGDLKIDHNVTRNEAEKSP

SEQ ID NO: 874 - protein, 199 aa, Arabidopsis thaliana
EKEREIEREREREKIEREKSHEKQLGDADREMVIDQTDKEIAGDGSTGAEPMDIVMTPTSQTSHIPNSDVRILEGHTSEVCACAWSPSASLLASGSGDATARIWSIPEGSFKAVHTGRNINALILKHAKGKSNEKSKDVTTLDWNGEGTLLATGSCDGQARIWTLNGMSTLIFWFHSLYVSSPCITSISIFLKLILFLL

SEQ ID NO: 875 - protein, 203 aa, Arabidopsis thaliana
MPTLYKKAGCLGIREFMDSSTSTKKNTKLFVRNQTCFKKSSLSSSNAKKTTNLSMREQTMFKKALELSTLCDIEVCVIYYGRDGKLIKTWPEDQSKVRDMAERFSRLHERERCKKRTNLSLFLRKQILHDKKLSEKVLEMEDSLESGLRVLQDKLLLLQPEKNQTELGQSCAVYSTTYPLSSPSLIEDHQHQQQWTEPLSNTE

SEQ ID NO: 876 - protein, 396 aa, Arabidopsis thaliana
MAMALSNPTTSTNLYHYSILSPFSPPYHLHRRNTVLLASPRRLRRLAVAGGPPSPPGPDPPPPEDTTQLEGLVGAVTRVQDRVKIFLAVFFWMFLFFWVTVTDGTGKGKGKKGSRFKERREMGGEEEVVSVELPAPSSWKKLCCNYQIFFFEDSEYGSFWWRNFYPNKVGSVKKTEVVFVAPTGEEISNRKQLEQYLKSHPGNPAIAEFDWTTSGTPRRSARISEKTKATPSPDKEPPKKRGRTKSPVSKKDAEGEKSEGGGEENSHVKDTEMNPPEGIAENENVTDKNGSGETERVNDAKENIVAEETPNAAPVQEEGESMKEKALDSVDDKSKETDKEKDTGSIEKNSVDVEKKTVEASDEKKNSEAETRNHEENGLTTEAEGKEKTAEGEATG

SEQ ID NO: 877 - protein, 890 aa, Arabidopsis thaliana
MRFLSFLIFVFAVLGLVQAQDQSGFISLDCGLVPTEITYVEKSTNITYRSDATYIDSGVPGKINEVYRTQFQQQIWALRSFPEGQRNCYNFSLTAKRKYLIRGTFIYGNYDGLNQLPSFDLYIGPNKWTSVSIPGVRNGSVSEMIHVLRQDHLQICLVKTGETTPFISSLELRPLNNNTYVTKSGSLIVVARLYFSPTPPFLRYDEDVHDRIWIPFLDNKNSLLSTELSVDTSNFYNVPQTVAKTAAVPLNATQPLKINWSLDDITSQSYIYMHFAEIENLEANETREFNITYNGGENWFSYFRPPKFRITTVYNPAAVSSLDGNFNFTFSMTGNSTHPPLINGLEIYQVLELPQLDTYQDEVSAMMNIKTIYGLSKRSSWQGDPCAPELYRWEVLTFGLSIRNLSGSNLSGTITSDISKLTHLRELDLSNNDLSGDIPFVFSDMKNLTLINLSGNKNLNRSVPETLQKRIDNKSLTLIRDETGKNSTNVVAIAASVASVFAVLVILAIVFVVIRKKQRTNEASGPRSFTTGTVKSDARSSSSSIITKERKFTYSEVLKMTKNFERVLGKGGFGTVYHGNLDDTQVAVKMLSHSSAQGYKEFKAEVELLLRVHHRHLVGLVGYCDDGDNLALIYEYMEKGDLRENMSGKHFNLVESISLDSLKHSKPGTGKHSVNVLSWETRMQIAVEAAQGLEYLHNGCRPPMVHRDVKPTNILLNERSQAKLADFGLSRSFPVDGESHVMTVVAGTPGYLDPEYYRTNWLSEKSDVYSFGVVLLEIVTNQPVMNKNRERPHINEWVMFMLTNGDIKSIVDPKLNEDYDTNGVWKVVELALACVNPSSSRRPTMPHVVMELNECLALEIERKQGSQATYIKESVEFSPSSASDFSPLAR

SEQ ID NO: 878 - protein, 286 aa, Arabidopsis thaliana
MATFSYFQNYPHSLLDPLLFPTPHSSINLTSFIDQNHLYPLPNISTVEDISFLEYNVDKTENSGSEKLANTTKTATTGSSSCDQLSHGPSAITNTGKTRGRKARNSNNSKEGVEGRKSKKQKRGSKEEPPTDYIHVRARRGQATDSHSLAERVRREKISERMRTLQNLVPGCDKVTGKALMLDEIINYVQTLQTQVEFLSMKLTSISPVVYDFGSDLDGLILQSEMGSPEVGTSFTNAMPTTTPIFPSLLDNSVVPTHAQVQEEGEERENFVDRSGFNNNNFCSFP

SEQ ID NO: 879 - protein, 284 aa, Arabidopsis thaliana
MMFEKDDLGLSLGLNFPKKQINLKSNPSVSVTPSSSSFGLFRRSSWNESFTSSVPNSDSSQKETRTFIRGIDVNRPPSTAEYGDEDAGVSSPNSTVSSSTGKRSEREEDTDPQGSRGISDDEDGDNSRKKLRLSKDQSAILEETFKDHSTLNPKQKQALAKQLGLRARQVEVWFQNRRARTKLKQTEVDCEFLRRCCENLTEENRRLQKEVTELRALKLSPQFYMHMSPPTTLTMCPSCEHVSVPPPQPQAATSAHHRSLPVNAWAPATRISHGLTFDALRPRS

SEQ ID NO: 880 - protein, 643 aa, Arabidopsis thaliana
MGEPLGLLQVTVIQGKKLVIRDFKSSDPYVIVKLGNESAKTKVINNCLNPVWNEELNFTLKDPAAVLALEVFDKDRFKADDKMGHASLSLQPLISVARLRHVVRVSSGETTLRKVLPDPENCVSRESTISCIDGEVVQSVWLRLCAVESDIISSVTSMAPPVSDDSLQPRAVMATYSSVPVCADVCVVGVARTPIGDFLGSLSSLTATRLGSIAIQAALKRAHVDPALVEEVFFGNVLTANLGQAPARQAALGAGIPYSVICTTINKVCAAGMKYDHSNGVYITAFTSLVTSAVMLASQSIQLGLNDIVVAGGMESMSNVPKYLPDARRGSRLGHDTVVDGMMKDGLWDVYNDFGMGVCGEICADQYRITREEQDAYAIQSFERGIAAQNTQLFAWEIVPVEVSTGRGRPSVVIDKDEGLGKFDAAKLKKLRPSFKEDGGSVTAGNASSIRSSFISQFCFFICNSACILSCLLPTATYWLWFTLVDSDGAAALVLVSGEKALELGLHVIAKIRGYADAAQAPELFTTTPALAIPKAIKRAGLDASQVDYYEINEAFSVIAHAELSVFYSCSVVALANQKLLGLDPERLNAHGGAVSLGHPLGCSGARILVTLLGVLRAKKGKYGVASICNGGGGASALVLEFM

SEQ ID NO: 881 - protein, 151 aa, Arabidopsis thaliana
MPTLYKKAGCQFQLTTMSLQRPNGNSSSSSSHKKHKTAAGSTCVLSSSADDGVNNPELDQTQNGVSTAKRRRGRNPVDKEYRSLKRLLRNRVSAQQARERKKVYVSDLESRANELQNNNDQLEEKISTLTNENTMLRKMLINTRPKTDDNH

SEQ ID NO: 882 - protein, 102 aa, Arabidopsis thaliana
  misc_feature (26)..(26): Xaa can be any naturally occurring amino acid
  misc_feature (39)..(39): Xaa can be any naturally occurring amino acid
  misc_feature (49)..(49): Xaa can be any naturally occurring amino acid
  misc_feature (57)..(57): Xaa can be any naturally occurring amino acid
  misc_feature (70)..(70): Xaa can be any naturally occurring amino acid
  unsure (1)..(102): unsure at all Xaa locations
CHDIFTSKKLEDIVPSSHNCDVPHVXRVDYQLIDISEDXFVSLLTDNGXTKDDLKAXPPDQALLTQLRMXFRGKDIFFSVMSPLRRAKFCFPGKFVPNYYYN

SEQ ID NO: 883 - protein, 268 aa, Arabidopsis thaliana
MSMTADSQSDYAFLESIRRHLLGESEPILSESTASSVTQSCVTGQSIKPVYGRNPSFSKLYPCFTESWGDLPLKENDSEDMLVYGILNDAFHGGWEPSSSSSDEDRSSFPSVKIETPESFAAVDSVPVKKEKTSPVSAAVTAAKGKHYRGVRQRPWGKFAAEIRDPAKNGARVWLGTFETAEDAALAYDRAAFRMRGSRALLNFPLRVNSGEPDPVRIKSKRSSFSSSNENGAPKKRRTVAAGGGMDKGLTVKCEVVEVARGDRLLVL

SEQ ID NO: 884 - protein, 167 aa, Arabidopsis thaliana
MTFFIEDTSLIISHVLYKTALIITVLRWIFAWILRYRSRSSSSSSSQSSSSPSISSQTIKESLAVSAFRDAVERSPAAINDMCAVCLGDLEDEDEIRELRNCTHVFHRDCIDRWLDYECCGGDDDNHRTCPLCRTPLLPSFTDYSTVTQTSWAVERLLYLFGDDLLP

SEQ ID NO: 885 - protein, 270 aa, Arabidopsis thaliana
  misc_feature (182)..(182): Xaa can be any naturally occurring amino acid
  unsure (1)..(270): unsure at all Xaa locations
DHLQESFRGSELCILCDIEACVIYYGPDGELKTWPKEREKVEDIALRYSQLNEALRRKKSVTLYDFLNKKKDKTNLEKKAMITDNDDLKTCLKNVNVLKSPIADHYFNDQISQLIQSLEPHVSKVQERIRFVESQKHKETKLDHQSLASIYSLNQSLNPSQFTLFLYNHGDNTMSQTPVTAXNFNQDFSELLQESGLMKQELCGYDQNMFMNNNNFQHSFVSNTQDYSALQESVNNNYGLMPNVLCGYDQNLFTSDITNNNLLIDNSMYL

SEQ ID NO: 886 - protein, 526 aa, Arabidopsis thaliana
  misc_feature (152)..(152): Xaa can be any naturally occurring amino acid
  unsure (1)..(526): unsure at all Xaa locations
RTKGGWNAALFIIVVEIAERFAFYGLASNLITFLTNELGQSTATAAKNINTWIGVSCMFPILGAFLADSILGRFKTVLLTSFIYLLGIVMLPLSVTVVARRMREKVFFMALYVMAVGEGGHKPCVMTFAADQFGEANAEEKAAKTSFFNYWXRVSWSLGFSIIAGSVVIAIVIFLIGIPKYRKQVPVGSPFTRVAQVMVAALKKWRLSSTRHHYGLCYEEEDEHKLESTNSNQVYLLARTNQFRFLDKATIIDEIDHNKNRNPWRLCTVNQVEEVKLILRLIPIWISLIMFCATLTQLNTFFLKQGSMMDRTIGNHFTIPPAAFQSIVGVTILILIPLYDRVFVPMVRKITNHHSGITSLQRIGVGLFVATFNMVICGLVEAKRLKVARDHGLIDSPKEVVPMSSLWLLPQYILVGIGDVFTIVGMQELFYDQMPETMRSIGAAIFISVVGVGSFVSTGIISTVQTISKSHGEEWLVNNLNRAHLDYYYWIIASLNAVSLCFYLFIANHFLYKKLQDKDDDVESER

SEQ ID NO: 887 - protein, 352 aa, Arabidopsis thaliana
MAIRSLPSSSGCSNSSSSSSYSLASTSLSNRLETIFRKASELCTLCDIEACVIYYGPDGELKTWPPEREKVEDIALRYSQLNEALRRKKSVTLYDFLNKKKNKTNLEKKAKIKDNDLKRLNVNVLKYPIADHYSPDQISQLIQSLEPHVSKVRERIRFVESQKHKETKPDHQSLASSSLNNQTQSLNPSQFSLFMYNHGDNILSQIPVSASNFNQDYFSALLEQSELKSQIMKQEVCGYEQNMCMSNNGDATLSQIPLSASNFNQEFSALLQEESGLMQQELCNYDQNMFMNNNNFQHSFVSNTQDHSAPAVQESVNNNYGLMPHVPCGYDQNLFTSDITNNNLLIDNSMFL

SEQ ID NO: 888 - protein, 639 aa, Arabidopsis thaliana
YAYLERLVFKRKLDCLSVGFDFPNIPRAPRSCRRKVLNKRIDHDDDNTQICAIDLLALAGKILQESESSSASSNAFEEIKQEKVENCKTIKSESSDQGNSVSKPTYDISTEKCVVNSCFSFPDSDGVLERTPMSDYKKIHGLMDVGCENKNVNNGFEQGEATDRVGDGGLVTDTCNLEDATALGLQFPKSVCVGGDLKSPSTLDMTPNGSYARHGNHTNLGRKDDDEKFYSYHKLSNKFKSYRSPTIRRIRKSMSSKYWKQVPKDFGYSRADVGVKTLYRKRKSCYGYNAWQREIIYKRRRSPDRSSVVTSDGGLSSGSVSKLPKKGDTDRIMWFSCIFISGAVKLSIKSFRIPELFIEVPETATVGSLKRTVMEAVSVLLSGGIRVGVLMHGKKVRDERKTLSQTGISCDENLDNLGFTLEPSPSKVPLPLCSEDPAVPTDPTSLSERSAASPMLDSGIPHADDVIDSRNIVDSNLELVPYQGDISVDEPSSDSKELVPLPELEVKALAIVPLNQKPKRTELAQRRTRRPFSVTEVEALVQAVEELGTGRWRDVKLRAFEDADHRTYVDLKDKWKTLVHTASISPQQRRGEPVPQELLDRVLRAYGYWSQHQGKHQARGASKDPDMNRGGAFESGVSV

SEQ ID NO: 889 - protein, 763 aa, Arabidopsis thaliana
MNSRPSNPTKLVIRSSTLLFCGVVLIHLFAAQIDAQRSTSRWQTLNGDAPLVIARGGFSGLYPDSSIAAYQLATLTSVADVVLWCDLQLTKDGLGICFPDLNLANASTIDRVYPNREKSYSVNGVTTKGWFPNDFSLTELQNFLLIRGILSRTDRFDGNGYLISTIEDVVTTLNREGFWLNVQHDAFYEQQNLSMSSFLLSVSRTVSIDFISSPEVNFFKKITGSFGRNGPTFVFQFLGKEDFEPTTNRTYGSILSNLTFVKTFASGILVPKSYILPLDDEQYLVPHTSLVQDAHKAGLQVYVSGFANDVDIAYNYSSDPVSEYLSFVDNGDFSVDGVLSDFPITASAAVDCFSHIGRNATKQVDFLVISKDGASGDYPGCTDLAYEKAIKDGADVIDCSVQMSSDGVPFCLRSIDLRNSIAALQNTFSNRSTSVPEISSVPGIFTFSLTWPEIQSLTPAISNPFRVYRIFRNPREKNSGKLISLSQFLDLAKTYTSLSGVLISVENAAYLREKQGLDVVQAVLDTLTEAGYSNGTTTTKVMIQSTNSSVLVDFKKQSKYETVYKIEETIGNIRDSAIEDIKKFANAVVINKDSVFPNSDSFLTGQTNVVERLQKSQLPVYVELFRNEFVSQAYDFFSDATVEINAYIYGAGINGTITEFPFTAARYKRNRCLGREEVPPYMLPVNPGGLLNVMSPLSLPPAQAPNQDFIEADVTEPPLSPVIAKAPTSTPGTPSTIAQAPSGQTRLKLSLLLSVFFLSLLLL

SEQ ID NO: 890 - protein, 384 aa, Arabidopsis thaliana
MAMRQAAKATIRACSSSSSSGYFARRQFNASSGDSKKIVGVFYKANEYATKNPNFPGCVENALGIRDWLESQGHQYIVTDDKEGPDCELEKHIPDLHVLISTPFHPAYVTAERTKKAKNLKLLLTAGIGSDHIDLQAAAAAGLTVAEVTGSNVVSVAEDELMRILILMRNFVPGYNQVVKGEWNVAGIAYRAYDLEGKTIGTVGAGRIGKLLLQRLKPFGCNLLYHDRLQMAPELEKETGAKFVEDLNEMLPKCDVIVINMPLTEKTRGMFNKELIGKLKKGVLIVNNARGAIMERQAVVDAVESGHIGGYSGDVWDPQPAPKDHPWRYMPNQAMTPHTSGTTIDAQLRYAAGTKDMLERYFKGEDFPTENYIVKDGELAPQYR

SEQ ID NO: 891 - protein, 2554 aa, Arabidopsis thaliana
MERHCVLVATFLLMLHIVHAQDQIGFISVDCGLAPRESPYNEAKTGLTYTSDDGLVNVGKPGRIAKEFEPLADKPTLTLRYFPEGVRNCYNLNVTSDTNYLIKATFVYGNYDGLNVGPNFDLYFGPNLWTTVSSNDTIKEIIHVTKTNSLQLRPMKKNMYVTQGESLNYLFRVYISNSSTRIRFPDDVYDRKWYPYFDNSWTQVTTTLDVNTSLTYELPQSVMAKAATPIKANDTLNITWTVEPPTTKFYSYMHFAELQTLRANDAREFNVTMNGIYTYGPYSPKPLKTETIYDKIPEQCDGGACLLQVVKTLKSTLPPLLNAIEAFTVIDFPQMETNGDDVDAIKNVQDTYGISRISWQGDPCVPKLFLWDGLNCNNSDNSTSPIITSLDLSSSGLTGSITQAIQNLTNLQELDLSDNNLTGEIPDFLGDIKSLLVINLSGNNLSGSVPPSLLQKKGMKLNVEGNPHLLCTADSCVKKGEDGHKKKSVIVPVVASIASIAVLIGALVLFFILRKKKSPKVEGPPPSYMQASDGRSPRSSEPAIVTKNRRFTYSQVAIMTNNFQRILGKGGFGMVYHGFVNGTEQVAVKILSHSSSQGYKEFKAEVELLLRVHHKNLVGLVGYCDEGENMALIYEYMANGDLKEHMSGTRNRFTLNWGTRLKIVVESAQGLEYLHNGCKPPMVHRDVKTTNILLNEHFQAKLADFGLSRSFPIEGETHVSTVVAGTPGYLDPEYYKTNWLTEKSDVYSFGIVLLELITNRPVIDKSREKPHIAEWVGVMLTKGDINSIMDPNLNEDYDSGSVWKAVELAMSCLNPSSARRPTMSQVVIELNECIASENSRGGASRDMDSKSSIEVSLTFDTELSPTARQENHGETLCVRYHFCANTSSCSSSKSNRVDCGLSPPESPYNAPQTGLTYTSDTGLINTGKTGRIAKDFEPFVDKPALTMRYFPDGIRNCYNLNVTRDTNYLIKATFVYGNYDGLNVDPNFDLYLGPNLWTTVSSNDTTEEIIHVTKFNSLQICLVKTGISIPFINVLELRPLKKNVYATQSGSLKYLFRMYVSNSSRRIRFPDDVYDRKWYPIFQNSWTQVTTNLNVNISTIYELPQSVMSTAATPLNANATLNITWTIEPPTTPFYSYIHFAELQSLRANDTREFNVTLNGEYTIGPYSPKPLKTETIQDLSPEQCNGGACILQLVETLKSTLPPLLNAIEAFTVIDFPQMETNEDDVTGINDVQNTYGLNRISWQGDPCVPKQYSWDGNPHLLCTDGLCVNKGDGHKKKSIIAPVVASIASIAILIGALVLFFVLKKKTQSKGPPAAYVQASNGRSRRSAEPAIVTKNKRFTYSEVMQMTNNFQRVLGKGGFGIVYHGLVNGTEQVAIKILSHSSSQGYKQFKAEVELLLRVHHKNLVGLVGYCDEGENLALIYEYMANGDLKEHMSGTRNHFILNWGTRLKIVVESAQGLEYLHNGCKPLMVHRDIKTTNILLNEQFDAKLADFGLSRSFPIEGETHVSTAVAGTPGYLDPEYYRTNWLTEKSDVYSFGVVLLEIITNQPVIDPRREKPHIAEWVGEVLTKGDIKNIMDPSLNGDYDSTSVWKAVELAMCCLNPSSARRPNMSQVVIELNECLTSENSRGGAIRDMDSEGSIEVSLTFGTEVTPLARKKNNGETFCVYCHLFADISSCSSSKSNSVDCGLSLLESPYDAPQTGLTYTSDADLVASGKTGRLAKEFEPLVDKPTLTLRYFPEGVRNCYNLNVTSDTNYLIKATFVYGNYDGLNVGPNFNLYLGPNLWTTVSSNDTIEEIILVTRSNSLQVCLVKTGISIPFINMLELRPMKKNMYVTQSGSLKYLFRGYISNSSTRIRFPDDVYDRKWYPLFDDSWTQVTTNLKVNTSITYELPQSVMAKAATPIKANDTLNITWTVEPPTTQFYSYVHIAEIQALRANETREFNVTLNGEYTFGPFSPIPLKTASIVDLSPGQCDGGRCILQVVKTLKSTLPPLLNAIEAFTVIDFPQMETNENDVAGIKNVQGTYGLSRISWQGDPCVPKQLLWDGLNCKNSDISTPPIITSLDLSSSGLTGIITQAIKNLTHLQILDLSDNNLTGEVPEFLADIKSLLVINLSGNNLSGSVPPSLLQKKGMKLNVEGNPHILCTTGSCVKKKEDGHKKKSVIVPVVASIASIAVLIGALVLFLILRKKRSPKVEGPPPSYMQASDGRLPRSSEPAIVTKNRRFSYSQVVIMTNNFQRILGKGGFGMVYHGFVNGTEQVAVKILSHSSSQGYKQFKAEVELLLRVHHKNLVGLVGYCDEGDNLALIYEYMANGDLKEHMSGTRNRFILNWGTRLKIVIESAQGLEYLHNGCKPPMVHRDVKTTNILLNEHFEAKLADFGLSRSFLIEGETHVSTVVAGTPGYLDPEYHRTNWLTEKSDVYSFGILLLEIITNRHVIDQSREKPHIGEWVGVMLTKGDIQSIMDPSLNEDYDSGSVWKAVELAMSCLNHSSARRPTMSQVVIELNECLASENARGGASRDMESKSSIEVSLTFGTERRFFQTLPTNATFGTLL

SEQ ID NO: 892 - protein, 1434 aa, Arabidopsis thaliana
MAPLLSQTLIHTGRFLLRRFLEPPPAVISAVAASRVCFHRYYSSKSLSLVSPLGLHCSSLFSPPDLILPIRKVLKAFSSSATSTTIEVQSTEHEVVIALGSNIGNRMNNFREALRLMKRGGICVTRHSCLYETAPVHVTDQPRFLNAAVRGVTKLGPHELLSVLKTIERDMGRKDGIRYGPRPLDLDILFYGKMRISSDKLIIPHERLWERSFVLAPLVDLLGSAVDNDTVAHWHSLAIHPGGIFQAWERLGGESLIGQDGIQRVLPIGDKLWDFSNKTHVMGILNLTPDSFSDGGKFQSIDSAVSRVRSMISEGADIIDIGAQSTRPMASRISSQEELDRLLPVLEAVRGMPEMEEKLISVDTFNSEVASEAISNGADILNDVSAGTLDPNMHKVVAESGVPYMAMHMRGDPCTMQNKENLQYDDVCKDVASELYLRVRDAELSGIPAWRVMIDPGIGFSKSVDHNLDIIMDLPKIREEMAKRSIAVSHAPILVGPSRKRFLGDICGRPEATDRDAATVASVTAGILGGANIIRVHNVRHNADAAKVCDAMLRRRRTGTTLEVNLNLLRLMVAKKIYFSIRTGFISIDCGIPDDSSYTDEKTNMKYVSDLGFVESGTSHSIVSDLQTTSLERQFQNVRSFPEGKRNCYDIRPQQGKGFKYLIRTRFMYGNYDGFSKTPEFDLYIGANLWESVVLINETAIMTKEIIYTPPSDHIHVCLVDKNRGTPFLSVLEIRFLKNDTYDTPYEALMLGRRWDFGTATNLQIRYKDDFYDRIWMPYKSPYQKTLNTSLTIDETNHNGFRPASIVMRSAIAPGNESNPLKFNWAPDDPRSKFYIYMHFAEVRELQRNETREFDIYINDVILAENFRPFYLFTDTRSTVDPVGRKMNEIVLQRTGVSTLPPIINAIEIYQINEFLQLPTDQQDVDAMTKIKFKYRVKKNWQGDPCVPVDNSWEGLECLHSDNNTSPKSIALNLSSSGLTGQIDPAFANLTSINKLDLSNNSLTGKVPDFLASLPNLTELNLEGNKLTGSIPAKLLEKSKDGSLSLRFGGNPDLCQSPSCQTTTKKKIGYIVPVVASLAGLLIVLTALALIWHFKKRSRRGTISNKPLGVNTGPLDTAKRYFIYSEVVNITNNFERVLGKGGFGKVYHGFLNGDQVAVKILSEESTQGYKEFRAEVELLMRVHHTNLTSLIGYCNEDNHMALIYEYMANGNLGDYLSGKSSLILSWEERLQISLDAAQGLEYLHYGCKPPIVHRDVKPANILLNENLQAKIADFGLSRSFPVEGSSQVSTVVAGTIGYLDPEYYATRQMNEKSDVYSFGVVLLEVITGKPAIWHSRTESVHLSDQVGSMLANGDIKGIVDQRLGDRFEVGSAWKITELALACASESSEQRPTMSQVVMELKQSIFGRVNNRSDHKDPVRMVTMNLDTEMVPRAR

SEQ ID NO: 893 - protein, 336 aa, Arabidopsis thaliana
MELALSLGDNTKKQFSFMEKNSKINNPSVSSTSTSEKDLGFCMALDVAFGGHRSLSSSSSPSVEDEKKKPAPRAKKSDEFRVSSSVDPPLQLQLHFPNWLPENSKGRQGGRMPLGAATVVEEEEEEEEAVPSMSVSPPDSVTSSFQLDFGIKSYGYERRSNKRDIDDEVERSASRASNEDNDDENGSTRKKLRLSKDQSAFLEDSFKEHSTLNPKQKIALAKQLNLRPRQVEVWFQNRRARTKLKQTEVDCEYLKRCCESLTEENRRLQKEVKELRTLKTSTPFYMQLPATTLTMCPSCERVATSAAQPSTSAAHNLCLSTSSLIPVKPRPAKQVS

SEQ ID NO: 894 - protein, 867 aa, Arabidopsis thaliana
MVSRSCANFLDLASWDLLDFPQTQRALPRVMTVPGIISELDGGYSDGSSDVNSSNSSRERKIIVANMLPLQAKRDTETGQWCFSWDEDSLLLQLRDGFSSDTEFVYIGSLNADIGISEQEEVSHKLLLDFNCVPTFLPKEMQEKFYLGFCKHHLWPLFHYMLPMFPDHGDRFDRRLWQAYVSANKIFSDRVMEVINPEEDYVWIHDYHLMVLPTFLRKRFNRIKLGFFLHSPFPSSEIYRTLPVRDDLLRGLLNCDLIGFHTFDYARHFLSCCSRMLGLDYESKRGHIGLDYFGRTVFIKILPVGIHMGRLESVLNLPSTAAKMKEIQEQFKGKKLILGVDDMDIFKGISLKLIAMERLFETYWHMRGKLVLIQIVNPARATGKDVEEAKKETYSTAKRINERYGSAGYQPVILIDRLVPRYEKTAYYAMADCCLVNAVRDGMNLVPYKYIICRQGTPGMDKAMGISHDSARTSMLVVSEFIGCSPSLSGAIRVNPWDVDAVAEAVNLALTMGETEKRLRHEKHYHYVSTHDVGYWAKSFMQDLERACREHYNKRCWGIGFGLSFRVLSLSPSFRKLSIDHIVSTYRNTQRRAIFLDYDGTLVPESSIIKTPNAEVLSVLKSLCGDPKNTVFVVSGRGWESLSDWLSPCENLGIAAEHGYFIRWSSKKEWETCYSSAEAEWKTMVEPVMRSYMDATDGSTIEYKESALVWHHQDADPDFGACQAKELLDHLESVLANEPVVVKRGQHIVEVKPQGVSKGLAVEKVIHQMVEDGNPPDMVMCIGDDRSDEDMFESILSTVTNPDLPMPPEIFACTVGRKPSKAKYFLDDVSDVLKLLGGLAAATSSSKPEYQQQSSSLHTQVAFESII

SEQ ID NO: 895 - protein, 223 aa, Arabidopsis thaliana
MDSSMSTKKKTKLSVRNQTCFKKSSLSSSSTAKKTTNLSMREETMFKKALELSTLCDIEVCVIYYGRDGELIKTWPEDQSKVRDMAERFSKLHERERRKKRTNLSLFLRKKILDDNKLSEKVLEMKDSLESGLRVLQDKLLLLQPENQTELGQSRAVSSTTNPLSSPEDHHHQQWTEPLVTGVSNTEQDLSTSPLSNHQSKYSVFVYNHDSGSFYQVPDSICF

SEQ ID NO: 896 - protein, 645 aa, Arabidopsis thaliana
MDPYSHGSSFMNLLTSQQEAHNLETNPYDDDVSPNQAAHTPKVKRERRKWSAGEDLVLVSAWLNTSKDAVIGNEQKGYAFWSRIAAYYGASPKLNGVEKRETGHIKQRWTKINEGVGKFVGSYEAATKQKSSGQNDDDVVALAHEIYNSEHGKFTLEHAWRVLRFEQKWLSAPSTKATVMSKRRKSDKASTSQPQTHEAEEAMSRPIGVKAAKAKAKKAVSKTTTVEDKGNVMLEIQSIWEIKQKDWELRQKDREQEKEDFEKQERLSRTKLLESLFTKKEPLTDIEVPVISNALGGILVGLVTSHAGGRRKVMHLKERLEEEEAVTRTLRAAFDGSIVSLPSLSSLFLPPQAIPIDIITHNFSELFQELAIVEAEILCLDRKIKEQASYSSSSNFLRSKNHYPSMESINTLKGYDKVSDQENQIHHHHHSPLPKPSSFSRKTLIATGSVVSLLLILSVVALTAGAFTHSPPHHPPISSASLKSLCSVTRYPETCFNSLSSSLNESDSKLNPESILELSLRVAAKEISNLSISFRSINDMPEDAAVGDCVKLYTDALSQLNDSITEIERKKKKGGNNWLTEEVVGDVKTWISAAMTDGETCSDGIEEMGTIVGNEIKKKMEMANQMMSISLAIVSQMKKLLLIFH

SEQ ID NO: 897 - protein, 844 aa, Arabidopsis thaliana
MEDSFLQSENVVMDADFMDGLLLDGCWLETTDGSEFLNIAPSTSSVSPFDPTSFMWSPTQDTSALCTSGVVSQMYGQDCVERSSLDEFQWNKRWWIGPGGGGSSVTERLVQAVEHIKDYTTARGSLIQLWVPVNRGGKRVLTTKEQPFSHDPLCQRLANYREISVNYHFSAEQDDSKALAGLPGRVFLGKLPEWTPDVRFFKSEEYPRVHHAQDCDVRGTLAIPVFEQGSKICLGVIEVVMTTEMVKLRPELESICRALQAVDLRSTELPIPPSLKGCDLSYKAALPEIRNLLRCACETHKLPLAQTWVSCQQQNKSGCRHNDENYIHCVSTIDDACYVGDPTVREFHEACSEHHLLKGQGVAGQAFLTNGPCFSSDVSNYKKSEYPLSHHANMYGLHGAVAIRLRCIHTGSADFVLEFFLPKDCDDLEEQRKMLNALSTIMAHVPRSLRTVTDKELEEESEVIEREEIVTPKIENASELHGNSPWNASLEEIQRSNNTSNPQNLGLVFDGGDKPNDGFGLKRGFDYTMDSNVNESSTFSSGGFSMMAEKKRTKADKTITLDVLRQYFAGSLKDAAKNIGVCPTTLKRICRQHGIQRWPSRKIKKVGHSLQKIQRVIDSVQGVSGPLPIGSFYANFPNLVSQSQEPSQQAKTTPPPPPPVQLAKSPVSSYSHSSNSSQCCSSETQLNSGATTDPPSTDVGGALKKTSSEIELQSSSLDETILTLSSLENIPQGTNLLSSQDDDFLRIKVSYGEEKIRLRMRNSRRLRDLLWEIGKRFSIEDMSRYDLKYLDEDNEWVLLTCDEDVEECVDVCRTTPSHTIKLLLQASSHHFPERSSATEYSLWH

SEQ ID NO: 898 - protein, 286 aa, Arabidopsis thaliana
MIKLLFTYICTYTYKLYALYHMDYACVCMYKYKGIVTLQVCLFYIKLRVFLSNFTFSSSILALKNPNNSLIKIMAVLPSSSSSLELTISVPGFASSPTLLPSSSVKELDINQVPLEEDWMASNMEDEEESSNGEPPRKKLRLTKEQSLLLEESFRQNHTLNPKQKESLAMQLKLRPRQVEVWFQNRRARSKLKQTEMECEYLKRWFGSLTEQNRRLQREVEELRAIKVGPPTVISPHSCEPLPASTLSMCPRCERVTSTADKPPSAAATLSAKVPPTQSRQPSAAC

SEQ ID NO: 899 - protein, 872 aa, Arabidopsis thaliana
MEGHRGLLLALIVNIFSIVHLVHAQNPEGFISLDCGLPAKESPYTESTTSLVFTSDANFISSGISTKLPKHDDYKPYNFLRYFPDGTRHCYDLSVKQGTNYLIRASFVYGNYDGRNIMPRFDLYIGPNIWAVVSELDLYSPEEEIIHMTKSTSLQICLVKTGPTTPFISTLELRPLRNDNYITQSGSLKLMQRMCMTETVSTLRYPDDVYDRLWYTDGIYETKAVKTALSVNSTNPFELPQVIIRSAATPVNSSEPITVEYGGYSSGDQVYLYLHFAEIQTLKASDNREFDIVWANNIKKLAYKPKVSQIDTLLNTSPNKCDNTFCKAFLVRTQRSTLPPLLNAYEVYILVEFPYSETHPDDVVAIKKIKAAYGLKIISWQGDPCLPREYKWEYIECSYTNNSIPPRIISLDLSNRGLKGIIEPVLQNLTQLEKLDLSINRLSGEVPEFLANMKSLSNINLSWNNLKGLIPPALEEKRKNGLKLNTQGNQNLCPGDECKRSIPKFPVTTVVSISAILLTVVVLLIVFIYKKKKTSKVRHRLPITKSEILTKKRRFTYSEVEAVTNKFERVIGEGGFGIVYHGHLNDTEQVAVKLLSHSSTQGYKQFKAEVELLLRVHHTNLVNLVGYCNEEDHLALVYEYAANGDLKQHLSGESSSAALNWASRLGIATETAQGLEYLHIGCEPPMIHRDVKTTNILLDEHFHAKLADFGLSRSFPVGVESHVSTNVAGTPGYLDPEYYRTNWLTEKSDVYSMGIVLLEIITNQPVIQQVREKPHIAEWVGLMLTKGDIKSIMDPKLNGEYDSSSVWKALELAMSCVNPSSGGRPTMSQVISELKECLIYENSRKEGRSEVDSKSSIELSTSFTAEVTPDAR

SEQ ID NO: 900 - protein, 223 aa, Arabidopsis thaliana
GTVSVSSRGNSLRLLQREQSPSPPEGTVSVVDFHEKDWSFLESMEIDSTEHTQKIERIIKAGELSESSRVLVSIGSETFVDRLVESSPSQLLLIVHDSLFTLACIKEKYDKVKCWQGEMIYVPEKWSPLDAVFLYFLPALPFDLDELFKTLSQRCSSGARVVISHPQGRLGLEQQRKEFSDVVVSDLPDESTLSNVAEKHSFELTQFVDEQGLYLAVLKSSKQ

SEQ ID NO: 901 - protein, 866 aa, Arabidopsis thaliana
MEDRHRYLFFIFAIIHYVQAQQGFISLDCGLPSNEPPYIEPVTGLVFSSDADHIPSGISGRIQKNLEAVHIKPYLFLRYFPDGLRNCYTLDVLQNRRYMIKAVFVYGNYDGYNDYPSFDLYLGPNKWVRVDLEGKVNGSVEEIIHIPSSNSLQICLVKTGNSLPFISALELRLLRNDTYVVQDVSLKHLFRRYYRQSDRLIRYPDDVYDRVWSPFFLPEWTQITTSLDVNNSNNYEPPKAALTSAATPGDNGTRLTIIWTLDNPDEQIHLYVHFAELEPVGENTDEALRTLFTRTFYFVVNGKISYDESITPLDLAVSTVETVVNKCDGGNCSLQLVRSEASPGVRVPLVNAMEAFTAIKFPHSETNPDDVISIKVIQATYELSRVDWQGDPCLPQQFLWTGLNCSYMNMSTSPRIISLDLSSHKLTGKIVPDIQNLTQLQKLDLSNNKLTGGVPEFLANMKSLLFINLSNNNLVGSIPQALLDRKNLKLEFEGNPKLCATGPCNSSSGNKETTVIAPVAAAIAIFIAVLVLIIVFIKKRPSSIRALHPSRANLSLENKKRRITYSEILLMTNNFERVIGEGGFGVVYHGYLNDSEQVAVKVLSPSSSQGYKEFKAEVELLLRVHHINLVSLVGYCDEQAHLALIYEYMANGDLKSHLSGKHGDCVLKWENRLSIAVETALGLEYLHSGCKPLMVHRDVKSMNILLDEHFQAKLADFGLSRSFSVGEESHVSTGVVGTPGYLDPEYYRTYRLTEKSDVYSFGIVLLEIITNQPVLEQANENRHIAERVRTMLTRSDISTIVDPNLIGEYDSGSVRKALKLAMSCVDPSPVARPDMSHVVQELKQCIKSENLRLRTGLNQVIDSKSS

SEQ ID NO: 902 - protein, 904 aa, Arabidopsis thaliana
MEEDNKKNTSWQMDSPCWLLLLLLGAFAIIGCVQAQDQQEFISLDCGLPMTEPSSYTESVTGLRFSSDAEFIQTGESGKIQASMENDYLKPYTRLRYFPEERRNCYSLSVDKNRKYLIRARFIYGNYDGRNSNPIFELHLGPNLWATIDLQKFVNGTMEEILHTPTSNSLNVCLVKTGTTTPLISALELRPLGNNSYLTDGSLNLFVRIYLNKTDGFLRYPDDIYDRRWHNYFMVDDWTQIFTTLEVTNDNNYEPPKKALAAAATPSNASAPLTISWPPDNPGDQYYLYSHFSEIQDLQTNDTREFDILWDGAVVEEGFIPPKLGVTTIHNLSPVTCKGENCIYQLIKTSRSTLPSLLNALEIYTVIQFPRNQLHLLILTSLSSTSVVAVKNIEAAYKLSRIRWQGDPCVPQKYAWDGLNCSNNTDVSKPPRVLSLNLSSSGLTGIIAAAIQNLTHLEKLDLSNNTLTGVVPEFLAQMKSLVIINLSGNNLSGPLPQGLRREGLELLVQGNPRLCLSGSCTEKNSKKKFPVVIVASVASVAIIVAVLVIIFVLSKKKSSTVGALQPPLSMPMVHDNSPEPSIETKKRRFTYSEVIKMTNNFQRVVGEGGFGVVCHGTINGSEQVAVKVLSQSSSQGYKHFKAEVDLLLRVHHTNLVSLVGYCDERDHLALIYEFLPKGDLRQHLSGKSGGSFINWGNRLRIALEAALGLEYLHSGCTPPIVHRDIKTTNILLDEQLKAKLADFGLSRSFPIGGETHISTVVAGTPGYLDPEYYQTTRLGEKSDVYSFGIVLLEIITNQPVIDQSRSKSHISQWVGFELTRGDITKIMDPNLNGDYESRSVWRVLELAMSCANPSSVNRPNMSQVANELKECLVSENLRENMNMDSQNSLKVSMSFDTELFPRAR

SEQ ID NO: 903 - protein, 305 aa, Arabidopsis thaliana
MSSLTVRRVSREDIQLVQNLIERCLQLYMNQKEVVDTLLEQAKIEPGFTELVWQKLEEENREFFKAYYLRLMVKHQIMEYNELLEQQINHMRQMHPTAGASVRNRNGSHVPPMNQQQLLYERKEPDQSSPNLSSPYLNGGSAINTNIPSYVDFSSHSRRVDPSPNSLSLQATNMPLMQGMIKSETAYQNCAPYMYGGEAQSTVGDVTIASFSNDSSNQSLNDPLVDPDAPTFGSLGQIPQNFSLSDLTADFSQSSDILESYEGSPFLLADAENFLDSSERVEHQGDHERLRTISSGFSYENFRSN

SEQ ID NO: 904 - protein, 398 aa, Arabidopsis thaliana
MNVDESDVCIVGVARTPMGGFLGSLSSLPATKLGSLAIAAALKRANVDPALVQEVVFGNVLSANLGQAPARQAALGAGIPNSVICTTVNKVCASGMKAVMIAAQSIQLGINDVVVAGGMESMSNTPKYLAEARKGSRFGHDSLVDGMLKDGLWDVYNDCGMGSCAELCAEKFQITREQQDDYAVQSFERGIAAQEAGAFTWEIVPVEVSGGRGRPSTIVDKDEGLGKFDAAKLRKLRPSFKENGGTVTAGNASSISDGAAALVLVSGEKALQLGLLVLAKIKGYGDAAQEPEFFTTAPALAIPKAIAHAGLESSQVDYYEINEAFAVVALANQKLLGIAPEKVNVNGGAVSLGHPLGCSGARILITLLGILKKRNGKYGVGGVCNGGGGASALVLELL

SEQ ID NO: 905 - protein, 280 aa, Arabidopsis thaliana
MIKLLFTYICTYTYKLYALYHMDYACVCMYKYKGIVTLQVCLFYIKLRVFLSNFTFSSSILALKNPNNSLIKIAMALSPNSSSLDLTISIPSFSPSPSLGDHHGMRDFDINQTPKTEEDREWMIGATPHVNEDDSNSGGRRRKKLRLTKEQSHLLEESFIQNHTLTPKQKKDLATFLKLSQRQVEVWFQNRRARSKLKHTEMECEYLKRWFGSLKEQNRRLQIEVEELRALKPSSTSALTMCPRCERVTDAVDNDSNAVQEGAVLSSRSRMTISSSSSLC

SEQ ID NO: 906 - protein, 866 aa, Arabidopsis thaliana
MEGIHKLIFLALIWIFLITNIVDAQDQQGFISLDCGMPRNESSYTDESTGLNFSSDADFISSGKSGTIKTEDSDSGVKYIKPYKQLRYFPEGARNCYNLTVMQGTHYLIRAVFVYGNYDLKQRPKFDLYLGPNFWTTINLQDPSGGFYYRIWLQDGTVEEVIHMPKSNNLDICLVKTGTTTPFISSLELRPLRDDTYTTTTGSLKLISRWYFRKPFPTLESIIRHPDDVHDRLWDVYHADEEWTDINTTTPVNTTVNAFDLPQAIISKASIPQVASDTWSTTWSIQNPDDDVHVYLHFAEIQALKPSDTREFSILWNKNTIIRDYYSPLEFMADTVPIRTSSKCGDDGFCSLDLTRTKSSTLPPYCNAMEVFGLLQLLQTETDENDATYRIQKTNWQGDPCVPIQFIWTGLNCSNMFPSIPPRITSMDLSNNNLTGKVPEFLAKMKLLTFINLSGNNLSGSIPQSLLNMEKNGLITLLYNGNNLCLDPSCESETGPGNNKKKLLVPILASAASVGIIIAVLLLVNILLLRKKKPSKASRSSMVANKRSYTYEEVAVITNNFERPLGEGGFGVVYHGNVNDNEQVAVKVLSESSAQGYKQFKAEVDLLLRVHHINLVTLVGYCDEGQHLVLIYEYMSNGNLKQHLSGENSRSPLSWENRLRIAAETAQGLEYLHIGCKPPMIHRDIKSMNILLDNNFQAKLGDFGLSRSFPVGSETHVSTNVAGSPGYLDPEYYRTNWLTEKSDVFSFGVVLLEIITSQPVIDQTREKSHIGEWVGFKLTNGDIKNIVDPSMNGDYDSSSLWKALELAMSCVSPSSSGRPNMSQVANELQECLLTENSRKGGRHDVDSKSSLEQSTSFGPEHIPDAR

SEQ ID NO: 907 - protein, 876 aa, Arabidopsis thaliana
MKTMNGFLLLSTIAFAVFHLVQAQSQSGFISLDCGLIPKDTTYTEQITNITYISDADYIDSGLTERISDSYKSQLQQQTWTLRSFPEGQRNCYNFNLKANLKYLIRGTFVYGNYDGLNQMPKFDLHIGPNKWTSVILEGVANATIFEIIHVLTQDRLQVCLVKTGQTTPFISSLELRPLNNDTYVTQGGSLMSFARIYFPKTAYFLRYSDDLYDRVWVPFSQNETVSLSTNLPVDTSSNSYNVPQNVANSAIIPAEATHPLNIWWDLQNINAPSYVYMHFAEIQNLKANDIREFNITYNGGQVWESSIRPHNLSITTISSPTALNSSDGFFNFTFTMTTTSTLPPLINALEVYTLVENLLLETYQDEVSAMMNIKKTYGLSKKISWQGDPCSPQIYRWEGLNCLYLDSDQPLITSLNLRTSGLTGIITHDISNLIQLRELDLSDNDLSGEIPDFLADMKMLTLVNLKGNPKLNLTVPDSIKHRINNKSLKLIIDENQSSEKHGIKFPLVAILASVAGVIALLAIFTICVIFKREKQGSGEAPTRVNTEIRSSYQSIETKDRKFTYSEILKMTNNFERVLGKGGYGRVYYGKLDDTEVAVKMLFHSSAEQDYKHFKAEVELLLRVHHRHLVGLVGYCDDGDNFALIYEYMANGDLKENMSGNRSGHVLSWENRMQIAMEAAQGLEYLHNGSRPPMVHRDVKTTNILLNELYQAKLADFGLSRSSPVDGESYVSTIVAGTPGYLDPETNLLSEKTDVYSFGVVLLEIITNQPVIDTTREKAHITDWVGFKLMEGDIRNIIDPKLIKEFDTNGVWKAVELALSCVNPTSNHRPTMPHVVMELKECLDSEIARKQGSQDMFSRDSIELTFSPTGFSPGPR

SEQ ID NO: 908 - protein, 70 aa, Arabidopsis thaliana
VTKKYGYYEQEMKKPQNLSVPVLMPGDNTPKFIPFPCPCAPPRPEKLTVDVQTPPQSPPVKPARFPVPLY

SEQ ID NO: 909 - protein, 119 aa, Arabidopsis thaliana
  misc_feature (7)..(7): Xaa can be any naturally occurring amino acid
  misc_feature (41)..(41): Xaa can be any naturally occurring amino acid
  misc_feature (54)..(54): Xaa can be any naturally occurring amino acid
  misc_feature (65)..(65): Xaa can be any naturally occurring amino acid
  unsure (1)..(119): unsure at all Xaa locations
KKLEDIXPSSHHFDLPHVNPVYYQLIYITEDGFLSLLTDIXGTKNYLKLPTDYXLTPQMRLGFHXGKDIVVSVMSSIGEDQIVPQGSGGGQLNKYHSIYYYQLTTHVNVIRTKRCFSLS

SEQ ID NO: 910 - protein, 264 aa, Arabidopsis thaliana
  misc_feature (191)..(191): Xaa can be any naturally occurring amino acid
  unsure (1)..(264): unsure at all Xaa locations
MWKIGQRGVPYFQRLIAAPFTTLRSLPTSLVETGQNRVIDASLTLIRERAKLKGELVRLIGGAKATTALLGVPLGHNSSFLEGPALAPPHVREAIWCGSTNSTTEEGKELKDPRVLSDVGDIPVQEIREMGVDDDRLMKVVSESVKLVMEEEPLRPLVIGGDHSISYPVVRAVSEKLGGPVDILHLDAHPXDIYDRFEGNYYSHASSFARIMEGGYARRLLQVGIRSINKEGREQGKRFGVEQYEMRTFSKDRQMLENLVCINF

SEQ ID NO: 911 - protein, 1065 aa, Arabidopsis thaliana
MASGGGDDGLRRRGCSCTKDDFLPEESFQSMGNYLKALKETPSRFMDRIMTRSLDSDEINEMKARSGHEMKKTLTWWDLMWFGIGAVIGSGIFVLTGLEARNHSGPAVVLSYVVSGVSAMLSVFCYTEFAVEIPVAGGSFAYLRVELGDFMAFIAAGNIILEYVVGGAAVARSWTSYFATLLNHKPEDFRIIVHKLGEDYSHLDPIAVGVCAIICVLAVVGTKGSSRFNYIASIIHMVVILFVIIAGFTKADVKNYSDFTPYGVRGVFKSAAVLFFAYIGFDAVSTMAEETKNPGRDIPIGLVGSMVVTTPYQQIDPDAPFSVAFSAVGWDWAKYIVAFGALKGMTTVLLVGAIGQARYMTHIARAHMMPPWLAQVNAKTGTPINATVVMLAATALIAFFTKLKILADLLSVSTLFIFMFVAVALLVRRYYVTGETSTRDRNKFLVFLGLILASSTATAVYWALEEEGWIGYCITVPIWFLSTVAMKFLVPQARAPKIWGVPLVPWLPSASIAINIFLLGSIDTKSFVRFAIWTGILLIYYVLFGLHATYDTAKATLKEKQALQKAEEVNPAFSLARLCVIERERRMKLEKKKGIGAKRRGKKSSIDHDPFLEEETEKRRKFNYDDDDDIESVESEEEGKVGEEVEDEFAHETVGEKRKRLAEDTLNRIEEAKQREHEEDNEEDDDFRDSLVAKTLMQEQLEKSGRVRRANALRVQDLQSSDKFRVIVKHQHSVTGVALSDDDSRGFSVSKDGTILHWDVSSGKSDEYKWPSDEVLKSHGLKFQESWYTRHNKQSLALAVSSDGRYLATGGVDCHVHLWDIRTREHVQAFTGHCGIVSSLCFREGTAELFSGSYDGTLSIWNAEHRTYIESCFGHQSELLSIDALGRERVLSVGRDRTMQLYKVPESTRLIYRASESNFECCCFVNSDEFLSGSDNGSIALWSILKKKPVFIVNNAHHVIADHDSVNHNCTPACSWVSSVAVCRGSELAASGAGNGCVRLWGVESGSSAIQPLYELPLPGFVNSLAFAKSGRFLIAGVGQEPRLGRWGCLKSAQNGVAIHPLRLS

SEQ ID NO: 912 - protein, 878 aa, Arabidopsis thaliana
MKNLCWVFLSLFWFGVFLIIRFAEGQNQEGFISLDCGLPLNEPPYIESETGIQFSSDENFIQSGKTGRIPKNLESENLKQYATLRYFPDGIRNCYDLRVEEGRNYLIRATFFYGNFDGLNVSPEFDMHIGPNKWTTIDLQIVPDGTVKEIIHIPRSNSLQICLVKTGATIPMISALELRPLANDTYIAKSGSLKYYFRMYLSNATVLLRYPKDVYDRSWVPYIQPEWNQISTTSNVSNKNHYDPPQVALKMAATPTNLDAALTMVWRLENPDDQIYLYMHFSEIQVLKANDTREFDIILNGETINTRGVTPKYLEIMTWLTTNPRQCNGGICRMQLTKTQKSTLPPLLNAFEVYSVLQLPQSQTNEIEVVAIKNIRTTYGLSRISWQGDPCVPKQFLWDGLNCNITDISAPPRIISLNLSSSGLSGTIVSNFQNLAHLESLDLSNNSLSGIVPEFLATMKSLLVINLSGNKLSGAIPQALRDREREGLKLNVLGNKELCLSSTCIDKPKKKVAVKVVAPVASIAAIVVVILLFVFKKKMSSRNKPEPWIKTKKKRFTYSEVMEMTKNLQRPLGEGGFGVVYHGDLNGSEQVAVKLLSQTSAQGYKEFKAEVELLLRVHHINLVNLVGYCDEQDHFALIYEYMSNGDLHQHLSGKHGGSVLNWGTRLQIAIEAALGLEYLHTGCKPAMVHRDVKSTNILLDEEFKAKIADFGLSRSFQVGGDQSQVSTVVAGTLGYLDPEYYLTSELSEKSDVYSFGILLLEIITNQRMIDQTRENPNIAEWVTFVIKKGDTSQIVDPKLHGNYDTHSVWRALEVAMSCANPSSVKRPNMSQVIINLKECLASENTRISRNNQNMDSGHSSDQLNVTVTFDTDVKPKAR

SEQ ID NO: 913 - protein, 1401 aa, Arabidopsis thaliana
MGWFNKIFKGSNQRLRVGNNKHNHNVYYDNYPTASHDDEPSAADTDADNDEPHHTQEPSTSEDNTSNDQENEDIDRAIALSLLEENQEQTSISVMDTGKYSMPVDEDEQLARALQESMVVGNSPRHKSGSTYDNGNAYGAGDLYGNGHMYGGGNVYANGDIYYPRPITFQMDFRICAGCNMEIGHGRFLNCLNSLWHPECFRCYGCSQPISEYEFSTSGNYPFHKACYRERYHPKCDVCSHFIPTNHAGLIEYRAHPFWVQKYCPSHEHDATPRCCSCERMEPRNTRYVELNDGRKLCLECLDSAVMDTMQCQPLYLQIQNFYEGLNMKVEQEVPLLLVERQALNEAREGEKNGHYHMPETRGLCLSEEQTVSTVRKRSKHGTGKWAGNITEPYKLTRQCEVTAILILFGLPRLLTGSILAHEMMHAWMRLKGFRTLSQDVEEGICQVMAHKWLDAELAAGSTNSNAASSSSSSQGLKKGPRSQYERKLGEFFKHQIESDASPVYGDGFRAGRLAVHKYGLRKTLEHIQMTASPKPREPYAASFEEETGEFDPNYSSGSHVCSYLADELLNSILRRLRLNPEACLEIFNLASKQQKFRPDYKAYCKMVHILSRARNYQQTKSYLCELVALNHSGFVVWGELVRVFKEFSFSPTVFDMILKVYAEKGLVKNALHVFDNMGNYGRIPSLLSCNSLLSNLVRKGENFVALHVYDQMISFEVSPDVFTCSIVVNAYCRSGNVDKAMVFAKETESSLGLELNVVTYNSLINGYAMIGDVEGMTRVLRLMSERGVSRNVVTYTSLIKGYCKKGLMEEAEHVFELLKEKKLVADQHMYGVLMDGYCRTGQIRDAVRVHDNMIEIGVRTNTTICNSLINGYCKSGQLVEAEQIFSRMNDWSLKPDHHTYNTLVDGYCRAGYVDEALKLCDQMCQKEVVPTVMTYNILLKGYSRIGAFHDVLSLWKMMLKRGVNADEISCSTLLEALFKLGDFNEAMKLWENVLARGLLTDTITLNVMISGLCKMEKVNEAKEILDNVNIFRCKPAVQTYQALSHGYYKVGNLKEAFAVKEYMERKGIFPTIEMYNTLISGAFKYRHLNKVADLVIELRARGLTPTVATYGALITGWCNIGMIDKAYATCFEMIEKGITLNVNICSKIANSLFRLDKIDEACLLLQKIVDFDLLLPGYQSLKEFLEASATTCLKTQKIAESVENSTPKKLLVPNNIVYNVAIAGLCKAGKLEDARKLFSDLLSSDRFIPDEYTYTILIHGCAIAGDINKAFTLRDEMALKGIIPNIVTYNALIKGLCKLGNVDRAQRLLHKLPQKGITPNAITYNTLIDGLVKSGNVAEAMRLKEKMIEKGLVRGSDKQGDVDIPKEVVLDPEVKLGSTGVIEMNSNELYDVRRVSEAVV

SEQ ID NO: 914 - protein, 350 aa, Arabidopsis thaliana
MARSPCCEKNGLKKGPWTSEEDQKLVDYIQKHGYGNWRTLPKNAGLQRCGKSCRLRWTNYLRPDIKRGRFSFEEEETIIQLHSFLGNKWSAIAARLPGRTDNEIKNFWNTHIRKKLLRMGIDPVTHSPRLDLLDISSILASSLYNSSSHHMNMSRLMMDTNRRHHQQHPLVNPEILKLATSLFSQNQNQNLVVDHDSRTQEKQTVYSQTGVNQYQTDQYFENTITQELQSSMPPFPNEAHQFNNMDHHFNGFGEQNLVSTSTTSVQDCYNPSFNDYSSSNFVLDPSYSDQSFNFANSVLNTPSSSPSPTTLNSSYINSSSCSTEDEIESYCSNLMKFDIPDFLDVNGFII

SEQ ID NO: 915 - protein, 304 aa, Arabidopsis thaliana
MIKLLFTYICTYTYKLYALYHMDYACVCMYKYKGIVTLQVCLFYIKLRVFLSNFTFSSSILALKNPNNSLIKIMMGATSPSGLELTMAVPGLSSSSGSEGFVCNNNNGSGNGNNMRDLDMNQPASGGEEEEFPMGSVEEDEEERGAGGPHRAKKLRLSKEQSRLLEESFRLNHTLTPKQKEALAIKLKLRPRQVEVWFQNRRARTKLKQTEMECEYLKRCFGSLTEENRRLQREVEELRAMRVAPPTVLSPHTRQPLPASALTMCPRCERITAATGPPAVRPPPSSAAAAAPSPFHPRRPSAAF

SEQ ID NO: 916 - protein, 412 aa, Arabidopsis thaliana
  misc_feature (9)..(9): Xaa can be any naturally occurring amino acid
  unsure (1)..(412): unsure at all Xaa locations
MYLSFDPAXMATYSSVPVCADVCVVGVARTPIGDFLGSLSSLTATRLGSIAIQAALKRAHVDPALVEEVFFGNVLTANLGQAPARQAALGAGIPYSVICTTINKVCAAGMKSVMLASQSIQLGLNDIVVAGGMESMSNVPKYLPDARRGSRLGHDTVVDGMMKDGLWDVYNDFGMGVCGEICADQYRITREEQDAYAIQSFERGIAAQNTQLFAWEIVPVEVSTGRGRPSVVIDKDEGLGKFDAAKLKKLRPSFKEDGGSVTAGNASSISDGAAALVLVSGEKALELGLHVIAKIRGYADAAQAPELFTTTPALAIPKAIKRAGLDASQVDYYEINEAFSVVALANQKLLGLDPERLNAHGGAVSLGHPLGCSGARILVTLLGVLRAKKGKYGVASICNGGGGASALVLEFM

SEQ ID NO: 917 - protein, 226 aa, Arabidopsis thaliana
MSDVPSCSSGNDTNNNDSSNFECNICLDLAQDPIVTLCGHLFCWPCLYKWLHLHSQSKDCPVCKAVIEEDRLVPLYGRGKSSADPRSKSIPGLEVPNRPSGQRPETAQPPDPNHGFAHHHGFGGFMGGFAAPMASARFGNVTLSAAFGGLIPSLFNLHFHGFPDAAMYGAAASGGFPHGFSNPFHGGHSHMHSYQRHTGRQGQQDHHLRILLLIVFVVVVFSLFLS

SEQ ID NO: 918 - protein, 307 aa, Arabidopsis thaliana
MQDIHDFSMNGVGGGGGGGGRFFGGGIGGGGGGDRRMRAHQNNILNHHQSLKCPRCNSLNTKFCYYNNYNLSQPRHFCKNCRRYWTKGGVLRNVPVGGGCRKAKRSKTKQVPSSSSADKPTTTQDDHHVEEKSSTGSHSSSESSSLTASNSTTVAAVSVTAAAEVASSVIPGFDMPNMKIYGNGIEWSTLLGQGSSAGGVFSEIGGFPAVSAIETTPFGFGGKFVNQDDHLKLEGETVQQQQFGDRTAQVEFQGRSSDPNMGFEPLDWGSGGGDQTLFDLTSTVDHAYWSQSQWTSSDQDQSGLYLP

SEQ ID NO: 919 - protein, 235 aa, Arabidopsis thaliana
QIWYRRQGGRMPLGAATVVEEEEEEEEAVPSMSVSPPDSVTSSFQLDFGIKSYGYERRSNKRDIDDEVERSASRASNEDNDDENGSTRKKLRLSKDQSAFLEDSFKEHSTLNPKQKIALAKQLNLRPRQVEVWFQNRRARTKLKQTEVDCEYLKRCCESLTEENRRLQKEVKELRTLKTSTPFYMQLPATTLTMCPSCERVATSAAQPSTSAAHNLCLSTSSLIPVKPRPAKQVS

SEQ ID NO: 920 - protein, 186 aa, Arabidopsis thaliana
  misc_feature (158)..(158): Xaa can be any naturally occurring amino acid
  unsure (1)..(186): unsure at all Xaa locations
GALGFSESSTNENQNSFSYGSSSSSGNNNSEAGNFECNICLELAQDPIVTLCGHLFCWPCLYQWLHVHAHSLECPVCKAVIEEEKLVPLYGRGKTSTDPRSKTMPGVNIPHRPSGQRPATAPPPEANHNQFPHVNPWFMGGAPVASTRFGNFTFSAAXGGLFPLLNFQVHGFPDAANTYATAAGFP

SEQ ID NO: 921 - protein, 201 aa, Arabidopsis thaliana
MGGKKTKIEIKKIINKPAKTVAFTKRREGLFRKASQLCLLSPATQIAILAAPMTSKSHASFYSFGHSSVDNVVSSLLYDHPPLTANQDNRSGLGFWWEDKRFDVSENVEELKEAVDAVSRMLNNVRCRLNDAVKSTQRDGGLEILHHQEEEVLQTRNDETKTNQTHEFEGGETSGSASWLENEDDILHFDDDFYTGIDPLF

SEQ ID NO: 922 - protein, 456 aa, Arabidopsis thaliana
MCGILAVLGCSDDSQAKRVRVLELSRRLRHRGPDWSGLYQNGDNYLAHQRLAVIDPASGDQPLFNEDKTIVVTVNGEIYNHEELRKRLKNHKFRTGSDCEVIAHLYEEYGVDFVDMLDGIFSFVLLDTRDNSFMVARDAIGVTSLYIGWGLDGSVWISSEMKGLNDDCEHFETFPPGHFYSSKLGGFKQWYNPPWFNESVPSTPYEPLAIRRAFENAVIKRLMTDVPFGVLLSGGLDSSLVASITARHLAGTKAAKQWGPQLHSFCVGLEGSPDLKAGKEVAEYLGTVHHEFHFSVQDGIDAIEDVIYHVETYDVTTIRASTPMFLMSRKIKSLGVKMVLSGEGADEIFGGYLYFHKAPNKKEFHQETCRKIKALHKYDCLRANKSTSAFGLEARVPFLDKDFINTAMSLDPESKMVTTKLTSQTQYLPSQVNVEQIFYMGFSRSSQRKEGSRNGF

SEQ ID NO: 923 - protein, 452 aa, Arabidopsis thaliana
MKKKKKESDTNRTLRSSPGRDQMDNIVDSLNKAYEKFVLASAGVLESKESAGGQKALLTDTALENFKEKWELFRVACDQAEEFVESVKQRIGSECLVDEATGLTTTAAGGQAPAAVTGAATSLPPISAVRLEQMSRAVRWLVLELQRGSGVAPDSSFSDSDEKEFWVLGKFDWLVWKHLPNTRSKHLRCLRRQSLFVYMDSNQSMRLLSAWIGQIGDLGLNLLWRFIHIVVSLWYIVSGIFEAIESYAITLGLNKKYGSIDLEKLRCLAVVVDIEAAQDVANVVELLQWLTTIGVKQVGLFDSQGLLKKSKDLILETVPGSMLLEEIEKDVAPDGKRIALEFISSSDNKEAVMKAANILLQRYLKSSHPEDDKGEDFFTESHLNDALRVVGENVHVPDLLLVYGPIRSHLGFPAWRLRYTEIVHMGTLKYMRYGSLLKAIHKFTGVHQNYGT

SEQ ID NO: 924 - protein, 260 aa, Arabidopsis thaliana
MITTSSFNSQRIYTTMASSSSSSLSFSTSKKNKTFFKKPNSAFSSSRATSLIKRQQTVFKKAKELSILCDIDVCVICYGSNGELKTWPEEKVKAIARRYGELSETKRRKGSVDLHEFLEKMNKDDPEKEEKKKIKVRRVPKVKYPVWDPRFDNYSVEQLMGLVQSLERNLTRIQHRTCAVVEAQGQRRVQYTNMANQELMMANTMNQLQQHSNQVSMYLWNHGNGAFSQIPVSALASNQTQSLAPIPPELKGRIRLNLQD

SEQ ID NO: 925 - protein, 191 aa, Arabidopsis thaliana
MGGTKRKIEMKRIEDKNVRAVAFTKRKSGLFHKASELCLLSPGTQIAILATPLSSHSHASFYSFGHSSVDHVVSSLLHNQHPSLPTNQDNRSGLGFWWEDQAFDRLENVDELKEAVDAVSRMLNNVRLRLDDAVKSNQRDGSLVIHQEDEEVLQLGYKDTNQITKLEGETSASASLLKNVVDNLHIDDRYY

SEQ ID NO: 926 - protein, 584 aa, Arabidopsis thaliana
MCGILAVLGCSDDSQAKRVRVLELSRRLRHRGPDWSGLYQNGDNYLAHQRLAVIDPASGDQPLFNEDKTIVVTVNGEIYNHEELRKRLKNHKFRTGSDCEVIAHLYEEYGVDFVDMLDGIFSFVLLDTRDNSFMVARDAIGVTSLYIGWGLDGSVWISSEMKGLNDDCEHFETFPPGHFYSSKLGGFKQWYNPPWFNESVPSTPYEPLAIRRAFENAVIKRLMTDVPFGVLLSGGLDSSLVASITARHLAGTKAAKQWGPQLHSFCVGLEGSPDLKAGKEVAEYLGTVHHEFHFSVQDGIDAIEDVIYHVETYDVTTIRASTPMFLMSRKIKSLGVKMVLSGEGADEIFGGYLYFHKAPNKKEFHQETCRKIKALHKYDCLRANKSTSAFGLEARVPFLDKDFINTAMSLDPESKMIKPEEGRIEKWVLRRAFDDEERPYLPKHILYRQKEQFSDGVGYSWIDGLKDHAAQNVNDKMMSNAGHIFPHNTPNTKEAYYYRMIFERFFPQNSARLTVPGGATVACSTAKAVEWDASWSNNMDPSGRAAIGVHLSAYDGKNVALTIPPLKAIDNMPMMMGQGVVIQS

SEQ ID NO: 927 - protein, 861 aa, Arabidopsis thaliana
MGSKSFGNLLDLASGDLLDIPQTPRYLPRVMTVPGIISDVDGYGISDGDSDVISLPCRERKIIVANFLPLNGKKDSETGKWKFSLDNDSPLLHLKDGFSPETEVIYVGSLKTHVDVSEQDEVSHNLFEEFNCVATFLPQDVHKKFYLGFCKQQLWPLFHYMLPMCPDHGERFDRGLWQAYVSANKIFADKVMGVINLEEDYIWIHDYHLMVLPTFLRRRFHRVKLGFFLHSPFPSSEIYRTLPVREELLRGLLNCDLIGFHTFDYARHFLSCCCRMLGLEYESKRGHIALDYLGRTVFLKILPIGIHMGRLESVLNLPATAEKLKEIQEKYRGKKIILGVDDMDIFKGLSLKILAFEHLLQQYPSMLGKIVLIQIVNPARGSGKDVQEARKETYDTVKRINERYGSHDYEPVVLIDRPVPRFEKSAYYALAECCIVNAVRDGMNLVPYKYTVCRQGTPSMNKSLGVSDDLPRTSTLVLSEFIGCSPSLSGAIRVNPWDVDAVADSLYSAITMSDFEKQLRHKKHFHYISTHDVGYWARSFSQDLERASRDHYSKRCWGVGWGLGFRLVALSPNFRRLSIEQTVSAYRRSSKRAIFLDYDGTLVPETSIVKDPSAEVISALKALCSDPNNTIFIVSGRGKVSLSEWLAPCENLGIAAEHGYFTRWNKSSDWETSGLSDDLEWKKVVEPIMRLYTETTDGSNIEAKESALVWHHQDADPDFGSCQAKELLDHLETVLVNEPVIVNRGHQIVEVKPQGVSKGLVTGKILSRMLEDGIAPDFVVCIGDDRSDEEMFENISTTLSAQSSSMSTEIFACTVGRKPSKAKYFLDEVSDVVKLLQGLANTSSPKPRYPSHLRVSFESVV

SEQ ID NO: 928 - protein, 622 aa, Arabidopsis thaliana
MVLQKRPDYGFNGYEVPHTPRAARSPRKSAFKKKSENHQISSFDLLAAVAGKLLLEGGNSSSSSNNTSGNNEDQCAVKKEPLNGGDIMVEEETTNSDHDNNNAERSFFVSEILQKSHEMQSFNRSPSPLKEFHFGSSSGITSDSSEKFETQELAYDESKINNGDCYRSESNDKKSMLGGLNFEAKLSRNVVGKDEKHIGSGFRKPIPQNPSTCSDDVDLHGKENDDGENFSACYRTKSFRSTLRIGDRRIRKVWASKYCKVPPKLKDTTVTNSDLDLKSDYYSKKHCLKSLRSERNYPIKKRRYFDGYTASQSEETNKNEGQSGSPRKAFLSSIACQKQPAAFQSPRDSNNVKLGIKSFRVPELFIEIPETATVGSLKRTVLEAVTSILGGGLRIGVLVHGKKVRDDSKMLLQTGLSLDTLSDTLGFCLEPNPPQSTKPLSPEDSDFARPCNVPHTLTRSVSIQSNSVESDLDSKPSAPNRGKTIYSRALIPVSPLHAQALTVVPPRKTKRSEVAQRRIRRPFSVAEVEALVQAVERLGTGRWRDVKLRAFDNAKHRTYVDLKDKWKTLVHTARISPQQRRGEPVPQELLDRVLTAHAYWSQQQGKHQLLEGPQQLETSLGL

SEQ ID NO: 929 - protein, 898 aa, Arabidopsis thaliana
MEGIHKLIFLALIWIFLITNIVDAQDQQGFISLDCGMPRNESSYTDESTGLNFSSDADFISSGKSGTIKTEDSDSGVKYIKPYKQLRYFPEGARNCYNLTVMQGTHYLIRAVFVYGNYDLKQRPKFDLYLGPNFWTTINLQDPSGGFYYRIWLQDGTVEEVIHMPKSNNLDICLVKTGTTTPFISSLELRPLRDDTYTTTTGSLKLISRWYFRKPFPTLESIIRHPDDVHDRLWDVYHADEEWTDINTTTPVNTTVNAFDLPQAIISKASIPQVASDTWSTTWSIQNPDDDVHVYLHFAEIQALKPSDTREFSILWNKNTIIRDYYSPLEFMADTVPIRTSSKCGDDGFCSLDLTRTKSSTLPPYCNAMEVFGLLQLLQTETDENDVTTLKNIQATYRIQKTNWQGDPCVPIQFIWTGLNCSNMFPSIPPRITSIDFSNFGLNGTITSDIQYLNQLQKLDLSNNNLTGKVPEFLAKMKLLTFINLSGNNLSGSIPQSLLNMEKNGLITLLYNGNNLCLDPSCESETGPGNNKKKLLVPILASAASVGIIIAVLLLVNILLLRKKKPSKASRSSMVANKRSYTYEEVAVITNNFERPLGEGGFGVVYHGNVNDNEQVAVKVLSESSAQGYKQFKAEVDLLLRVHHINLVTLVGYCDEGQHLVLIYEYMSNGNLKQHLSGENSRSPLSWENRLRIAAETAQGLEYLHIGCKPPMIHRDIKSMNILLDNNFQAKLGDFGLSRSFPVGSETHVSTNVAGSPGYLDPEYYRTNWLTEKSDVFSFGVVLLEIITSQPVIDQTREKSHIGEWVGFKLTNGDIKNIVDPSMNGDYDSSSLWKALELAMSCVSPSSSGRPNMSQVANELQECLLTENSRKGGRHDVDSKSSLEQSTSFGPEHIPDAR

SEQ ID NO: 930 - protein, 881 aa, Arabidopsis thaliana
MTSKAKALTFICCVALLNLAIAQDQSGFISIDCGLQPENSSYTETSTDIKYVSDSSYTDTGTSYFVAPENRQNMKQSMWSVRSFPEGIRNCYTIAVNSSTKYLIRADFMYGNYDSRNEIPGFDLHLGPNKWDTVELVSPLQTVSKEIIYYVLTDTIQVCLVNTGNGTPFISVLELRQLPNSSYAAQSESLQLFQRLDFGSTTNLTVRYPNDVFDRIWFPATPNGTKPLSDPSTSLTSNSTGNFRLPQVVMRTGIVPDNPRGFVDFGWIPDDPSLEFFFYLYFTELQQPNSGTVETREFVILLNGKSFGEPLSLNYFRTLALFTSNPLKAESFQFSLRQTQSSSLPPLINAMETYFVNKLPQSSTDPNDLSAMRNIKSAYKVKRNWEGDVCVPQAYTWEGLNCSFNGTNMPRVIALNLSSAGLTGEITSDISRLSQLQILDLSNNNLSGPAVPAFLAQLQFLRVLHLANNQLSGPIPSSLIERLDSFSGNPSICSANACEEVSQNRSKKNKLPSFVIPLVASLAGLLLLFIISAAIFLILMRKKKQDYGGNETAVDAFDLEPSNRKFTYAEIVNITNGFDRDQGKVGFGRNYLGKLDGKEVTVKLVSSLSSQGYKQLRAEVKHLFRIHHKNLITMLGYCNEGDKMAVIYEYMANGNLKQHISENSTTVFSWEDRLGIAVDVAQGLEYLHTGCKPPIIHRNVKCTNVFLDESFNAKLGGFGLSRAFDAAEGSHLNTAIAGTPGYVDPEYYTSNMLTEKSDVYSFGVVLLEIVTAKPAIIKNEERMHISQWVESLLSRENIVEILDPSLCGDYDPNSAFKTVEIAVACVCRNSGDRPGMSQVVTALKESLAVEVERKKHLPVGSTDSLEELALGFGSNPPPRLR

SEQ ID NO: 931 - protein, 523 aa, Arabidopsis thaliana
MAEISATSFPSSSSSALVIRSSHNGSLKCQNVAVPKTTSQFQEVHPFEIDAHTCCFFDDTTKFCICFLLNLQLSLKRSQLVGNAVVTGHVTGSRSCKNQAIRAVLSGDGTALTTDSKEAGLRGKLKKVVLAYSGGLDTSVIVPWLKENYGCEVVCFTADVGQGIKELEGLEQKAKASGASQLVVKDLTEEFVKDFIFPCLRAGAIYERKYLLGTSMARPVIAKAMVDVAAEVGADAVAHGCTGKGNDQVRFELTFFSLNPELKVVAPWREWEIQGREDAIEYAKKHNVPVPVTKKSIYSRDRNLWHLSHEGDLLEDPANEPKKDMYMMSVDPEDAPDQPEYIEIGIESGLPVALNGKALSPATLLAELNTIGGKHGIGRIDMVENRLVGMKSRGVYETPGGTILFAAVQELESLTLDRESIQVKDTLALKYAEMVYAGRWFDPLRESMDAFMEKITETTTGSVTLKLYKGSVSVTGRQSPNSLYRQDISSFEGSEIYNQADAAGFIRLYGLPMKIRAMLKKIS

SEQ ID NO: 932 - protein, 328 aa, Arabidopsis thaliana
MDKKVSFTSSVAHSTPPYLSTSISWGLPTKSNGVTESLSLKVVDARPERLINTKNISFQDQDSSSTLSSAQSSNDVTSSGDDNPSRQISFLAHSDVCKGFEETQRKRFAIKSGSSTAGIADIHSSPSKANFSFHYADPHFGGLMPAAYLPQATIWNPQMTRVPLPFDLIENEPVFVNAKQFHAIMRRRQQRAKLEAQNKLIKARKPYLHESRHVHALKRPRGSGGRFLNTKKLQESTDPKQDMPIQQQHATGNMSRFVLYQLQNSNDCDCSTTSRSDITSASDSVNLFGHSEFLISDCPSQTNPTMYVHGQSNDMHGGRNTHHFSVHI

SEQ ID NO: 933 - protein, 332 aa, Arabidopsis thaliana
  misc_feature (302)..(302): Xaa can be any naturally occurring amino acid
  unsure (1)..(332): unsure at all Xaa locations
MDIKEDDESRVITPTELQLHDSVTARTGTLWTAVAHIITGVIGAGVLSLAWATAELGWIAGPAALIAFAGVTLLSAFLLSDCYRFPDPNNGPLRLNSYSQAVKLYLGKKNEIVCGVVVYISLFGCGIAYTIVIATCSRAIMKSNCYHRNGHNATCSYGDNNNYFMVLFGLTQIFMSQIPNFHNMVWLSLVAAIMSFTYSFIGIGLALGKIIENRKIEGSIRGIPAENRGEKVWIVFQALGNIAFSYPFSIILLEIQDTLRSPPAEKQTMKKASTVAVFIQTFFFFCCGCFGYAAFGDSTPGXNLLTGFGFYEAHFWARRIFAQPPCHLFLSF

SEQ ID NO: 934 - protein, 199 aa, Arabidopsis thaliana
MLRFVVLSLTLMVFINSSNFPKTAATPPGTYQNHTTYVKTACNSTTYPTMCYNCLSSYSSTIKSDPIKLCTTSLNLNVKSAKNATLVVSNLLQKAKAAKSHEVSILKDCVDEMKDTIDELKQAVAEMKYVRGGGKTTEEHLKNVKTWVSSALTDEGTCTDGFEEGRVNVETKKKVKKAISELSKTTSNTLALLTHYLSY

SEQ ID NO: 935 - protein, 201 aa, Arabidopsis thaliana
MARNFELSLILFVLYLSTAAIVMARNLEEESSGDTEFIKASCETTSYPDRCFQSLSSYASEIKKQPRKLAETALAVSIARAKSAKTYVSEMTDYKGITKRQHEAVADCLEEMGDTVDRLSNSLKELKHLEEGDSGEDFWFCLSNVRTWTSAALTDETACMDGFGGKAMAGELKSLIRTHIVSVAEETSNALALINDFASKH

SEQ ID NO: 936 - protein, 2465 aa, Arabidopsis thaliana
MKHIFKKLHRGGNQEQQNRTNDAAPPSDQNRIHVSANPPQATPSSVTETLPVAGATSSMASPAPTAASNRADYMSSEEEYQVQLALAISASNSQSSEDPEKHQIRAATLLSLGSHQRMDSRRDSSEVGNAGFSLCVYRLLGHNDFKEYGVLDYEEKVVDSFYDVYSLSTDSAKQGEMPSLEDLESNHGTPGFEAVVVNRPIDSSLHELLEIAECIALGCSTTSVSVLVQRLAELVTEHMGGSAEDSSIVLARWTEKSSEFKAALNTCVFPIGFVKIGISRHRALLFKVLADSVRLPCRLVKGSHYTGNEDDAVNTIRLEDEREYLVDLMTDPGTLIPADFASASNNTVEPCNSNGNKFPTAQFSNDVPKLSEGEGSSHSSMANYSSSLDRRTEAERTDSSYPKVGPLRNIDYSSPSSVTSSTQLENNSSTAIGKGSRGAIIECSRTNMNIVPYNQNSEEDPKNLFADLNPFQNKGADKLYMPTKSGLNNVDDFHQQKNNPLVGRSPAPMMWKNYSCNEAPKRKENSYIENLLPKLHRDPRYGNTQSSYATSSSNGAISSNVHGRDNVTFVSPVAVPSSFTSTENQFRPSIVEDMNRNTNNELDLQPHTAAVVHGQQNDESHIHDHRKYTSDDISTGCDPRLKDHESTSSSLDSTSYRNDPQVLDDADVGECEIPWNDLVIAERIGLGSYGEVYHADWHGTEVAVKKFLDQDFSGAALAEFRSEVRIMRRLRHPNVVFFLGAVTRPPNLSIVTEFLPRGSLYRILHRPKSHIDERRRIKMALDVAMGMNCLHTSTPTIVHRDLKTPNLLVDNNWNVKVGDFGLSRLKHNTFLSSKSTAGTPEWMAPEVLRNEPSNEKCDVYSFGVILWELATLRLPWRGMNPMQVVGAVGFQNRRLEIPKELDPVVGRIILECWQTDPNLRPSFAQLTEVLKPLNRLGTPVNIIVGSHVWFEDPEVAWIDGEVEKINGQEVVIQATTGKKVTAKLSKIYPKDVEAPAGGVDDMTKLSYLHEPGVLQNLKIRYELNEIYTYTGNILIAINPFQRLPHIYDAHMMQQYKGAPLGELSPHVFAVADVAYRAMINEGKSNSILVSGESGAGKTETTKMLMRYLAYLGGRAVTEGRTVEQQVLESNPVLEAFGNAKTVRNNNSSRFGKFVEIQFDKQGRISGAAIRTYLLERSRVCQISDPERNYHCFYLLCAAPQEEIEKYKLGHPKTFHYLNQSKCFELVGISDAHDYLATRRAMDIVGISEKEQEAIFRVVAAILHIGNIDFTKGKEVDSSVPKDEKSKFHLKTAAELLMCDLKALEDALCKRVMITPEEVIKRSLDPQSAVTSRDGLAKTVYSRLFDWLVDKINKSIGQDANSRSLIGVLDIYGFESFKTNSFEQFCINFTNEKLQQHFNQHVFKMEQEEYTKEAIDWSYIEFVDNQDVLDLIEKKPGGIVALLDEACMFPKSTHETFANKLYQTFKTHKRFIKPKLSRTDFAVAHYAGEVLYQSELFLDKNKDYVIPEHQDLLGASKCPFVVGLFPPLPEETSKSSKFSSIGSRFKLQLQQLMETLNCTEPHYIRCVKPNNLLKPAIFENVNIMQQLRCGGVLEAIRISCAGYPTRKPFFEFINRFGLLSPAALEGNFDEKVACQKILDNMGLKGYQIGKTKVFLRAGQMAELDARRAEVLSSAAKKIQRRIRTHQAQKRFIVLRKATISLQAICRGRLSCKHYDNLRREAAAVKIQKNGRRHYSRKSYKKLHVASLVVQTGLRAMAARKQFRFRKQTKAATIVQAQWRCHRAISYYKKLKNGVVLSQTRWRGRLAKRELRKLKMAARETGALKEAKDMLEKKVEELTYRVQLEKRSRGDLEEAKTQEILKLKSSFEEMRKKVDETNALLLKEREAAKKAAEEAPPVIKETQILVEDTKKIELMTEELESVKVTLENEKQRADDAVRKFEEAQESLEDKKKKLEETEKKGQQLQESLTRMEEKCSNLESENKVLRQQAVSMAPNKFLSGRSRSILQRGSESGHLAVDARSNLDLHSHSINHRDPSEVEDKPQKSLNEKQQENQDLLIRSIVQHLGFQGNRPITACIIYKCLLQWRSFEVERTSVFDRIIQTIGHAIETQDNNNTLAYWLSNTSTLLLLLQRTLKASGAAGMAPQRRRSSSATLFGRMSQSFRGAPPGVNLAMINGAAGGGADTFRQVEAKYPALLFKQQLTAYVEKIYGMIRDNLKKEISPLLGLCIQAPRTSRASLVKGASRSVGNTAAQQALIAHWQGIVKSLTNFLNTLKSNNVPSFLVRKVFTQIFSFINVQLFNSLLLRRECCSFSNGEYVKAGLSELEHWCFKATNEYAGSSWDELKHIRQAIGFLVVHQKPKKTLDEISHDLCPVLSIQQLYRISTMYWDDKYGTHSVSPDVIANMRVLMTEDSNNAVSNSFLLDDDSSIPFSVDDLSKSMEKFEIADIEPPPLIRENSGFSFLLPVSE

SEQ ID NO: 937 - protein, 467 aa, Arabidopsis thaliana
MVSPGNTLVSEVLDGSNFSSWKIAMFVSLNVKNKIAFVDGTLPRPPESDPSFRVWSRCNSMVKSRILNSVTKQIYKSILRFNDAAEIWKDLDTRFHITNLPRSYQLTQQIWSLQTEELLLPMTDSYGAVSVDVGTIYLGGKEHRVKTASGVVSVIVYGDREKPALITYPDLALNHMSCFQGLFFCPEAASLLLHNFCIYHISPPGHELGAAPICPNDSVPSAENLADQILEVLNFFGLGVVMCMGVTAGAYILTLFAMKHRERVLGLILVSPLCKAPSWSEWFYNKVITNLLYYYGMCGVVKEFLLQRYFSKEVRGNVEIPESDIAQACRRLLDERQGINVLRFLDAIDRRPDISSGLKKLKCRTLIFIGDQSPFYSEAVHMAATLDRGYCALVEVQACGSMVTEEQPHAMLIPMEYFLMGYGLYRPSLFSESPRSPLSPSCISPELLSPESMGLKLKPIKTRISAA

SEQ ID NO: 938 - protein, 99 aa, Arabidopsis thaliana
MENTQDFSPPHMDASRPSLGFPLGTALLLIIIFSLSGIFSCCHHWDKHRSLRRSLANGRPSADIESNPYKPKPPFPEMKKPQNLSVPVLMPGDRIGQIV

SEQ ID NO: 939 - protein, 454 aa, Arabidopsis thaliana
  misc_feature (154)..(154): Xaa can be any naturally occurring amino acid
  unsure (1)..(454): unsure at all Xaa locations
MEESSNQQILNSETRPDPIQKPPESPATKLSFPRLFLWFDQSNRIKTLLSWSIFFLLAVIVPMISHFVLICADCDFKHRRPYDGLVQLSLSIFAGISFVSLSDWSKKYGIRRFLFFDKLKDVSDKVRIGYEAKIQRSMKLLAIFVLPSTTLQAXIYRIWWYASGFNQIPYIINPTLSHVLACTLQLSSWLYRTSLFIIACILYQNICHLQVLRLDEFARCFASEIKDFSSILAEHLKIRRELKIVSHRFRRFILLSLFFVTATQFMALLTTIRASVPFNIYEVGELALCSTSLVSGLFICLKSATQMTHKAQSVTSIATKWNVCASLDTFDVLYDGETPKCPTTTQHSQILSRRRNVVQSSDDDEEGEGDDNDLEIHPIFARAISSQKRQALVTYLENNRAGITVYGFLVDKTWLRMIFSIELALLLWLLKKTISNFICFYSESIFSFFITFLL

SEQ ID NO: 940 - protein, 276 aa, Arabidopsis thaliana
  misc_feature (171)..(171): Xaa can be any naturally occurring amino acid
  unsure (1)..(276): unsure at all Xaa locations
MPTLYKKPALIMQSSNVTDCTMRKRGTKRKIEIEKRMTKQQRSVACSKRRPTLFSKAADLCLLSGANIAVFVTSPDENSDVVYSFSGYSHASEIVDCYLNNKSPPKTTINPESAKFWWEEPDLYRDCDDLSELRIIEDRLMRTKKHLMDYLEKKEKSHSVSKSDQNPNNDXESSSDQSRYLVNEDAGFVDGLLCETEEEKNGMRLPQETQTQPMFSEEDQSFWENLDVDDVFGLFKDDNNLEVPLQDHSSTNEDDELLIDISEYLSEEAMECPCFS

SEQ ID NO: 941 - protein, 226 aa, Arabidopsis thaliana
MAMEDQSAARSIGKVSWFSDGKGYGFITPDDGGEELFVHQSSIVSDGFRSLTLGESVEYEIALGSDGKTKAIEVTAPGGGSLNKKENSSRGSGGNCFNCGEVGHMAKDCDGGSGGKSFGGGGGRRSGGEGECYMCGDVGHFARDCRQSGGGNSGGGGGGGRPCYSCGEVGHLAKDCRGGSGGNRYGGGGGGGRPCYSCGEVGHLAKDCRGGSGGSRYGGGGGSGSD

SEQ ID NO: 942 - protein, 496 aa, Arabidopsis thaliana
MSNASFKCQLCTKKQAANFQLTTMDNNNNNNTFSSLDNVMTNQNPLLMDFIPSREDSTSFSTMLPWNTIRSDPLQMGGFDIFNSMLTNKYLSSSPRSIDVQDNRNVEFMAPPPHPPPLHPLDHLRHYDDSSNNMWGFEANSEFQAFSGVVGPSEPMMSTFGEEDFPFLISNKRNNELSLSLASDVSDECSEISLCAATRLASEQASCSSKDISNNVVTQGFSQLIFGSKYLHSVQEILSHFAAYSLDYSSRGTESGAASSAFTSRFENITEFLDGDSNNSEAGFGSTFQRRALEAKKTHLLDLLQMVDDRYSHCVDEIHTVISAFHAATELDPQLHTRFALQTVSFLYKNLRERICKKIISMGSVLERGKDKTQETSMFHQHCLLQQLKRKNHQIWRPQRGLPEKSVSVLRNWMFQNFLHPYPKDSEKHLLAIRSGLTRSQVSNWFINARVRLWKPMIEEMYAEMNKRKLNNSHIQPNGPTLRMPKSVMMSQAMHK

SEQ ID NO: 943 - protein, 192 aa, Arabidopsis thaliana
MSGTVKDIVSKEELDNLRHSGAPLVLHFWASWCDASKQMDQVFSHLATDFPRAHFFRVEAEEHPEISEAYSVALVPYFVFFKDGKTVDTLEGADPSSLANKVGKVAGSITPASLGLAAGPTILETVKKNAKASGQDRAQPVATWSKHVAKVDLLLLFEEHVLCLVVEGIMFIWEEHKPTGKFTPSSIVNPDT

SEQ ID NO: 944 - protein, 358 aa, Arabidopsis thaliana
MCGGAIISDFIPPPRSRRVTSEFIWPDLKKNLKGSKKSSKNRSNFFDFDAEFEADFQGFKDDSSIDCDDDFDVGDVFADVKPFVFTSTPKPAVSAAAEGSVFGKKVTGLDGDAEKSANRKRKNQYRGIRQRPWGKWAAEIRDPREGARIWLGTFKTAEEAARAYDAAARRIRGSKAKVNFPEENMKANSQKRSVKANLQKPVAKPNPNPSPALVQNSNISFENMCFMEEKHQVSNNNNNQFGMTNSVDAGCNGYQYFSSDQGSNSFDCSEFGWSDQAPITPDISSAVINNNNSALFFEEANPAKKLKSMDFETPYNNTEWDASLDFLNEDAVTTQDNGANPMDLWSIDEIHSMIGGVF

SEQ ID NO: 945 - protein, 2151 aa, Arabidopsis thaliana; identical to SEQ ID NO: 584

SEQ ID NO: 946 - protein, 97 aa, Arabidopsis thaliana
QHQHSSLSTTSTRSLLSHDRLTPHPRGRLQEPNWRRVTVSSGHGRSKHGAWRVYAALDVGRVLPGGSFVRDMETTFEVVSVNSVKNESCELEDVNHV

SEQ ID NO: 947 - protein, 476 aa, Arabidopsis thaliana
MSLMIRSSYVSHITLFQPRNSKPSSFTNQISFLSSSNNNPFLNLVYKRNLTMQSVSKMTVKSSLIDPDGGELVELIVPETEIGVKKAESETMPKVKLNQIDLEWVHVISEGWASPLKGFMREDEYLQSLHFNSLRLKNGTFVNMSLPIVLAIDDDTKEQIGSSENVALVCPQGDIIGSLRSVEIYKHNKEERIARTWGTTSPGLPYVEEYITPSGNWLIGGDLEVFEPIKYNDGLDHYRLSPKQLREEFDNRQADAVFAFQLRNPVHNGHALLMNDTRKRLLEMGYKNPVLLLHPLGGFTKADDVPLDVRMEQHSKVLEDGVLDPKTTIVSIFPSPMHYAGPTEVQWHAKARINAGANFYIVGRDPAGMGHPTEKRDLYDPDHGKRVLSMAPGLEKLNILPFRVAAYDTIEKKMAFFDPSRAKEFLFISGTKMRTYARTGENPPDGFMCPSGWNVLVKYYESLQESEAKQQAVVSA

SEQ ID NO: 948 - protein, 613 aa, Arabidopsis thaliana
MARSFGANSTVVLAIIFFGCLFAFSTAKEEATKLGSVIGIDLGTTYSCVGVYKNGHVEIIANDQGNRITPSWVGFTDSERLIGEAAKNQAAVNPERTVFDVKRLIGRKFEDKEVQKDRKLVPYQIVNKDGKPYIQVKIKDGETKVFSPEEISAMILTKMKETAEAYLGKKIKDAVVTVPAYFNDAQRQATKDAGVIAGLNVARIINEPTAAAIAYGLDKKGGEKNILVFDLGGGTFDVSVLTIDNGVFEVLSTNGDTHLGGEDFDHRIMEYFIKLIKKKHQKDISKDNKALGKLRRECERAKRALSSQHQVRVEIESLFDGVDLSEPLTRARFEELNNDLFRKTMGPVKKAMDDAGLQKSQIDEIVLVGGSTRIPKVQQLLKDFFEGKEPNKGVNPDEAVAYGAAVQGGILSGEGGDETKDILLLDVAPLTLGIETVGGVMTKLIPRNTVIPTKKSQVFTTYQDQQTTVSIQVFEGERSLTKDCRLLGKFDLTGVPPAPRGTPQIEVTFEKIDARNALETYVYNMKNQVSDKDKLADKLEGDEKEKIEAATKEALEWLDENQNSEKEEYDEKLKEVEAVCNPIITAVYQRSGGAPGAGGESSTEEEDESHDEL

SEQ ID NO: 949 - protein, 520 aa, Arabidopsis thaliana
  misc_feature (239)..(239): Xaa can be any naturally occurring amino acid
  misc_feature (393)..(393): Xaa can be any naturally occurring amino acid
  unsure (1)..(520): unsure at all Xaa locations
MGWFNKIFKGSNQRLRVGNNKHNHNVYYDNYPTASHDDEPSAADTDADNDEPHHTQEPSTSEDNTSNDQENEDIDRAIALSLLEENQEQTSISGKYSMPVDEDEQLARALQESMVVGNSPRHKSGSTYDNGNAYGAGDLYGNGHMYGGGNVYANGDIYYPRPITFQMDFRICAGCNMEIGHGRFLNCLNSLWHPECFRCYGCSQPISEYEFSTSGNYPFHKACYRERYHPKCDVCSHFXHPFWVQKYCPSHEHDATPRCCSCERMEPRNTRYVELNDGRKLCLECLDSAVMDTMQCQPLYLQIQNFYEGLNMKVEQEVPLLLVERQALNEAREGEKNGHYHMPETRGLCLSEEQTVSTVRKRSKHGTGKWAGNITEPYKLTRQCEVTAILILXGLPRLLTGSILAHEMMHAWMRLKGFRTLSQDVEEGICQVMAHKWLDAELAAGSTNSNAASSSSSSQGLKKGPRSQYERKLGEFFKHQIESDASPVYGDGFRAGRLAVHKYGLRKTLEHIQMTGRFPV

SEQ ID NO: 950 - protein, 759 aa, Arabidopsis thaliana
MRGLLRASSLLLCGVILIQLLAAQIHAQSKKPKSPWPTLTGDPPLVIARGGFSGLFPDSSYDAYNFAILTSVPDAVLWCDVQLTKDALGICFPDLTMRNSSSIEAVYPTRQKSYPVNGVPTSGWFTIDFSLKDLKDVNLIRGILSRSEKFDGNSNPIMTVQSVSTQMKPSFFWLNVQHDAFYAQHNLSMSSFLVAASKTVLIDFISSPEVNFFKKIAGRFGRNGPSLVFRFLGQDEFEPTTNRTYGSILSNLTFVKTFASGILVPKSYILPLDDQQYLLPHTSLVQDAHKAGLEVFVSGFANDIDIAHDYSFDPVSEYLSFVDNGNFSVDGVLSDFPITASASLDCFSHVGRNATKQVDFLVITKDGASGDYPGCTDLAYKKAIKDGADVIDCSVQLSSDGTPFCLSSIDLGNSTTVSLTAFRNRSTTVPELGSLGAIYTFSLTWAEIQTLTPAISNPYRVTSLFRNPKQKNAGKLFSLSDFLSLAKNSTSLSGVLISVENAAYLREEQGLDVVKAVLDTLTQTGYSNSTATKVMIQSTNSSVLVDFKKQSQYETVYKVEENIRDILDSAIEDIKKFADAVVIQKLSVFPVAQSFITTQTNVVEKLQKSQLPVYVELFQNEFLSQPYDFFADATVEINSYITGAGINGTITEFPFTAARYKRNLCLGRKETIPYMAPAQPGALLTLVSPTAFPPAEAPNPVFTDADVTEPPLPPVTAKAPTSSPGTPSTNAQAPSGQTRITLSLLLSVFAMVLASLLLL

SEQ ID NO: 951 - protein, 100 aa, Arabidopsis thaliana
MSANQEEDKKPGDGGAHINLKVKGQDGNEVFFRIKRSTQLKKLMNAYCDRQSVDMNSIAFLFDGRRLRAEQTPDELDMEDGDEIDAMLHQTGGSGGGATA

SEQ ID NO: 952 - protein, 327 aa, Arabidopsis thaliana
METDSMECVSSTGNEIHQNGNGHQSYQFSSTKTHGGAAAAAVVTNIVGPTATAPATSVYELLECPVCTYSMYPPIHQCHNGHTLCSTCKVRVHNRCPTCRQELGDIRCLALEKVAESLELPCKFYNLGCPEIFPYYSKLKHESLCNFRPYSCPYAGSECGIVGDIPFLVAHLRDDHKVDMHAGSTFNHRYVKSNPREVENATWMLTVFHCFGQYFCLHFEAFQLGMGPVYMAFLRFMGDEEDARSYSYSLEVGGSGRKLTWEGTPRSIRDSHRKVRDSNDGLIIQRNMALFFSGGDRKELKLRVTGKIWKEQHSPDSGLSIPNLSSS

SEQ ID NO: 953 - protein, 298 aa, Arabidopsis thaliana
MPTLYKKAGCQFQLTTMGRSPCCDKNGVKKGPWTAEEDQKLIDYIRFHGPGNWRTLPKNAGLHRCGKSCRLRWTNYLRPDIKRGRFSFEEEETIIQLHSVMGNKWSAIAARLPGRTDNEIKNHWNTHIRKRLVRSGIDPVTHSPRLDLLDLSSLLSALFNQPNFSAVATHASSLLNPDVLRLASLLLPLQNPNPVYPSNLDQNLQTPNTSSESSQPQAETSTVPTNYETSSLEPMNARLDDVGLADVLPPLSESFDLDSLMSTPMSSPRQNSIEAETNSSTFFDFGIPEDFILDDFMF

SEQ ID NO: 954 - protein, 922 aa, Arabidopsis thaliana
MGAHSVFLILFSVIAIAIVVHGQGQAGFISIDCGSPPNINYVDTDTGISYTWDAPFINAGVNLNVSEEYGYPKNPVLPFPLADVRSFPQGNRNCYTLTPSDGKGNLYLIRASFMYGNYDGKNALPEFDLYVNVNFWTSVKLRNASENVIKEILSFAESDTIYVCLVNKGKGTPFISALELRPMNSSIYGTEFGRNVSLVLYQRWDTGYLNGTGRYQKDTYDRIWSPYSPVSWNTTMTTGYIDIFQSGYRPPDEVIKTAASPKSDDEPLELSWTSSDPDTRFYAYLYFAELENLKRNESREIKIFWNGSPVSGAFNPSPEYSMTVSNSRAFTGKDHWISVQKTAESTRPPILNAIEIFSAQSLDEFYTRIDDVQAIESIKSTYKVNKIWTGDPCSPRLFPWEATTLLVIKSSPFLLMSLFLYFAARRNLSSSGLHGPIAFAFRNLSLLESLDLSNNNLKGIVPEFLADLKYLKSLNLKGNNLTGFIPRSLRKRATANGLALSVDEQNICHSRSCRDGNRIMVPIVVSTLVIILIAALAIICIMRRESKIMYSGAYSGPLLPSGKRRFTYSEVSSITNNFNKVIGKGGFGIVYLGSLEDGTEIAVKMINDSSFGKSKGSSSSSSSSQVSKEFQVEAELLLTVHHRNLASFVGYCDDGRSMALIYEYMANGNLQDYLSSENAEDLSWEKRLHIAIDSAQGLEYLHHGCRPPIVHRDVKTANILLNDNLEAKIADFGLSKVFPEDDLSHVVTAVMGTPGYVDPEYYNTFKLNEKSDVYSFGIVLLELITGKRSIMKTDDGEKMNVVHYVEPFLKMGDIDGVVDPRLHGDFSSNSAWKFVEVAMSCVRDRGTNRPNTNQIVSDLKQCLAAELAREPKSNHEKKEVVKEKYTKTKSTVQNYSSNEYNSSSGSVSLSFGDYSTFGPMAR

SEQ ID NO: 955 - protein, 356 aa, Arabidopsis thaliana
MMIGETRRTYPTVEIPPWPVLEELTTSEFFSPVMNSPDCSMLEALAGLQRYLPSNEPDPESYPDLLGPDSPIDAYSCDHFRMYDFKVRRCARGRSHDWTECPYAHPGEKARRRDPRKYHYSGTACPDFRKGGCKKGDSCEFAHGVFECWLHPARYRTQPCKDGGNCLRKICFFAHSPDQLRFLHTRSPDRVDSFDVSSPIRARAFQLSISPVSGSPPMSPRADSESSPMTQSLSRSLGSCSINDVVPSFRNLQFNSVKSFPRNNPLFGFGSPRGSILGPGFQSLPTTPTRPGNLDIWEYGLEEEPVMERVVESGRELREKMREKLHKENCMDRVAQDPDQNLGEAPDVGWVSDLLM

SEQ ID NO: 956 - protein, 864 aa, Arabidopsis thaliana
MRANLVFGIFCALVTTILVHGQDQSGYISIDCGIPPYDTPEDTMTNINYVSDEAFITTGVNFKVSEEYGYPKNPVLLSTLAEVRAFPQGNRNCYTLKLSQGKDHLYLIRASFMYGNYDGKKALPEFDLYVNVNFWSTVKFKNASDQVTKEILSFAESDTIYVCLVNKGKGTPFISGLELRPVNSSIYGTEFGRNVSLVLYRRWDIGYLNGTGRYQDDRFDRIWSPYSSNISWNSIITSGYIDVFQNGYCPPDEVIKTAAAPENVDDPLELFWTSDDPNVRFYAYLYFAELETLEKNETRKIKILWNGSPVSETSFEPSSKYSTTFSNPRAFTGKDHWISIQKTVDSTLPPILNAIEIFTAQSLDEFSTTIEDIHAIESIKATYKVNKVWSGDPCSPRLFPWEGVGCSDNNNNHQIKSLNLSSSGLLGPIVLAFRNLSLLESLDLSNNDLQQNVPEFLADLKHLKVLNLKGNNFTGFIPKSLMKKLKAGLLTLSADEQNLCNSCQEKKKKKSMVVPIAVAASVIVLVVVLVIIWIILRQRKKGAYSGPLLPSGKRRFTYNEVSSITNNFNKVIGKGGFGIVYLGSLEDGTKIAVKMINDSSLAKPKGTSSSSLSRASNQFQVEAELLLTVHHRNLASFVGYCDDDRSMALIYEYMANGNLQAYLSSENAEDLSWEKRLHIAIDSAQGLEYLHDGCRPAIVHRDVKTANILINDNLEAKIADFGLSKVFPEDDLSHVVTTVMGTPGYVDPEYYRTFVLNEKSDVYSFGVVLLELITGQRAIIKTEEGDNISVIHYVWPFFEARELDGVVDPLLRGDFSQDSAWKFVDVAMSCVRDKGSNRPTMNQIVAELKQCLAAELDREPQSQG

SEQ ID NO: 957 - protein, 369 aa, Arabidopsis thaliana
MATTMNAAVSLTSSNSSSFPATSCAIAPERIRFTKGAFYYKSNNVVTGKRVFSIKAQITTETDTPTPAKKVEKVSKKNEEGVIVNRYRPKEPYTGKCLLNTKITADDAPGETWHMVFSHQGEIPYREGQSVGVIADGIDKNGKPHKVRLYSIASSALGDLGNSETVSLCVKRLVYTNDQGETVKGVCSNFLCDLAPGSDVKLTGPVGKEMLMPKDPNATVIMLATGTGIAPFRSFLWKMFFEKHDDYKFNGLAWLFLGVPTTSSLLYQEEFDKMKAKAPENFRVDYAISREQANDKGEKMYIQTRMAQYAAELWELLKKDNTFVYMCGLKGMEKGIDDIMVSLAANDGIDWFDYKKQLKKAEQWNVEVY

SEQ ID NO: 958 - protein, 782 aa, Arabidopsis thaliana
MGPLEALKKMKNTNNFVFSIEIFCYFRAESYHTLKYVYVFPLSVTILEERKTNSTFLAVVSSIKQNPRDTEKEDKRESSMEEDTGIDEAKTYTVEKSEKVEPEKDGLSQFRDEEKSLGADMEDLHDETVRETLGKDQVQGVRENSSVEPNVEDVLEVNETDSVKETVVSAIVPVDEVEENRQVETSPSLAASSDSLTVTPCLSLDPATASTAQDLPLVSVPTKQEQRSDSPVVNRLSVTPVPRTPARDGYNWRKYGQKQVKSPKGSRSYYRCTYTECCAKKIECSNDSGNVVEIVNKGLHTHEPPRKTSFSPREIRVTTAIRPVSEDDTVVEELSIVPSGSDPSASTKEYICESQTLVDRKRHCENEAVEEPEPKRRQSSDSVSKPGKKNKFVVHAAGDVGICGDGYRWRKYGQKMVKGNPHPRNYYRCTSAGCPVRKHIETAVENTKAVIITYKGVHNHDMPVPKKRHGPPSSMLVAAAAPTSMRTRTDDQVNIPTSSQCSVGRESEKQSKEALDVGGEKCVRALRWRVFDAFTRSISSFHGIEFSGTSISHGTVIPNRSLTRNLPWYSHWYRSQDRCFSSNTKDTDEDEESSEGEDDDEEEGEDFEDSADMEVEREYSPAEKVEEAEEIGYKVMGPLKPSERLFKPYEPVFAIVQIGSHQFKVSNGDSIFTEKLKFCDINDKLELTKVLLLGSASQTIIGRPILPDATVHAVVEEHALDEKVLIFKKKRRKNYRRTRGHRQELTKLRITDIQGIEKPEPKIVHKPSKEAVTEQTKAELVA

SEQ ID NO: 959 - protein, 181 aa, Arabidopsis thaliana
MIIYLSVYTPLYQHIYIYIAHTLHGFLILIKINKLIFEYPKKNLASSNFFKYIITSTMSGVWVFNKNGVMRLVENPYNQSAGDSSESSSSGGNQQQRMRRKILVHLPSSEVVSSYGSLEKILKNLGWERYYSGDNTDHLLQFHKRTSIDLISLPRDFSKFNSIHMYDIVVKNPNVFHVRDM

SEQ ID NO: 960 - protein, 200 aa, Arabidopsis thaliana
MSRVYVGNLDPRVTERELEDEFRAFGVVRSVWVARRPPGYAFLDFEDPRDARDAIRALDGKNGWRVEQSHNRGERGGGGRGGDRGGGGGGRGGRGGSDLKCYECGETGHFARECRNRGGTGRRRSKSRSRTPPRYRRSPSYGRRSYSPRARSPPPPRRRSPSPPPARGRSYSRSPPPYRAREEVPYANGNGLKERRRSRS

SEQ ID NO: 961 - protein, 287 aa, Arabidopsis thaliana
MDRQSSDDIMKFLDGMASSDDVLFGFLDEGNHSPEDYNFAAGDESEVDNDTTDCNSEENRKFWQEHEQLLQATLYRTSSIETKIRQATKEALKVVRSKGLVCVCRRPVTDGCRSCLRGEVSSLLREAGYDCVISKSKWRSSHEIPAGEHEYLEVVDKSVSKKGEIRVVIELCFRAEFEMARGSEEYKRLIGMLPEVYVGKTERLKSLIKILCTAAKKCMKDKKMHMGPWRKHKYMQAKWFGTCERKSVSPVSETEENMFPVAKQRVSMLNYGLFGAGIGRPTVVAVV

SEQ ID NO: 962 - protein, 171 aa, Arabidopsis thaliana
  misc_feature (154)..(154): Xaa can be any naturally occurring amino acid
  unsure (1)..(171): unsure at all Xaa locations
MSGTVKDIVSKEELDNLRHSGAPLVLHFWASWCDASKQMDQVFSHLATDFPRAHFFRVEAEEHPEISEAYSVALVPYFVFFKDGKTVDTLEGADPSSLANKVGKVAGSITPASLGLAAGPTILETVKKNAKASGQDRAQPVSTADALKNRLEKXHPVMLFMNGTPEEPRFL

SEQ ID NO: 963 - protein, 473 aa, Arabidopsis thaliana
MDNNNNNNTFSSLDNVMTNQNPLLMDFIPSREDSTSFSTMLPWNTIRSDPLQMGGFDIFNSMLTNKYLSSSPRSIDVQDNRNVEFMAPPPHPPPLHPLDHLRHYDDSSNNMWGFEANSEFQAFSGVVGPSEPMMSTFGEEDFPFLISNKRNNELSLSLASDVSDECSEISLCAATRLASEQASCSSKDISNNVVTQGFSQLIFGSKYLHSVQEILSHFAAYSLDYSSRGTESGAASSAFTSRFENITEFLDGDSNNSEAGFGSTFQRRALEAKKTHLLDLLQMVDDRYSHCVDEIHTVISAFHAATELDPQLHTRFALQTVSFLYKNLRERICKKIISMGSVLERGKDKTQETSMFHQHCLLQQLKRKNHQIWRPQRGLPEKSVSVLRNWMFQNFLHPYPKDSEKHLLAIRSGLTRSQVSNWFINARVRLWKPMIEEMYAEMNKRKLNNSHIQPNGPTLRMPKSVMMSQAMHK

SEQ ID NO: 964 - protein, 607 aa, Arabidopsis thaliana
MDTKIGSIDDCKPTNGDVCSPTNGTVATIHNSVPSSAITINYCDATLGRHLARRLVQAGVTDVFSVPGDFNLTLLDHLMAEPDLNLIGCCNELNAGYAADGYARSRGVGACVVTFTVGGLSVLNAIAGAYSENLPLICIVGGPNSNDYGTNRILHHTIGLPDFSQELRCFQTVTCYQAVVNNLDDAHEQIDKAISTALKESKPVYISVSCNLAAIPHHTFSRDPVPFSLAPRLSNKMGLEAAVEATLEFLNKAVKPVMVGGPKLRVAKACDAFVELADASGYALAMMPSAKGFVPEHHPHFIGTYWGAVSTPFCSEIVESADAYIFAGPIFNDYSSVGYSLLLKKEKAIVVQPDRITVANGPTFGCILMSDFFRELSKRVKRNETAYENYHRIFVPEGKPLKCESREPLRVNTMFQHIQKMLSSETAVIAETGDSWFNCQKLKLPKGCGYEFQMQYGSIGWSVGATLGYAQASPEKRVLAFIGDGSFQVTVQDISTMLRNGQKTIIFLINNGGYTIEVEIHDGPYNVIKNWNYTGLVDAIHNGEGNCWTAKVRYEEELVEAITTATTEKKDCLCFIEVILHKDDTSKELLEWGSRVSAANSRPPNPQ

SEQ ID NO: 965 - protein, 606 aa, Arabidopsis thaliana
  misc_feature (78)..(78): Xaa can be any naturally occurring amino acid
  misc_feature (111)..(111): Xaa can be any naturally occurring amino acid
  misc_feature (117)..(117): Xaa can be any naturally occurring amino acid
  unsure (1)..(606): unsure at all Xaa locations
MSATAAASSSIAVATNSLRNVTLSSRSPLPSAISVAFPSRGRNTLQRRLVLVSCSTGDGSKPTILVAEKLGDAGIKLXLEDVANVDCSYNMTPEELNIKISLCDALIVRSXGTKVGXREVFESSHGRLKVVGRAGVGIDNVDLSAATEFGCLVVNAPTANTIAAAEHGIALMAAMARNVAQADASVKAGEWKRNKYVGVSLVGKTLAVLGFGKVGTEVARRAKGLGMRVIAHDPYAPADRAHAIGVDLVSFDEALATADFISLHMPLTPTTSKILNDETFAKMKKGVRIVNVARGGVIDEDALVRALDAGIVAQAALDVFTKEPPAKDSKLVQHERVTVTPHLGASTMEAQEGVAIEIAEAVVGALNGELAATAVNAPMVSAEVLTELKPYVVLAEKLGRLAVQLVAGGSGVKNAKITYASARATDDLDTRLLRAMITKGIIEPISDVYVNLVNADFTAKQRGLRLSEERVLLDGSPESPLETITVQLSNVESKFASSLSESGEVKVEGKVKDGVPHLTKVGSFEVDVTLEGSIILCRQVDQPGMIGTVGSILGESNVNVNFMSVGRIAPRKQAIMAIGVDDIPSKETLKKIGEIPAVEEFVFLKL

SEQ ID NO: 966 - protein, 382 aa, Arabidopsis thaliana
MSSDQLSKFLDRNKMEDNKRKVLDEEAKASLDIWKYVFGFADIAAAKCAIDLKIPEAIENHPSSQPVTLAELSSAVSASPSHLRRIMRFLVHQGIFKEIPTKDGLATGYVNTPLSRRLMITRRDGKSLAPFVLFETTPEMLAPWLRLSSVVSSPVNGSTPPPFDAVHGKDVWSFAQDNPFLSDMINEAMACDARRVVPRVAGACHGLFDGVTTMVDVGGGTGETMGMLVKEFPWIKGFNFDLPHVIEVAEVLDGVENVEGDMFDSIPACDAIFIKWVLHDWGDKDCIKILKNCKEAVPPNIGKVLIVESVIGENKKTMIVDERDEKLEHVRLMLDMVMMAHTSTGKERTLKEWDFVLKEAGFARYEVRDIDDVQSLIIAYRS

SEQ ID NO: 967 - protein, 478 aa, Arabidopsis thaliana
MSIALGKLFDLESQESGGSPLFMSPAPSTDPQPISGEKNGGDGGRIPVEEWLPITESRKGNVYTATFHLLCSGIGLQVILLPAAFAALGWVWGTIILTVGFVWKLYTTWLLVQLHEAVPGIRISRYVRLAIASFGVKLGKLLGIFPVMYLSGGACTILVITGGKSIQQLLQIMSDDNTAPLTSVQCFLVFSCIAMIMSQFPNLNSLFGVSLIGAFMGIAYCTVIWILPVASDSQRTQVSVSYATMDKSFVHIFNAIGLIALVYRGNNLVLEIQGTLPSDSKNPSCKTMWRAVMISHALVAICMFPLTFAVYWAYGDKIPATGGPVGNYLKLYTQEHSKRAACFIHLTFIFSCLCSYPINLMPACDNIEMVYITKKKKPASIIVRMMLRVFLSLVCFTIAVGFPFLPYLAVLIGAIALLVTFTYPCFMWISIKKPQRKSPMWLFNVLVGCLGASLSVLLLVASAMRLAQKGLHANFFRP

SEQ ID NO: 968 - protein, 299 aa, Arabidopsis thaliana
MASEDQSAARSTGKVNWFNASKGYGFITPDDGSVELFVHQSSIVSEGYRSLTVGDAVEFAITQGSDGKTKAVNVTAPGGGSLKKENNSRGNGARRGGGGSGCYNCGELGHISKDCGIGGGGGGGERRSRGGEGCYNCGDTGHFARDCTSAGNGDQRGATKGGNDGCYTCGDVGHVARDCTQKSVGNGDQRGAVKGGNDGCYTCGDVGHFARDCTQKVAAGNVRSGGGGSGTCYSCGGVGHIARDCATKRQPSRGCYQCGGSGHLARDCDQRGSGGGGNDNACYKCGKEGHFARECSSVA

SEQ ID NO: 969 - protein, 781 aa, Arabidopsis thaliana
  misc_feature (62)..(62): Xaa can be any naturally occurring amino acid
  unsure (1)..(781): unsure at all Xaa locations
MVGPFKKILHAHNQRFPPSSSSSLDPVVDDSSRKQTRIILSYLLHLSLSLHMPSPPRLFLLXEAKLSFFFLYLSDQFGSSNPFSPMEESNNSAVVDFPDNFMDQLLWEECWEEEATQHDQALSSPSGLKERVACAMGHLQEVMGERELLIQLWVPVETRSGRVLSTEEQPYSINTFSQSQSLALYRDASAGYSFAAEVGSEQLVGLPGRVFLRRMPEWTPDVRFFRKEEYPRIGYARRYQVRATLALPLFQGTSGNCVAVMEMVTTHRNLEYASQLSTICHALEAFDLRTSQTSIVPASLKVTSSSSSSSRTEVASILQGICSSHGLPLAVTWGHQDSSSCLSALISASYAADHGSRCFLAACSEHHLLGGEGIAGRAFATKKQCFATDVAIFSKWSYPLSHYAKMFDLHAALAVPILTRGNRTVQFVLELFFPRDCLDIQTHSLTLASQLKLRFQSSPHLMVDDNQIAEEVRDAATPPLTQEDPKGKQVSFSFSSASSLENRKRKTKAEKDITLDTLRQHFAGSLKDAAKNIGVCPTTLKRICRQNGISRWPSRKIKKVGHSLRKLQVVMDSVEGVQGSLHLASFYSSFPQLQSSSSSSFPFINPTQTVHVPPKSPPSSSGSQSSSGSSTCCSSEEQQLGGFQKPALSHPQLLTLSSMHEDQRPVRVTSSLPPLPSATTPRKAKDGMKVKAMFGDSMLRMSLLPHSRLTDLRREIAKRFGMDDVLRSNFSLKYLDDDQEWVLLTCDADLEECIQVYKSSSLKETIRILVHHPLSRPSFGS

SEQ ID NO: 970 - protein, 878 aa, Arabidopsis thaliana
MEIRKKPNIFTVLVIDFSSKPSMALLLAILLFLSGPSASAVAAAAVGPATGFKPADDILIDCGSKSSSKTPDGRVFKSDQETIQYIEAKEDIQVSAPPSDKVASPIYLTARIFREEATYKFHLTRPGWHWVRLHFLAFPNDKFDLQQATFSVLTEKYVLLHNFKISNNNNDSQAAVQKEYLVNMTDAQFALRFRPMKSSAAFINAIEVVSAPDELISDSGTALFPVIGFSGLSDYAYQSVYRVNVGGPLIMPQNDTLGRTWIPDKEFLKDENLAKDVKTTPSAIKYPPEVTPLIAPQTVYATAVEMANSLTIDPNFNVSWNFPSNPSFNYLIRLHFCDIVSKSLNDLYFNVYINGKTAISGLDLSTVAGNLAAPYYKDIVVNATLMGPELQVQIGPMGEDTGTKNAILNGVEVLKMSNSVNSLDGEFGVDGRTTGMGKHGMVATAGFVMMFGAFIGLGAMVYKWKKRPQDWQKRNSFSSWLLPIHAGDSTFMTSKGGSQKSNFYNSTLGLGRYFSLSELQEATKNFEASQIIGVGGFGNVYIGTLDDGTKVAVKRGNPQSEQGITEFQTEIQMLSKLRHRHLVSLIGYCDENSEMILVYEFMSNGPFRDHLYGKNLAPLTWKQRLEICIGSARGLHYLHTGTAQGIIHRDVKSTNILLDEALVAKVADFGLSKDVAFGQNHVSTAVKGSFGYLDPEYFRRQQLTDKSDVYSFGVVLLEALCARPAINPQLPREQVNLAEWAMQWKRKGLLEKIIDPHLAGTINPESMKKFAEAAEKCLEDYGVDRPTMGDVLWNLEYALQLQEAFTQGKAEETENAKPDVVTPGSVPVSDPSPITPSVTTNEAATVPVPAKVEENSGTAVDEHSGTAMFTQFANLNGR

SEQ ID NO: 971 - protein, 294 aa, Arabidopsis thaliana
MKRLSSSDSMCGLISTSTDEQSPRGYGSNYQSMLEGYDEDATLIEEYSGNHHHMGLSEKKRRLKVDQVKALEKNFELENKLEPERKTKLAQELGLQPRQVAVWFQNRRARWKTKQLEKDYGVLKGQYDSLRHNFDSLRSDNDSLLQEISKIKAKVNGEEDNNNNKAITEGVKEEEVHKTDSIPSSPLQFLEHSSGFNYRRSFTDLRDLLPNSTVVEAGSSDSCDSSAVLNDETSSDNGRLTPPVTVTGGSFLQFVKTEQTEDHEDFLSGEEACGFFSDEQPPSLHWYSASDHWT

SEQ ID NO: 972 - protein, 570 aa, Arabidopsis thaliana
MEDDKDIYTKDGTLDIHKKPANKNKTGTWKACRFILGTECCERLAYYGMSTNLINYLEKQMNMENVSASKSVSNWSGTCYATPLIGAFIADAYLGRYWTIASFVVIYIAGMTLLTISASVPGLTPTCSGETCHATAGQTAITFIALYLIALGTGGIKPCVSSFGADQFDDTDEKEKESKSSFFNWFYFVINVGAMIASSVLVWIQMNVGWGWGLGVPTVAMAIAVVFFFAGSNFYRLQKPGGSPLTRMLQVIVASCRKSKVKIPEDESLLYENQDAESSIIGSRKLEHTKILTFFDKAAVETESDNKGAAKSSSWKLCTVTQVEELKALIRLLPIWATGIVFASVYSQMGTVFVLQGNTLDQHMGPNFKIPSASLSLFDTLSVLFWAPVYDKLIVPFARKYTGHERGFTQLQRIGIGLVISIFSMVSAGILEVARLNYVQTHNLYNEETIPMTIFWQVPQYFLVGCAEVFTFIGQLEFFYDQAPDAMRSLCSALSLTAIAFGNYLSTFLVTLVTKVTRSGGRPGWIAKNLNNGHLDYFFWLLAGLSFLNFLVYLWIAKWYTYKKTTGHAL

SEQ ID NO: 973 - protein, 603 aa, Arabidopsis thaliana
MDTKIGAIDTCKPTTGDIGSPPSNAVATIQDSAPITTTSESTLGRHLSRRLVQAGVTDVFSVPGDFNLTLLDHLIAEPELNNIGCCNELNAGYAADGYARSRGVGACVVTFTVGGLSVLNAIAGAYSENLPVICIVGGPNSNDFGTNRILHHTIGLPDFSQELRCFQTVTCYQAVVNNLEDAHEQIDKAIATALKESKPVYISISCNLAATPHPTFARDPVPFDLTPRMSNTMGLEAAVEATLEFLNKAVKPVMVGGPKLRVAKASEAFLELADASGYPLAVMPSTKGLVPENHPHFIGTYWGAVSTPFCSEIVESADAYIFAGPIFNDYSSVGYSLLLKKEKAIIVHPDRVVVANGPTFGCVLMSDFFRELAKRVKRNETAYENYERIFVPEGKPLKCKPGEPLRVNAMFQHIQKMLSSETAVIAETGDSWFNCQKLKLPKGCGYEFQMQYGSIGWSVGATLGYAQATPEKRVLSFIGDGSFQVTAQDISTMIRNGQKAIIFLINNGGYTIEVEIHDGPYNVIKNWNYTGLVDAIHNGEGKCWTTKVRYEEELVEAIKTATTEKKDSLCFIEVIVHKDDTSKELLEWGSRVSAANGRPPNPQ

SEQ ID NO: 974 - protein, 592 aa, Arabidopsis thaliana
MDVRSLPSNGVATIQDSAPTAATILGSSAATLGRHLSRRLVQAGVTDIFTVPGDFNLSLLDQLIANPELNNIGCCNELNAGYAADGYARSRGVGACVVTFTVGGLSVLNAIAGAYSENLPVICIVGGPNSNDFGTNRILHHTIGLPDFSQELRCFQTVTCYQAVVNHLEDAHEQIDKAIATALRESKPVYISISCNLAAIPHPTFASYPVPFDLTPRLSNKDCLEAAVEATLEFLNKAVKPVMVGGPKLRVAKARDAFVELADASGYPVAVMPSAKGFVPENHPHFIGTYWGAVSTLFCSEIVESADAYIFAGPIFNDYSSVGYSLLLKKEKAIIVHPDSVVVANGPTFGCVRMSEFFRELAKRVKPNKTAYENYHRIFVPEGKPLKCKPREPLRINAMFQHIQKMLSNETAVIAETGDSWFNCQKLKLPKGCGYEFQMQYGSIGWSVGATLGYAQATPEKRVLSFIGDGSFQVTAQDVSTMIRNGQKTIIFLINNGGYTIEVEIHDGPYNVIKNWNYTGLVDAIHNGEGKCWTTKVRYEEELVEAINTATLEKKDSLCFIEVIVHKDDTSKELLEWGSRVSAANGRPPNPQ

SEQ ID NO: 975 - protein, 545 aa, Arabidopsis thaliana
MMSFEMNDRKKIGLGLTGFGVFFSFLGIVFVFDKGLLAMGNILFISGVSLTIGFKSTMQFFMKRQNYKGTISFGVGFFFVIIGWPILGMMLETYGFFVLFSSLTSTGASVCRSSLPSRVERRFTELDAAEQAIKISGEVIHWREMKSSRMKFAKKLKSIRAGEYLNQDRILQVLSAADEFLPKISNHIPQITSAASIWRTPQKSENQIANVTELLENVRQGEEEASGNFVGDEENVRPPVNQIPRVPCDRKESKLAVSCGSDTGIGRKSFGSGFRRPDLNSTTLFDPKLLEAFELAALCFRKIKDFSREARVNDEDDIVFPEEEEIRKDGNSIPPVISVVEYRRKDENVVVLHKDDGNALQIVNAIREEVIGEEDIGKDGNTLMDPLLEFEERCPPGGEESVVFYTTTLRGIRKTFDDCNMIRFLLDSFKVKYYERDVSMHREYREELRRISAAETEVLPPVLFVKGRCIGGAQRVLGLHEQGKFKILFEGIPITGDERCRRCDGFRFLMCDGCRGSRRIISGDGSRIQCLICNENGLIVCVGCS

SEQ ID NO: 976 - protein, 587 aa, Arabidopsis thaliana
  misc_feature (54)..(54): Xaa can be any naturally occurring amino acid
  misc_feature (76)..(76): Xaa can be any naturally occurring amino acid
  misc_feature (117)..(117): Xaa can be any naturally occurring amino acid
  misc_feature (129)..(129): Xaa can be any naturally occurring amino acid
  unsure (1)..(587): unsure at all Xaa locations
MEVQSSSNNGGHSSFSSLRVYLNSLSATPSRLSRRAISVSTSSDEMSRVRAVSXGEQMRRTLRWYDLIGLGIRGNXVGAGVFVTTGRASRLDAGPSIVVSYAIAGLCALLSAFCYTXEFAVHLPVAGGXAFSYIRITFGEFPAFFTGANLVMDYVMSNAAVSRSFTAYLGTAFGISTSKWRFVVSGLPKGFNEIDPVAVLVVLVITVIICCSTRESSKVNMIMTAFHIAFIFFVIVMGFIKGDSKNLSSPANPEHPSGFFPFGAAGVFNGAAMVYLSYIGYDAVSTMAEEVENPVKDIPVGVSGSVAIVTVLYCLMAVSMSMLLPYDLIDPEAPFSAAFRGSNGWEWVTKVVGIGASFGILTSLLVAMLGQARYMCVIGRSRVVPFWFAKIHPKTSTPVNASTFLGIFTAALALFTDLNVLLNLVSIGTLFVFYMVANALIFRRYVPVGPTKPWPTLCFLTLFSITSLVFTLIWKLVPEGKPKAFMLGASAVVAIAIVLSFQCVVPQARKPELWGVPFMPWTPCVSIFLNIFLLGSLDAPSYVRFGFFSGLIVLVYLFYGVHASSDAEANGSFGVKDGQVMKELIEV

SEQ ID NO: 977 - protein, 324 aa, Arabidopsis thaliana
MASNKLISILVLVVTLLLQGDNNYVVEAQLTTNFYSTSCPNLLSTVQTAVKSAVNSEARMGASILRLFFHDCFVNGCDGSILLDDTSSFTGEQNAAPNRNSARGFNVIDNIKSAVEKACPGVVSCADILAIAARDSVVALGGPNWNVKVGRRDARTASQAAANSNIPAPTSSLSQLISSFSAVGLSTRDMVALSGAHTIGQSRCTNFRARIYNETNINAAFATTRQRTCPRASGSGDGNLAPLDVTTAASFDNNYFKNLMTQRGLLHSDQVLFNGGSTDSIVRGYSNNPSSFNSDFTAAMIKMGDISPLTGSSGEIRKVCGRTN

SEQ ID NO: 978 - protein, 967 aa, Arabidopsis thaliana
MRRIETMKGLFFCLGMVVFMLLGSVSPMNNEGKALMAIKASFSNVANMLLDWDDVHNHDFCSWRGVFCDNVSLNVVSLNLSNLNLGGEISSALGDLMNLQSIDLQGNKLGGQIPDEIGNCVSLAYVDFSTNLLFGDIPFSISKLKQLEFLNLKNNQLTGPIPATLTQIPNLKTLDLARNQLTGEIPRLLYWNEVLQYLGLRGNMLTGTLSPDMCQLTGLWYFDVRGNNLTGTIPESIGNCTSFEILDVSYNQITGVIPYNIGFLQVATLSLQGNKLTGRIPEVIGLMQALAVLDLSDNELTGPIPPILGNLSFTGKLYLHGNKLTGQIPPELGNMSRLSYLQLNDNELVGKIPPELGKLEQLFELNLANNNLVGLIPSNISSCAALNQFNVHGNFLSGAVPLEFRNLGSLTYLNLSSNSFKGKIPAELGHIINLDTLDLSGNNFSGSIPLTLGDLEHLLILNLSRNHLNGTLPAEFGNLRSIQIIDVSFNFLAGVIPTELGQLQNINSLILNNNKIHGKIPDQLTNCFSLANLNISFNNLSGIIPPMKNFTRFSPASFFGNPFLCGNWVGSICGPSLPKSQVFTRVAVICMVLGFITLICMIFIAVYKSKQQKPVLKGSSKQPEGSTKLVILHMDMAIHTFDDIMRVTENLDEKYIIGYGASSTVYKCTSKTSRPIAIKRIYNQYPSNFREFETELETIGSIRHRNIVSLHGYALSPFGNLLFYDYMENGSLWDLLHGPGKKVKLDWETRLKIAVGAAQGLAYLHHDCTPRIIHRDIKSSNILLDGNFEARLSDFGIAKSIPATKTYASTYVLGTIGYIDPEYARTSRLNEKSDIYSFGIVLLELLTGKKAVDNEANLHQMILSKADDNTVMEAVDAEVSVTCMDSGHIKKTFQLALLCTKRNPLERPTMQEVSRVLLSLVPSPPPKKLPSPAKVQEGEERRESHSSDTTTPQWFVQFREDISKSSL

SEQ ID NO: 979 - protein, 513 aa, Arabidopsis thaliana
MATLFLTILLATVLFLILRIFSHRRNRSHNNRLPPGPNPWPIIGNLPHMGTKPHRTLSAMVTTYGPILHLRLGFVDVVVAASKSVAEQFLKIHDANFASRPPNSGAKHMAYNYQDLVFAPYGHRWRLLRKISSVHLFSAKALEDFKHVRQEEVGTLTRELVRVGTKPVNLGQLVNMCVVNALGREMIGRRLFGADADHKADEFRSMVTEMMALAGVFNIGDFVPSLDWLDLQGVAGKMKRLHKRFDAFLSSILKEHEMNGQDQKHTDMLSTLISLKGTDLDGDGGSLTDTEIKALLLNMFTAGTDTSASTVDWAIAELIRHPDIMVKAQEELDIVVGRDRPVNESDIAQLPYLQAVIKENFRLHPPTPLSLPHIASESCEINGYHIPKGSTLLTNIWAIARDPDQWSDPLAFKPERFLPGGEKSGVDVKGSDFELIPFGAGRRICAGLSLGLRTIQFLTATLVQGFDWELAGGVTPEKLNMEESYGLTLQRAVPLVVHPKPRLAPNVYGLGSG

SEQ ID NO: 980 - protein, 677 aa, Arabidopsis thaliana
MKERDSESFESLSHQVLPNTSNSTHMIQMAMANSGSSAAAQAGQDQPDRSKWLLDCPEPPSPWHELKRQVKGSFLTKAKKFKSLQKQPFPKQILSVLQAIFPIFGWCRNYKLTMFKNDLMAGLTLASLCIPQSIGYATLAKLDPQYGLYTSVVPPLIYALMGTSREIAIGPVAVVSLLISSMLQKLIDPETDPLGYKKLVLTTTFFAGIFQASFGLFRLGFLVDFLSHAAIVGFMGGAAIVIGLQQLKGLLGITNFTTNTDIVSVLRAVWRSCQQQWSPHTFILGCSFLSFILITRFIGKKYKKLFWLPAIAPLIAVVVSTLMVFLTKADEHGVKTVRHIKGGLNPMSIQDLDFNTPHLGQIAKIGLIIAIVALTEAIAVGRSFAGIKGYRLDGNKEMVAIGFMNVLGSFTSCYAATGSFSRTAVNFAAGCETAMSNIVMAVTVFVALECLTRLLYYTPIAILASIILSALPGLININEAIHIWKVDKFDFLALIGAFFGVLFASVEIGLLVAVVISFAKIILISIRPGIETLGRMPGTDTFTDTNQYPMTVKTPGVLIFRVKSALLCFANASSIEERIMGWVDEEEEEENTKSNAKRKILFVVLDMSSLINVDTSGITALLELHNKLIKTGVELVIVNPKWQVIHKLNQAKFVDRIGGKVYLTIGEALDACFGLKV

SEQ ID NO: 981 - protein, 578 aa, Arabidopsis thaliana
MCGILAVLGCVDNSQAKRSRIIELSRRLRHRGPDWSGLHCYEDCYLAHERLAIVDPTSGDQPLYNEDKTIAVTVNGEIYNHKALRENLKSHQFRTGSDCEVIAHLYEEHGEEFVDMLDGMFAFVLLDTRDKSFIAARDAIGITPLYIGWGLDGSVWFASEMKALSDDCEQFMCFPPGHIYSSKQGGLRRWYNPPWFSEVVPSTPYDPLVVRNTFEKAVIKRLMTDVPFGVLLSGGLDSSLVASVALRHLEKSEAACQWGSKLHTFCIGLKGSPDLKAGREVADYLGTRHHELHFTVQDGIDAIEEVIYHVETYDVTTIRASTPMFLMSRKIKSLGVKMVLSGEGSDEIFGGYLYFHKAPNKKEFHEETCRKIKALHQYDCLRANKSTSAWGVEARVPFLDKEFINVAMSIDPEWKMIRPDLGRIEKWVLRNAFDDEKNPYLPKHILYRQKEQFSDGVGYSWIDGLKDHANKHVSETMLMNASFVFPDNTPLTKEAYYYRTIFEKFFPKSAARATVPGGPSVACSTAKAVEWDAAWSQNLDPSGRAALGVHVSAYGEDKTEDSRPEKLQKLAEKTPAIV

SEQ ID NO: 982 - protein, 168 aa, Arabidopsis thaliana
MQEQATSSLAASSLPSSSERSSSSAPHLEIKEGIESDEEIRRVPEFGGEAVGKETSGRESGSATGQERTQATVGESQRKRGRTPAEKENKRLKRLLRNRVSAQQARERKKAYLSELENRVKDLENKNSELEERLSTLQNENQMLRHILKNTTGNKRGGGGGSNADASL

SEQ ID NO: 983 - protein, 344 aa, Arabidopsis thaliana
MADSSDSVSIDMEALSLGGQEHLVETTYGPVCVAVCGDPDKPALITYPDIALNYMFCFQGLLFCPEASSLLLHNFCIYHISPLGHELGAPMISVDAPLLSADDLADQIVEVLNYFGLGAVMCMGVTAGAYILTLFAMKYRQRVLGLILVSPLCQAPSWSEWLCNKVMSNLLYYYGTCGVVKEMLLKRYFSKEVRGNGHVPESDIVQECRRLLSERQSTNVWRFLEAINGRVDLSEGLRKLQCRTLIFIGENSAYHSEAVHMTTKLDRRYGALVEVQGSGSLVSEEQPQAMIIPMEYFLMGYGLYRPTQSVSPRSPLSPTRISPELLSPENMGLKLKPIKTRLAL

SEQ ID NO: 984 - protein, 155 aa, Arabidopsis thaliana
MDLGRFPIISILEDMLEVPEDHNNEKTRNNPSRVYMRDAKAMAATPADVIEHPNAYAFVVDMPGIKGDEIKVQVENDNVLVVSGERQRENKENEGVKYVRMERRMGKFMRKFQLPENADLDKISAVCHDGVLKVTVQKLPPPEPKKPKTIQVQVA

SEQ ID NO: 985 - protein, 156 aa, Arabidopsis thaliana
MDLEFGRFPIFSILEDMLEAPEEQTEKTRNNPSRAYMRDAKAMAATPADVIEHPDAYVFAVDMPGIKGDEIQVQIENENVLVVSGKRQRDNKENEGVKFVRMERRMGKFMRKFQLPDNADLEKISPACNGGVLEVTNPKLPPPEPRNPRQNKVQFA

SEQ ID NO: 986 - protein, 569 aa, Arabidopsis thaliana
MAATRVRCCHSNAAFTRLPLTRHRNSPTLPISLNRVDFPTLKKLSLPIGDGSSIRKVSGSGSRNIVRAVLEEKKTEAITEVDEKGITCVMKFGGSSVASAERMKEVADLILTFPEESPVIVLSAMGKTTNNLLLAGEKAVSCGVSNASEIEELSIIKELHIRTVKELNIDPSVILTYLEELEQLLKGIAMMKELTLRTRDYLVSFGECLSTRIFAAYLNTIGVKARQYDAFEIGFITTDDFTNGDILEATYPAVAKRLYDDWMHDPAVPIVTGFLGKGWKTGAVTTLGRGGSDLTATTIGKALGLKEIQVWKDVDGVLTCDPTIYKRATPVPYLTFDEAAELAYFGAQVLHPQSMRPAREGEIPVRVKNSYNPKAPGTIITKTRDMTKSILTSIVLKRNVTMLDIASTRMLGQVGFLAKVFSIFEELGISVDVVATSEVSISLTLDPSKLWSRELIQQELDHVVEELEKIAVVNLLKGRAIISLIGNVQHSSLILERAFHVLYTKGVNVQMISQGASKVNISFIVNEAEAEGCVQALHKSFFESGDLSELLIQPRLGNGSPVRTLQVEN

SEQ ID NO: 987 - protein, 544 aa, Arabidopsis thaliana
MASLQLYGVKTPGLALSSKRLEFASKGACFSVTLPSSSAVFRDVEHSCRNIGLRVSCEALRVDLLQRKEPETCDSSGTGKELTCVMKFGGSSVESAERMKEVANLILSFPDERPVIVLSAMGKTTNKLLKAGEKAVTCGVTNVESIEELSFIKELHLRTAHELGVETTVIEKHLEGLHQLLKGISMMKELTLRTRDYLVSFGECMSTRLFSAYLNKIGHKARQYDAFEIGFITTDDFTNADILEATYPAVSKTLVGDWSKENAVPVVTGYLGKGWRSCAITTLGRGGSDLTATTIGKALGLREIQVWKDVDGVLTCDPNIYPGAQSVPYLTFDEAAELAYFGAQVLHPLSMRPARDGDIPVRVKNSYNPTAPGTVITRSRDMSKAVLTSIVLKRNVTMLDIASTRMLGQYGFLAKVFTTFEDLGISVDVVATSEVSISLTLDPAKLWGRELIQRVNELDNLVEELEKIAVVKLLQRRSIISLIGNVQKSSLILEKVFQVFRSNGVNVQMISQGASKVNISLIVNDEEAEQCVRALHSAFFETDP

SEQ ID NO: 988 - protein, 548 aa, Arabidopsis thaliana [sequence omitted]

SEQ ID NO: 989 - protein, 357 aa, Arabidopsis thaliana
  misc_feature (291)..(291): Xaa can be any naturally occurring amino acid
  unsure (1)..(357): unsure at all Xaa locations
MSSLADLINLDLSDSTDQIIAEYIWIGGSGLDMRSKARTLPGPVTDPSQLPKWNYDGSSTGQAPGDDSEVIIYPQAIFKDPFRRGNNILVMCDAYTPAGEPIPTNKRHAAAKIFEDPSVVAEETWYGIEQEYTLLQKDIKWPVGWPVGGFPGPQGPYYCGVGADKAFGRDIVDSHYKACLYAGINVSGTNGEVMPGQWEFQVGPTVGIAAADQVWVARYILERITELAGVVLSLDPKPIPGDWNGAGAHTNYSTKSMREDGGYEVIKKAIEKLGLRHKEHIAAYGEGNERXRLTGKHETADINTFLWGVANRGASIRVGRDTEQAGKGYFEDRRPASNMDPYTVTSMIAESTILWKP

SEQ ID NO: 990 - protein, 851 aa, Arabidopsis thaliana
MEDRHRYLFFIFAIIHYVQAQQGFISLDCGLPSNEPPYIEPVTGLVFSSDADHIPSGISGRIQKNLEAVHIKPYLFLRYFPDGLRNCYTLDVLQNRRYMIKAVFVYGNYDGYNDYPSFDLYLGPNKWVRVDLEGKVNGSVEEIIHIPSSNSLQICLVKTGNSLPFISALELRLLRNDTYVVQDVSLKHLFRRYYRQSDRLIRYPDDVYDRVWSPFFLPEWTQITTSLDVNNSNNYEPPKAALTSAATPGDNGTRLTIIWTLDNPDEQIHLYVHFAELEPVGENTDEALRTLFTRTFYFVVNGKISYDESITPLDLAVSTVETVVNKCDGGNCSLQLVRSEASPGVRVPLVNAMEAFTAIKFPHSETNPDDVWYIFNSMTVISIKVIQATYELSRVDWQGDPCLPQQFLWTGLNCSYMNMSTSPRIISLDLSNNKLTGGVPEFLANMKSLLFINLSNNNLVGSIPQALLDRKNLKLEFEGNPKLCATGPCNSSSGNKETTVIAPVAAAIAIFIAVLVLIIVFIKKRPSSIRALHPSRANLSLENKKRRITYSEILLMTNNFERVIGEGGFGVVYHGYLNDSEQVAVKVLSPSSSQGYKEFKAEVELLLRVHHINLVSLVGYCDEQAHLALIYEYMANGDLKSHLSGKHGDCVLKWENRLSIAVETALGLEYLHSGCKPLMVHRDVKSMNILLDEHFQAKLADFGLSRSFSVGEESHVSTGVVGTPGYLDPEYYRTYRLTEKSDVYSFGIVLLEIITNQPVLEQANENRHIAERVRTMLTRSDISTIVDPNLIGEYDSGSVRKALKLAMSCVDPSPVARPDMSHVVQELKQCIKSENLRLRTGLNQVIDSKSS

SEQ ID NO: 991 - protein, 289 aa, Arabidopsis thaliana
MNLWVSIFLVSAIAGSCLPSGFAYVDVCNHEFEVFRSVIEQKCPRSLYPSPPIEVDGDLLDKLMDANHGNAYISILFYTSRCPFSRAVRPKFDVLSSMFPHITHLIVEQSQALPSVFSRYGIHSLPSILMVNQTMKMRYHGPKDLASLIQFYKETTGLKPVQYMDEGEPTSLDTDGNLITWLHNGSSIREIAEREPYMLLALMFLSLKLAILIFPIMGSRLKTLWALYVPHLSLGILGETSQLFGRALHMIDVRRLWIKLRLTKTRNFQERAKNALASVSLGKSSSQSA

SEQ ID NO: 992 - protein, 467 aa, Arabidopsis thaliana; identical to SEQ ID NO: 608

SEQ ID NO: 993 - protein, 110 aa, Arabidopsis thaliana
MSGVWVFKNGVIRLVENPNQSGSDTQNRRKVMVYLPTGEVVSSYSTLEQILQSLGWERYFGGGDTDLLQFHKRSSIDLISLPRDFTKFNSVYMYDIVVKNPNYFHVRDSH

SEQ ID NO: 994 - protein, 306 aa, Arabidopsis thaliana
MPTLYKKAGCLGIREFMDSSMSTKKKTKLSVRNQTCFKKSSLSSSSTAKKTTNLSMREQTMFKKALELSTLCNIDVCVIYYGRDGKLIKTWPEDQSKVRDMAERFSRLHERERCKKRTNLSLFLRKKILDDTKLSEKVLEMEDSLESGLRVLQDKLLLLQPEKNQTEFGQTRAVSSTTNPLSPPPSLIEDHRHQQWTEPLMSGVSNTEQDLSTSSLSQNQSRISVFLYNHDNRSFYQVPDSVSSFDSLTSTGLLGEQGSGLGSNFDLPPMVFPPQMQTQTPLVPFDQFAAWNQAPSFADPMMFPYN

SEQ ID NO: 995 - protein, 190 aa, Arabidopsis thaliana
MDLISHQPNKNPNSSTQLTPPSSSRYENQKRRDWNTFCQYLRNHRPPLSLPSCSGAHVLEFLRYLDQFGKTKVHHQNCAFFGLPNPPAPCPCPLRQAWGSLDALIGRLRAAYEENGGPPEANPFGSRAVRLFLREVRDFQAKARGVSYEKKRKRVNRQKPQTQPPLQLQQQQQQPQQGQSMMANYSGATV

SEQ ID NO: 996 - protein, 858 aa, Arabidopsis thaliana
MNEKLRILFSFLCFFYVLLVSPSQSNGQDISLSCGASEPAVDQDKKKWEPDTKFLKTPNTVHAPATYQDPSLLSTVPYMTSRIFTAPATYEIPVKGDKRHMLRLHFYPSTYTGLNILDSYFSVAANDLTLLSNFSAAITCQALTQAYLVREYSLAPSEKDVLSIIFTPSDKHPKAFAFINGIEVIPMPELFDTASLVGFSDQTSDTKTANLQTMFRLNVGGQDIPGSQDSGGLTRTWYNDAPYIFSAGLGVTLQASNNFRIDYQKMPVSTAPADVYKTARSQGPNGDINMKSNLTWMFQVDTNFTYIMRLHFCEFQLAKINQKVFNIFINNRTAQGDTNPADILGWTGGKGIPTYKDYAIYVDANTGGGGEEISLQMTPSTFGQPEYYDSQLNGLEIFKIDTMKNLAGPNPKPSPMQANEDVKKDFQGDKRITAFVIGSAGGVAAVLFCALCFTMYQRKRKFSGSDSHTSSWLPIYGNSHTSATKSTISGKSNNGSHLSNLAAGLCRRFSLSEIKHGTHNFDESNVIGVGGFGKVYKGVIDGGTKVAIKKSNPNSEQGLNEFETEIELLSRLRHKHLVSLIGYCDEGGEMCLIYDYMSLGTLREHLYNTKRPQLTWKRRLEIAIGAARGLHYLHTGAKYTIIHRDVKTTNILLDENWVAKVSDFGLSKTGPNMNGGHVTTVVKGSFGYLDPEYFRRQQLTEKSDVYSFGVVLFEVLCARPALNPSLSKEQVSLGDWAMNCKRKGTLEDIIDPNLKGKINPECLKKFADTAEKCLSDSGLDRPTMGDVLWNLEFALQLQETADGSRHRTPSNGGGSVDLGGGGGGVTVNISAGESDLGDDLSSEENSGIFSQIVNPKGR

SEQ ID NO: 997 - protein, 187 aa, Arabidopsis thaliana
MTRVYVGNLDPRVTERELEDEFKAFGVLRNVWVARRPPGYAFLEFDDERDALDAISALDRKNGWRVELSHKDKGGRGGGGGRRGGIEDSKCYECGELGHFARECRRGRGSVRRRSPSPRRRRSPDYGYARRSISPRGRRSPPRRRSVTPPRRGRSYSRSPPYRGSRRDSPRRRDSPYGRRSPYANGV

SEQ ID NO: 998 - protein, 406 aa, Arabidopsis thaliana
MKNKTQKYIDKKTWNYINMDHHHAFASHSYNSVFISKKAMEESRSYRKERKQTKKKTGRGSGSRSIHIKMRKLRVLIPGGRRLNQPDLLLSKTADYIMHLELRISILHLLVRYYLKKKRSNLSSSPNESNQNPEFSDSDTYQRQLQQLFHLHDSGLDQALIDALPVFLYKEIKGTKEPFDCAVCLCEFSEDDKLRLLPNCSHAFHIDCIDTWLLSNSTCPLCRGTLFSLGHQFEYPDFNFGFFAGDDGGGGVRVSPVQKPAENEIGKRVFSVRLGKFRSSNIVNNGEVVVGGGGETSSSSLDNRRCFSMGSYQYIVAESDLVVALCPNNEGLKNNKDVEGKKINMRSKGESFSVSKIWQWSNKRSKFPNNHPSETNLVVGGSSSSSSYVCSGSDGLSLNGRRFQGP

SEQ ID NO: 999 - protein, 448 aa, Arabidopsis thaliana
  misc_feature (253)..(253): Xaa can be any naturally occurring amino acid
  unsure (1)..(448): unsure at all Xaa locations
MTKKMRRVGKYEVGRTIGEGTFAKVKFARNTDTGDNVAIKIMAKSTILKNRMVDQIKREISIMKIVRHPNIVRLYEVLASPSKIYIVLEFVTGGELFDRIVHKGRLEESESRKYFQQLVDAVAHCHCKGVYHRDLKPENLLLDTNGNLKVSDFGLSALPQEGVELLRTTCGTPNYVAPEVLSGQGYDGSAADIWSCGVILFVILAGYLPFSETDLPGLYRKINAAEFSCPPWFSAEVKFLIHRILDPNPKTSXRIQIQGIKKDPWFRLNYVPIRAREEEEVNLDDIRAVFDGIEGSYVAENVERNDEGPLMMNAFEMITLSQGLNLSALFDRRQDFVKRQTRFVSRREPSEIIANIEAVANSMGFKSHTRNFKTRLEGLSSIKAGQLAVVIEIYEVAPSLFMVDVRKAAGETLEYHKFYKKLCSKLENIIWRATEGIPKSEILRTITF

SEQ ID NO: 1000 - protein, 431 aa, Arabidopsis thaliana
  misc_feature (39)..(39): Xaa can be any naturally occurring amino acid
  unsure (1)..(431): unsure at all Xaa locations
MAQILAASPTCQMRVPKHSSVIASSSKLWSSVVLKQKKXQSNNKVRGFRVLALQSDNSTVNRVETLLNLDTKPYSDRIIAEYIWIGGSGIDLRSKSRTIEKPVEDPSELPKWNYDGSSTGQAPGEDSEVILYPQAIFRDPFRGGNNILVICDTWTPAGEPIPTNKRAKAAEIFSNKKVSGEVPWFGIEQEYTLLQQNVKWPLGWPVGAFPGPQGPYYCGVGADKIWGRDISDAHYKACLYAGINISGTNGEVMPGQWEFQVGPSVGIDAGDHVWCARYLLERITEQAGVVLTLDPKPIEGDWNGAGCHTNYSTKSMREEGGFEVIKKAILNLSLRHKEHISAYGEGNERRLTGKHETASIDQFSWGVANRGCSIRVGRDTEAKGKGYLEDRRPASNMDPYIVTSLLAETTLLWEPTLEAEALAAQKLSLNV

SEQ ID NO: 1001 - protein, 1111 aa, Arabidopsis thaliana
MSSNTSRSCSTRSRQNSRVSSQVLVDAKLHGNFEESERLFDYSASINLNMPSSSCEIPSSAVSTYLQKIQRGMLIQPFGCLIVVDEKNLKVIAFSENTQEMLGLIPHTVPSMEQREALTIGTDVKSLFLSPGCSALEKAVDFGEISILNPITLHCRSSSKPFYAILHRIEEGLVIDLEPVSPDEVPVTAAGALRSYKLAAKSISRLQALPSGNMLLLCDALVKEVSELTGYDRVMVYKFHEDGHGEVIAECCREDMEPYLGLHYSATDIPQASRFLFMRNKVRMICDCSAVPVKVVQDKSLSQPISLSGSTLRAPHGCHAQYMSNMGSVASLVMSVTINGSDSDEMNRDLQTGRHLWGLVVCHHASPRFVPFPLRYACEFLTQVFGVQINKEAESAVLLKEKRILQTQSVLCDMLFRNAPIGIVTQSPNIMDLVKCDGAALYYRDNLWSLGVTPTETQIRDLIDWVLKSHGGNTGFTTESLMESGYPDASVLGESICGMAAVYISEKDFLFWFRSSTAKQIKWGGARHDPNDRDGKRMHPRSSFKAFMEIVRWKSVPWDDMEMDAINSLQLIIKGSLQEEHSKTVVDVPLVDNRVQKVDELCVIVNEMVRLIDTAAVPIFAVDASGVINGWNSKAAEVTGLAVEQAIGKPVSDLVEDDSVETVKNMLALALEGSEERGAEIRIRAFGPKRKSSPVELVVNTCCSRDMTNNVLGVCFIGQDVTGQKTLTENYSRVKGDYARIMWSPSTLIPPIFITNENGVCSEWNNAMQKLSGIKREEVVNKILLGEVFTTDDYGCCLKDHDTLTKLRIGFNAVISGQKNIEKLLFGFYHRDGSFIEALLSANKRTDIEGKVTGVLCFLQVPSPELQYALQVQQISEHAIACALNKLAYLRHEVKDPEKAISFLQDLLHSSGLSEDQKRLLRTSVLCREQLAKVISDSDIEGIEEGYVELDCSEFGLQESLEAVVKQVMELSIERKVQISCDYPQEVSSMRLYGDNLRLQQILSETLLSSIRFTPALRGLCVSFKVIARIEAIGKRMKRVELEFRIIHPAPGLPEDLVREMFQPLRKGTSREGLGLHITQKLVKLMERGTLRYLRESEMSAFVILTEFPLI

SEQ ID NO: 1002 - protein, 349 aa, Arabidopsis thaliana
MVKGTKRKIAIETIQKRDSLRVTCTKRRKGLYSKASQLCLLSDAQIAILATPPSSESDVSFYSFGHSSVDAVVSAFLSGKRPVSAPKDNKETREDVGICLTRKNLGLGFWWNDESLVRSENPQEISEAIGSMWTLLSNLKELRADEACVNDHKDLKKNEKSDVHGTQDQTLIFQSASAVCCIPENLNDITQEPNQTLDIQSSSSAICCVPDKSPEIFNEITEEQDQILSICETFCVTDNNNNNNNNAALPEVNLYYNQDMAIDQLIDFNTPFESSIDDWFSDNTTHQETTSASILNDVGVDDQVSVDTNPFSYFQSLEDADLVFQRCLDGDNLRFSDCFNDFANTIAAV

SEQ ID NO: 1003 - protein, 426 aa, Arabidopsis thaliana
MTTIRSSPSSSRCSNSSSSSSYSLASTSLSNRLETIFKKASELCTLCDIEACVIYYGPDGELKTWPKEREKVRDIALRFNQLNEALRHKKSVNLHGFLNKKKKNKGLKNPNKKKKTSLKNVNVLKYPLADHYSPDQVSQLTQSLELNVSKFQERLRFLESQKQNETKPDHQSLTSISSLNQSLNPSQFSLFMYNHGYNTLSQIPVSASNFNQDYISALLEQSELKSQIMKQEVCGYEQNMCMSNHGDATLSQIPFSASNFNQDFSANNNFQHSFVSNTQDYYSVQKSVNNNYGLKNQLMKHDLCGYEHNMCMSNHGDATFSQIPLSASNFNQDFSVSIQEESGLMQQELCGYDQNQNMSMGDITNNNFQVTCASVLESVNNFGLNQLMHKEFYGCHQNMSMGNINNNSFQHPWVSNADHTRRYKNL

SEQ ID NO: 1004 - protein, 355 aa, Arabidopsis thaliana
MAIRSLPSSSRCSSSSSSSSYSLASTSLSNRLETIFKKASELCTLCDIEACVIYYGPDGELKTWPPEREKVEDIALRYSQLNEALRRKKSVTLYDFLNKKKDKTNLEKKAKITDNDDLKTCLKNVNILKYPLADHYSPDQVSQLIQSLEPHVSKVRERIRFVESQKHKETKPDHQSLASSSLNHQTQSLNPSQFSLFMYNHGDNTLSQIPVSASNFNQDYFSALLEQSELKSQIMKQDLCGYEQNMCMSNHGDATLSQIPLSASNLNQDFSALLQDESGLMQQELCGYDQNMFMNNNNFQHSFVSNTQDHSAPVVQESVNNNYGLMPHVPCGYDQNLFTSDITNNNLLINNSMFL

SEQ ID NO: 1005 - protein, 329 aa, Arabidopsis thaliana
MAIRSLPSSSGCSNSSSSSSYSLASTSLSNRLETIFRKASELCTLCDIEACVIYYGPDGELKTWPPEREKVEDIALRYSQLNEALRRKKSVTLYDFLNKKKNKTNLEKKAKIKDNDLKRLSLEPHVSKVRERIRFVESQKHKETKPDHQSLASSSLNNQTQSLNPSQFSLFMYNHGDNILSQIPVSASNFNQDYFSALLEQSELKSQIMKQEVCGYEQNMCMSNNGDATLSQIPLSASNFNQEFSALLQEESGLMQQELCNYDQNMFMNNNNFQHSFVSNTQDHSAPAVQESVNNNYGLMPHVPCGYDQNLFTSDITNNNLLIDNSMFL

SEQ ID NO: 1006 - protein, 385 aa, Arabidopsis thaliana
MTMRSLPFSSSSYSLASTSLSNRLETIFKKASELCTLCDIEACVIYYGPDGELKTWPKEKEKVRDIALRYSQLNEALRSKKSVNLHGFLNKKKKKKKKGLKNPNNKRKTCLKKNVNVLKYPLADHYPPDQVSQLTQSLKLHVSKFQERLRFLESQKQTKPDHQSLTPSSLNHQTQSLNPRQFSLFMYNHGDNTLSQISVSASNFNQNYFSALLEQSELKNQLMKQDGYDQNQNMRMGDITNNNFQLPYFSKKEAVQESVNYFGMNQLMLKELYGCDQNMCMGNINSNSFQHPCVSKAQHYSAVEGSVNNQRQSELMQQELCGYEQNMCFTNNNFQVSNKEAVQESVTNFGLMQHELYGCDQNMSMGNIINNSFQQRLKHRTRICE

SEQ ID NO: 1007 - protein, 376 aa, Arabidopsis thaliana
MSWVRFTIEQKDGNFAYPPPFYKDPILSPPSPPPPSSGNRISPAVLFVIVILAVLFFISGLLHLLVRFLIKHPSATASSRSNRFPEISTSDALQRQLQQLFHLNDSGLDQAFIDALPVFHYKEIVGSAGGGGGNGAAQEPFDCAVCLCEFSEKDKLRLLPMCSHAFHLNCIDTWLQSNSTCPLCRGTLFSPGFSMENPMFDFDDIREDEEGVTENGSQKTMEIQEIVVEKGVLPVRLGKFKRLDNVGNGQGQDVVAGGETSSSNLDARRCFSMGSYQYILGNSELKVPFANDRLPRLKPQDKESEQTGNSSSEDNKKINTVAKGESFSVSKIWLWPKKDKFSSDAQRRLPSSSLNVDDLPKLPWMEEHKKLENDGR

SEQ ID NO: 1008 - protein, 214 aa, Arabidopsis thaliana
MEKRESSGGSGSGDAEVRKGPWTMEEDLILINYIANHGEGVWNSLAKSAGLKRTGKSCRLRWLNYLRPDVRRGNITPEEQLTIMELHAKWGNRWSKIAKHLPGRTDNEIKNFWRTKIQKYIIKSGETTTVGSQSSEFINHHATTSHVMNDTQETMDMYSPTTSYQHASNINQQLNYGNYVPESSSIMMPLSVDQSEQNYWSVDDLWPMNIYNGN

SEQ ID NO: 1009 - protein, 330 aa, Arabidopsis thaliana
MTMRSSSPSSSSSYSLAFTSLSNRLETIFKKASELCTLCDIEACVIYYGPDGELKTWPKEKEKVRDIALRYSLLNEALRRKKSVNLHGFLNKKKNKGLKNPNKKMKTSLKNVNILKYPLADHYPPDQVSPLIQSLELHVSKFQERLRFLESQKQNQTKPDHQSLTPSSLNHYTQSLNPSQFSLFMYNHGDNTLSQIPVSASNFNQDYFSALLEESELKNQLMKPEICGYDQNQNMSMGDITNNKFQDPCVSNKEAVQESVNNFGLNQLMYKEFYGCDQNMSMGNINSNSFQNPCVSNTQHYSAVEESVKNPWLNQLMQNELYGYGYAGFC

SEQ ID NO: 1010 - protein, 671 aa, Arabidopsis thaliana
  misc_feature (71)..(71): Xaa can be any naturally occurring amino acid
  misc_feature (82)..(82): Xaa can be any naturally occurring amino acid
  misc_feature (100)..(100): Xaa can be any naturally occurring amino acid
  unsure (1)..(671): unsure at all Xaa locations
MARSFGANSTVVLAIIFFGCLFAFSTAKEEATKLGSVIGIDLGTTYSCVGVYKNGHVEIIANDQGNRITPXSWVGFTDSERXLIGEAAKNQAAVNPERTXVFDVKRLIGRKFEDKEVQKDRKLVPYQIVNKDGKPYIQVKIKDGETKVFSPEEISAMILTKMKETAEAYLGKKIKDAVVTVPAYFNDAQRQATKDAGVIAGLNVARIINEPTAAAIAYGLDKKGGEKNILVFDLGGGTFDVSVLTIDNGVFEVLSTNGDTHLGGEDFDHRIMEYFIKLIKKKHQKDISKDNKALGKLRRECERAKRALSSQHQVRVEIESLFDGVDLSEPLTRARFEELNNDLFRKTMGPVKKAMDDAGLQKSQIDEIVLVGGSTRIPKVQQLLKDFFEGKEPNKGVNPDEAVAYGAAVQGGILSGEGGDETKDILLLDVAPLTLGIETVGGVMTKLIPRNTVIPTKKSQVFTTYQDQQTTVSIQVFEGERSLTKDCRLLGKFDLTGVPPAPRGTPQIEVTFEVDANGILNVKAEDKASGKSEKITITNEKGRLSQEEIDRMVKEAEEFAEEDKKVKEKIDARNALETYVYNMKNQVSDKDKLADKLEGDEKEKIEAATKEALEWLDENQNSEKEEYDEKLKEVEAVCNPIITAVYQRSGGAPGAGGESSTEEEDESHDEL

SEQ ID NO: 1011 - protein, 831 aa, Arabidopsis thaliana; identical to SEQ ID NO: 517

SEQ ID NO: 1012 - protein, 1047 aa, Arabidopsis thaliana
MYGEECVHVAVWGPCNKNAIKKLLKQVSHSRLALCRLRLLLPSSSSSLSFVFSVRGMGDGDEQSKELGGVSSSSRRCSSGTAGAANAEARMKFAAVDAITELVWSPSNGLSLRCADISFTGKAKLLSPNFFDIGLTNMAIHSNSTSIEDQEDHVDVELRNRDQVNQAMIGGSVEDMKPEMVEDKVETNDDIKNEEAGCSKRSSDSPKAMEGETRDLLVNEQLRMESAGSQEEGDKAHNRVDRLESMDENNLATLAVVACEGKGDYLPEGEAGPSGSYRRREKAKGKEKALSDENFGGDGEDEDEESFGSVESCNSAGLLSRGKKRPGFEEQLIFGSKRLKTLNQECLGSTSKLKQDSSFMNWISNMTKGIWKGNEEDNSPFVALTTTSNANGHGQVNAIVDQQQLSPCCVKENSGCRNTGFQSFFQSIYCPKKQSQDVVDMDFPNDVNAAPLQELPWIPEHCDISKGDDLSSSGNEIGPVAEPNISSGKVVFNQTSKTQSSENKREDKEPNISLMSLSKSKPNEEPKTCGEADGKVSPCLTNRNSGLKSLWISRFSSKGSFPQKKASETAKEANASASDAAKTRDSRKMLADKNVIRPSISSVDGPDKPDTVLPIVSSMRIESSEAMASLFARRLEAMKSIMPSGSLAENAEEEQRDLICFYCGKKGHCLRDCLEVTDTELRDLVQNISVRNGREEASSLCIRCFQLSHWAATCPNAPLYGSGAEGRAMKNALASTSGMKLPISGFTDVPRAVFDAVQVLRLSRTDVLKWINTKKSVSGLEGFFLRLRLGKWEEGLGGTGYYVARIDGDTEGQSSRRHSEKSLISVKVKGVTCLVESQFISNQDFLEEELKAWWQSAGKSARTSGYDGIPSAEELSRKIQQRKMVSSIQQWSVPIFVDMEPEVVAAGIVKKRTFKKFSFRGVDLDALLDMSIEDLVKHFSSRIRRRFSRGLTRKPMALIKKLRKAKMEAPAGEKPASVRTHLRNMIIVPEMIGSIIGVYNGKTFNQVEIKPEMIGHYLAEFSISYKPVKHGRPGVGATNSSRFIPLK

SEQ ID NO: 1013 - protein, 1103 aa, Arabidopsis thaliana
MEMAEGEGTTEENYDVDIATTASSLGGSGVFHIINDIVGFVLYMHQQIPSVLQDMSLEFEGLQTEFMDLETNLAEPQVKPLVRRKLMSRKREVKNEIKKLEKLMKTISSLRSALQLMIREAPGIQKVVLILGGSPLRPQNAYELLFTQRRDHVLGYEGDFAKSKAAEALSKKTIRALISTGAGSTSYPGPMRLFILVHAPPTLNLPQHFLPKRDFRYNRKFVPSKLRFKCRTQDNATNSPPTNDLIWYFSYSQFSSYTLNKFLTMPYCVIAGRRKKMIFKIEDVTVYFPYDNIYPEQYEYMVELKRALDAKGHCLLEMPTGTGKTIALLSLITSYRLSRPDSPIKLVYCTRTVHEMEKTLGELKLLHDYQVRHLGTQAKILALGLSSRKNLCVNTKVLAAENRDSVDAACRKRTASWVRALSTENPNVELCDFFENYEKAAENALLPPGVYTLEDLRAFGKNRGWCPYFLARHMIQFANVIVYSYQYLLDPKVAGFISKELQKESVVVFDEAHNIDNVCIEALSVSVRRVTLEGANRNLNKIRQEIDSSYYIIEIVQLVGRFKATDAGRLRAEYNRLVEGLALRGDLSGGDQWLANPALPHDILKEAVPGNIRRAEHFVHVLRRLLQYLGVRLDTENVEKESPVSFVSSLNSQAGIEQKTLKFCYDRLQSLMLTLEITDTDEFLPIQTVCDFATLVGTYARGFSIIIEPYDERMPHIPDPILQLSCHDASLAIKPVFDRFQSVVITSGTLSPIDLYPRLLNFTPVVSRSFKMSMTRDCICPMVLTRGSDQLPVSTKFDMRSDPGVVRNYGKLLVEMVSIVPDGVVCFFVSYSYMDGIIATWNETGILKEIMQQKLVFIETQDVVETTLALDNYRRACDCGRGAVFFSVARGKVAEGIDFDRHYGRLVVMYGVPFQYTLSKILRARLEYLHDTFQIKEGDFLTFDALRQAAQCVGRVIRSKADYGMMIFADKRYSRHDKRSKLPGWILSHLRDAHLNLSTDMAIHIAREFLRKMAQPYDKAGTMGRKTLLTQEDLEKMAETGQSKIVVAKIFTVVEVELKLAELVRRPNHLSPITASKTVEAHWALAKPNSWSSSSPTSRYYAG

SEQ ID NO: 1014 - protein, 243 aa, Arabidopsis thaliana
MYGQCNIESDYALLESITRHLLGGGGENELRLNESTPSSCFTESWGGLPLKENDSEDMLVYGLLKDAFHFDTSSSDLSCLFDFPAVKVEPTENFTAMEEKPKKAIPVTETAVKAKHYRGVRQRPWGKFAAEIRDPAKNGARVWLGTFETAEDAALAYDIAAFRMRGSRALLNFPLRVNSGEPDPVRITSKRSSSSSSSSSSSTSSSENGKLKRRRKAENLTSEVVQVKCEVGDETRVDELLVS

SEQ ID NO: 1015 - protein, 282 aa, Arabidopsis thaliana
MMMGKEDLGLSLSLGFAQNHPLQLNLKPTSSPMSNLQMFPWNQTLVSSSDQQKQQFLRKIDVNSLPTTVDLEEETGVSSPNSTISSTVSGKRRSTEREGTSGGGCGDDLDITLDRSSSRGTSDEEEDYGGETCRKKLRLSKDQSAVLEDTFKEHNTLNPKQKLALAKKLGLTARQVEVWFQNRRARTKLKQTEVDCEYLKRCVEKLTEENRRLEKEAAELRALKLSPRLYGQMSPPTTLLMCPSCERVAGPSSSNHNQRSVSLSPWLQMAHGSTFDVMRPRS

SEQ ID NO: 1016 - protein, 415 aa, Arabidopsis thaliana
MAPPVSDDSLQPRDVCVVGVARTPIGDFLGSLSSLTATRLGSIAIQAALKRAHVDPALVEEVFFGNVLTANLGQAPARQAALGAGIPYSVICTTINKVCAAGMKSVMLASQSIQLGLNDIVVAGGMESMSNVPKYLPDARRGSRLGHDTVVDGMMKDGLWDVYNDFGMGVCGEICADQYRITREEQDAYAIQSFERGIAAQNTQLFAWEIVPVEVSTGRGRPSVVIDKDEGLGKFDAAKLKKLRPSFKEDGGSVTAGNASSISDGAAALVLVSGEKALELGLHVIAKIRGYADAAQAPELFTTTPALAIPKAIKRAGLDASQVDYYEINEAFSVVALANQKLLGLDPERLNAHGGAVSLGHPLGCSGARILVTLLGVLRAKKGKYGVASICNGGGGASALVLEFMSEKTIGYSAL

SEQ ID NO: 1017 - protein, 879 aa, Arabidopsis thaliana
MLFWVLLSSFCVFCFSSPDGFLSLSCGGSSYTAAYNISWVSDNDYIETGNTTTVTYAEGNSTSSVPIRLFPDPQGRQCYKLPVRKDLSSVLIRATFVYRNYDSQNSPPAFHVSLGRRITSTVDLRTNDPWIEELVWPVNNDSLLLCLLAVKGRGIPVISSLEVRPLPLGSYKYSLEGSPDIILRRSYRINSGYTNGTIRYPSDPFDRIWDPDQSYSPFHASWSFNGLTKLNSFNITENPPASVLKTARILARKESLSYTLSLHTPGDYYIILYFAGILSLSPSFSVTINDEVKQSDYTVTSSEAGTLYFTQKGISKLNITLRKIKFNPQVSALEVYEILQIPPEASSTTVSALKVIEQFTGQDLGWQDDPCTPLPWNHIECEGNRVTSLFLSKINLRSISPTFGDLLDLKTLDLHNTSLTGAIQNVGSLKDLQKLNLSFNQLESFGSELEDLVNLEVLDLQNNSLQGSVPETLGKLKKLRLLNLENNNLVGPLPQSLNITGLEVRITGNPCLSFSSISCNNVSSTIDTPQVTIPINKKQRKQNRIAILLGVSGGALFATFLVFVFMSIFTRRQRNKERDITRAQLKMQNWNASRIFSHKEIKSATRNFKEVIGRGSFGAVYRGKLPDGKQVAVKVHLLSQIRHQNLVSFEGFCYEPKRQILVYEYLSGGSLADHLYGPRSKRHSLNWVSRLKVAVDAAKGLDYLHNGSEPRIIHRDVKSSNILLDKDMNAKVSDFGLSKQFTKADASHITTVVKGTAGYLDPEYYSTLQLTEKSDVYSFGVVLLELICGREPLSHSGSPDSFNLVLWARPNLQAGAFEIVDDILKETFDPASMKKAASIAIRCVGRDASGRPSIAEVLTKLKEAYSLQLSYLAASAHTD

SEQ ID NO: 1018 - protein, 1092 aa, Arabidopsis thaliana
MFLSSRTIFVGLCFLFVLAPCFTRATTNEVQVSCDSHNFNNGKHFRSCVDLPVLDSFLHYSYVRETGVLEVAYRHTNIESSSWIAWGINPTSKGMIGAQTLLAYRNSTSGFMRAYTSSINGYTPMLQEGPLSFRVTQLSAEYLNREMTIFATMVWPSNTTVVNHLWQDGPLKEGDRLGMHAMSGNHLKSMANLDLLSGQVMTTKAANDNMLLVKSIHGLVNAVCWGIFIPIGVMAASPDGFLSLSCGGSSYTAAYNISWVSDNDYIETGNTTTVTYAEGNSTSSVPIRLFPDPQGRQCYKLPVRKDLSSVLIRATFVYRNYDSQNSPPAFHVSLGRRITSTVDLRTNDPWIEELVWPVNNDSLLLCLLAVKGRGIPVISSLEVRPLPLGSYKYSLEGSPDIILRRSYRINSGYTNGTIRYPSDPFDRIWDPDQSYSPFHASWSFNGLTKLNSFNITENPPASVLKTARILARKESLSYTLSLHTPGDYYIILYFAGILSLSPSFSVTINDEVKQSDYTVTSSEAGTLYFTQKGISKLNITLRKIKFNPQVSALEVYEILQIPPEASSTTVSALKVIEQFTGQDLGWQDDPCTPLPWNHIECEGNRVTSLFLSKINLRSISPTFGDLLDLKTLNLSFNQLESFGSELEDLVNLEVLDLQNNSLQGSVPETLGKLKKLRLLNLENNNLVGPLPQSLNITGLEVRITGNPCLSFSSISCNNVSSTIDTPQVTIPINKKQRKQNRIAILLGVSGGALFATFLVFVFMSIFTRRQRNKERDITRAQLKMQNWNASRIFSHKEIKSATRNFKEVIGRGSFGAVYRGKLPDGKQVAVKVRFDRTQLGADSFINEVHLLSQIRHQNLVSFEGFCYEPKRQILVYEYLSGGSLADHLYGPRSKRHSLNWVSRLKVAVDAAKGLDYLHNGSEPRIIHRDVKSSNILLDKDMNAKVSDFGLSKQFTKADASHITTVVKGTAGYLDPEYYSTLQLTEKSDVYSFGVVLLELICGREPLSHSGSPDSFNLVLWARPNLQAGAFEIVDDILKETFDPASMKKAASIAIRCVGRDASGRPSIAEVLTKLKEAYSLQLSYLAASAHTD

SEQ ID NO: 1019 - protein, 356 aa, Arabidopsis thaliana
MPTLYKKAGCQFPLTTMVKKGGTKRKIAIETIQKRDSLRVTCTKRREGLYSKASQLCLLSDAQIAILATPPSSESNVSFYSFGHSSVDAVVSAFLSGQRPVPKDNKETREDVGICLTRNNLGLGFWWNDESLARSENPQEISEAIDSMRTLLRNLKELRADEALACNQAFVNDREDLKNNDKCDFVSDHETHDQTLILQSASPICCIPENLNEITQEPNQTLNIQSSTSAICCVPDNSPENFNEITEEQDQIRSICETFCVMDNNAALPEMNLDYDQDIGFDTPFESALNDWFSDNTTHQEISASILNAVVDDQVSVDLTPFSYFQRCLDGDNLRFSDCFKAFPIPCAPLRGNQTT

SEQ ID NO: 1020 - protein, 285 aa, Arabidopsis thaliana
MRFVPYLYEIERLWLSLVNYLSPRKNKNRRCGEIDKIRMVKKGGTKRKIAIETIQKSDYLRVTCTKRREGLFSKASQLCLLSDAQIAILATPPTSESNISFYSFGHSSVDAVVSSFLSGQRCVPLQEDTKEMREDVAICLSRTNLGLGFWWNNESLNKSENPQEISDAINSMLTLLSNLKELSGEEALVNDHKDLKKNERSDVVLQHGTQYETLNPNSNTTTICCVPDELPANSNEIVGISPNPLIMLEKKKSQIEEKFEKEWQVSVTRIENEATSSYAKRRRSI

SEQ ID NO: 1021 - protein, 309 aa, Arabidopsis thaliana
MPTLYKKAGSFQLTTMEEFTKVEEEMDVRRGPWTVEEDLELINYIASHGEGRWNSLARCAELKRTGKSCRLRWLNYLRPDVRRGNITLEEQLLILELHTRWGNRWSKIAQYLPGRTDNEIKNYWRTRVQKHAKQLKCDVNSQQFKDTMKYLWMPRLVERIQAASIGSVSMSSCVTTSSDQFVINNNNTNNVDNLALMSNPNGYITPDNSSVAVSPVSDLTECQVSSEVWKIGQDENLVDPKMTSPNYMDNSSGLLNGDFTKMQDQSDLNWFENINGMVPNYSDSFWNIGNDEDFWLLQQHQQVHDNGSF

SEQ ID NO: 1022 - protein, 406 aa, Arabidopsis thaliana
QHQHSSLSTTSTRSLLSHDRLTPHPRGRLQELATTSNTMSTDLLLQSSSKLSQKQDYIFHGGRRHVRPYYFEFISHVNKRWTGKTIVDLFADEFKGRPRDYYVGAVKSGRIKVDGEIVPVSYIVKSSQKITHFLHRHEPPVMIDDVVILHQEPDVVTVCKPASVPVHPCGQYRKNTIVGILDAEHDLGTLFSIHRLDRLVSGLLIIARTAAKADFFRQQIEGGMVKKRYIAKVIGVFPEDEMIVDANINYNGSEGRSTAEDANSSGDDKKVKGKPACTKFTRIDTNGTHSLVSCEPVTGRTHQIRVHLQYTGHPIANDPLYLNQHIDNLETYIAKRIDAGERKIVSPDDYVYSSEDFSIDPMCTNCPKKLIPQGYEEHDEALWLHCVQYCGTGWEYECPYPSWASL

SEQ ID NO: 1023 - protein, 204 aa, Arabidopsis thaliana
MSQVLYSLTIVFVFFASTNIQKTSGSASSYSQNHKTFVKTACNSTTYPDKCYKSLSSYSSNIKSDPIKLCTTALNLNVKSAKEATSVVSKLLKMSQKSTAGRKGKMLPEALILKDCLEEMKDTIIELKQAITEMKNLQDGGSMAEHITNVRTWVSSALTDEGTCTDGFEEVKVNKETKKKVNKVVEELATTTSNTLALITNLRY

SEQ ID NO: 1024 - protein, 860 aa, Arabidopsis thaliana
MWKLTRRLQPHINSTRWLVRNFRNGGAGDATGLYGFDHLKTAKGFQRFVADAIERSGELVSYISGMPSSPEIIKAMDEISDTVCCVVDSAELCRQTHPDREFVEEANKAAIEMNDYLHHLNTNHTLYAAVKKAEQDSNLLTKEASRTAHHLRMDFERGGIHLDPEKLDKVNNLTTNIFQLCREFSENIADDPGHVDIFPGSRIPRHLHHLLNPTYRSTSGGSRGSTRSAHKSKQKGFRINTDPRTVSSILQWTSDEEVRKMVYIQGNSVPHANHGVLEKLIAARHELSQMMGCNSYADIMVEPNLAKSPKVVTSFLQELSKTVKPKADEEFIAIRDFKREKCGNPSAELEPWDETYYTSMMKSSINDVDTAVVASYFPLPQCIEGLKVLVESLFGATFHTIPLAPGESWHPNVVKLSLHHPDEGDLGYLYLDLYSRKGKYPGCASFAIRGGRKISETEYQLPVIALVCNFSRACDSSIVKLNHSEVEVLFHEFGHALHSLLSRTDYQHFSGTRVALDLAEMPSNLFEYYAWDYRLLKRFARHYSTGETIPEKLVNSLQGARNMFAATEMQRQVFYALIDQMLFGEQPETARDVSHLVAELKRQHTSWNHVEGTHWYIRFSHLLNYGAGYYSYLYAKCFASTIWQSICEEDPLSLNTGTLLREKFFKHGGAKDPAELLTDLAGKEIISVHGDYLFFTTRNPRFAIKCQNSQIESDTTEDPSRSKNSSSSGVGFGSPASSSSPAKKLSAATSGNKKGKGKREVNRRAPVEKPVFMSEEGAAKAEEQRQNENAFLLTWLGLGIVILIEGIILAASGFLPEELDKLFVKYVYPVFTPSVVLFVAGTTAYGVLKYIQNEKMKGQE

SEQ ID NO: 1025 - protein, 211 aa, Arabidopsis thaliana
MVRGKIEIKKIENVTSRQVTFSKRRSGLFKKAHELSVLCDAQVAAMIFSQKGRLYEFASSDIRNTIKRYAEYKREYFVAETHPIEQYVQGLKKEMVTMVKKIEVLEVHNRKMMGQSLDSCSVKELSEIATQIEKSLHMVRLRKAKLYEDELQKLKAKERELKDERVRLSLKKTIYTHLCQVGERPMGMPSGSKEKEDVETDLFIGFLKNRP

SEQ ID NO: 1026 - protein, 207 aa, Arabidopsis thaliana
MVRGKIEIKKIENVTSRQVTFSKRRSGLFKKAHELSVLCDAQVAAIVFSQSGRLHEYSSSQMEKIIDRYGKFSNAFYVAERPQVERYLQELKMEIDRMVKKIDLLEVHHRKLLGQGLDSCSVTELQEIDTQIEKSLRIVRSRKAELYADQLKKLKEKERELLNERKRLLEEVNMHHSSKGNTEGGHRTKHSSEVETDLFIGLPVTRL

SEQ ID NO: 1027 - protein, 1246 aa, Arabidopsis thaliana
MSSVSSQPQFRYTQPPSKVLHLRNLPWECTEEELIELGKPFGTVVNTKCNVGANRNQAFIEFEDLNQAIQMISYYASSSEPAQVRGKTVYLQYSNRQEIVNNKTTADVVGNVLLVTIEGDDARMVSIDVLHLVFSAFGFVHKITTFEKTAGYQALVQFTDAETATAAKLALDGRSIPSLSSVCWSFSTNGLFPSDVWLIAYLLAETVGQCSLKITYSAHTDLTVKFQSHRSRDYTNPYLPVAPSAIDSTGQVAVGVDGKKMEPESNVLLASIENMQYAVTLDVLHMVFAAFGEVQKIAMFDKNGGVQALIQYSDVQTAVVAKEALEGHCIYDGGFCKLHITYSRHTDLSIKVNNDRSRDYTMPNPPVPMPQQPVQNPYAGNPQQYHAAGGSHHQQQQQPQGGWVQPGGQGSMGMGGGGHNHYMAPPSSSSMHQGPGGHMPPQHYGGPASLFLRPPLHTSSFKLYPCLFSSSSLSFCPQSLSSFYRLSSVLHNSRFRPLPCSLRQDNVASDSDFIPKDSAFEVTDSAESNRLVSDTEVSELETNDRFVGGEETKSGGEEAEVSNGVTEGKEEDQKKSKFRIVVLMMALWAAIKRAIEKVMEWEWLSWWPFSRQEKRLEKLIAEADANPKDAALQGALLAELNKHIPEAVVQRFEQREHTVDSRGVAEYIRALVITNAISEYLPDEQTGKPSSLPALLQELKHRASGNMDESFVNPGISEKQPLHVTMVNPKVSNKSRFAQELVSTILFTVAVGLVWIMGAAALQKYIGSLGGIGTSGVGSSSSYSPKELNKEITPEKNVKTFKDVKGCDDAKQELEEVVEYLKNPSKFTRLGGKLPKGILLTGAPGTGKTLLAKAIAGEAGVPFFYRAGSEFEEMFVGVGARRVRSLFQAAKKKAPCIIFIDEIDAVGSTRKQWEGHTKKTLHQLLVEMDGFEQNEGIIVMAATNLPDILDPALTRPGRFDRHIVVPSPDVRGREEILELYLQGKPMSEDVDVKAIARGTPGFNGADLANLVNIAAIKAAVEGAEKLSSEQLEFAKDRIVMGTERKTMFVSEDSKKLTAYHESGHAIVALNTKGAHPIHKATIMPRGSALGMVTQLPSNDETSVSKRQLLARLDVCMGGRVAEELIFGLDHITTGASSDLSQATELAQYMVSSCGMSEAIGPVHIKERPSSDMQSRIDAEVVKLLREAYERVKSLLKRHEKQLHTLANALLEYETLTAEDIKRILLPKQEGEKFEEQQQEEGDLVLA

SEQ ID NO: 1028 - protein, 429 aa, Arabidopsis thaliana
MSSVSSQPQFRYTQPPSKVLHLRNLPWECTEEELIELGKPFGTVVNTKCNVGANRNQAFIEFEDLNQAIQMISYYASSSEPAQVRGKTVYLQYSNRQEIVNNKTTADVVGNVLLVTIEGDDARMVSIDVLHLVFSAFGFVHKITTFEKTAGYQALVQFTDAETATAAKLALDGRSIPRYLLAETVGQCSLKITYSAHTDLTVKFQSHRSRDYTNPYLPVAPSAIDSTGQVAVGVDGKKMEPESNVLLASIENMQYAVTLDVLHMVFAAFGEVQKIAMFDKNGGVQALIQYSDVQTAVVAKEALEGHCIYDGGFCKLHITYSRHTDLSIKVNNDRSRDYTMPNPPVPMPQQPVQNPYAGNPQQYHAAGGSHHQQQQQPQGGWVQPGGQGSMGMGGGGHNHYMAPPSSSSMHQGPGGHMPPQHYGGPGPMH

SEQ ID NO: 1029 - protein, 587 aa, Arabidopsis thaliana
MGYDRLGPSGPSNPNQKDPATSLPELQKKTKTKLILFTLAVLVVGVVCFGIFAGIRAVDSGKTEPKLTRKPTQAISRTCSKSLYPNLCIDTLLDFPGSLTADENELIHISFNATLQKFSKALYTSSTITYTQMPPRVRSAYDSCLELLDDSVDALTRALSSVVVVSGDESHSDVMTWLSSAMTNHDTCTDGFDEIEGQGGEVKDQVIGAVKDLSEMVSNCLAIFAGKVKDLSGVPVVNNRKLLGTEETEELPNWLKREDRELLGTPTSAIQADITVSKDGSGTFKTIAEAIKKAPEHSSRRFVIYVKAGRYEEENLKVGRKKTNLMFIGDGKGKTVITGGKSIADDLTTFHTATFAATGAGFIVRDMTFENYAGPAKHQAVALRVGGDHAVVYRCNIIGYQDALYVHSNRQFFRECEIYGTVDFIFGNAAVILQSCNIYARKPMAQQKITITAQNRKDPNQNTGISIHACKLLATPDLEASKGSYPTYLGRPWKLYSRVVYMMSDMGDHIDPRGWLEWNGPFALDSLYYGEYMNKGLGSGIGQRVKWPGYHVITSTVEASKFTVAQFISGSSWLPSTGVSFFSGLSQ

SEQ ID NO: 1030 - protein, 742 aa, Arabidopsis thaliana
  misc_feature (300)..(300): Xaa can be any naturally occurring amino acid
  misc_feature (534)..(534): Xaa can be any naturally occurring amino acid
  unsure (1)..(742): unsure at all Xaa locations
MDEIVEDSSRVMEIEGQNDDLDRCVVEEVELTVPKTDDPTLPVLTFRMWTLGLGACIILSFINQFFWYRQMPLTISGISAQIAVVPLGHLMAKVLPTRMFLEGSKWEFSMNPGPFNVKEHVLITIFANSGAGTVYATHILSAIKLYYKRSLPFLPAFLLMITTQFLGFGWAGLFRKHLVEPGEMWWPSNLVQVSLFSALHEKEKKKKGGMTRIQFFLIVLVTSFAYYILPGYLFTMITSISWICWLGPKSVLVHQLGSGEQGLGIGAIGIDWATISSYLGSPLASPLFATINVTAPGAHXSPPPPPICYWLNIYKAKTYPIFSSGLFMGNGSSYDVLSIIDKKFHLDRDIYAKTGPINMSTFFAVTYGLGFATLSATIVHVLLFNGRDLWKQTRGAFQRNKKMDFHTRIMKKNYREVPMWWFYVILVLNIALIMFISFYYNATVQLPWWGVLLACAIAVFFTPLIGVIAATTNQEPGLNVITKYVIGYPYPERPVANMCFKVYGYISMTQALTFIQDFKLGLYMKIPPRSMFMXAQVVGTLVSVVVYTGTAWWLMVDIPHLCDKSLLPPDSEWTCPMDRVFFDASVIWGLVGPRRMFGNLGEYAAINWFFLVGAIAPFFVWLATKAFPAHKWISKIHFPVILGATSMMPPAMAVNFTSWCIVAFVFGHFLYKYKRQWWKKYNYVLSGGLDAGTAFMTILIFLSVGRKGIGLLWWGNADDSTNCSLASCPTAKGVIMHGCPVL

SEQ ID NO: 1031 - protein, 733 aa, Arabidopsis thaliana
MKDFTDTISESECDDEISIVPQVELTVPKTDDPTSPTVTFRMWVLGITACVLLSFLNQFFWYRTNPLTISSVSAQIAVVPIGHLMAKVLPTRRFFEGTRWSFTMNPGPFSTKEHVLITVFANSGSGAVYATHILSAVKLYYKRRLDFLPALLVMITTQVLGFGWAGLYRKHLVEPGEMWWPSNLVQVSLFRALHEKENKSKWGISRNQFFVITLITSFSYYLLPGYLFTVLTTVSWLCWISPKSILVNQLGSGSAGLGIGSFGLDWSTIASYLGSPLASPFFASANIAAGFFLVMYVITPLCYYLDLYNAKTFPIYSGKLFVASGKEYKVTSIIDANFRLDRQAYAETGPVHMSTFFAVTYGLGFATLSASIFHVLIFNGKDLWTQTRGAFGKNKKMDIHTKIMKRNYKEVPLWWFLSIFAVNLAVIVFICIYYKTQIQLPWWGAFLACLIAIFFTPLVGVIMATTNQAPGLNIITEYIIGYAYPERPVANICFKTYGYISMSQSLTFLSDLKLGTYMKIPPRTMFMAQVVGTLVAVIAYAGTAWWLMAEIPNLCDTNLLPPGSQWTCPSDRVFFDASVIWGLVGPRRMFGDLGEYSNINWFFVGGAIAPALVYLASRLFPNKKWISDIHIPVLIGATAIMPPASAVNFTSWLVMAFVFGHFVFKYRREWWQRYNYVLSGGMDAGTGFMSVLLFLALQRSEIAIDWWGNSGEGCPVAKCPTAKGVVVHGCPVF

SEQ ID NO: 1032 - protein, 855 aa, Arabidopsis thaliana
MVFTKSLLVLLWFLSCYTTTTSSALFNPPDNYLISCGSSQNITFQNRIFVPDSLHSSLVLKIGNSSVATSTTSNNSTNSIYQTARVFSSLASYRFKITSLGRHWIRLHFSPINNSTWNLTSASITVVTEDFVLLNNFSFNNFNGSYIFKEYTVNVTSEFLTLSFIPSNNSVVFVNAIEVVSVPDNLIPDQALALNPSTPFSGLSLLAFETVYRLNMGGPLLTSQNDTLGRQWDNDAEYLHVNSSVLVVTANPSSIKYSPSVTQETAPNMVYATADTMGDANVASPSFNVTWVLPVDPDFRYFVRVHFCDIVSQALNTLVFNLYVNDDLALGSLDLSTLTNGLKVPYFKDFISNGSVESSGVLTVSVGPDSQADITNATMNGLEVLKISNEAKSLSGVSSVKSLLPGGSGSKSKKKAVIIGSLVGAVTLILLIAVCCYCCLVASRKQRSTSPQEGGNGHPWLPLPLYGLSQTLTKSTASHKSATASCISLASTHLGRCFMFQEIMDATNKFDESSLLGVGGFGRVYKGTLEDGTKVAVKRGNPRSEQGMAEFRTEIEMLSKLRHRHLVSLIGYCDERSEMILVYEYMANGPLRSHLYGADLPPLSWKQRLEICIGAARGLHYLHTGASQSIIHRDVKTTNILLDENLVAKVADFGLSKTGPSLDQTHVSTAVKGSFGYLDPEYFRRQQLTEKSDVYSFGVVLMEVLCCRPALNPVLPREQVNIAEWAMAWQKKGLLDQIMDSNLTGKVNPASLKKFGETAEKCLAEYGVDRPSMGDVLWNLEYALQLEETSSALMEPDDNSTNHIPGIPMAPMEPFDNSMSIIDRGGVNSGTGTDDDAEDATTSAVFSQLVHPRGR

SEQ ID NO: 1033 - protein, 639 aa, Arabidopsis thaliana
MSREPETVLLPRALSNFLIALLFENSETNVTTMDTKIGSIDACNPTNHDIGGPPNGGVSTVQNTSPLHSTTVSPCDATLGRYLARRLVEIGVTDVFSVPGDFNLTLLDHLIAEPNLKLIGCCNELNAGYAADGYARSRGVGACVVTFTVGGLSVLNAIAGAYSENLPLICIVGGPNSNDYGTNRILHHTIGLPDFTQELRCFQAVTCFQAVINNLEEAHELIDTAISTALKESKPVYISISCNLPAIPLPTFSRHPVPFMLPMKVSNQIGLDAAVEAAAEFLNKAVKPVLVGGPKMRVAKAADAFVELADASGYGLAVMPSAKGQVPEHHKHFIGTYWGAVSTAFCAEIVESADAYLFAGPIFNDYSSVGYSLLLKKEKAIIVQPDRVTIGNGPAFGCVLMKDFLSELAKRIKHNNTSYENYHRIYVPEGKPLRDNPNESLRVNVLFQHIQNMLSSESAVLAETGDSWFNCQKLKLPEGCGYEFQMQYGSIGWSVGATLGYAQAMPNRRVIACIGDGSFQVTAQDVSTMIRCGQKTIIFLINNGGYTIEVEIHDGPYNVIKNWNYTAFVEAIHNGEGKCWTAKVRCEEELVKAINTATNEEKESFCFIEVIVHKDDTSKELLEWGSRVSAANSRPPNPQ

SEQ ID NO: 1034 - protein, 104 aa, Arabidopsis thaliana
  misc_feature (39)..(39): Xaa can be any naturally occurring amino acid
  unsure (1)..(104): unsure at all Xaa locations
MSATPEEDKKPDQGAHINLKVKGQDGNEVFFRIKRSTQXLKKLMNAYCDRQSVDFNSIAFLFDGRRLRAEQTPDELEMEDGDEIDAMLHQTGGGAKNGLKLFCF

SEQ ID NO: 1035 - protein, 766 aa, Arabidopsis thaliana
MINMRDNPTMHVLQASKFLFLALILIQLLSTQLFAQRSKSPWQTLTGDAPLVIARGGFSGLLPDSSLDAYSFVSQTSVPGAVLWCDVQLTKDAIGLCFPDVKMMNASNIQDVYPKRKTSYLLNGVPTQDWFTIDFNFKDLTKVILKQGILSRSAAFDGNSYGISTVKDISTQLKPEGFWLNVQHDAFYAQHNLSMSSFLLSISKTVIIDYLSSPEVNFFRNIGRRFGRNGPKFVFRFLEKDDVEVSTNQTYGSLAGNLTFLKTFASGVLVPKSYIWPIESQYLLPRTSFVQDAHKAGLEVYASGFGNDFDLAYNYSFDPLAEYLSFMDNGDFSVDGLLSDFPLTASSAVDCFSHLGSNASSQVDFLVISKNGASGDYPGCTDLAYTKAIKDGADVIDCSLQMSSDGIPFCLSSINLGESTNVVQSPFRNRSTTVPEIGSLPGIYSFSLAWSEIQTLRPAIENPYSREFTMFRNPRERSSGKFVSLSDFLNLAKNSSSLTGVLISVENATYLREKQGLDAVKAVLDTLTEAGYSNKTTTTRVMIQSTNSSVLIDFKKQSRYETVYKVEETIRDILDTAIEDIKKFADAVVISKKSVFPTSESFTTGQTKLVERLQKFQLPVYVEVFRNEFVSQPWDFFADATVEINSHVTGAGINGTITEFPLTAARYKRNSCLTRKDVPPYMIPVQPAGLLTIVSPASLPPAEAPSPVFTDADVTEPPLPPVSARAPTTTPGPQSTGEKSPNGQTRVALSLLLSAFATVFASLLLL

SEQ ID NO: 1036 - protein, 346 aa, Arabidopsis thaliana
MTDSYGAVSVDVGTIYLGGKEHRVKTASGVVSVIVYGDREKPALITYPDLALNHMSCFQGLFFCPEAASLLLHNFCIYHISPPGHELGAAPICPNDSVPSAENLADQILEVLNFFGLGVVMCMGVTAGAYILTLFAMKHRERVLGLILVSPLCKAPSWSEWFYNKVITNLLYYYGMCGVVKEFLLQRYFSKEVRGNVEIPESDIAQACRRLLDERQGINVLRFLDAIDRRPDISSGLKKLKCRTLIFIGDQSPFYSEAVHMAATLDRGYCALVEVQACGSMVTEEQPHAMLIPMEYFLMGYGLYRPSLFSESPRSPLSPSCISPELLSPESMGLKLKPIKTRISAA

SEQ ID NO: 1037 - protein, 398 aa, Arabidopsis thaliana
MDSNFHYSIDLNEDQNHHEQPFFYPLGSSSSLHHHHHHHHHQVPSNSSSSSSSISSLSSYLPFLINSQEDQHVAYNNTYHADHLHLSQPLKAKMFVANGGSSACDHMVPKKETRLKLTIRKKDHEDQPHPLHQNPTKPDSDSDKWLMSPKMRLIKKTITNNKQLIDQTNNNNHKESDHYPLNHKTNFDEDHHEDLNFKNVLTRKTTAATTENRYNTINENGYSNNNGVIRVCSDCNTTKTPLWRSGPRGPKSLCNACGIRQRKARRAAMAAAAAAGDQEVAVAPRVQQLPLKKKLQNKKKRSNGGEKYNHSPPMVAKAKKCKIKEEEEKEMEAETVAGDSEISKSTTSSNSSISSNKFCFDDLTIMLSKSSAYQQVFPQDEKEAAVLLMALSYGMVHG

SEQ ID NO: 1038 - protein, 316 aa, Arabidopsis thaliana
MLKVVLLMMIMMLASQSEAQLNRDFYKESCPSLFLVVRRVVKRAVAREPRMGASLLRLFFHDCFVNGCDGSLLLDDTPSFLGEKTSGPSNNSVRGFEVIDKIKFKVEKMCPGIVSCADILAITARDSVLLLGGPGWSVKLGRRDSTTANFAAANSGVIPPPITTLSNLINRFKAQGLSTRDMVALSGSHTIGRAQCVTFRNRIYNASNIDTSFAISKRRNCPATSGSGDNKKANLDVRSPDRFDHGFYKQLLSKKGLLTSDQVLFNNGPTDSLVIAYSHNLNAFYRDFARAMIKMGDISPLTGSNGQIRQNCRRPN

SEQ ID NO: 1039 - protein, 325 aa, Arabidopsis thaliana
MECYEQSRQRAAFVVLLFIVMLGSQAQAQLRTDFYSDSCPSLLPTVRRVVQREVAKERRIAASLLRLFFHDCFVNGCDASILLDDTRSFLGEKTAGPNNNSVRGYEVIDAIKSRVERLCPGVVSCADILAITARDSVLLMGGRGWSVKLGRRDSITASFSTANSGVLPPPTSTLDNLINLFRANGLSPRDMVALSGAHTIGQARCVTFRSRIYNSTNIDLSFALSRRRSCPAATGSGDNNAAILDLRTPEKFDGSYFMQLVNHRGLLTSDQVLFNGGSTDSIVVSYSRSVQAFYRDFVAAMIKMGDISPLTGSNGQIRRSCRRPN

SEQ ID NO: 1040 - protein, 578 aa, Arabidopsis thaliana
MVSHKCVEEFGYASYLVPSNARAPRSARKRRSIEKRISKEDDNMCAIDLLATVAGHLSFESGSSLMSIDKLIEDHRVKEEFPEEEKPLMPVALSPYRGSLSPCGFSSVINGKVENEVDGFSYSGGSDACQVGNFSQDVKPDIDGDAVVLDARPNVVVSLGSSSRTEVPSIGNCVSHGVRDDVNLFSRDDDENFSKYIHPRVTKHSPRTVPRIGDRRIRKILASRHWKGGSRHSDTKPWRNYYLHQQRSYPIKKRKNFDHISDSVTDDYRMRTKMHRGSRKGQGASFVASDSHVKLRIKSFRVPELFIEIPETATVGSLKRMVMEAVSTLLSDGHRVGLMVQGKKVRDDNKTLHQTGISQDNSHLDSLDFSLEPSSEMPQLLTSHPLGHACEELLPVCQATKIDNVLESDHHDSALFPSDSLGNNNVTEDSKAMISVALNELSSQSQPPSRKSRRSEQQQQQAAQRRIRRPFSVAEVEALVQAVEKLGTGRWRDVKLCAFEDADHRTYVDLKDKWKTLVHTAKISPQQRRGEPVPQELLNRVLNAHGYWTQQQMQQLQQNVNKLEQETQSQTTEGLLLL

SEQ ID NO: 1041 - protein, 1664 aa, Arabidopsis thaliana
  misc_feature (15)..(15): Xaa can be any naturally occurring amino acid
  unsure (1)..(1664): unsure at all Xaa locations
MESKFSQFHGRKLQXKHIYSFVSLTQDILPCCQRLGLFLGFIYLYAVFLSNSGIGAFAIIGCVQAQDQQEFISLDCGLPMTEPSSYTESVTGLRFSSDAEFIQTGESGKIQASMENDYLKPYTRLRYFPEERRNCYSLSVDKNRKYLIRARFIYGNYDGRNSNPIFELHLGPNLWATIDLQKFVNGTMEEILHTPTSNSLNVCLVKTGTTTPLISALELRPLGNNSYLTDGSLNLFVRIYLNKTDGFLRYPDDIYDRRWHNYFMVDDWTQIFTTLEVTNDNNYEPPKKALAAAATPSNASAPLTISWPPDNPGDQYYLYSHFSEIQDLQTNDTREFDILWDGAVVEEGFIPPKLGVTTIHNLSPVTCKGENCIYQLIKTSRSTLPSLLNALEIYTVIQFPRSETNENDVVAVKNIEAAYKLSRIRWQGDPCVPQKYAWDGLNCSNNTDVSKPPRVLSLNLSSSGLTGIIAAAIQNLTHLEKLDLSNNTLTGVVPEFLAQMKSLVIINLSGNNLSGPLPQGLRREGLELLVQGNPRLCLSGSCTEKNSKKKFPVVIVASVASVAIIVAVLVIIFVLSKKKSSTVGALQPPLSMPMVHDNSPEPSIETKKRRFTYSEVIKMTNNFQRVVGEGGFGVVCHGTINGSEQVAVKVLSQSSSQGYKHFKAEVDLLLRVHHTNLVSLVGYCDERDHLALIYEFLPKGDLRQHLSGKSGGSFINWGNRLRIALEAALGLEYLHSGCTPPIVHRDIKTTNILLDEQLKAKLADFGLSRSFPIGGETHISTVVAGTPGYLDPEYYQTTRLGEKSDVYSFGIVLLEIITNQPVIDQSRSKSHISQWVGFELTRGDITKIMDPNLNGDYESRSVWRVLELAMSCANPSSVNRPNMSQVANELKECLVSENLRENMNMDSQNSLKDSSVWIADSLRMNCLLMKRVSLDCGSLRMKSSYVVEKTVESEKILRDTLSRTLRYFPDGIRNCYNLNVEKGRTHLIVARFVYGNYDGFDLKPKFDLYLGPNLWATVDLQTEVNDWGNYTANIGFGIMGNGSYITKSGSLNLLSRTYLSKSGSDLRYMKDVYDRTWVSYGASFRTGWTQIYTALEVNNSNNYAPPKDALRNAATPTNASAPLTIEWPSGSPSQEVPGTNITFFSDPIIPKKLDITSVQSVTPKTCQEGKCSLQLTRTNRSTLPPLLNALEIYAVIQFPQSETNEIDVIAIKKIEAMYESSRINWQGDPCVPQHFIWDGLNCSNTDISTPPRITSLNLSSSGLTGNIAAAIQNLTQLEKLDLSNNNLTGGVPEFLGNMKSLSFINLSGNNLSGSIPQTLQKKRLELFVEGNPRLCLSDSCRKPPKKKIHVAIVASVASAAIVVAVLILFLILRKRKSTIVQGQHLPPSTSTVDVTFANKKSKRFTYLEVIKMTNNFQRVLGKGGFGMVYHGTVKGSDQVAVKVLSQSSTQGYKQFKAEVCGKSFDIAGSIAGLEYLHIGCIPPMVHRDVKTANILLDENFKAKLADFGLSRSFQVRGESYDSTFVAGTPGYLDPEYYPTSRLAAKSDVYSYGIVLLEMITNQPVISEKYHITEWVGSKLNRGDIIEIMDPNLGGVYDSNSAWRALELAMSCADPSSSKRPTMSQVINELKECLVCENSRMSKTRGMEYQEMNISLDTSVVPGAR

SEQ ID NO: 1042 - protein, 868 aa, Arabidopsis thaliana
MESSFGLLLALLTLTIIHIVQAQDPQGFISLDCGLPANETSPYTETQTGLLFSSDATFIQSGKTGRVQANQESKFLKPYRTLRYFPEGVRNCYNLSVFKERKYLIAASFLYGNYDGHNIAPVFDLYLGPNLWAKIDLQDVNGTGEEILHIPTSNSLQICLVQTGETTPLISSLELRPMRTGSYTTVSGSLKTYRRLYFKKSGSRLRYSKDVYDRSWFPRFMDEWTQISTALGVINTNIYQPPEDALKNAATPTDASAPLTFKWNSEKLDVQYYFYAHYAEIQDLQANDTREFNILLNGQNLSVTGPEVPDKLSIKTFQSSSPISCNGWACNFQLIRTKRSTLPPLLNALEVYTVIQFPRSETDESDVVAMKNISASYGLSRINWQGDPCFPQQLRWDALDCTNRNISQPPRITSLNLSSSRLNGTIAAAIQSITQLETLDLSYNNLTGEVPEFLGKMKSLSVINLSGNNLNGSIPQALRKKRLKLYLEGNPRLIKPPKKEFPVAIVTLVVFVTVIVVLFLVFRKKMSTIVKGLRLPPRTSMVDVTFSNKKSKRFTYSEVVQVTKNFQRVLGKGGFGMVYHGTVKGSEQVAVKVLSQSSTQGSKEFKAEVDLLLRVHHTNLVSLVGYCCEGDYLALVYEFLPNGDLKQHLSGKGGNSIINWSIRLRIALEAALGLEYLHIGCTPPMVHRDVKTANILLDENFKAKLADFGLSRSFQGEGESQESTTIAGTLGYLDPECYHSGRLGEKSDVYSFGIVLLEMITNQPVINQTSGDSHITQWVGFQMNRGDILEIMDPNLRKDYNINSAWRALELAMSCAYPSSSKRPSMSQVIHELKECIACENTGISKNRSLEYQEMNVSLDTTAVPMAR

SEQ ID NO: 1043 - protein, 882 aa, Arabidopsis thaliana
MERSLELLLLLIRTLAIIHISQAQSQQGFISLDCGLPANEPSPYTEPRTGLQFSSDAAFIQSGKIGRIQANLEADFLKPSTTMRYFPDGKRNCYNLNVEKGRNHLIRARFVYGNYDGRDTGPKFDLYLGPNPWATIDLAKQVNGTRPEIMHIPTSNKLQVCLVKTGETTPLISVLEVRPMGSGTYLTKSGSLKLYYREYFSKSDSSLRYPDDIYDRQWTSFFDTEWTQINTTSDVGNSNDYKPPKVALTTAAIPTNASAPLTNEWSSVNPDEQYYVYAHFSEIQELQANETREFNMLLNGKLFFGPVVPPKLAISTILSVSPNTCEGGECNLQLIRTNRSTLPPLLNAYEVYKVIQFPQLETNETDVSAVKNIQATYELSRINWQSDPCVPQQFMWDGLNCSITDITTPPRITTLNLSSSGLTGTITAAIQNLTTLEKLDLSNNNLTGEVPEFLSNMKSLLVINLSGNDLNGTIPQSLQRKGLELLYQGNPRLISPGSTETKSGKSFPVTIVASVGSAAILIVVLVLVLFLRKKKPSAVEVVLPRPSRPTMNVPYANSPEPSIEMKKRKFTYSEVTKMTNNFGRVVGEGGFGVVCHGTVNGSEQVAVKLLSQSSTQGYKEFKAEVDLLLRVHHTNLVSLVGYCDEGDHLALIYEFVPNGDLRQHLSGKGGKPIVNWGTRLRIAAEAALGLEYLHIGCTPPMVHRDVKTTNILLDEHYKAKLADFGLSRSFPVGGESHVSTVIAGTPGYLDPDRLSEKSDVYSFGIVLLEMITNQAVIDRNRRKSHITQWVGSELNGGDIAKIMDLKLNGDYDSRSAWRALELAMSCADPTSARRPTMSHVVIELKECLVSENSRRNMSRGMDTLSSPEVSMIFDAEMIPRAR

SEQ ID NO: 1044 - protein, 829 aa, Arabidopsis thaliana
MGGEKFGFLIWILSIPCLIFLCYGYVPVDNYLINCGSSTNVTVTSRVFISDNLASNFLTSPNEILAASNRNSNSDIYQTARIFTGISKYRFSVARGRHWIRLHFNPFQYQNFQMVSAKFSVSSETHVLLSDFTVSSRVMKEYSLNVATDHLELTFTPSGDSFAFLNALEVVSVPDTLFSGDPSFAGSPGKFQGLSWQALETVYRVNMGGPRVTPSNDTLSRIWEPDSEFLVEKNLVKSVSKIASVDYVPGFATEETAPRTVYGTCTEMNSADNPSSNFNVTWDFDVDPGFQYFLRFHFCDIVSKALNQLYFNLYVDSMDVVENLDLSSYLSNTLSGAYAMDFVTGSAKLTKRIRVSIGRSSVHTDYPTAILNGLEIMKMNNSKSQLSIGTFLPSGSSSTTKKNVGMIIGLTIGSLLALVVLGGFFVLYKKRGRDQDGNSKTWIPLSSNGTTSSSNGTTLASIASNSSYRIPLVAVKEATNSFDENRAIGVGGFGKVYKGELHDGTKVAVKRANPKSQQGLAEFRTEIEMLSQFRHRHLVSLIGYCDENNEMILVYEYMENGTLKSHLYGSGLLSLSWKQRLEICIGSARGLHYLHTGDAKPVIHRDVKSANILLDENLMAKVADFGLSKTGPEIDQTHVSTAVKGSFGYLDPEYFRRQQLTEKSDVYSFGVVMFEVLCARPVIDPTLTREMVNLAEWAMKWQKKGQLEHIIDPSLRGKIRPDSLRKFGETGEKCLADYGVDRPSMGDVLWNLEYALQLQEAVVDGDPEDSTNMIGELPLRFNDYNHGDTSVNFSVAKEGRFDEEESSVDDSSGVSMSKVFSQLIKSEGR

SEQ ID NO: 1045 - protein, 306 aa, Arabidopsis thaliana
MQTRSSSSPSANHRRETQLQIADPTSFCGKIMPGWTVVNRPRSSNNGVVDTYFIEPGTGRQFSSLEAIHRHLAGEVNDRRLTRAGSFFQDKTRVYEGSRTKQDHCGVEYASKGFRLPRGWSVEEVPRKNSHYIDKYYVERKTGKRFRSLVSVERYLRESRNSIEQQLRVLQNRRGHSKDFRLPDGWIVEEKPRRSSSHIDRSYIEPGTGNKFRSMAAVERYLISVGNITLDSVSMVHSERLPLLMNRNGIRFQSEVIDPNPPKKVKWVLTGSGGNMFTANVRGSNVSSLVKHTWSEAFVSLIEDRS

SEQ ID NO: 1046 - protein, 336 aa, Arabidopsis thaliana
METFCGFQKEEEQMDLPPGFRFHPTDEELITHYLHKKVLDTSFSAKAIGEVDLNKSEPWELPWMAKMGEKEWYFFCVRDRKYPTGLRTNRATEAGYWKATGKDKEIYRGKSLVGMKKTLVFYRGRAPKGQKTNWVMHEYRLEGKFSAHNLPKTAKNEWVICRVFQKSAGGKKIPISSLIRIGSLGTDFNPSLLPSLTDSSPYNDKTKTEPVYVPCFSNQTDQNQGTTLNCFSSPVLNSIQADIFHRIPLYQTQSLQVSMNLQSPVLTQEHSVLHAMIENNRRQSLKTMSVSQETGVSTDMNTDISSDFEFGKRRFDSQEDPSSSTGPVDLEPFWNY

SEQ ID NO: 1047 - protein, 202 aa, Arabidopsis thaliana
MAKQYLFVLLSISYLLSLELTAATAASQTGASKKAINFIQSSCKTTTYPALCVHSLSVYANDIQTSPKRLAETAIAVTLSRAQSTKLFVSRLTRMKGLKKREVEAIKDCVEEMNDTVDRLTKSVQELKLCGSAKDQDQFAYHMSNAQTWTSAALTDENTCSDGFSGRVMDGRIKNSVRARIMNVGHETSNALSLINAFAKTY

SEQ ID NO: 1048 - protein, 203 aa, Arabidopsis thaliana
MGESFRLFNHHHFLTTFLIIIAMLKLVHTTTTTTTTTTTNTEFVKSSCTFTTYPRLCFSSLSTHASLIQTSPKLMAHAALNITLASAKVTSAMMVRLSNSRLKPKEVSAMRDCVEELGDTLEELRKSIGEMCQLSGSNYEVYISDIQTWVSAALTDVNTCTDGFEGEDMDGKVKVLVRGRILVIAHLTSNALALINHFASIHG

SEQ ID NO: 1049 - protein, 763 aa, Arabidopsis thaliana
MNSRPSNPTKLVIRSSTLLFCGVVLIHLFAAQIDAQRSTSRWQTLNGDAPLVIARGGFSGLYPDSSIAAYQLATLTSVADVVLWCDLQLTKDGLGICFPDLNLANASTIDRVYPNREKSYSVNGVTTKGWFPNDFSLTELQNFLLIRGILSRTDRFDGNGYLISTIEDVVTTLNREGFWLNVQHDAFYEQQNLSMSSFLLSVSRTVSIDFISSPEVNFFKKITGSFGRNGPTFVFQFLGKEDFEPTTNRTYGSILSNLTFVKTFASGILVPKSYILPLDDEQYLVPHTSLVQDAHKAGLQVYVSGFANDVDIAYNYSSDPVSEYLSFVDNGDFSVDGVLSDFPITASAAVDCFSHIGRNATKQVDFLVISKDGASGDYPGCTDLAYEKAIKDGADVIDCSVQMSSDGVPFCLRSIDLRNSIAALQNTFSNRSTSVPEISSVPGIFTFSLTWPEIQSLTPAISNPFRVYRIFRNPREKNSGKLISLSQFLDLAKTYTSLSGVLISVENAAYLREKQGLDVVQAVLDTLTEAGYSNGTTTTKVMIQSTNSSVLVDFKKQSKYETVYKIEETIGNIRDSAIEDIKKFANAVVINKDSVFPNSDSFLTGQTNVVERLQKSQLPVYVELFRNEFVSQAYDFFSDATVEINAYIYGAGINGTITEFPFTAARYKRNRYLGREEVPPYMLPVNPGGLLNVMSPLSLPPAQAPNQDFIEADVTEPPLSPVIAKAPTSTPGTPSTIAQAPSGQTRLKLSLLLSVFFLSLLLL

SEQ ID NO: 1050 - protein, 578 aa, Arabidopsis thaliana
MCGILAVLGCIDNSQAKRSRIIELSRRLRHRGPDWSGLHCYEDCYLAHERLAIIDPTSGDQPLYNEDKTVAVTVNGEIYNHKILREKLKSHQFRTGSDCEVIAHLYEEHGEEFIDMLDGMFAFVLLDTRDKSFIAARDAIGITPLYIGWGLDGSVWFASEMKALSDDCEQFMSFPPGHIYSSKQGGLRRWYNPPWYNEQVPSTPYDPLVLRNAFEKAVIKRLMTDVPFGVLLSGGLDSSLVAAVALRHLEKSEAARQWGSQLHTFCIGLQGSPDLKAGREVADYLGTRHHEFQFTVQDGIDAIEEVIYHIETYDVTTIRASTPMFLMSRKIKSLGVKMVLSGEGSDEILGGYLYFHKAPNKKEFHEETCRKIKALHQFDCLRANKSTSAWGVEARVPFLDKEFLNVAMSIDPEWKLIKPDLGRIEKWVLRNAFDDEERPYLPKHILYRQKEQFSDGVGYSWIDGLKDHANKHVSDTMLSNASFVFPDNTPLTKEAYYYRTIFEKFFPKSAARATVPGGPSIACSTAKAVEWDATWSKNLDPSGRAALGVHVAAYEEDKAAAAAKAGSDLVDPLPKNGT

SEQ ID NO: 1051 - protein, 361 aa, Arabidopsis thaliana
MLFYMPTLYKKAGCLGIREFMKQASSSSSSRNSTSLTNRLKTIFKKAEELSILCAIEVCVIYYGPDGELRTWPKERETVKDMALRYKEARKRKKSRNLHEFLEKEKDKDKGKTNLKKNWYPNFDHYSPQQLSQLIQSLERTLSTLQERLRIVEAQKLQNTNLVHQSLTPSYLNQTQHLNPSKFSLFMYNHGDATLSQLPLSAPHSNQLINYQNHLMQHGFGQNMCSDNITNNNFEHPGVSNTQDYSPLLSVQASAVNNYGLNNHLMQQQDQLHGFDQNMCMVSEIINNNNGLQHPNLSNTVPHEFSSDFNQNPYGNAVGNISFSQDMFSSYDASSLLQTSSLPPLHNIPSSYCFPGNSRLL

SEQ ID NO: 1052 - protein, 433 aa, Arabidopsis thaliana
MSSSERVPCDFCGERTAVLFCRADTAKLCLPCDQQVHTANLLSRKHVRSQICDNCGNEPVSVRCFTDNLILCQECDWDVHGSCSVSDAHVRSAVEGFSGCPSALELAALWGLDLEQGRKDEENQVPMMAMMMDNFGMQLDSWVLGSNELIVPSDTTFKKRGSCGSSCGRYKQVLCKQLEELLKSGVVGGDGDDGDRDRDCDREGACDGDGDGEAGEGLMVPEMSERLKWSRDVEEINGGGGGGVNQQWNATTTNPSGGQSSQIWDFNLGQSRGPEDTSRVEAAYVGKGAASSFTINNFVDHMNETCSTNVKGVKEIKKDDYKRSTSGQVQPTKSESNNRPITFGSEKGSNSSSDLHFTEHIAGTSCKTTRLVATKADLERLAQNRGDAMQRYKEKRKTRRYDKTIRYESRKARADTRLRVRGRFVKASEAPYP

SEQ ID NO: 1053 - protein, 136 aa, Arabidopsis thaliana; identical to SEQ ID NO: 611

SEQ ID NO: 1054 - protein, 453 aa, Arabidopsis thaliana
MASKVISATIRRTLTKPHGTFSRCRYLSTAAAATEVNYEDESIMMKGVRISGRPLYLDMQATTPIDPRVFDAMNASQIHEYGNPHSRTHLYGWEAENAVENARNQVAKLIEASPKEIVFVSGATEANNMAVKGVMHFYKDTKKHVITTQTEHKCVLDSCRHLQQEGFEVTYLPVKTDGLVDLEMLREAIRPDTGLVSIMAVNNEIGVVQPMEEIGMICKEHNVPFHTDAAQAIGKIPVDVKKWNVALMSMSAHKIYGPKGVGALYVRRRPRIRLEPLMNGGGQERGLRSGTGATQQIVGFGAACELAMKEMEYDEKWIKGLQERLLNGVREKLDGVVVNGSMDSRYVGNLNLSFAYVEGESLLMGLKEVAVSSGSACTSASLEPSYVLRALGVDEDMAHTSIRFGIGRFTTKEEIDKAVELTVKQVEKLREMSPLYEMVKEGIDIKNIQWSQH

SEQ ID NO: 1055 - protein, 427 aa, Arabidopsis thaliana
MAVSPHISPTLSRYKFFSTSVVENPNFSPYRIYSRRRVTKSHLQAHNSTTSYGRTELSSSKKLWIRQRSFSEMEVEQAQLEDDEEQVEIDIVDEASLLSLSMKPDRNMALLDDYEMEELGHTPNTHHRSGYVAVVGMPNVGKSTLSNQMIGQKISIVTDKPQTTRHRILGICSSPEYQMILYDTPGVIEKKMHRLDTMMMKNVRDAAINADCVVILVDACKTPTNIEEVLKEGLGDLEKKPPMLLVMNKKDLIKPGEIAKKLEWYEKFTDVDEVIPVSAKYGHGIEDVKEWILSKLPFGPPYYPKDIVSEHPERFFVSEIVREKIFMQYRNEVPYACQVNVLSYKTRPAAKDFIQVEVVVDKNSQKIILIGKEGKALKTLATAARLDIEDFLQKKVFLEVEVKVKENWRQDEGLLKYYGYGGQIRAM

SEQ ID NO: 1056 - protein, 1163 aa, Arabidopsis thaliana
MSSLTSVELNFLVFRYLQESGFTHAAFTLGYEAGINKSNIDGNMVPPGALIKFVQKGLQYMEMEANLSNSEVDIDEDFSFFQPLDLISKDVKELQDMLREKKRKERDMEKERDRSKENDKGVEREHEGDRNRAKEKDRHEKQKEREREREKLEREKEREREKIEREKEREREKMEREIFEREKDRLKLEKEREIEREREREKIEREKSHEKQLGDADREMVIDQTDKEIAGDGSTGAEPMDIVMTPTSQTSHIPNSDVRILEGHTSEVCACAWSPSASLLASGSGDATARIWSIPEGSFKAVHTGRNINALILKHAKGKSNEKSKDVTTLDWNGEGTLLATGSCDGQARIWTLNGELISTLSKHKGPIFSLKWNKKGDYLLTGSVDRTAVVWDVKAEEWKQQFEFHSGPTLDVDWRNNVSFATSSTDSMIYLCKIGETRPAKTFTGHQGEVNCVKWDPTGSLLASCSDDSTAKIWNIKQSTFVHDLREHTKEIYTIRWSPTGPGTNNPNKQLTLASASFDSTVKLWDAELGKMLCSFNGHREPVYSLAFSPNGEYIASGSLDKSIHIWSIKEGKIVKTYTGNGGIFEVCWNKEGNKIAACFADNSVCVLDFRINKAVANFKIVVTLVAAPPPISNLAFLNSDSENRRLPGNMSETDRERPLLASEERAYEETEKVLIVGIDEEEDADYDDDPGNSPKFSWKKLWLFTGPGFLMSIAFLDPGNLESDLQAGAIAGYSLIWLLMWATAIGLLIQLLSARLGVATGRHLAELCREEYPTWARMVLWIMAEIALIGADIQEVIGSAIAIKILSNGLVPLWAGVVITALDCFIFLFLENYGIRKLEAVFAILIATMALAFAWMFGQTKPSGTELLVGALVPKLSSRTIKQAVGIVGCIIMPHNVFLHSALVQSREVDPKKRFRVKEALKYYSIESTGALAVSFIINVFVTTVFAKSFYGTEIADTIGLANAGQYLQDKYGGGFFPILYIWAIGVLAAGQSSTITGTYAGQFIMGGFLNLKMKKWVRALITRSCAIIPTMIVALVFDSSDSMLDELNEWLNVLQSVQIPFAVIPLLCLVSNEQIMGSFKIQPLVQTISWIVAALVIAINGYLMVDFFSGAATNLILLVPVIIFAIAYVVFVLYLISRGLTYTPWQLVASSHKEPQRDDE

SEQ ID NO: 1057 - protein, 166 aa, Arabidopsis thaliana
MAPTVKTAAVKTNEGNGVRYRGVRKRPWGRYAAEIRDPFKKSRVWLGTFDTPEEAARAYDKRAIEFRGAKAKTNFPCYNINAHCLSLTQSLSQSSTVESSFPNLNLGSDSVSSRFPFPKIQVKAGMMVFDERSESDSSSVVMDVVRYEGRRVVLDLDLNFPPPPEN

SEQ ID NO: 1058 - protein, 400 aa, Arabidopsis thaliana
MASLALTSPPSVKIPSYLSSSSSSLFSRSSISFRTTESRSRICVSGYAKCNLPKALNGNARVPIINETTIPKFFDSSRLEKSVSRNNTKLKLFSGTANPALSQEIAWYMGLELGKVSIKRFADGEIYVQLKESVRGCDVFLVQPTCTPTNENLMELLIMVDACRRASAKKVTAVIPYFGYARADRKTQGRESIAAKLVANLITEAGADRVLACDLHSGQSMGYFDIPVDHVYCQPVILDYLASKSISSEDLVVVSPDVGGVARARAFAKKLSDAPLAIVDKRRHGHNVAEVMNLIGDVKGKVAVMVDDIIDTAGTIVKGAALLHEEGAREVYACCTHAVFSPPAIERLSSGLLQEVIVTNTLPVAEKNYFPQLTILSVANLLGETIWRVHDDSSVSSIFL

SEQ ID NO: 1059 - protein, 323 aa, Arabidopsis thaliana
MQSSNVTDCTMRKRGTKRKIEIEKRMTKQQRSVACSKRRPTLFSKAADLCLLSGANIAVFVTSPDENSDVVYSFSGYSHASEIVDCYLNNKSPPKTTINPESAKFWWEEPDLYRDCDDLSELRIIEDRLMRTKKHLMDYLEKKEKSHSVSKSDQNPNNDSGSSSSSSQIASDFGQNPSTLSPSSLKIVSFDQNSYSSLEPSSQVTTCFDQNPVFSVGSESSSDQSRYLVNEDSGFVDGLLCETEEENNGMRLPQETQTQPMFTEEDQSFWENLDVDDVFGLFKDDNNLEVPLQDHSSTNEDDELLIDISEYLSEEAMECPCFS

SEQ ID NO: 1060 - protein, 353 aa, Arabidopsis thaliana
MTSPLSDLLNLDLSDTKKIIAEYIWIGGSGMDIRSKARTLPGPVSNPTKLPKWNYDGSSTDQAAGDDSEVILYPQAIFKDPFRKGNNILVMCDAYRPAGDPIPTNNRHKAVKIFDHPNVKAEEPWFGIEQEYTLLKKDVKWPLGWPLGGFPGPQGPYYCAVGADKAFGRDIVDAHYKACLYSGLSIGGANGEVMPGQWEFQISPTVGIGAGDQLWVARYILERITEICGVIVSFDPKPIQGDWNGAAAHTNFSTKSMRKDGGLDLIKEAIKKLEVKHKQHIAAYGEGNERRLTGKHETADINTFSWGVADRGASVRVGRDTEKEGKGYFEDRRPSSNMDPYLVTSMIAETTIL

SEQ ID NO: 1061 - protein, 888 aa, Arabidopsis thaliana
MEKYFHGVLCVFIITVAFIHVVQAQDPNGFITLDCGLLPDGSPYTNPSTGLTFTSDSSFIESGKNGRVSKDSERNFEKAFVTLRYFPDGERNCYNLNVTQGTNYLIRAAFLYGNYDGLNTVPNFDLFIGPNKVTTVNFNATGGGVFVEIIHMSRSTPLDICLVKTGTTTPMISTLELRPLRSDTYISAIGSSLLLYFRGYLNDSGVVLRYPDDVNDRRWFPFSYKEWKIVTTTLNVNTSNGFDLPQGAMASAATRVNDNGTWEFPWSLEDSTTRFHIYLHFAELQTLLANETREFNVLLNGKVYYGPYSPKMLSIDTMSPQPDSTLTCKGGSCLLQLVKTTKSTLPPLINAIELFTVVEFPQSETNQDEVIAIKKIQLTYGLSRINWQGDPCVPEQFLWAGLKCSNINSSTPPTITFLNLSSSGLTGIISPSIQNLTHLQELDLSNNDLTGDVPEFLADIKSLLIINLSGNNFSGQLPQKLIDKKRLKLNVEGNPKLLCTKGPCGNKPGEGGHPKKSIIVPVVSSVALIAILIAALVLFLVLRKKNPSRSKENGRTSRSSEPPRITKKKKFTYVEVTEMTNNFRSVLGKGGFGMVYHGYVNGREQVAVKVLSHASKHGHKQFKAEVELLLRVHHKNLVSLVGYCEKGKELALVYEYMANGDLKEFFSGKRGDDVLRWETRLQIAVEAAQGLEYLHKGCRPPIVHRDVKTANILLDEHFQAKLADFGLSRSFLNEGESHVSTVVAGTIGYLDPEYYRTNWLTEKSDVYSFGVVLLEIITNQRVIERTREKPHIAEWVNLMITKGDIRKIVDPNLKGDYHSDSVWKFVELAMTCVNDSSATRPTMTQVVTELTECVTLENSRGGKSQNMGSTSSSEVTMTFDTEVNPVAR

SEQ ID NO: 1062 - protein, 894 aa, Arabidopsis thaliana
MAFSSCFLLVLLQIFSALLLCLAQDQSGFISLDCGSPRETSFREKTTNITYISDANFINTGVGGSIKQGYRTQFQQQTWNLRSFPQGIRNCYTLNLTIGDEYLIRANFLHGGYDDKPSTQFELYLGPNLWSTVTTTNETEASIFEMIHILTTDRLQICLVKTGNATPFISALELRKLMNTTYLTRQGSLQTFIRADVGATVNQGYRYGIDVFDRVWTPYNFGNWSQISTNQSVNINNDYQPPEIAMVTASVPTDPDAAMNISLVGVERTVQFYVFMHFAEIQELKSNDTREFNIMYNNKHIYGPFRPLNFTTSSVFTPTEVVADANGQYIFSLQRTGNSTLPPLLNAMEIYSVNLLPQQETDRKEVDAMMNIKSAYGVNKIDWEGDPCVPLDYKWSGVNCTYVDNETPKIISLDLSTSGLTGEILEFISDLTSLEVLDLSNNSLTGSVPEFLANMETLKLINLSGNELNGSIPATLLDKERRGSITLSIEGNTGLCSSTSCATTKKKKKNTVIAPVAASLVSVFLIGAGIVTFLILKRKKRTKLGLNPNSGTGTTPLHSRSHHGFEPPVIAKNRKLTYIDVVKITNNFERVLGRGGFGVVYYGVLNNEPVAVKMLTESTALGYKQFKAEVELLLRVHHKDLTCLVGYCEEGDKMSLIYEFMANGDLKEHLSGKRGPSILTWEGRLRIAAESAQGLEYLHNGCKPQIVHRDIKTTNILLNEKFQAKLADFGLSRSFPLGTETHVSTIVAGTPGYLDPEYYRTNWLTEKSDVFSFGVVLLELVTNQPVIDMKREKSHIAEWVGLMLSRGDINSIVDPKLQGDFDPNTIWKVVETAMTCLNPSSSRRPTMTQVVMDLKECLNMEMARNMGSRMTDSTNDSSIELSMNFTTELNPGAR

SEQ ID NO: 1063 - protein, 843 aa, Arabidopsis thaliana
MERHCLFFVIFSLILHLVQAQDPIGSPYKESSTGLTYTSDDGFVQSGKIGKITKELESLYKKPERTLRYFPDGVRNCFSLNVTRGTKYLIKPTFLYGNYDGRNVIPDFDLYIGPNMWITVNTDNTIKEILHVSKSNTLQVCLVKTGTSIPYINTLELRPLADDIYTNESGSLNYLFRVYYSNLKGYIEYPDDVHDRIWKQILPYQDWQILTTNLQINVSNDYDLPQRVMKTAVTPIKASTTTMEFPWNLEPPTSQFYLFLHFAELQSLQANETREFNVVLNGNVTFKSYSPKFLEMQTVYSTAPKQCDGGKCLLQLVKTSRSTLPPLINAMEAYTVLDFPQIETNVDEVIAIKNIQSTYGLSKTTWQGDPCVPKKFLWDGLNCNNSDDSTPPIITSFGLTGIIVLTIQNLANLQELDLSNNNLSGGVPEFLADMKSLLVINLSGNNLSGVVPQKLIEKKMLKLNIEGNPKLNCTVESCVNKDEEGGRQIKSMTIPIVASIGSVVAFTVALMIFCVVRKNNPSNDEAPTSCMLPADSRSSEPTIVTKNKKFTYAEVLTMTNNFQKILGKGGFGIVYYGSVNGTEQVAVKMLSHSSAQGYKQFKAEVELLLRVHHKNLVGLVGYCEEGDKLALIYEYMANGDLDEHMSGKRGGSILNWGTRLKIALEAAQGLEYLHNGCKPLMVHRDVKTTNILLNEHFDTKLADFGLSRSFPIEGETHVSTVVAGTIGYLDPDDVYSFGVVLLVMITNQPVIDQNREKRHIAEWVGGMLTKGDIKSITDPNLLGDYNSGSVWKAVELAMSCMNPSSMTRPTMSQVVFELKECLASESSREVSMTFGTEVAPMAR

SEQ ID NO: 1064 - protein, 882 aa, Arabidopsis thaliana
MERHCVFVTIFVLILHLVQAQNQTGFISVDCGLSPPESPYNAPQTGLTYTSDTGLINTGKTGRIAKDFEPFVDKPALTMRYFPDGIRNCYNLNVTRDTNYLIKATFVYGNYDGLNVDPNFDLYLGPNLWTTVSSNDTTEEIIHVTKFNSLQICLVKTGISIPFINVLEVRPLKKNVYATQSGSLKYLFRMYVSNSSRRIRFPDDVYDRKWYPIFQNSWTQVTTNLNVNISTIYELPQSVMSTAATPLNANATLNITWTIEPPTTPFYSYIHFAELQSLRANDTREFNVTLNGEYTIGPYSPKPLKTETIQDLSPEQCNGGACILQLVETLKSTLPPLLNAIEAFTVIDFPQMETNEDDVTGINDVQNTYGLNRISWQGDPCVPKQYSWDGLNCNNSDISIPPIIISLDLSSSGLNGVITQGIQNLTHLQYLDLSDNNLTGDIPKFLADIQSLLVINLSGNNLTGSVPLSLLQKKGLKLNVEGNPHLLCTDGLCVNKGDGHKKKSIIAPVVASIASIAILIGALVLFFVLKKKTQSKGPPAAYVQASNGRSRRSAEPAIVTKNKRFTYSEVMQMTNNFQRVLGKGGFGIVYHGLVNGTEQVAIKILSHSSSQGYKQFKAEVELLLRVHHKNLVGLVGYCDEGENLALIYEYMANGDLKEHMSGTRNHFILNWGTRLKIVVESAQGLEYLHNGCKPLMVHRDIKTTNILLNEQFDAKLADFGLSRSFPIEGETHVSTAVAGTPGYLDPEYYRTNWLTEKSDVYSFGVVLLEIITNQPVIDPRREKPHIAEWVGEVLTKGDIKNIMDPSLNGDYDSTSVWKAVELAMCCLNPSSARRPNMSQVVIELNECLTSENSRGGAIRDMDSEGSIEVSLTFGTEVTPLAR

SEQ ID NO: 1065 - protein, 885 aa, Arabidopsis thaliana
MERHFVFIATYLLIFHLVQAQNQTGFISVDCGLSLLESPYDAPQTGLTYTSDADLVASGKTGRLAKEFEPLVDKPTLTLRYFPEGVRNCYNLNVTSDTNYLIKATFVYGNYDGLNVGPNFNLYLGPNLWTTVSSNDTIEEIILVTRSNSLQVCLVKTGISIPFINMLELRPMKKNMYVTQSGSLKYLFRGYISNSSTRIRFPDDVYDRKWYPLFDDSWTQVTTNLKVNTSITYELPQSVMAKAATPIKANDTLNITWTVEPPTTQFYSYVHIAEIQALRANETREFNVTLNGEYTFGPFSPIPLKTASIVDLSPGQCDGGRCILQVVKTLKSTLPPLLNAIEAFTVIDFPQMETNENDVAGIKNVQGTYGLSRISWQGDPCVPKQLLWDGLNCKNSDISTPPIITSLDLSSSGLTGIITQAIKNLTHLQILDLSDNNLTGEVPEFLADIKSLLVINLSGNNLSGSVPPSLLQKKGMKLNVEGNPHILCTTGSCVKKKEDGHKKKSVIVPVVASIASIAVLIGALVLFLILRKKRSPKVEGPPPSYMQASDGRLPRSSEPAIVTKNRRFSYSQVVIMTNNFQRILGKGGFGMVYHGFVNGTEQVAVKILSHSSSQGYKQFKAEVELLLRVHHKNLVGLVGYCDEGDNLALIYEYMANGDLKEHMSGTRNRFILNWGTRLKIVIESAQGLEYLHNGCKPPMVHRDVKTTNILLNEHFEAKLADFGLSRSFLIEGETHVSTVVAGTPGYLDPEYHRTNWLTEKSDVYSFGILLLEIITNRHVIDQSREKPHIGEWVGVMLTKGDIQSIMDPSLNEDYDSGSVWKAVELAMSCLNHSSARRPTMSQVVIELNECLASENARGGASRDMESKSSIEVSLTFGTEVSPNAR

SEQ ID NO: 1066 - protein, 889 aa, Arabidopsis thaliana
MKSLHFCLLFMIVSFTVSRPVEAQDQAGFISLDCGLVPKETTYVETSTNITYKSDANYTDSGLVGKINDAHKTLVQQPLWALRSFPEGERNCYNFNLTVNSTYLIRGTFLYGNYDGLNQSPSFDLHIGASKWTSVNIVGVTDTVMPEIIHVLTQKRLQVCLVKTGKTTPFISSLELRPLINNIYIAESGSMVLQNRVYFPSDSTSIVRYDEDIHDRVWNPVSDDDSSSISTDLQVQTNNLYDVPQFVMKTAAIPKDASAPWSLVWTIDNTTALSYVYMHFAEIQDLKANDLREFDITYNGGKLWFSQFRPNKLSILTMFSQVPLTSSNGEYNFTFEMTSNSTLPPLINALEIYTGLEILQLQTDKDEVSAMMNIKTTYDLSKKISWQGDPCAPQLYRWEGLDCSYPDTEASRIISLNLNASGLNGTITSDITKLTQLSELDLSNNDLSGEIPEFFTDMKLLKLINLSGNPKLNLTVPDSLQQRVNNKSLTLILGEKVKMNPTAKKESKKVPIVPIAASVAGVFALIVILAIFFIVKGKKGKSAEGPPLSVTSGTAKSETRSSNPSIMRKDRKITYPQVLKMTNNFERVLGKGGFGTVYHGNMEDAQVAVKMLSHSSAQGYKEFKAEVELLLRVHHRHLVGLVGYCDDGDNLALIYEYMANGDLRENMLGKRGGNVLTWENRMQIAVEAAQGLEYLHNGCTPPMVHRDVKTTNILLNAQCGAKLADFGLSRSFPIDGECHVSTVVAGTPGYLDPEYYRTNWLSEKSDVYSFGVVLLEIVTNQPVINQTRERPHINEWVGFMLSKGDIKSIVDPKLMGDYDTNGAWKIVELGLACVNPSSNLRPTMAHVVIELNECVAFENARRQGSEEMYTRSSTNFSHTSASEFSPGAR

SEQ ID NO: 1067 - protein, 880 aa, Arabidopsis thaliana
MKSIHGFLLFLITAYVILESVQAQDQLGFISLDCGLVPKNATYTEKTTNITYKSDANYIDSGLVGRISAEYKAQLQQQTWTVRSFPEGERNCYNFNLTAKSRYLIRATFTYGNYDGLRQVPKFDIHIGPSKWTSVKLDGVGNGAVLEMIHVLTQDRLQICLVKTGKGIPFISSLELRPLNNNTYLTQSGSLIGFARVFFSATPTFIRYDEDIHDRVWVRQFGNGLKSISTDLLVDTSNPYDVPQAVAKTACVPSNASQPLIFDWTLDNITSQSYVYMHFAEIQTLKDNDIREFNITYNGGQNVYSYLRPEKFEISTLFDSKPLSSPDGSFSLSFTKTGNSTLPPLINGLEIYKVLDLLELETDQDEVSAMINIKATYDLSKKVSWQGDPCAPKSYQWEGLNCSYPNSDQPRIISLNLAENKLTGTITPEISKLTQLIELDLSKNDLSGEIPEFFADMKLLKLIKLNVFICRNLSGNLGLNSTIPDSIQQRLDSKSLILILSKTVTKTVTLKGKSKKVPMIPIVASVAGVFALLVILAIFFVVRRKNGESNKGTNPSIITKERRITYPEVLKMTNNFERVLGKGGFGTVYHGNLEDTQVAVKMLSHSSAQGYKEFKAEVELLLRVHHRNLVGLVGYCDDGDNLALIYEYMANGDLKENMSGKRGGNVLTWENRMQIAVEAAQGLEYLHNGCTPPMVHRDVKTTNILLNERYGAKLADFGLSRSFPVDGESHVSTVVAGTPGYLDPEYYRTNWLSEKSDVYSFGVVLLEIVTNQPVTDKTRERTHINEWVGSMLTKGDIKSILDPKLMGDYDTNGAWKIVELALACVNPSSNRRPTMAHVVTELNECVALENARRQGREEMHTSGYVDFSRSSASEFSPGAR

SEQ ID NO: 1068 - protein, 855 aa, Arabidopsis thaliana
MKTMNGFLLLSTIAFAVFHLVQAQSQSGFISLDCGLIPKDTTYTEQITNITYISDADYIDSGLTERISDSYKSQLQQQTWTLRSFPEGQRNCYNFNLKANLKYLIRGTFVYGNYDGLNQMPKFDLHIGPNKWTSVILEGVANATIFEIIHVLTQDRLQVCLVKTGQTTPFISSLELRPLNNDTYVTQGGSLMSFARIYFPKTAYFLRYSDDLYDRVWVPFSQNETVSLSTNLPVDTSSNSYNVPQNVANSAIIPAEATHPLNIWWDLQNINAPSYVYMHFAEIQNLKANDIREFNITYNGGQVWESSIRPHNLSITTISSPTALNSSDGFFNFTFTMTTTSTLPPLINALEVYTLVENLLLETYQDEVSAMMNIKKTYGLSKKISWQGDPCSPQIYRWEGLNCLYLDSDQPLITSLDLSDNDLSGEIPDFLADMKMLTLVNLKGNPKLNLTVPDSIKHRINNKSLKLIIDENQSSEKHGIKFPLVAILASVAGVIALLAIFTICVIFKREKQGSGEAPTRVNTEIRSSYQSIETKDRKFTYSEILKMTNNFERVLGKGGYGRVYYGKLDDTEVAVKMLFHSSAEQDYKHFKAEVELLLRVHHRHLVGLVGYCDDGDNFALIYEYMANGDLKENMSGNRSGHVLSWENRMQIAMEAAQGLEYLHNGSRPPMVHRDVKTTNILLNELYQAKLADFGLSRSSPVDGESYVSTIVAGTPGYLDPEYYRTNLLSEKTDVYSFGVVLLEIITNQPVIDTTREKAHITDWVGFKLMEGDIRNIIDPKLIKEFDTNGVWKAVELALSCVNPTSNHRPTMPHVVMELKECLDSEIARKQGSQDMFSRDSIELTFSPTGFSPGPR

SEQ ID NO: 1069 - protein, 421 aa, Arabidopsis thaliana
MSNQRKRSNDEREEEDDEDAEGIGEWERAYVDDRSWEELQEDESGLLRPIDNSAIYHAQYRRRLRMLSAAAAGTRIQKGLIRYLYIVIDFSRAAAEMDFRPSRMAIMAKHVEAFIREFFDQNPLSQIGLVSIKNGVAHTLTDLGGSPETHIKALMGKLEALGDSSLQNALELVHEHLNQVPSYGHREVLILYSALCTCDPGDIMETIQKCKKSKLRCSVIGLSAEMFICKHLCQETGGLYSVAVDEVHLKDLLLEHAPPPPAIAEFAIANLIKMGFPQRAAEGSMAICSCHKEVKIGAGYMCPRCKARVCDLPTECTICGLTLVSSPHLARSYHHLFPIAPFDEVPALSSLNDNRRKLGKSCFGCQQSLIGAGNKPVPCVTCRKCKHYFCLDCDIYIHESLHNCPGCESIHRPKSVSLMEE

SEQ ID NO: 1070 - protein, 794 aa, Arabidopsis thaliana
MKGSSESSSRGLNNTSGVSEFCTDGSKSLSHIDYVRSLLGSHKEANLGGLDDDSIVRALECEDVSLRQWLDNPDRSVDAFECFHVFRQIVEIVNAAHSQGIVVHNVRPSCFVMSSFNNVSFIESASCSDSGSDEDATTKSREIGSSRQEEILSERRSKQQEEVKKQPFPMKQILAMEMSWYTSHEEDNGSLCNCASDIYRLGVLLFELFCPVSSREEKSRTMSSLRHRVLPPQILLNWPKEASFCLWLLHPEPSCRPSMSELLQSEFINEPRENLEEREAAMELRDRIEEQELLLEFLFLIQQRKQEAADKLQDTISLLSSDIDQVVKRQLVLQQKGRDVRSFLASRKRIRQGAETTAAEEENDDNSIDEESKLDDTLESTLLESSRLMRNLKKLESVYFATRYRQIKAATAAEKPLARYYSALSCNGRSSEKSSMSQPSKDPINDSRQGGWIDPFLEGLCKYLSFSKLRVKADLKQGDLLNSSNLVCAIGFDRDGEFFATAGVNKKIKIFECESIIKDGRDIHYPVVELASRSKLSGICWNSYIKSQVASSNFEGVVQVWDVARNQLVTEMKEHEKRVWSIDYSSADPTLLASGSDDGSVKLWSINQGVSIGTIKTKANICCVQFPSETGRSLAFGSADHKVYYYDLRNPKLPLCTMIGHHKTVSYVRFVDSSTLVSSSTDNTLKLWDLSMSISGINETPLHSFMGHTNVKNFVGLSVSDGYIATGSETNEVFVYHKAFPMPVLSYKFKTIDPVSELEVDDASQFISSVCWRGQSSTLVAANSTGNIKILEMV

SEQ ID NO: 1071 - protein, 185 aa, Arabidopsis thaliana
MPNITMGLKPDPVAPTNPTHHESNAAKEIRYRGVRKRPWGRYAAEIRDPVKKTRVWLGTFDTAQQAARAYDAAARDFRGVKAKTNFGVIVGSSPTQSSTVVDSPTAARFITPPHLELSLGGGGACRRKIPLVHPVYYYNMATYPKMTTCGVQSESETSSVVDFEGGAGKISPPLDLDLNLAPPAE

SEQ ID NO: 1072 - protein, 587 aa, Arabidopsis thaliana
MAPIKEFISKFSDFKNNKKLILSSAAIALLLLASIVGIAATTTNQNKNQKITTLSSTSHAILKSVCSSTLYPELCFSAVAATGGKELTSQKEVIEASLNLTTKAVKHNYFAVKKLIAKRKGLTPREVTALHDCLETIDETLDELHVAVEDLHQYPKQKSLRKHADDLKTLISSAITNQGTCLDGFSYDDADRKVRKALLKGQVHVEHMCSNALAMIKNMTETDIANFELRDKSSTFTNNNNRKLKEVTGDLDSDGWPKWLSVGDRRLLQGSTIKADATVADDGSGDFTTVAAAVAAAPEKSNKRFVIHIKAGVYRENVEVTKKKTNIMFLGDGRGKTIITGSRNVVDGSTTFHSATVAAVGERFLARDITFQNTAGPSKHQAVALRVGSDFSAFYQCDMFAYQDTLYVHSNRQFFVKCHITGTVDFIFGNAAAVLQDCDINARRPNSGQKNMVTAQGRSDPNQNTGIVIQNCRIGGTSDLLAVKGTFPTYLGRPWKEYSRTVIMQSDISDVIRPEGWHEWSGSFALDTLTYREYLNRGGGAGTANRVKWKGYKVITSDTEAQPFTAGQFIGGGGWLASTGFPFSLSL

SEQ ID NO: 1073 - protein, 155 aa, Arabidopsis thaliana
MSAVAINHFFGLPEAIEKLILPISRSGESNNESRGRGSSNNIPIDILESPKEYIFYLDIPGISKSDIQVTVEEERTLVIKSNGKRKRDDDESEEGSKYIRLERRLAQNLVKKFRLPEDADMASVTAKYQEGVLTVVIKKLPPQPPKPKTVQIAVS

SEQ ID NO: 1074 - protein, 316 aa, Arabidopsis thaliana
MEQGDHQQHKKEEEALPPGFRFHPTDEELISYYLVNKIADQNFTGKAIADVDLNKSEPWELPEKAKMGGKEWYFFSLRDRKYPTGVRTNRATNTGYWKTTGKDKEIFNSTTSELVGMKKTLVFYRGRAPRGEKTCWVMHEYRLHSKSSYRTSKQDEWVVCRVFKKTEATKKYISTSSSSTSHHHNNHTRASILSTNNNNPNYSSDLLQLPPHLQPHPSLNINQSLMANAVHLAELSRVFRASTSTTMDSSHQQLMNYTHMPVSGLNLNLGGALVQPPPVVSLEDVAAVSASYNGENGFGNVEMSQCMDLDGYWPSY

SEQ ID NO: 1075 - protein, 1070 aa, Arabidopsis thaliana
MTKSAITFPLIFTLLTFIDVSSSASIVFNVVSFGAKPDGVTDSTAAFLKAWQGACGSAASATVVVPTGTFLLKVITFGGPCKSKITFQVTGTVVAPEDYRTFGNSGSWILFNKVNRFSLVGGTFDARGSGFWSCRKSGQNCPPGVRSISFNSAKDVIISGVKSMNSQVSHMTLNGCTNVAVRNIRLVAPGDSPNTDGFTVQFSTGVTLTGSTVQTGDDCVAIGQGTRNFLISKLACGPGHGVSIGSLAKQLNEDGVENVTVSSSVFTGSQNGVRIKSWARPSTGFVRNVFFQNLIMRNVQNPIIIDQNYCPSNQGCPTEHSGVKITQVTYKNIQGTSATQEAMKLVCSKSNPCTGITLQDIKLTYNKGTPATSLCFNAVGKNLGKSGNHREVRVFHFQAGSVITKHGLLEKSSRILQTKLASFRFGRKSCYSRSLCNLREKHTMSSLVPVMEKQESVRGNSVEEQQSLRCVGAENQVRKGRALDKQVSFLAVNVVEKHGIKGRAMEKQERAMERQRSFRGFVEKQKSFRVVMERQLSFMNVGGERKKKTDSPGKRGDSPLHLAARTGNLGKVMELIRACNGIEELKELSSKQNLEGETPLYSAAENGHSLVVEEMLKHMDLDTASVKARNGFDPFHVAAKQGHIEALKKLLETFPNLAMTVDLSCTTALHTAASQGHTDVVNLLLKTDSHLAKIAKNNGKTALHSAARMGHREVVKSLIGNDASIGFRTDKKGQTALHMAVKGQNEGIVLELVKPDPAILSVEDSKGNTPLHTATNKGRIKIVRCLVSFDGINLNAMNKAGDTALDIAEKIGNPELVSVLKEAGAATAKDLGKPRNPAKQLNQTVSDIKHEVQSQLQQSRQTGVRVRRIAKRLKKLHINGLNNAINSATVVAVLIATVAFAAIFTIPGQYEEDRTKGLLLLGEARIAGKAPFLVFFIFDSLALFISLAVVVVQTSVVVIEQKAKKNLVFVINKLMWLACLFISVAFVSLSFIVVGKEDIWLAICATIIGGTIMLTTIGAMCYCVVMHRIEESKLKSLRKERSKSKSFSLSHMPSESEILNGEFNKRMYAL

SEQ ID NO: 1076 - protein, 347 aa, Arabidopsis thaliana
MEALIHHFTLLSDQALVDKTFDPSRIEDLMRLFEVDSYKAWAALESEQQQELEEAEESLREAELELDRDMEWGMEEYRRTLEEMERMEAAELKELEEKAETARRTGNLMEKAATVAAKRHIAAAMGSAAASMRSAWKTAAGNKCFNMGGKKTKIEIKKIINKPAKTVAFTKRREGLFRKASQLCLLSPATQIAILAAPMTSKSHASFYSFGHSSVDNVVSSLLYDHPPLTANQDNRSGLGFWWEDKRFDVSENVEELKEAVDAVSRMLNNVRCRLNDAVKSTQRDGGLEILHHQEEEVLQTRNDETKTNQTHEFEGGETSGSASWLENEDDILHFDDDFYTGIDPLF

SEQ ID NO: 1077 - protein, 1190 aa, Arabidopsis thaliana
  misc_feature (785)..(785): Xaa can be any naturally occurring amino acid
  unsure (1)..(1190): unsure at all Xaa locations
MSSSTKNIPKPPPLPCITYQRFQSSTRKPSSLMRLVPKEALETWDKLFKEGSGADTYVETDNKSHFPAHSSVLAAASPVIATLLNQSRDKNGNTYLKIHGVPCEAVYMFIRFLYSSCYEEEEMKKFVLHLLVLSHCYSVPSLKRLCVEILDQGWINKENVIDVLQLARNCDVTRICFVCLSMVIKDFKSVSSTEGWKVMKRSNPLLEQELIEAVIESDSRKQERRRKLEEREVYLQLYEAMEALVHICREGCGTIGPRDKALKGSHTVCKFPACKGLEGALRHFLGCKSRASCSHCKRMWQLLQLHSCICDDSNSCKVSLCWNFKEKMKKLSKKEQSKWRLLVENIIRARNSLGPFSSRSSGFISIDCGIPSGSSYKDDTTGINYVSDSSFVETGVSKSIPFTAQRQLQNLRSFPEGSRNCYTLIPIQGKGKKYLIRASFMYGNYDGENGSPEFDLFLGGNIWDTVLLSNGSSIVSKEVVYLSQSENIFVCLGNKGKGTPFISTLELRFLGNDNTTYDSPNGALFFSRRWDLRSLMGSPVRYDDDVYDRIWIPRNFGYCREINTSLPVTSDNNSYSLSSLVMSTAMTPINTTRPITMTLENSDPNVRYFVYMHFAEVEDLSLKPNQTREFDISINGVTVAAGFSPKYLQTNTFFLNPESQSKIAFSLVRTPKSTLPPIVNALEIYVANSFSQSLTNQEDGDAVTSLKTSYKVKKNWHGDPCLPNDYIWEGLNCSYDSLTPPRITSLKKIYTIGGRNLSSSGLTGHISSSFSNLTMIQELQLYYQXDLSNNGLTGDIPEFLSKLKFLRVLNLENNTLTGSVPSELLERSNTGSFSLRLGENPGLCTEISCRKSNSKKLVIPLVASFAALFILLLLSGVFWRIRNRRNNPMAKSENKLLFTFADVIKMTNNFGQVLGKGGFGTVYHGFYDNLQVAVKLLSETSAQGFKEFRSEVEVLVRVHHVNLTALIGYFHEGDQMGLIYEFMANGNMADHLAGKYQHTLSWRQRLQIALDAAQGLEYLHCGCKPPIVHRDVKTSNILLNEKNRAKLADFGLSRSFHTESRSHVSTLVAGTPGYLDPLCFETNGLNEKSDIYSFGVVLLEMITGKTVIKESQTKRVHVSDWVISILRSTNDVNNVIDSKMAKDFDVNSVWKVVELALSSVSQNVSDRPNMPHIVRGLNECLQREESNKNY

SEQ ID NO: 1078 - protein, 843 aa, Arabidopsis thaliana
MEEFRFLYLIYSAAFALCLVVSVLAQDQSGFISIDCGIPSGSSYKDDTTGINYVSDSSFVETGVSKSIPFTAQRQLQNLRSFPEGSRNCYTLIPIQGKGKKYLIRASFMYGNYDGENGSPEFDLFLGGNIWDTVLLSNGSSIVSKEVVYLSQSENIFVCLGNKGKGTPFISTLELRFLGNDNTTYDSPNGALFFSRRWDLRSLMGSPVRYDDDVYDRIWIPRNFGYCREINTSLPVTSDNNSYSLSSLVMSTAMTPINTTRPITMTLENSDPNVRYFVYMHFAEVEDLSLKPNQTREFDISINGVTVAAGFSPKYLQTNTFFLNPESQSKIAFSLVRTPKSTLPPIVNALEIYVANSFSQSLTNQEDGDAVTSLKTSYKVKKNWHGDPCLPNDYIWEGLNCSYDSLTPPRITSLNLSSSGLTGHISSSFSNLTMIQELDLSNNGLTGDIPEFLSKLKFLRVLNLENNTLTGSVPSELLERSNTGSFSLRLGENPGLCTEISCRKSNSKKLVIPLVASFAALFILLLLSGVFWRIRNRRNNPMAKSENKLLFTFADVIKMTNNFGQVLGKGGFGTVYHGFYDNLQVAVKLLSETSAQGFKEFRSEVEVLVRVHHVNLTALIGYFHEGDQMGLIYEFMANGNMADHLAGKYQHTLSWRQRLQIALDAAQGLEYLHCGCKPPIVHRDVKTSNILLNEKNRAKLADFGLSRSFHTESRSHVSTLVAGTPGYLDPLCFETNGLNEKSDIYSFGVVLLEMITGKTVIKESQTKRVHVSDWVISILRSTNDVNNVIDSKMAKDFDVNSVWKVVELALSSVSQNVSDRPNMPHIVRGLNECLQREESNKNY

SEQ ID NO: 1079 - protein, 206 aa, Arabidopsis thaliana
  misc_feature (27)..(27): Xaa can be any naturally occurring amino acid
  misc_feature (132)..(132): Xaa can be any naturally occurring amino acid
  unsure (1)..(206): unsure at all Xaa locations
MELKNTIFLVILLSITILQSSSATAKXRSESDQFIVSSCQTTQYPSLCVHTLSAYATKIRHNNDQDLAQTALIISLARAKSVTIFVAKLTKETPKFKRREYLAIKDCIEVLGNSVDRLAQSVKELARAWSCXVASEDFMWKMSNVQTWVSAALTDETTCLDGFSERAMGGKVKRLIRYKVVHVAQVTSNALALVNQFAEKRSVKFP

SEQ ID NO: 1080 - protein, 244 aa, Arabidopsis thaliana
MEYQTNFLSGEFSPENSSSSSWSSQESFLWEESFLHQSFDQSFLLSSPTDNYCDDFFAFESSIIKEEGKEATVAAEEEEKSYRGVRKRPWGKFAAEIRDSTRKGIRVWLGTFDTAEAAALAYDQAAFALKGSLAVLNFPADVVEESLRKMENVNLNDGESPVIALKRKHSMRNRPRGKKKSSSSSTLTSSPSSSSSYSSSSSSSSLSSRSRKQSVVMTQESNTTLVVLEDLGAEYLEELMRSCS

SEQ ID NO: 1081 - protein, 359 aa, Arabidopsis thaliana
  misc_feature (43)..(43): Xaa can be any naturally occurring amino acid
  misc_feature (63)..(63): Xaa can be any naturally occurring amino acid
  misc_feature (102)..(102): Xaa can be any naturally occurring amino acid
  unsure (1)..(359): unsure at all Xaa locations
MSLLADLVNLDISDNSEKIIAEYIWVGGSGMDMRSKARTLPGXPVTDPSKLPKWNYDGSSTGXQAPGQDSEVILYPQAIFKDPFRRGNNILVMCDAYTPSGXEPIPTNKRHAAAEIFANPDVIAEVPWYGIEQEYTLLQKDVNWPLGWPIGGFPGPQGPYYCSIGADKSFGRDIVDAHYKASLYAGINISGINGEVMPGQWEFQVGPSVGISAADEIWIARYILERITEIAGVVVSFDPKPIPGDWNGAGAHTNYSTKSMREEGGYEIIKKAIEKLGLRHKEHISAYGEGNERRLTGHHETADINTFLWGVANRGASIRVGRDTEKEGKGYFEDRRPASNMDPYVVTSMIAETTLLWNP

SEQ ID NO: 1082 - protein, 246 aa, Arabidopsis thaliana
MGESPKGLRKGTWTTEEDILLRQCIDKYGEGKWHRVPLRTGLNRCRKSCRLRWLNYLKPSIKRGKLCSDEVDLVLRLHKLLGNRWSLIAGRLPGRTANDVKNYWNTHLSKKHDERCCKTKMINKNITSHPTSSAQKIDVLKPRPRSFSDKNSCNDVNILPKVDVVPLHLGLNNNYVCESSITCNKDEQKDKLININLLDGDNMWWESLLEADVLGPEATETAKGVTLPLDFEQIWARFDEETLELN

SEQ ID NO: 1083 - protein, 209 aa, Arabidopsis thaliana
MEGSSKGLRKGAWTAEEDSLLRQCIGKYGEGKWHQVPLRAGLNRCRKSCRLRWLNYLKPSIKRGKFSSDEVDLLLRLHKLLGNRWSLIAGRLPGRTANDVKNYWNTHLSKKHEPCCKTKIKRINIITPPNTPAQKVCENSITCNKDDEKDDFVDNFMVGDNIWLERLLDEGQEVDVLVTEAAATEKEGTLAFDVEQLWNLFDGETVIFD

SEQ ID NO: 1084 - protein, 396 aa, Arabidopsis thaliana
MKKDWQMKGSIKLLWELKSLLSDNYTTSDYLWFMEASSSTELKKDTSLYSSHTNLIYLHNVIIQYNLFQCKLRWSPIAGRLPGRIANNVKNYRNTHLNKKEEPCCKSRMRKRETTCSATSPIQRLNVIKPRTQFYNGRLNGQPEVSSFKGSSKGLRKGAWTAEEDSLLRLCIDKYGEGKWHQVPLRAGLNRCRKSCRLRWLNYLKPSIKRGRLSNDEVDLLLRLHKLLGNRWSLIAGRLPGRTANDVKNYWNTHLSKKHESSCCKSKMKKKNIISPPTTPVQKIGVFKPRPRSFSVNNGCSHLNGLPEVDLIPSCLGLKKNNVCENSITCNKDDEKDDFVNNLMNGDNMWLENLLGENQEADAIVPEATTAEHGATLAFDVEQLWSLFDGETVELD

SEQ ID NO: 1085 - protein, 747 aa, Arabidopsis thaliana
MNSRPSNPTKLVIRSSTLLFCGVVLIHLFAAQIDAQRSTSRWQTLNGDAPLVIARGGFSGLYPDSSIAAYQLATLTSVADVVLWCDLQLTKDGLGICFPDLNLANASTIDRVYPNREKSYSVNGVTTKVIRGILSRTDRFDGNGYLISTIEDVVTTLNREGFWLNVQHDAFYEQQNLSMSSFLLSVSRTVSIDFISSPEVNFFKKITGSFGRNGPTFVFQFLGKEDFEPTTNRTYGSILSNLTFVKTFASGILVPKSYILPLDDEQYLVPHTSLVQDAHKAGLQVYVSGFANDVDIAYNYSSDPVSEYLSFVDNGDFSVDGVLSDFPITASAAVDCFSHIGRNATKQVDFLVISKDGASGDYPGCTDLAYEKAIKDGADVIDCSVQMSSDGVPFCLRSIDLRNSIAALQNTFSNRSTSVPEISSVPGIFTFSLTWPEIQSLTPAISNPFRVYRIFRNPREKNSGKLISLSQFLDLAKTYTSLSGVLISVENAAYLREKQGLDVVQAVLDTLTEAGYSNGTTTTKVMIQSTNSSVLVDFKKQSKYETVYKIEETIGNIRDSAIEDIKKFANAVVINKDSVFPNSDSFLTGQTNVVERLQKSQLPVYVELFRNEFVSQAYDFFSDATVEINAYIYGAGINGTITEFPFTAARYKRNRCLGREEVPPYMLPVNPGGLLNVMSPLSLPPAQAPNQDFIEADVTEPPLSPVIAKAPTSTPGTPSTIAQAPSGQTRLKLSLLLSVFFLSLLLL

SEQ ID NO: 1086 - protein, 918 aa, Arabidopsis thaliana
  misc_feature (22)..(22): Xaa can be any naturally occurring amino acid
  unsure (1)..(918): unsure at all Xaa locations
MLSSIGCNMFVPSTFCSVSSYXEFVSIDCGCSSNYTDPRTGLGWVSDSEIIKQGKPVTLANTNWNSMQYRRRRDFPTDNKKYCYRLSTKERRRYIVRTTFLYGGLGSEEAYPKFQLYLDATKWATVTIQEVSRVYVEELIVRATSSYVDVCVCCAITGSPFMSTLELRPLNLSMYATDYEDNFFLKVAARVNFGAPNMDALRYPDDPYDRIWESDINKRPNYLVGVAPGTTRINTSKTINTLTREYPPMKVMQTAVVGTQGLISYRLNLEDFPANARAYAYFAEIEELGANETRKFKLVQPYFPDYSNAVVNIAENANGSYTLYEPSYMNVTLDFVLTFSFGKTKDSTQGPLLNAIEISKYLPISVKTDRSDVSVLDAIRSMSPDSDWASEGGDPCIPVLWSWVNCSSTSPPRVTKIALSRKNLRVNLFFDRWLDDNELTGTLPDMSKLVNLKIMHLENNQLSGSLPPYLAHLPNLQELSIENNSFKGKIPSALLKGKVLFKYNNNPELQNEAQRKHFWQILGISIAAVAILLLLVGGSLVLLCALRKTKRADKGDSTETKKKGLVAYSAVRGGHLLDEGVAYFISLPVLEEATDNFSKKVGRGSFGSVYYGRMKDGKEVAVKITADPSSHLNRQFVTEVALLSRIHHRNLVPLIGYCEEADRRILVYEYMHNGSLGDHLHGSSDYKPLDWLTRLQIAQDAAKGLEYLHTGCNPSIIHRDVKSSNILLDINMRAKVSDFGLSRQTEEDLTHVSSVAKGTVGYLDPEYYASQQLTEKSDVYSFGVVLFELLSGKKPVSAEDFGPELNIVHWARSLIRKGDVCGIIDPCIASNVKIESVWRVAEVANQCVEQRGHNRPRMQEVIVAIQDAIRIERGNENGLKSSSSSSSKAQSSRKTLLTSFLELESPDISRNSLAPAAR

SEQ ID NO: 1087 - protein, 286 aa, Arabidopsis thaliana
MENSMKKKKSFKESEDEELRRGPWTLEEDTLLTNYILHNGEGRWNHVAKCAGLKRTGKSCRLRWLNYLKPDIRRGNLTPQEQLLILELHSKWGNRWSKIAQYLPGRTDNEIKNYWRTRVQKQARQLNIESNSDKFFDAVRSFWVPRLIEKMEQNSSTTTTYCCPQNNNNNSLLLPSQSHDSLSMQKDIDYSGFSNIDGSSSTSTCMSHLTTVPHFMDQSNTNIIDGSMCFHEGNVQEFGGYVPGMEDYMVNSDISMECHVADGYSAYEDVTQDPMWNVDDIWQFRE

SEQ ID NO: 1088 - protein, 1117 aa, Arabidopsis thaliana
MTSAYRPRVIVNGTRRTRTFHYFYCRHCSRTIRLRSFGLYGPICPFCSREINLHDELDIMRPSRPYWDSDTDWITLHLINEPRSNRFNHDDLVYNTDEEFADVMPSVQIGPPPASQSAIEAVRTVIITDEDLVKEKVCAICKEEFEVGEEGKELKCLHLYHSSCIVSWLNIHNTCPICRFEVNLGVSESNVDEGGSYNIDNDRSNRFRTRVCSLWPLRMMIDWGGEGEDLEPLFDYRRVQPANFVCIDDDDDDASVTPIPKKAKTSQTVEKLDDDVKVIEVTGDDDWLLPPPKVIFDKSKDSVEDSTIKALRSKKMELMSFTKTVGDVMQEVEESAKREVEESRNPSSETAAQLPSEPTNDRAKIVITIQDKDGQKTLRVFADEKFERVIKLYTDKAKLDPQNLVFIFDGDKIDPSTTPSELGMEDHDMIEGGIFYMLCIIIIENMERVCEFCKAYRAVVYCIADTANLCLTCDAKVHSANSLSGRHLRTVLCDSCKNQPCVVRCFDHKMFLCHGCNDKFHGGGSSEHRRRDLRCYTGCPPAKDFAVMWGFRVMDDDDDVSLEQSFRMVKPKVQREGGFILEQILELEKVQLREENGSSSLTERGDPSPLELPKKPEEQLIDLPQTGKELVVDFSHLSSSSTLGDSFWECKSPYNKNNQLWHQNIQDIGVCEDTICSDDDFQIPDIDLTFRNFEEQFGADPEPIADSNNVFFVSSLDKSHEMKTFSSSFNNPIFAPKPASSTISFSSSETDNPYSHSEEVISFCPSLSNNTRQKVITRLKEKKRARVFAPNSPELTFLEVKSQELSPGKMENKIAPFSYSGSSAGNSSSGGVVSSSLYSDQLYKSTRNIMQQRQDMVNREALCYTRLHEASLEAEALRLENTELRSMNLRLKNELNSLIRSSIQNRFDHRSPLRMLSNLSIGGNDADEVENQNRTVNRDDVNDKSPTSVMENEDLNRSSLPKSISVRSNGYSKASQGGGGAAAQSGKPRGTVTKPGTCGQVSTTQKVYVRGGGKKEDQEEEIEVEVYNQGMTKTELCNKWQETGTCPYGDHCQFAHGIKELRPVIRHPRYKTEVCRMVLAGDNCPYGHRCHFRHSLSEQEKLVAAGFKPKSSLKLIT

SEQ ID NO: 1089 - protein, 160 aa, Arabidopsis thaliana
MNLSSNDQPSQGRIKAKDWSTDLCECWMDINSCCLTCWCPCVAFGRIAEVVDRGSTSCGVSGAMYMIIFMLTGYGGSSLYSCFYRTKLRAQYNLKERPCCDCCVHFCCEPCALCQEYRQLQHNRDLDLVIGWHGNMERHARLAASTPSAPPLQAPMSRLV

SEQ ID NO: 1090 - protein, 158 aa, Arabidopsis thaliana
MSDDEHHFESSDAGASKTYPQQAGNIRKGGHIVIKGRPCKVVEVSTSKTGKHGHAKCHFVAIDIFTSKKLEDIVPSSHNCDVPHVNRVDYQLIDISEDGFVSLLTDNGSTKDDLKLPTDEALLTQLKNGFEEGKDIVVSVMSAMGEEQMCALKEVGPK

SEQ ID NO: 1091 - protein, 856 aa, Arabidopsis thaliana
MVSRSCANFLDLSSWDLLDFPQTPRTLPRVMTVPGIITDVDGDTTSEVTSTSGGSRERKIIVANMLPLQSKRDAETGKWCFNWDEDSLQLQLRDGFSSETEFLYVGSLNVDIETNEQEEVSQKLLEEFNCVATFLSQELQEMFYLGFCKHQLWPLFHYMLPMFPDHGDRFDRRLWQAYVSANKIFSDRVMEVINPEDDYVWIQDYHLMVLPTFLRKRFNRIKLGFFLHSPFPSSEIYRTLPVRDEILRGLLNCDLIGFHTFDYARHFLSCCSRMLGLDYESKRGHIGLDYFGRTVYIKILPVGVHMGRLESVLSLDSTAAKTKEIQEQFKGKKLVLGIDDMDIFKGISLKLIAMEHLFETYWHLKGKVVLVQIVNPARSSGKDVEEAKRETYETARRINERYGTSDYKPIVLIDRLVPRSEKTAYYAAADCCLVNAVRDGMNLVPYKYIVCRQGTRSNKAVVDSSPRTSTLVVSEFIGCSPSLSGAIRVNPWDVDAVAEAVNSALKMSETEKQLRHEKHYHYISTHDVGYWAKSFMQDLERACRDHYSKRCWGIGFGLGFRVLSLSPSFRKLSVEHIVPVYRKTQRRAIFLDYDGTLVPESSIVQDPSNEVVSVLKALCEDPNNTVFIVSGRGRESLSNWLSPCENLGIAAEHGYFIRWKSKDEWETCYSPTDTEWRSMVEPVMRSYMEATDGTSIEFKESALVWHHQDADPDFGSCQAKEMLDHLESVLANEPVVVKRGQHIVEVKPQGVSKGLAAEKVIREMVERGEPPEMVMCIGDDRSDEDMFESILSTVTNPELLVQPEVFACTVGRKPSKAKYFLDDEADVLKLLRGLGDSSSSLKPSSSHTQVAFESIV

SEQ ID NO: 1092 - protein, 212 aa, Arabidopsis thaliana
MNPKEPNTSHNNMVTMMRPTLLILLFSTFLPQILTVDPPLPPSNGSDFIRLACNTTLYPDLCFSTLSSFANSIQNDSNRLARVAISLTLHNTLQLLSYLQNAYNRDHPTPVLRDCFENLKDAVDGMRGSMKQMKELVSASGSIESFRFQMSNVKTWLSAALTDEYTCTDGFKDVHEDDSIKDDVCSRVDDVKKLTSNALALVNRYADESIIN

SEQ ID NO: 1093 - protein, 615 aa, Arabidopsis thaliana
MASTSTSSLMASKTVISKTALFSSLPGIVSRSFLTFAPASPSVKPLRIRSSNVTKFDEVTNSLDEDMDQIRRLQNGSDVRGVALEGEKGRTVDLTPAAVEAIAESFGEWVAATESNGNGVIKISLGRDPRVSGGKLSTAVFAGLARAGCLAFDMGLATTPACFMSTLLSPFEYDASIMMTASHLPYTRNGLKFFTKRGGLTSPEVEKICDLAARKYATRQTKVSTLIRTRPQQVDFMSAYSKHLREIIKERINHPEHYDTPLKGFQIVVNAGNGSGGFFTWDVLDKLGADTFGSLYLNPDGMFPNHIPNPENKIAMQHTRAAVLENSADLGVVFDTDVDRSGVVDNKGNPINGDKLIALMSAIVLKEHPGSTVVTDARTSMGLTRFITERGGRHCLYRVGYRNVIDKGVELNKDGIETHLMMETSGHGAVKENHFLDDGAYMVVKIIIEMVRMRLAGSNEGIGSLIEDLEEPLEAVELRLNILSEPRDAKAKGIEAIETFRQYIEEGKLKGWELGTCGDCWVTEGCLVDSNDHPSAIDAHMYRARVSDEESGEEYGWVHMRQSIHNPNIALNMQSMLPGGCLSMTRIFRDQFLEASGVARFLDISDFDNYIGGQS

SEQ ID NO: 1094 - protein, 206 aa, Arabidopsis thaliana
MALSPNSSSLDLTISIPSFSPSPSLGDHHGMRDFDINQTPKTEEDREWMIGATPHVNEDDSNSGGRRRKKLRLTKEQSHLLEESFIQNHTLTPKQKKDLATFLKLSQRQVEVWFQNRRARSKLKHTEMECEYLKRWFGSLKEQNRRLQIEVEELRALKPSSTSALTMCPRCERVTDAVDNDSNAVQEGAVLSSRSRMTISSSSSLC

SEQ ID NO: 1095 - protein, 497 aa, Arabidopsis thaliana
MSIITMVWLMKVFVFVTLLSLVFVITESAPESALITKLPGFEGTFPSKHYSGYVTIDKEHGKNLWYYFIESEKNPSKDPVVLWLNGGPGCSSMDGFVYEHGPFNFELPKKNNSLPLLHLNPYSWSKVSNIIYLDSPVGVGFSYSNNKSDYITGDIKTAVDSHAFLLKWFQMFPEFQSNPFFISGESYAGVYVPTLASEVVIGNKNGVKPALNFKGYLVGNVVADPKFDGNAFVPFAHGMGLISDELFENVTKACKGNFYEIEGLECEEQYTKVNDDTNQLNIYNILEPCYHGTSLSAFDIRSLPSSLLQLGKTEKRLPIRKRMFGRAWPVRAPVHPGIVPSWSQLLADVTVPCIDDRVATAWLNDPEIRKAIHTKEESEIGRWELCSGKLSFYHDAGSMIDFHRNLTLSGYRALIYSGDHDMCVPFTGSEAWTKSLGYKVIDEWRAWISNDQVAGYTQGYANNLTFLTIKGAGHTVPEYKPREALDFYSRFLEGSKI

SEQ ID NO: 1096 - protein, 234 aa, Arabidopsis thaliana
MSSQPNHQTSISSLLHDRLHIPPAETIVEKESAEKDTCQSQRKRKEPVLHEVDGSSSGAAKKQDHNAKERLRRMRLHASYLTLGTLLPDHSSSSSKKKWSAPSIIDNVITYIPKLQNEVGELTLRKQKLVELERRGPSIRAISVLELGESGYEAVVQICLKKENEDEFSNLLHVMEVQGLSVLSASTSQVCREQRVVCYNFHVKMDEKPCEGDDYITVLKNNIISSLRDNTKCK

SEQ ID NO: 1097 - protein, 540 aa, Arabidopsis thaliana
MRRFLINQAKGLVDHSRRQHHHKSPSFLSPQPRPLASSPPALSRFFSSTSEMSASDSTSSLPVTLDSINPKVLKCEYAVRGEIVNIAQKLQEDLKTNKDAYPFDEIIYCNIGNPQSLGQLPIKFFREVLALCDHASLLDESETHGLFSTDSIDRAWRILDHIPGRATGAYSHSQGIKGLRDVIAAGIEARDGFPADPNDIFLTDGASPAVHMMMQLLLSSEKDGILSPIPQYPLYSASIALHGGSLVPYYLDEATGWGLEISDLKKQLEEARSKGISVRALVVINPGNPTGQVLAEENQRDIVNFCKQEGLVLLADEVYQENVYVPDKKFHSFKKVARSLGYGEKDISLVSFQSVSKGYYGECGKRGGYMEVTGFTSDVREQIYKMASVNLCSNISGQILASLVMSPPKPGDDSYDSYMAERDGILSSMAKRAKTLEDALNSLEGVTCNRAEGAMYLFPRINLPQKAIEAAEAEKTAPDAFYCKRLLNATGVVVVPGSGFGQVPGTWHFRCTILPQEDKIPAIVNRLTEFHKSFMDEFRN

SEQ ID NO: 1098 - protein, 345 aa, Arabidopsis thaliana
MMHQMLNKKDSATHSTLPYLNTSISWGVVPTDSVANRRGPAESLSLKVDSRPGHIQTTKQISFQDQDSSSTQSTGQSYTEVASSGDDNPSRQISFSAKSVVSLGSEITQRKGFASNPKQGSMTGFPNIHFAPAQANFSFHYADPHYGGLLAATYLPQAPTCNPQMVSMIPGRVPLPAELTETDPVFVNAKQYHAIMRRRQQRAKLEAQNKLIRARKVPYLHESRHVHALKRPRGSGGRFLNTKKLLQESEQAAAREQEQDKLGQQVNRKTNMSRFEAHMLQNNKDRSSTTSGSDITSVSDGADIFGHTEFQFSGFPTPINRAMLVHGQSNDMHGGGDMHHFSVHI

SEQ ID NO: 1099 - protein, 158 aa, Arabidopsis thaliana
MRKTTKVIVFNWHLKKKKKKKGAMTMFRSISMVMLLVALVTFISMVSSAASSPEADFVKKTISSHKIVIFSKSYCPYCNKAKSVFRELDQVPYVVELDEREDGWSIQTALGEIVGRRTVPQVFINGKHLGGSDDTVDAYESGELAKLLGVSGNKEAEL

SEQ ID NO: 1100 - protein, 937 aa, Arabidopsis thaliana
MFYIASTLAIRNPFFFLDRGGKMKNLRGLLLAFLVLSLGISDFLRAQDQQGITFFVSGFLLLTLTKHVSYHNLVINSVSKLIFLPNYFSVFFLLPLSGFISLDCGLQADESPYTEPLTKLTFTSDADFIKSGKSGKIQNVPGMEYIKPYTVLRYFPDGVRNCYTLIVIQGTNYLIVAMFTYGNYDNLNTHPKFDLYLGPNIWTTVDLQRNVNGTRAEIIHIPRSTSLQICLVKTGTTTPLISALELRPLRNNTYIPQSGSLKTLFRVHLTDSKETVRYPEDVHDRLWSPFFMPEWRLLRTSLTVNTSDDNGYDIPEDVVVTAATPANVSSPLTISWNLETPDDLVYAYLHVAEIQSLRENDTREFNISAGQDVNYGPVSPDEFLVGTLFNTSPVKCEGGTCHLQLIKTPKSTLPPLLNAIEAFITVEFPQSETNANDVLAIKSIETSYGLSRISWQGDPCVPQQLLWDGLTCEYTNMSTPPRIHSLDLSSSELTGIIVPEIQNLTELKKLDFSNNNLTGGVPEFLAKMKSLNLSGNNLSGSVPQALLNKVKNGLKLNIQGNPNLCFSSSCNKKKNSIMLPVVASLASLAAIIAMIALLFVCIKRRSSSRKGPSPSQQSIETIKKRYTYAEVLAMTKKFERVLGKGGFGMVYHGYINGTEEVAVKLLSPSSAQGYKEFKTEVELLLRVYHTNLVSLVGYCDEKDHLALIYQYMVNGDLKKHFSGSSIISWVDRLNIAVDAASGLEYLHIGCKPLIVHRDVKSSNILLDDQLQAKLADFGLSRSFPIGDESHVSTLVAGTFGYLDHEYYQTNRLSEKSDVYSFGVVLLEIITNKPVIDHNRDMPHIAEWVKLMLTRGDISNIMDPKLQGVYDSGSAWKALELAMTCVNPSSLKRPNMSHVVHELKECLVSENNRTRDIDTSRSMDINLSFGTDVNPKAR

SEQ ID NO: 1101 - protein, 402 aa, Arabidopsis thaliana
MGTSTTESVVACEFCGERTAVLFCRADTAKLCLPCDQHVHSANLLSRKHVRSQICDNCSKEPVSVRCFTDNLVLCQECDWDVHGSCSSSATHERSAVEGFSGCPSVLELAAVWGIDLKGKKKEDDEDELTKNFGMGLDSWGSGSNIVQELIVPYDVSCKKQSFSFGRSKQVVFEQLELLKRGFVEGEGEIMVPEGINGGGSISQPSPTTSFTSLLMSQSLCGNGMQWNATNHSTGQNTQIWDFNLGQSRNPDEPSPVETKGSTFTFNNVTHLKNDTRTTNMNAFKESYQQEDSVHSTSTKGQETSKSNNIPAAIHSHKSSNDSCGLHCTEHIAITSNRATRLVAVTNADLEQMAQNRDNAMQRYKEKKKTRRYDKTIRYETRKARAETRLRVKGRFVKATDP

SEQ ID NO: 1102 - protein, 137 aa, Arabidopsis thaliana
MAINTITNEEDDASNNFGCNICLELAREPIVTLCGHLFCWPCLYKWLHYHSKSNHCPVCKALVKEDTLVPLYGMGKPSSDPRSKLNSGVTVPNRPAATRTETARPRLEQRHHGSSFFGGHSSFAAMPTGLRFSNFLL

SEQ ID NO: 1103 - protein, 338 aa, Arabidopsis thaliana
MAINTITNEEDDASNNFGCNICLELAREPIVTLCGHLFCWPCLYKWLHYHSKSNHCPVCKALVKEDTLVPLYGMGKPSSDPRSKLNSGVTVPNRPAATRTETARPRLEQRHHGSSFFGGHSSFAAMPTATMASITNLASSLSSLSFSSQVSQRPNTISFPRANSVFALPAKSARRASLSITATVSAPPEEEEIVELKKYVKSRLPGGFAAQKIIGTGRRKCAIARVVLQEGTGKVIINYRDAKEYLQGNPLWLQYVKVPLVTLGYENSYDIFVKAHGGGLSGQAQAITLGVARALLKVSADHRSPLKKEGLLTRDARVVERKKAGLKKARKAPQFSKR

SEQ ID NO: 1104 - protein, 222 aa, Arabidopsis thaliana
MAKMGLKPDPATTNQTHNNAKEIRYRGVRKRPWGRYAAEIRDPGKKTRVWLGTFDTAEEAARAYDTAARDFRGAKAKTNFPTFLELSDQKVPTGFARSPSQSSTLDCASPPTLVVPSATAGNVPPQLELSLGGGGGGSCYQIPMSRPVYFLDLMGIGNVGRGQPPPVTSAFRSPVVHVATKMACGAQSDSDSSSVVDFEGGMEKRSQLLDLDLNLPPPSEQA

SEQ ID NO: 1105 - protein, 430 aa, Arabidopsis thaliana
MAQILAASPTCQMRVPKHSSVIASSSKLWSSVVLKQKKQSNNKVRGFRVLALQSDNSTVNRVETLLNLDTKPYSDRIIAEYIWIGGSGIDLRSKSRTIEKPVEDPSELPKWNYDGSSTGQAPGEDSEVILYPQAIFRDPFRGGNNILVICDTWTPAGEPIPTNKRAKAAEIFSNKKVSGEVPWFGIEQEYTLLQQNVKWPLGWPVGAFPGPQGPYYCGVGADKIWGRDISDAHYKACLYAGINISGTNGEVMPGQWEFQVGPSVGIDAGDHVWCARYLLERITEQAGVVLTLDPKPIEGDWNGAGCHTNYSTKSMREEGGFEVIKKAILNLSLRHKEHISAYGEGNERRLTGKHETASIDQFSWGVANRGCSIRVGRDTEAKGKGYLEDRRPASNMDPYIVTSLLAETTLLWEPTLEAEALAAQKLSLNV

SEQ ID NO: 1106 - protein, 207 aa, Arabidopsis thaliana
MASEDQSAARSTGKVNWFNASKGYGFITPDDGSVELFVHQSSIVSEGYRSLTVGDAVEFAITQGSDGKTKAVNVTAPGGGSLKKENNSRGNGARRGGGGSGGGERRSRGGEGCYNCGDTGHFARDCTSAGNGDQRGATKGGNDGCYTCGDVGHVARDCTQKSVGNGDQRGAVKGGNDGCYTCGDVGHFARDCTQKVAAGNVRSVVVV

SEQ ID NO: 1107 - protein, 196 aa, Arabidopsis thaliana
MESADSGRSDPVKGDDPGPSFVSSPPATPSRYESQKRRDWNTFLQYLKNHKPPLALSRCSGAHVIEFLKYLDQFGKTKVHVAACPYFGHQQPPSPCSCPLKQAWGSLDALIGRLRAAYEENGGRPDSNPFAARAVRIYLREVRESQAKARGIPYEKKKRKRPPTVTTVRVDVASSRQSDGDPCNVGAPSVAEAVPP

SEQ ID NO: 1108 - protein, 675 aa, Arabidopsis thaliana
  misc_feature (667)..(667): Xaa can be any naturally occurring amino acid
  unsure (1)..(675): unsure at all Xaa locations
MIFIKENTAKMTRNKAIACLVFLTVLDFLMNIGAALMSSLAIEGEEQKLGTVIGIDLGTTYSCVGVYHNKHVEIIANDQGNRITPSWVAFTDTERLIGEAAKNQAAKNPERTIFDPKRLIGRKFDDPDVQRDIKFLPYKVVNKDGKPYIQVKVKGEEKLFSPEEISAMILTKMKETAEAFLGKKIKDAVITVPAYFNDAQRQATKDAGAIAGLNVVRIINEPTGAAIAYGLDKKGGESNILVYDLGGGTFDVSILTIDNGVFEVLSTSGDTHLGGEDFDHRVMDYFIKLVKKKYNKDISKDHKALGKLRRECELAKRSLSNQHQVRVEIESLFDGVDFSEPLTRARFEELNMDLFKKTMEPVKKALKDAGLKKSDIDEIVLVGGSTRIPKVQQMLKDFFDGKEPSKGTNPDEAVAYGAAVQGGVLSGEGGEETQNILLLDVAPLSLGIETVGGVMTNIIPRNTVIPTKKSQVFTTYQDQQTTVTINVYEGERSMTKDNRELGKFDLTGILPAPRGVPQIEVTFEVDANGILQVKAEDKVAKTSQSITITNDKGRLTEEEIEEMIREAEEFAEEDKIMKEKIDARNKLETYVYNMKSTVADKEKLAKKISDEDKEKMEGVLKEALEWLEENVNAEKEDYDEKLKEVELVCDPVIKSVYEKTEGENEDXDGDDHDEL

SEQ ID NO: 1109 - protein, 455 aa, Arabidopsis thaliana
MSFRSIVRDVRDSIGSLSRRSFDFKLSSLNKEGGKSRGSVQDSHEEQLVVTIQETPWANLPPELLRDVIKRLEESESVWPARRHVVACASVCRSWRDMCKEIVQSPELSGKITFPVSLKQPGPRDATMQCFIKRDKSNLTYHLYLCLSPALLVENGKFLLSAKRIRRTTYTEYVISMHADTISRSSNTYIGKIRSNFLGTKFIIYDTQPAYNSNIARAVQPVGLSRRFYSKRVSPKVPSGSYKIAQVSYELNVLGTRGPRRMHCAMNSIPASSLAEGGTVPGQPDIIVPRSILDESFRSITSSSSRKITYDYSNDFSSARFSDILGPLSEDQEVVLEEGKERNSPPLVLKNKPPRWHEQLQCWCLNFRGRVTVASVKNFQLIAANQPQPQPQPQPQPQPLTQPQPSGQTDGPDKIILQFGKVGKDMFTMDFRYPLSAFQAFAICLSSFDTKLACE

SEQ ID NO: 1110 - protein, 174 aa, Arabidopsis thaliana
MAPIRRQKGTAARRRQKGTAARRRQKGTAARRRQKGDETVIETAMVDQSPRRVVVAALLLFVVLCDLSNSAGAANSVSAFVQNAILSNKIVIFSKSYCPYCLRSKRIFSQLKEEPFVVELDQREDGDQIQYELLEFVGRRTVPQVFVNGKHIGGSDDLGAALESGQLQKLLAAS

SEQ ID NO: 1111 - protein, 856 aa, Arabidopsis thaliana
MKNLRGLLLAFLVLSLGISDFLRAQDQQGFISLDCGLQADESPYTEPLTKLTFTSDADFIKSGKSGKIQNVPGMEYIKPYTVLRYFPDGVRNCYTLIVIQGTNYLIVAMFTYGNYDNLNTHPKFDLYLGPNIWTTVDLQRNVNGTRAEIIHIPRSTSLQICLVKTGTTTPLISALELRPLRNNTYIPQSGSLKTLFRVHLTDSKETVRYPEDVHDRLWSPFFMPEWRLLRTSLTVNTSDDNGYDIPEDVVVTAATPANVSSPLTISWNLETPDDLVYAYLHVAEIQSLRENDTREFNISAGQDVNYGPVSPDEFLVGTLFNTSPVKCEGGTCHLQLIKTPKSTLPPLLNAIEAFITVEFPQSETNANDVLAIKSIETSYGLSRISWQGDPCVPQQLLWDGLTCEYTNMSTPPRIHSLDLSSSELTGIIVPEIQNLTELKKLDFSNNNLTGGVPEFLAKMKSLLVINLSGNNLSGSVPQALLNKVKNGSCNKKKNSIMLPVVASLASLAAIIAMIALLFVCIKRRSSSRKGPSPSQQSIETIKKRYTYAEVLAMTKKFERVLGKGGFGMVYHGYINGTEEVAVKLLSPSSAQGYKEFKTEVELLLRVYHTNLVSLVGYCDEKDHLALIYQYMVNGDLKKHFSGSSIISWVDRLNIAVDAASGLEYLHIGCKPLIVHRDVKSSNILLDDQLQAKLADFGLSRSFPIGDESHVSTLVAGTFGYLDHEYYQTNRLSEKSDVYSFGVVLLEIITNKPVIDHNRDMPHIAEWVKLMLTRGDISNIMDPKLQGVYDSGSAWKALELAMTCVNPSSLKRPNMSHVVHELKECLVSENNRTRDIDTSRSMDINLSFGTDVNPKAR

SEQ ID NO: 1112 - protein, 777 aa, Arabidopsis thaliana
MDREDNLPVQPDKPPKSLVRPILNLETTSSSSSSSSSSPELLRHLQAAFKRHRPLSKMQTTSIGPRRSVAPQRQASRNTRLVTAEGQRSQDVVTLSQSLAANTLTQDTTNNLAITSVAGESASITQPTVSEHFNPSDRQMDFGKSAVTSLESNLDVQRKSQSLIGTSQDMEWDATNQAEASHLDACIGSKHQNLPSVDSEVSLKSEYKDSSSLAKIQGQLGEFPNFLNQPRTRCSAVGSSWATTTLIHSSSAPMLNATTHVSRSYVEADSNANPHAVQSQGNLPSCCPSSKVSNILHPNKDATASEMPASTNDPEVRVKETDTSKQQQITTGLEAPVGSSIYGSDGQANARLPEELHTSVSSQPQKSDKHEKVASSKGPSAPRKRNYDPDLFFKVNGKLYQRLGKIGSGGSSEVHKVISSDCTIYALKKIKLKGRDYATAYGFCQEIGYLKKLKGKTNIIQLIDYEVTDKTLLQEVLNGTMSNKDGRVKEDGFIYMVLEYGEIDLAHMLSQKWREIEGSDRTIDENWLRFYWQQILQAVNTIHEERIVHSDLKPANFLLVRGFLKLIDFGIAKAINSDTTNIQRDSQVGTLSYMSPEAFMCNESDENGNTIKCGRPSDIWSLGCILYQMVYGRTPFADYKTFWAKFKVITDPNHEITYNQLSNPWLIDLMKKCLAWDRNQRWRIPELLQHPFLAPPIPHEPQVKTIKLFSLIAESCGSDDDKANSMISQLEQLLSNPAPLPRNDVLDSRDQNQQLLSRVSELCIQLQDRLQGLEGEN

SEQ ID NO: 1113 - protein, 332 aa, Arabidopsis thaliana
MENTDELVSIELPAPASWKKLFYPKRAGTPRKTEIVFVAPTGEEISSRKQLEQYLKDNKEAAEKNEEAAVKENMDVDKDGKTENAEAEKEKEKEGVTEIAEAEKENNEGEKTEAEKVNKEGEKTEAGKEGQTEIAEAEKEKEGEKAEAENKEAEVVRDKKESMEVDTSELEKKAGSGEGAEEPSKVEGLKDTEMKEAQEVVTEADVEKKPAEEKTENKGSVTTEANGEQNVTLGEPNLDADAEADKGKESKEYDEKTTEAEANKENDTQESDEKKTEAAANKENETQESDVKKTEAAVAEEKSNDMKAEDTNRSLEANQVQQQQGAAASVSC

SEQ ID NO: 1114 - protein, 124 aa, Arabidopsis thaliana
KGRPSKVVEASPSKTGKHGPPKCHFVATKIFTFKKLKEMVPFSPNCDVPHVNRVDYQLIKFSKKGFVSLLTHKGTPKDDLKLPPNEALLPQLKNGFEEGKDIVGSVMSPMGKEQMCALKKVGPQ

SEQ ID NO: 1115 - protein, 343 aa, Arabidopsis thaliana
MAAAISAAVSLPSSKSSSLLTKISSVSPQRIFLKKSTVCYRRVVSVKAQVTTDTTEAPPVKVVKESKKQEEGIVVNKFKPKNPYTGRCLLNTTEGEVPYREGQSIGVIPEGIDKNGKPHKLRLYSIASSAIGDFGDSKTVSLCVKRLVYTNDGGEIVKGVCSNFLCDLKPGDEAKITGPVGKEMLMPKDPNATIIMLGTGTGIAPFRSFLWKMFFEEHEDYKFNGLAWLFLGVPTSSSLLYKEEFEKMKEKNPDNFRLDFAVSREQTNEKGEKMYIQTRMAEYAEELWELLKKDNTFVYMCGLKGMEKGIDDIMVSLAAKNGIDWLEYKKQLKRSEQWNVEVY

SEQ ID NO: 1116 - protein, 768 aa, Arabidopsis thaliana
MSFTRWEVFFGLSVLALTMPFSAGVTNLRDVSAINNLYITLGAPSLHHWLAFGGDPCGEKWQGVVCDSSNITEIRIPGMKVGGGLSDTLADFSSIQVMDFSSNHISGTIPQALPSSIRNLSLSSNRFTGNIPFTLSFLSDLSELSLGSNLLSGEIPDYFQQLSKLTKLDLSSNILEGHLPSSMGDLASLKILYLQDNKLTGTLDVIEDLFLTDLNVENNLFSGPIPPNLLKIPNFKKDGTPFNTSIITPPPPPVVDPPPATHRAPPVPRIPPVSGVPPAPFAPFAPLQPQQHPPPSPPLVWSPPSSDNGGGDPWNSVSGQPTLQISPPSGSGSGKFWSTQRIILVVSSVAIIVLVSGLCVTLWRCCRSKIYNRYYSGARKDLQRPYFNKPPSQPTPTMGKVSREPMVKPFDGYGAGDRKYGYPMPQRAEESRRAMPPTSYYNKDVNTPQKPLQQPPRQFQSNDTASKRAAHFPPGLNSSSSATVFTIASLQQYTNNFSEENIIGEGSIGNVYRAELRHGKFLAVKKLSNTINRTQSDGEFLNLVSNVLKLKRGHILELLGYCNEFGQRLLVYEYCPNGSLQDALHLDRKLHKKLTWNVRINIALGASKALQFLHEVCQPPVVHQNFKSSKVLLDGKLSVRVADSGLAYMLPPRPTSQMAGYAAPEVEYGSYTCQSDVFSLGVVMLELLTGRRPFDRTRPRGHQTLAQWAIPRLHDIDALTRMVDPSLHGAYPMKSLSRFADIISRSLQMEPGFRPPISEIVQDLQHMI

SEQ ID NO: 1117 - protein, 313 aa, Arabidopsis thaliana
MESIGVLMMCPMSSYLENELEKRFNLLRFWTSPEKSVLLETHRNSIRAVVGNASAGADAQLISDLPNLEIVSSFSVGLDKIDLGKCKEKGIRVTNTPDVLTEDVADLAIGLILALLRRLCECDRYVRSGKWKQGEFQLTTKFSGKSVGIIGLGRIGTAIAKRAEAFSCPINYYSRTIKPDVAYKYYPTVVDLAQNSDILVVACPLTEQTRHIVDRQVMDALGAKGVLINIGRGPHVDEQELIKALTEGRLGGAALDVFEQEPHVPEELFGLENVVLLPHVGSGTVETRNAMADLVVGNLEAHFSGKSLLTPVV

SEQ ID NO: 1118 - protein, 668 aa, Arabidopsis thaliana
  misc_feature (583)..(583): Xaa can be any naturally occurring amino acid
  unsure (1)..(668): unsure at all Xaa locations
MGSTPFCYSINPSPSKLDFTRTHVFSPVSKQFYLDLSSFSGKPGGVSGFRSRRALLGVKAATALVEKEEKREAVTEKKKKSRVLVAGGGIGGLVFALAAKKKGFDVLVFEKDLSAIRGEGKYRGPIQIQSNALAALEAIDIEVAEQVMEAGCITGDRINGLVDGISGTWYVKFDTFTPAASRGLPVTRVISRMTLQQILARAVGEDVIRNESNVVDFEDSGDKVTVVLENGQRYEGDLLVGADGIWSKVRNNLFGRSEATYSGYTCYTGIADFIPADIESVGYRVFLGHKQYFVSSDVGGGKMQWYAFHEEPAGGADAPNGMKKRLFEIFDGWCDNVLDLLHATEEEAILRRDIYDRSPGFTWGKGRVTLLGDSIHAMQPNMGQGGCMAIEDSFQLALELDEAWKQSVETTTPVDVVSSLKRYEESRRLRVAIIHAMARMAAIMASTYKAYLGVGLGPLSFLTKFRVPHPGRVGGRFFVDIAMPSMLDWVLGGNSEKLQGRPPSCRLTDKADDRLREWFEDDDALERTIKGEWYLIPHGDDCCVSETLCLTKDEDQPCIVGSEPDQDFPGMRIVIPSSQVYKXMHARVIYKDGAFFLMDLRSEHGTYVTDNEGRRYRATPNFPARFRSSDIIEFGSDKKAAFRVKVIRKTPKSTRKNESNNDKLLQTA

SEQ ID NO: 1119 - protein, 248 aa, Arabidopsis thaliana
MNGDNRPVEDAHYTETGFPYAATGSYMDFYGGAAQGPLNYDHAATMHPQDNLYWTMNTNAYKFGFSGSDNASFYGSYDMNDHLSRMSIGRTNWDYHPMVNVADDPENTVARSVQIGDTDEHSEAEECIANEHDPDSPQVSWQDDIDPDTMTYEELVELGEAVGTESRGLSQELIETLPTKKYKFGSIFSRKRAGERCVICQLKYKIGERQMNLPCKHVYHSECISKWLSINKVCPVCNSEVFGEPSIH

SEQ ID NO: 1120 - protein, 1343 aa, Arabidopsis thaliana
MLVAGPEEFISYLHFPEEEFLASFGTSTPLVNFPGSKQRMMNRQLLFTLLVVFAIIQLIFAQEPEGFISLDCGLSANEPPYVDGDLGLTYSSDAKFVEGGKIGQIQKDLEPGVLKTYATLRYFPNGIRNCYNLNVTQDTRYLVRAGFMYGNYNGLDSPPEFDLYIEQRGYGTSSEIIHTPKSNTLQICLVRTNDGIPFISVLELRPLSNNIYATRSGSLNRFVRVYFTESSNYVRYPDDVHDRKWVPFSEDELMTVNNTVDTDFDNPYDPPKAVISTAAIPTNASSSLILTWLTSNPEDQIYIYIHFLELQVLRGNETRIFDILMNGIITSPAYSPTDSVVDTVYNKEPLRCNASVCSLELRKTLGSTLPPLINAIEIFTVLEFPETATYEDDFSAIENIRAAYALSNGSGDPCVPKPSHYLKCSNFTDTSVVQLRIISLNLSSMRLSGVISPSIQTLTKLQVLDLSNNNLTGGVPGFLSNMVSLLSIDLSNNSLSGPIPQALLDRRKEGLDLKFHGNTKLYEFISHRKKNFPLVAVVASASAIAIVLVVLGVLFICLRRKPPSREAPHSSIETVKRRFTYSEVMAMTNNFKKIIGEGGFGIIYHGHLNDGQQVAVKVLSESSSQGYKQFKAEVELLMRVHHVNLVNLAGYCDDSNHLALIYEFMENRDLKEHLSGKEGSSFLDWPCRLKIAAEAALGLEYLHTGCKPPMIHRDVKSTNILLNEDFQAKLGDFGLSRSFPIGGETHVSTVVVGTHGFLDPEYYQTQRLSEKSDVYSFGIVLLEIITNKLVIDQTRERPHIAEWVRYMLSIGDIESVMDPNLKGKYDSSSAWKVLELAMLCSKLSLAERPNMAQIVHELNEYLLYENSRREISQDVRSKNSSEVSTNTEMAPMAHASLRAGRKGLSFSVSYLVDSLGLPKKVAESISKKVSFEDKGNPDSVLSLLRSHGFTDSQISSIITDYPQLLVADAEKSIGPKLQFLQSRGASRSELTHIVSTVPEILGKRGDKTISIYYDFVKEIIEADKSSKFEKLCHSLPEGSKQENKIRNVLVLRELGVPQRLLFPLLISDHQPVCGKENFEESLKKVVEMGFDPTTSKFVKALRVVYRFRDKTIEAKVNVCKSLGFSVGDVWAMFKKCPSFLNFSENKIVQTWETLKKCGLLEDDVLSVLKKFPQCINASEQKIMNSIETFLGLGFSRDEVAMIAKRFPQCLILSAETVKKKTEFLVKKMNWPLKAVVSTPAVLGYSLEKRTIPRCNVIKALMSKGSLGSELPGMSSVLIWIEIWNDAMQLLSSWIGHYNELMPALMAIFTKSRVCYEAQRAGAYVDGYIHQRSCFIDQKAHLQQ

SEQ ID NO: 1121 - protein, 1018 aa, Arabidopsis thaliana
MILKRTLTTFENQNLKRCKIDSEIEYGRKKGEIIVYKKRQRATVDQPCSKEPELLTSSSSSLTSKEESQQVCSDQSKSSRGRVRAVSSRFKDSIVGTWKSSRRKGESTESSHDDDDVSLGKKVKGFSGSSKLHRSKDSKVFPRKDNGDSSEVDCDYWDVQISYDDANFGMPKKSDASRKGVYKPEEFTVGDLVWAKCGKRFPAWPAVVIDPISQAPDGVLKHCVPGAICVMFFGYSKDGTQRDYAWVRQGMVYPFTEFMDKFQDQTNLFNYKASEFNKALEEAVLAENGNFGDAEIISPDSSATESDQDYGPASRFQGSYHEDIRTCDGCGSVMPLKSLKRTKDSQPEELLCKHCSKLRKSNQYCGICKRIWHPSDDGDWVCCDGCDVWVHAECDNITNERFKELEHNNYYCPDCKVQHELTPTILEEQNSVFKSTEKTTETGLPDAITVVCNGMEGTYIRKFHAIECKCGSCGSRKQSPSEWERHTGCRAKKWKYSVRVKDTMLPLEKWIAEFSTYTLETQMLDKQKMLSLLEEKYEPVRAKWTTERCAVCRWVEDWEENKMIICNRCQVAVHQECYGVSKSQDLTSWVCRACETPDIERDCCLCPVKGGALKPSDVEGLWVHVTCAWFRPEVGFLNHENMEPAVGLFKIPANSFLKVCTICKQTHGSCVHCCKCATHFHAMCASRAGYNMELHCLEKNGVQRTRKSVYCSFHRKPDPDSVVVVHTPSGVFGSRNLLQNQYGRAKGSRLVLTKKMKLPGFQTQTQAEQSRVFDSLSAARCRIYSRSNTKIDLEAISHRLKGPSHHSLSAIENLNSFKASFSFRAPFMSVFCFLGATFSEYLRKILISIYLVTHQEADFTSFRERLKHLQRTENFRVCFGKSGIHGWGLFARKSIQEGEMIIEYRGVKVRRSVADLREANYRSQGKDCYLFKISEEIVIDATDSGNIARLINHSCMPNCYARIVSMGDGEDNRIVLIAKTNVAAGEELTYDYLFEVDESGEIKVPCLCKAPNCRKFMN

SEQ ID NO: 1122 - protein, 156 aa, Arabidopsis thaliana
MDLEFGRFPIFSILEDMLEAPEEQTEKTRNNPSRAYMRDAKAMAATPADVIEHPDAYVFAVDMPGIKGDEIQVQIENENVLVVSGKRQRDNKENEGVKFVRMERRMGKFMRKFQLPDNADLEKISAACNDGVLKVTIPKLPPPEPKKPKTIQVQVA

SEQ ID NO: 1123 - protein, 101 aa, Arabidopsis thaliana
  misc_feature (23)..(23): Xaa can be any naturally occurring amino acid
  unsure (1)..(101): unsure at all Xaa locations
DNQLISIPKAGVVSLLSDSGRIXLDLKLPTNDGLTAQMRSGFDHEQDNVACVKSSMAEEQICAVKAVGGGKWTSVSLYVMTSLTTDVYVISTKRCFSLSEF

SEQ ID NO: 1124 - protein, 222 aa, Arabidopsis thaliana
MVTVSQSHTTTFLFFTTFLLIFGSISAVRLLPRPNTTTTNDLDFIRTSCNATLYPDVCFTSLSGYASAVQDSPARLAKLAIGVSLSQAKSTAAFLSKLSRSAAKYSGDGHQTASAVIRDCVSNVEDAVDEMRGSLRQLRDMNGRGGGTAARRSVETFRFQMSNVQTWMSAALTDEDTCTDGFEDMDEGGLIKTTVCDRLEEVKRLTSNALALVNTYANNGAP

SEQ ID NO: 1125 - protein, 417 aa, Arabidopsis thaliana
MKKKKKESDTNRTLRSSPGRDQMDNIVDSLNKAYEKFVLASAGVLESKESAGGQKALLTDTALENFKEKWELFRVACDQAEEFVESVKQRIGSECLVDEATGLTTTAAGGQAPAAVTGAATSLPPISAVRLEQMSRAVRWLVLELQRGSGVAPGSVHSSSTGYMDSNQSMRLLSAWIGQIGDLGLNLLWRFIHIVVSLWYIVSGIFEAIESYAITLGLNKKYGSIDLEKLRCLAVVVDIEAAQDVANVVELLQWLTTIGVKQVGLFDSQGLLKKSKDLILETVPGSMLLEEIEKDVAPDGKRIALEFISSSDNKEAVMKAANILLQRYLKSSHPEDDKGEDFFTESHLNDALRVVGENVHVPDLLLVYGPIRSHLGFPAWRLRYTEIVHMGTLKYMRYGSLLKAIHKFTGVHQNYGT

SEQ ID NO: 1126 - protein, 504 aa, Arabidopsis thaliana
MGRLVEAIIASILLSLCFTITKSAPKSALITNLPGFNGTFPSKHYAGYVAIDKHRNKNLWYYFVESERNASVDPVVLWLNGGPGCSSMDGFVYEHGPFNFEPKKKNSHLLHLNPYSWSKVSNIIYLDSPVGVGFSYSNDNADYTTDDTKTASDTHTFLLEWFKMFPEFQSNPFFISGESYAGIYVPTLAAEVVKGNKNAMRTNKTSKNVTKPVINFKGYLVGNGVTDEVFDGNALVPFTHGMGLISDELYEETKLVCNGTYYTGGQSGVSKECAGKLKTVSDTVNLLNLYNILEPCYHGTSLSALDIEFLPKSLLTLGKTEKPMAVRKRMFGRAWPLGAVVRPGIVPSWSQLLAGFGVPCIDDTVATKWLNDPAVRKAVHAKEEKAIGNWELCSSNLEYRHDTGSMIEYHRNLTLSGFRALIFSGDHDMCVPYTGSEAWTKAMGYKVVDEWRPWMSNNQVAGFTQGYANNLTFLTIKGAGHTVPEYKPRESLDFYSRFLAGEKI

SEQ ID NO: 1127 - protein, 872 aa, Arabidopsis thaliana
MDTCTRLLFAACATLSILHLVQSQNQQGFISLDCGLASNESPYNEANSNLTYISDADFIQGGKTGNVQKDLLMKLRKPYTVLRYFPDGIRNCYSLNVKQDTNYLIRVMFRYGNYDGLNNSPRFDLYLGPNIWTTIDMGKSGDGVLEEIIHITRSNILDICLVKTGTSTPMISSIELRPLLYDTYIAQTGSLRNYNRFYFTDSNNYIRYPQDVHDRIWVPLILPEWTHINTSHHVIDSIDGYDPPQDVLRTGAMPANASDPMTITWNLKTATDQVYGYIYIAEIMEVQANETREFEVVVNNKVHFDPFRPTRFEAQVMFNNVPLTCEGGFCRLQLIKTPKSTLPPLMNAFEIFTGIEFPQSETNQNDVIAVKNIQASYGLNRISWQGDPCVPKQFLWTGLSCNVIDVSTPPRIVKLDLSSSGLNGVIPPSIQNLTQLQELDLSQNNLTGKVPEFLAKMKYLLVINLSGNKLSGLVPQALLDRKKEGLKLLVDENMICVSCGTRFPTAAVAASVSAVAIIILVLVLIFVLRRRKPSLSWNSVKFFYAVTRSSFKSENRRFTYSDVNKMTNNFQVVIGKGGFGVVYQGCLNNEQAAIKVLSHSSAQGYKEFKTEVELLLRVHHEKLVSLIGYCDDDNGLALIYELMGKGNLKEHLSGKPGCSVLSWPIRLKIALESAIGIEYLHTGCKPKIVHRDVKSTNILLSEEFEAKIADFGLSRSFLIGNEAQPTVVAGTFGYLDPEYHKTSLLSMKSDVYSFGVVLLEIISGQDVIDLSRENCNIVEWTSFILENGDIESIVDPNLHQDYDTSSAWKVVELAMSCVNRTSKERPNMSQVVHVLNECLETCEKWRKSQEVDLSSPLELSIVVDTEINPKAR

SEQ ID NO: 1128 - protein, 851 aa, Arabidopsis thaliana
MKTHPQAILLCVLFFITFGLLHVVEAGNQEGFISLDCGLSPNEPPYVDAATDLTYTTDNDFVQSGKTGTIDKELESTYNKPILQLRYFPEGVRNCYTLNVTLGTNYLIRASFVYGNYDGLNKELEFDLYLGPNLWANVNTAVYLMNGVTTEEIIHSTKSKVLQVCLIKTGESIPIINSLELRPLINDTYNTQSGSLKYLFRNYFSTSRRIIRYPNDVNDRHWYPFFDEDAWTELTTNLNVNSSNGYDPPKFVMASASTPISKNAPFNFTWSLIPSTAKFYSYMHFADIQTLQANETREFDMMLNGNLALERALEVFTVIDFPELETNQDDVIAIKNIQNTYGVSKTSWQGDPCVPKRFMWDGLNCNNSYISTPPTITFLNLSSSHLTGIIASAIQNLTHLQNLDLSNNNLTGGVPEFLAGLKSLLVINLSGNNLSGSVPQTLLQKKGLKLNLEGNIYLNCPDGSCVSKDGNGGAKKKNVVVLVVVSIALVVVLGSALALFLVFRKRKTPRNEVSRTSRSLDPTITTKNRRFTYSEVVKMTNNFEKILGKGGFGMVYHGTVNDAEQVAVKMLSPSSSQGYKEFKAEVELLLRVHHKNLVGLVGYCDEGENLSLIYEYMAKGDLKEHMLGNQGVSILDWKTRLKIVAESAQGLEYLHNGCKPPMVHRDVKTTNILLDEHFQAKLADFGLSRSFPLEGETRVDTVVAGTPGYLDPEYYRTNWLNEKSDVYSFGIVLLEIITNQHVINQSREKPHIAEWVGVMLTKGDIKSIIDPKFSGDYDAGSVWRAVELAMSCVNPSSTGRPTMSQVVIELNECLASENSRRGMSQNMESKGSIQYTEVSTNFGTEYTPEAR

SEQ ID NO: 1129 - protein, 630 aa, Arabidopsis thaliana
MVLQKRPDYGFNGYEVPHTPRAARSPRKSAFKKKSENHQISSFDLLAAVAGKLLLEGGNSSSSSNNTSGNNEDQCAVKKEPLNGGDIMVEEETTNSDHDNNNAERSFFVSEILQKSHEMQSFNRSPSPLKEFHFGSSSGITSDSSEKFETQELAYDESKINNGDCYRSESNDKKSMLGGLNFEAKLSRNVVGKDEKHIGSGFRKPIPQNPSTCSDDVDLHGKENDDGENFSACYRTKSFRSTLRIGDRRIRKVWASKYCKVPPKLKDTTVTNSDLDLKSDYYSKKHCLKSLRSERNYPIKKRRYFDGYTASQSEETNKNEGQSGSPRKASAFLSSIACQKQPAAFQSPRDSNNVKLGIKSFRVPELFIEIPETATVGSLKRTVLEAVTSILGGGLRIGVLVHGKKVRDDSKMLLQTGLSLDTLSDTLGFCLEPNPPQSTKPLSPEDSDFARPCNVPHTLTRCLPSPGKHAKPSNSVESDLDSKPSAPNRGKTIYSRALIPVSPLHAQALTVVPPRKTKRSEVAQRRIRRPFSVAEVEALVQAVERLGTGRWRDVKLRAFDNAKHRTYVDLKDKWKTLVHTARISPQQRRGEPVPQELLDRVLTAHAYWSQQQGKHQLLEGPQQLETSLGL

SEQ ID NO: 1130 - protein, 104 aa, Arabidopsis thaliana
VVRLVENPTSGNAAAAPGKRKALLHTPSGEVVTSYASLERKLAALGWERYYAGGGDGGGAGLLQYHKRTSVDLISLPKDFAHFGSVHMYDIVIKNRDAFRVIDA

SEQ ID NO: 1131 - protein, 90 aa, Arabidopsis thaliana
  misc_feature (12)..(12): Xaa can be any naturally occurring amino acid
  misc_feature (20)..(20): Xaa can be any naturally occurring amino acid
  unsure (1)..(90): unsure at all Xaa locations
STSKTGMHVYSXCHFDAIEXGTAKKLEDIVPSSHNCDVPHVNRVDYHLIDITEDGFVSLLTVSGGTKDCLKLPTDDGLTVHMRLDFNEGK

SEQ ID NO: 1132 - protein, 418 aa, Arabidopsis thaliana
  misc_feature (138)..(138): Xaa can be any naturally occurring amino acid
  misc_feature (349)..(349): Xaa can be any naturally occurring amino acid
  unsure (1)..(418): unsure at all Xaa locations
MSSSGQTQFRYTQTPSKVVHLRNLPWECVEEELIDLCKRFGKIVNTKSNVGANRNQAFVEFADLNQAISMVSYYASSSEPAQIRGKTVYIQYSNRHEIVNNQSPGDVPGNVLLVTFEGVESHEVSIDVIHLMLMPLYXNLSGESLEIVSCSSFSYLCSIMPIIGQVFSAFGFVHKIATFEKAAGFQALVQFTDVETASAARSALDGRSIPRYLLSAHVGSCSLRMSYSAHTDLNIKFQSHRSRDYTNPYLPVNQTAMDGSMQPALGADGKKVESQSNVLLGLIENMQYAVTVDVLHTVFSAYGTVQKIAIFEKNGSTQALIQYSDIPTAAMAKEALEGHCIYDGGYCFXSDKSRDYTLPDLSLLVAQKGPAVSGSAPPAGWQNPQAQSQYSGYGGSPYMYPSSDPNGASPSGQPPYYG

SEQ ID NO: 1133 - protein, 225 aa, Arabidopsis thaliana
MRRGRGSSAVAGPTVVAAINGSVKEIRFRGVRKRPWGRFAAEIRDPWKKARVWLGTFDSAEEAARAYDSAARNLRGPKAKTNFPIDSSSPPPPNLRFNQIRNQNQNQVDPFMDHRLFTDHQQQFPIVNRPTSSSMSSTVESFSGPRPTTMKPATTKRYPRTPPVVPEDCHSDCDSSSSVIDDDDDIASSSRRRNPPFQFDLNFPPLDCVDLFNGADDLHCTDLRL

SEQ ID NO: 1134 - protein, 266 aa, Arabidopsis thaliana
MGGVKRKIAIEKIQNKNPRAVSFSKRRKGLYSKASELCLLSDAEIAIIATPVSSNSNAAFYSFGHSSVDNVVAAFLANQRPCDERFWWEDESLLKSENLEELREAMDSMSTMLRDLKELEKQRDHQTQTLIHQPCSARVCIQDYVTVNFDGFNTEEQTLAVSDNSNNNGLLGNLDECNEDFDDLDQIFDTVTNSEFLSVNLEMDDVTVNSEGNTEEQTLAVSDNSNNNGLLGNLDECNEDFDDLDQIIEYLTSSEALSMNLKMDDV

SEQ ID NO: 1135 - protein, 722 aa, Arabidopsis thaliana
MSFVVGVGGSGSGSGGDGGGSHHHDGSETDRKKKRYHRHTAQQIQRLESSFKECPHPDEKQRNQLSRELGLAPRQIKFWFQNRRTQLKAQHERADNSALKAENDKIRCENIAIREALKHAICPNCGGPPVSEDPYFDEQKLRIENAHLREELERMSTIASKYMGRPISQLSTLHPMHISPLDLSMTSLTGCGPFGHGPSLDFDLLPGSSMAVGPNNNLQSQPNLAISDMDKPIMTGIALTAMEELLRLLQTNEPLWTRTDGCRDILNLGSYENVFPRSSNRGKNQNFRVEASRSSGIVFMNAMALVDMFMDCVKWTELFPSIIAASKTLAVISSGMGGTHEGALHLLYEEMEVLSPLVATREFCELRYCQQTEQGSWIVVNVSYDLPQFVSHSQSYRFPSGCLIQDMPNGYSKVTWVEHIETEEKELVHELYREIIHRGIAFGADRWVTTLQRMCERFASLSVPASSSRDLGGVILSPEGKRSMMRLAQRMISNYCLSVSRSNNTRSTVVSELNEVGIRVTAHKSPEPNGTVLCAATTFWLPNSPQNVFNFLKDERTRPQWDVLSNGNAVQEVAHISNGSHPGNCISVLRGSNATHSNNMLILQESSTDSSGAFVVYSPVDLAALNIAMSGEDPSYIPLLSSGFTISPDGNGSNSEQGGASTSSGRASASGSLITVGFQIMVSNLPTAKLNMESVETVNNLIGTTVHQIKTALSGPTASTTA

SEQ ID NO: 1136 - protein, 421 aa, Arabidopsis thaliana
MDGSMNFKNNNLGNEPPGDGGGGGGLTRQGSIYSLTFDEFQSSVGKDFGSMNMDELLKNIWSAEETQAMASGVVPVLGGGQEGLQLQRQGSLTLPRTLSQKTVDQVWKDLSKVGSSGVGGSNLSQVAQAQSQSQSQRQQTLGEVTLEEFLVRAGVVREEAQVAARAQIAENNKGGYFGNDANTGFSVEFQQPSPRVVAAGVMGNLGAETANSLQVQGSSLPLNVNGARTTYQQSQQQQPIMPKQPGFGYGTQMGQLNSPGIRGGGLVGLGDQSLTNNVGFVQGASAAIPGALGVGAVSPVTPLSSEGIGKSNGDSSSLSPSPYMFNGGVRGRKSGTVEKVVERRQRRMIKNRESAARSRARKQAYTVELEAEVAKLKEENDELQRKQARIMEMQKNQETEMRNLLQGGPKKKLRRTESGPW

SEQ ID NO: 1137 - protein, 886 aa, Arabidopsis thaliana
METRSKLMLLACATFSIISLVKSQNQQGFISLYCGLPSNESPYIEPLTNLTYISDVNFVRGGKTGNIKNNSDIDFTSRPYKVLRYFPEGIRNCYSLSVKQGTKYLIRTLFFYGNYDGLNTSPRFDLFLGPNIWTSVDVQKVDGGDGVIEEIIHVTRCNILDICLVKTGTTTPMISAIELRPLRYDTYTARTGSLKKILHFYFTNSGKEVRYPEDVYDRVWIPHSQPEWTQINTTRNVSGFSDGYNPPQDVIKTASIPTNVSEPLTFTWMSESSDDETYAYLYFAEIQQLKANETRQFKILVNGVYYIDYIPRKFEAETLITPAALKCGGGVCRVQLSKTPKSTLPPQMNAIEIFSVIQFPQSDTNTDEVIAIKNIQSTYKVSRISWQGDPCVPIQFSWMGVSCNVIDISTPPRIISLDLSSSGLTGVITPSIQNLTMLRELDLSNNNLTGVIPPSLQNLTMLRELDLSNNNLTGEVPEFLATIKPLLVIHLRGNNLRGSVPQALQDRENNDGLKLLRGKHQPKSWLVAIVASISCVAVTIIVLVLIFIFRRRKSSTRKVIRPSLEMKNRRFKYSEVKEMTNNFEVVLGKGGFGVVYHGFLNNEQVAVKVLSQSSTQGYKEFKTEVELLLRVHHVNLVSLVGYCDKGNDLALIYEFMENGNLKEHLSGKRGGPVLNWPGRLKIAIESALGIEYLHIGCKPPMVHRDVKSTNILLGLRFEAKLADFGLSRSFLVGSQTHVSTNVAGTLGYLDPEYYQKNWLTEKSDVYSFGIVLLEIITGQPVIEQSRDKSYIVEWAKSMLANGDIESIMDRNLHQDYDTSSSWKALELAMLCINPSSTLRPNMTRVAHELNECLEIYNLTKRRSQDQNSSKSSGHTVTFISDIPSAR

SEQ ID NO: 1138 - protein, 868 aa, Arabidopsis thaliana
METRNKFMLLACATFSIMSLVKSQNQQGFISLDCGLPSKESYIEPSSNLTFISDVNFIRGGKTGNIQNNSRTNFIFKPFKVLRYFPDGIRNCYSLSVKQGTKYLIRTLFYYGNYDGLNTSPRFDLFLGPNIWTSVDVLIADVGDGVVEEIVHVTRSNILDICLVKTGTSTPMISAIELRPLRYDTYTARTGSLKSMAHFYFTNSDEAIRYPEDVYDRVWMPYSQPEWTQINTTRNVSGFSDGYNPPQGVIQTASIPTNGSEPLTFTWNLESSDDETYAYLFFAEIQQLKVNETREFKILANGVDYIDYTPWKFEARTLSNPAPLKCEGGVCRVQLSKTPKSTLPPLMNAIEIFSVIQFPQSDTNTDEVIAIKKIQSTYQLSRISWQGDPCVPKQFSWMGVSCNVIDISTPPRIISLDLSLSGLTGVISPSIQNLTMLRELDLSNNNLTGEVPEFLATIKPLLVIHLRGNNLRGSVPQALQDREKNDGLKLFVDPNITRRGKHQPKSWLVAIVASISCVAVTIIVLVLIFIFRRRKSSTRKVIRPSLEMKNRRFKYSEVKEMTNNFEVVLGKGGFGVVYHGFLNNEQVAVKVLSQSSTQGYKEFKTEVELLLRVHHVNLVSLVGYCDEGIDLALIYEFMENGNLKEHLSGKRGGSVLNWSSRLKIAIESALGIEYLHIGCQPPMVHRDVKSTNILLGLRFEAKLADFGLSRSFLVGSQAHVSTNVAGTLGYLDPEYYLKNWLTEKSDVYSFGIVLLESITGQPVIEQSRDKSYIVEWAKSMLANGDIESIMDPNLHQDYDSSSSWKALELAMLCINPSSTQRPNMTRVAHELNECLEIYNLTKIRSQDQNSSKSLGHTVTFISDIPSAR

SEQ ID NO: 1139 - protein, 121 aa, Arabidopsis thaliana
  misc_feature (82)..(82): Xaa can be any naturally occurring amino acid
  unsure (1)..(121): unsure at all Xaa locations
MESEGKIVFTEEQEALVVKSWSVMKKNSAELGLKLFIKIFEIAPTTKKMFSFLRDSPIPAEQNPKLKPHAMSVFVMCCESAXVQLRKTGKVTVRETTLKVAWGQAYDHLVAAIKAEMNLSN

SEQ ID NO: 1140 - protein, 590 aa, Arabidopsis thaliana
MAVDSNLSSPLGPPACEKDAKALRFIEEMTRNADTVQENLLAEILARNADTEYLRRFNLCGATDRDTFKTKIPVITYEDLQPEIQRIADGDRSPILSAHPISEFLTSSGTSAGERKLMPTIKEELDRRQLLYSLLMPVMNLYVPGLDKGKGMYFLFVKSETKTPGGLPARPVLTSYYKSEHFRSRPYDPYNVYTSPNEAILCPDSFQSMYTQMLCGLLDRLSVLRVGAVFASGLLRAIRFLQLHWSRFAHDIELGCLDSEITDPSIRQCMSGILKPDPVLAEFIRRECKSDNWEKIITRIWPNTKYLDVIVTGAMAQYIPTLEYYSGGLPMACTMYASSECYFGLNLNPMSKPSEVSYTIMPNMAYFEFIPLGGTKAVELVDVNIGKEYELVVTTYAGLCRYRVGDILRVTGFHNSAPQFHFVRRKNVLLSIDSDKTDESELQKAVENASSILHEECGSRVAEYTSYADTSTIPGHYVLYWELLVRDGARQPSHETLTRCCLGMEESLNSVYRQSRVADNSVGPLEIRVVRNGTFEELMDYAISRGASINQYKVPRCVNFTPIVELLDSRVVSAHFSPSLPHWTPERRRR

SEQ ID NO: 1141 - protein, 176 aa, Arabidopsis thaliana
MSFFIEDSGLIVTQLLYKMAVLITVLRWILAWILRYRSRSRSTSSSTSACPSISSQAIKESLSVTTFRDAAERSPAMINDTCAVCLGDLEDGDEVRELRNCSHMFHRECIDRWLDYECCGGDENNEGEEDNHRTCPLCRTPLLAANTTSCGDWPTKNEPSWAVERLLYLFGDDLHV

SEQ ID NO: 1142 - protein, 130 aa, Arabidopsis thaliana
FSEESDEELLMVPDMEAAGSTCVLSSSADDGVNNPELDQTQNGVSTAKRRRGRNPVDKEYRSLKRLLRNRVSAQQARERKKVYVSDLESRANELQNNNDQLEEKISTLTNENTMLRKMLINTRPKTDDNH

SEQ ID NO: 1143 - protein, 369 aa, Arabidopsis thaliana
MSERRIHYSQLKNDNLNQISPSSAPSPITLNHQLTDSSSSSSSGGNNRISPIILFIIVLLSVIFFICSILHLLVRYYLKKKRSNLSSSPNESNQNPEFSDSDTYQRQLQQLFHLHDSGLDQALIDALPVFLYKEIKGTKEPFDCAVCLCEFSEDDKLRLLPNCSHAFHIDCIDTWLLSNSTCPLCRGTLFSLGHQFEYPDFNFGFFAGDDGGGGVRVSPVQKPAENEIGKRVFSVRLGKFRSSNIVNNGEVVVGGGGETSSSSLDNRRCFSMGSYQYIVAESDLVVALCPNNEGLKNNKDVEGKKINMRSKGESFSVSKIWQWSNKRSKFPNNHPSETNLVVGGSSSSSSYVCSGSDGLSLNGRRFQGP

SEQ ID NO: 1144 - protein, 768 aa, Arabidopsis thaliana
  misc_feature (623)..(623): Xaa can be any naturally occurring amino acid
  unsure (1)..(768): unsure at all Xaa locations
MSNQNKPQPPKPLMKQQSLPPDINREEAWLRMKKKHPSARLHRSKSCVTNDDIEELRGCFDLGFGFEPDSLDFNPSLSKTIPALDLYSAIHRQYSNHLSRTWSSTSERDVNSSTTTIVNKDDDGKTMKKKLKQWAKVVACSTRQSSEKQLDPLHCSRAHLFPLQKWPHVSNLLPTPSSAIIMTSFSLTFTSPLLPSSSTKPKRSVLVAAAQTTAPAESTASVDADRLEPRVELKDGFFILKEKFRKGINPQEKVKIEREPMKLFMENGIEELAKKSMEELDSEKSSKDDIDVRLKWLGLFHRRKHQYGKFMMRLKLPNGVTTSAQTRYLASVIRKYGEDGCADVTTRQNWQIRGVVLPDVPEILKGLASVGLTSLQSGMDNVRNPVGNPIAGIDPEEIVDTRPYTNLLSQFITANSQGNPDFTNLPRKWNVCVVGTHDLYEHPHINDLAYMPANKDGRFGFNLLVGGFFSPKRCEEAIPLDAWVPADDVLPLCKAVLEAYRDLGTRGNRQKTRMMWLIDELGVEGFRTEVEKRMPNGKLERGSSEDLVNKQWERRDYFGVNPQKQEGLSFVGLHVPVGRLQADDMDELARLADTYGSGELRLTVEQNIIIPNVETSKTEALLXQEPFLKNRFSPEPSILMKGLVACTGSQFCGQAIIETKLRALKVTEEVERLVSVPRPIRMHWTGCPNTCGQVQVADIGFMGCLTRGEEGKPVEGADVYVGGRIGSDSHIGEIYKKGVRVTELVPLVAEILIKEFGAVPREREENED

SEQ ID NO: 1145 - protein, 909 aa, Arabidopsis thaliana
MEDDGGSDGGEGNGGFSPNSSFGAFADTAMDLDFMDELLFDGCWLETTDSKSLKQTEQSPSASTAMNDNSPFLCFGENPSQDNFSNEETERMFPQAEKFLLEEAEVGKSWWIAPSASEGPSSSVKERLLQAISGLNEAVQDKDFLVQIWVPIQQEGKSFLTTWAQPHLFNQEYSSLAEYRHVSETYNFPADEGMKDFVGLPGRVFLQKFPEWTPDVRFFRRDEYPRIKEAQKCDVRGSLALPVFERGSGTCLGVVEIVTTTQKMNYRQELEKMCKALEAVDLRSSSNLNTPSSEFLQVYSDFYCAALPEIKDFLATICRSYDFPLALSWAPCARQGKVGSRHSDENFSECVSTIDSACSVPDEQSKSFWEACSEHHLLQGEGIVGKAFEATKLFFVPEVATFSKTNYPLAHHAKISGLHAALAVPLKSKSGLVEFVLEFFFPKACLDTEAQQEMLKSLCVTLQQDFRSSNLFIKDLELEVVLPVRETMLFSENLLCGAETVESLTEIQMQESSWIAHMIKANEKGKDVSLSWEYQKEDPKELSSGRENSQLDPVPNNVPLEAEQLQQASTPGLRVDIGPSTESASTGGGNMLSSRRPGEKKRAKTEKTIGLEVLRQYFAGSLKDAAKSIGVCPTTLKRICRQHGIMRWPSRKIKKVGHSLKKLQLVMDSVQGAQGSIQLDSFYTSFPELNSPNMSSNGPSLKSNEQPSHLNAQTDNGIMAEENPRSPSSSCSKSSGSSNNNENTGNILVAEDADAVLKRAHSEAQLHNVNQEETKCLARTQSHKTFKEPLVLDNSSPLTGSSNTSLRARGAIKVKATFGEARIRFTLLPSWGFAELKQEIARRFNIDDISWFDLKYLDDDKEWVLLTCEADLVECIDIYRLTQTHTIKISLNEASQVKLSGSFGNTGLS

SEQ ID NO: 1146 - protein, 933 aa, Arabidopsis thaliana
MKHIFKKLHRGGNQEQQNRTNDAAPPSDQNRIHVSANPPQATPSSVTETLPVAGATSSMASPAPTAASNRADYMSSEEEYQVQLALAISASNSQSSEDPEKHQIRAATLLSLGSHQRMDSRRDSSEVVAQRLSRQYWEYGVLDYEEKVVDSFYDVYSLSTDSAKQGEMPSLEDLESNHGTPGFEAVVVNRPIDSSLHELLEIAECIALGCSTTSVSVLVQRLAELVTEHMGGSAEDSSIVLARWTEKSSEFKAALNTCVFPIGFVKIGISRHRALLFKVLADSVRLPCRLVKGSHYTGNEDDAVNTIRLEDEREYLVDLMTDPGTLIPADFASASNNTVEPCNSNGNKFPTAQFSNDVPKLSEGEGSSHSSMANYSSSLDRRTEAERTDSSYPKVGPLRNIDYSSPSSVTSSTQLENNSSTAIGKGSRGAIIECSRTNMNIVPYNQNSEEDPKNLFADLNPFQNKGADKLYMPTKSGLNNVDDFHQQKNNPLVGRSPAPMMWKNYSCNEAPKRKENSYIENLLPKLHRDPRYGNTQSSYATSSSNGAISSNVHGRDNVTFVSPVAVPSSFTSTENQFRPSIVEDMNRNTNNELDLQPHTAAVVHGQQNDESHIHDHRKYTSDDISTGCDPRLKDHESTSSSLDSTSYRNDPQVLDDADVGECEIPWNDLVIAERIGLGSYGEVYHADWHGTEVAVKKFLDQDFSGAALAEFRSEVRIMRRLRHPNVVFFLGAVTRPPNLSIVTEFLPRGSLYRILHRPKSHIDERRRIKMALDVAMGMNCLHTSTPTIVHRDLKTPNLLVDNNWNVKVGDFGLSRLKHNTFLSSKSTAGTPEWMAPEVLRNEPSNEKCDVYSFGVILWELATLRLPWRGMNPMQVVGAVGFQNRRLEIPKELDPVVGRIILECWQTDPNLRPSFAQLTEVLKPLNRLVLPTPQ

SEQ ID NO: 1147 - protein, 361 aa, Arabidopsis thaliana
MGLIQNAHVVTAADREGADVANLRSIWDLASSNLGFSFYPFPLFVRTKCFEFLLTFFSDLMAMEDQSAARSIGKVSWFSDGKGYGFITPDDGGEELFVHQSSIVSDGFRSLTLGESVEYEIALGSDGKTKAIEVTAPGGGSLNKKENSSRGSGGNCFNCGEVGHMAKDCDGGSGGKSFGGGGGRRSGGEGECYMCGDVGHFARDCRQSGGGNSGGGGGGGRPCYSCGEVGHLAKDCRGGSGGNRYGGGGGRGSGGDGCYMCGGVGHFARDCRQNGGGNVGGGGSTCYTCGGVGHIAKVCTSKIPSGGGGGGRACYECGGTGHLARDCDRRGSGSSGGGGGSNKCFICGKEGHFARECTSVA

SEQ ID NO: 1148 - protein, 338 aa, Arabidopsis thaliana
MARIGSFLIILYLTYALTLCICDDDESNYGGDKGNLFPGFYRSSCPRAEEIVRSVVAKAVARETRMAASLMRLHFHDCFVQGCDGSLLLDTSGSIVTEKNSNPNSRSARGFEVVDEIKAALENECPNTVSCADALTLAARDSSVLTGGPSWMVPLGRRDSTSASLSGSNNNIPAPNNTFNTIVTRFNNQGLDLTDVVALSGSHTIGFSRCTSFRQRLYNQSGNGSPDRTLEQSYAANLRQRCPRSGGDQNLSELDINSAGRFDNSYFKNLIENMGLLNSDEVLFSSNEQSRELVKKYAEDQEEFFEQFAESMIKMGNISPLTGSSGEIRKNCRKINNS

SEQ ID NO: 1149 - protein, 880 aa, Arabidopsis thaliana
MEYHPQAIRLCALIFISFYALLHLVEAQDQKGFISLDCGSLPNEPPYNDPSTGLTYSTDDGFVQSGKTGRIQKAFESIFSKPSLKLRYFPDGFRNCYTLNVTQDTNYLIKAVFVYGNYDGLNNPPSFDLYLGPNLWVTVDMNGRTNGTIQEIIHKTISKSLQVCLVKTGTSSPMINTLELRPLKNNTYNTQSGSLKYFFRYYFSGSGQNIRYPDDVNDRKWYPFFDAKEWTELTTNLNINSSNGYAPPEVVMASASTPISTFGTWNFSWLLPSSTTQFYVYMHFAEIQTLRSLDTREFKVTLNGKLAYERYSPKTLATETIFYSTPQQCEDGTCLLELTKTPKSTLPPLMNALEVFTVIDFPQMETNPDDVAAIKSIQSTYGLSKISWQGDPCVPKQFLWEGLNCNNLDNSTPPIVTSLNLSSSHLTGIIAQGIQNLTHLQELDLSNNNLTGGIPEFLADIKSLLVINLSGNNFNGSIPQILLQKKGLKLILEGNANLICPDGLCVNKAGNGGAKKMNVVIPIVASVAFVVVLGSALAFFFIFKKKKTSNSQESAIMTKNRRFTYSEVVTMTNNFERVLGKGGFGMVYHGTVNNTEQVAVKMLSHSSSQGYKEFKAEVELLLRVHHKNLVGLVGYCDEGENLALIYEYMANGDLREHMSGKRGGSILNWETRLKIVVESAQGLEYLHNGCKPPMVHRDVKTTNILLNEHLHAKLADFGLSRSFPIEGETHVSTVVAGTPGYLDPEYYRTNWLNEKSDVYSFGIVLLEIITNQLVINQSREKPHIAEWVGLMLTKGDIQNIMDPKLYGDYDSGSVWRAVELAMSCLNPSSARRPTMSQVVIELNECLSYENARGGTSQNMNSESSIEVSMNFDIGATPDAR

SEQ ID NO: 1150 - protein, 842 aa, Arabidopsis thaliana
MVFLIFPWKVREDDYMKNSLGLLFLLVSIIHIVRAQDQQGFISLDCGLPANELSPYEESFTGLRFSSDEKFIRSGKNGRIRENPQGYAKPFVYGNYDGFDLKPKFDLYLGPNLWATVDLQTEVNDWGNYTANIGFGIMGNGSYITKSGSLNLLSRTYLSKSGSDLRYMKDVYDRTWVSYGASFRTGWTQIYTALEVNNSNNYAPPKDALRNAATPTNASAPLTIEWPSGSPIFSDPIIPKKLDITSVQSVTPKTCQEGKCSLQLTRTNRSTLPPLLNALEIYAVIQFPQSETNEIDVIAIKKIEAMYESSRINWQGDPCVPQHFIWDGLNCSNTDISTPPRITSLNLSSSGLTGNIAAAIQNLTQLEKLDLSNNNLTGGVPEFLGNMKSLSFIGNNLSGSIPQTLQKKRLELFVEGNPRLCLSDSCRKPPKKKIHVAIVASVASAAIVVAVLILFLILRKRKSTIVQGQHLPPSTSTVDVTFANKKSKRFTYLEVIKMTNNFQRVLGKGGFGMVYHGTVKGSDQVAVKVLSQSSTQGYKQFKAEALIYEFLPNGDLKQHLSGKGGKSIINWSIRLQIALNAALGLEYLHIGCIPPMVHRDVKTANILLDENFKAKLADFGLSRSFQVRGESYDSTFVAGTPGYLDPEYYPTSRLAAKSDVYSYGIVLLEMITNQPVISEKYHITEWVGSKLNRGDIIEIMDPNLGGVYDSNSAWRALELAMSCADPSSSKRPTMSQVINELKECLVCENSRMSKTRGMEYQEMNISLDTSVVPGARYPMGQTSVCEWRQFLNANQSSIAGEKVSPPGTADDEEALFFSLDGIFRRRKPPEIIILSRRLAEAC

SEQ ID NO: 1151 - protein, 1172 aa, Arabidopsis thaliana
MVSGVGGSGGGRGGGRGGEEEPSSSHTPNNRRGGEQAQSSGTKSLRPRSNTESMSKAIQQYTVDARLHAVFEQSGESGKSFDYSQSLKTTTYGSSVPEQQITAYLSRIQRGGYIQPFGCMIAVDESSFRIIGYSENAREMLGIMPQSVPTLEKPEILAMGTDVRSLFTSSSSILLERAFVAREITLLNPVWIHSKNTGKPFYAILHRIDVGVVIDLEPARTEDPALSIAGAVQSQKLAVRAISQLQALPGGDIKLLCDTVVESVRDLTGYDRVMVYKFHEDEHGEVVAESKRDDLEPYIGLHYPATDIPQASRFLFKQNRVRMIVDCNATPVLVVQDDRLTQSMCLVGSTLRAPHGCHSQYMANMGSIASLAMAVIINGNEDDGSNVASGRSSMRLWGLVVCHHTSSRCIPFPLRYACEFLMQAFGLQLNMELQLALQMSEKRVLRTQTLLCDMLLRDSPAGIVTQSPSIMDLVKCDGAAFLYHGKYYPLGVAPSEVQIKDVVEWLLANHADSTGLSTDSLGDAGYPGAAALGDAVCGMAVAYITKRDFLFWFRSHTAKEIKWGGAKHHPEDKDDGQRMHPRSSFQAFLEVVKSRSQPWETAEMDAIHSLQLILRDSFKESEAAMNSKVVDGVVQPCRDMAGEQGIDELGAVAREMVRLIETATVPIFAVDAGGCINGWNAKIAELTGLSVEEAMGKSLVSDLIYKENEATVNKLLSRALRGDEEKNVEVKLKTFSPELQGKAVFVVVNACSSKDYLNNIVGVCFVGQDVTSQKIVMDKFINIQGDYKAIVHSPNPLIPPIFAADENTCCLEWNMAMEKLTGWSRSEVIGKMIVGEVFGSCCMLKGPDALTKFMIVLHNAIGGQDTDKFPFPFFDRNGKFVQALLTANKRVSLEGKVIGAFCFLQIPSPELQQALAVQRRQDTECFTKAKELAYICQVIKNPLSGMRFANSLLEATDLNEDQKQLLETSVSCEKQISRIVGDMDLESIEDGSFVLKREEFFLGSVINAIVSQAMFLLRDRGLQLIRDIPEEIKSIEVFGDQIRIQQLLAEFLLSIIRYAPSQEWVEIHLSQLSKQMADGFAAIRTEFRMACPGEGLPPELVRDMFHSSRWTSPEGLGLSVCRKILKLMNGEVQYIRESERSYFLIILELPVPRKRPLSTASGSGDMMLMMPY

SEQ ID NO: 1152 - protein, 876 aa, Arabidopsis thaliana
MAMLKSLSSILFTSFALLFFLVHAQDQSGFISIDCGIPDDSSYNDETTGIKYVSDSAFVDSGTTKRIAAQFQSSGFDRHLLNVRSFPQSKRSCYDVPTPRGKGFKYLIRTRFMYGNYDDLGRVPEFDLYLGVNFWDSVKLDDATTILNKEIITIPLLDNVQVCVVDKNAGTPFLSVLEIRLLLNTTYETPYDALTLLRRLDYSKTGKLPSRYKDDIYDRIWTPRIVSSEYKILNTSLTVDQFLNNGYQPASTVMSTAETARNESLYLTLSFRPPDPNAKFYVYMHFAEIEVLKSNQTREFSIWLNEDVISPSFKLRYLLTDTFVTPDPVSGITINFSLLQPPGEFVLPPIINALEVYQVNEFLQIPTHPQDVDAMRKIKATYRVKKNWQGDPCVPVDYSWEGIDCIQSDNTTNPRVVSLNISFSELRGQIDPAFSNLTSIRKLDLSGNTLTGEIPAFLANLPNLTELNVEGNKLTGIVPQRLHERSKNGSLSLRFGRNPDLCLSDSCSNTKKKNKNGYIIPLVVVGIIVVLLTALALFRRFKKKQQRGTLGERNGPLKTAKRYFKYSEVVNITNNFERVIGKGGFGKVYHGVINGEQVAVKVLSEESAQGYKEFRAEVDLLMRVHHTNLTSLVGYCNEINHMVLIYEYMANENLGDYLAGKRSFILSWEERLKISLDAAQGLEYLHNGCKPPIVHRDVKPTNILLNEKLQAKMADFGLSRSFSVEGSGQISTVVAGSIGYLDPEYYSTRQMNEKSDVYSLGVVLLEVITGQPAIASSKTEKVHISDHVRSILANGDIRGIVDQRLRERYDVGSAWKMSEIALACTEHTSAQRPTMSQVVMELKQIVYGIVTDQENYDDSTKMLTVNLDTEMVPRAR

SEQ ID NO: 1153 - protein, 881 aa, Arabidopsis thaliana
MVHYNFLSLIIFACFFAVFVLLVRAQDQSGFVSIDCGIPEDSSYNDETTDIKYVSDAAFVESGTIHSIDPEFQTSSLEKQFQNVRSFPEGNRNCYDVKPPQGKGFKYLIRTRFMYGNYDNLGKAPDFDLYLGFNIWDSVTIDNATTIVTKEIIHTLRSDHVHVCLVDKNRGTPFLSALEIRLLKSNTYETPYDSLILFKRWDLGGLGALPVRYKDDVFDRIWIPLRFPKYTIFNASLTIDSNNNEGFQPARFVMNTATSPEDLSQDIIFSWEPKDPTWKYFVYMHFAEVVELPSNETREFKVLLNEKEINMSSFSPRYLYTDTLFVQNPVSGPKLEFRLQQTPRSTLPPIINAIETYRVNEFLQSPTDQQDVDAIMRIKSKYGVKKSWLGDPCAPVKYPWKDINCSYVDNESPRIISVNLSSSGLTGEIDAAFSNLTLLHILDLSNNSLTGKIPDFLGNLHNLTELNLEGNKLSGAIPVKLLERSNKKLILLRIDGNPDLCVSASCQISDEKTKKNVYIIPLVASVVGVLGLVLAIALFLLYKKRHRRGGSGGVRAGPLDTTKRYYKYSEVVKVTNNFERVLGQGGFGKVYHGVLNDDQVAVKILSESSAQGYKEFRAEVELLLRVHHKNLTALIGYCHEGKKMALIYEFMANGTLGDYLSGEKSYVLSWEERLQISLDAAQGLEYLHNGCKPPIVQRDVKPANILINEKLQAKIADFGLSRSVALDGNNQDTTAVAGTIGYLDPEYHLTQKLSEKSDIYSFGVVLLEVVSGQPVIARSRTTAENIHITDRVDLMLSTGDIRGIVDPKLGERFDAGSAWKITEVAMACASSSSKNRPTMSHVVAELKESVSRARAGGGSGASSVTDPAMTNFDSGMFPQAR

SEQ ID NO: 1154 - protein, 984 aa, Arabidopsis thaliana
MGNFNFLPLVSFASFVVVLVLVCAQDQSGFVSIDCGIPEDSSYYDEKTDIKYISDAAFVESGTIHSIDSKFQKKNLEKQFQKVRSFPEGKKNCYDVQPPQGKGFKYLIRTRFMYGNYDNLGKAPDFDLYLGVNLWDSVTLENSTTIVTKEIIYTLRSDKVHVCLVDKERGTPFLSVLELRLLKNNIYETASDSLMLYRRWDLGATGDLPARYKDDIFDRFWMPLMFPNFLILNTSLMIDPTSSNGFLPPSVVMSTAVAPMNSSIEQIMVYWEPRDPNWKFYIYIHFAEVEKLPSNETREFSVFLNKEQIDTTSVFRPSYLYTDTLYVQNPVSGPFLEFVLRQGVKSTRPPIMNAIETYRTNEFLDLPTDQNDVDAIMKIKTKYKVKKNWLGDPCAPFGYPWQGINCSYTANNPPRIISVNLSFSGLTGQIDPVFITLTPLQKLDLSNNRLTGTVPDFLANLPDLTELNLEENKLTGILPEKLLERSKDGSLSLRVGGNPDLCVSDSCRNKKTERKEYIIPSVASVTGLFFLLLALISFWQFKKRQQSVKTGPLDTKRYYKYSEIVEITNNFERVLGQGGFGKVYYGVLRGEQVAIKMLSKSSAQGYKEFRAEVELLLRVHHKNLIALIGYCHEGDQMALIYEYIGNGTLGDYLSGKNSSILSWEERLQISLDAAQGLEYLHNGCKPPIVHRDVKPTNILINEKLQAKIADFGLSRSFTLEGDSQVSTEVAGTIGYLDPEHYSMQQFSEKSDVYSFGVVLLEVITGQPVISRSRTEENRHISDRVSLMLSKGDIKSIVDPKLGERFNAGLAWKITEVALACASESTKTRLTMSQVVAELKESLCRARTSGDSGDISFSEPTEMNVSMTVDPGVLPQPSNENDKGQQTSVNSPLSVSPHTRNEYPVTQPDAVNSTDKSVGITKEHNLLHGIVQWFRKLKHTLSSEETSDRKASDATKTSDQWRLKSESDEDSEEPWPVHALTHSGS

SEQ ID NO: 1155 - protein, 396 aa, Arabidopsis thaliana
MASATSVIAWGSGEDGQLGLGTDEEKELASVVDALEPFNVRSVVGGSRNSLAICDDGKLFTWGWNQRGTLGHPPETKTESTPSLVKSLANVKIVQAAIGGWHCLAVDDQGRAYAWGGNEYGQCGEEPSKDETGRPVRRDIVIPKRCAQQLTVRQVAAGGTHSVVLTREGYVWTWGQPWPPGDIKQISVPVRVQGLENVRLIAVGAFHNLALKEDGTLWAWGNNEYGQLGTGDTQPRSYPIPVQGLDDLTLVDIAAGGWHSTALTNEGEVYGWGRGEHGRLGFGDNDKSSKMLPQKVNLLAGEDIIQVSCGGTHSVALTRDGRIFSFGRGDHGRLGYGRKVTTGQPLELPIHIPPPEGRFNHTDEEDDGKWIAKHVACGGRHTLAIVEWKYDQEETE

SEQ ID NO: 1156 - protein, 359 aa, Arabidopsis thaliana
MMIGESHRGFNPTVHIPPWPLSEDLTVSDIYGSPDGGSSMMEALAELQRYLPSNEPDPDSDPDLSGPDSPIDAYTCDHFRMYEFKVRRCARGRSHDWTECPYAHPGEKARRRDPRKFHYSGTACPEFRKGCCKRGDACEFSHGVFECWLHPARYRTQPCKDGGNCRRRVCFFAHSPDQIRVLPNQSPDRVDSFDVLSPTIRRAFQFSISPSSNSPPVSPRGDSDSSCSLLSRSLGSNLGNDVVASLRNLQLNKVKSSLSSSYNNQIGGYGSGFGSPRGSVLGPGFRSLPTTPTRPGFMNIWENGLEEEPAMERVESGRELRAQLFEKLSKENCMGRIEPDPDQGAGDTPDVGWVSDLVM

SEQ ID NO: 1157 - protein, 179 aa, Arabidopsis thaliana
MVAATVNLANMTWTSLNSNPAISFSMLSGIRNLGMLPFRRCLKPTVIGIASWPPLRCSSVKAMSSSSSSSGSTLEETVKTTVAENPVVVYSKTWCSYSSQVKSLFKSLQVEPLVVELDQLGSEGSQLQNVLEKITGQYTVPNVFIGGKHIGGCSDTLQLHNKGELEAILAEANGKNGQT

SEQ ID NO: 1158 - protein, 294 aa, Arabidopsis thaliana
MDRQNSDDIMRFLDGMASSDDVLFGFLDEGNQSPEDFSVNLNAGEDDGDEDDNNNNSEDNKAFWQEHEQLLQGTLYRTSSIETKIRQATKEALKQVKSKGLYCVCRRPVDGGCRSCLRGEISRHLRDVAGYDCVISKSKWRSCQDIPAEENEFIEIVDRSGSKKSEMRVVIELSFRAEFEIAKGSEEYKRLISRLPEVYVGKTERLRSLIKILCIAGKKCLRDKKMHMAPWRKHKYMQAKWLGTCDRSSSLEASVSEAMEPENWVPVAKPRVSMLNYDGLLGGFSAGPATVAVV

SEQ ID NO: 1159 - protein, 431 aa, Arabidopsis thaliana
MSSGLNEDFLDCIVRLEETHVQQGFDEGYEEGLVSGREDARHLGLKLGFETGELIGFYRGCSALWNSALRIDPTRFSPQLHKHLNDFHVLLDKIPLLDPEDEAKDGIKDDLRVKFSIICASLGFSKKQFEWSEEMLREMLGCCKVYISEARNKTALEAIERALKPFPPAAIVNKFEDAAYGRVGYTVVSSLANGSSSSLKNAVFAMVKTALDTINLELHCGSHPRLGVVDHICFHPLSQTSIEQVSSVANSLAMDIGSILRVPTYLYGAAEKEQCTLDSIRRKLGYFKANREGHEWAGGFDLEMVPLKPDAGPQEVSKAKGVVAVGACGWVSNYNVPVMSNDLKAVRRIARKTSERGGGLASVQTMALVHGEGVIEVACNLLNPSQVGGDEVQGLIERLGREEGLLVGKGYYTDYTPDQIVERYMDLLNNS

SEQ ID NO: 1160 - protein, 120 aa, Arabidopsis thaliana
MFKKALELSTLCNIEVCVIYYGRDGELFKTWPEDESKVRDMAERFTKLNERERRKKRTNLSLFLRKKILDDNKLSGKVLEMKDSLERGLRVLQDKLLLLQPENQTKSLTRSVSSLDYVFV

SEQ ID NO: 1161 - protein, 218 aa, Arabidopsis thaliana
MSNAFSIMPTLYKKAGSMSGGGDVNMSGGDRRKGTVKWFDTQKGFGFITPSDGGDDLFVHQSSIRSEGFRSLAAEESVEFDVEVDNSGRPKAIEVSGPDGAPVQGNSGGGGSSGGRGGFGGGGGRGGGRGGGSYGGGYGGRGSGGRGGGGGDNSCFKCGEPGHMARECSQGGGGYSGGGGGGRYGSGGGGGGGGGGLSCYSCGESGHFARDCTSGGAR

SEQ ID NO: 1162 - protein, 129 aa, Arabidopsis thaliana
  misc_feature (42)..(42): Xaa can be any naturally occurring amino acid
  misc_feature (46)..(46): Xaa can be any naturally occurring amino acid
  misc_feature (51)..(51): Xaa can be any naturally occurring amino acid
  misc_feature (64)..(64): Xaa can be any naturally occurring amino acid
  misc_feature (91)..(91): Xaa can be any naturally occurring amino acid
  misc_feature (94)..(94): Xaa can be any naturally occurring amino acid
  misc_feature (99)..(99): Xaa can be any naturally occurring amino acid
  misc_feature (102)..(102): Xaa can be any naturally occurring amino acid
  misc_feature (111)..(111): Xaa can be any naturally occurring amino acid
  misc_feature (113)..(113): Xaa can be any naturally occurring amino acid
  misc_feature (116)..(116): Xaa can be any naturally occurring amino acid
  misc_feature (119)..(119): Xaa can be any naturally occurring amino acid
  unsure (1)..(129): unsure at all Xaa locations
TEILHGEPQLSYLRTMAASKMGHSWGKSFLKGIGCNMMVCLXLWCXLTAGXTLSKVIATYLPIXCFLWIGWEHSVANMFSVTIACYEGVPXKTXGDVLXWNXIPVRFGNMXGXILXGLXQFAYGRQQLG

SEQ ID NO: 1163 - protein, 525 aa, Arabidopsis thaliana
MGGGGDTTDTNMMQRVNSSSGTSSSSIPKHNLHLNPALIRSHHHFRHPFTGAPPPPIPPISPYSQIPATLQPRHSRSMSQPSSFFSFDSLPPLNPSAPSVSVSVEEKTGAGFSPSLPPSPFTMCHSSSSRNAGDGENLPPRKSHRRSNSDVTFGFSSMMSQNQKSPPLSSLERSISGEDTSDWSNLVKKEPREGFYKGRKPEVEAAMDDVFTAYMNLDNIDVLNSFGGEDGKNGNENVEEMESSRGSGTKKTNGGSSSDSEGDSSASGNVKVALSSSSSGVKRRAGGDIAPTGRHYRSVSMDSCFMGKLNFGDESSLKLPPSSSAKVSPTNSGEGNSSAYSVEFGNSEFTAAEMKKIAADEKLAEIVMADPKRVKRILANRVSAARSKERKTRYMAELEHKVQTLQTEATTLSAQLTHLQRDSMGLTNQNSELKFRLQAMEQQAQLRDGMHIIKTLSEKLNEEVQRLKLVIGEPNRRQSGSSSSESKMSLNPEMFQQLSISQLQHQQMQHSNQCSTMKAKHTSND

SEQ ID NO: 1164 - protein, 871 aa, Arabidopsis thaliana
MEIRKKPNIPMCLVLDSSSRPFMTLLFTILLFLTGLASAVGAVGGSPTAGFKPADDILIDCGSKSSTKTPEGRVFKSDSETVQYIEAKDDIQVSAPPSDKLPSPIYLTAKIFREEAIYKFHLTRPGWHWVRLHFFAFPNDKFDLQQATFSVLTEKYVLLHNFKLSNDNNDSQATVQKEYLLNMTDAQFALRFKPMKGSAAFINGIELVSAPDELISDAGTSLFPVNGFSGLSDYAYQSVYRVNVGGPLITPQNDTLGRTWTPDKEYLKDENLAKDVKTNPTAIIYPPGVTPLIAPQTVYATGAEMADSQTIDPNFNVTWNFPSNPSFHYFIRLHFCDIISKSLNDLYFNVYINGKTAISGLDLSTVAGDLSAPYYKDIVVNSTLMTSELQVQIGPMGEDTGKKNAILNGVEVLKMSNSVNSLDGEFGVDGQRASMGKQGMVATAGFVMMFGAFVGLGAMVYKWKKRPQDWQKRNSFSSWLLPIHAGDSTFMTSKTGSHKSNLYNSALGLGRYFSLSELQEVTKNFDASEIIGVGGFGNVYIGTIDDGTQVAIKRGNPQSEQGITEFHTEIQMLSKLRHRHLVSLIGYCDENAEMILVYEYMSNGPFRDHLYGKNLSPLTWKQRLEICIGAARGLHYLHTGTAQGIIHRDVKSTNILLDEALVAKVADFGLSKDVAFGQNHVSTAVKGSFGYLDPEYFRRQQLTDKSDVYSFGVVLLEALCARPAINPQLPREQVNLAEWAMLWKQKGLLEKIIDPHLVGAVNPESMKKFAEAAEKCLADYGVDRPTMGDVLWNLEYALQLQEAFSQGKAEAEEVETPKPVAVPAAAPTSPAATTAAASERPVSQTEEKDDSTVDQHSGTTMFTQFASLNGR

SEQ ID NO: 1165 - protein, 966 aa, Arabidopsis thaliana
MKEKMQRMVLSLAMVGFMVFGVASAMNNEGKALMAIKGSFSNLVNMLLDWDDVHNSDLCSWRGVFCDNVSYSVVSLNLSSLNLGGEISPAIGDLRNLQSIDLQGNKLAGQIPDEIGNCASLVYLDLSENLLYGDIPFSISKLKQLETLNLKNNQLTGPVPATLTQIPNLKRLDLAGNHLTGEISRLLYWNEVLQYLGLRGNMLTGTLSSDMCQLTGLWYFDVRGNNLTGTIPESIGNCTSFQILDISYNQITGEIPYNIGFLQVATLSLQGNRLTGRIPEVIGLMQALAVLDLSDNELVGPIPPILGNLSFTGKLYLHGNMLTGPIPSELGNMSRLSYLQLNDNKLVGTIPPELGKLEQLFELNLANNRLVGPIPSNISSCAALNQFNVHGNLLSGSIPLAFRNLGSLTYLNLSSNNFKGKIPVELGHIINLDKLDLSGNNFSGSIPLTLGDLEHLLILNLSRNHLSGQLPAEFGNLRSIQMIDVSFNLLSGVIPTELGQLQNLNSLILNNNKLHGKIPDQLTNCFTLVNLNVSFNNLSGIVPPMKNFSRFAPASFVGNPYLCGNWVGSICGPLPKSRVFSRGALICIVLGVITLLCMIFLAVYKSMQQKKILQGSSKQAEGLTKLVILHMDMAIHTFDDIMRVTENLNEKFIIGYGASSTVYKCALKSSRPIAIKRLYNQYPHNLREFETELETIGSIRHRNIVSLHGYALSPTGNLLFYDYMENGSLWDLLHGSLKKVKLDWETRLKIAVGAAQGLAYLHHDCTPRIIHRDIKSSNILLDENFEAHLSDFGIAKSIPASKTHASTYVLGTIGYIDPEYARTSRINEKSDIYSFGIVLLELLTGKKAVDNEANLHQLILSKADDNTVMEAVDPEVTVTCMDLGHIRKTFQLALLCTKRNPLERPTMLEVSRVLLSLVPSLQVAKKLPSLDHSTKKLQQENEVRNPDAEASQWFVQFREVISKSSI

SEQ ID NO: 1166 - protein, 1648 aa, Arabidopsis thaliana
MAMQSLSPVPKLLSTTPSSVLSSDKNFFFVDFVGLYCKSKRTRRRLRGDSSSSSRSSSSLSRLSSVRAVIDLERVHGVSEKDLSSPSALRPQVRFFTDINFTNTQRAKFHPLWGSFKQVANLEDILSERGACGVGFIANLDNIPSHGVVKDALIALGCMEHRGGCGADNDSGDGSGLMSSIPWDFFNVWAKEQSLAPFDKLHTGVGMIFLPQDDTFMQEAKQVIENIFEKEGLQVLGWREVPVNVPIVGKNARETMPNIQQVFVKIAKEDSTDDIERELYICRKLIERAVATESWGTELYFCSLSNQTIVYKGMLRSEALGLFYLDLQNELYESPFAIYHRRYSTNTSPRWPLAQPMRFLGHNGEINTIQGNLNWMQSREASLKAAVWNGRENEIRPFGNPRGSDSANLDSAAEIMIRSGRTPEEALMILVPEAYKNHPTLSVKYPEVVDFYDYYKGQMEAWDGPALLLFSDGKTVGACLDRNGLRPARYWRTSDNFVYVASEVGVVPVDEAKVTMKGRLGPGMMIAVDLVNGQVYENTEVKKRISSFNPYGKWIKENSRFLKPVNFKSSTVMENEEILRSQQAFGYSSEDVQMVIESMASQGKEPTFCMGDDIPLAGLSQRPHMLYDYFKQRFAQVTNPAIDPLREGLVMSLEVNIGKRGNILELGPENASQVILSNPVLNEGALEELMKDQYLKPKVLSTYFDIRKGVEGSLQKALYYLCEAADDAVRSGSQLLVLSDRSDRLEPTRPSIPIMLAVGAVHQHLIQNGLRMSASIVADTAQCFSTHHFACLVGYGASAVCPYLALETCRQWRLSNKTVAFMRNGKIPTVTIEQAQKNYTKAVNAGLLKILSKMGISLLSSYCGAQIFEIYGLGQDVVDLAFTGSVSKISGLTFDELARETLSFWVKAFSEDTTKRLENFGFIQFRPGGEYHSNNPEMSKLLHKAVREKSETAYAVYQQHLSNRPVNVLRDLLEFKSDRAPIPVGKVEPAVAIVQRFCTGGMSLGAISRETHEAIAIAMNRIGGKSNSGEGGEDPIRWKPLTDVVDGYSPTLPHLKGLQNGDIATSAIKQVASGRFGVTPTFLVNADQLEIKVAQGAKPGEGGQLPGKKVSAYIARLRSSKPGVPLISPPPHHDIYSIEDLAQLIFDLHQINPNAKVSVKLVAEAGIGTVASGVAKGNADIIQISGHDGGTGASPISSIKHAGGPWELGLTETHQTLIANGLRERVILRVDGGLKSGVDVLMAAAMGADEYGFGSLAMIATGCVMARICHTNNCPVGVASQREELRARFPGVPGDLVNYFLYVAEEVRGILAQLGYNSLDDIIGRTELLRPRDISLVKTQHLDLSYLLSSVGTPSLSSTEIRKQEVHTNGPVLDDDILADPLVIDAIENEKVVEKTVKICNVDRAACGRVAGVIAKKYGDTGFAGQVNLTFLGSAGQSFGCFLIPGMNIRLIGESNDYVGKGMAGGEIVVTPVEKIGFVPEEATIVGNTCLYGATGGQIFARGKAGERFAVRNSLAEAVVEGTGDHCCEYMTGGCVVVLGKVGRNVAAGMTGGLAYLLDEDDTLLPKINREIVKIQRVTAPAGELQLKSLIEAHVEKTGSSKGATILNEWEKYLPLFWQLVPPSEEDTPEASAAYVRTSTGEVTFQSA

SEQ ID NO: 1167 - protein, 475 aa, Arabidopsis thaliana
MASQSSVAVISSAAARGESFPDSKKPIGSVRFQQPLRLSFSYCKSGNMSSRICAMAKPNDAETLSSSVDMSLSPRVQSLKPSKTMVITDLAATLVQSGVPVIRLAAGEPDFDTPKVVAEAGINAIREGFTRYTLNAGITELREAICRKLKEENGLSYAPDQILVSNGAKQSLLQAVLAVCSPGDEVIIPAPYWVSYTEQARLADATPVVIPTKISNNFLLDPKDLESKLTEKSRLLILCSPSNPTGSVYPKSLLEEIARIIAKHPRLLVLSDEIYEHIIYAPATHTSFASLPDMYERTLTVNGFSKAFAMTGWRLGYLAGPKHIVAACSKLQGQVSSGASSIAQKAGVAALGLGKAGGETVAEMVKAYRERRDFLVKSLGDIKGVKISEPQGAFYLFIDFSAYYGSEAEGFGLINDSSSLALYFLDKFQVAMVPGDAFGDDSCIRISYATSLDVLQAAVEKIRKALEPLRATVSV

SEQ ID NO: 1168 - protein, 311 aa, Arabidopsis thaliana
MMKRLSSSDSVGGLISLCPTTSTDEQSPRRYGGREFQSMLEGYEEEEEAIVEERGHVGLSEKKRRLSINQVKALEKNFELENKLEPERKVKLAQELGLQPRQVAVWFQNRRARWKTKQLEKDYGVLKTQYDSLRHNFDSLRRDNESLLQEISKLKTKLNGGGGEEEEEENNAAVTTESDISVKEEEVSLPEKITEAPSSPPQFLEHSDGLNYRSFTDLRDLLPLKAAASSFAAAAGSSDSSDSSALLNEESSSNVTVAAPVTVPGGNFFQFVKMEQTEDHEDFLSGEEACEFFSDEQPPSLHWYSTVDHWN

SEQ ID NO: 1169 - protein, 275 aa, Arabidopsis thaliana
MGFDDTCNTGLVLGLGPSPIPNNYNSTIRQSSVYKLEPSLTLCLSGDPSVTVVTGADQLCRQTSSHSGVSSFSSGRVVKRERDGGEESPEEEEMTERVISDYHEDEEGISARKKLRLTKQQSALLEESFKDHSTLNPKQKQVLARQLNLRPRQVEVWFQNRRASRTKLKQTEVDCEFLKKCCETLADENIRLQKEIQELKTLKLTQPFYMHMPASTLTKCPSCERIGGGGGGNGGGGGGSGATAVIVDGSTAKGAFSISSKPHFFNPFTNPSAAC

SEQ ID NO: 1170 - protein, 595 aa, Arabidopsis thaliana
MTVDSALRSPMMHSPSTKDVKALRFIEEMTRNVDFVQKKVIREILSRNSDTEYLKRFGLKGFTDRKTFKTKVPVVIYDDLKPEIQRIANGDRSMILSSYPITEFLTSSGTSAGERKLMPTIDEDMDRRQLLYSLLMPVMNLYVPGLDKGKALYFLFVKTESKTPGGLPARPVLTSYYKSEQFKRRPNDPYNVYTSPNEAILCPDSSQSMYTQMLCGLLMRHEVLRLGAVFASGLLRAIGFLQTNWKELADDISTGTLSSRISDPAIKESMSKILTKPDQELADFITSVCGQDNSWEGIITKIWPNTKYLDVIVTGAMAQYIPMLEYYSGGLPMACTMYASSESYFGINLKPMCKPSEVSYTIMPNMAYFEFLPHHEVPTEKSELVELADVEVGKEYELVITTYAGLNRYRVGDILQVTGFYNSAPQFKFVRRKNVLLSIESDKTDEAELQSAVENASLLLGEQGTRVIEYTSYAETKTIPGHYVIYWELLVKDQTNPPNDEVMARCCLEMEESLNSVYRQSRVADKSIGPLEIRVVKNGTFEELMDYAISRGASINQYKVPRCVSFTPIMELLDSRVVSTHFSPALPHWSPERRR

SEQ ID NO: 1171 - protein, 227 aa, Arabidopsis thaliana
MVNGESSTSTSYSDSNNDTNDQGGDFECNICFELAQDPIVTLCGHLFCWPCLYRWLHHHSHSQECPVCKAVVQDDKLVPLYGRGKNQTDPRSKRYPGLRIPNRPTGQRPETAAPPPQPEAASNFFNYGIGLMGGIMPMMATTRFGNFSMGFGGLLPSLFNFQFHGFHDATLYGSTPGYPYGGYHNGFRGVPPRGQERPMARGGNQSDAFLKNILFFVGICVVIFLIW

SEQ ID NO: 1172 - protein, 240 aa, Arabidopsis thaliana
MPLSWTFKVDPQKITFIFNFESITLISHRRARERAKAVSSGNLRMSRVYVGNLDPRVTERELEDEFRSFGVIRSVWVARRPPGYAFLDFEDSRDARDAIREVDGKNGWRVEQSHNRGGGGGRGGGRGGGDGGRGRGGSDLKCYECGESGHFARECRSRGGSGGRRRSRSRSRSPPRYRKSPTYGGRRSYSPRARSPPPPRRRSPSPRGRNYSRSPPPYRARDEVPYANGNGLKDVRRSRS

SEQ ID NO: 1173 - protein, 1122 aa, Arabidopsis thaliana; identical to SEQ ID NO: 504

SEQ ID NO: 1174 - protein, 435 aa, Arabidopsis thaliana
MYSNFKEQAIEYVKQAVHEDNAGNYNKAFPLYMNALEYFKTHLKYEKNPKIREAITQKFTEYLRRAEEIRAVLDEGGSGPGSNGDAAVATRPKTKPKDGEGGGKDGEDPEQSKLRAGLNSAIVREKPNIKWSDVAGLESAKQALQEAVILPVKFPQFFTGKRRPWRAFLLYGPPGTGKSYLAKAVATEADSTFFSVSSSDLVSKWMGESEKLVSNLFEMARESAPSIIFVDEIDSLCGTRGEGNESEASRRIKTELLVQMQGVGHNDEKVLVLAATNTPYALDQAIRRRFDKRIYIPLPEAKARQHMFKVHLGDTPHNLTEPDFEYLGQKTEGFSGSDVSVCVKDVLFEPVRKTQDAMFFFKSPDGTWMPCGPRHPGAIQTTMQDLATKGLAEKIIPPPITRTDFEKVLARQRPTVSKSDLDVHERFTQEFGEEG

SEQ ID NO: 1175 - protein, 441 aa, Arabidopsis thaliana
RGFEDSGVGGGGTAQFLPYRSNNNKLFTTSTTVRFSLNEIPPFHGLDSSVDIGAIFTRAESLLYTIADAAVVGADSVVTTDSSAVQKSGGWFGFISDAMELVLKILKDGLSAVHVPYAYGFAIILLTIIVKAATYPLTKQQVESTLAMQNLQPKIKAIQQRYAGNQERIQLETSRLYKQAGVNPLAGCLPTLATIPVWIGLYQALSNVANEGLFTEGFFWIPSLGGPTSIAARQSGSGISWLFPFVDGHPPLGWYDTVAYLVLPVLLIASQYVSMEIMKPPQTDDPAQKNTLLVFKFLPLMIGYFALSVPSGLSIYWLTNNVLSTAQQVYLRKLGGAKPNMDENASKIISAGRAKRSIAQPDDAGERFRQLKEQEKRSKKNKAVAKDTVELVEESQSESEEGSDDEEEEAREGALASSTTSKPLPEVGQRRSKRSKRKRTV

SEQ ID NO: 1176 - protein, 880 aa, Arabidopsis thaliana
MEGRRQRLLVFIFGALAITHLVQAQPPDQRGFISLDCGLPVNESPYTDPRTGLTFSSDADFILSGLRGEAGDDNTYIYRQYKDLRYFPDGIRNCYNLKVEQGINYLIRAGFGYGNYDGLNVYPKFDLHVGPNMWIAVDLEFGKDREIIYMTTSNLLQICLVKTGSTIPMISTLELRPLRNDSYLTQFGPLDLIYRRAYSSNSTGFIRYPDDIFDRKWDRYNEFETDVNTTLNVRSSSPFQVPEAVSRMGITPENASLPLRFYVSLDDDSDKVNVYFHFAEIQALRGNETREFDIELEEDIIQSAYSPTMLQSDTKYNLSPHKCSSGLCYLKLVRTPRSTLPPLISAIEAFKVVDFPYAETNPNDVAAMKDIEAFYGLKMISWQGDPCVPELLKWEDLKCSYTNKSTPPRIISLDLSSRGLKGVIAPAFQNLTELRKLDLSNNSFTGGVPEFLASMKSLSIINLNWNDLTGPLPKLLLDREKNGLKLTIQGNPKLCNDASCKNNNNQTYIVPVVASVASVLIIIAVLILILVFKKRRPTQVDSLPTVQHGLPNRPSIFTQTKRFTYSEVEALTDNFERVLGEGGFGVVYHGILNGTQPIAVKLLSQSSVQGYKEFKAEVELLLRVHHVNLVSLVGYCDEESNLALLYEYAPNGDLKQHLSGERGGSPLKWSSRLKIVVETAQGLEYLHTGCKPPMVHRDVKTTNILLDEHFQAKLADFGLSRSFPVGGETHVSTAVAGTPGYLDPEYYRTNRLNEKSDVYSFGIVLLEIITSRPVIQQTREKPHIAAWVGYMLTKGDIENVVDPRLNRDYEPTSVWKALEIAMSCVNPSSEKRPTMSQVTNELKQCLTLENSKRGVREDMGSRSSVEMSTSFTTEINPKAR

SEQ ID NO: 1177 - protein, 786 aa, Arabidopsis thaliana
MMSHLLLAIIGTFAVIVGAQKQEGFISLDCGFPIEESPYSDPSTGLTFTSDSTFIQTGESGRVDKELNKIFRKPYLTLRYFPEGKRNCSLRNSFRVHCSTSDSEIRYDDDSYDRVWYPFFSSSFSYITTSLNINNSDTFEIPKAALKSAATPKNASAPLIITWKPRPSNAEVYFYLHFAEIQTLAANETREFDIVFKGNFNYSAFSPTKLELLTFFTSGPVQCDSDGCNLQLVRTPNSTLPPLINALEAYTIIEFPQLETSLSDVNAIKNIKATYRLSKTSWQGDPCLPQELSWENLRCSYTNSSTPPKIISLNLSASGLTGSLPSVFQNLTQIQELDLSNNSLTGLVPSFLANIKSLSLLDLSGNNFTGSVPQTLLDREKEGLVLKLEGNPELCKFSSCNPKKKKGLLVPVIASISSVLIVIVVVALFFVLRKKKMPSDAQAPPSLPVEDVGQAKHSESSFVSKKIRFAYFEVQEMTNNFQRVLGEGGFGVVYHGCVNGTQQVAVKLLSQSSSQGYKHFKAEVELLMRVHHKNLVSLVGYCDEGDHLALIYEYMPNGDLKQHLSGKRGGFVLSWESRLRVAVDAALGLEYLHTGCKPPMVHRDIKSTNILLDERFQAKLADFGLSRSFPTENETHVSTVVAGTPGYLDPEYYQTNWLTEKSDVYSFGIVLLEIITNRPIIQQSREKPHLVEWVGFIVRTGDIGNIVDPNLHGAYDVGSVWKAIELAMSCVNISSARRPSMSQVVSDLKECVISENSRTGESREMNSMSSIEFSMGIDTEVIPKAR

SEQ ID NO: 1178 - protein, 884 aa, Arabidopsis thaliana
MKIHLLLAMIGTFVVIIGAQDQEGFISLDCGLPSDESPYDDSFNGLTFTSDSTFIQTGKIDSVDKDLNINLSKQYLTLRYFPEGKRNCYSLDVKRGTTYLIVVSFVYGNYDGLNRDPNFDIHLGPNKWKRIDLDGEKEGTREEIIHKARSNSLDICLVKTGETLPIISAIEIRPLRNNTYVTQSGSLMMSFRVYLSNSDASIRYADDVHDRIWSPFNGSSHTHITTDLNINNSNAYEIPKNILQTAAIPRNASAPLIITWDPLPINAEVYLYMHFAEIQTLEANETRQFDVILRGNFNHSGFSPTKLKVFTLYTEEPMKCGSEGCYLQLVKTPNSTLPPLINAIEAYSVIEFSQLETSLSDVDAIKNIKNTYKLNKITWQGDPCLPQDLSWESIRCTYVDGSTSPTIISLDLSKSGLNGSIPQILQNFTQLQELDLSNNSLTGPVPIFLANMKTLSLINLSGNNLSGSVPQALLDKEKEGLVLKLEGNPDLCKSSFCNTEKKNKFLLPVIASAASLVIVVVVVALFFVFRKKKASPSNLHAPPSMPVSNPGHNSQSESSFTSKKIRFTYSEVQEMTNNFDKALGEGGFGVVYHGFVNVIEQVAVKLLSQSSSQGYKHFKAEVELLMRVHHINLVSLVGYCDEGEHLALIYEYMPNGDLKQHLSGKHGGFVLSWESRLKIVLDAALGLEYLHTGCVPPMVHRDIKTTNILLDQHLQAKLADFGLSRSFPIGNEKNVSTVVAGTPGYLDPEYYQTNWLTEKSDIYSFGIVLLEIISNRPIIQQSREKPHIVEWVSFMITKGDLRSIMDPNLHQDYDIGSVWKAIELAMSCVSLSSARRPNMSRVVNELKECLISETSRIGEGRDMESKGSMEFSRDIYNEVIPQAR

SEQ ID NO: 1179 - protein, 717 aa, Arabidopsis thaliana
MEGHRGLLLALIVNIFSIVHLVHAQNPEGFISLDCGLPAKESPYTESTTSLVFTSDANFISSGISTKLPKHDDYKPYNFLRYFPDGTRHCYDLSVKQGTNYLIRASFVYGNYDGRNIMPRFDLYIGPNIWAVVSELDLYSPEEEIIHMTKSTSLQICLVKTGPTTPFISTLELRPLRNDNYITQSGSLKLMQRMCMTETVSTLRYPDDVYDRLWYTDGIYETKAVKTALSVNSTNPFELPQVIIRSAATPVNSSEPITVEYGGYSSGDQVYLYLHFAEIQTLKASDNREFDIVWANNIKKLAYKPKVSQIDTLLNTSPNKCDNTFCKAFLVRTQRDLSINRLSGEVPEFLANMKSLSNINLSWNNLKGLIPPALEEKRKNGLKLKLPITKSEILTKKRRFTYSEVEAVTNKFERVIGEGGFGIVYHGHLNDTEQVAVKLLSHSSTQGYKQFKAEVELLLRVHHTNLVNLVGYCNEEDHLALVYEYAANGDLKQHLSGESSSAALNWASRLGIATETAQGLEYLHIGCEPPMIHRDVKTTNILLDEHFHAKLADFGLSRSFPVGVESHVSTNVAGTPGYLDPEYYRTNWLTEKSDVYSMGIVLLEIITNQPVIQQVREKPHIAEWVGLMLTKGDIKSIMDPKLNGEYDSSSVWKALELAMSCVNPSSGGRPTMSQVISELKECLIYENSRKEGRSEVDSKSSIELSTSFTAEVTPDAR

SEQ ID NO: 1180 - protein, 552 aa, Arabidopsis thaliana
MSNAFSKMPTLYKKAGCQFQLTTMQEFHSSKDSLPCPATSWDNSVFTNSNVQGSSSLTDNNTLSLTMEMKQTGFQMQHYDSSSTQSTGGESYSEVASLSEPTNRYGHNIVVTHLSGYKENPENPIGSHSISKVSQDSVVLPIEAASWPLHGNVTPHFNGFLSFPYASQHTVQHPQIRGLVPSRMPLPHNIPENEPIFVNAKQYQAILRRRERRAKLEAQNKLIKVRKPYLHESRHLHALKRVRGSGGRFLNTKKHQESNSSLSPPFLIPPHVFKNSPGKFRQMDISRGGVVSSVSTTSCSDITGNNNDMFQQNPQFRFSGYPSNHHVSVLMLKAIPQGPPPRVRITVLSDLTEDIPFSVGPPAYIYGTQFIGCAQSLNINLQISVLDKFQLIHTSPRENLIVCVHFRLHQLKHSILDERSEALKALRSLGPKGVVLCENNGECSRSIDFAAGFSKKLDYLWMFWIQKAQDSKKRIVKKGSEWKKRRQRKEKCYERMRKAVFAAEAFGEDAIDGAKSLLRKYDNNWEIRMDDGDTFAGLMWKGEAISFCSVWK

SEQ ID NO: 1181 - protein, 337 aa, Arabidopsis thaliana
MEPKCDHCATSQALIYCKSDLAKLCLNCDVHVHSANPLSHRHIRSLICEKCFSQPAAIRCLDEKVSYCQGCHWHESNCSELGHRVQSLNPFSGCPSPTDFNRMWSSILEPPVSGLLSPFVGSFPLNDLNNTMFDTAYSMVPHNISYTQNFSDNLSFFSTESKGYPDMVLKLEEGEEDLCEGLNLDDAPLNFDVGDDIIGCSSEVHIEPDHTASPPGQQMNINTGLQLPLSPVLFGQIHPSLNITGENNAADYQDCGMSPGFIMSEAPWETNFEVSCPQARNEAKLRYKEKKLKRSFGKQIRYASRKARADTRKRVKGRFVKAGDSYDYDPSSPTTNN

SEQ ID NO: 1182 - protein, 884 aa, Arabidopsis thaliana
MESHRVFVATFMLILHLVQAQDQPGFINVDCGLLPRDSPYNALGTGLVYTSDVGLVSSGKTGKIAKEFEENNSTPNLTLRYFPDGARNCYNLNVSRDTNYMIKATFVYGNYDGHKDEPNFDLYLGPNLWATVSRSETVEEIIHVTKSDSLQVCLAKTGDFIPFINILELRPLKKNVYVTESGSLKLLFRKYFSDSGQTIRYPDDIYDRVWHASFLENNWAQVSTTLGVNVTDNYDLSQDVMATGATPLNDSETLNITWNVEPPTTKVYSYMHFAELETLRANDTREFNVMLNGNDLFGPYSPIPLKTETETNLKPEECEDGACILQLVKTSKSTLPPLLNAIEAFTVIDFLQVETDEDDAAAIKNVQNAYGLINRSSWQGDPCVPKQYSWDGLKCSYSDSTPPIINFLDLSASGLTGIIAPAIQNLTHLEILALSNNNLTGEVPEFLADLKSIMVIDLRGNNLSGPVPASLLQKKGLMLHLDDNPHILCTTGSCMHKGEGEKKSIIVPVVASIVSLAVIIGALILFLVFRKKKASKVEGTLPSYMQASDGRSPRSSEPAIVTKNKRFTYSQVVIMTNNFQRILGKGGFGIVYHGFVNGVEQVAVKILSHSSSQGYKQFKAEVELLLRVHHKNLVGLVGYCDEGENMALIYEYMANGDLKEHMSGTRNRFILNWETRLKIVIDSAQGLEYLHNGCKPLMVHRDVKTTNILLNEHFEAKLADFGLSRSFPIGGETHVSTVVAGTPGYLDPEYYKTNRLTEKSDVYSFGIVLLEMITNRPVIDQSREKPYISEWVGIMLTKGDIISIMDPSLNGDYDSGSVWKAVELAMSCLNPSSTRRPTMSQVLIALNECLVSENSRGGASRDMDSKSSLEVSLTFDTDVSPMAR

SEQ ID NO: 1183 - protein, 220 aa, Arabidopsis thaliana
  misc_feature (121)..(121): Xaa can be any naturally occurring amino acid
  unsure (1)..(220): unsure at all Xaa locations
MDMIPQLMEGSSAYGGVTNLNIISNNSSSVTGATGGEATQPLSSSSSPSANSSRYENQKRRDWNTFGQYLRNHRPPLSLSRCSGAHVLEFLRYLDQFGKTKVHTNICHFYGHPNPPAPCPXCPLRQAWGSLDALIGRLRAAFEENGGKPETNPFGARAVRLYLREVRDMQSKARGVSYEKKKRKRPLPSSSTSSSSAVASHQQFQMLPGTSSTTQLKFEK

SEQ ID NO: 1184 - protein, 243 aa, Arabidopsis thaliana
MEYSQSSMYSSPSSWSSSQESLLWNESCFLDQSSEPQAFFCPNYDYSDDFFSFESPEMMIKEEIQNGDVSNSEEEEKVGIDEERSYRGVRKRPWGKFAAEIRDSTRNGIRVWLGTFDKAEEAALAYDQAAFATKGSLATLNFPVEVVRESLKKMENVNLHDGGSPVMALKRKHSLRNRPRGKKRSSSSSSSSSNSSSCSSSSSTSSTSRSSSKQSVVKQESGTLVVFEDLGAEYLEQLLMSSC

SEQ ID NO: 1185 - protein, 273 aa, Arabidopsis thaliana
MEDYERINSNSPTHEEDSDVRKGPWTEEEDAILVNFVSIHGDARWNHIARSSGLKRTGKSCRLRWLNYLRPDVRRGNITLEEQFMILKLHSLWGNRWSKIAQYLPGRTDNEIKNYWRTRVQKQAKHLRCDVNSNLFKETMRNVWMPRLVERINAQSLPTTCEQVESMITDPSQPVNEPSPVEPGFVQFSQNHHQQFVPATELSATSSNSPAETFSDVRGGVVNGSGYDPSGQTGFGEFNDWGCVGGDNMWTDEESFWFLQDQFCPDTTSYSYN

SEQ ID NO: 1186 - protein, 1116 aa, Arabidopsis thaliana
MASASKNIQQNPFSSKPPRPPYSSGAASTTAVASTSAEPLIRNSTLNPNPSTSGLPSTSNSPITMSQEDEILARSSHITRSELLKRRSHNLKQLAKCYRDNYWALMEDVKAQHRDYWWKYGISQFKDENNQSNKRRRLGQEGDIGDGGDAVEGSGDNVTNNDGVKSDQYANSNCGSCMYGCKAKAMALTKYCQLHILKDSKQKLYTGCTNVIKRKDLGLTLDFFSKFFIGFGRSLSFGHRDSDRRAPAGPLLCGKPTLASTVPALCNIHFQKAQKHVAKALKDAGHNVSSTSKPPPKLHVIVAAFVHHIQAKRKNPQKEYVIRLAAATPYFSSSRTAAFQPYTHPTTQSGIGRLQSSVAAPTPGVRRVYETGESSRRVEDRDSNNNLHLGDSSKRKNMIILQREKDSEQNKQQETYLNMGVPAKVSGDGAPARVFRQGSSGGGFRRWNSGKNFRREFSGEEVQVVIFRQRSSGGGFRRGSSGGGFRRGSSSGDFSGEGVLAVVSGEGVPAVVSGEGVPAVVSGGNFPASEFQRWWQRFRWWWWWWFWAGMVKKQKAATDSRNKAEPRRRQSWTIPETKPVNKLDGETKIIFKVDSVEAKKKEENFRETLRDMANSKYEYVKSFELEDEVMLPNLMVVRIDGRDFSRFSQVHEFEKPNDETALNLMNSCSAAVLEEFPDIIFAYGYSDEYSFVFKKTSRFYQRRASKILSLVASFFAAVYVTKWKEFFPQRKLLYAPSFSSKVVSCASAEVLQAYLAWRQQDCHANNQYDTCFWMLVKSGKSVSETQEILKDTQKQQKNELLFQKFGINYKTLPELFRQGSCLFKKKVEETVKHDENGNPVKRLRRKAVFVHSENIAGRSFWNEQPSLYNDLGHFTKDIGKIEPDFIRSFQFENKLLPLTWVVVRIDGCHFHRFSDVHEFEKPNDEQALKLMNSCAVAVLEEFEDIHFAYGVSDEYSKIISAVASFFTSTYVLQWGEFFPHKELKYPPSFDGRAVCYPTYNILLDYLAWRQVDCHINNQYNTCFWMLVKSGKNKTQSQDYLKGTQTREKNELLSRQFGIEYNSLPVIFRMGSSVFRLKEAENGVVSGKKLEGEVVVDHCNIIERCFWEEHLHILSYS

SEQ ID NO: 1187 - protein, 616 aa, Arabidopsis thaliana [sequence omitted]

SEQ ID NO: 1188 - protein, 662 aa, Arabidopsis thaliana
MTIMEEKQNNSPVGEKQQSFNGIIINQTQENQTKSMEKQQSFRCVVENQPRKARALEKQVSFQGVNVENYQQSRLGRSMEKQQSFRGVNVENHKRGVMEKLPSFGRATMERQKSFRGGFLEKQKSFRVVMERQLSFIGERRKKNESPGKRGDSSLHIAARTGNLSKVKELIRGCGDELKELLSKQNLEGETPLYTAAENGHSIVVEEMLKHMDLETASIAARNGFDPFHVAAKQGHLEVLKILLETFPNLAMTTDLSCTTALHTAATQGHIDVVNLLLETDSNLAKIAKNNGKTALHSAARMGHVEVVKSLIGKDPSIGFRTDKKGQTALHMAVKGQNDGIVVELVKPDVAVLSVEDNKGNTPLHIATNKGRIKIVRCLVSFEGINLNPINKAGDTPLDVSEKIGNAELVSVLKEAGAATAKDLGKPQNPAKQLKQTVSDIKHEVQSQLQQSRQTGVRVQKIAKRLKKLHISGLNNAINSATVVAVLIATVAFAAIFTIPGQYEEDRSKGELLGQAHIANKAPFLVFFIFDSLALFISLAVVVVQTSVVVIEQKAKKKLVFVINKLMWCACLFISIAFVSLSYIVVGKEEMWLAVCATVIGGTIMLTTIGAMCYCVVMHRMEESKLRSIRKERSKSQSFSMSRMPSDSDILNGEYNKRMYAL

SEQ ID NO: 1189 - protein, 190 aa, Arabidopsis thaliana
MAFAGTTQKCMACDKTVYLVDKLTADNRVYHKACFRCHHCKGTLKLSNYNSFEGVLYCRPHFDQNFKRTGSLEKSFEGTPKIGKPDRPLEGERPAGTKVSNMFGGTREKCVGCDKTVYPIEKVSVNGTLYHKSCFKCTHGGCTISPSNYIAHEGKLYCKHHHIQLIKEKGNLSQLEGGGENAAKDKVVAA

SEQ ID NO: 1190 - protein, 837 aa, Arabidopsis thaliana
MEGSSNSNSRGFNTSGVSDRNTEFLPVERLTTRSKPSSHVDEYVRSLFGSTSTHKSGEDDSLGIDPFVRSLEWGDVSLRQWLDKPERSVDVFECLHVFRQIVEIVNAAHSQGIVVHNVRPSCFVMSSFNHVSFIESASCSDSGSDSLEDGPISQKEIGSSRREEAVSKAIAIEEKGVYNKLLERKIEKLEEEKTQPFPMKHILAMETSWYTSPEEDFGSSSTCASDVYRLGVLLFELFCPVPSREEKSRTMSSLRHRVLPPQILLKCPKEASFCLWLLHPEPTCRPSMSDLLQSEFITEPRDNLEEREAAIELRDRIEEQESLLEFLLLIQQRKQESAYRLQDTVSLLSSDIEQVVKRQLILKKRGSSLSDFSKDDHQYTSGQPLMSFQANEEPSAFLASRKRVRQGILALENGVEVDEESQGSTLLESSRLMRNFKKLESVYFLTRRRQMKAAASGKSLTRHSPLSSENGRGSMIVSEKSSVSNPVAPKAFFNNDSRQGGWIDPFLEGLCRYLSFSQLRVKADLKQGDLLNSSNLVCALAFDREGELFATAGVNKKIKIFECNSIVNDNRDIHYPVVELAGRSKLSSLCWNSYIKSQIASSNFDGVVQIWDVARSQLVTEMKEHKKRVWSIDISSADPTLLASGSDDGTGVSIGTIKTKANVCCVQFPSDSGRSLAFGSADHKVYYYDLRNPKIPLCTMIGHSKTVSYVKFVDSSTLVSSSTDNTLKLWDLSMSASGINESPLHSFTGHTNLKNFVGLSVSDGYIATGSETNEVFVYHKAFPMPVMSYMFNNTDSMSGLEVDDASQFISSICWRGQSSTLVAANSNGNIKILEMMT

SEQ ID NO: 1191 - protein, 177 aa, Arabidopsis thaliana
LIRILNENGIRFASFDIKNNSQEVLNHLKNHYQITEVPNLFINQKPIGDYTKVKELADNKQLQSLVPKDDLIISIDEKLKELINSNPVMIFMKGTPDAPQCGFSRKMIDLLNKHNTNFGYFNILADKVVRERLKEYSNWKTYPQLYVDGKLVGGIDIANELDSQGEFEELIGNYIKS

SEQ ID NO: 1192 - protein, 403 aa, Arabidopsis thaliana
MASLGLSFPPAAKTPTYLASSSSTFFSNSSLSVRTSQFRSRNSVFACVKCDMPESLNVGNGNPSIPIINERTLPKFLESARMEKSVNRTNTRLKLFSGTANPALAQEIAWYMGLDLGKVNIKRFADGEIYVQLQESVRGCDVYLVQPTCTPTNENLMELLIMVDACRRASAKKVTAVIPYFGYARADRKTQGRESIAAKLVANLITEAGADRVLACDLHSGQSMGYFDIPVDHVYCQPVILDYLASKSIPSEDLVVVSPDVGGVARARAFAKKLSDAPLAIVDKRRSGHNVAEVMNLIGDVRGKVAIMVDDMIDTAGTIVKGAALLHQEGAREVYACCTHAVFSPPAIERLSGGLLQEVIVTNTLPVAEKNYFPQLTILSVANLLGETIWRVHDDSSVSSIFL

SEQ ID NO: 1193 - protein, 348 aa, Arabidopsis thaliana
MATTMNAAVSLTSSNSSSFPATSCAIAPERIRFTKGAFYYKSNNVVTGKRVFSIKAQITTETDTPTPAKKVEKVSKKNEEGVIVNRYRPKEPYTGKCLLNTKITADDAPGETWHMVFSHQGEIPYREGQSVGVIADGIDKNGKPHKVRLYSIASSALGDLGNSETVSLCVKRLVYTNDQGETVKGVCSNFLCDLAPGSDVKLTGPVGKEMLMPKDPNATVIMLATGTGIAPFRSFLWKMFFEKHDDYKEFDKMKAKAPENFRVDYAISREQANDKGEKMYIQTRMAQYAAELWELLKKDNTFVYMCGLKGMEKGIDDIMVSLAANDGIDWFDYKKQLKKAEQWNVEVY

SEQ ID NO: 1194 - protein, 507 aa, Arabidopsis thaliana
MKTINKIILERDAISSKSRNDGLEICSFVDRVMLPNYGFESLKDLYKGNASSILLESLGWVSVNMLSDKLEDISIYESGNGYEVHGSRQSPQHLHHMSGGIMDEEIEIPPFFLCPISLEIMKDPVIVSTGITYDRDSIEKWLFAGKKNSCPVTKQDITDADLTPNHTLRRLIQSWCTLNASYGVERIPTPRPPICKSEIEKLIRDSASSHENQVKCLKRLRQIVSENATNKRCLEAAGVPEFLANIVSNDSENGSLTDEALNLLYHLETSETVLKNLLNNKKDNNIVKSLTKIMQRGMYESRVYATLLLKNILEVADPMQSMTLKPEVFTEVVQILDDRISQKATKAAMHILVNICPWGRNRHKAVEAGVISVIIELLMDESFTSERRGPEMAMVVLDLLCQCAEGRAEFLNHGAAIAVVCKKILRVSQTASDRAVRVLLSVGRFCATPALLHEMLQLGVVAKLCLVLQVSCGGKTKEKAKELLKLHARVWKDSPCLPKNMILAYPC

SEQ ID NO: 1195 - protein, 442 aa, Arabidopsis thaliana
MVTRETKLTSEREVESSMAQARHNGGGGGENHPFTSLGRQSSIYSLTLDEFQHALCENGKNFGSMNMDEFLVSIWNAEENNNNQQQAAAAAGSHSVPANHNGFNNNNNNGGEGGVGVFSGGSRGNEDANNKRGIANESSLPRQGSLTLPAPLCRKTVDEVWSEIHRGGGSGNGGDSNGRSSSSNGQNNAQNGGETAARQPTFGEMTLEDFLVKAGVVREHPTNPKPNPNPNQNQNPSSVIPAAAQQQLYGVFQGTGDPSFPGQAMGVGDPSGYAKRTGGGGYQQAPPVQAGVCYGGGVGFGAGGQQMGMVGPLSPVSSDGLGHGQVDNIGGQYGVDMGGLRGRKRVVDGPVEKVVERRQRRMIKNRESAARSRARKQAYTVELEAELNQLKEENAQLKHALAELERKRKQQYFESLKSRAQPKLPKSNGRLRTLMRNPSCPL

SEQ ID NO: 1196 - protein, 962 aa, Arabidopsis thaliana
MTPFRWRLLGGGIHYNTLKVEHNESGPLSLKGLFGSVSGNFTFFTFLGSHLMVRISLLLLCLLVSTCLFTSSSAQAPGFVSLDCGGAEPFTDELGLKWSPDNHLIYGETANISSVNETRTQYTTLRHFPADSRKYCYTLNVTSRNRYLIRATFLYGNFDNSNNVYPKFDISLGATHWATIVISETYIIETAELVFLASSPTVSVCLSNATTGQPFISTLELRQLSGSMYGSMLSEDRFYLSVAARINFGAESEASVRYPDDPYDRIWESDLQKKPNYLVDVAAGTVRVSTTLPIESRVDDRPPQKVMQTAVVGTNGSLTYRMNLDGFPGFGWAFTYFAEIEDLAEDESRKFRLVLPEQPEYSKSVVNIKENTQRPYRVYAPGYPNITLPFVLNFRFAKTADSSRGPILNAMEISKYLRKSDGSVDATVMANVASLYSSTEWAQEGGDPCSPSPWSWVQCNSDPQPRVVAIKLSSMNLTGNIPSDLVKLTGLVELHLENNRLTGKIPSSLTKLPNLKELYLQNNVLTGTIPSDLAKDVISNFSGNLNLEKSGDKGKKLGVIIGASVGAFVLLIATIISCIVMCKSKKNNKLGKTSAELTNRPLPIQRVSSTLSEAHGDAAHCFTLYEIEEATKKFEKRIGSGGFGIVYYGKTREGKEIAVKVLANNSYQGKREFANEVTLLSRIHHRNLVQFLGYCQEEGKNMLVYEFMHNGTLKEHLYGVVPRDRRISWIKRLEIAEDAARGIEYLHTGCVPAIIHRDLKTSNILLDKHMRAKVSDFGLSKFAVDGTSHVSSIVRGTVGYLDPEYYISQQLTEKSDVYSFGVILLELMSGQEAISNESFGVNCRNIVQWAKMHIDNGDIRGIIDPALAEDDYSLQSMWKIAEKALLCVKPHGNMRPSMSEVQKDIQDAIRIEKEALAARGGISDEFSRSSAHSSSLNMGMLDLAGSQSYVSIDESVLQPTAR

SEQ ID NO: 1197 - protein, 795 aa, Arabidopsis thaliana
MVLKDDNSEKSIELFISIGLDEKTARNTINNNKVTANLTAVIHEAAVTDGCDRNTGNLLYSVATKFPTNALVHRPTLLKYIVNSKIKTPAQLEAAFAFFASTGPEDFKLNEFEEACGVGIEVSPEDIEKAVKGIFEENKKTILEQRYRTNVGELFGHVRKSLPWADPKIVKKLIDEKMYELLGEKTAADNEKPTKKKEKKEKPAKVEEKKAVVETTAEPSEEELNPYTIFPQPEQNFMVHTEVFFSDGSILRCSNTKEVLDKHLKVTGGKVYTRFPPEPNGYLHIGHAKAMFVDFGLAKERGGCCYLRYDDTNPEAEKEEYINHIEEIVKWMGWEPFKITYTSDYFQELYDLAVELIRRGHAYVDHQTADEIKEYREKKMNSPWRDRPIEESLKLFDEMRRGIIEEGKATLRMKQDMQSDNFNMYDLIAYRIKFAPHPKAGDKWCIYPSYDYAHCTVDSLENITHSLCTLEFETRRASYYWLLHSLSLYMPYVWEYSRLNVTNTVMSKRKLNYIVTNKYVDGWDDPRLLTLSGLRRRGVTSTAINAFVRGIGITRSDGSMIHVSRLEHHIREELNKTAPRTMVVLNPLKVVITNLESDKLIELDAKRWPDAQNDDPSAFYKVPFSRVVYIDQSDFRMKDSKDYYGLAPGKSVLLRYAFPIKCTNVVFADDNETVREIHAEYDPEKKSKPKGVLHWVAESSPGEEPIKVEVRLFEKLFNSENPAELNDAWLTDINPNSKMVISGAYAVSTLKDAAVGDRFQFERLGYYAVDKDSEPGKLVFNRTVTLRDSYGKGGK

SEQ ID NO: 1198 - protein, 475 aa, Arabidopsis thaliana
MAGAYDPSLPEVPEWLNKGDNAWQLTAATLVGLQSMPGLVILYASIVKKKWAVNSAFMALYAFAAVLLCWVLLCYKMAFGEELLPFWGKGGPAFDQGYLKGQAKIPNSNVAAPYFPMATLVYFQFTFAAITTILVAGSVLGRMNIKAWMAFVPLWLIFSYTVGAYSIWGGGFLYQWGVIDYSGGYVIHLSSGVAGFVAAYWVGPRPKADRERFPPNNVLLMLAGAGLLWMGWSGFNGGAPYAANLTSSIAVLNTNLSAATSLLVWTTLDVIFFGKPSVIGAIQGMVTGLAGVTPGAGLIQTWAAIIIGVVSGTAPWASMMIIHKKSALLQKVDDTLAVFYTHAVAGLLGGIMTGLFAHPDLCVLVLPLPATRGAFYGGNGGKQLLKQLAGAAFIAVWNVVSTTIILLAIRVFIPLRMAEEELGIGDDAAHGEEAYALWGDGEKFDATRHVQQFERDQEAAHPSYVHGARGVTIVL

SEQ ID NO: 1199 - protein, 188 aa, Arabidopsis thaliana
MTNPDNMKPVEATDVESAAEKTSEPTPASGTSTITQRWKREDLIKKASPITRGICLLFSLIAFLIMVSNKHGYGRNFNDYEEYRYVLAISIISTLYTAWQTFAHFSKREIFDRRTSILVDFSGDQIVAYLLISAASSAIPLTNIFREGQDNIFTDSAASAISMAIFAFIALALSALFSGYKLSTHSFI

SEQ ID NO: 1200 - protein, 968 aa, Arabidopsis thaliana
MDTVKSINKGYGKVDETQDLALKRKTRKRLYQIGISVAVLVAIIISSTVTIAIHSRKGNSPHPTPSSVPELTPAASLKTVCSVTNYPVSCFSSISKLPLSNTTDPEVIFRLSLQVVIDELNSIVELPKKLAEETDDEGLKSALSVCEHLLDLAIDRVNETVSAMEVVDGKKILNAATIDDLLTWLSAAVTYHGTCLDALDEISHTNSAIPLKLKSGMVNSTEFTSNSLAIVAKILSTISDFGIPIHGRRLLNSSPHATPISVPKLTPAASLRNVCSVTRYPASCVSSISKLPSSNTTDPEALFRLSLQVVINELNSIAGLPKKLAEETDDERLKSSLSVCGDVFNDAIDIVNDTISTMEEVGDGKKILKSSTIDEIQTWLSAAVTDHDTCLDALDELSQNKTEYANSPISLKLKSAMVNSRKFTSNSLAIIAKFPIHERHGVQSPRLRKSPHPTPSSVLRTVCNVTNYPASCISSISKLPLSKTTTDPKVLFRLSLQVTFDELNSIVGLPKKLAEETNDEGLKSALSVCADVFDLAVDSVNDTISSLDEVISGGKKNLNSSTIGDLITWLSSAVTDIGTCGDTLDEDNYNSPIPQKLKSAMVNSTEFTSNSLAIVAQVLKKPSKSRIPVQGRRLLNSNSFPNWVRPGVRRLLQAKNLTPHVTVAADGSGDVRTVNEAVWRVPKKGKTMFVIYVKAGTYVENVLMKKDKWNVFIYGDGRDKTIISGSTNMVDGVRTFNTSTFATEGKGFMMKDMGIINTAGPEKHQAVAFRSDSDRSVYYRCSFDGYQDTLYTHSNRQYYRNCDVTGTVDFIFGAGTVVFQGCSIRPRQPLPNQFNTITAEGTQEANQNTGISIHQCTISPNGNVTATTYLGRPWKLFSKTVIMQSVIGSFVNPAGWIAWNSTYDPPPRTIFYREYKNSGPGSDLSKRVKWAGYKPISSDDEAARFTVKYFLRGDDNWIPKAVMGMPPL

SEQ ID NO: 1201 - protein, 139 aa, Arabidopsis thaliana
MESSNRSSNNQSQDDKQARFRGVRRRPWGKFAAEIRDPSRNGARLWLGTFETAEEAARAYDRAAFNLRGHLAILNFPNEYYPRMDDYSLRPPYASSSSSSSSGSTSTNVSRQNQREVFEFEYLDDKVLEELLDSEERKR

SEQ ID NO: 1202 - protein, 380 aa, Arabidopsis thaliana
  misc_feature (120)..(120): Xaa can be any naturally occurring amino acid
  unsure (1)..(380): unsure at all Xaa locations
MELSLALTSTDHNPSPSEAHPDTMDFLSREWCNFAVQSLHPDPILYDRSIVPVETSIAKFQGDSSPVSCAMMDTSMKMDDPDFKPSMPSWKTNDVKSWIWMQQAMHPELSYEGFFRKKLXTSMENYAVDKEMVERDKGETKGRKNAGKDGGNGRPSTRETAVASAAAVVAAQCAQMAETMGANRDQLSTMIGSAMTGTSVSEILTLTASATTSLRGAATLKARRGCKINRLNGSAPVLPIEDSSYLPPEFDKNTSVLAKGTDLFVETPDGDFKARTVSMVLNKDGKVILKMKKHNLLRTKKESIVTNVHVELYKDSDSEDNNIEDTCYLIVLRTNRGAIKLDMADDYNRYKTWVTTIQHMLTLSSSSLSTNYALTFYNKN

SEQ ID NO: 1203 - protein, 205 aa, Arabidopsis thaliana
MKLSLHQPLLFFFLASVLPLILTVHSQSDDSDFIRTSCNTTLYPDLCFSSLSSFSSSVHNDPALLARAAISVTLTKTLDLASYLANITTLQPESNEDGAHHPTAAAVFHDCFDNLKDAVEEMKGSMKQMRELVSTGSLESFRFQMSNVQTWLSAALTDEETCTDGFKDIHDEPRKDDICARVDDVKKMTSNALALVNRCVDKAIH

SEQ ID NO: 1204 - protein, 174 aa, Arabidopsis thaliana
MAPPPPSPPAVSLKVLLLLLRVLTGVFLVIALIILSTNSVTIVSQGSALKFHFKDVYAYRYMLSAAVIGLVYAVIQLFFTISEFATGVKNPFNYQLDFYGDKLISYLVATGSAAGFGVTKDLKDTFLALVALDSTDPVDKFFSKGYASASLLLFAFICLAVLSVFSSFAMAKRN

SEQ ID NO: 1205 - protein, 178 aa, Arabidopsis thaliana
MAPPPPAPPSVTLRTVLLLLRVLTAAFLLITVVLISTNTVTLEISSTSIKLPFNDVYAYRYMLSAAVIGLVYAVVQLFLTISQFATGKTHPLTYQFDFYGDKVISYLLATGSAAGFGVSKDLKDTYIALIEFDSTDPVDKFFSKGYASASLLLFAFVSLAVLSVFSSLALSKRPVPVS

SEQ ID NO: 1206 - protein, 693 aa, Arabidopsis thaliana
MSSSREENVYLAKLAEQAERYEEMVEFMEKVAKTVDTDELTVEERNLLSVAYKNVIGARRASWRIISSIEQKEESRGNDDHVSIIKDYRGKIETELSKICDGILNLLDSHLVPTASLAESKVFYLKMKGDYHRYLAEFKTGAERKEAAESTLVAYKSAQDIALADLAPTHPIRLGLALNFSVFYYEILNSPDRACSLAKQAFDEAISELDTLGEESYKDSTLIMQLLRDNLTLWNSDINRDRSIRSGGLKPYSFEAATDARETPTKETGFRPRINPTGAPTHHKTPRKLVSPTSTSTAPDSEEAIRYTGRGSGEDGQLGIGTNEEKEWACVVEALEPYSVRSVVSGSRNSLAICDDGTMFTWGWNQRGTLGHQPETKTENIPSRVKALANVKITQAAIGGWHCLAVDDQGRAYAWGGNEYGQCGEEPLKDEMGRPVRRDIVIPKRCAPKLTVRQVAAGGTHSVVLTREGHVWTWGQPWPPGDIKQISVPVRVQGLENVRLIAVGAFHNLALEEDGRLLAWGNNEYGQLGTGDTQPTSHPVPVQGLDDLTLVDIAAGGWHSTALTDKGEVYGWGRGEHGRLGLGDNDKSSKMVPQKVNLLAEEDIIQVSCGGTHSVALTRDGRIFSFGRGDHGRLGYGRKVTTGQPLELPIKIPPPEGSFNHTDEEEEGKWSAKSIACGGRHTLAIVEWKSDDI

SEQ ID NO: 1207 - protein, 1629 aa, Arabidopsis thaliana
MALQSPGATGASSSVSRLLSSAKLSSTKTIFSVDFVRSYCISKGTKRRNELSGFRGYSPLLKSSLRSPFSVKAILNSDRAAGDASSSFSDLKPQVAYLEDIISERGACGVGFIANLENKATHKIVNDALIALGCMEHRGGCGSDNTSGDGSGLMTSIPWDLFNEWAEKQGIASFDRTHTGVGMLFLPRDDNIRKEAKKVITSIFEKEGLEVLGWRDVPVEASIVGHNAKQTMPNTEQVFVRIVKDDKVDDVERELYICRKLIERAVASESWASELYFSSLSNQTIVYKGMLRSEVLGLFYPDLQNDLYKSPFAIYHRRFSTNTSPRWHLAQPMRFLGHNGEINTIQGNLNWMTSREASLRSPVWHGRENDIRPISNPKASDSANLDSAAELLIRSGRTPEESLMILVPEAYKNHPTLMIKYPEAVDFYDYYKGQMEPWDGPALVLFSDGKTVGACLDRNGLRPARYWRTSDNVVYVASEVGVLPMDESKVTMKGRLGPGMMISVDLENGQVYENTEVKKRVASYNPYGKWVSENLRNLKPSNYLSSAILETDETLRRQQAFGYSSEDVQMVIESMAAQGKEPTFCMGDDTPVAVLSQKPHMLYDYFKQRFAQVTNPAIDPLREGLVMSLEVNIGKRGNILEVGPQNVSQVVLSGPVLNERELEGLLGDPLLKSQILPTFFDIRRGIEGSLKKGLLKLCEAADEAVRNGSQVLVLSDRSDNPEPTRPAIPMLLAVGAVHQHLIQNGLRMSASIIADTAQCFSTHHFACLIGYGASAICPHLALETCRQWRLSNKTVNMMRNGKMPTVTMEQAQKNYRKAVNTGLLKVLSKMGISLFSSYCGAQIFEIYGLGNEVVEFSFRGSASQIGGLTLDELARETLTFWVRAFSEDTAKRLENFGFIQFRPGGEYHGNNPEMSKLLHKAVREKSETAYAVYQQHLANRPITVFRDLLEFKSDRNPIPVGKVEPASSIVERFCTGGMSLGAISRETHETIAIAMNRLGGKSNSGEGGEDPIRWKPLTDVVDGYSSTLPHLKGLRNGDTATSAIKQVASGRFGVTPTFLVNADQLEIKVAQGAKPGEGGQLPGKKVSAYIARLRNSKPGVPLISPPPHHDIYSIEDLAQLIFDLHQVNPKAKVSVKLVSETGIGTVASGVAKANADIIQISGYDGGTGASPISSIKHAGGPWELGLAETQKTLIGNGLRERVIIRVDGGFKSGVDVLIAAAMGADEYGFGTLAMIATGCIMARICHTNNCPVGVASQREELRARFPGLPGDLVNFFLYIAEEVRGILAQLGYEKLDDIIGRTDLLKARDISLVKTHLDLSYLLSSVGLPKRSSTSIRKQEVHSNGPVLDDTLLQDPEIMDAIENEKTVHKTMSIYNVDRSVCGRIAGVIAKKYGDTGFAGQLNLTFTGSAGQSFACFLTPGMNIRLVGEANDYVGKGMAGGEVVILPVESTGFRPEDATIVGNTCLYGATGGLLFVRGKAGERFAVRNSLAQAVVEGTGDHCCEYMTGGCVVILGKVGRNVAAGMTGGLAYILDEDNTLLPKMNKEIVKIQRVTSPVGQTQLKSLIQAHVEKTGSSKGAMIVEEWDKYLAMFWQLVPPSEEDTPEANSDHILKTTTGDEEQVSSTLAEK

SEQ ID NO: 1208 - protein, 93 aa, Arabidopsis thaliana
MALVRSLFSAKKILGGSLVKTSKAPPKGFLAVYVGESQKKQRHFVPVSYLNQPLFQDLLSKCEEEFGFDHPMGGLTIPCPVDTFISITSQLQG

SEQ ID NO: 1209 - protein, 204 aa, Brassica napus
MSRVYVGNLDPRVTERELEDEFRVYGVIKSVWVARRPPGYAFLDFEDSRDARDAIRDLDGKNGWRVEQSHNRGGGGGGRGGGGGRGDGGRGRGGSDLKCYECGESGHFARECRSRGGGGSRRGRSPSPRGRSRSRSPPRYRKSPTYGERRRSYSPRARSPPPPRRRSPSPRGRNYSRSPPPYRGRDEVPYANGNGLKDVRRSRS

SEQ ID NO: 1210 - protein, 364 aa, Brassica napus
MGSTAETQITPVQVTDDEAALFAMQLASASVLPMVLKSALDLDLLEIMAKNSSPMSPSEIASKLQTKNPEAPVMLDRILRLLTSYSILTCSNRTIPGGDSVERIYGLGPVCKYLTKNEDGVSIAALCLMNQDKVLMESWYHLKDAILDGGIPFNKAYGMSAFEYHGKDLRFNTVFNNGMSNHSTITMKKILETYKGFEGLTSLVDVGGGIGATLKMIVSKYPDLKGINFDLPHVIEEATSHPGIDHVGGDMFVSVPKGDAIFMKWICHDWSDEHCVKFLKNCYEALPEDGKVILAECILPETPDSSLSTKQVVHVDCIMLAHNPGGKERTEKEFEALAKGSGFKGINVACNAFGVYVIELLKKM

SEQ ID NO: 1211 - protein, 282 aa, Brassica napus
MGSLRGNVEEPISQSLPRQNSLYSLKLHEVQNHLGSSAKPLGSMNFDELLKNVWSAEATNQPREATEAGLSRQGSLALPRGLSKKTVEEVWREIQHDKNGSSGNPHGERIDNNNNNKQPTLGEITLEDLLLKAGVVTETVLPQTVVNVASNEPWVQYHHPQHQQQGFMPYPVCEMQEMVSPMNMMMGDAPQAHGRKRVAPSGGDIVERVVERRQKRMIKNRESAARSRARKQAYTHELEIKVSSLEEENEKLRRLKEVEKILPSEPPPDPKWKLRRTSSASF

SEQ ID NO: 1212 - protein, 227 aa, Brassica napus
MEKGESTSTSYSDTNGSNEPDHDFECNICFELAQDPIVTLCGHLFCWPCLYRWLHHHSHSQECPVCKALVQDDKLVPLYGRGKNQTDPRTKRYPGMRIPNRPAGQRPETASPPPQQPQNDAASNFFNYGIGLMGGFMPMATTRIGNFSFGVGGLLPSLFNFQFHGFPDAALYGTAPGYPFGGYHNGFRGVPGGNNEPTAPGGGHPSDAALKNILIVVGICVFFFLLL

SEQ ID NO: 1213 - protein, 145 aa, Brassica napus
  misc_feature (28)..(28): Xaa can be any naturally occurring amino acid
  misc_feature (117)..(117): Xaa can be any naturally occurring amino acid
  unsure (1)..(145): unsure at all Xaa locations
GPSHASSRVHDISCSCITTKEVVDQLAXLICNRMGGPVIMGEDELVPMWKECINGLKECFKVVVPIGSLSVGLCRHRALLFKVLADIIDLPCRIAKGCKYCDRDDAASCLVRFGLDXEYLVDLVGKPGHLWEPDSLLNGPSTISI

SEQ ID NO: 1214 - protein, 238 aa, Brassica napus
RPTRPEILNTLCRDKSNLVFIVSAKSRETLSDWFSPCEKLGIAAEHGYFLRLRKDVEWENCVAAADCSWKQIAEPVMELYTETTDGSTIEDKETALVWSYEDADPDFGSCQAKELLDHLESVLANEPVTVKRGQNYVEVKPQGVSKGLIARRMLSMMQEKGTPPEFVLCIGDDRSDEDMFEVICSSTEGPSIAPRAEVFACTVGQKPSKAKYYLDDTTEIVRLMHGLASVSEQTMSAV

SEQ ID NO: 1215 - protein, 228 aa, Brassica napus
MAPSIKEIFSKDNFKKNKKIVLLSAAVALLLVASVAGIAAGASKANENGKRTLSPTSHAVLRSACSSTLYPELCISAVATAGGVKLMSQKDVIEASLNLTTTAVEHNYFGVKKLIKNTKGLTPREKTALHDCLETIDETLDELHEALEDLHMYPNKKSLREHAGDLKTLISSAITNQETCLDGFSHDAADKKVRKALLKGQVRKNMCKSLPIAVLKWDCITMENKNKI

SEQ ID NO: 1216 - protein, 876 aa, Brassica napus
VAVGNNVLDTLGRSRQSFGGKVRQAMNVPKGKGSRGVVKAMFERFTEKAIKVIMLAQEEARRLGHNFVGTEQILLGLIGEGTGIAAKVLKSMGINLKDARVEVEKIIGRGSGFVAVEIPFTPRAKRVLELSLEEARQLGHNYIGSEHLLLGLLREGEGVAARVLENLGADPSNIRTQVIRMVGENNEVTANVGGGSGTNKMPTLEEYGTNLTKLAEEGKLDPVVGRHPQIERVVQILGRRTKNNPCLIGEPGVGKTAIAEGLAQRIASGVVRETSEGKKVITLDMGLLAAGTKYRGEFEERVKKLMEEIKQSDEIILFIDEVHTLIGAGAAEGAIDAANILKPALARGELQCIGATTLDEYRKHIEKDPALERRFQPVKVPEPTVDETIQILKGLRERYEIHHKLRYTDESLVAAAQLSYQYISDRFLPDRAIDLMDEAGSRVRLRHAQVPEEARELEKELRQITKEKNEAVRGQDFEKAGTLRDREIELRAEVSAIQAKGKEMSKAESETGDEGPMVTESDIQHIVSSWTGILVEKVSTDESDLLLKMEETLHKRVIGQDEAVKAISRAIRRARVGLKNPNRPIASFIFFGPTGVGKSELAKALAAYYFGCEEAMIRLDMSEFMERHTVSKLIGSPPGYVGYTEPPQLTEAVRRRPYTVVLFDEIEKAHPDVFNMMLQILEDGRLTDSKGRTVDFKNTLLIMTSNVGSSVIEKGGRRIGFDLDYDEKDSSYNRIKSLVTEELKQYFRPEFLNRLDEMIVFRQLTKLEVKEIADILLQEVFERLKKKEIELQVTERFRERVVDEGYNPSYGARPLRRAIMRLLEDSMAEKMLAREIKEGDSVIVDVDSEGKVTVLNGGSGTPTTSLEEQEDSLPVA

SEQ ID NO: 1217 - protein, 338 aa, Brassica napus
MKPVFCGNFEYDAREGDLERLFRKYGRVERVDMKAGFAFVYMENERDADDAIRGLDRIEFGRKGRRLRVEWTKGERGGDRRSGGGGSRRSSSSMRPSKTLFVINFDADNTRTRDLERHFEAYGKIVNVRIRRNFAFIQYEEQEDATRALEATNNSKLMDKVISVEYAMKDDDARGNGQSPDRRRDRSPERRRRSPSPYKRERGSPDYGRGGSPVAAYRKERTSPDYGRRRSPSPYKRSRRMSPEYGRDRRGNESPRRRERVASPNNKRERRSPDDSPFKKESPKNGGGEVESPRRERSRSSPENGQVESPSSIGRRDSDDGAESPMQKSRSRSPPAEE

SEQ ID NO: 1218 - protein, 106 aa, Brassica napus
ISFVPKIKKTGSKTPSTSDDDPHASVDQRSRKGKVPKRINKAVRERLKREHLNELFIELADTLEMNQQNSGKASILCEATKFLKDVFGQSESLRKEQTALLSESNY

SEQ ID NO: 1219 - protein, 124 aa, Brassica napus
GSMFSGNRLSKEEMEVVMNKAKEIVSEYPVVVFSKTYCGYCQRVKQVLTQLGATFKVLELDEMGDGGEIQSALSEWTGQSTVPNVFIKGKHIGGCDRVVESNKQGKLVPLLTEAGAIANNSSQL

SEQ ID NO: 1220 - protein, 254 aa, Brassica napus
MASLRCRRATTVLSINQTRSISSVRRLELPGTSITHGIPSQNRSLTSDLPWYRSQGRHFSSETKDTNESSEGEDDDDDYEDSAEMEVEREYSPAEKVEAAAEIGYKVMGPLKPSERLFKPYEPVFAVVQIGSHQFKVSNGDSIFTEKLKFCDINDKLVLTKVLLLGSASQTIIGRPILPEATVHAVVEEHALDEKVLIFKKKRRKNYRRTTGHRQELTKLRITDIQGIEKPEPKIVHKPPKAADTEQPEAELVG

SEQ ID NO: 1221 - protein, 210 aa, Brassica napus
  misc_feature (192)..(192): Xaa can be any naturally occurring amino acid
  unsure (1)..(210): unsure at all Xaa locations
MYSNFEEQAIEYVKQAVQEDNAGNYSKAFPLYMNALEYFKTHLKYEKNPKIREAITHKFTEYLRRAEEIRAVLDEGGPGPGSNGGDAAVATKPKSKPKDGGGDGEDPEQSKLRAGLDSAIVREKPNIKWTDVAGLESAKQALQEAVILPVKFPQFFTGKRRPWRAFLLYGPPGTGKSYLAKAVATEADSNFXSVSSSDLVSKWMGESEKL

SEQ ID NO: 1222 - protein, 403 aa, Brassica napus
ELARQVEKEFRESAPSLDTICLYGGTPIGQQMRELNYGVDVAVGTPGRIIDLMKRGALNLSEVQFIVLDEADQMLQVGFAEDVEVILQKLPEKRQSMMFSATMPSWIRSLTKKYLNNPLTIDLVGDSDQKLADGITMYSISADSYGKASIIGPLVEAHGKGGKCIVFTQTKRDADRLSYGLAKTFKCEALHGDISQSQRERTLAGFRDGNFNILVATDVAARGLDVPNVDLVIHYELPNNTETFVHRTGRTGRAGKKGNAILIHGPEQSRAVKMIEREVGSKFTELPSIPVERGSGSMFEGIGGRSGGSYGGGMRDRSSSYGGRSGGYGGGGGSGRYGGDRSEGSGNRYSGGSDRSSGYGGFGSGGSNRSSGGYGGFGSDRSSQSSGRSSFGGFGLKDPNSSY

SEQ ID NO: 1223 - protein, 323 aa, Brassica napus
MDLDSMDCASTIDVTDDEEIHQDRHSYASVSKHHSNNSNANAASGLLPTTTSVHELLECPVCTNSMYPPIHQCHNGHTLCSTCKNRVHNRCPTCRQELGDIRCLALEKVAESLELPCKYMSLGCPEIFPYYSKLKHETVCNFRPYNCPYAGSECSVMGDIPFLVAHLRDDHKVDMHSGCTFNHRYVKSNPREVENATWMLTVFHCFGQYFCLHFEAFQLGMAPVYMAFLRFMGDETEARNYNYSLEVGGYGRKLIWEGTPRSVRDSHRKVRDSHDGLIIQRNMALFFSGGDRKELKLRVTGRIWKEQQQSGEGGGGACIPNLS

SEQ ID NO: 1224 - protein, 171 aa, Brassica napus
RTIPFLCSPLSLSLYKPCDPLPQDSSMKGGKSKTETRSSKLSVAKKPAKAAGRSKAAAKDPNKPKRPASAFFVFMEDFRQTYKKDHPNNKSVAAVGKAGGEKWKSLSDSEKAPFVAKADKRKVEYEKTMKAYNKKLEEGPKEDEEESDKSVSEVNDEDDADDGSDEEEDDD

SEQ ID NO: 1225 - protein, 359 aa, Brassica napus
MEKYELVKDIGAGNFGVARLMKVKDSKELVAMKYIERGPKIDENVAREIINHRSLRHPNIIRFKEVVLTPTHLAIAMEYAAGGELFERICGAGRFSEDEARYFFQQLISGVSYCHAMQICHRDLKLENTLLDGSPAPRLKICDFGYSKSSLLHSRPKSTVGTPAYIAPEVLSRREYDGKMADVWSCGVTLYVMLVGAYPFEDQEDPKNFRKTIQKIMAVQYKIPDYVHISQDCKHLLSRIFVANSLKRITIAEIKKHPWFTKNLPRELTETAQAAYFKKENPTFSAQTAEEIMKIVDDAKTPPPVSRSIGGFGWGGEGDLEGKEEEEVDEEEVEEEEDEEDEYDKTVKEVHASGEVRIS

SEQ ID NO: 1226 - protein, 124 aa, Brassica napus
  misc_feature (102)..(102): Xaa can be any naturally occurring amino acid
  unsure (1)..(124): unsure at all Xaa locations
MELPLLSYTNSASFSRTGICSSSSSSTSINDFLERRRSLRMRFNGGDNPRSVRASAGRSSEGMEKTNSSGGGARQFAGPVMEVTTLDRGFANSTTVDFPVWXKLGALVRLTYGIGIYGAMAVAG

SEQ ID NO: 1227 - protein, 120 aa, Brassica napus
MGRSPCCDESGLKKGPWTPEEDEKLINHIRKHGHGSWRALPKQAGLNRCGKSCRLRWTNYLRPDIKRGNFAAEEEQTIINLHSLLGNKWSSIAGHLPGRTDNEIKNYWNTHIRKKLIQMG

SEQ ID NO: 1228 - protein, 286 aa, Brassica napus
  misc_feature (216)..(216): Xaa can be any naturally occurring amino acid
  unsure (1)..(286): unsure at all Xaa locations
CHNGHTLCSTCKVRVHNRCPTCRQELGDIRCLALEKVAESLELPCKFYNLGCPEIFPYYSKLKHESLCNFRPYGCPYAGSECGVVGDIPFLVSHLRDDHKVDMHAGSTFNHRYVKSNPREVENATWMLTVFHCFGQYFCLHFEAFQLGMGPVYMAFLRFMGDEEEARSYSYSLEVGGSGRKLTWGGTPRSIRDSHRKVRDSNDGLIIQRNMALFFXSGGDRKELKLRVTGKIWKEQHSPDSGLFMPKPIFLIVHAFSSFFFSIFENESCMMNTFTHFFFICILNIS

SEQ ID NO: 1229 - protein, 159 aa, Brassica napus
  misc_feature (98)..(98): Xaa can be any naturally occurring amino acid
  unsure (1)..(159): unsure at all Xaa locations
MSDEEHHFESSDAGASKTYPQQAGNIRKGGHIVIKGRPCKVVEVSTSKTGKHGHAKCHFVAIDIFTAKKLEDIVPSSHNCDVPHVNRIDYQLIDISEXGFVSLLTDSGGTKDDLKLPTDDNLSALMKSGFEEGKDVVVSVMSSMGEEQICAVKEVGGGK

SEQ ID NO: 1230 - protein, 160 aa, Brassica napus
  misc_feature (74)..(74): Xaa can be any naturally occurring amino acid
  unsure (1)..(160): unsure at all Xaa locations
MSDEEHHFESSDAGASKTYPQQAGNIRKGGHIVIKGRPCKVVEVSTSKTGKHGHAKCHFVAIDIFTAKKLEDIXVPSSHNCDVPHVNRVDYQLIDISEDGFVSLLTDSGGTKDDLKLPTDDNLSALMKSGFEEGKDVVVSVMSSMGEEQICAVKEVGGGK

SEQ ID NO: 1231 - protein, 132 aa, Brassica napus
MDMTSSSGKRSVAKKMTTPCCTKMGMKRGPWTVEEDKILVSFIEKEGEGRWRSLPKRAGLLRCGKSCRLRWMNYLRPSAKRGGIAPDEEDLILRLHRLIGNKWSLIAGRIPGKTDNEIKNYWNTHPRKKLLS

SEQ ID NO: 1232 - protein, 428 aa, Brassica napus
MAQILAASPTCQMRLTKPSSIASSKLWNSVVLKQKKQSSSKVRSFKVMALQSDNSTINRVESLLNLDTKPFTDRIIAEYIWIGGSGIDLRSKSRTLEKPVEDPSELPKWNYDGSSTGQAPGEDSEVILYPQAIFRDPFRGGNNILVICDTYTPAGEPIPTNKRARAAEIFSNKKVNEEIPWFGIEQEYTLLQPNVNWPLGWPVGAYPGPQGPYYCGVGAEKSWGRDISDAHYKACLYAGINISGTNGEVMPGQWEFQVGPSVGIEAGDHVWCARYLLERITEQAGVVLTLDPKPIEGDWNGAGCHTNYSTKSMREDGGFEVIKKAILNLSLRHMEHISAYGEGNERRLTGKHETASIDQFSWGVANRGCSIRVGRDTEKKGKGYLEDRRPASNMDPYIVTSLLAETTLLWEPTLEAEALAAQKLSLKV

SEQ ID NO: 1233 - protein, 219 aa, Brassica napus
VAVKVIPKSKMTTAISVEDVRREVKILRALSGHNNLVQFYDAFEDNANVYIVMELCGGGELLDRILARGGKYSEDDAKAVLIQILNVVAFCHLQGVVHRDLKPENFLYTSKEENSQLKVIDFGLSDFVRPHERLNDIVGSAYYVAPEVLHRSYTTEADVWSIGVIAYILLCGSRPFWARTESGIFRAVLKSDPSFNEPPWPSLSFEAKDFVKRLLYKDP

SEQ ID NO: 1234 - protein, 198 aa, Brassica napus
MESTDSGSQQHGGDPGPSSVTPSSPPATPPSRYESQKRRDWNTFLQYLKNHKPPLALSRCSGAHVIEFLKYLDQFGKTKVHVATCPYFGHQQPPSPCACPLKQAWGSLDALIGRLRAAYEEHGGRPDSNPFAARAVRIYLREVRESQAKARGIPYEKKKRKRAPTVTTARIDVAPSRPSEGGGGCNVSDPSVAEAVPP

SEQ ID NO: 1235 - protein, 437 aa, Brassica napus
  misc_feature (164)..(164): Xaa can be any naturally occurring amino acid
  unsure (1)..(437): unsure at all Xaa locations
IKNKQVKRRVGKYEVGRTIGEGAFAKVKFARNSETGEPVALKILDKEKVLKHKMSEQIRREIATMKLIKHPNVVQLYEVMASKTKIFIILEYVTGGELFDKIVNDGRMKEDEARRYFQQLVHAVDYCHSRGVYHRDLKPENLLLDAYGNLKISDFGLSALSTHXPGLLHTSCGTPNYVAPEVLNDGGYDGATADMWSCGVILYVLLAGYLPFDDSNLMNLYKKISSGEFNCPPWLSLGAMKLITRILDPNPMTRVTPQEVFEDEWFKKDYKPPVFEEKDDSNMDDVDAVFKDSEEHHVTEKKEEQPAAINAFEIISMSRGLNLENLFDPEQEFKRETRITLRGGANEIIDKIEEAAKPLGFDVQKKNYKMRLENVKAGRKGNLNVATEIFQVAPSLHMVQVSKSKGDTLEFHKFYKKLSNSLENVVWTNNEVKKAGK

SEQ ID NO: 1236 - protein, 290 aa, Brassica napus
HASADAWAVSIKILPVGIHMGQIEEIKVAEETAEKVKGLRERFKEKIVMLGVDDLDMFKGISLKFWAMGQLLEQNKELRGKVVLVQITNPARSSGKDVQDVETQIHLIADEVNNKFGRPGSGYKPIVFVNGPVSTLDKVAYYAISECVVVNAVRDGMNLVPYKYTVTRQGSPVLDEALGLGAGDVRKSVIIVSEFIGCSPSLSGAIRVNPWNIDAVTDAMSSAVTMSDKEKNLRHQKHHKYISSHDVAYWSRSYDQDLQRACKDHYNKRFWGVGLGLVFRVVALDPNFRK

SEQ ID NO: 1237 - protein, 184 aa, Brassica napus
MRKDDLYITVPSFFRCPISLDVMKSPVSLCTGVTYDRASIQRWLDGGNNTCPATMQILQNKDFIPNRTLQRLIEIWSDSVRRRASVEPAELAAPTRDEIADAIDRVKVEKEERFDREVLAKILRFARESDDNRGFLAGKDDFVRLLVDLMSQVDFKTTSAAKLLIVQEAVKILSMIRSKISDRR

SEQ ID NO: 1238 - protein, 354 aa, Brassica napus
MEKYELVKDIGAGNFGVARLMKVKNSKELVAMKYIERGPKIDENVAREIINHRSLRHPNIIRFKEVVLTPTHLAIAMEYAAGGELFERICSAGRFSEDEARYFFQQLISGVSYCHAMQICHRDLKLENTLLDGSPAPRLKICDFGYSKSSLLHSRPKSTVGTPAYIAPEVLSRREYDGKMADVWSCGVTLYVMLVGAYPFEDQEDPKNFRKTIQKIMAVQYKIPDYVHISQDCKHLLSRIFVANSLKRITIAEIKKHPWFLKNLPRELTETAQAAYFKKENPTFSPQTAEEIMKIVDDAKTPPPVSRSIGGFGWGGKGDEEEEEVDEEEVVEEEEDEEDEYDKTVKEAHASGEV

SEQ ID NO: 1239 - protein, 201 aa, Brassica napus
MAKLYQTLLLIISISYFFSPELIAASPAGASQKAVNFIQSSCKTTTYPAVCFRSLSAYANAIQTSPQRLAETALAVTLSRVQSTKLFVSRLTRFKTLKKREVEAIKDCVEEINDTIERLTKSVQEMKLCGSAKNQEQFAFHMSNAQTWTSAALTDENTCSDGFSGRFMDGRIKNSVRARIVNMGQETSNALSLINAYGKKY

SEQ ID NO: 1240 - protein, 209 aa, Brassica napus
  misc_feature (193)..(193): Xaa can be any naturally occurring amino acid
  unsure (1)..(209): unsure at all Xaa locations
MTISDQFPCGLRVLVVDDDASCLIILEKMLLRLMYQVTICSQADVALTLLRERKGCFDLVLSDVHMPGMNGYKLLQQVGLEMDLPVIMMSVDGRTATVMTGINHGACDYLIKPIRPEELKNIWQHVVRRKCTINKNSISSSSSSLGSLFSVSGVSEGSLKRRKNKRRVDSEEDDLLDPGNSSKKSRVVWSMEXHQQFVKAINHLGIEKA

SEQ ID NO: 1241 - protein, 428 aa, Brassica napus
MAQILAASPTCQMKLTKPSPIASSKLWSSVMLKQKKQNSSKLRSFKAMALQSDNSTINRVESLLNLDTKPFTDRIIAEYIWIGGSGIDLRSKSRTLEKPVEDPSELPKWNYDGSSTGQAPGEDSEVILYPQAIFRDPFRGGNNILVICDTYTPAGEPIPTNKRARAAEIFSNKKVNEEIPWFGIEQEYTLLQPNVNWPLGWPVGAYPGPQGPYYCGVGAEKSWGRDISDAHYKACLYAGINISGTNGEVMPGQWEFQVGPSVGIEAGDHVWCARYLLERITEQAGVVLTLDPKPIEGDWNGAGCHTNYSTKSMREEGGFDVIKKDILNLSLRHMEHISAYGEGNERRLTGKHETASIDQFSWGVANRGCSIRVGRDTEKKGKGYLEDRRPASNMDPYIVTSLLAETTLLWEPTLEAEALAAQKLSLKV

SEQ ID NO: 1242 - protein, 128 aa, Brassica napus
  misc_feature (118)..(118): Xaa can be any naturally occurring amino acid
  unsure (1)..(128): unsure at all Xaa locations
DIEIYKHPKEERIARTWGTTAPGLPYVEEAITNAGNWLIGGDLEVLEPVKYNDGLDRFRLSPAELRKELEKRGADAVFAFQLRNPVHNGHALLMTDTRRRLLEMGYKNPILLLHPLGXGYTKADGCSS

SEQ ID NO: 1243 - protein, 141 aa, Brassica napus
MENTQDFSPPHMDASRPSLGFPLGTALLLIIIFSLSGIFSCCYHWDKHRSLRRSLANASGHPSATSSDIESSPFKPRLPFPDLKKNQNLSVPVLMPGDNTPKFIALPCPCAPPRPEKLTVDVQSPPHSPPVKPPRFPVPLY

SEQ ID NO: 1244 - protein, 333 aa, Brassica napus
MPGLESETSTFHVFNHDLQTQLQRYPQETAVEEHPPVGRQNSIMSLTLDEIQMKSGKSFGAMNMDELLANMWMTVEENNGGGAGAQQDGEKPTIVPRQGSLSVPVPLYKKTVEEVWFEIQNGVQQPPPSSIAGQNPDEDNRRQQTLGEITLEDFLVKAGVVQEPLKTTMKMSSSDFGYNPEFGVGLHCQTQNNYGDNRTGFNENRPFYSGMGESSSCMTGKERSDQYLPGLNAFRIQKRIIDGPPEILMERRQRRMIKNRESAARSRARRQAYTVELELELNQLTEENLKLKKIVEENEKKRRQEVMNRSTQITKEKNGDKLRRIRRMASAGW

SEQ ID NO: 1245 - protein, 206 aa, Brassica napus
MSGGDGNNGGGRRKGSVKWFDTQKGFGFITPDDGGEDLFVHQSSIRSEGYRSLAPEEAVEFEVEVDNSGRTKAIEVSGPDGAPVLGNSGGSSGGRGGFGGGGRGGGRGGGGRGYGGGDSYGGGGYGGGGGYGGGGYGGRGGGGGDGACYKCGEQGHMARDCSQGGGGGYGGGGGGRFGGGGGGGGGSCYSCGESGHFARDCTSGGR

SEQ ID NO: 1246 - protein, 362 aa, Brassica napus
MAAAAIGAAVSYPSSKSSSLPSKTSFVSPQRIFLNNKSTLCYREACIYRGRVKAQVSTEAPVKVAKESKKQEEGIVVNKFKPKDPYTGRCLLNTRITGDDAPGETWHIVFTTEGEVPYREGQSIGIIPEGIDKNGKPHKLRLYSIASSAIGDFGDSKTVSLCVKRLVYTNESGEVVKGVCSNFLCDLKPGDEAKITGPVGKEMLMPKDPNATIIMLGTGTGIAPFRSFLWKMFFEEHEDYKFNGLAWLFLGVPTSSSLLYKEEFEKMKEKNPENFRLDFAVSREQTNDKGEKMYIQTRMAEYAEELWELLKKDNTFVYMCGLKGMEKGIDEIMVSLAAKDGIDWFEYKKQLKKSEQWNVEVY

SEQ ID NO: 1247 - protein, 115 aa, Brassica napus
VDHASARREKISERMKILQDLVPGCNKVIGKALVLDEIINYIQSLQRQVEFLSMKLEAVNSRMTPGIEVFPPKEFDQQTFENQGMQFGAQATREYSRGASPEWLHMQVGGGFERS

SEQ ID NO: 1248 - protein, 151 aa, Brassica napus
MEAQHLYGKPQAEGEWSTGFCDCFSDCKNCCITCWCPCITFGQVAEIVDQGSTTCGTAGALYALINAVTGCACIYSCFYRGKMRAQYNIEGSDCGDCLKHFFCELCALTQQYRELKNRGFNMDLGWAGNVQRQQNQGAAMGAPVFQGGMNR

SEQ ID NO: 1249 - protein, 158 aa, Brassica napus
MELASFVGRALFVSVFLLSAWQEFNGFGDDGGRAAKSLRPKFNAFVSHVTTHTGQQLPPVDMKILVAAAIALKGIGGLLFVFGSSLGAYLLLLHQAVATPILYDFYNYDVDKKEFSQLFSKFTQSLALLGALLFFIGMKNSRRHGRQLRKKAPKAKAN

SEQ ID NO: 1250 - protein, 365 aa, Brassica napus
  misc_feature (121)..(121): Xaa can be any naturally occurring amino acid
  misc_feature (357)..(357): Xaa can be any naturally occurring amino acid
  unsure (1)..(365): unsure at all Xaa locations
MSFRSIVQDLRDGLGSLSRRSFDFRLHHKGKSHGSSFREYSSSLDLSPLIVQTSRWANLPPELLLDVIKRLEESESNWPARKHVVACASVCRSWRAMCQEIVHGPEISGKLTFPVSLKQPXPRDAMIQCFIKRDNPKLTFHLFLCWWPTRPVENGKFLLSAKRTRRTTRTEYIISMDAENISRSSNSYLGKLRSNFLGTKFLVYDTQPPPDTSSSSSSALITDRTSRSRFHSRRVSPKVPSGSYNIAQITYELNVLGTRGPRRMHCIMNSIPTSSLEPGGSVPNQPEKLLPPPPRSFDDSFRSNISFSKSSFDHRSVDFSSSRFSEMGVSCEEDQGETSFKPLVLKNKQPRWHEQLXCWCLNFRG

SEQ ID NO: 1251 - protein, 179 aa, Brassica napus
MAVTTFNTLRLVSSSLDSIPSISFSTSYSLSLISVGGITCSDVKRCLKHTCSVRAMSSSSAASSSSFGSRMEESVKKTVTENVVVVYSKTWCSYCIEVKTLFKRLGVQPLVIELNELGPQGPQLQKVLERLTGQRTVPNVFVGGKHIGGCTDTVKLKRKGDLALMLAEANGKTDQTLRK

SEQ ID NO: 1252 - protein, 183 aa, Brassica napus
MASSVHDLSDKIETHDKQEHKDSQFQIQPPIPPGRNSAVYSEQLPHSMAPGHYPYPDPYYRSMFAPNPQAYPPRPYETGVHAHLMGVQQQCVPLPSDAVEEPVFVNAKQYHGILRRRQSRAKLESQNKVVKSRKPYLHESRHLHAIRRPRGCGGRFLNAKKEEEHHEGNHLEEKSMAASGGTS

SEQ ID NO: 1253 - protein, 183 aa, Brassica napus
LMEISHQYLHKQISIVSQEPILFNCSVEENIAYGFDGEATLSDIENAAKMANAHEVIETFPDKYKTVVGERGVRLSGGQKQRIAIARALLTNPRVLLLDEATSALDAESEYLVQDAMDSLMAGRTVLVIAHRLSTVKTADCVAVISDGQVAEKGTHEELLSFNGIYTNLVKRQLQSSSSVTNL

SEQ ID NO: 1254 - protein, 182 aa, Brassica napus
MAPNVDESVKLFLSIGLDEKTAATTINNPKVTANLTAVIHEAGVTDGCDRTTGNLLYTVATKHHSNLLLHRPTLFDYIVSSKIKTPAQLDAAVSFFDNHAAEDFKLNEFEEACGVGVEVSAEDIEKAAGEVFEENRSAIAEQRYRTNVGQLLGHVRKSLPWADPKIVKDVIKKKKKKKKKNM

SEQ ID NO: 1255 - protein, 109 aa, Brassica napus
MSGVWVFKNGVIRLVENPNQSGGVTHGRRNVLVYLPTGEVVSSYSSLEQILMSLGWERYFSGDSDLIQYHKRSSIDLISLPRDFSKFNSVYMYDIVIKNPNTFHVREFH

SEQ ID NO: 1256 - protein, 655 aa, Brassica napus
MAAATSSSPISLTAKPSSKSPLPISRFSLPFSLTPQKDSSRLHRPLAISAVLNSPVNVAPPSPEKTDKNKTFVSRYAPDEPRKGADILVEALERQGVETVFAYPGGASMEIHQALTRSSTIRNVLPRHEQGGVFAAEGYARSSGKPGICIATSGPGATNLVSGLADAMLDSVPLVAITGQVPRRMIGTDAFQETPIVEVTRSITKHNYLVMDVDDIPRIVQEAFFLATSGRPGPVLVDVPKDIQQQLAIPNWDQPMRLPGYMSRLPQPPEVSQLGQIVRLISESKRPVLYVGGGSLNSSEELGRFVELTGIPVASTLMGLGSYPCNDELSLQMLGMHGTVYANYAVEHSDLLLAFGVRFDDRVTGKLEAFASRAKIVHIDIDSAEIGKNKTPHVSVCGDVKLALQGMNKVLENRAEELKLDFGVWRSELSEQKQKFPLSFKTFGEAIPPQYAIQILDELTEGKAIISTGVGQHQMWAAQFYKYRKPRQWLSSSGLGAMGFGLPAAIGASVANPDAIVVDIDGDGSFIMNVQELATIRVENLPVKILLLNNQHLGMVMQWEDRFYKANRAHTYLGDPARENEIFPNMLQFAGACGIPAARVTKKEELREAIQTMLDTPGPYLLDVICPHQEHVLPMIPSGGTFKDVITEGDGRTKY

SEQ ID NO: 1257 - protein, 205 aa, Brassica napus
DEIDSLCGQRGEGNESEASRRIKTELLVQMQGVGHNDEKVLVLAATNTPYALDQAIRRRFDKRIYIPLPDVKARQHMFKVRLGDTPHNLNEADFEYLARKTEGFSGSDVAVCVKDVLFEPVRKTQDAMFFFKSADGTWMPCGPKQSGAIQITMQDLAEKGLAEKIIPPPISRTDFEKVLARQRPTVSKSDLEVHERFTKEFGEEG

SEQ ID NO: 1258 - protein, 148 aa, Brassica napus
STHASEEIQDMILEMVPRSVLLQETGEKDTSGIALEFISSSDNKEAVVKAANILFQKYLKSRHPGKDEEGENVFTESHLNEALRVVGESVHVPDLLLVYGPVRSHLGFPAWRLRYTEIVHMGSLKYMRYGSLLKAIHKFTGVRQNYGV

SEQ ID NO: 1259 - protein, 150 aa, Brassica napus
VISPVKQVKEIVPSPPPCHVPHVPRVDSQFNEIPEDGLVTLLPPSGGPKDTLHLPPHKSLSALIKSGFGEGKEVVVFVMSSMGKKQMCPVKPVGVVKLNPFSFFLERIILFPVVHVIPPKPCFFFFFFLIIWVVFPCCPAPKTKNRFWGV

SEQ ID NO: 1260 - protein, 137 aa, Brassica napus
RDAWAQAWALARQLNLRPRQVEVWFQNRRARTKLKQTEVDCEFLKKCCETLTDENRRLQKELQDLKALKMSQPFYMHMPAATLTMCPSCERLGGGGGGAAGGGGGTAEVNGGTAKGAFSVVTKPRFFNPLTSPSTAC

SEQ ID NO: 1261 - protein, 239 aa, Brassica napus
  misc_feature (215)..(215): Xaa can be any naturally occurring amino acid
  unsure (1)..(239): unsure at all Xaa locations
MATSISLKPTNLLLSSFSTGKVLHLRRSRFSHRPSPSSSCRRTLVAQFGFSPGPVSLDLIKEHVESLLYTIADAAVSSSETFDSFSGTTTTTTTNQNSDWFTGIANYMETILKVLKDGLSTVNVPYSYGFAIILLTVLVKAATFPLTKKQVESTMAMKSLQPQIKAIQERYAGDQEKIQLETARLYKLAGINPFAGCLPTLATIPVWIGLYRALXNVADEVYLQKERKKLLSIYFSQRL

SEQ ID NO: 1262 - protein, 321 aa, Brassica napus
  misc_feature (251)..(251): Xaa can be any naturally occurring amino acid
  unsure (1)..(321): unsure at all Xaa locations
MENTDELVSIELPAPASWKKLFYPKRAGTPRKTEIVFMAPTGEEISSRKQLEQYLKAHPGNPVISEFDWTTGETPRRSSRISQKVKATTPTPEREPHMKKRRSSLTKKDLKEAAEKNQVAQQDKNGQTEEADVAVKEGLVEENKDGEKSEAEKEKENKEDENKEGEVVTDKKEPVEVDSSEVEKKAEAENKEGEVATDKKEPMEVDSSEVEKKAGSGGKAEETPKGGDLKDTEMKEGDGENKLAEKETENXGSIGAEANGGENATSGKPNLEANQGNGTHEAAAAVAEEKSNDVKAAEDTNRGLEANQVQQQQGAAASVSC

SEQ ID NO: 1263 - protein, 150 aa, Brassica napus
MTHTDEMVSIELPAPSSWKKLFYPELAGSPRKTKIVFVAPTGERISSRKQLEKYLKAHPGSPVISELDWTNGESPRRSSRISQMVKATPTPTPDEKEPPKKRRRSSLSKKGGKGAASAEKNEEAQEGEVVAEENVEADKNGEAEESAGKE

SEQ ID NO: 1264 - protein, 392 aa, Brassica napus
  misc_feature (45)..(45): Xaa can be any naturally occurring amino acid
  unsure (1)..(392): unsure at all Xaa locations
MCCGSDQLDQISASEDSTTNTEMNHLTVETEDTFASLLELAANNXDVEGVRLSIDRDPSCVDEPGLWYGRQKGSKAMVNDHRTPLMVAATYGSIDVIKLILSLTDVNRACGSDQTTALHCAASGGAVNAVQVVKLLLAAGADLNLMDADGQRAGDVIVVPPKLEGVKLMLQELLSAATAERNLRVVTNVRTSRSNSPNEEEYGDGDGESPFKMKSSTEFKKEYPVDPSLPDIKNSIYSTDEFRMYSFKVRPCSRAYSHDWTECPFVHPGENARRRDPRKFHYSCVPCPDFRKGACRRGDMCEFAHGVFECWLHPAQYRTRLCKDGTGCARRVCFFAHIPEELRPLYESTGSAVLSPQSNADFAAALSLLPPGSPSGVSVMSPLSPSSGGNGM

SEQ ID NO: 1265 - protein, 284 aa, Brassica napus
MMFEKDDLGLSLGLNLPKKQMNLKSNPSVSLTPSSSSFGLLRRSSLNESFNSSVPYSDSSRVETRTFIRGIDVNQPPSTAEYGDKDAGVSSPNSTVSSSTGKRSEREEDTDPQGSRGISDDEDGDNSRKKLRLSKDQSAILEETFKDHSTLNPKQKQALAKQLGLRARQVEVWFQNRRARTKLKQTEVDCEFLRRCCENLTDENRRLQKEVTELRSLKLSPQFYMHMNPPTTLTMCPSCEHVSVPPPPQVAASGHHQRSLPVNPWAPATRVSHGLTFDAFRPRS

SEQ ID NO: 1266 - protein, 272 aa, Brassica napus
RPHASAKHQGVNIITEYAMGIIYPGRPIANVCFKVYGYMSMAQAVSFLNDFKLGHYMKIPPRSMFLVQFIGTILAGTINITVAWWQLNTITNICQEELLPPNSPWTCPGDRVFFDASVIWGLVGPKRIFGSQGNYAAMNWFFLGGAIGPVIVWLCHKAFPKHSWIPLVNLPVLLGATPMMPPATAVNYNSWILVGTIFNLFVFRYRKSWWQRYNYVLSAAMDPGVAFMAVLLSFSVGMEDKSLDWWGPKGDHCDLAKCPPPKGVIVKGCPVV

SEQ ID NO: 1267 - protein, 203 aa, Brassica napus
MGTEEESVSVELPAPSSWKKLFFPNKVGSVKKTEIVFVAPTGEEISNRKQLDQYLKSHPGNPSITEFDWTTSGTPRRSARISDKKTKSTPSPDKEPPKKRGRTKSSGSKKDAEEEGEKPEDTEMSPLKGTEESVTVKDGSGETKDDMVAEKTPVQEAVGESMKEQTPDLVGESSKERVESQTDKEEETGSVVKTSVEAEIKTA

SEQ ID NO: 1268 - protein, 135 aa, Brassica napus
GSFLRGLDVNRAPSRVVVDVGEDAGVSCPNSTVSSVMSGKRNERELVAAAGTGGGRTIEDNEAERGSSSLGGGSDDEDGGGNGDDGSRKKLRLSKEQAWFLEETFKEHSTLNPKQKMALAKQLNLMTRQVEVWFQ

SEQ ID NO: 1269 - protein, 254 aa, Brassica napus
  misc_feature (245)..(245): Xaa can be any naturally occurring amino acid
  unsure (1)..(254): unsure at all Xaa locations
GKKIRHLTIQLKKRNITKKLIFSVSTHASGEVESDYALLESIRRHLLGGEAELWFAESIPSSCFTESWGDLPLKENDSEDMLVYGLLNDPYDTSSPSSDLSCITDFLDLETSSKRPSDPPVVKAEPAESFAAATVEKQKAATAKGKHYRGVRQRPWGKFAAEIRDPAKNGARVWLGTFETAEDAAFAYDRAAFRMRGSRALLNFPLRVNSGEPDPVRITSKRSYTSSSSSSSKLKQLRKTENVPXEFQVKCEVV

SEQ ID NO: 1270 - protein, 133 aa, Brassica napus
SVRNPLSPDLGGRFDRSLWQAYVSVNKIFADRIMEVINPEDDFVWIHDYHLMVLPTFLRKRFNRVKLGFFLHSPFPSSDIYRTLPIIEELLRALLNADLIGFHTFDYARHFLSCCSRMLGLTYESKRGYIGLE

SEQ ID NO: 1271 - protein, 343 aa, Brassica napus
  misc_feature (210)..(210): Xaa can be any naturally occurring amino acid
  unsure (1)..(343): unsure at all Xaa locations
STHASAEFSSHFFSSVDHLDGPNHPKKPLTIKEAAKPEAKAMAPPKFRPPVVSVGPSHCGSNQSTNDHQVTHPPVSMSDRSKNVEERLDTSSGGSSGCSKETESGRSVSISRKRKHAMDTDQESMSQSDVRLMPTDDQTMGNKSSQRSGSTRRSRAAEVHNLSERRRRDRINERMKALQELIPHCSKTDKASILDEAIDYLKTLQMQLQXVMWMGSGMAAAAAAAATPMMFPGVQSSQYINQMAMQSQMQMPQFPVMNRPAAQNHPGLVCQNPAVQFQMQAQNQMLSEQLARYMGGFPPMPATTQTQTVQQPMDMMRFGSQVGQQSQLSTPVTTDSLRMGKTG

SEQ ID NO: 1272 - protein, 509 aa, Brassica napus
PTAREILNSELISKNDSAISTAADEEMSELLLHFLSSLEKQKKKNATKLLQDIQTLEDDIKEAEQRYSSNASLVRSHGAIETRVQSSPLDERCTTSSGALFAPAANTDRLMMSNLRQLEDAYFFMRSQMKLSNSAARSDKSLRWSENQNENQETKTKEKSSDQVEVSTHASGKFARYSKFETCGTIRSGDLLNSTASVVCSLSFDAEEEHIAAAGISKKIKIFDFNAFMNESVGVQYPLVEMVSKSKLSCVCWNNYIKNYLASTDYDGVVQIWDAGTGQGFSQYTEHQKRAWSVDFSPSDPTKFVSGSDDCSVKLWSVNEKRSLGTIWSPANVCCVQFSSYSNHLLAFGSADYKVYCYDLRYVKTPWCTLAGHEKAVSYVKFMDSETIVTASTDNSLKLWNLNKTNSSGLSPGACSMTYKGHTNQKNFVGLSVLDGYIACGSETNEVYSYYRSLPMPMTSYKFGAVDPISGNECFDDNAQFVSSVCWKKKSNMLVAANSTGNMKLLKLV

SEQ ID NO: 1273 - protein, 158 aa, Brassica napus
MSDEEHHFESSDAGASKTYPQQAGNIRKGGYIVIKGRPCKVVEVSTSKTGKHGHAKCHFVAIDIFTSKKLEDIVPSSHNCDVPHVNRVDYQLIDISEDGFVSLLTDNGSTKDDLKLPTDEALLTQLKSGFEEGKDIVVSVMSAMGEEQMCALKEVSPK

SEQ ID NO: 1274 - protein, 294 aa, Brassica napus
  misc_feature (262)..(262): Xaa can be any naturally occurring amino acid
  unsure (1)..(294): unsure at all Xaa locations
MSSGGTVRRVSRQDIQLVQNLIERCLQLYMNQKEVVETLLEQAKIEPGFTELVWQKLEEENREFFKAYYLRLMVKHQIMEFNKLLEQQVHHMQQMHPSGVAPVQNTNGSHIQSMNQKHLGYASEHTDQSLKSIPSSLSNAYLNGSSTLNTTNVASSVNISTHARRVDASSPNMLSSQTTTNMPMMQGMNGGGGMIKSETAFTSPASFMYGGERNALEGHSTVRDTTSISTFGNESNNNQQPLSETLLDSEAATFGFLGQIPXNFSLSDLTADFSQSSEILESYDKSPFLVPMVK

SEQ ID NO: 1275 - protein, 132 aa, Brassica napus
MAMKKAKEIVSSNAVVVFSKSYCPYCVKVKDLLKKLGAKFIAVELDKESDGAQVQSALAEWTGQRTVPNVFIGEKHIGGCDSVTNLHRGGKLVPLLTVSKPSSKIRSSITEARQGHNMPTKVEGPSRARKTS

SEQ ID NO: 1276 - protein, 117 aa, Brassica napus
MEKEKEEEGSHHRICDYCESSVALVYCKADSAKLCLACDNQVHVTNQLFSKHFRSLLCDSCDDSPSSVFCDTESSVLCQNCDWQHHTSSSSLHSRRPLEGFSGCPSVTELLALVGLD

SEQ ID NO: 1277 - protein, 495 aa, Brassica napus
MAEISATSFPSSSSASLALRSSLNGSLRCQNVACLRTTSLFQELSVKRSQLSGNAVATTTHVPLTRGCKSQAIRAVLSGDGQVVSADPKGAGLRGKLKKVVLAYSGGLDTSVIVPWLKENYGCEVVCFTADVGQGIKELDGLEQKAKASGASQLVVKDLTEEFVKDYIFPCLRAGAIYERKYLLGTSMARPVIAKAMVDVAAEVGADAVAHGCTGKGNDQVRFELTFFSLNPELKVVAPWREWEIQGREDAIEYAKKHNVPVPVTKKSIYSRDRNLWHLSHEGDILEDPANEPKKDMYMMSVDPEDAPDQPEYIEIGIESGLPVALNGKPLSPATLLSELNTIGGKHGIGRIDMVENRLVGMKSRGVYETPGGTILFAAVQELESLTLDRESIQVKDSLALKYAEMVYAGRWFDPLKESMDAFMEKLTEKTTGSVTLKLYKGSVSVTGRKSPNSLYRQDISSFEGSEIYNQADAAGFIRLYGLPMRVRAMLEKGI

SEQ ID NO: 1278 - protein, 129 aa, Brassica napus
  misc_feature (125)..(125): Xaa can be any naturally occurring amino acid
  unsure (1)..(129): unsure at all Xaa locations
MRKGRGSSAVPPALHGSVVKEPRYRGVRKRPWGRFAAEIRDPLKKSRVWLGTFDSAVEAARAYDAAARNLRGSKAKTNFPIDCSPSSPLQPLNYQNHHRNLAPNQNQMDPFMDHRLYGEGGGSFXEQQQ

SEQ ID NO: 1279 - protein, 199 aa, Brassica napus
MSSVSSQQQFRYTQTPSKVLHLRNLPWECTEEELIELGKPFGTVVNTKCNVGANKNQAFIEFEDLNQAIQMISFYASSSEPAQVRGKTVYLQYSNRQEIVNNKTAADVVGNVLLVTVEGEDARMVSIDVLHLVFSAFGFVHKITTFEKTAGYQALVQFSDAETATSARTSLDGRSIPSYLLPEEVSQCSLKITYSAHTD

SEQ ID NO: 1280 - protein, 231 aa, Brassica napus
MSQKRNTHITEEIMKKPSLHQPILFFFLATLLPLILTVHSQPSPSPSPSPSPSPSDDSDFIQRSCNTTLYPDVCVSSLSNFSTYVHNDPALLARAAISVTLSNALELGKYLSNVSTLLEIHEDGGHHPTAAAVFHDCFENLKDAVDEMRDSMKQMRDLVTTGSLESFRFQMSNVQTWLSAALTNEETCTDEFKDVQDEPRKDEVCARVDGVKKLTSNALALVNRCVDNAIR

SEQ ID NO: 1281 - protein, 344 aa, Brassica napus
MAKPMAIEVYNPNGKYRVVSTKPMPGTRWINLLVDQGCRVEICHLKKTILSVEDIIDLIGNKCDGVIGQLTEDWGETLFSALSKAGGKAFSNMAVGYNNVDVEAANKYGIAVGNTPGVLTETTAELAASLSLAAARRIVEADGFMRAGLYEGWLPHLFVGNLLKGQTVGVIGAGRIGSAYARMMVEGFKMNLIYFDLYQSTRLEKFVTAYGQFLKANGEQPVTWKRASSMEEVLREADLISLHPVLDKTTYHLVNKERLAMMKKEAILVNCSRGPVIDEVALVNHLRENPMFRVGLDVFEEEPFMKPGLADMKNAIVVPHIASASKWTREGMATLAALTFSSKP

SEQ ID NO: 1282 - protein, 495 aa, Brassica napus
  misc_feature (339)..(339): Xaa can be any naturally occurring amino acid
  unsure (1)..(495): unsure at all Xaa locations
IRMRFLLKVLAFVTLLLVFLITTESAPQSALITKLPGFSGTFPSKHYSGYVTIDKEHGKNLWYYFVESEMNPSKDPVVLWLNGGPGCSSMDGFVYEHGPFNFEPAKTNYSLPLLHLNPYSWSKVSNMIYLDSPVGVGFSYSKNESDYITGDMKTAADSHAFLLKWFQMFPEFQSNPFYISGESYAGVYVPTLASEVVKGNKEGLKPALNLKGYLVGNGVADSMYDGNALVPFAHGMGLVSDQLFENVTKACNGNFYDNLSPDCEEQMAKVSMDIDRLNIYNILEPCYHGTSLSAFDIKSLPSTLLQLGKTEKPLAVRKRMFGRAWPVRAPILPGIVPSXWSQLLADVSVPCIDDRVATAWLNDPAIRKAIHAKEESEIGRWELCTGKLWFHHDAGSMISFHRNLTLSGYRALIYSGDHDMCVPFTGSEAWTHSLGYKVIDEWRAWISNDQVAGYTEGYANNLTFLTIKGAGHTVPEYKPREALDFYSRFLAGSKI

SEQ ID NO: 1283 - protein, 252 aa, Brassica napus
MGRGRVELKRIENKINRQVTFAKRRNGLLKKAYELSVLCDAEVSLIVFSNRGKLYEFCSTSNMLKTLDRYQKCSYGSVEVNNKPAKELENSYREYLKLKGRYENLQRQQRNLLGEDLGPLNSKELEQLERQLDGSLKQVRCIKTQYMLDQLTDLQGKEHILLEANRALSMKLEDMIGVRSHQIGGAWEGGDQHNVAYGHHQAQSQGLFQSLECDPTLQMGYNHPVCSEQMAVTAQGQSSQPGNNGYIPGWML

SEQ ID NO: 1284 - protein, 159 aa, Brassica napus
MHSLSFPSSSSSLLSSLLAFNSSRLLSLQPKKLTRLQSHYLSPKLSTKQSDASRHRAFSVSSSSPPEETVSMVDFHEKDWSFLESMETEQTQKLEKIIKAGEVTESSRVLVSFSSEAFVDRLVESSPSQLLLIVHDSLFMLACVKEKYDKVKCWQGEFI

SEQ ID NO: 1285 - protein, 280 aa, Brassica napus
  misc_feature (152)..(152): Xaa can be any naturally occurring amino acid
  unsure (1)..(280): unsure at all Xaa locations
MALENQSAARFTGKVNWFNDSKGFGFITPDDGTTEELFVHQSSIVSEGYRSLAIDDLVEFEIAQGTDGKTKAVEVTAPGGAPLKKKEASSRGRSGRGGGCYNCGEAGHLAKDCRDGGERGACYTCGDTGHLARDCVQKPSGERGGGRGGGGXCYECGDTGHLARDCVKKSAGERVSGGVCYTCGGSGHMARECPSKRQSGGSGCYECGGAGHLARDCDKRGGGGRSSGGCYECGGAGHMARDCEKRGSGGGGGRSSGGGGGGKCYKCGEGGHFARECSVA

SEQ ID NO: 1286 - protein, 189 aa, Brassica napus
MTNPDKQNPVEASDVEAATKTETTQGSGTSSFSAITQRWKREDLVKKACPITRGLCLLFSLLAFIIMVSNKHGYGRNFDDYEEYKYVLAIAIISTVYTAWQTFVYLSKREFFDRRTSMLVDFSGDQIVAYLLISAASSAIPLTNRFREGQDNIFTDSAASAISMAVFAFVSLALSALFSGYKLSTHSFI

SEQ ID NO: 1287 - protein, 323 aa, Brassica napus
MDVVKIDYNYKGDNALKELERITSKAAEVQDNILCGILEQNKDTQYLSKYMKGSKDVLEFKRSVPIITYKDVCPYIQRIANGEDSSLITGHPITEILCSSGTSGGEPKLMPTISEDLDRRTFVYNLINPIANKYLEGLDKGKTMYLNFVKAETSTPCGLPIRTVLTSYYKSKHFQCRPYDPFNDLTSPIQTILCEDSNQSMYCQLLAALIHRHKVMRLGAVFASAFLRAISYLERKWSQLCQDIRTGHLSPMITDPGCQTAMTSLLASPNPDLADEVEEICGRPSWKGILCQLWPQAKFIEAVVTGSMAQYIPALEFFRPRQD

SEQ ID NO: 1288 - protein, 165 aa, Brassica napus
MYSNFKEQAIEYVKQAVQEDNAGNYSKAFPLYMNALEYFKTHLKYEKNPKIREAITQKFTEYLRRAEEIRAVLDEGGPGPGSNGGEAAVKSKPKEGGGDGEDREQSKLRAGLDSAIVREKPNIKWTDVAGLESAKQALQEAVILPVKFPQFFTGKRRPWRAFLLY

SEQ ID NO: 1289 - protein, 260 aa, Brassica napus
MNFRVSMLLLLCVIAGSCLPSGLASSVDVCDHRDEFEVFRCGIERKCPPFLYPRPPTEVDGDLLDRLVDVHNHGNAYTSILFYSPPCPSPSLVRPKFEALSSMFPHIGHLVVEQSQALPSVFSRYGIHSLPSILMVNQTLKMRYIGPKDLASLIQFYQHTTGLKPVQYVDEAEPNLIKWLHNGSSIREIAERDPYLVLALMFLSLKLAILIFPIMGARLRTLWAAHVPHLSLGILGETSQLFGRALHMIDVRRLWIKQRL

SEQ ID NO: 1290 - protein, 240 aa, Brassica napus
SDGSMIHVSRLEHHIREELNKTAPRTMVVLNPLKVVITNLESDKVMELDAKRWPDAQNDDPSAFYKVPFSRVVYIDQSDFRMKDSKDYYGLAPGKSVLLRYGFPIKCTNVVFADDNETIREIHAEYDPEKKTKPKGVLHWVAESSPGKEPIKVEVRLFEKLFNSENPAELNDDWLTDINPNSKVVVSDAYAVSILKDAAVGDEFQFERLGYFAVDKDSEPGKLVFNRTVTLRDSYGKGGK

SEQ ID NO: 1291 - protein, 157 aa, Brassica napus
  misc_feature (139)..(139): Xaa can be any naturally occurring amino acid
  unsure (1)..(157): unsure at all Xaa locations
KSANLIGDEQESLIQGRKRRSNWLRGSESVRIGMSNGTEQTRKRAAPGDSNWLPPGWRVEDKVRTSGATAGSVDKYYYEPITGRKFRSRTEVLYYLEHGTSKKGSKKPDNTDSTSDHVEGQGSNKSSRKAKEPTPPPRXRSPPLKFDFENPPEKVSW

SEQ ID NO: 1292 - protein, 131 aa, Brassica napus
MALEKAKEIIASSPVDLALRKAKETVASHPVVVFSKTYCPFCTRVKQLLAKLGASYKAIELDVESDGAELQSALAEWTGQRTVPNVFVKGERIGGCDATMAMHDGGKLVPLLTEAGAIVTARATATTTPSL

SEQ ID NO: 1293 - protein, 203 aa, Brassica napus
MAPPQKLFLAAIVAAVIVAATTGYAPNSAAEDIVHSSCVHASYPSLCVRTLSTYSGPTITNRRELAQAAVKISLSHARAAAKKLAAVRETVGKKRVKAAVVDCVEMIGDSVDELSRTLGVLKHLHVSGGSANEFRWQMSNAQTWASAALTDDDTCLDGFKGVEGKIKSEVKEWMTKVARVTSNALYMINQLDDKRGKPHVVRP

SEQ ID NO: 1294 - protein, 303 aa, Brassica napus
EEMLRREMLGCCKVYISEARNKTALEAIERSAKTFPPAAIVNKFEDAAYGRVGYTLVSALDHEGLSSSSPLKSAVFAMVKTALDAINLESHCGSHPRLGVVDHICFHPLYETSIDQVSSVATSLARDIGSILRVPTYLYGAAHEEQCTLDSIRRKLGYFKANREGHEWAGGLELEVVPVKPDAGPQEVSKAKGVVAIGACGWVGNYNVPVMSTDLKAVKRIARKASERGGGGLASVQTMALVHGEGVIEVACNLLNPSQVGGDEVQGLIERLGGEEGLIVGKGYYTDYTADQIAQRYKELLIS

SEQ ID NO: 1295 - protein, 178 aa, Brassica napus
  misc_feature (158)..(158): Xaa can be any naturally occurring amino acid
  unsure (1)..(178): unsure at all Xaa locations
MALQIHTSCSFSARPCHLHHLVTSINPRFAIKCQNSQIETETTEDPSQPRKPSSSGVGFGSPAPSSSPAKKGKGKKEVIRRSPVEKPVFISEEGAAKAEELRRNENAFLLAWLGLGGVILVQGLLLAASGFLPEELDKLFVKYVYPVFTPSVGLFVAXGTTAYGVLKYLQNEKLKDQK

SEQ ID NO: 1296 - protein, 122 aa, Brassica napus
  misc_feature (81)..(81): Xaa can be any naturally occurring amino acid
  misc_feature (99)..(99): Xaa can be any naturally occurring amino acid
  unsure (1)..(122): unsure at all Xaa locations
MDDKRSLMMNKNIGDFENNVDEEMDLRRGPWTVEEDFKLINYISTHGEGRWNSLSRCAGLKRTGKSCRLRWLNYLRPDVRXGNITLEEQLLILELHSRXGNRWSKIAQYLPGRTDNEIKNYW

SEQ ID NO: 1297 - protein, 202 aa, Brassica napus
PTNLSERSAVSPTLDTETPHPDDVANPGNIVDNNHLELIPYHQEITVDEEEPSTDPKALVPLPALEAEALAIVPLNQKPKRTELAQRRTRRPFSVTEVEALVQAVEELGTGRWRDVKLRAFEDADHRTYVDLKDKWKTLVHTRTRGPQQRRGEPVPQELLDRVLRAYGYWSQHQGKHQGRGAAAHKDLDMNIGRALESGVSV

SEQ ID NO: 1298 - protein, 163 aa, Brassica napus
  misc_feature (75)..(75): Xaa can be any naturally occurring amino acid
  misc_feature (115)..(115): Xaa can be any naturally occurring amino acid
  misc_feature (123)..(123): Xaa can be any naturally occurring amino acid
  misc_feature (143)..(143): Xaa can be any naturally occurring amino acid
  misc_feature (152)..(152): Xaa can be any naturally occurring amino acid
  unsure (1)..(163): unsure at all Xaa locations
MGSNFHYSIDLNEDQNHHEQPFFYPLGSSSSLLHNQVLSNSSCSSSSISSLSSYLPFLINSQEDQHVAYKSTYHXDHVHLSQPLKAKMFNGGSSSSYDHMVPKKETRLKLTIRKXDHHEDQTXFLHQNPTKPNSDSDKWMMSXPKMRLIKNXITNNKQSTRSY

SEQ ID NO: 1299 - protein, 131 aa, Brassica napus
MSMSNEEDVSNNFGCNICLEMAREPIVTLCGHLFCWPCLYKWIHFHSQSKHCPVCKAPVKEDSLVPLYGSGKPSSDPRSKPSTIPNRPSAPAAPRLETARPRLRQIHHHESSFFGGFASVPGGARFGNFLL

SEQ ID NO: 1300 - protein, 652 aa, Brassica napus
MAAATSSSPISLTAKPSSKSPLPISRFSLPFSLTPQKPSSRLHRPLAISAVLNSPVNVAPEKTDKIKTFISRYAPDEPRKGADILVEALERQGVETVFAYPGGASMEIHQALTRSSTIRNVLPRHEQGGVFAAEGYARSSGKPGICIATSGPGATNLVSGLADAMLDSVPLVAITGQVPRRMIGTDAFQETPIVEVTRSITKHNYLVMDVDDIPRIVQEAFFLATSGRPGPVLVDVPKDIQQQLAIPNWDQPMRLPGYMSRLPQPPEVSQLGQIVRLISESKRPVLYVGGGSLNSSEELGRFVELTGIPVASTLMGLGSYPCNDELSLQMLGMHGTVYANYAVEHSDLLLAFGVRFDDRVTGKLEAFASRAKIVHIDIDSAEIGKNKTPHVSVCGDVKLALQGMNKVLENRAEELKLDFGVWRSELSEQKQKFPLSFKTFGEAIPPQYAIQVLDELTQGKAIISTGVGQHQMWAAQFYKYRKPRQWLSSSGLGAMGFGLPAAIGASVANPDAIVVDIDGDGSFIMNVQELATIRVENLPVKILLLNNQHLGMVMQWEDRFYKANRAHTYLGDPARENEIFPNMLQFAGACGIPAARVTKKEELREAIQTMLDTPGPYLLDVICPHQEHVLPMIPSGGTFKDVITEGDGRTKY

SEQ ID NO: 1301 - protein, 151 aa, Brassica napus
KQAGVNPLAGCLPTLATIPVWIGLYQALSNVANEGLFTEGFFWIPSLGGPTSIAARQSGSGVSWLFPFVDGHPPLGWGDTAAYLVLPVLLIVSQYVSMEIMKPPQTDDPAQKNTLLVFKFLPLMIGYFALSVPSGLSIYWFTNNVLSTAQQ

SEQ ID NO: 1302 - protein, 198 aa, Brassica napus
MDSGSQRPGPVSEGDPGPSIVTPSSPPAAPSRYESQKRRDWTTFLQYLKNHKPPLSLSRCSGAHAIEFLKYLDQFGKTKVHVAACPYFGHQQPPSPCACPLKQAWGSLDALIGRLRAAYEENGGRPESNPFAARAVRIYLREVRESQAKARGRPYEKKKRKRPTTVTTVRVDVASSRQSEGDGCNIGDPSYVAEAVPP

SEQ ID NO: 1303 - protein, 113 aa, Brassica napus
  misc_feature (10)..(10): Xaa can be any naturally occurring amino acid
  misc_feature (92)..(92): Xaa can be any naturally occurring amino acid
  unsure (1)..(113): unsure at all Xaa locations
AKGKHYRGVXQRPWGKFAAEIRDPAKFGARVWLGTFEKAEDAALAYDRAAFRMRGSRALLNFPWRVNSGEPDPVRIPSKRSYTSSSSSDKGXPKRRRNTEEVPSELQVKCEVA

SEQ ID NO: 1304 - protein, 280 aa, Brassica napus
  misc_feature (33)..(33): Xaa can be any naturally occurring amino acid
  misc_feature (160)..(160): Xaa can be any naturally occurring amino acid
  unsure (1)..(280): unsure at all Xaa locations
MESNSFFFDPSLSHGNMFFLNPAAVQEAKSMMXTEESSKRRPFFCSHEDLYDDDYYDDHTPEKKRRLTSQQVHLLEKSFETENKLEPERKTQLANKLGLQPRQVAVWFQNRRARWKTKQLERDFNLLKSSYDQLLSNYDSILKDNHLLRSEVFTFPFQTXTSLVEKLQAKEDTTNKPPGQVPEANPQQQLHPVNMNQIEPPIKTEDRLSSGSTVLDEDDAPQLLDSCNSYFPIIAPIHHSEGHNNRNGSVNDRSCFVDVFVPTTSPPHGHGESLGFWGWT

SEQ ID NO: 1305 - protein, 223 aa, Brassica napus
  misc_feature (71)..(71): Xaa can be any naturally occurring amino acid
  misc_feature (215)..(215): Xaa can be any naturally occurring amino acid
  unsure (1)..(223): unsure at all Xaa locations
MDRPAVSGPMDLPIMHDSDRYELVKDIGSGNFGVARLMRDKQSNELVAVKYIERGEKIDENVKREIINHRXLRHPNIVRFKEVILTPTHLAIVMEYAAGGELFERICNAGRFSEDEARFFFQQLISGVSYCHAMQVCHRDLKLENTLLDGSPAPRLKICDFGYSKSSVLHSQPKSTVGTPAYIAPEVLLKKEYDGKLADVWSCGVTLYVMLVGAXPFEDPDEP

SEQ ID NO: 1306 - protein, 354 aa, Brassica napus
MSLLSDLVNLNLSDSTEKIIAEYIWIGGSGMDIRSKARTLPGPVSDPSKLPKWNYDGSSTGQAAGDDSEVILYPQAIFRDPFRKGNNILVMCDAYTPAGNPIPTNKRHNAAKIFSNPKVASEEPWYGIEQEYTLMQKGVNWPIGWPIGGFPGPQGPYYCGVGADKAIGRDIVDAHYKACIYAGIGISGVNGEVMPGQWEFQVGPVEGISAGDQVWVARYLLERITEISGVNVSFDPKPVPGDWNGAGAHCNYSTKSMRNDGGLAVIKKAIEKLQVKHKEHIAAYGEGNERRLTGKHETADINTFSWGVANRGASVRVGRDTEKEGKGYFEDRRPASNMDPYVVTSMIAETTILG

SEQ ID NO: 1307 - protein, 159 aa, Brassica napus
  misc_feature (27)..(27): Xaa can be any naturally occurring amino acid
  unsure (1)..(159): unsure at all Xaa locations
MSRLSDLVNLNLSDTTKQIIAEYIWIXGGSGMDIRSKARTLPGPVTDPSKLPKWNYDGSSTGQAAGDDSEVILYPQAIFRDPFRKGNNILVMCDAYTPAGNPIPTNKRHNAAKIFSNPKVAFEEPWYGIEQEYTLMQKAKVTSRTEGQLLTWILTLLRP

SEQ ID NO: 1308 - protein, 157 aa, Brassica napus
  misc_feature (141)..(141): Xaa can be any naturally occurring amino acid
  unsure (1)..(157): unsure at all Xaa locations
MIIGETRRTYPTVEIPTWPVSEDFTTSELFSPAMSSPDCSMLEALAALQRYLPSNEPDPDLFGPDSPVDAYSCDHFRMYDFKVRRCARGRSHDWTECPYAHPGEKARRRDPTKYNYSGTACPDFRKGGCKKGDSCEFAHGXFECWLHPARYRTQPCK

SEQ ID NO: 1309 - protein, 220 aa, Brassica napus
NTAWKEGRSGNVPRVVVVVTKIDLLPSSLSPTRFEQWVRQRAREGGLSKITKLHFVSPVKNWGIKDMVEDVAAMAGKRGQVWAVGSQNAGKSTLINAVGKVFGGKVWHLTEAPVPGTTLGIVRVEGVLPFEAKLFDTPGLLNPHQITTRLTREEQKLVQISKELKPRTYRIKEGYTVHIGGLMRLDIDESSVDSMYVTVWASSSVPLHMGKKENAYKTLE

SEQ ID NO: 1310 - protein, 112 aa, Brassica napus
  misc_feature (36)..(37): Xaa can be any naturally occurring amino acid
  misc_feature (55)..(55): Xaa can be any naturally occurring amino acid
  misc_feature (71)..(71): Xaa can be any naturally occurring amino acid
  misc_feature (76)..(77): Xaa can be any naturally occurring amino acid
  misc_feature (85)..(85): Xaa can be any naturally occurring amino acid
  misc_feature (101)..(101): Xaa can be any naturally occurring amino acid
  unsure (1)..(112): unsure at all Xaa locations
MAPPPPSPPPVSLKVVVLFLRVLTAVFLVITVIILXXNSVTIDSQGTALKYYFKXVYAYRYMFSAAIIGLXVYAVXXLFFTISEXATRIKNPINYPLDFYXDKIISIFAGAT

SEQ ID NO: 1311 - protein, 260 aa, Brassica napus
  misc_feature (99)..(99): Xaa can be any naturally occurring amino acid
  unsure (1)..(260): unsure at all Xaa locations
MGSLPPTHLDFSSANHQDISKDNLVSLFKSQQDLLNHFFKHLDLSQTLSFSRLLLSASGTVFFTGVGKSAFVANKVSQTLVSLSFRSSFLSPLDALHGXDIGALSPRDILVLFSKSGATEELLRLVPCAKARGAFLVSLTSVPGNPLAGVCDMNVHLPLERELCPFNLAPVTSTAIQMVFGDTIAVALMAARNLTKEEYGANHPAGRIGKSLIFKVKDVMKKKDELPVCKEGDLIMDQLVELTSKGCGCLLVVDEGHRLI

SEQ ID NO: 1312 - protein, 232 aa, Brassica napus
  misc_feature (197)..(197): Xaa can be any naturally occurring amino acid
  misc_feature (202)..(202): Xaa can be any naturally occurring amino acid
  misc_feature (212)..(212): Xaa can be any naturally occurring amino acid
  unsure (1)..(232): unsure at all Xaa locations
MGYMCDFCNEQRSMVYCRSDAACLCLSCDRNVHSANALSKRHSRTLICERCNAQPASVRCSDERVSLCQNCDWSGHNNDATSQHKRQSINCYSGCPSSEELASIWSFCLDLNFSSAGQSACEQEMGLMTIDEGTGEDKPGVQNVNLDQPGTSSALAKDIGVSEDDFCGNLMMDEVDLAFEKYDELFGTAYNSSKESXEHGEXGSLFENMRAXKGMQQPAGKHAASEDSFMTC

SEQ ID NO: 1313 - protein, 141 aa, Brassica napus
MQEQATSSLAASSLPSSSERSSSSNPHLEIKEGIESDEEIRRVPEFGGEATGKEASGSANGQDRTQIAVGEGQRKRGRTPAEKETKRLKRLLRNRVSAQQARERKKAYLGELETRVKDLENRHSELDERLSTLQNENTCLD

SEQ ID NO: 1314 - protein, 162 aa, Brassica napus
  misc_feature (105)..(105): Xaa can be any naturally occurring amino acid
  unsure (1)..(162): unsure at all Xaa locations
MSFFIEDSGLFITQLLYKMALLITVLRWIFSWILRYRSRSTSSTPPISSQAIKESLSVTTFRDAAERYPESISDTCAVCLGDLEDGDEVRELRNCSHVFHRECIXDRWLDYECDDNDGEEDNHRTCPLCRTPLLAANTSSCCGGRLTMNEPSWADERLLYLF

SEQ ID NO: 1315 - protein, 125 aa, Brassica napus
  misc_feature (23)..(23): Xaa can be any naturally occurring amino acid
  unsure (1)..(125): unsure at all Xaa locations
MGKKKCDLCDGVARIYCESDQAXLCWNCDGKVHGANFLVAKHTRCLLCTSCQSLTPWKATGLRLGPTFSVCESCVALKSAAAGGVGAGNGSENEEDRLGLIDDDAESYDDDEDEDEDEEYSDEDE

SEQ ID NO: 1316 - protein, 399 aa, Brassica napus
QFTWPSSSDHHQSQGDMIGTVHVEGGKGLSLSLSSSLEAAAAAAKAEEYRSIYCAAVDGTSSSSNASVHHHQFNQLKTLLLDNSSSHQHQVMGHFGSSSSSPMAASSSIGGIYTLRNSKYTKPAQELLEEFCSVGRGHHFKKNKLSRDNSNPNTSGCGGGGGGGGSSSTAGAANDSPPLSPADRIEHQRRKVKLLSMLEEVDRRYNHYCEQMQMVVNSFDQVMGYGAAVPYTTLAQKAMSRHFRCLKDAVAVQLKRSCELLGDKESAGAASSGLTKGETPRLRLLEQSLRQQRAFHHMGMMEQEAWRPQRGLPERSVNILRAWLFEHFLNPYPSDADKHLLARQTGLSRNQVSNWFINARVRLWKPMVEEMYQQEAKEREEEELGENKKEDYQHQRRHR

SEQ ID NO: 1317 - protein, 99 aa, Brassica napus
MDQEIEIPTFFLCPISLDIMKDPVIVSTGITYDRDSIEKWLFTGKKNTCPVTKQVITETDLTPNHTLRRLIQSWCTLNASHGIERIPTPKPPISKSEIE

SEQ ID NO: 1318 - protein, 349 aa, Brassica napus
VNLNLSETTDKIIAEYIWVGGSGMDMRSKARTLPGPVSDPSELPKWNYDGSSTGQAPGEDSEVILYPQAIFKDPFRGGNNILVMCDAYTPAGEPIPTNKRHAAAKVFSHPDVVAEVPWYGIEQEYTLLQKDVKWPVGWPIGGFPGPQGPYYCSVGADKSFGRDIVDAHYKACLYAGITISGINGEVMPGQWEFQVGPAVGISAGDEIWVTRYILERITEVAGVVVSFDPKPIPGDWNGAGAHCNYSTKSMREDGGYEIIKKAIDKLGMRHKEHIAAYGEGNERRLTGHHETADINTSSWGVANRGASIRVGRDTEKEGKGYFEDRRPASNMDPYIVTSMIAETTILWKP

SEQ ID NO: 1319 - protein, 146 aa, Brassica napus
  misc_feature (142)..(142): Xaa can be any naturally occurring amino acid
  unsure (1)..(146): unsure at all Xaa locations
KILMKHSDSVLAATKAKNGFDAFHIAAKNGNLKVLDVLMEANPELSFTFDSSKTTALHTAASQGHGEIVCFLLDKGVDLAAIARSNGKTALHSAARNGHTEIVKELIGKKVGMVTRVDKKGQTALHMAVKGQNAEIVDALMXADLR

SEQ ID NO: 1320 - protein, 156 aa, Brassica napus
MTSSVHELSDNNESHKKQERPDSQTPPPVPSGPCSESIDTSSVYSEPMAHGLYPYPDPYYRSVFAHQAYLPHPFPGVQMQLMGMHQQVVPLQCDAVEEPVFVNAKQYHGILRRRQSRAKLEARNRAIKSKKPYMHESRHLHAINRPRGCGGRFLNA

SEQ ID NO: 1321 - protein, 163 aa, Brassica napus
  misc_feature (160)..(160): Xaa can be any naturally occurring amino acid
  unsure (1)..(163): unsure at all Xaa locations
MNPSSNFTQGLTHGKPKGWSTDLCECWRDINSCCLTCWCPCVAFGRIAEIVDRGGSSCGVSGAMYMIIFMLTGYAGSSLYSCFYRTKLRGQYNLKERPCCDCCVHFCCEPCALCQEYRQLEHKRAFDLSIGWHGNMERQARMAMSASSSAVPPALQPPMXRLN

SEQ ID NO: 1322 - protein, 179 aa, Brassica napus
MRLLVEQVATRASSPLSSASSTECNSHTCRWKPYSNSTEFQANVSVLLILVVSALICGLSLCAAIRCFLRPNLQTDDNEHKPDPEEDVSSTVPTPTLVYSSDLELAGAQAECAICLSEFEPGESIHVLEKCHHGFHVKCIHKWLSSRSSCPTCRTSIFSQNTLDSATSAVAPSTNEINA

SEQ ID NO: 1323 - protein, 356 aa, Brassica napus
MSLLTDLVNLNLSETTDKIIAEYIWVGGSGMDMRSKARTLPGPVSDPSELPKWNYDGSSTGQAPGEDSEVILYPQAIFKDPFRRGNNILVMCDAYTPAGEPIPTNKRHAAAKVFSHPDVVAEVPWYGIEQEYTLLQKDVNWPLGWPIGGFPGPQGPYYCSVGADKSFGRDIVDAHYKACLYAGINISGINGEVMPGQWEFQVGPAVGISAGDEIWVARFILERITEIAGVVVSFDPKPIPGDWNGAGAHCNYSTKSMREDGGYEIIKKAIDKLGLRHKEHIAAYGEGNERRLTGHHETADINTFLWGVANRGASIRVGRDTEKEGKGYFEDRRPASNMDPYIVTSMIAETTILWKP

SEQ ID NO: 1324 - protein, 101 aa, Brassica napus
  misc_feature (65)..(65): Xaa can be any naturally occurring amino acid
  misc_feature (77)..(77): Xaa can be any naturally occurring amino acid
  unsure (1)..(101): unsure at all Xaa locations
MARVYVGNLDARVTSGELEDEFRVFGVLRSVWVARKPPGFAFIDFDDRRDAEDAIRDLDGKNGWXVELSRSTNGRGXRDRHGGSESKCYECGETGHFAREC

SEQ ID NO: 1325 - protein, 432 aa, Brassica napus
  misc_feature (423)..(423): Xaa can be any naturally occurring amino acid
  unsure (1)..(432): unsure at all Xaa locations
MVGAKPVKMVENGSDGTSLLNGRYEIGRLLGHGTFAKVYHARNVTTGKSVALKVVAKEKVAKAGMEEQIKREISVMKMVKHPNIVELHEVMASKTKIYFAMELVRGGELFAKVAKGRLREDAARVYFQQLISAVDFCHSRGVYHRDLKPENLLLDEEGNLKVTDFGLSALTEHLKQDGLFHTTCGTPAYVAPEVILKKGYDGAKADLWSCGVILFVLLAGYLPFQDDNLVNMYRKIYRGDFKCPGWLSSDARRLVTKLLDPNPNTRISIDKVMDSAWFKKHSTRSKNEAEDLDISVHKSKEETETLNAFHIIALSEGFDLSPLFEEKKKEEKREMRFATSRPASSVISSLEEAARVGDKFDVRKSESRVRIEGKQNGRKGKLAVEAEIFAVAPSFVVVEVKKDHGDTLEYNNFCSTALRPALXDIFWTSTPV

SEQ ID NO: 1326 - protein, 254 aa, Brassica napus
MGRGRVELKRIENKINRQVTFAKRRNGLLKKAYELSVLCDAEVALIIFSNRGKLYEFCSSSNMIKTLERYQKCSYGSIEVNNKPAKELENSYREYLKLKGRYESLQRQQRNLLGEDLGPLNSKELEQLERQLDGSLKQVRSIKTQYMLDQLSDLQSKEQMLLETNRALAIKLDDMIGVRSHHMGGGGGGGWEGNEQNVSYEHHHQAQSQGLFQPLECNPTLQIGYDNPVGSEQITATTQAQAQPGNGYIPGWML

SEQ ID NO: 1327 - protein, 234 aa, Brassica napus
  misc_feature (226)..(226): Xaa can be any naturally occurring amino acid
  unsure (1)..(234): unsure at all Xaa locations
MDSVTSFKGYGKVDEAQDLALKKKTRKRLILLTVSGVILVAVIIAAVVGTVVHNKNKNSSEPTPSSPPELTPSTSLKTICSVTRFPESCFNSISKLPSSNTTDPEVLFKLSLKVIIDELDSISDLPEKLSTETEDERIKSALRVCGNLIEDALDRLNDTVSSMDASEDGSKKTLNSSRINDLKTWLSATVTDHETCFDAIDELATNKTEYGNSTITKQLKSAMSSXTEFASNSL

SEQ ID NO: 1328 - protein, 317 aa, Brassica napus
MCGGAIISDFIPPPRSRRVTSEFLWPDLKKSSKKRSSFFDLDDEFEADFQGFKDDSSIDCDDAKPFVFAGARKPAVSAATADSVIGKKVADGEGERSAKRKRKSQYRGIRQRPWGKWAAEIRDPREGSRVWLGTFKTAEEAARAYDAAARRIRGSKAKVNFPEEKENPPAKKVAPNPSPVLAQNLDNSFDNMCFMEEKHQVNHHSNQVGGNGYHQYFSSDQGSNSFGCSEFGWNDQAPITPEISSAFINNNSVTFAEEADPAKQLKVMDFETTYNSTEWDSSLDFFSGDAVATQDNGANPMELWSIDEINSMIGGVF

SEQ ID NO: 1329 - protein, 238 aa, Brassica napus
  misc_feature (229)..(229): Xaa can be any naturally occurring amino acid
  unsure (1)..(238): unsure at all Xaa locations
MASATSVIAWGSGEDGQLGLGTYEEKEWACVVEALDPFAVRSVVGGSRNSLAICDDGKLFTWGWNQRGTLGHPPEKKTESVPSLVKSLANVKITQAAIGGWHCLAVDDQGRAYAWGGNEYGQCGEEPSKDESGRPVRRDIVIPKRCAPKLTVRQVAAGGTHSVVLTREGSVWTWGQPWPPGDIKQISVPVRVQGLENVRLIAVGAFHNLALKEDGTLWAWGNNEYGQLXGTGDTQPRS

SEQ ID NO: 1330 - protein, 637 aa, Brassica napus
MASFSFFGTIPSSPTKASVFSLPVSVTTLPSFPRRRATRVSVSANSKKDQDRTASRRENPSTFSSKYAPNVPRSGADILVEALERQGVDVVFAYPGGASMEIHQALTRSNTIRNVLPRHEQGGIFAAEGYARSSGKPGICIATSGPGAMNLVSGLADALFDSVPLIAITGQVPRRMIGTMAFQETPVVEVTRTITKHNYLVMEVDDIPRIVREAFFLATSVRPGPVLIDVPKDVQQQFAIPNWEQPMRLPLYMSTMPKPPKVSHLEQILRLVSESKRPVLYVGGGCLNSSEELRRFVELTGIPVASTFMGLGSYPCDDEEFSLQMLGMHGTVYANYAVEYSDLLLAFGVRFDDRVTGKLEAFASRAKIVHIDIDSTEIGKNKTPHVSVCCDVQLALQGMNEVLENRRDVLDFGEWRCELNEQRLKFPLRYKTFGEEIPPQYAIQLLDELTDGKAIITTGVGQHQMWAAQFYRFKKPRQWLSSGGLGAMGFGLPAAMGAAIANPGAVVVDIDGDGSFIMNIQELATIRVENLPVKVLLINNQHLGMVLQWEDHFYAANRADSFLGDPANPEAVFPDMLLFAASCGIPAARVTRREDLREAIQTMLDTPGPFLLDVVCPHQDHVLPLIPSGGTFKDIIV

SEQ ID NO: 1331 - protein, 150 aa, Brassica napus
  misc_feature (42)..(42): Xaa can be any naturally occurring amino acid
  unsure (1)..(150): unsure at all Xaa locations
MAIRLMDLDSPFFNTLHRIMDLTEDAEKNLNAPTRTYVRDAXAMAATPADVKEYPNSYVFVIDMPGLKSGDIKVQVEDDNVLLISGERKREEEKEKEGGKYLRMERRLGKLMRKFTLPENANTDAISAVCLDGVLTVTVNKLPPPQPKKP

SEQ ID NO: 1332 - protein, 607 aa, Brassica napus
MDTVIGSIDACNPATGDICRPPNGAVSTVQNSTPAHSTTISPCDATLGRYLARRLVEIGVTDVFSVPGDFNLTLLDHLIAEPSLKLIGCCNELNAGYAADGYARSRGVGACVVTFTVGGLSVLNAIAGAYSENLPLICIVGGPNSNDYGTSRILHHTIGLPDFTQELRCFQAVTCYQAVINNLEDAHELIDTAISTALKESKPVYISISCNLPAIPMPTFSRHPVPFSLAPKVSNLMGLDAAVEAAAEFLNKAVKPVLVGGPKMRVAKAADAFVELADASGYGVAVMPSAKGQVPEHHKHFIGTYWGAVSTAFCAEIVESADAYLFAGPIFNDYSSVGYSLLLKKEKAIIVQPDRVTIGNGPAFGCVLMKDFLSGLAKRINHNNTAYENYHRIFVPEGKPLRENPKEPLRVNVLFQHIQNLLSSETAVLAETGDSWFNCQKLKLPEGCGYEFQMQYGSIGWSVGATLGYAQAIPNKRVIACIGDGSFQVTAQDVSTMIRCGQKTIIFLINNGGYTIEVEIHDGPYNVIKNWNYTAFVEAIHNGEGKCWTAKVRCEDELVKAISTATNEEKESFCFIEVIVHKDDTSKELLEWGSRVSAANSRPPNPQ

SEQ ID NO: 1333 - protein, 253 aa, Brassica napus
KSLGVKMVLSGEGSDEIFGGYLYFHKAPNKQEFHQETCRKIKALHKYDCLRANKATSAFGLEARVPFLDKEFINTAMSLDPESKMISPEEGRIEKWVLRRAFDDEERPYLPKHILYRQKEQFSDGVGYSWIDGLKAHAAENVNDKMMSNAAFIFPHNTPLTKEAYYYRMIFERFFPQNSARLTVPGGATVACSTAKAVEWDASWSNNMDPSGRAAIGVHLSAYDGSKVALPLPPHKAIDDIPMMMGQEVVIQT

SEQ ID NO: 1334 - protein, 280 aa, Brassica napus
  misc_feature (143)..(143): Xaa can be any naturally occurring amino acid
  unsure (1)..(280): unsure at all Xaa locations
LKRFAAEEQCMSPEVIKKAFQATEEGFLSIVTNQFQTRPQIATVGSCCLVTVICDGTLYVANAGDSRAVLPRVRFKSTPALGDVHATQLSAEHNASIESVRRELHALHPDHPDIVLLKHNVWRVKGIIQVSRSIGDVYLKRSXFNREPLYAKFRLRAPFSRPLLSAEPAVTVHRLQEQDKFIICASDGLWEHMSNQEAVEMVQNHPRNGIAKRLVKVALQEAAKKREMRYSDLKKIERGVRRHFHDDITVIVVFLDAKPGEVRGPAVSVRGAGVSIPKKT

SEQ ID NO: 1335 - protein, 189 aa, Brassica napus
MAFAGTTQKCMACDKTVYLVDKLTADNRVYHKACFRCHHCKGTLKLSNYNSFEGVLYCRPHFDQNFKRTGSLEKSFEGTPKIGKPDRPLEGERPAGTKVSNMFGGTREKCVGCDKTVYPIEKVSVNGTLYHKSCFKCTHGGCTISPSNYIAHEGKLYCKHHHIQLIKEKGNLSQLEGGDNAAKDKVDAA

SEQ ID NO: 1336 - protein, 141 aa, Brassica napus
  misc_feature (11)..(11): Xaa can be any naturally occurring amino acid
  misc_feature (15)..(15): Xaa can be any naturally occurring amino acid
  misc_feature (26)..(27): Xaa can be any naturally occurring amino acid
  misc_feature (29)..(32): Xaa can be any naturally occurring amino acid
  misc_feature (35)..(35): Xaa can be any naturally occurring amino acid
  misc_feature (38)..(40): Xaa can be any naturally occurring amino acid
  misc_feature (42)..(42): Xaa can be any naturally occurring amino acid
  misc_feature (44)..(44): Xaa can be any naturally occurring amino acid
  misc_feature (46)..(46): Xaa can be any naturally occurring amino acid
  misc_feature (50)..(50): Xaa can be any naturally occurring amino acid
  misc_feature (52)..(52): Xaa can be any naturally occurring amino acid
  misc_feature (56)..(56): Xaa can be any naturally occurring amino acid
  misc_feature (58)..(58): Xaa can be any naturally occurring amino acid
  misc_feature (74)..(74): Xaa can be any naturally occurring amino acid
  misc_feature (83)..(83): Xaa can be any naturally occurring amino acid
  misc_feature (85)..(85): Xaa can be any naturally occurring amino acid
  misc_feature (90)..(91): Xaa can be any naturally occurring amino acid
  misc_feature (95)..(95): Xaa can be any naturally occurring amino acid
  misc_feature (102)..(102): Xaa can be any naturally occurring amino acid
  misc_feature (105)..(105): Xaa can be any naturally occurring amino acid
  misc_feature (121)..(121): Xaa can be any naturally occurring amino acid
  misc_feature (124)..(124): Xaa can be any naturally occurring amino acid
  misc_feature (126)..(126): Xaa can be any naturally occurring amino acid
  misc_feature (128)..(128): Xaa can be any naturally occurring amino acid
  misc_feature (136)..(136): Xaa can be any naturally occurring amino acid
  unsure (1)..(141): unsure at all Xaa locations
STCLDEEHHFXSSDXGASKTYPQQCXXIXXXXHIXIKXXXCXVXEXSTSXKXGKHXHXKCHFVAIDIFTAKKLXDIGPSSHDXDXPHVNXXDYQXIDISEDXFVXLLTDSGGTKDDLKLPXDDXLXAXLMKSGFEXVKDVV

SEQ ID NO: 1337 - protein, 153 aa, Brassica napus
MDASHSRRRAYISLLVISYSYVFGLASNLNISNDARGSKIEITNSRSSSTDYGTDMGKQYIMCTESNLQDPWVLSCKTSKDVVTRINFADYGNPSGKCEHYRHGNCGAKATMDVVKKNCLGKHNCVIIDNDEMFGASHCNKDIKFIVQYTCTK

SEQ ID NO: 1338 - protein, 199 aa, Brassica napus
  misc_feature (124)..(124): Xaa can be any naturally occurring amino acid
  misc_feature (137)..(137): Xaa can be any naturally occurring amino acid
  misc_feature (153)..(153): Xaa can be any naturally occurring amino acid
  misc_feature (166)..(167): Xaa can be any naturally occurring amino acid
  misc_feature (174)..(174): Xaa can be any naturally occurring amino acid
  misc_feature (182)..(182): Xaa can be any naturally occurring amino acid
  misc_feature (185)..(185): Xaa can be any naturally occurring amino acid
  unsure (1)..(199): unsure at all Xaa locations
MDPIHGFMSTSNISHNTNLMIAAAAATTTTTSSSSSSSGGSATNQLSRYENQKRRDWNTFGQYLRNHRPPLSLSRCSGAHVLEFLRYLDQFGKTKVHMQICSFFGHPNPPAPCTCPLRQAWGSXDALIGRLRAAFEXNGGSPETNPFGARAVXLYLREVRDSQAKXXGISYEKXKRKRPPQXPLXPPHQPVISNSPNLQ

SEQ ID NO: 1339 - protein, 361 aa, Brassica napus
MCGGAIISDFIPPPSFRRVTSEFLWPDLKKSKGKASKKRSDFFDLDDEFEADFQGFEDDDASFDCEDDDDEVFAKVKPFVFTATTKPVASPPTGSVSGKKIIESGGQAEKSAKRKRKNQYRGIRQRPWGKWAAEIRDPRKGSREWLGTFDTAEEAARAYDAAARRIRGSKAKVNFPEESNNNRSVSQKRPSAKKLVAKPNQSPALVQQPMSQYCNNSFGDVSFVEEKPQMYNNQFGLANSYNNHYFSSDQGSNSFDCSEFGWSDHGPKTPEISSMLVGNNQAPFTEETNAAKKLKPSSDDGTSNQSDDLMAYLDNALWESPSPLEVEAMLGVDAVAVTQGEENPMDLWSLDDINYMLEGVF

SEQ ID NO: 1340 - protein, 137 aa, Brassica napus
MEVEGKPQADGEWSTGFCDCFLDCSNCCMTFWCPCVTFGQIAEIVDQGSSSCGTTGALYMLLAWFTGCGCIYSCFYRTKMRKQYNLKGSECGDCLKHFFCELCALTQAYRELTNRGFDVALEPRSPVVLPPGGEVGC

SEQ ID NO: 1341 - protein, 122 aa, Brassica napus
MRRGRVSTPVTANHNPSIKETRFRGVRKRPWGRYAAEIRDPYKKSRVWLGTFDSAVDAARAYDAAARNLRGPKAKTNFPIESPPSPPQIDPFMDHRLYAGASSRPTSSSMSSTVESSSGQRS

SEQ ID NO: 1342 - protein, 397 aa, Brassica napus
MAFLLHARPSPSLPAADLRRSSPLILRRPSSVRFPLKCKAVDSYGGNSDDLYLLTGDTAPASALLSRTRLEDAIKNNTTRLRIFSGTANPSLAQEISCYLGLELGKIKIKRFADGEIYVQLQESVRGCDVFLVQPTCPPANENLMELLVMIDACRRASAKTITAVIPYFGYARADRKTQGRESIAAKLVANLITESGADRVLACDLHSGQSMGYFDIPVDHVYGQPVILDYLASKGISSDDLVVVSPDVGGVARARAFAKKLSDAPLAIVDKRRHGHNVAEVMNLIGDVKGKVAIMVDDMIDTAGTISKGAALLHQEGAREVYACTTHAVFSPPAISRLSSGLFQEVIITNTIPLSEQNYFPQLTVLSVANLLAETIWRVHDDCSGDIEPFSTLGID

SEQ ID NO: 1343 - protein, 162 aa, Brassica napus
  misc_feature (119)..(119): Xaa can be any naturally occurring amino acid
  unsure (1)..(162): unsure at all Xaa locations
MEPKLTHLCYCLLLFLPLLSQSTIANPSSSPNPNQSINFIVSSCRTTRYPKLCIKCLAAFASRIHHNENRLARTALAVTLVRVRSTTVYVAKLTRARRIKRREYLAVKDCVENLGDGLXMLVQSMREMKQVGRSGRSRDEFLWRLSNVETWVSAALTDETTC

SEQ ID NO: 1344 - protein, 186 aa, Brassica napus
  misc_feature (98)..(98): Xaa can be any naturally occurring amino acid
  misc_feature (158)..(158): Xaa can be any naturally occurring amino acid
  unsure (1)..(186): unsure at all Xaa locations
MTKMVLKPDPNLTQSNAKEIPYRGVRKRPWGRYAAEIRDPRKKTRVWLGTFDTAQQAARAYDAAAREFRGAKAKTNFPTSLELNVNDGGYSRSPSQSXPVDSASPTVARLVTPPQLELSLGNGSGAGYQIPVARHVYLFNMTAFPLAATCGVQSESDXSSVVDFEGGGEKKSQPLDLDLNLAPPAE

SEQ ID NO: 1345 - protein, 320 aa, Brassica napus
  misc_feature (185)..(185): Xaa can be any naturally occurring amino acid
  unsure (1)..(320): unsure at all Xaa locations
MAESNGSVSVDVGTIYLGGKEHRVKTACGVVSVIVYGDREKPALITYPDLALNHMSCFQGLFFCPEAASLLLHNFCIYHISPPGHELGAGPIFPNDSVPSADDLADQILEVLNFFGLGAVMCMGVTAGAYILTLFAMKHRERVAGLILVSPLCKAPSWSEWFYNRVVSNLLYFYGMCGVVKEFLXLQRYFSKEVRGNVEIPESDIAQACRRLLDERQSVNVMRFLDAIDRRPDISSGLKKLKCRTLIFIGDQSPFYSEAVHIAANLDRGYCALVEVQACGSMVTEEQPHAMLVPMEYFLMGYGLYRPSCFTESPRSPLSP

SEQ ID NO: 1346 - protein, 169 aa, Brassica napus
  misc_feature (13)..(13): Xaa can be any naturally occurring amino acid
  misc_feature (16)..(16): Xaa can be any naturally occurring amino acid
  misc_feature (29)..(29): Xaa can be any naturally occurring amino acid
  misc_feature (75)..(75): Xaa can be any naturally occurring amino acid
  misc_feature (104)..(104): Xaa can be any naturally occurring amino acid
  unsure (1)..(169): unsure at all Xaa locations
MLSVCRERCTSHXAAXPLTSHLSASSNVXKSMFHHDLKEKESSTIHIDDMSRESCMALLSYLYGNITQEDFWKHXVALLGAANKYDITDLKAACEESLMEDINXGNVLERLQEAWLYQLEKLKKGCLMYLFDFGKIYDVREEISGFFRQADRELMLEMFQEVLSVWKPV

SEQ ID NO: 1347 - protein, 105 aa, Brassica napus
MDKVMRMSSEKGVVIFTKSSCCLCYTVQILFRDLRVQPTIHEIDNDPDCREIEKALLRIGCSTAVPAVFVGGKLVGSTNEVMSLHLSGSLVPLIKPYQSLLYQAN

SEQ ID NO: 1348 - protein, 137 aa, Brassica napus
  misc_feature (132)..(132): Xaa can be any naturally occurring amino acid
  unsure (1)..(137): unsure at all Xaa locations
MSDSEEHHFESKADAGASKTYPQQAGTVRKNGFIVIKNRPCKVVEVSTSKTGKHGHAKCHFVAIDIFNGKKLEDIVPSSHNCDIPHVNRTEYQLIDISEDGFVSLLTSDGNTKDDLRLPTDETLVAQIKEGXESGKD

SEQ ID NO: 1349 - protein, 136 aa, Brassica napus
  misc_feature (132)..(132): Xaa can be any naturally occurring amino acid
  unsure (1)..(136): unsure at all Xaa locations
RRRDRINERMKALHELIPHCTKTDKASILEEAIDYLKSLQLQLQVMWMGSGMAGAAATPIMFPGVQPPPPFIRQVQSPVLLPRFPVMDGSAIQNNPGLVCQNPVQSQVFPDRFGRYVGLFPRMQGTSQPMEXMTFG

SEQ ID NO: 1350 - protein, 537 aa, Brassica napus
  misc_feature (285)..(285): Xaa can be any naturally occurring amino acid
  unsure (1)..(537): unsure at all Xaa locations
MRRFVIGQAKNLIDQTRRRPRPHHNNIRLLSLLASDPIPVSSSRFFSDMTGSDSSSSLPVTLDSINPNVLKCEYAVRGEIVNIAQKLQDDLKINKDAYPFDEIIYCNIGNPQSLSQQPITFFREVLALCSHTALLDRDETHALFSADSIARAWKILDQIPGKATGAYSHSQGIKGLRDAIAAGIEARDGFPADPNDIFMTDGASPGVHMMMQLLISSEKDGILCPIPQYPLYSASIALHGGSLVPYYLDEASGWGLEISELKKQLEDAKSKGITVRALAVIQPGXPTGQVLAEENQREIVDFCKKEGLVLLADEVYQENVYVPDKKFHSFKKVARSMGYGEKDICLVSFQSISKGYYGECGKRGGYMEVTGFTSDVREQIYKVASVNLCSNISGQILASLVMSPPKPGDESYESYIAEKEGILSSMARRAKTLEEALNKLEGITCNRAEGAMYLFPCINLPQKAIAAAEAAKTAPDTFYCKRLLNATGIVLVPGSGFRQVPGTWHFRCTILPQEDKIPAIVNRLTEFHKSFMDEFRD

SEQ ID NO: 1351 - protein, 165 aa, Brassica napus
MAQDDQSAARSTGTVNWFSDAKGYGFIAPDDGGDELFVHQSSIVSDGFRTLTVDEPVEYAIAVGNDGKTKAVDVTAPGGGSLNKKEMSSRGNGGSCFSCGEVGHMAKDCAGGKRYGGGGRRSGGEGSCYVCGNVGHFARDCRQNAGGNSGGGGGGECYNCGVVGH

SEQ ID NO: 1352 - protein, 286 aa, Brassica napus
MCGILAVLGCVDNSQATRSRIIKLSRRLRHRGPDWSGLHCYEDCYLAHERLAIIDPISGDQPLYSEDKTVVVTVNGEIYNHKALRESESLKSHKYHTGSDCEVLAHLYEEHGEEFINMLDGMFAFVLLDTKDKSYIAVRDAIGVIPLYIGWGLDGSVWFASEMKALSDDCEQFMAFPPGHIYSSKQGGLRRWYNPPWFSELVPSTPYDPLVLRDTFEKAVIKRLMTDVPFGVLLSGGLDSSLVASVAIRHLEKSDARQWGSKLHTFCIGLKGSPDLKAGKEVADYL

SEQ ID NO: 1353 - protein, 158 aa, Brassica napus
MPKDRKIGIAMDFSESSKNALRWAIDNLADKGDTFYIIHALPTSEAGPRNSLWLKSGSPLIPLVEFREPETMEKYGVKIDIPVLDMLDTGSRQKEIHVVTKIYWGDAREKLVDAVKSLKLDSIVIGSRGLSALQRIIMGSVSSFVIQHAPCPVTVVKD

SEQ ID NO: 1354 - protein, 317 aa, Brassica napus
MGYMCDFCGEQRSMVYCRSDAACLCLSCDRSVHSANALSKRHSRTLVCERCNAQPATVRCVEERVSLCQNCDWSGHNNNNNNSSSSSSNNHKRQTISCYSGCPSSSELASIWSFWLELAGQSGWEQEMGMMNIDEEGQGNQNCNEDKKDVVAGSSSRPETSSAAPATSSFPKDVRVCEDDFYGNLGMDEVDLALENYEELFGTAFNTSGELFGQGGIDSLFQKHHQAAAPDGGNLVHPAESNDDSFMSSKTEPIICFTSKPAQACSDCSLRRFLRWRSVFLLPRLPFLRRLPGDHRWWFRRRICCRWRCSSWRRWWR

SEQ ID NO: 1355 - protein, 135 aa, Brassica napus
  misc_feature (132)..(132): Xaa can be any naturally occurring amino acid
  unsure (1)..(135): unsure at all Xaa locations
MASTTFRRFGVAAAAAAFIALAAFGSASASKTAFVKSTVKAHDVVIFSKSYCPYCKRAKAVFKELELKKDPYVVELDQREDGGEIQDALSDMVGRRTVPQVFIRGKHLGGSDDTVDAYESGELAKLLNISVXDDL

SEQ ID NO: 1356 - protein, 199 aa, Brassica napus
MAESFRATHHFLTSLLITAAITITTLKSVHTTATNTEFVKSSCTVTTYPRLCVASLSTHASLIQTSPKLMAHAALNITLASAKATSVMMVRLSSSSQLKPREVSAMRDCVEELGDTLDELRKSIGEMGQLIGSSYEVYMSDIQTWVSAALTDENTCTDGFEGDDMNGKVKVFVRERILVIAHLTSNALALINHFASIHG

SEQ ID NO: 1357 - protein, 198 aa, Brassica napus
MAVSFRFNHHFLASLLITITITTLKSVHTTTTTNTEFVKSSCTFTTYPRLCVTSLSTQSSLIQTSHKLMAHAALNITLASAKATSAMMVRLSSSSRLKPREVSAMRDCVEELGDTLEELRKSIGEMGQLSGSNYEVYMSDIQTWVSAALTDENTCSDGFEGDDMNGKVKVLVRGRILVIAHLTSNALALINHFASIHG

SEQ ID NO: 1358 - protein, 206 aa, Brassica napus
  misc_feature (195)..(195): Xaa can be any naturally occurring amino acid
  unsure (1)..(206): unsure at all Xaa locations
MNSYLIMFTLLSLLLLALSLNPSLASSRNYTDDTNASIVPRYSRYVKDACNVTRYKQLCLRTLWPFTIVAKNNSSKWARAGVAVTITDTKRILRLLLKTRNSSAVGKRERIALSDCRELYVDSLGNLYQSLSVLRKLDADQFQQQMSDLATWLSAALTDEDTCLDGFEETMSKSSTVRMIKRKATRCMHLCSNAXALTNKLAYDGL

SEQ ID NO: 1359 - protein, 151 aa, Brassica napus
MGRVMEVKGKPQADGEWSTGFCGCCSDCSSCCLTCWCPCITVGRIAEIVDQGSSSCCATGALYMLSMYTVFGSACISCKYRTKMRKQYNLKGSECGDYLKHFFCELCALTQTYRELTKRGFDVPLGWDGNVARHNAGVAMGAPVVEGGMRR

SEQ ID NO: 1360 - protein, 167 aa, Brassica napus
MAGLNDAVSVDIEGFCMGRMEHHVKTCHGLVSVVVYGDQEKPALITYPDVALNYLSCFQGLFLCPEAVSLLLHNFCIYHISPPGHEFGAAPVCSTDPSPSVEDLADQILEVLNFFRLESVMCMGITAGAYILSLFAIKHKDRVLGLILISPLCKAPSWSEWFYYKVV

SEQ ID NO: 1361 - protein, 150 aa, Brassica napus
MSLQRPNGNSSSSSSPKKRTTEESDEELLMVPDMEAAGSTGVLSSSADDGVNNPEIEVEQTQNATSTAKRRRGRNPEDKEYRSLKRLLRNRVSAQQARERKKVYVSDLESRANELQNNNEQLEEKISTLMNENTMLRKMLINTRPKADDN

SEQ ID NO: 1362 - protein, 159 aa, Brassica napus
MVSQSHTATFLLFTTFLFISRSISAAHSPPRLNATTNDLDFIRTSCNATLYQDLCFNSLAGYASIVQDSPARLAKIATGVSLSKAKSTLAFLSKLSRSAAEVQDCVSYLDEAVGSIRDSLRTLRNMSRVAAAPSSGETFSSQVNDVQTWMSAALTYEDT

SEQ ID NO: 1363 - protein, 102 aa, Brassica napus
  misc_feature (19)..(19): Xaa can be any naturally occurring amino acid
  misc_feature (25)..(25): Xaa can be any naturally occurring amino acid
  misc_feature (45)..(45): Xaa can be any naturally occurring amino acid
  misc_feature (55)..(56): Xaa can be any naturally occurring amino acid
  misc_feature (89)..(90): Xaa can be any naturally occurring amino acid
  misc_feature (97)..(97): Xaa can be any naturally occurring amino acid
  unsure (1)..(102): unsure at all Xaa locations
MDKVMRMSSERGVVIITKXSCCLCXAVQILFRDLRVQPTVHEIDXAPHCREIEKXXLRIGCSTAVPAVFVGGKLVGSTNEVMSLHLSGXXAPLLNPXQSLLY

SEQ ID NO: 1364 - protein, 247 aa, Brassica napus
  misc_feature (223)..(223): Xaa can be any naturally occurring amino acid
  misc_feature (237)..(237): Xaa can be any naturally occurring amino acid
  unsure (1)..(247): unsure at all Xaa locations
MDRQDSDDIMKFLDGMASSDDVLFGFLDGGNHSPEVYPDTGSFAAGEDSYAENDAAGCNSDENKTFWLEQEQLLQATLYRTSSIETKIRQAAKQALKEVRSEGTQCVCRRPVAGGCRSCLRAEVARRLREAGYDCVSCKSKWRSNHEIPAGEHEYLEIVDQSGSKKVEIRVVIELSFRAEFEMARGSEEYKRLVGILPEVYVGKTERLTTLIKILCMAAKKCXMKDKKMHMGPWRKXKYMPAQWLGT

SEQ ID NO: 1365 - protein, 126 aa, Brassica napus
MDPYFVQSPFSAFSPEYSPESFSSSSSNNYSLPFNENDSEEMLLYGLIEQSTQQNVPVKTEEETGTSRKPEKSYRGVRRRPWGKFAAEIRDSTRNGIRVWLGTFESAEEAALAYDQAAFSMRGSSA

SEQ ID NO: 1366 - protein, 110 aa, Brassica napus
  misc_feature (6)..(6): Xaa can be any naturally occurring amino acid
  misc_feature (21)..(21): Xaa can be any naturally occurring amino acid
  misc_feature (44)..(44): Xaa can be any naturally occurring amino acid
  misc_feature (46)..(46): Xaa can be any naturally occurring amino acid
  misc_feature (49)..(49): Xaa can be any naturally occurring amino acid
  misc_feature (61)..(63): Xaa can be any naturally occurring amino acid
  misc_feature (65)..(65): Xaa can be any naturally occurring amino acid
  misc_feature (89)..(89): Xaa can be any naturally occurring amino acid
  misc_feature (91)..(91): Xaa can be any naturally occurring amino acid
  misc_feature (99)..(99): Xaa can be any naturally occurring amino acid
  unsure (1)..(110): unsure at all Xaa locations
MSGVWXFKNGVIRLVENPNQXGSDTNSRRKVMVYLPTGEVISSXSXLEXILRSLGWERYFXXXDXDLLQFHKRSSSDLISLPKDFTKFXSXYMYDIVVXNPNYFHVRDSN

SEQ ID NO: 1367 - protein, 275 aa, Brassica napus
MGVICQEIKLLLKLKKKKKKKKKYPGKPLANVAFKTYGYISMSQALYFVGDFKLGHYMKIPPRSMFLVQLVATMVSSTVCFGTTWWLLSSIENICNKDKLPVSSPWTCPGDEVFYNASIIWGIIGPGRMFTSKGVYPGMNWFFLIGLLAPVPVWFFARKFPEKKWIKKIHIPLIFSATTAMPVAKAVHYWSWGFVGVVFNYYIFRRYKAWWARHNYILSAALDAGTAIMGVLIYFALQNNNIYFPDWWGSENTDHCPLAQCPTEKGIVIKGCPVF

SEQ ID NO: 1368 - protein, 151 aa, Brassica napus
MSYGQDTGVERRKGSVKWFDTQKGFGFITPDDGGDDLFVHQSSIRSEGFRSLAAEEPVEFQVENDNNGRPKAIEVSGPDGAPVQGSSGGGSSGGRGGFGGGGRGGGRGFGGGRGGGRGGSDCYKCGEPGHIARDCSEGGGGYGGGGGRGGY

SEQ ID NO: 1369 - protein, 233 aa, Brassica napus
  misc_feature (62)..(62): Xaa can be any naturally occurring amino acid
  misc_feature (101)..(101): Xaa can be any naturally occurring amino acid
  unsure (1)..(233): unsure at all Xaa locations
MKKTGRSGKERITSQKEEEGTVRKGPWTMEEDLILFNYILNHGEGLWNSVAKASGLKRTGKXSCRLRWLNYLRPDVRRGNITAEEQLLIIQLQAKLGNKWXSKIAKHLPGRTDNEIKNFWRTKIQRHMELSSSKTMNSRHCLGSSQSSVMTTTDQGSSSKALHMAESLKSTETMTTSYNVMDQSNDSYWSVEDLWPVQLFNDDHHQHQLLLLYYKYIMNLMNDYDKKKKKKKK

SEQ ID NO: 1370 - protein, 138 aa, Brassica napus
  misc_feature (74)..(74): Xaa can be any naturally occurring amino acid
  unsure (1)..(138): unsure at all Xaa locations
MENTQGSSPPHMDASRPSLRFPLGTALLLIIIFSLSGIFSCSYHWDKHRSLRRSLANASGHPSADIESSPFKPXPPFPDLKKPQDLSITVLMPGDNTPKFIALPCPCAPPRPENLTVDVQSPPHSPPVKPPRFPIPLC

SEQ ID NO: 1371 - protein, 340 aa, Brassica napus
MSNQRKRPNGEREEDDEEDDAEGIGQWERAYVDDRSWEALQEDESGLLRPIDTSAIYHAQYRRRLRMLSAAAAGTRIQKGLIRYLYIVIDFSRAAAETDFRPSRMAIMAKHVEAFIREFFDQNPLSQIGLVSIKNGIAHTLTDLGGSPESHIQALMGKLEAAGDSSLQNALELVHEHLNQIPSYGHREVLILYSALSTSDPGDIMETIQKCKKSRLRCSVIGLSAEMFICKHLCQETGGLYSVAVDEVHLKDLLLEHAPPPPAIAEFAISNLIKMGFPQRAAEGSMAICSCHKEVKIGAGYTCPRCKARVCELPTECTICGLTLVSSPHLARSYHHLFPI

SEQ ID NO: 1372 - protein, 144 aa, Brassica napus
  misc_feature (128)..(128): Xaa can be any naturally occurring amino acid
  unsure (1)..(144): unsure at all Xaa locations
MYASDCRYRGYILLLVLFYSLVFDLASKIDISDDVRGNQTDSNWKRFLSNSNQHGKEYTSCISVGAEIPKLYLFCDESLKDIITKINFADYGNPIGGCKDNRHGNCGAPAALRVVEKNCLGKLKCELXIRTKMFGPSHCKKDIT

SEQ ID NO: 1373 - protein, 111 aa, Brassica napus
MSSGTVRRVSRQDIQLVQNLIERCLQLYMNQKEVVETLLEQAKIEPGFTELVWQKLEEENREFFNAYYLRLMVKHQIMEFNKLLEQQVRHMQQMHPSALTSVQNTNGSHIQ

SEQ ID NO: 1374 - protein, 203 aa, Brassica napus
MEPKNTIFLVLLLSTILQSSSATPNPSELVRFIVTSCQTTRYPLLCVHTLSAYATMIRHKNDQDLAQIALTISLSRARSVAIFVAKLTKETPSFKRREYLAIKDCIEVLGNSVDRLGQSVKELGRAGHAVAGEDFMWKMSNVQTWVSAALTDETTCLDGFSGRAMEGKVKKLIRLKVVHVAQVTSNALALVNHFAEKRSAKIP

SEQ ID NO: 1375 - protein, 183 aa, Brassica napus
SFCPGFGYWAGSEFGPICSQDISGGGETSRKKLRLSKDQSAFLEDTFKEHNTLNPKQKVALAKKLNMTARQVEVWFQNRRARTKLKQTEVDCEYLKRCVEKLTEENRRLQKEAMELRTLKLSPQFYGQMTPPTTLIMCPSCERVAGPSSNHHQTHRPVAINPWVARAGQVAHGLDFEALRPRS

SEQ ID NO: 1376 - protein, 334 aa, Brassica napus
  misc_feature (47)..(47): Xaa can be any naturally occurring amino acid
  misc_feature (90)..(90): Xaa can be any naturally occurring amino acid
  unsure (1)..(334): unsure at all Xaa locations
MLDYEWDNTSAIMGSGEERHHHQDLDTTRALSIFDPTQTNHHQSPYXTFPPPLFSNQQHLTVVYGHQTAHNIPTNQFHHSFYDPNPYASXSSDSIYHAHSSASALFSFDQSGPAGSGSSYNFLVPKTEVDVSRSLDFSTSNRIGLNLGGRTYFSAGDDDFVSRLYRRSRPGELLGMGNSLSTTTTTPRCQAERCNADLSHAKHYHRRHKVCEFHSKASTVVAAGLSQRFCQQCSRFHLLSEFDNGKRSCRKRLADHNRRRRKCHQSASASGKHTPDIITTPKSANDSGVKSSSASPSSGPTPISLECFRQRQFQTTASSSTSAIWGSLAPTYNI

SEQ ID NO: 1377 - protein, 147 aa, Brassica napus
DKDDGIGKFDAAKLKKLRPSFKEDGGSVTAGNASSISDGAAALVLVSGKKAIELGLNVIAKIRGYADAAQAPELFTTTPALAIPKAIMRAGLDASQVDYYEINEAFSVVALANQKLLGLDPARLNAHGGAVALGHPLGCSGARILVT

SEQ ID NO: 1378 - protein, 172 aa, Brassica napus
MAPTAKTTAFETNGGDGGNKENRYRGVRKRPWGRYAAEIRDPTKKTRVWLGTFDTPEAAARAYDKAAFQFRGAKAKTNFHLPFFVAENESPSQSSTVESPSSLPDLNLGSISSVDSRFPFPKIQVKSGMIVFDEESGRSESDSSSVVVYLSSEKRPRVFLDLDLNLPPKPEN

SEQ ID NO: 1379 - protein, 261 aa, Brassica napus
MAAASPNIPPTLSRYKFFSTSVVENPNFSPHHHNIDNRRRRRLIKSHLQAQNNTTAISYGAPRTELASSKKLWIRQQRSFSETEVEQGQLGDDEEELEDEASLLSLSVKPDRNMALLDDYEMEELGHSLPDTNHRSGYVAVVGMPNVGKSTLSNQMIGQKISIVTDKPQTTRHRILGICSSPDYQMILYDTPGVIEKKMHRLDTMMMKNVRDAAINADCVVILVDACKTPANIDQVLKEGLGDLEKKRPPMLLVMNKKDLI

SEQ ID NO: 1380 - protein, 121 aa, Brassica napus
  misc_feature (120)..(120): Xaa can be any naturally occurring amino acid
  unsure (1)..(121): unsure at all Xaa locations
MDERGRSLKNNNMEEDMDLKRGPWTAEEDCKLINYIATNGEGRWNSLSRCAGLQRTGKSCRLRWLNYLRPDVRRGNITLEEQLLILELHSRWGNRWSKIAQYLPGRTDHEIKNYWRTRVXK

SEQ ID NO: 1381 - protein, 240 aa, Brassica napus
PKEKRKKIEKKLLKGKKKQYSQSTMSSSPSSWSSSQESFFWNESSLLDHSSDHPSFFCPNYNYSDYFFSFESPEPMIKEETQNGDVSNSEEEEKIGTIDEGKSYRGVRKRPWGKFAAEIRDSTRNGVRVWLGTFDEAEEAALAYDQAAFATKGALAVLNFPVEVVRESLKKMENVNLQDGGSPIMALKRKHSLRNRPRGKKRSSNSSSCSSNSSSYSSSSSTSWSSSSTSRGNEQSVVKQ

SEQ ID NO: 1382 - protein, 310 aa, Brassica napus
MASNQFVSILVLVLTLLLQRDNNNVVKAQLTTNFYSTSCPNLLSTVKSGVKSAVSSQPRMGASILRLFFHDCFVNGCDGSILLDDTSSFTGEQNAGPNRNSARGFTVIDNIKSAVEKACPGVVSCADILAIAARDSVVQLGGPNWNVKVGRRDAKTASQAAANSNIPAPTMSLSQLISSFSAVGLSTRDMVALSGAHTIGQSRCANFRARVYNETNINAAFATLRQRSCPRAAGSGDANLAPLDVNSATSFDHSYFQNLVAQRGLLHSGQVLFHGGSTDSIVTGYSNNPASFSSDFTAAMIKMGDISPLT

SEQ ID NO: 1383 - protein, 160 aa, Brassica napus
MDSWSYGRSVFLPNGTIAENQSSMPGFEMETSDGFITKVASSSYVEENQSSNLSRIDFKFRSYENHDGTSSLRAKKTRASNSCSQSPLCQVYGCNMDLSFSKDYHKRHRVCDAHSKSSVVIVRGVEQRFCQQCSRFHFLSEFDDGKRSCRRRLAGHNERR

SEQ ID NO: 1384 - protein, 295 aa, Brassica napus
MMKRLSSSDSMCGLVSNSPDEQSPRGYGSNFQSMLDGYEEDGTIVEEYSGNHHHMGLSEKKRRLRVDQVKALEKNFELENKLEPERKTKLAQELGLQPRQVAVWFQNRRARWKTKQLEKDYGLLKSQYDSLRHNFDSLRRDNDSLLQEISKMKGKINGEDEDNNNVKATTESDISAVKEEEDPIPSSPPQFLEHSTGFNYRRSFTDLRDLMPNPVVEAGSSDSCDSSAVLNEETSSENGRLTPPPPATVAGGSFLQFVKTEDHDEFFSGEEACGGFFSDEQPPSLNWYSASDHWT

SEQ ID NO: 1385 - protein, 381 aa, Brassica napus
MVEQTQQQPTIFHKASSGQILRSGVSQDIHGYTSGFQRRATYGNYSNAAFQYPLAATSRIVATTTASPVFVQAPGEKGFSSFAIDFLMGGVSAAVSKTAAAPIERVKLLIQNQDEMLKAGRLSEPYKGIGDCFGRTIKDEGFGSLWRGNTANVIRYFPTQALNFAFKDYFKRLFNFKKDRDGYWKWFAGNLGSGGAAGASSLLFVYSLDYARTRLANDSKAAKKGGERQFNGLVDVYKKTLKSDGIAGLYRGFNISCVGIIVYRGLYFGLYDSLKPLLPADLQDSFFASFALGWLITNGAGLASYPIDTVRRRMMMTSGEAVKYKSSMDAFQQILKKEGPKSLFKGAGANILRAIAGAGVLSGYDKLQLLLLGKKYGSGSG

SEQ ID NO: 1386 - protein, 143 aa, Brassica napus
MVKLCELCGAEAHLHCDADSAYLCRSCDVKFHASNFLFSRHVRRAICPGCSSLTGDIVSGSLSPWPAKITCSCCGTSSSSASSCCSELSSSTTRKTIVNRGPRRREKGVNAVADGIFVNWCDELGLNGDSKNEVVSLASLALA

SEQ ID NO: 1387 - protein, 154 aa, Brassica napus
MDFGRFPIISILEDMLEVPEEHSEKGRSNPSRAYVRDQKAMAATPADVIEHPDAYAFVVDMPGIKGDEIKVQVESDNLLVVSGERKRENKENEGVKYVRMERRMGKFMRKFQLPENADLEKISASCNDGVLKVTVGKLPPPEPKKPKTIQVQVA

SEQ ID NO: 1388 - protein, 215 aa, Brassica napus
  misc_feature (174)..(174): Xaa can be any naturally occurring amino acid
  misc_feature (194)..(194): Xaa can be any naturally occurring amino acid
  misc_feature (208)..(209): Xaa can be any naturally occurring amino acid
  misc_feature (214)..(214): Xaa can be any naturally occurring amino acid
  unsure (1)..(215): unsure at all Xaa locations
MRKGRGSSAVPPALPGSVKEPRYRGVRKRPWGRFAAEIRDPLKKSRVWLGTFDSAEEAARAYDAAARNLRGPKAKTNFQIDCSPSSPLQPLHHRNQIDPFMDHRLYGGEQEVVIISRPASSSMSSTVKSCSGVRPASSSVAKAATKRYPRTPPVAPEDCRSDCDSSSSVVEDGXDIASSSSRRKPPFEFDLNFXPLDGVDLFVGADDXXCTDLXL

SEQ ID NO: 1389 - protein, 201 aa, Brassica napus
MAKVLDLSLVLFVLCVSTAAIAMARNLGEESSDDTEFIKSSCETATYPELCFQSLSSYASEIKKRPLQLAETALAVSMARAKSAKTYISDMTDYKGITKRQHEAVLDCVEEMGDTVDRLSKSLKELKNLEEGESKEDFWFCLSNVRTWTSAALTDETTCLDGFGGKGMDGELKSLVKAHIVRVAQDTSNALALINVYASKH

SEQ ID NO: 1390 - protein, 290 aa, Brassica napus
MEIGFLGLGIMGKAMAMNLLKHGFKVTVWNRTLSKCDELVEHGASMGETPAQVIKKCKYTIAMLSDPCAALSVVFDDKDGVLEQICEGKGYIDMSTVDAETSLKINQAITGKGGRFVEGPVSGSKKPAEDGQLIILAAGDKSLFDETVPAFDVLGKKSFYLGQVGNGAKMKLVVNMVMGSMMNAFSEGLVLADKSGLSSDTLLDILDLGAMTNPMFKGKGPSMNKSSYPPAFPLKHQQKDMRLALALGDENAVSMPVAAAANEAFKKARSMGLGDLDFSAVIEAVKFSRE

SEQ ID NO: 1391 - protein, 170 aa, Brassica napus
MSFFIQDSGLIVTQLLYQMAVFITLLRWIFSWILRYRSKSRTSSAPPVSSQAIKESLSVTTFHDALERSPELISDTCAVCLGDLEDGDEVRELRNCSHVFHRECIDRWLDYECCGGDGNEGEEDNHRTCPLCRTPLLAADTSSCGDWPVKTEPSWAVERLLYLFGDDLLV

SEQ ID NO: 1392 - protein, 260 aa, Brassica napus
MGGAVKDIASKSELDNLRQSGAPVVLHFWASWCDASKQMDQVFSHLATDFPRAHFFRVEAEEHPEISEAYSVSAVPYFVFFKDGKAVDTLEGADPSSLANKVSKVAGSSTSAEPAAPASLGLAAGPTILETVKENAKATSKDRAQPLSTTTTTTEALNTRLEKLTNSHPVMLFMKGTPEEPRCGFSRQVVGVLREENVDFGSFDILSDNEVREGLKKFSNWPTFPQLYCNGELLGGSDIVLEMQKSGELRQVLSEKGKQS

SEQ ID NO: 1393 - protein, 491 aa, Brassica napus
MASARFLSLLPIVTLSLLLTTTDASSRSLPTSHETTVLDVVSSLQQTQQILSIDPTRSSLTTTTAAKESIPVFLNSSSPLSLELHSRDTLVASQHKNYKSLVLSRLERDSSRVASIIAKVKLAVEGADSETHYQPEELTTPVISGASQGSGEYFSRLGVGTPAKEMYMVLDTGSDINWIQCKPCSSCYQQSDPIFDPSSSSTYKSLTCSAPQCASLRASACRSDKCLYQVRYGDGSFTVGEYATDTVTFGSSGKVDNVALGCGRDNEGLFTGAAGLLGLGGGALSMTSQIKAKSFSYCLVDRDSGKSSSLDFNSVQVGAGDATAPLLRNSKIDTFYYVGLSGFSVGGQQVSIPSSVFAVDASGAGGVILDCGTAVTRLQTQAYNSLRDAFVKLTANLKKGTSSISLFDTCYDFSSLSTVKVPTVAFHFTGGKSIDLPAKNYLIPVDDAGTFCFAFAPTSSSLSIIGNVQQQGTRITYDLANNLIGLSANQC

SEQ ID NO: 1394 - protein, 135 aa, Brassica napus
MTMMMMRSFSMAMLLFTLVSSISIVSSASSSPEAEFVKKTISSHKIVIFSKSYCPYCRRAKSVFSELDQVPHVVELDEREDGWNVQSALGEIVGRRTVPQVFINGKHIGGSDDTVEAHESGELAKLLGLSTKAEL

SEQ ID NO: 1395 - protein, 123 aa, Brassica napus
MSDTDEHHFESKADSGASKTYPQQAGAIRKGGHIVIKARPCKVVEVSTSKTGKHGHAKCHFVAIDIFNGKKLEDIVPSSHNCDVPHVDRQDYQLIDITDDGYVSLLTESGNTKDDLKLPTDDV

SEQ ID NO: 1396 - protein, 159 aa, Brassica napus
MSDEEHHFESSDAGASKTYPQQAGNIRKGGHIVIKGRPCKVVEVSTSKTGKHGHAKCHFVAIDIFTAKKLEDIVPSSHNCDVPHVNRVDYQLIDISEDGFVSLLTDSGGTKDDLKLPTDDNLSALMKSGFEEGKDVVVSVMSSMGEEQICAVKEVGGGK

SEQ ID NO: 1397 - protein, 155 aa, Brassica napus
  misc_feature (138)..(138): Xaa can be any naturally occurring amino acid
  unsure (1)..(155): unsure at all Xaa locations
MENTDELVSIELPAPASWKKLFYPKRAGTPRKTEIVFMAPTGEEISSRKQLEQYLKAHPGNPVISEFDWTTGETPRRSSRISQKVKATTPTPEREPHMKKRRSSLTKKDLVEAAEKENKEGEKKEGGAEVAEAEKENXEGKKTEADNKEGEVVTA

SEQ ID NO: 1398 - protein, 204 aa, Brassica napus
MAGLEKNAELKKTSFFSRSMTTHHGRPVASSLNPSLNRTTSITKYYTPVESVGSSLKGKVKDLCRLFEGSKSVKPTSTDPPEKKKLTKSVLSESRLSPFLSLSNSVTRLPGTEDRIVVFFTSLRGIRRTYEDCYSVRMIFRGFRVWIDERDVSMDAAYRKELQIAMGEKSSVSLPQVFIMGKYVGGADVIKSLFEIGELAKILK

SEQ ID NO: 1399 - protein, 121 aa, Brassica napus
  misc_feature (95)..(96): Xaa can be any naturally occurring amino acid
  misc_feature (101)..(101): Xaa can be any naturally occurring amino acid
  misc_feature (107)..(107): Xaa can be any naturally occurring amino acid
  misc_feature (115)..(115): Xaa can be any naturally occurring amino acid
  misc_feature (117)..(118): Xaa can be any naturally occurring amino acid
  misc_feature (120)..(120): Xaa can be any naturally occurring amino acid
  unsure (1)..(121): unsure at all Xaa locations
MTSRMKKRCNENEEGVEQRKGPWTLEEDTILTNYIAHNGEGRWNVLAKSSGLKRKGKSCRLRWLNYLKPDIKRGNLTPQEQLLILELHCHGGNRXXKIAQXLPGRTXNEIKNYWXTXXSXP

SEQ ID NO: 1400 - protein, 329 aa, Brassica napus
MAGDQKIVSMSESPLVLVQRPPTFDFMDELLSRNFPILTTHHTSSAPLLNSLSRHASSIRAVVNMAMLKLDADLLSHLPSLQLLVCTSVGTEHIDLSECKRRGISVTNAGEAFSEDVADCAVGLLISVLRKIPAADRYVRSGKWVKFGEFQLGIKLSGKRVGILGLGSIGSFIAKRLEPFGCIISYNSTSQKQSITYPYYPDVLSLAANNEVIILCCALNDQTHHIVNREVMEALGKNGVIINVGRGGLIDEKEMVKCLVDGVIGGAGLDVFEKEPGVPVELFVLDNVVLSPHAAMETPGSLDNIALLVLANLKAFFSNQPLISPVRLD

SEQ ID NO: 1401 - protein, 182 aa, Brassica napus
  misc_feature (136)..(136): Xaa can be any naturally occurring amino acid
  unsure (1)..(182): unsure at all Xaa locations
MSGENDNGGAKRRGSVKWFAAEKGFGFITPEDGGEDLFVHQSSIRSEGYRSLAEGESVEFLVEVDNNSGRTKAIEVTGPDGAPVQGTSRGSSGGRGGFGGDGYGGRGGGRGSYGGRGGGGGGRGGGGGDCYKCGEXGHMARECSQGGGGYGGGGRGGGGGGGSCYSCGESGHFSRDCTSGGR

SEQ ID NO: 1402 - protein, 237 aa, Brassica napus
  misc_feature (64)..(64): Xaa can be any naturally occurring amino acid
  unsure (1)..(237): unsure at all Xaa locations
MEKPSSEQGSREHLLHPEFPPSRFPFLSTVLWFDKSSRGTALLSCLSYWSRKFGMRRFLFLDKXLWMLATRVRIEYQAEIQRSKKRLMIFVLPSLTLEATYRIWWYISGSDQIPYLINPLLSNVIACTLQLSSGLYRNAIFITVCILYQITCHLQTLRLNDFARCFASEITDVGAALAEHQKIRRNLRIVSHRFRRFILLSLILVTGTQFMALLTTTRASVAVNIYEVGELALCSLI

SEQ ID NO: 1403 - protein, 137 aa, Brassica napus
MGRDETERYITVPSLFRCPISLDVMRSPVSLCTGVTYDRASIQRWLDGGNNTCPATMQILRTKDFVPNLTLQRLIKAWSDSVGRRADGSPLRGIPTVEEVNESLRRLSLEKDDEIRLENLSRIVRFAKDSDANREFS

SEQ ID NO: 1404 - protein, 201 aa, Brassica napus
  misc_feature (183)..(183): Xaa can be any naturally occurring amino acid
  unsure (1)..(201): unsure at all Xaa locations
MARQLYTSAFLHLATLLFIFRTISAVRFPPGPTTTNDLDFIRTSCNATLYPDVCFTSLAGYASAVQYNPARLARLAIGVSLSRAKHTATYLSKLSRASASAAVHDCVSNVGDAMEKMRGSLRQLREMNHRRPGAPTFRFQMSNVQTWMSAALTDEETCTDGITEEMEDGETKTAVCEKVADVXRFTSNALAIVNTYANSGA

SEQ ID NO: 1405 - protein, 157 aa, Brassica napus
  misc_feature (151)..(151): Xaa can be any naturally occurring amino acid
  unsure (1)..(157): unsure at all Xaa locations
IAMTPASMPSHIPSSDVRILEGHTSEVCACAWSPSASLLASGSGDTTARIWNIPEGPLKSSRSISALILKHAKGKSNEKSKDVTTLDWNGEGTLLATGSCDGQARIWTTNGDLISTLSKHKGPIFSLKWNKNGDYLLTGSVDRTAVVWDVXAEEWKQ

SEQ ID NO: 1406 - protein, 116 aa, Brassica napus
  misc_feature (90)..(90): Xaa can be any naturally occurring amino acid
  misc_feature (113)..(113): Xaa can be any naturally occurring amino acid
  unsure (1)..(116): unsure at all Xaa locations
MSDVPSCSSGNNTNSDDSSNFECNICLDLAQDPIVTLCGHLFCWPCLYKWLHLHSTSSECPVCKAVIQEDRLVPLYGRGKSSTDPRSKSXPGIQVPNRPSGQRPETAQPPEPXHGS

SEQ ID NO: 1407 - protein, 142 aa, Brassica napus
MPRSLEPLDLGIQIPYHFRCPISLELMRDPVTVCTGQTYDRTSIESWVSTGNNNTTCPVTRAPLSDHTLIPNHTLRRLIQEWCVANRSNGVERIPTPKQPADPTSVRALLSQASAACGTHVSVRSRAAALRRLRAFARDSEK

SEQ ID NO: 1408 - protein, 125 aa, Brassica napus
MGRSPCCDKAGLKKGPWTPEEDQKLLAYIEEHGHGSWRSLPEKAGLQRCGKSCRLRWTNYLRPDIKRGKFTVQEEQTIIQLHALLGNRWSAIATHLAKRTDNEIKNYWNTHLKKRLVKMGIDPVT

SEQ ID NO: 1409 - protein, 136 aa, Brassica napus
  misc_feature (27)..(28): Xaa can be any naturally occurring amino acid
  unsure (1)..(136): unsure at all Xaa locations
KQVASGRFGVTPTFLVNADQLEIKVAXXAKPGEGGQLPGKKVSAYIARLRSSKPGVPLISPPPHHDIYSIEDLAQLIFDLHQINPNAKVSVKLVAEAGIGTVASGVAKGNADIIQISGHDGGTGASPISSIKHAGG

SEQ ID NO: 1410 - protein, 155 aa, Brassica napus
MDTTHSCRRGYILLLVLSYSSVFGLASNMSISNDTSGNKTDSFFESQSTSTEWGTDMGDKYIMCTESNMEIPWMISCKKSKEVFTRINFADYGNPSGKCEHYRHGNCGAKTTMEVAKKNCLGKHQCVFKVSDEMFGTSHCKKEAKFFVQLTCTKA

SEQ ID NO: 1411 - protein, 300 aa, Brassica napus
MKPVFCGNFEYDAREGDLERLFRKYGRVERVDMKAGFAFVYMEDERDAEDAIRALDRIEFGRKGRRLRVEWTKGERGGDRRSGGGSRRSSSMRPSKTLFVINFDADNTRTRDLERHFEPYGKIVNVRIRRNFAFVQYEEQEDATRALDATNNSKLMDKVISVEYAMKDDDARGNGHSPERRRDRSPERRRRSPSPYKRERGSPDYGRGGSPVAAYKRERTSPDYGRRRSPSPYKRTRRSSPEYGRDRHRGNESPRRRERGASPRYLPGRPLDRPGRSGLAGGKFSRVICKCGGTKGGSLE

SEQ ID NO: 1412 - protein, 161 aa, Brassica napus
MGEIVFTEKQEALVKESWEILKQDIPKYSLHFFSQILEIAPAAKDMFSFLRDTDEVPHNNPKLKAHAVKVFKMTCETAIQLREKGKVVVADTTLQYLGSVHLKSGVLDPHFEVVKEALVRTLKEGLGEKYNEEVEGAWSKAYDHLALAIKAEMKQEDSQKP

SEQ ID NO: 1413 - protein, 519 aa, Brassica napus
MSGAITCSAADLATLLGPNATAAADYICGQLGTVNNKFTDAAFAIDNTYLLFSAYLVFAMQLGFAMLCAGSVRAKNTMNIMLTNVLDAAAGGFFYYLFGYAFAFGGSSEGFIGRHNFALRDFPTPTADYSFFLYQWAFAIAAAGITSGSIAERTQFVAYLIYSSFLTGFVYPVVSHWFWSPDGWASPFRSADDRLFSTGAIDFAGSGVVHMVGGIAGLWGALIEGPRRGRFEKGGRAIALRGHSASLVVLGTFLLWFGWYGFNPGSFTKILVPYNSGSNYGQWSGIGRTAVNTTLSGCTAALTTLFGKRLLSGHWNVTDVCNGLLGGFAAITAGCSVVEPWAAIVCGFMTSLVLIGCNKLAELVQYGDPLEAAQLHGGCGAWGLIFVGLFAKEKYLNEVYGATPGRPYGLFMGGGGKLLGAQLVQILVIVGWVSATMGTLFFILKRLNLLRISEQHEMQGMDMTRHGGFAYIYHDNDDESHRVDPGSPFPRSALPLAFNFQLFGNLLPFKYCLGFGFEI

SEQ ID NO: 1414 - protein, 204 aa, Brassica napus
  misc_feature (100)..(100): Xaa can be any naturally occurring amino acid
  unsure (1)..(204): unsure at all Xaa locations
MGTEEESVPVELPAPSSWKKLFFPNKVGSVKKTEIVFVAPTGEEISNRKQLDQYLKSHPGNPSITEFDWTTSGTPRRSARISDKKTKSTPSPDKEPPKKXGRTKSSGSKKDADEEGEKPEGGGVGNSHAQEEGTEMSPLKGTEENVTVKDGSGETKDDMVAEETPDPAPVQEAGGESMKEQTHDLVGDTSKESVESPTNKKEAT

SEQ ID NO: 1415 - protein, 294 aa, Brassica napus
MQDIHDYSMTGGGGSGGSTGRFYGGGIGGGGGGGDRRMRTHQNNILNHHQSLKCPRCNSLNTKFCYYNNYNLSQPRHFCKNCRRYWTKGGVLRNVPVGGGCRKAKRSKSKQPQPSSPSSADKPTTQNVEEKSSSSESSSLTASNSTAVTVTATAAKVASPRVMDTDMPNLKQYGNGIEWSTLLGQGSSDGGAFSEIGGFTAASMVETTPFRFGGTSVNHQSIADHLKFEDNTVQQQFGDPTAQVDPNMGFEPLDWGSGGGDQTFFDLTSSVDHAYWSQSQWASSDQDQNGLYLP

SEQ ID NO: 1416 - protein, 273 aa, Brassica napus
MASMALTSPPGVKIPSYMAASSSSSLFSRSSISFRTVESRSRICVSGSAKCNLNGNARIPIINETTLPKYFDSSRLEKSASRGNTKLKLFSGTANPALSQEIAWYMGLELGKISIKRFADGEVYVQLKESVRGCDVFLVQPTCTPTNENLMELLIMVDACRRASAKKVTAVIPYFGYARADRKTQGRESIAAKLVANLITEAGADRVLACDLHSGQSMGYFDIPVDHVYCQPVILDYLASKSISSKDLVVVSPDVGGVARARAFAKKLSDAPL

SEQ ID NO: 1417 - protein, 343 aa, Brassica napus
  misc_feature (188)..(188): Xaa can be any naturally occurring amino acid
  unsure (1)..(343): unsure at all Xaa locations
MFLKIGQRGIRHLQRSSTASFTTVSASSIEKGQNRVVDASLTLIRERAKLKGELVRLLGGAKASTSLLGVPLGHNSSFLQGPAFAPPRIREAIWCGSTNSSTEEGKELKDPRVLTDVGDVPVQEIRDCGVDDDRLMNVISESVKLVMEEEPLRPLVLGGDHSISYPVIRAVSEKLGGPVDVLHLDAHXDIYDCFEGNKYSHASSFARIMEGGYARRLLQVGSIRSINKEGREQGKRFGVEQYEMRTFSRDREVLENLKLGEGVKGVYISIDVDCLDPAFAPGVSHIEPGGLSFRDVLNILHNLEGDVVGADVVEFNPQRDTVDGMTAMVAAKLVRELAAKISK

SEQ ID NO: 1418 - protein, 132 aa, Brassica napus
  misc_feature (118)..(118): Xaa can be any naturally occurring amino acid
  misc_feature (129)..(129): Xaa can be any naturally occurring amino acid
  unsure (1)..(132): unsure at all Xaa locations
MGRSPCCDKMGLKKGPWTSEEDQKLLAYIDEHGHGSWRSLPEKAGLHRCGKSCRLRWTNYLRPDIKRGKFNLQEEQTIIQLHALLGNRWSAIATHLPKRTDNEIKNYWNTHLKKRLVXMGIDPVTHKPXNET

SEQ ID NO: 1419 - protein, 243 aa, Brassica napus
  misc_feature (124)..(124): Xaa can be any naturally occurring amino acid
  misc_feature (143)..(143): Xaa can be any naturally occurring amino acid
  unsure (1)..(243): unsure at all Xaa locations
MGSLPPPHLDFSSANHGNEHHHHQEISKDNLLALFKSQQDLLNYFFKHLDLSQTLDFSRILLSTSGTVFFTGVGKSAFVANKISQTLISLSFRSSFLSPLDALHGDIGALSSRDVLVLFSKSGXTEELLRLVPCAKARGAFLXSLTSVPGDPLAGVCDMNVHLPLQRELCPFNLAPVTSTAIQMVFGDTIAVALMAARNLTKGEYGANHPAGRIGKSLIFKVKDVMKKKEELPVCKEGDLIMD

SEQ ID NO: 1420 - protein, 323 aa, Brassica napus
METEKMSPLSDLLNLNLDTKQIIAEYIWIGGSGMDIRSKGRTLPGPVSDPSKLPKWNYDGSSTNQAAGDDSEVILYPQAIFKDPFRKGNNILVMCDAYTPKGDPIPTNNRHKAVKIFDHPNVKAEEPWFGIEQEYTLLKKDVKWPLGWPLGGFPGPQGPYYCAVGADKAFGRDIVDGHYKACLYAGLSIGGANGEVMPGQWEFQISPTVGIGAGDQLWVARYILERITEICGVIVSFDPKPIEGDWNGAAAHTNFSTKSMRKEGGLDLIKKAIGKLEVKHKQHIAAYGEGNERRLTGKHETADINKFSWGVADRGASVRVGRD

SEQ ID NO: 1421 - protein, 174 aa, Brassica napus
PQGSRGISDDEDGDNSRKKLRLSKDQSAILEETFKDHSTLNPKQKQALAKQLGLRARQVEVWFQNRRARTKLKQTEVDCEFLRRCCENLTEKNRRLQKKVTELRSLKLSPQFYMHMNPPTTLTMCPSCEHVSVPPPPPQVAASGHHQRSLPVNPWAPATRVSHGLTFDAFRPRS

SEQ ID NO: 1422 - protein, 196 aa, Brassica napus
MSRVYVGNLDPRVTERELEDEFRVYGVIKSVWVARRPPGYAFLDFEDSRDARDAIRDLDGKNGWRVEESHNRGGGGGRGGRGGGDGGRGRGGSDLKCYECGEPGHFARECRSRGGSGRRRSPSPRGRSPPRYRKSPTYGERRRSYSPRARSPPPPRRRSPSPRGRNYSRSPPPYRGRDEVPYANGNGLKDVRRSRS

SEQ ID NO: 1423 - protein, 589 aa, Brassica napus
MSLPETKTQTLLDAWDFQGRPADRSKTGGWASAAMILCIEAVERLTTLGIGVNLVTYLTGTMHLGNATAANTVTNFLGTSFMLCLLGGFIADTFLGRYLTIAIFAAIQATGVSILTLSTIIPGLRPPRCDPTTSSHCVQANGIQLTVLYLALYLTALGTGGVKASVSGFGSDQFDDTEPKERSQMTYFFNRFFFCINVGSLMAVTVLVYIQDDVGRKWGYGICALAIVLSLSIFLAGTNRYRFKKLIGSPMTQVGTVLVAAWRNRRLELPSDPSFLYDLDDVIAAEGSMKSKQKLPHTNQFRSLDKAAIKDQEMAMTQNVYNKWTLSTVTDIEEVKQIVRMLPIWATCILFWTVHAQLTTLSVAQSETMDRHIGSFEIPPAAMAVFYIGGLLLTTAVYDRLAIPLCKKLFNYPHGLRPLQRIGLGLLLAAMGMAVAALVEIKRLRTAHAHGPTVKTLPLGFSLLIPQYLIVGIGEALIYTGQLDFFLRECPKGMKTMSTGLLLSTLALGFFFSSVLVTIVEKVTDKAHPWIADDLNKGRLYNFYWLVAVIVALNFLVFLVFSKWYVYKEKRLADLGIELEDEPDIPMGH

SEQ ID NO: 1424 - protein, 297 aa, Brassica napus
MDRQNSDDIMRFLDGMASSDDVLFGFLDEGNQSPEDFPDSGNLNGGSDTDDVDNNSNCTSEENKVFWQEQEQLLQGTLYRTSSIETKIRQATKEALKEVKSKGLYCVCRRPVAGGCRSCLRGEISRHLRDVAGYDCVISKSKWRSSQDIPAGEHEYIEILDRSDSKKGEMRVVIELSFRAEFEIAKGGEEYKRLISRLPEVYVGKTERLRSLIKILCIAGKKCLRDKKMHMGPWRKHKYIQAKWLGTCDRSSSLEAAVVSETTEPENWVPLVKPRVSMLNYDGLTTGMGRSAAVTVV

SEQ ID NO: 1425 - protein, 55 aa, Brassica napus
MGKKCDLCEGVARTYCDSDQASLCWDCDGKVHGANFLVAKHTRCLLCSACQSSTP

SEQ ID NO: 1426 - protein, 359 aa, Brassica napus
  misc_feature (119)..(119): Xaa can be any naturally occurring amino acid
  misc_feature (143)..(143): Xaa can be any naturally occurring amino acid
  unsure (1)..(359): unsure at all Xaa locations
MSALADLINLDLSDSSEKIIAEYIWIGGSGLDMRSKARTLPGPVKDPSELPKWNYDGSSTGQAPGDDSEVIIYPQAIFKDPFRRGNNILVMCDAYTPAGEPIPTNKRACGRPKIFSDPXVARRKETWYGIEQEYTLLQKDTKXGPVGWPPRGFPGPHGPYYCGVGADKAFGRDIVDAHYKACLYAGINVSGTNGEVMPGQWEFQVGPTVGIAAADQVWVARYILERITELAGVVLSLDPKPIPGDWNGAGAHTNYSTKSMREDGGYEIIKKAIEKLGLRHKEHIAAYGEGNERRLTGKHETADINTFLWGVANRGASIRVGRDTEKDGKGYFEDRRPASNMDPYTVTSMVAETTILWKP

SEQ ID NO: 1427 - protein, 208 aa, Brassica napus
  misc_feature (21)..(21): Xaa can be any naturally occurring amino acid
  unsure (1)..(208): unsure at all Xaa locations
MCGGAVIADYITPSRSSRSSXTWRRDNDVVDLTLDDFEGDFDEFESENEDIYGFSTAKPAAPLRRSSPPQEDRRKKKKSSEYRGIRRRPWGRWAAEIRDPIKGVRVWLGTFNTAEDAARAYDLEAKRIRGAKAKLNFPNESPSRKRKASSSSSPQPQVKIEEKQEVAVASSLWEGDTIQVDTQWLEDAIKGGEKEGKRQKGCDGEGDV

SEQ ID NO: 1428 - protein, 311 aa, Brassica napus
MMKRLSSSDSVGGLISLCPTTSTDQPSPRRYGREFQSMLEGYEEEEEEAITEERGQTGLAEKKRRLSINQVKALEKNFELENKLEPERKVKLAQELGLQPRQVAVWFQNRRARWKTKQLEKDYGVLKTQYDSLRHNFDSLRRDNESLLQEIGKLKAKLNGEEEVEEDDEDEENNAVTMESDVSVKEEEVSLPEELTDPPSSPPQLLEHSDSFNYRSFTDLRDLLPLKAAASSVAAAGSSDSSDSSAVLNEESSSNVTAAPATVPRGSFLQFVKMEQTEDHDDFLSGEEACGFFSDEQPPSLHWYSTVDQWN

SEQ ID NO: 1429 - protein, 274 aa, Brassica napus
EQHSVSRLIGAPPGYVGHEEGGQLTEAVRRRPYCVILFDEVEKAHVAVFNTLLQVLDDGRLTDGQGRTVDFRNSVIIMTSNLGAEHLLSGLTGKVSMQVARECVMQEVRKHFRPELLNRLDEIVVFDPLSHDQLRKVARLQMKDVAVRLAERGVALAVTDAALDYILAESYDPVYGARPIRRWMEKKVVTELSKMVVREEIDENSTVYIDAGSGGSDLVYRVEKNGGLVNATTGQKSDVLIHIANGPKKSDAAQAVKKMRIEEIEDDDEGMGGD

SEQ ID NO: 1430 - protein, 166 aa, Brassica napus
MTESSDAGASMASKIGNLRLASDIDINDHIDLSGKPCRVIDPYTKRGLCHLHTINILTGYFVRRIVPISTEFVIPDVSRDLYQLTGISYKDDSITLLHHSGAYTRDDIFLPENENLRTMMVDGFNDDKRVIVGIVTSLGQDAVYAVDVYQAGSANDIDFVAKNVGF

SEQ ID NO: 1431 - protein, 180 aa, Brassica napus
  misc_feature (160)..(160): Xaa can be any naturally occurring amino acid
  unsure (1)..(180): unsure at all Xaa locations
MERYDILRDLGSGNFGVAKLVREKANGKFYAVKYIERGLKIDEHVQREIINHRDLKHPNIIRFKEVFVTPTHLAIVMEYAAGGELFERICSAGRFSEDEARYYFKQLISGVSYCHSMQICHRDLKLENTLLDGSPSSQLKICDFGYSKSSVLHSQPKSTXGTPAYVAPEVLSRKEYNGKI

SEQ ID NO: 1432 - protein, 214 aa, Brassica napus
AEHGYFTRRNSDSPWETTVLPTDLGWKKIAEPVMSHYTEATDGSFIEEKESAMVWHHQEADPSLGSWQAKELLDHLESVLTNEPVVVKRGQHIVEVKPQGVSKGKVVEHLIATMRNSKGKRPDFLLCIGDDRSDEDMFDGIVKHQDVSPIAFAEVFACTVGQKPSKAKYYLDATPMVINMLEWLASASDKSKDGEQQSKFTFQQGHCRNEIIDL

SEQ ID NO: 1433 - protein, 197 aa, Brassica napus
  misc_feature (8)..(8): Xaa can be any naturally occurring amino acid
  misc_feature (75)..(75): Xaa can be any naturally occurring amino acid
  unsure (1)..(197): unsure at all Xaa locations
DALPAFLXYKEIKGSKEPFDCAVCLCEFSEDDKLRLLPICSHAFHIDCIDTWLLSNSTCPLCRGTLYPLGHQFEXPDFNFGFFAGEDGERASPGEKPAESDIMSGKRVFSVRLGKFRSSNINEGEGGGGGGGETSGCVSVNSSLDNRRCFSMGSYQYIVAESDLVVALCPNNEGLKNVKGESESNVEGKKLNMRSKG

SEQ ID NO: 1434 - protein, 139 aa, Brassica napus
SFIQSSPRLMAHIAFNITLGSAKAPPVIMVRLPSSSQPKPKEVSPIRVCVEKLGAPLDELQKSIGEMGQLSGSTYEVYMSDIQPWVSAALPNENTCPPGFGGDAMNGKVKIFVKKRILVIAHLTSNALALINPFASIHG

SEQ ID NO: 1435 - protein, 342 aa, Brassica napus
MASLALSFPPAAAKTPSYLSSSSSTFFSSSLSFTTSQSHSRNSVFASIKCDLGNGNPSIPIINERTLPKFLESARMEKSANRSNNNTRLKLFSGTANPALSQEIAWYMGLDLGKIKIKRFADGEIYVQLEESVRGCDVYLVQPTCTPTNENLMELLIMVDACRRASAKKVTAVIPYFGYARADRKTQGRESIAAKLVANLITEAGADRVLACDLHSGQSMGYFDIPVDHVYCQPVILDYLASKSIAAEDLVVVSPDVGGVARARAFAKKLSDAPLAIVDKRRSGHNVAEVMNLIGDVKGKVAVMVDDMIDTAGTIVKGAALLHQEGAREVYACCTHAVFSPP

SEQ ID NO: 1436 - protein, 235 aa, Brassica napus
  misc_feature (151)..(151): Xaa can be any naturally occurring amino acid
  misc_feature (203)..(203): Xaa can be any naturally occurring amino acid
  misc_feature (211)..(211): Xaa can be any naturally occurring amino acid
  unsure (1)..(235): unsure at all Xaa locations
MSFTSRQVFLVLSVLALTTMPFSAGVTNLRDVSAINNLYITLGAPSLHRWLAFGGDPCGEKWQGVVCDSSNITEIRIHGMKVGGSLSDTLADFSSIQVMDFSDNHISGTIPQALPSTIRNLSLSSNRFTGNIPFTLSFLTELSELSLGNNXLSGEIPDYFQQLTKLTKLDLSSNILEGRLPPSMGDLAALKILYLRDNKLIGXLDVIEDLXLNDLNVANNLFSGPIPPNLLKSQI

SEQ ID NO: 1437 - protein, 356 aa, Brassica napus
MSLLTDLVNLDLSDNTEKIIAEYIWVGGSGMDMRSKARTLPGPVTDPSKLPKWNYDGSSTGQAPGEDSEVILYPQAIFKDPFRRGNNILVMCDTYTPAGEPIPTNKRHAAAQIFSNPDVVAEVPWYGIEQEYTLLQKDVNWPVGWPIGGFPGPQGPYYCSVGADKSFGRDIVDAHYKACLYAGINISGINGEVMPGQWEFQVGPSVGISAADEVWIARFILERITEIAGVVVSFDPKPIPGDWNGAGAHTNYSTKSMREEGGYEIIKKAIDKLGLRHKEHISAYGEGNERRLTGHHETADINTFKWGVANRGASIRVGRDTEKEGKGYFEDRRPASNMDPYTVTSMIAETTLLWNP

SEQ ID NO: 1438 - protein, 600 aa, Brassica napus
MSAAAASSAISVATNPLKTFSLSSRSPLPSAISLPSRSLNTPRRRLVLVSCTAGDGSKPTILVAEKLGEAGVKLLEGFANVDCSYNMTPEELNTKISLCDALIVRSGTKVGREVFESSRGRLKVVGRAGVGIDNVDLSAATEFGCLVVNAPTANTIAAAEHGIALLASMARNVAQSDASVKAGEWKRNKYVGVSLVGKTLAVMGFGKVGTEVARRAKGLGMRVIAHDPYAPADRAHAIGVELVSFDEALATADFISLHMPLTPATNKILNDETFAKMKKGVRIVNVARGGVIDEDALVRALDAGIVSQAALDVFTKEPPAIDSPLVQHENVTVTPHLGASTMEAQEGVAIEIAEAVVGALNGELAATAVNAPMVSAEVLTELKPYVILAEKLGRLAVQLVAGGSGVKNVKVSYTSARATDDLDTRLLRAMITKGIIEPISDVYVNLVNADFTAKQRGLRLSEERVLLDGSPENPLETITVQLGNVESKFASSLSESGEVKVEGRVKDGIPHLTKVGSFEVDVTLEGSIILCRQVDQPGMIGTVGSILGESNVNVNFMSVGRIAPRKQAIMAIGVDDQPSKETLKKIGEIPAIEEFVFLKL

SEQ ID NO: 1439 - protein, 148 aa, Brassica napus
  misc_feature (5)..(5): Xaa can be any naturally occurring amino acid
  misc_feature (17)..(17): Xaa can be any naturally occurring amino acid
  misc_feature (23)..(23): Xaa can be any naturally occurring amino acid
  misc_feature (27)..(30): Xaa can be any naturally occurring amino acid
  misc_feature (33)..(33): Xaa can be any naturally occurring amino acid
  misc_feature (37)..(37): Xaa can be any naturally occurring amino acid
  misc_feature (41)..(41): Xaa can be any naturally occurring amino acid
  misc_feature (44)..(44): Xaa can be any naturally occurring amino acid
  misc_feature (47)..(47): Xaa can be any naturally occurring amino acid
  misc_feature (50)..(51): Xaa can be any naturally occurring amino acid
  misc_feature (53)..(53): Xaa can be any naturally occurring amino acid
  misc_feature (66)..(66): Xaa can be any naturally occurring amino acid
  misc_feature (68)..(68): Xaa can be any naturally occurring amino acid
  misc_feature (75)..(75): Xaa can be any naturally occurring amino acid
  misc_feature (85)..(85): Xaa can be any naturally occurring amino acid
  misc_feature (88)..(88): Xaa can be any naturally occurring amino acid
  misc_feature (100)..(100): Xaa can be any naturally occurring amino acid
  misc_feature (102)..(102): Xaa can be any naturally occurring amino acid
  misc_feature (108)..(108): Xaa can be any naturally occurring amino acid
  misc_feature (127)..(128): Xaa can be any naturally occurring amino acid
  misc_feature (130)..(130): Xaa can be any naturally occurring amino acid
  misc_feature (133)..(134): Xaa can be any naturally occurring amino acid
  misc_feature (139)..(141): Xaa can be any naturally occurring amino acid
  misc_feature (143)..(146): Xaa can be any naturally occurring amino acid
  unsure (1)..(148): unsure at all Xaa locations
MSDEXHHFESSDAGASXTYPQQXGNIXXXXHIXIKGXPCKXVEXSTXKTXXHXHAKCHFVAIDIFXAXKIEDIVXPSSHNCDGPXGNXIDYQLIDISEDXFXSLLTDXGGTKDDLKLPTDDSLSALXXSXFKXXKDVVXXXMXXXXEV

SEQ ID NO: 1440 - protein, 211 aa, Brassica napus
MKKPSLHTSLIFFFFLATLLPIILTVHSQPSSLPSDDSDFIRTSCNTTLYPVLCVSSLSNFSSSVNNDPALLARAAISVTLSKALELGSYLSNVTALLKSQEENGGHPAAAVVFHDCFENLKDAVDEMRGSMKQMRDLVSTGSLESFRFQMSNVQTWLSAALTDEETCTDGFKDVQDEPRKDEVCARVDDVKKLTSNALALVNRCVDKAMH

SEQ ID NO: 1441 - protein, 164 aa, Brassica napus
  misc_feature (156)..(156): Xaa can be any naturally occurring amino acid
  unsure (1)..(164): unsure at all Xaa locations
MDKYEVVKDLGTGNFGVARLLRHKETKELVAMKYIERGRKIDENVAREIINHRSLKHPNIIRFKEVMLTPTHLAIVMEYASGGELFERICTAGRFSEAEARYFFQQLICGVDYCHSLQICHRDLKLENTLLDGSPAPLLKICDFGYSKSSILHSRXKSTVGTPA

SEQ ID NO: 1442 - protein, 206 aa, Brassica napus
DLVDVKLGRYYELVVTTFAGLYRYRIGDVLQVAGFYNKAPQFRFICRRNVVLSIDLDKTNEEDLHRSITLAKKKLENKAFLAEYTSYADTSSVPGHYVLFWEIQWLEPDDEEEKLLMEECCIAVQEELDYIYRQCRKRDRSVGPLEIRVVKPGTFEKLMDMIISQGGSLNQYKTPRCVKSNSAMLKLLDGHATGSFSSPRDPTWSP

SEQ ID NO: 1443 - protein, 232 aa, Brassica napus
MQVPTNSNIQGSQSFSLTKNLMMPCKMKHSGLQLQDQDSSSTQSTEESGGGYIVSPQGKAIASYTKSTTTSSMVSHDSVFPPTYFNGFLAPEYASQSTVLPHVEMMGLVTSRVPLPHNYQENEPMFVNAKQYHAILRRRKHRAKLEAQNKLIKSRKPYLHESRHLHALKRARGSGGRFLNTKKLQESSSNSLCSSSATPSSSSDRDNMFQNPPFRFSGYPSTHHVSALMSGT

SEQ ID NO: 1444 - protein, 215 aa, Brassica napus
TVGAGLPIISTLRGLLETGDKILRIEGIFSGTLSYLFNNFVGNRSFSDVVAEAKQAGFTEPDPRDDLSGTDVARKVTILARESGLKLGLDSLPVQSLVPKPLQACASAEEFMQKLPQFDEELSKQRQEAEAAGEVLRYVGVVDAVGKKGTVELKRYKKDHPFAQLSGADNIIAFTTKRYKEQPLIVRGPGAGAQVTAGGIFSDILRLAFYLGAPS

SEQ ID NO: 1445 - protein, 256 aa, Brassica napus
  misc_feature (10)..(10): Xaa can be any naturally occurring amino acid
  misc_feature (37)..(37): Xaa can be any naturally occurring amino acid
  misc_feature (50)..(50): Xaa can be any naturally occurring amino acid
  misc_feature (53)..(53): Xaa can be any naturally occurring amino acid
  misc_feature (79)..(80): Xaa can be any naturally occurring amino acid
  misc_feature (86)..(86): Xaa can be any naturally occurring amino acid
  misc_feature (89)..(89): Xaa can be any naturally occurring amino acid
  unsure (1)..(256): unsure at all Xaa locations
PIPTNKRHAXAKIFSDPTVAAEETWYRIEQEYTLLQXDTKWPVGWPVGGXPGXQGPYYCGVGADKAFGRDIVDAHYKAXXYAGINXSGXSRPTRPGQWEFQVGPTVGIAAADQVWVARYILERITELAGVVLSLDPKPIPGDWNGAGAHTNYSTKSMREDGGYEIIKKAIEKLGLRHKEHIAAYGEGNERRLTGRHETADINTFLWGVANRGASIRVGRDTEKDGKGYFEDRRPASNMDPYTVTSMVAETTILWKP

SEQ ID NO: 1446 - protein, 207 aa, Brassica napus
MENGSSVQGSRELLLPVESRQSAITINNKPPEFPASRFTFLSIVLWFDQSSRGTALISWSVFFLLVVGAPLISHFLLVCSDCDFHHRRPYDAVVQLSLSLFAGISFVSLSYWSRKFGMRKFLFLDKLWDVSDKVRIEYEAEIQRSTRRLMIFVLPSLTLEAIYRIWWYISGSNQIPYFINPVLSNALACTLQLSSGVYRNAIFITVC

SEQ ID NO: 1447 - protein, 154 aa, Brassica napus
MSAVAINHLFGLPETIEKLIFPTSRSGEGNETRGGSNNNIPIDILESPKEYIFYVDIPGISKSDIQVTVEEERTLVIKSNGKRKREDHDESEEGCKYIRLERRLPQNLVKKFRLPEDADVEAVAAKYQDGVLTVTVGKVPPQPPKSKTVQIAVS

SEQ ID NO: 1448 - protein, 101 aa, Brassica napus
  misc_feature (95)..(96): Xaa can be any naturally occurring amino acid
  unsure (1)..(101): unsure at all Xaa locations
MPRSLEPLDLGIQIPYHFRCPISLELMRDPVTVCTGQTYDRTSIESWVSTGNNTTCPVTRAPLTDFTLIPNHTLRRLIQEWCVANRSNGVLAYPXXPKQPG

SEQ ID NO: 1449 - protein, 228 aa, Brassica napus
MRKGRGSSAIPPALPVTANGSVKEPRYRGVRKRPWGRFAAEIRDPLKKSRVWLGTFDSAVEAARAYDQAARNLRGPKAKTNFPIDCSPSSPLQPLYHQNHQNLRSANQSQIDPFMDHRLYGGGGEQQIISRPASSSMSSTVKSFSGQRPSSSVAKPLPAAKRYPRTPPVAPEDCHSDCDSSSSVIDDGDDIVSSSTRRKPPFQFDLNFSPLDGVDLFDDDLHCTDLRL

SEQ ID NO: 1450 - protein, 173 aa, Brassica napus
LSFVSLSFCLCVRDSVEMISFVGRALFVSVFLLSAWQEFNDFGDNGGRAAKSLRPKFNAFVSHVTTHTGQQLPPVDTKLLVAAAIALKGIGGLLFVSGSSLGAYLLLLHQAVATPILYDFYNYDVERKEFSQLFSKFTQSVALVGALLFFIGMKNSRRHGRQLRRKAPKAKAN

SEQ ID NO: 1451 - protein, 181 aa, Brassica napus
  misc_feature (165)..(165): Xaa can be any naturally occurring amino acid
  unsure (1)..(181): unsure at all Xaa locations
DLTVLVVAAVCFGIFAGIRSIGSDRHEPKLNRNPSQEISRTCSKAQYTSLCIDTLLDFPGSSTADEQQLLHISFNATLQSFSKALYSSSKISYTQMPPRVRSAYDSRLELLDDSVDALSRALSSVVISSSGNDESHSDVMTWLSSAMTNHDTCTDGFEGVGNGEXKDQVVGAVKGFGPKNG

SEQ ID NO: 1452 - protein, 172 aa, Brassica napus
MPEAPKYESLDAFDLTLDEKNKRKLQLIEELTSNADQVQRRVLEEILTRNADVEYLRRHDLNGRTDRETFKNVMPVITYEDIQPEINRIANGDKSPILSSKPISEFLTSSGTSGGERKLMPTIEEELDRRSLLYSFLMPVMSQFVPGLDKGKGMYFLFVKSESKTPGGLPAR

SEQ ID NO: 1453 - protein, 257 aa, Brassica napus
  misc_feature (217)..(217): Xaa can be any naturally occurring amino acid
  unsure (1)..(257): unsure at all Xaa locations
MAHTADSVNPRDVCIVGVARTPMGGFLGSLSSLPATKLGSVAIAAALKRANVDPSLVQEVVFGNVLSANLGQAPARQAALGAGIPNSVICTTVNKVCASGMKAVMIAAQSIQLGINDVVVAGGMESMSNTPKYLAEARKGSRFGHDSLVDGMLKDGLWDVYNDCGMGSCAELCAEKFQITREQQDDYAVQSFERGIAAQEAGAFTWEIAPVEVSGGXGRPSTIVDKDEGLGKFDAAKLRKLRPSFKENGGTVTAGNA

SEQ ID NO: 1454 - protein, 445 aa, Brassica napus
MTFNAPLSADDEENNNKKQMDYNDWLPITASRNAKWYYSAFHNVTAMVGAGVLGLPFAMSQLGWGPGLVAIMLSWLITFYSLWQMVNLHESVPGKRFDRYSELGQEAFGPKLGYWIVLPQQLMVQIASDIVYNVTGGKSLKKFVELLFPHLHHIRQTYYILGFGVLQVGLSQSPDFNSIQIISLLAALMSFLYSMIASVASIVKGMEHHPAEYGVRGHTTASMIFDAFNGVGTIAFAFAGHSVVLEIQATIPSTPEVPSKKPMWKGVVVAYFIVIVCYLCVAISGYWAFGAHVEDDVLISLERPVWLIAAANFMVFIHVIGSYQVFAMSVFDAIESYLVKTLKFTPSVMLRLVARSTYVAIVCLIAICIPFFGGLLGFFGGLVFSSTSYFIPCIIWLVMKRPKLFSFHWFASWFAITIGVLIAIFAPIGGMRHIILSAKSYQLFS

SEQ ID NO: 1455 - protein, 459 aa, Brassica napus
MAAALNKTPFLSQPLTKSPSSDLPIAAVSFPSKPRRRNITVHAGLIAPDGGKLVELIVDEPRRREKKHEAATELPRVELTAIDMQWMHVLSEGWASPLGGFMRESEFLQTLHFNSLRLDDGSVVNMSVPIVLPIDDEPKASIGESKRVALVDSDGNPVAILTDIEIYKHPKEERIARTWGTTAPGLPYVDEAITNAGNWLIGGDLEVLEPVKYNDGLDRFRLSPAELRKELEKRGADAVFAFQLRNPVHNGHALLMTDTRRRLLEMGYQEPYPFASSVRGYTKADDVPLSWRMKQHEKVLEDGVLDPETTVVSIFPSPMHYAGPTEVQWHAKARINAGANFYIVGRDPAGIRHPVEKRDLYDADHGKKVLSMAPGLERLNILPFKVAAYDKTQGKMAFFDPSRPQDFLFISGTKMRTLAKNKENPPDGFMCPGGWQVLVDYYDSLTPAGNGRLPEVVSA

SEQ ID NO: 1456 - protein, 588 aa, Brassica napus
MSLPETKSQTLLDAWDFQGRPADRSKTGGWASAAMILCIEAVERLTTLGIGVNLVTYLTGTMHLGNATAANTVTNFLGTSFMLCLLGGFIAHTFLGRYLTIAIFAAIQATGVSILTLSTIIPGFQPPRCPTTSSHCVQPSGIQLTVLYLALYLTALGTGGVKASVSGFGSDQFDETEPKEQSQMTYFFNRFFFCINVGSLLAVTVLVYMQDDVGRKWGYGLCALAIVLSLSIFLAGTNRYRFKKLIGSPMTQVAAVIVAAWWNRRLELPSDPSFLYDLDDVIAAEGSMKSKQKLPHTNQFRSLDKAAIKDQEMAMTQNVYNKWTLSTVTDIEEVKQIVRMLPIWATCILFWTVHAQLTTLSVAQSETMDRHIGSFEIPPAAMAVFYIGGLLLTTAVYDRLAIPLCKKLFNYPHGLRPLQRIGLGLLLAAMGMAVAALVEIKRLRTAHAHGPTVKTLPLGFSLLIPQYLIVGIGEALIYTGQLDFFLRECPKGMKTMSTGLLLSTLALGFFFSSVLVTIVEKVTDKAHPWIADDLNKGRLYNFYWLVAVIVALNFLVFLVFSKWYVYKEKRLADLGIELEDEPDIPMGH

SEQ ID NO: 1457 - protein, 211 aa, Brassica napus
MGYERLGPSKPSGSVATITAPSPNLSQVPTTSQPDNTSPRRKKLLVSSLVVAFALILAAAIFAGVRSQVKSSQQVPGLARKPSQAISKACALTRFPELCVDSLMDFPGSLAASSPRDLIHVTVNMTLHHFSQALYSSSSFSFLDMPPRVRSAYESCVELLDDSVDALSRALSSVVSVSGGQTKPQDVMTWLSSALTNHDTCTEGFDGVGDG

SEQ ID NO: 1458 - protein, 167 aa, Brassica napus
MAAALSSRFLNTVRCSRLASVSSVYQNGMRRYSSSVPSDSDTHDDFKPTQKVPPGGSSDSLKDLVENDVKENPVMLYMKGVPEAPQCGFSSLAVRVLQQYNVPIGARNILEDPELKNAVKSFSHWPTFPQIFIKGEFIGGSDIILNMHKEGELEEKLKDVSANHKSQ

SEQ ID NO: 1459 - protein, 202 aa, Brassica napus
MGRDETETYITVPTFFKCPISLDVMRSPVSLSTGVTYDRPSIQRWLDGGNNTCPATMQILKSKDLVPNLTLQRLIKAWSDSVGSSPAASSPDPASARGIPTVEEVNESLMRLSQEKDDEIRLEILTRIVRFVKDSEANREFLSGREDLVPMLVDIVSAVKTAKIKLAILAIKIWDSIIKKCNEGDRERLSNLMLLTNGGDAG

SEQ ID NO: 1460 - protein, 192 aa, Brassica napus
MASSSQFRYTQTPSKVVLLRNLPWECVEEELIDLCKRFGKIVNTKTYVGANRNQAFVEFGDVNQAISVVSYYASSSEPAQIRGKTVYIQYSNRHEIVNNQSPGEVPGNVLLVTFEGVQSHDVSIDVIHLVFSAYGFVHKIATFEKAAGFQALVQFTDVDTALAARTALDGRSIPKYLLPEHVGSCNLRMSYS

SEQ ID NO: 1461 - protein, 219 aa, Brassica napus
  misc_feature (162)..(162): Xaa can be any naturally occurring amino acid
  unsure (1)..(219): unsure at all Xaa locations
MYQREGRVYLSTFFAITYGIGFAAIVSTLTHVALFNGKGIWQQVRASATAKVDIHTRLMKKYKDIPSWWFYSMLAVSLALSLVLCTVMKDEIQMPWWGLLLASFMALIFTVPVSIITATTNQTPGLNIITEYLMGVLLPGRPIANVVFKTYGYISMSQAISXLNDFKLGHYMKIPPRSMFLVQFIGTIIAGTVNISVAWYLLTSVENICQKELLPPNSP

SEQ ID NO: 1462 - protein, 283 aa, Brassica napus
PDSGSNSSRNEMEESKRNLLDEEAKASLDIWRYVFGFADIAAAKCAIDLKIPEAIETHPSSQPVTLAELSGAVSASPSHLHRIMRFLVHQGVFKEVPTKDGLATGYTNTPLSRRMMITKRDGKSLAPFVLFETSPEMLAPWLSLSSVVSSPVNGSHPPPFDAVHGKDVWALTKDNPCFGEMINEAMACDARRVVPRLAGACHDLFDGVATVVDVGSGTGEAMGILVKEFPWIKGFNFDLPHVIEVAQVLDGVENVGGDMFDSIPKCDAVFIKVQIIHILYSVE

SEQ ID NO: 1463 - protein, 162 aa, Brassica napus
  misc_feature (39)..(39): Xaa can be any naturally occurring amino acid
  misc_feature (104)..(104): Xaa can be any naturally occurring amino acid
  misc_feature (146)..(146): Xaa can be any naturally occurring amino acid
  unsure (1)..(162): unsure at all Xaa locations
MSDEEHHFESSDAGASKTYPQQAGNIRKGGHIVIKGRPXARVVEVSTSKTGKHGHAKCHFVAIDIFTAKKLEDIVPSSHNCDVPHVNRIDYQLIDISEDGFVSXLLTDSGGTKDDLKLPTDDNLSALMKSGFEEGKDVVVSVMSSXMGEEQICAVKEVGGGK

SEQ ID NO: 1464 - protein, 208 aa, Brassica napus
  misc_feature (11)..(12): Xaa can be any naturally occurring amino acid
  unsure (1)..(208): unsure at all Xaa locations
DSDLCPKPDPXXNVSALKLDESYEVVRVEQEVEEGWVPLSYKPKQPLWKHLSEESFLSGLDPSIVSSYKKPLSSKQLSNDSINVEVISPPSSALSTTQAKAEDKIVLYFTTLRGIRKTYENCCCVRTILRGFQVTVDERDISMDSKYRKELQSMVGDAEKPVCLPQVFIGDTHIGGVEEIMKLNDSGELVEMLKGFPACECLGTCKSC

SEQ ID NO: 1465 - protein, 303 aa, Brassica napus
METEDMHSKSESGNQIVSEAHHHTSSTSINSLNPWLRAAASCNANSSVEEAGDKSIALENQTNLESSNGSKSPSNRDENGNKESQVTASPQQSAADYSEKSQELVHPGSTPPPHPQLVSHTVGWASSNPYQDSYYAGMMGAYPLTYVPHGGMPHSRMQLPPEMAQEPVYVNAKQYQAIMRRRQARAKAELEKKLIKSRKRYLHESRHQHAMRRPRGTGGRFAKKTNTEASQQKDGEKRNACATQSPTSSHSDQHEGCSDEYRTNQSDEMQSSAYKIREEADCSGQQWNNISSNHPSQPLLAIK

SEQ ID NO: 1466 - protein, 162 aa, Brassica napus
MALRSVKAPTSIPPGLIVSSSVINKPQSLRFASKPTASLAVRSNLKLKPASPRAAKFRCSASSSSALTPQLRDTLEKLVNSEKVVLFMKGTRDFPMCGFSNTVVQILKSLNVPFEDVNILENEMVRQGLKEYSSWPTFPQLYIDGEFFGGCDITLEASQSGE

SEQ ID NO: 1467 - protein, 249 aa, Brassica napus
  misc_feature (215)..(215): Xaa can be any naturally occurring amino acid
  unsure (1)..(249): unsure at all Xaa locations
IRLNHHLTERFTFVGKEPITVKSEPEVINFWELMSGLDADTCRFSPLPVKRNVSSVGVNKENSDPNWKNPGTQSNNDAVLKPLDPKIAEEEPEKLCPPGDGGDNRVVIYTTSLRGVRRTFDACNAVRAAIESFGVVICERDISMDRGFREELTSLMSGESVLPPRVFVKGRYIGGVEEVMNLVEEGLLRDLLRGIPRRKDRGGGCDGCGGLSFLXPCSECNGSCKVVAGWGSDVVVVRCNKCNENGLVF

SEQ ID NO: 1468 - protein, 205 aa, Brassica napus
ILQFHGSNNDELLQSTFSHFQMLGSGFGPNPNMGFGPSHEAMDGCISRTSSFQMDPVDTMGVMLKNSEENRTISSKNKRKSEVKRREEERTEKKIKVEAETESNMKGKSSMSNTEASSDTSKETSKGASEIHKLDYIHVRSRRSQATDRHSLAERARREKISKKMKYLQDIVPGCKKVTGQAGMLDEIINYVQSLQTQIEVSNEP

SEQ ID NO: 1469 - protein, 269 aa, Brassica napus
  misc_feature (249)..(249): Xaa can be any naturally occurring amino acid
  misc_feature (260)..(260): Xaa can be any naturally occurring amino acid
  unsure (1)..(269): unsure at all Xaa locations
MGDSSGSVSIDMEAMSLGGQDHLVETTYGPVCVAVCGDPDKPALITYPDVALNYMFSFQGLLFCPEASSLLLHNFCIYHISPIGHELGAPVIGVDAPLLSADDLADQIVEVLNYFGLGAVMCMGVTAGAYILTLFAMKYRQRVLGLILVSPLCQAPSWSEWLCNKVMSNLLYYYGMCGVVKELLLKRYFSKEVRGNAQVPESDIVQECRRLLCERQSTNVWRFLEAINGRVDLSEGLRKLQCRTLIFIXESSGYHSEAVXMTTKLERRY

SEQ ID NO: 1470 - protein, 174 aa, Brassica napus
  misc_feature (11)..(11): Xaa can be any naturally occurring amino acid
  unsure (1)..(174): unsure at all Xaa locations
PGDEAKITGPXGKEMLMPKDPNATIIMLGTGTGIAPFRSFLWKMFFEEHEDYKFNGLAWLFLGVPTSSSLLYKEEFEKMKEKNPENFRLDFAVSREQTNDKGEKMYIQTRMAEYAEELWELLKKDNTFVYMCGLKGMEKGIDEIMVSLAAKDGIDWLEYKKQLKKSEQWNVEVY

SEQ ID NO: 1471 - protein, 164 aa, Brassica napus
NFLMQISKLKSKLNGEEEEEEEEEENKAVKMESDFSVKEEEDSLPENITEPPSSPPELLEHSDSFNYRSFTDLRDLLPLKAAASSFAAAGSSDSSDSSAVMNEESSSNVTVAPTAVPGGGFFQFVKMEQTEDHDDFLSGEEACGFFSDEQPPSLHWYSAVDHWT

SEQ ID NO: 1472 - protein, 141 aa, Brassica napus
MENTQENSPPHMDASRPSLGFPLGTALLLIIIFSLSGIFSCCYHWDKHRSLRRSLASASGHPSAASADIESSPFKPRLPFPDLKKNQNLSVTVLMPGDNTPKFIALPCPCAPPRPEKLTVSAQSPPHSPPVKPPLFPVPLY

SEQ ID NO: 1473 - protein, 217 aa, Brassica napus
MTLDRICAEANEAIKEGYTLLVLSDRAFSSTRVAVSSLLAVGAVHHHLVKSLARTQVGLIVESAEPREVHHFCTLVGFGADAICPYLAVETVHRLQVDGKIPPKSNGEFHSKEELVKKYYKASNYGMMKVLAKMGISTLASYKGAQIFEALGLSSEVIEKCFAGTPSRVEGATFEMLARDALLLHEMAFPARAYAPGSAEASALSNPGNYHWRKNGD

SEQ ID NO: 1474 - protein, 148 aa, Brassica napus
MGERLKGTVKWFNVTKGFGFISPEDGSEDLFVHQSAIKADGYRSLNENDVVEFEVITGDDGRTKATDVTAPGGGALAGGSRPSEGGGDRGGRGGGGYGGGGYGGGGGGYGGGGGGYGGGGGSYGGGGGYGGGGGGGRYGGGSGGGREC

SEQ ID NO: 1475 - protein, 501 aa, Brassica napus
  misc_feature (319)..(319): Xaa can be any naturally occurring amino acid
  unsure (1)..(501): unsure at all Xaa locations
ASTGTSGGYPKLIPLTAEDMEQRILFASLYAPLVFKHIGGLTEGKSLMFYFVTRESETASGLIVRFMLTCVLKSVNPSNIFLWDRVQVSPHEISTCVDTSQAMYCQLLCGLVQRENVARLGAPFASSFLKVINFLEDHWTELCSNIRTGRVSDWITDAQCVSGVSKFLTAPNPDLASLIEKECSKTSWEGIVKRLWPKAKCIEAVVTGSMVQYIPLLEFYGGGLPLISSWYGASECFIGINVDPLSKPCDVSYTIVPSMAYFEFLEVEKDHQETGHNPTKNPVVVDLADVKIGHDYELIITTFSGLYRYRLGDVLRVTXGFYNNAPQFYFVGRQKVVLSMDIDKTYEEDLHKARASATHLLEPHDLMLIDFTSRVDSSSFPGHYVIYWELGRKLKDAKVEPHRHVLEECCFTIEKSLNSVYRKLRKNDGTVGPLEIKVVRRGAFDELMNLFLSRGSSVSQYKTPRSVTSEEAMKILEEAVVSEFLSTKTPSWEPREMHSGR

SEQ ID NO: 1476 - protein, 122 aa, Brassica napus
  misc_feature (7)..(7): Xaa can be any naturally occurring amino acid
  misc_feature (24)..(25): Xaa can be any naturally occurring amino acid
  misc_feature (31)..(32): Xaa can be any naturally occurring amino acid
  misc_feature (39)..(39): Xaa can be any naturally occurring amino acid
  misc_feature (42)..(42): Xaa can be any naturally occurring amino acid
  misc_feature (47)..(47): Xaa can be any naturally occurring amino acid
  misc_feature (54)..(54): Xaa can be any naturally occurring amino acid
  misc_feature (56)..(56): Xaa can be any naturally occurring amino acid
  misc_feature (58)..(58): Xaa can be any naturally occurring amino acid
  misc_feature (65)..(65): Xaa can be any naturally occurring amino acid
  misc_feature (78)..(78): Xaa can be any naturally occurring amino acid
  unsure (1)..(122): unsure at all Xaa locations
SHARAAXKKLAAVRETVGKKRVKXXVVDCVXXIGDSVDXLRXTLGVXKHLHVSXVXAXEFKWQMXNAQTWASAALTDXDTCLDGFKGVEGKVKTEVKQWMTKVARVTSNALYMINQLDESRG

SEQ ID NO: 1477 - protein, 144 aa, Brassica napus
MKGGKSKADTKSSKLAVNKKPAKASKAAAAAKDPNKPKRPSSAFFVFMEDFRQTYKKDHPNNKSVAAVGKAGGHKWKSLSDTEKAPYVAKADTRKVDYEKNMKAYNKKLEEGPKEDEEESDKSVSEVNDEDDADDGSDEEEDDD

SEQ ID NO: 1478 - protein, 348 aa, Brassica napus
  misc_feature (216)..(216): Xaa can be any naturally occurring amino acid
  unsure (1)..(348): unsure at all Xaa locations
MGYDRLGPSGSVSNPNQKDPATSLPELQKRTKKTKLILFTLAVLVVAVVCLGIFAGIRAVGSDQHAPKLNRKPTREISQTCSKAQYPNLCIDTLLDFPGALTADEKQLIHISFNATLQSFSKALYSSSTISYAQMPPRVRSAYDSCLELLDDSVDALSRALSSIVAASSSDDSHSDVMTWLSSAMTNHDTCTEGFDEAGDGGGGGKDQVIGAGKDXSEMVSNCLAIFSGNVNDLSGVPVVNHRKLLGEEETEEFPNWLKRGDRELLGTPATKIQADITVSKDGNGTFKTIAEAIKKAPEHSSRRFVIYVKAGKYEEEILKVGRKKTNLMFIGDGKGRTVITGGKSIVD

SEQ ID NO: 1479 - protein, 132 aa, Brassica napus
MTMIRSISMLTLLVTLAASISMVSSASSADFVKKTISSHKIVIFSKSYCPYCRRAKSVFSELNQVPHVVELDEREDGGSIQSALGEIVGRRTVPQVFINGKHIGGSDDTVDAHESGELAKLLGVSENTRAEL

SEQ ID NO: 1480 - protein, 212 aa, Brassica napus
  misc_feature (75)..(75): Xaa can be any naturally occurring amino acid
  misc_feature (84)..(84): Xaa can be any naturally occurring amino acid
  misc_feature (145)..(145): Xaa can be any naturally occurring amino acid
  unsure (1)..(212): unsure at all Xaa locations
VHECLDVGIKALYRQRKSCYGYHTWKHETIYKRRRSPDRSSVVTSDGGLSNGSVSKLPEKRKSGSYCNSSVILSXLLWFSIIFXISGAVKLSIKSFRIPELFIEVPETATVGSLKVHCNVHLLSFSGTCLALLCVDIKVLIVIFXLFWLQRTVMEAVSVLLSGGIRVGVLVHGKKVRDDKRTLSQTGISFEENLSNLGFTLEPGGTSHGPIP

SEQ ID NO: 1481 - protein, 154 aa, Brassica napus
TIGGKHGIGRIDMVENRLVGMKSRGVYETPGGTILFAAVQELESLTLDRESIQVKDSLALKYAEMVYAGRWFDPLKESMDAFMEKLTEKTTGSVTLKLYKGSVSVTGRKSPNSLYRQDISSFEGSEIYNQADAAGFIRLYGLPMRVRAMLEKGI

SEQ ID NO: 1482 - protein, 130 aa, Brassica napus
  misc_feature (9)..(9): Xaa can be any naturally occurring amino acid
  misc_feature (13)..(13): Xaa can be any naturally occurring amino acid
  misc_feature (15)..(15): Xaa can be any naturally occurring amino acid
  misc_feature (17)..(17): Xaa can be any naturally occurring amino acid
  misc_feature (32)..(32): Xaa can be any naturally occurring amino acid
  misc_feature (36)..(36): Xaa can be any naturally occurring amino acid
  misc_feature (44)..(44): Xaa can be any naturally occurring amino acid
  misc_feature (66)..(66): Xaa can be any naturally occurring amino acid
  misc_feature (69)..(69): Xaa can be any naturally occurring amino acid
  misc_feature (71)..(71): Xaa can be any naturally occurring amino acid
  misc_feature (73)..(73): Xaa can be any naturally occurring amino acid
  misc_feature (75)..(75): Xaa can be any naturally occurring amino acid
  misc_feature (78)..(79): Xaa can be any naturally occurring amino acid
  misc_feature (84)..(84): Xaa can be any naturally occurring amino acid
  misc_feature (91)..(91): Xaa can be any naturally occurring amino acid
  misc_feature (101)..(101): Xaa can be any naturally occurring amino acid
  misc_feature (110)..(110): Xaa can be any naturally occurring amino acid
  misc_feature (123)..(124): Xaa can be any naturally occurring amino acid
  misc_feature (129)..(129): Xaa can be any naturally occurring amino acid
  unsure (1)..(130): unsure at all Xaa locations
MSDEEHHFXSSDXGXSXTYPQQAGNIRKGGHXVIKXRPCKVVEXSTSKTGRHGHAKCHFVAIDIFXAKXLXDXAXSSXXCDAPXVNRIDYXLIDISEDGFXNLLTDSGGXKDDLKLPTDDNLXXLMKSXF

SEQ ID NO: 1483 - protein, 224 aa, Brassica napus
REDSSLAHITTRCGILAVLGCIDNSQAKRSRIIELSRRLRHRGPDWSGLHSHEDCYLAHERLAIIDPTSGDQPLYNQDKTVVVTVNGEIYNHKILREKLKSHQFWTGSDCEVIAHLYEEHGEEFIDMLDGMFAFVLLDTRDKSFIAARDAIGVIPLYIGWGVDGSVWFASEMKALSDDCEQFMAFPPGHIYSSKQGVLRRWYNPPGYSELVPSTPYDPLVLRKA

SEQ ID NO: 1484 - protein, 133 aa, Brassica napus
MALEDQSAARSTGKVNWFNDSKGYGFITPDGGGEELFVHQSSIVSEGYRSLAIDDLVEFEITQGTDGKTKAVDVTAPGGAPLKKKETSSRGGSARRVGGGGGCYNCGEAGHMAKDCRDDGGERGGRSVLLQLW

SEQ ID NO: 1485 - protein, 149 aa, Brassica napus
MGGGGGFGAGGQQMGMVGPLSPVSSDGLGHGQVDNIGGQYGVDMGGLRGRKRVVDGPVEKVVERRQRRMIKNRESAARSRARKQAYTVELEAELNQLKEENAQLKHALGELERKRKQQYFESLKTRARPKVPKVSGRLRTLMRNPSCPL

SEQ ID NO: 1486 - protein, 282 aa, Brassica napus
  misc_feature (230)..(230): Xaa can be any naturally occurring amino acid
  misc_feature (258)..(258): Xaa can be any naturally occurring amino acid
  unsure (1)..(282): unsure at all Xaa locations
SCSSFDGSCMGKVCMSTSDLAVYVVDAHVWGFRDACAEHHLQKGQGVAGRAFLSGNLCFSRDVTRFCKTDYPLVHYARMFKLTSCFAVCLKSTYTGDDEYVLEFFLPPGVTDEGEQDSLLGSLFQTMKQHYSSLKVVSGTELFENEMSIEVVEASEEGMVYSKREPIQISISKDYLEINAPEEKLRLNPDLVVENNDVANGFERFRTFNPSAEEAKTEKKTERKRGKTEXTISLEVLQQYFAGSLKDAAKSLGVCPTXMKRICRQHGILRWPSRKINKVNRS

SEQ ID NO: 1487 - protein, 204 aa, Brassica napus
MKTLSQIDIIFLSIALLLFITSSATPSTYSNQTNLDYIKTSCNLTHYKTLCYISLSPYALKIDSNPQRLAVTALNLTLSSANSAAKFIKNIPHGRGGLTRFEAGAVADCVEEIGDSVSELQDSIRELESINYEDSSKFEMVMSDVETWVSAALTDDDTCMDGFGQDGRAKAVVKDLVRRHVVKVARLTSNALAVINMYASTHEK

SEQ ID NO: 1488 - protein, 669 aa, Brassica napus
MARSLGANGTVVLAIIFFGCLFAFSTAKEEATKLGTVIGIDLGTTYSCVGVYKNGHVEIIANDQGNRITPSWVGFTDNERLIGEAAKNQAAVNPERTVFDVKRLIGRKFADKEVQKDRKLVPYQIVDKDGKPYIQVKIKDGETKVFSPEEVSAMILTKMKETAEAYLGKKIKDAVVTVPAYFNDAQRQATKDAGVIAGLNVARIINEPTAAAIAYGLDKKGGEKNILVFDLGGGTFDVSVLTIDNGVFEVLSTNGDTHLGGEDFDHRIMDYFIKLIKKKHQKDISKDNKALGKLRRECERAKRALSSQHQVRVEIESLFDGLDFSEPLTRARFEELNNDLFRKTMGPVKKAMDDAGLQKSQIDEIVLVGGSTRIPKVQQLLKDFFEGKEPNKGVNPDEAVAYGAAVQGGILSGEGGDETKDILLLDVAPLTLGIETVGGVMTKLIPRNTVIPTKKSQVFTTYQDQQTTVSIQVFEGERSLTKDCRLLGNFDLTGIPPAPRGTPQIEVTFEVDANGILNVKAEDKASGKSEKITITNEKGRLSQEEIDRMVKEAEEFAEEDKKVKERIDARNSLETYVYNMKNQINDKDKLADKLEGDEKEKIEAATKEALEWLDENQNSEKEEYDEKLKEVEAVCNPIITAVYQRSGGAPGGAGGEGATEEEDESHDEL

SEQ ID NO: 1489 - protein, 205 aa, Brassica napus
MRPVFCGNFEYDAREGDLERLFRRYGKVDRVDMKAGFAFVYMENERDAEDAIRALDRYEYGRKGRRLRVEWTKNERGAPTRSSGSRRSSSLRPSKTLFVINFDAESTRTRDLERHFEPYGKIVNVRIRRNFAFIQYELQEDATRALEATNSSKLMDKVISVEYAMKDDDARGNGYSPERRRDRSPDRRRRSPSPYRRERGSPDYG

SEQ ID NO: 1490 - protein, 276 aa, Brassica napus
  misc_feature (24)..(24): Xaa can be any naturally occurring amino acid
  misc_feature (28)..(28): Xaa can be any naturally occurring amino acid
  misc_feature (43)..(43): Xaa can be any naturally occurring amino acid
  misc_feature (47)..(47): Xaa can be any naturally occurring amino acid
  misc_feature (53)..(53): Xaa can be any naturally occurring amino acid
  misc_feature (61)..(61): Xaa can be any naturally occurring amino acid
  misc_feature (65)..(65): Xaa can be any naturally occurring amino acid
  misc_feature (103)..(103): Xaa can be any naturally occurring amino acid
  misc_feature (107)..(107): Xaa can be any naturally occurring amino acid
  misc_feature (110)..(111): Xaa can be any naturally occurring amino acid
  misc_feature (113)..(116): Xaa can be any naturally occurring amino acid
  misc_feature (176)..(176): Xaa can be any naturally occurring amino acid
  unsure (1)..(276): unsure at all Xaa locations
TIRKKDHHDDQPISSSKPDKLNSXADKXLMSPKMRLIKKTITXNNKXRIDHTXSNDNNHKXDHYXLDKTTFKEDHDEELKKVSTRTTTAVTTEKRCNTINETXYGNXNGXXRXXXXCNTTKTPLWRSGPRGPKSLCNACGIRQRKARRAAMAAAVAAGDDQEVVARLQQLPVKKKXQNKRKRFNGGDKYNLSSPVVAKTKKCKLKEEEDDAAIVAGDSEISKSTTSSGSSVLPNKFCFDDLTILLSKSSAYQQVFPQDEKEAAILLMALSYGMVHG

SEQ ID NO: 1491 - protein, 150 aa, Brassica napus
  misc_feature (4)..(4): Xaa can be any naturally occurring amino acid
  misc_feature (15)..(16): Xaa can be any naturally occurring amino acid
  misc_feature (18)..(18): Xaa can be any naturally occurring amino acid
  misc_feature (30)..(30): Xaa can be any naturally occurring amino acid
  misc_feature (42)..(42): Xaa can be any naturally occurring amino acid
  misc_feature (44)..(44): Xaa can be any naturally occurring amino acid
  misc_feature (52)..(52): Xaa can be any naturally occurring amino acid
  misc_feature (75)..(75): Xaa can be any naturally occurring amino acid
  misc_feature (86)..(86): Xaa can be any naturally occurring amino acid
  misc_feature (91)..(92): Xaa can be any naturally occurring amino acid
  misc_feature (100)..(100): Xaa can be any naturally occurring amino acid
  misc_feature (103)..(103): Xaa can be any naturally occurring amino acid
  misc_feature (110)..(110): Xaa can be any naturally occurring amino acid
  misc_feature (113)..(113): Xaa can be any naturally occurring amino acid
  misc_feature (122)..(123): Xaa can be any naturally occurring amino acid
  misc_feature (126)..(126): Xaa can be any naturally occurring amino acid
  misc_feature (129)..(129): Xaa can be any naturally occurring amino acid
  misc_feature (132)..(132): Xaa can be any naturally occurring amino acid
  misc_feature (135)..(136): Xaa can be any naturally occurring amino acid
  misc_feature (138)..(138): Xaa can be any naturally occurring amino acid
  misc_feature (143)..(144): Xaa can be any naturally occurring amino acid
  unsure (1)..(150): unsure at all Xaa locations
HFEXSDAGASKTYPXXAXNIRKDGHIVIKXRPCKVVEVSTSXTXKHGHAKCXHFVAIDIFTAKKLEDIVPSSHNXDVPHVNRIDYXLIDIXXDGFVTLLXDSXGTKDDLXLPXDDNLSALMXXGFXEEXKDXVPXXMXSMSEXXICAVKE

SEQ ID NO: 1492 - protein, 139 aa, Brassica napus
AALVLVSGEKALQLGLQVLAKIKGYGDAAQEPEFFTTAPALAIPKAIAHAGLESSQVDYYEINEAFAVVALANQKLLGIGPEKVNVNGGAVSLGHPLGCSGARILITLLGILKKRNGKYGVGGVCNGGGGASALVLELV

SEQ ID NO: 1493 - protein, 85 aa, Brassica napus
  misc_feature (65)..(65): Xaa can be any naturally occurring amino acid
  unsure (1)..(85): unsure at all Xaa locations
MMQLKCDRKENDECEFSLHFRLLRNRVSAQQARERKKVYVSDLESRANELQNNNDELEEKISTLXTNTMLRKMLINTRPKADENH

SEQ ID NO: 1494 - protein, 173 aa, Brassica napus
EVVILPVESTGFLPEDATIVGNTCLYGATGGLLFVRGKAGERFAVRNSLAQAVVEGTGDHCCEYMTGGCVVVLGKVGRNVAAGMTGGLAYILDEDNTLLPKVNNEIVKIQRVTSQVGQIQLKSLIQAHVEKTGSSKGATIVEEWEKYLSMFWQLVPPSEEDTPEANSDHLVKT

SEQ ID NO: 1495 - protein, 204 aa, Brassica napus
MAKLNQTFFLILSICYFLSPALTAATTALRAGASNKAVNFIQSSCKTTTYPAVCFHSLSAYANAIQTSPKRLAETALAVTLSRAQSTKLFVSRLTRFKGLKKREIEAIKDCVEEINDTIDRLTKSVQEMKLCGSAKNQEQFAFHMSNAQTWTSAALTDENTCSDGFSGRVTDGRIKNSVRARIVNVGHETSNALSLINAFAKKY

SEQ ID NO: 1496 - protein, 141 aa, Brassica napus
  misc_feature (29)..(29): Xaa can be any naturally occurring amino acid
  misc_feature (36)..(36): Xaa can be any naturally occurring amino acid
  misc_feature (45)..(46): Xaa can be any naturally occurring amino acid
  misc_feature (49)..(50): Xaa can be any naturally occurring amino acid
  misc_feature (54)..(54): Xaa can be any naturally occurring amino acid
  misc_feature (68)..(69): Xaa can be any naturally occurring amino acid
  misc_feature (73)..(73): Xaa can be any naturally occurring amino acid
  misc_feature (78)..(79): Xaa can be any naturally occurring amino acid
  misc_feature (102)..(102): Xaa can be any naturally occurring amino acid
  misc_feature (108)..(108): Xaa can be any naturally occurring amino acid
  misc_feature (114)..(114): Xaa can be any naturally occurring amino acid
  misc_feature (116)..(116): Xaa can be any naturally occurring amino acid
  misc_feature (120)..(121): Xaa can be any naturally occurring amino acid
  misc_feature (123)..(126): Xaa can be any naturally occurring amino acid
  misc_feature (134)..(134): Xaa can be any naturally occurring amino acid
  unsure (1)..(141): unsure at all Xaa locations
MSDEEHHFESSDAGASKTYPQQAGNIRKXGHIVIKXGRPCKGVEXXTFXXGKHXHAKGHFVAIDIFTXXKLEXIVPSXXNWDVPHGNRGDYQLIDISEDGFXSLLTEXGGTKDXLXLPPXXNXXXXMKKGIQGXKGWGGGF

SEQ ID NO: 1497 - protein, 231 aa, Brassica napus
MGKKCDLCEGVARMYCESDQASLCWNCDAKVHGANFLVAKHTRCLLCSACQSSTPWKATGLRLGPTFSVCDSCVALKSAGGGGAGVGTDQSQEVNESQLRRRDDDDGDSAESYDDGEDEDEDEEYSDEDEEEDDADDEEAENQVVPGSGAGAAQLPPVMNSSSSNGGGGDLAAKRTRDYSDEEIGCSSSAQESNFSPPLKRPSRDELAFKSTAEINSLVRLEGERVLERRR

SEQ ID NO: 1498 - protein, 193 aa, Brassica napus
MKIVRRDFVRNGPGSVKMVAEDSDDLWYAYNLIAVRDSVMAVTFRKVQREVPGGGRDSERVRLKLEVQVEEVDYDKDAAVLRIRGKNILENDHVKIGAFHTLEIELKRPFVLRKGIWDSLALDTLKQASDPAASADLAVVLMQEGLGQIFLVGRSVTSSRARIETSIPRKHGPAIAGYESALKKFFENVLQAF

SEQ ID NO: 1499 - protein, 110 aa, Brassica napus
IRGKLGEKETAEEQGERIPRLRYLDQRLRQQRALHQQLGMVRPTWRPQRGLPENSVSILRAWLFEHFLHPYPKESEKIMLAKQTGLSKNQVANWFINARVRLWKPMIEEM

SEQ ID NO: 1500 - protein, 103 aa, Brassica napus
  misc_feature (15)..(15): Xaa can be any naturally occurring amino acid
  unsure (1)..(103): unsure at all Xaa locations
DDDFLRLKVSYEEEXKIRFRMRNSRRLKDLLWEIAKRFGIEDVSRYDLKYLDEDNEWVLLRCDDDVEECVDVCRSFPGETIKLLLQLSSQHLQERSSISGSLS

SEQ ID NO: 1501 - protein, 248 aa, Brassica napus
MCGGAIISDFVPILTKAKGRKLTAEELWSELDASAGDYLWSFHPTSKLQSTNQEEVALKDEAVVKENKREPATTEKRRRKRKNVYRGIRKRPWGKWASEIRDPRKGTRVWLGTFNTAEEAAMAYDVAAKRIRGDKAKLNFPDLIPPPATPALTSSPPSDDQPPAKKLCLLSQSELTQLSFPDECIGFGNGGQFQNHSYGFEPGYDLKQQISSLESFLELDGGTTGEQPSQLDESVDVWMIDDVISSYA

SEQ ID NO: 1502 - protein, 171 aa, Brassica napus
MAAALSSKFLKGITSLHSLRSTRLASASVYQHGMMRYSSTVPSDSDTHDDFKPTQKVPSGSTDSLKDIVENDVKENPVMIYMKGVPEAPQCGFSSLAVRVLQQYNVPIGARNILEDQELKNAVKSFSHWPTFPQIFIKGEFIGGSDIILNMHKEGELEEKLKDVSGNQKSQ

SEQ ID NO: 1503 - protein, 225 aa, Brassica napus
RENLDNLGFTLEPGSSENPVLSLPTDSTNLSERSSASPELNSRIPLSLLHADHMINSGTCVESKQELVPYQSDITADEQQQPSPDSRAIVPVPPLEPEALAIVPLNEKPKRTELSQRRTRRPFSVSEVEALVHAVEELGTGRWRDVKLRSFDDASHRTYVDLKDKWKTLVHTASISPQQRRGQPVPQELLDRVLAAHRYWSQHQVKQNGKHQAAAMMVVESGLSM

SEQ ID NO: 1504 - protein, 337 aa, Brassica napus
  misc_feature (168)..(168): Xaa can be any naturally occurring amino acid
  misc_feature (314)..(314): Xaa can be any naturally occurring amino acid
  unsure (1)..(337): unsure at all Xaa locations
RLQRPGGSPLTRIFQVIVAAFRKVSVKVPEDKSLLFETADDESNITGSRKLEHTDNLMFFDKAAVESHSDSIKDGEVNPWRLCSVTQVEELKSIITLLPVWASGIVFATVYSQMNTMFVLQGNAMDQHMGKNFEVPSASLSLFDTVSVLFWTPVYDQFIVPFARKFTXRQERGFTQLQRMGIGLVISIFAMVTAGVLEVVRLDYVKSHNAYDDKKIPMSIFWQIPQYLLIGCAEVFTFIGQLEFFYDQAPDAMRSLCSALSLTTVALGNYLSTVLVTVVMKLTKKNGKPGWIPDNLNRGHLDYFFYLLAVLSFXLNFLVYLWISKRYKYKKAIGRAH

SEQ ID NO: 1505 - protein, 241 aa, Brassica napus
KSQIASSNFEGVVQIWDVARSQLVTEMKEHKKRVWSIDISSADPTLLASGSDDGTVKLWSINQGVSTGTIKTKANICCVQFPSDSGRCLAFGSADHKVYYYDLRNPKIPLSTMVGHSKTVSNVKFVDSSTLVSSSTDNTLKLWDLSMSASGVNETPLHSFSGHTNLKNFVGLSVSDGYIATGSETNEVFVYHKAFPMPVMSYMFSNTDSMSGLEIEDASQFISSICWRGQSSTLVAANSKG

SEQ ID NO: 1506 - protein, 179 aa, Brassica napus
MSYGQDRLRGTVKWFDTQKGFGFITPDNGGDDLFVHQSSIRSEGFRSLAAEEPVEFQVENDNNGRPKAIEVSGPDGAPVQGSSGGGSSGGRGGFGGGGRGGGGGRGFGGGRGGGGRGGSDCYKCGEPGHIARDCSEGGGGYGGGRGGGGHGGGGGGGGGSCYSCGESGHFARDCTSGGR

SEQ ID NO: 1507 - protein, 351 aa, Brassica napus
PRVRPRVRKVSGGVVGIEDFEVLKVVGQGAFGKVYQVRKKESSEIYAMKVMRKDKIMEKNHAEYMKAERDILTKIDHPFIVQLKYSFQTKYRLYLVLDFINGGHLFFQLYHQGLFREDLARVYTAEIVSAVSHLHENGIMHRDLKPENILMDTDGHVMLTDFGLAKEFEENKRSNSMCGTTEYMAPEIVRGKGHDKAADWWSVGILLYEMLTGKPPFLGSKGKIQQKIVKDKIKLPQFLSNEAHALLKGLLQKEPERRLGSGPSGAEEIKGHKWFKGMNWKKLEAREVKPSFKPEVSGRQCIANFDKCWTDMSVLDSPASSPSSDPKANPFTNFTYVRPPHSFLNQTTSTS

SEQ ID NO: 1508 - protein, 245 aa, Brassica napus
  misc_feature (213)..(213): Xaa can be any naturally occurring amino acid
  unsure (1)..(245): unsure at all Xaa locations
SSETTFGINVDPLCKPEDVSYAFMPNMSYFEFITMDGEKRDVVDLHDVKVGCTYEPVVTNFAGLYRMRVGDVLLVTGFYNNAPQFRFVRRENVVLSIDSDKTNEEDLFKAVSQAKLVLDSSDLFLEDFTSYADTSTFPGHYVLYVEVKAKGGNNHLELNEEVFSKCCSVMEDSLDNVYKRCRFKDGSVGPLEIRVVDKGTFESLMDFFINQGXASTGQYKTPRCIKSGKALELMEDRVVAKFFSS

SEQ ID NO: 1509 - protein, 149 aa, Brassica napus
  misc_feature (143)..(143): Xaa can be any naturally occurring amino acid
  unsure (1)..(149): unsure at all Xaa locations
MSFFIEDSGLIVTQLLYQMAVLITLLRWIFTWILRYRSRSTSSSSSSTPPISSQTIKESLAVTTFRDAADRSPELISDTCAVCLGDLEDGDEVRELRNCSHVFHRECIDRWLDYECCGGDDNDGEEDNHRTCPLCRTPLLAAXTSSCAD

SEQ ID NO: 1510 - protein, 164 aa, Brassica napus
MQEQTTSSLPASSLPSSSERSSSSAPHLEIKEGIESDEKIRRVPEFGGEATGKEISGSATGQDQTQATVGGEGQRKRGRTPAEKETKRLKRLLRNRVSAQQARERKKAYLGELENRVKDLENRNSELEERLSTLQNENQMLRQILKNTTGNKRGSGGSNADASL

SEQ ID NO: 1511 - protein, 232 aa, Brassica napus
KDKTALDVQFPKPVCVDGDDLKSPSCVNMIPNGSLARHGNHTNLVRDDDEKLYSSRKCSNKFTSYKSPAIRRIRKSKYSKQVSKDFGHYRADVGIKALYRKRKSCYGYNTWKHETIYKRRRSPDRGSVVTSDGGLSNGSVSKLPEKRKSVKLSIKSFRIPELFIEVPETATVGSLKRTVMEAVSVLLSGGIRVGVLVHGKKVRDDKRTLSQTGISSEENLSNLGFTLEPGGT

SEQ ID NO: 1512 - protein, 202 aa, Brassica napus
MAKQILYVLFLFLLSTTMELTTASSAAPAGTSKRAVNFIQASCKSTTYPTVCFSSLSGYANSIQTSPQRLAETALTVTVNQAQSTKVFVSRLARFKGLKKREVQAIRDCIEEISDTVDRLTKSVQEVKMCGRAKGRDQFWFHMSNAQTWTSAALTNAITCSDGFARRIMDGRIKNSVRARIVNLGRGTSNALALINAFAKKY

SEQ ID NO: 1513 - protein, 653 aa, Brassica napus
MSIEMQSHQAEAAPAEEPLSQWLINMPEPPTMWQEFVGYIRTNVLSKKRNKMKKKPSNQVYSYLKSVFPILIWGRQYKLNMFKKDLMAGLTLASLCIPQSIGYANLAGLDPEYGLYTSVVPPLIYSMMGSSRELAIGPVAVVSLLLSSMVSDLQDPVTDPIAYRKIVFTATFFAGAFQAIFGLFRLGFLMDFLSHAALVGFMAGAAIVIGLQQLKGLFGLSHFTSKTDVVSVLSSVFHSLHHPWQPLNFVIGSSFLIFILLARFLGKRNKKLFWIPAMAPLISVILATLIVYLTNAETRGVKIVKNIKPGFNRPSVNQLEFNGPHLGQVAKIGIICAIIALTEAIAVGRSFATIKGYRLDGNKEMMAMGFSNIAGSLTSCYVATGSFSRTAVNFSAGCETVVSNIVMAITVMVSLEVLTRFLYFTPTAILASIILSALPGLIDISGALHIWKLDKLDFLILVAAFLGVLFASVEIGLLLAVGISFTRIILSSIRPTVEALGRLSKTDIFGDINQYPMATKTQGLLTLRISSPLLCFANANFIRDRILNSIQKVEEGEDDEQEVKRAKVLQVVILDMSCVMGLDTSGVVALEELHQELASNDTQLVIASPRWRVFHKLKRAKLEEKVKKENIFMTVGEAVDFYVRARTTSHDMC

SEQ ID NO: 1514 - protein, 142 aa, Brassica napus
  misc_feature (141)..(141): Xaa can be any naturally occurring amino acid
  unsure (1)..(142): unsure at all Xaa locations
MEVQGKPQAEGEWSTGFCDFCSDCSICCLTCWCPCVTVGRIVEIVDKGSTSCCAAGALYMLLTWFTGCGFIYSCHYRTKMRKQYNLKGSECGDCFKHFCCERCALTQAYRELTNRGFGVALGWQGNAGHQNAGVAWGAPVXQ

SEQ ID NO: 1515 - protein, 175 aa, Brassica napus
MAVTAFNPLKLASSPRDSFPSISSSTSYSVSLISFGIRNSVGSPLKRCLKQTCSVRAMSSSSSSSFGSGMEESVKKTVADNTVVVYSKTWCPYCSEVKTLFKRLGVQPLVVELDELGPQGTQLQSVLETLTGQRTVPNVFVGGKHVGGCTDTVNLNRKGELELMLAEANAKTDQT

SEQ ID NO: 1516 - protein, 206 aa, Brassica napus
MASSVSDQSVQPQDVCVVGVARTPMGDFLGSLSSITAPRLGSIAIEAALKSANVEPALVEEVFFGNVLTANLGQAPARQAALGAGIPYSVICTTVNKVCAAGMKAVMLAAQSIQLGLNDVVVAGGMESMSNVPKYLPNARRGSRLGHDTVVDGMTKDGLWDVYNDFGMGVCGEICADQYRITREEQDAYAIQSLERGIAAQNARLS

SEQ ID NO: 1517 - protein, 233 aa, Brassica napus
  misc_feature (194)..(194): Xaa can be any naturally occurring amino acid
  unsure (1)..(233): unsure at all Xaa locations
MAVDSPLQSRTTSEKDAKALSFIEEMTRNSDSVQEKVLGEILSRNSGTEYLKRFGLNGSTDRKTFKTKVPVVTYEDLKPEIQRISNGDRSPILSSHPITEFLTSSGTSAGERKLMPTIDEDLDRRQLLYSLLMPVMNLYVPGLDKGKGLYFLFVKSESKTPGGLPARPVLTSYYKSDHFKRRPYDPYNVYTSPXEAILCSDSSQSMYAQMLCGLVMRHDVLRLGAVFASGLLA

SEQ ID NO: 1518 - protein, 506 aa, Brassica napus
  misc_feature (287)..(287): Xaa can be any naturally occurring amino acid
  unsure (1)..(506): unsure at all Xaa locations
EQMLNQHSNWRGRAVLVQIVNPARGKGIDIDEIRGEIEGSCKRINEDFGKPGYQPIVYIDTPVSVNEIIAYYHIAECVVVTAVRDGMNLTPYEYIVCRQGLLGSESDFNGPKKSMLVASEFIGCSPSLSGAIRVNPWNVEATGEALNEALSMRDPEKQLRHEKHFRYVSTHDVAFWSRSFLQDLERICVDHFKKRCWGMGISFGFRVVALDPNFRKLSIPCIVSDYKRAKSRAILLDYDGTLMPQNSINKAPSQEVLKFLNELCEDKKNSIFIVSGRGRESLGNGFXPCENIGIAAEHGYFLKWPGTKEWETCGQSCDFGWMQIVEPVMKQYTEATDGSSIEIKDSALVWQYRDADSGFGSLQAKEMLEHLESVLANEPVAVKSGHYIVEVKPQGVSKGSVAEKIFSSMDEKGKPVDFVLCIGDDRSDEDMFEAIGNAMSKRLLCDNALVFACTGGQKPSKAKYYLDDTMEVTSMLESLAEASEASNFSMRELDEALLIFETRMLK

SEQ ID NO: 1519 - protein, 246 aa, Brassica napus
MDIVRPTVEIPPRKLLSSSKSFSGEASPRSSPRKHNWNNKSNKTPTSEQEEDSFNEDNTNTNTNNNKDAKEYCYDSDTDDPYASDHFRMFEFKIRRCTRSRSHDWTDCPFAHPGEKARRRDPRRFQYAGEVCPEFRRGGDCSRGDDCEFAHGVFECWLHPIRYRTEACKDGKHCKRKVCFFAHSPRQLRVLPPENDSGGSSASTSQAKNQNPCCLFCSGSPTSTLLGNWSHLSRSPSLSPPFVSSS

SEQ ID NO: 1520 - protein, 196 aa, Brassica napus
  misc_feature (134)..(134): Xaa can be any naturally occurring amino acid
  misc_feature (171)..(171): Xaa can be any naturally occurring amino acid
  unsure (1)..(196): unsure at all Xaa locations
RPTRPGRENEIRPFGNPRGSDSANLDSAAEILIRSGRTPEEALMILVPEAYKNHPTLSIKYPEVLDFYDYYKGQMEAWDGPALLLFSDGKTVGACLDRNGLRPARYWKTSDNFVYVASEVGVVPVDEAKVTMKXGRLGPGMMIAADLVNGQVYENTEVKKRVSSLNPYGRXIKENLRFLKPVNFKSSTVMENERIL

SEQ ID NO: 1521 - protein, 197 aa, Brassica napus
RNLNKIRQEIDRFKATDAGRLRAEYNRLIEGLALRGDLSGTDQWLANPALPNDILKEAVPGNIRRAEHFVHVLRRLLQYLGGRLDTENVEKESPVSFVSSLNSQAGIEQKTLKFCYDRLHSLMMTLEITDTDEFLPIQTICDFATLVGTYARGFSIIIEPYDERMPHIPDPILQLSCHDASLAIKPGVDRFQSVVIT

SEQ ID NO: 1522 - protein, 261 aa, Brassica napus
  misc_feature (224)..(224): Xaa can be any naturally occurring amino acid
  misc_feature (229)..(229): Xaa can be any naturally occurring amino acid
  misc_feature (237)..(237): Xaa can be any naturally occurring amino acid
  unsure (1)..(261): unsure at all Xaa locations
VSEWMRPDSIVKENGSDSRPCLFSGAANPSDVCQGRLGDCWFLSAVAVLTEVSQISEVIITPEYNEEGIYTVRFCIQGEWVPVVIDDWIPCESPGKPAFATSKKFNELWVSIVEKAYAKLHGSYEALEGGLVQDALVDLTGGAGEEIDLRSAQAQIDLASGRLWSQLVRFKQEGFLLGAGSPSGSDVHVSSSGIVQGHAYSVLQVREVDGHRLVQIRNPWANEXEWNGXWSDSSPEXSDRMSTAEACPQSTKFFWMFGRFN

SEQ ID NO: 1523 - protein, 303 aa, Brassica napus
  misc_feature (183)..(183): Xaa can be any naturally occurring amino acid
  misc_feature (220)..(220): Xaa can be any naturally occurring amino acid
  unsure (1)..(303): unsure at all Xaa locations
DKQLQLPWWGLVLACAIAMFFTLPIGVIQATTNQQMGLNVITELIIGYLYPGRPLANVSFKTYGYRRVAQALYFVGDFKLGHYMKIPPRSMFIVQLVATVVSSSVCFGTTWWLISSVENICNTDLLPVGSPWTCPGDEVFYNASIIWGVIGPRRMFTKEGIYPGMNWFFLIGILAPVPFWYLXSEKFPEKKWLTLIHIPVIFAAGSPMPHAKAVPYWSWXLIVGVVFNYYIFRRFKSWWARHNYILSAALDAGTAIMGVLIFFAFQNNDISIPDWWGLENSDHCPLAHCPTAKGVVIEGCPVF

SEQ ID NO: 1524 - protein, 265 aa, Brassica napus
  misc_feature (7)..(7): Xaa can be any naturally occurring amino acid
  misc_feature (20)..(20): Xaa can be any naturally occurring amino acid
  misc_feature (23)..(23): Xaa can be any naturally occurring amino acid
  unsure (1)..(265): unsure at all Xaa locations
ACANVRXQLDSQPEEIDNLXKGXRMQLEIELHALEREKDKASKARLVEVRKELDDLRDKLQPLTMKYKKEKERMDEIRRLKQKREELMFAWQEAERRYDLARAADLRYGAIQEVESAIAQLEGTSDENMMLTENVGPEHIAEVVSRWTGIPVTRLGQNEKDRLMGLADRLHKRVVGQDQAVSAVAEAILRSRAGLGRPQQPTGSFWFLGPTGVGKTELAKALAEQLFDDENLLVRIDMSEYMEQHSVSRLMGAPPGYVGHEEGGQ

SEQ ID NO: 1525 - protein, 197 aa, Brassica napus
  misc_feature (175)..(175): Xaa can be any naturally occurring amino acid
  unsure (1)..(197): unsure at all Xaa locations
SNRRLQKPPWMTYPAAFYSDSAEKKGKVTPLQETRMRDRFTLYARGGEGGNGCSSLRRSRTDRFGKPDGGNGGRGGDVILECTHAVWDFSGLQPHVKGGKAGHGTSKNRIGNRGEDKVLQVPIGTVIHLQEGELPSQIEVGSPKSSDPWDLPGTLVDDPASDENSDVDQDSSVQXNPEEESVAMHVDMEKETEFDER

SEQ ID NO: 1526 - protein, 186 aa, Brassica napus
MTRVYVGNLDPRVTERELEDEFRIFGVLRNVWVARRPPGYAFLEFDDERDALDAIRALDGKNGWRVELSHKDKGGRGGGGRRGGIEDSKCYECGEPGHFARECRRGRGGYGRRRSPSPRRRSPDYGYGRRSISPRGRRSPPRRRSVSPPPPRRYSRSPPPYRSSRRDSPRRRDSPYGRRSPYANGG

SEQ ID NO: 1527 - protein, 311 aa, Brassica napus
MQPIFNAIIQNDIPAFLGLVEEKESWLEERNVDQDNSTVLHMAAKHGHGELVSKIIELKPSLIFSRNAHGNTPLHLAALLGDVNTVRTLLEFGSETCSARNNSCQTPLHLVCRSISTESARLFAEKTHSVSLDELKFSISSGSTFVTRIVLERFPYLARELAWVVEDSLTTLLHHACDRGNLELISILLGLDQGLEKARNTNGLSPLHLAVLRGPVVVLEEFLEKAPLSFSSLTRSKETVFHLAARNKNVDAFIFMAERLSINNQKLMREVDVNGNTVLHIAVSMSCGARVSSFLCRCQLYNKSKNHQILF

SEQ ID NO: 1528 - protein, 252 aa, Brassica napus
MGSLRGDMEEPIHQSLPRGNSLYSLKLHEVQTHWGSSSKPLGSMNLDELLKSVLSAEANHPPEEGTEDGITRQGSLTLPRGLSRKTVNDVWRDIQHDENGCSSNPNKQPTLGEITLEDLLMKAGVVTESMTVPQNVVNVASNGQWAQYPQQQHQGFMPYPVSDMQEMVPPTALMMGGLSETQQVHGRKRVASSEGEFVERIVERKQKRMIKNRESASRSRARKQAYTQELEIKVSSLEEENQKLRRLMEVEK

SEQ ID NO: 1529 - protein, 138 aa, Brassica napus
MGERVKGTVKWFNVTKGFGFISPDDGGEDLFVHQSAIKSDGYRSLNENDAVEFEVITGDDGRTKASDVTAPGGGALSGGSRPGDGGGDRGGRGGYGGGGGGGGGGGGGYGGGGGGYGGGGGGYGGGGGGGGCYKCGEE

SEQ ID NO: 1530 - protein, 235 aa, Brassica napus
  misc_feature (203)..(203): Xaa can be any naturally occurring amino acid
  misc_feature (214)..(214): Xaa can be any naturally occurring amino acid
  unsure (1)..(235): unsure at all Xaa locations
LRASLMAASSVLDGDIDIEKGGMILQSSENQDPSPTPSPSATATAPAWVLSNSGKRMDQAGKKKYVKQVTGRHNDTELHLAAQRGDLAAVQQILKDINSQMEGTLSGEEFDAEVAEIRASIVNEVNELGETALFTAADKGHLDVVKELLKYSSRESIAKKNRSGYDPLHIAAIQGHHAMVEVLLDHDATLSHTLGPSNATPLXSAAMRGHTEVXNQLLSKAGNLLDISRSNHKNA

SEQ ID NO: 1531 - protein, 197 aa, Brassica napus
SLKQVSPTNSVDRAPAFSIEFNNGEFTAAEMKKIMANDKLAEMAISDPKRVKRILANRQSAARSKERKMRYIVELEHKVQTLQTEATTLSAQLTLLQRDMMGLTNQNNELKFRLQAMEQQARLRDALNEALNGEVQRLKLAIGESSHNNEADRSKMQSLNAEMFQQLNISQLIQQQPQSQSQSQQNGTMSTKPESNE

SEQ ID NO: 1532 - protein, 191 aa, Brassica napus
SEPEAKRWKGESETNGGNGNGSKTVREPRIVVQTTSDIDILDDGYRWRKYGQKVVKGNPNPRSYYKCTTNGCPVRKHVERASHDMRAVITTYEGKHNHDVPAARGSGYTTNRLTQDPSSAPIRPNAVAGHSSYTTSSQAPYTLQMLHQNNNTSAGSFGYATNNNNFLGGGFSRAKEEPNDESSSFFDSFLS

SEQ ID NO: 1533 - protein, 170 aa, Brassica napus
RDLAAAARGEGDETEGERASCSHGGGSCGSDDEDGANRDGSRKKLRLSKEEALVLEETFKEHSTLNPKQKLALAKQLNLRTRQVEVWFQNRRARTKLKQTEVDCEYLKRCCDNLTDENRRLQKEVSGLRALKLSPNLYMQMTPTTLTMCPSCERVSASSSAVAAPPPPSS

SEQ ID NO: 1534 - protein, 209 aa, Brassica napus
MGKKCDLCEGVARMYCDSDQASLCWDCDGKVHGANFLVAKHTRCLLCSACQSPTPWKAAGLRLGPTFSVCDSCVALKTAAGGRDGVSSTERILTENPGQKINGFDNDDGDGAESYDDDEDEDEDEEYSDEDENEEDEAENQVVPWAAAAAAQPPFVMSSSSADGGGGGPVAKRTRDCSDVRICLFLVQFCLNNLKFFPFWFFLIMFFFF

SEQ ID NO: 1535 - protein, 356 aa, Brassica napus
MSLLTDLVNLDLSDNTEKIIAEYIWVGGSGMDMRSKARTLPGPVTDPSKLPKWNYDGSSTGQAPGEDSEVILYPQAIFKDPFRRGNNILVMCDTYTPAGEPIPTNKRHAAAQIFSNPDVVAEVPWYGIEQEYTLLQKDVKWPVGWPIGGFPGPQGPYYCSVGADKSFGRDIVDAHYKACLYAGINISGINGEVMPGQWEFQVGPSVGISAADEVWIARYILERITEIAGVVVSFDPKPIPGDWNGAGAHTNYSTKSMREEGGYEIIKKAIDKLGLRHKEHISAYGEGNERRLTGHHETADINTFKWGVANRGASIRVGRDTEKEGKGYFEDRRPASNMDPYTVTSMIAETTLLWNP

SEQ ID NO: 1536 - protein, 166 aa, Brassica napus
MESEGKIVFTEEQEALVLKSWSVMKKNSADLGLKLFIKIFEIAPTAKKLFSFLRDSPIPAEQNPKLKPHAMSVFVMCCESAAQLRKTGKVTVKETTLKRLGANHSKYGVVDEHFEVTKYALLETIKEAVPEMWSPEMKSAWGQAYDHLVAAIKAEMQAFSLIYILI

SEQ ID NO: 1537 - protein, 270 aa, Brassica napus
FRSGFPGRPTRPDDFTEIVSKIACLDHENVTKLDGYCCEHGQHLVIYEFYRNGSLHDFLHLSEEESKPLIWNPRVKIALGTARALEYLHEVCSPSIVHKNIKSANILLDSELNPHLSDAGLASFLPTANELLNQNDEGYNAPEVSMSDQYSLKSDVYSFGVVMLELLTGRKPFDSTRSRSEQSLVRWATPQLHDIDALGKMVDPALKGLYPVKSLSRFADVIALCVQPEPEFRPPMSEVVQALVVLVQRANMSKRTVGVGSGSSGANDYM

SEQ ID NO: 1538 - protein, 154 aa, Brassica napus
  misc_feature (100)..(100): Xaa can be any naturally occurring amino acid
  unsure (1)..(154): unsure at all Xaa locations
MDFGRFPIISILEDMLEVPEEHNDKSRNNPSRVYMRDAKAMAATPADVIEHQNAYVFVVDMPGIKGDEIKVQVENENVLVVSGERQRENKESEGVKFVRXERRMGKFMRKFQLPENADLEKISAVCHDGVLKVTVEKLPPPEPKKPKTIQVQVA

SEQ ID NO: 1539 - protein, 134 aa, Brassica napus
  misc_feature (6)..(6): Xaa can be any naturally occurring amino acid
  misc_feature (133)..(133): Xaa can be any naturally occurring amino acid
  unsure (1)..(134): unsure at all Xaa locations
MEAQHXNAKPQAEGEWSTGFCDCFSDCKNCCITCWCPGITFGQVAEIVDQGSTTCGTAGALYTLISCFTGCGCIYSCFYRGKMRAQYNIGGNDCGDCLKHFFCELCALTQQYRELKNRGFNMDLGWAGNVQRXQ

SEQ ID NO: 1540 - protein, 714 aa, Brassica napus
GGVGGSGSGGGDGGGSGSGSQQHHDGSETDKKKKRYHRHTAQQIQRLESSFKECPHPDDKQRNQLSRELGLAPRQIKFWFQNRRTQLKAQHERADNNALKAENDKIRCENIAIREAIKHAICPNCGSPPVNEDPYFDEHKLRIENAHLRDDLERMSTVASKYMGRPISSHLSTLHPLHISPLDLSMTGPSLDFDLLPGSSMHSQPNNNLATISDMDKPLMNDIALTAMEELLRLFNTNEPLWTRGDGGREILDLGSYENLFPRSGNRGKNHNVRTEASRSSGIVFMNAMTLVDMFMDGVKWGELFPCIVASSKTLAVVSSGMGGTHEGALHLMYEEMAVLSPLVATREFCELRYCQMIEQGSWIVVNVSYHLPQFVSQSSHSYKFPSGCLIQDMPSGYSKVTWVEHVETEEKEQTHELYREVIHKGIAFGAERWVTTLQRMCERFASLLAPSTSSRDLGGVIPSPEGKRSMMRLAHRMVSNYCLSVSRSNNTHSTVVAELNEVGVRVTAHKSPEPNGTILCAATTFWLPNSPQSVFNFLKDERTRPQWDVLSNRNAVQEVAHIANGSHPGCCISVLRASNASQSQSNNMLILQETSIDSSGALVVYSPVDLPALNIAMSGDDTSYIPLLSSGFAISPDGNHSSSTTEQGGGASTSSGFGGGGSLITVGFQIMVSNLPSAKLNMESVETVNNLIGTTVHQIKTGLNNCPSGSTTA

SEQ ID NO: 1541 - protein, 178 aa, Brassica napus
MAVSAFNPLKLASSSSLDSIPSISYSTSYSLFLISVGIRKSVGSPFKRCLKQSYSSVRAMSSSAASSSFGSRMEESVRKTVTENIVVVYSKTWCSYCTEVKTLFKRLGVQPLVIELDELGPQGPQLQKVLERLTGQRTVPNVFVGGKHIGGCTDTVNLNRKGDLELMLAEANANTDQT

SEQ ID NO: 1542 - protein, 165 aa, Brassica napus
MSRVYVGNLDPRVTERELEDEFRVYGVIKSVWVAHRPPGYAFLDFEDPRDASDAIRDLDGKNGWRVEQSHNRGDRGGGRGGDRGGDRGGSDLKCYECGEPGHFARECRNRGGTGRRRSRSRSRSPRYRRSPSYGRRSYSPRARSPPPPPPRRRSPSPPPARGRSY

SEQ ID NO: 1543 - protein, 211 aa, Brassica napus
MGSRIQEEKELEPDMEKGWATDPVSPAGSTVADLSSPTPTPRKTLVLSNSGKALMVSNSSKSLGLSNSGKRFDPTGKKKYVKQVTGRHNDTELHLAAQRGDLAAVKQILSDIDSQITGTISGSDFDEEVAQIMTSVVNEVNELGETPLFTAAEKGNIDVVKELLCYTTKESLMQKNLSGFDALHIACSQGHRAIVQLLLEHEPLLSKTVAQ

SEQ ID NO: 1544 - protein, 79 aa, Brassica napus
MGKKNCELCDGVARMFCESDQASLCWNCDGKVHGANFLVAKHTRCLLCSVCQSPTPWKASGLRFGPTVSVCESCLALVP

SEQ ID NO: 1545 - protein, 226 aa, Brassica napus
  misc_feature (154)..(154): Xaa can be any naturally occurring amino acid
  misc_feature (160)..(160): Xaa can be any naturally occurring amino acid
  misc_feature (167)..(167): Xaa can be any naturally occurring amino acid
  misc_feature (182)..(182): Xaa can be any naturally occurring amino acid
  misc_feature (187)..(187): Xaa can be any naturally occurring amino acid
  misc_feature (195)..(195): Xaa can be any naturally occurring amino acid
  misc_feature (199)..(199): Xaa can be any naturally occurring amino acid
  misc_feature (204)..(205): Xaa can be any naturally occurring amino acid
  misc_feature (214)..(214): Xaa can be any naturally occurring amino acid
  misc_feature (217)..(217): Xaa can be any naturally occurring amino acid
  misc_feature (223)..(223): Xaa can be any naturally occurring amino acid
  unsure (1)..(226): unsure at all Xaa locations
MDKRGGICSGGSGSSGETEVRKGPWTMEEDLILINYIANHGDGVWNTLAKSAGLKRTGKSCRLRWLNYLRPDVRRGNITPEEQLIIMELHAKWGNRWSKIAKHLPGRTDNEIKNFWRTRIQKYIKQTDVAATATSSVGSHHSSEINDHAASTSXHKWSFXAQDQAMXTYSPTTTSYHIPNMXFNYGXYSAPGGSXDTAXTTANXXRTDWTVDDXTGXNFWGDXDGI

SEQ ID NO: 1546 - protein, 284 aa, Brassica napus
  misc_feature (64)..(64): Xaa can be any naturally occurring amino acid
  misc_feature (66)..(66): Xaa can be any naturally occurring amino acid
  misc_feature (80)..(81): Xaa can be any naturally occurring amino acid
  misc_feature (85)..(85): Xaa can be any naturally occurring amino acid
  misc_feature (87)..(87): Xaa can be any naturally occurring amino acid
  misc_feature (91)..(91): Xaa can be any naturally occurring amino acid
  misc_feature (93)..(93): Xaa can be any naturally occurring amino acid
  misc_feature (95)..(95): Xaa can be any naturally occurring amino acid
  misc_feature (99)..(99): Xaa can be any naturally occurring amino acid
  misc_feature (101)..(102): Xaa can be any naturally occurring amino acid
  misc_feature (105)..(105): Xaa can be any naturally occurring amino acid
  misc_feature (111)..(112): Xaa can be any naturally occurring amino acid
  misc_feature (114)..(115): Xaa can be any naturally occurring amino acid
  misc_feature (118)..(121): Xaa can be any naturally occurring amino acid
  misc_feature (123)..(123): Xaa can be any naturally occurring amino acid
  misc_feature (125)..(125): Xaa can be any naturally occurring amino acid
  misc_feature (128)..(132): Xaa can be any naturally occurring amino acid
  misc_feature (137)..(137): Xaa can be any naturally occurring amino acid
  misc_feature (140)..(141): Xaa can be any naturally occurring amino acid
  misc_feature (145)..(146): Xaa can be any naturally occurring amino acid
  misc_feature (148)..(148): Xaa can be any naturally occurring amino acid
  misc_feature (152)..(153): Xaa can be any naturally occurring amino acid
  misc_feature (167)..(167): Xaa can be any naturally occurring amino acid
  unsure (1)..(284): unsure at all Xaa locations
MSALADLINLDLSDSSEKIIAEYIWIGGSGLDMRSKARTLPGPVKDPSELPKWNYDGSSTGQAXPXDDSEVIIYPQAIFXXSPPXPXGKHXLXMXDAHXPXXKKXKPTTPXXLXXPNXXXXPXSXPAXXXXXPPPSXSHXXSALXXDXRTGXXLVRPPPRLPCPPGXPYPSPPGADKSFGRDIVDAHYKACLYAGINISGINGEVMPGQWEFQVGPAVGISAGDEIWVARFILERITEIAGVVVSFDPKPIPGDWNGAGAHCNYSTIYVAHSPPSCFHFGSIHW

SEQ ID NO: 1547 - protein, 172 aa, Brassica napus
  misc_feature (141)..(141): Xaa can be any naturally occurring amino acid
  unsure (1)..(172): unsure at all Xaa locations
MEFVRFPIVSILEDMLEVPEEHNEKSRNNPSRAYMRDAKAMAATPADVIEHPSSYVFVVDMPGIKGEDIKVQVENENVLVVSGERQRENKENEGVKYVRMERRMGKFMRKFQLPENADLEKISAVCNDGVLKVTVQKLPPXPEPKKTKRLSQSQVALSFWIFLHDMVGLISV

SEQ ID NO: 1548 - protein, 147 aa, Brassica napus
MGRTPCCDKKGLKKGPWTAEEDEILVEYIKKNSHGSWRTLPKNAGLLRCGKSCRLRWTNYLRPDIKRGPFTPEEEKLVVQLHAILGNRWAAIAAQLPGRTDNEIKNLWNTHLKKRLLSMGLDPKTHEPLPSFGLAIQAPASPTTRHM

SEQ ID NO: 1549 - protein, 145 aa, Brassica napus
TSLLFVGEVESRVGHRPRRVEVTAVHILLILAVVLSDLSISAGAEKSVAAFVQNAILSNKIVIFSKSYCPYCLRSKRIFRELKEQPFVVELDLREDGDKIQYELLEFVGRRTVPQVFVNGKHIGGSDDLADSVENGQLQKLLAAS

SEQ ID NO: 1550 - protein, 97 aa, Brassica napus
KGCGCLLVVDEGHRLIGTFTDGDLRRTLKASGEAIFKLTVGEMCNRKPRTIGPETMAVEAMKKMESPPSPVQFLPVVNEDNTLIGIVTLHGLVSAGL

SEQ ID NO: 1551 - protein, 274 aa, Brassica napus
MMMRKEDLGLSLSLGLSQDHTPLQSQNPNSSISNNLHRFPWNQTFASTSDLGKIDVNSLPRTVDCEEEPGVSSPNSTISSTISGGKRSEREGISEHDEITPDRGYSRGNSDEEEDGGETSRKKLRLSKDQSAFLEETFKEHNTLNPKQKLALAKKLSLTARQVEVWFRSGRARTKLKQTEVDCEYLKRCVEKLTEENRRLQKEAMELRTLKLSPQFYGQMTPPTTLIMCPSCERVAGPASNHQHNHRPVPVNPWVACAGQVTHGLNFEALRPRS

SEQ ID NO: 1552 - protein, 175 aa, Brassica napus
MAVTAFNPLKLASSPRDSFPSISSSTSYSVSLISFGIRNSVGSPLKKCLKQTCSVRAMSSSSSSSFESGMEESVKKTVADNTVVVYSKTWCPYCSEVKTLFKRLGVQPLVVELDELGPQGTQLQKVLETLTGQRTVPSVFVGGKHIGGCTDTVNLNRKGELELMLAEANGKTDQT

SEQ ID NO: 1553 - protein, 718 aa, Brassica napus
MSFVGGVGGSGSGGGDGGGSGSGSQQHHDGSETDRKKKRYHRHTAQQIQRLESSFKECPHPDDKQRNQLSRELGLAPRQIKFWFQNRRTQLKAQHERADNNALKAENDKIRCENIAIREAIKHAICPNCGGPPVNEDPYFDEHKLRIENAHLRDELERMSTVASKYMGRPISSHLSTLHPLHISPLDLSMTGPSLDFDLLPGSSMHSHPNNNLATISEMDKPLMNDIALTAMEELLRLFNTNEPLWTRADGGREILDLGSYENLFPRSGNRGKNHNVRTEASRSSGIVFMNAMTLVDMFMDGVKWGELFPCIVASSKTLAVVSSGMGGTHEGALHLMYEEMAVLSPLVATREFCELRYCQMIEQGSWIVVNVSYHLPQFVSQSSHSYKFPSGCLIQDMPNGYSKVTWVEHVETEEKEQTHELYREVIHKGIAFGAERWVTTLQRMCERFASLLAPSTSSRDLGGVIPSPEGKRSMMRLAHRMVSNYCISVSRSNNTHSTVVAELNEVGVRVTAHKSPEPNGTILCAATTVWLPNSPQNVFNFLKDERIRPQWDVLSNRNAVQEVAHIANGSHPGCCISVLRASNASQSQSNNMLILQETSIDSSGALVVYSPVDLPALNIAMSGDDTSYIPLLSSGFAISPDGNHSSSTTEQGGGASTSSGFGGGGSLITVGFQIMVSNLPSAKLNMESVETVNNLIGTTVHQIKTGLNNCPSGSTTA

SEQ ID NO: 1554 - protein, 105 aa, Brassica napus
MCGILAVLGCSDDSQAKRVRVLELSRRLRHRGPDWSGIYQNGFNYLAHQRLAIIDPASGDQPLFNEDKSIVVTVNGEIYNHEELRKGLKNHKFHTGSDCDVIAHL

SEQ ID NO: 1555 - protein, 377 aa, Brassica napus
  misc_feature (358)..(358): Xaa can be any naturally occurring amino acid
  unsure (1)..(377): unsure at all Xaa locations
VPKDYIWPTDSANYLKPASTFVADAHRAGLEVYASGFANDLRTSFNYSYDPSAEYLQFVDNGQFSVDGFITDFPPTASQAISCLSHQQGNLPKAGHALVITHNGASGDYPGCTDLAYQKAVDDGADVIDCSVQMSKDGMAFCHDSADLTATTTAMTTFMSRATSVPEIQPTNGIFSFDLTWAEIQSLKPQILSPFSTSGGFQRNPANKNAGKFMTLVDFLEFGKAKAVTGVLINIENAAYLASKKGLGIVDTVQSAITKSTLDKQLTQKVLIQSDDSSVLSSFEAVPPYTRVLSIEKEIGDAPKPSVDEIKKHAEAVNLKRSSLDTISESFATGETNVVEEMHKGNISVYVSVLRTSXLSIAFDYFSDPTVELATFI

SEQ ID NO: 1556 - protein, 290 aa, Brassica napus
MMKRLSSSDSMCGLVSNSPDEQSPRGYGGNFQSMLDGYEEDGTIVEEYSGNHHHMGLSEKKRRLRVDQVKALEKNFELENKLEPERKTKLAQELGLEPRQVAVWFQNRRARWKTKQLEKDYGLLKSQYDSLRHNFDSLRRDNDSLVLKISELKAKINGEDVNNDSKVTAESDISAVKEENVPSSPPEFIEHSTGFDYRRSFTDLCDLLPNSTAPDGGSSDSCDSSAETSSENGRLTPPPTVTGGNFLQFVKTEQMEDHDEFFSGEEACGGFFSDVQPPSLNWYSASDHWT

SEQ ID NO: 1557 - protein, 148 aa, Brassica napus
RHEAGDQVWVARYLLERITEISGVNVSFDPKPVPGDWNGAGAHCNYSTKSMRNDGGLAVIKKAIEKLQVKHKEHIAAYGEGNERRLTGKHETADINTFSWGVANRGASVRVGRDTEKEGKGYFEDRRPASNMDPYVVTSMIAETTILG

SEQ ID NO: 1558 - protein, 148 aa, Brassica napus
TDSNLAKIANNNGKTALHSAARMGHVDVVKSLIGNDPSIGFRTDKKGQTALHMAVKGQNDEIVVELVKPDVAVLSVEDNKGNTPLHIATNKGRVKIVQCLGSFEGVNLNPINKAGDTPLDIAEKIRDGELVSVLKEAGAATAKDLGKP

SEQ ID NO: 1559 - protein, 414 aa, Brassica napus
MVATSATSSFSHVPSSSSLDTNGKGNRVGSTNFAGLNSTPSSGRTKVKPNAQAPPKINGKKANLPGSVEISKSDNETSQPAHAPRTFINQLPDWSMLLAAITTIFLAAEKQWMMLDWKPRRSDMIMDPFGLGRIVQDGLVFRQNFSIRSYEIGADRSASIETVMNHLQETALNHVKSAGLLENGFGSTPEMFKKNLIWVVARTQVVVDKYPTWGDVVEVDTWVSQSGKNGMRRDWLVRDCNTGEIVTRASSLWVMMNKLTRRLSKIPEEVRGKIEPYFVNSDPILAEDSRKLTKLDEKTADYVRSGLTPRWSDLDVNQHVNNVKYIGWILESAPVEMMEKHKLKSMTLEYRRECGRDSVLQSLTAVSGCDVGSLGTAGEVECQHLLRLQDGAEVVKGRTVWSSKTPSTTWDTTS

SEQ ID NO: 1560 - protein, 55 aa, Brassica napus
EGKALKTLATAARLDIEDFLQKKVFLEVEVKVKENWRQDEGLLKYYGYGGQIRAM

SEQ ID NO: 1561 - protein, 214 aa, Brassica napus
MLRSLLLRRSNARSLRPPFPPLRTLCTSGQTLTPAPPPPPPPPPPISSSASEKEFRKYAGYAALALFSGAATYFSFPFPENAKHKKAQIFRYAPLPEDLHTVSNWSGTHEVQTRNFNQPETLADLEALVKEAHEKKNRIRPVGSGLSPNGIGLSRSGMVNLALMDKVLEVDKEKKRVRVQAGIRVQQLVDAIQEYGLTLQNFASIREQQIGGII

SEQ ID NO: 1562 - protein, 288 aa, Brassica napus
RHEGERERERERERERERERERERERERERERFITTDDFTNADILEATYPAVSKTLLNNWSKDKAVPVVTGFLGKGWRSCAITTLGRGGSDLTATTIGKALGLREIQVWKDVDGVLTCDPNIYSGAQSVPYLTFDEAAELAYFGAQVLHPLSMRPARDGDIPVRVKNSYNPNAPGTVITRSRDMSKAVLTSIVLKRNVTMLDIASTRMLGQYGFLAKVFTTFEDLGISVDVVATSEVSISLTLDPAKLWGRELVQRANELDHVVEELEKIAVVKLLQRRSIISLIGNV

SEQ ID NO: 1563 - protein, 222 aa, Brassica napus
MASKAIFSTIRRSLTKPRGGAVSRGHHLSTSAATASESYAGDEHAIVMKGVRISGRPLYLDMQSTTPLDPRVFDAMNASSIYDYGNPHSRTHLYGWEAENAVEVARIQVAKLIGASPKEIVFLSGATEANNTVVKGVMHFYKDKKRHVITTQTEHKCVLDSCRHLQQEGFEVTYLPVKTDGLIDLEMLRESIRPDTGLVSVMAVNNEIGVVQLWRRWWIVGA

SEQ ID NO: 1564 - protein, 111 aa, Brassica napus
MAMQKAKEIVSGNAVVVFSKSFCPYCVRVKELLQQLGAKFIAVELDKESDGSQVQSALAEWTGQRTVPNVFIGEKHIGGCDSVTNLHRDGKLVPMLTEAGAIAATAGTTSS

SEQ ID NO: 1565 - protein, 257 aa, Brassica napus
NTPVDVVSSLRRYEESRRLRVAIIHGMARMAAIMASTYKAYLGVGLGPLSFLTKFRVPHPGRVGGRFFIDIAMPLMLNWVLGGNSEKLEGRPPSCRLTDKADDRLREWFEDDEALERTINGEWYLIPHGNECSVSETLRLTKDEDQPCIVGSEPDQDIPGTHIVIPSPQVSKMHARVIYKDGAFFLMDLRSEHGTYLTDNEGGKYRVTPNFPARFRPSDIIEFGSDKKAAFRVKVIRTTPKLTRRDEKSDGKLLQAA

SEQ ID NO: 1566 - protein, 376 aa, Brassica napus
  misc_feature (40)..(40): Xaa can be any naturally occurring amino acid
  misc_feature (304)..(304): Xaa can be any naturally occurring amino acid
  unsure (1)..(376): unsure at all Xaa locations
MSFKSILRDLKEVRDGLGGISKRTWSKSSHIAPDHTVTPXENIPQSPWASLPPELLHEIIRRVEESEASWPARAAVVSCASVCKSWRGITMETVRVPEQCGKLTFPISLKQPGPRDLPIQCFIKRNRATATYILYYGLMPSEMENDKLLLAARRVRRATCTDFVISLSAKNFSRRSSTYVGKLRSGFLGTKFTIYDNQTASSTAQAQPKQASPKLPATSYTSGSITYELNVLRTRGPRRMHCVMDSIPLSSVISEPSLVKEEVSSGETSSTHKENISLDQPLVLKNKSPRWHEQLQCWCLNFKXGRVTVASVKNFQLVADVDPSLNALPEEHERVILQFGKIGKDIFTMDYRYPLSAFQAFAICISSFGTKPACEG

SEQ ID NO: 1567 - protein, 182 aa, Brassica napus
  misc_feature (85)..(85): Xaa can be any naturally occurring amino acid
  misc_feature (121)..(121): Xaa can be any naturally occurring amino acid
  misc_feature (147)..(147): Xaa can be any naturally occurring amino acid
  unsure (1)..(182): unsure at all Xaa locations
VDPRVRFLIYEHPHHDHHHEVPCNSLSCISSLSSYLPFLINSQEDHHVAYNNTYHADHLHLSQPLKANMFNGGSSSSYDHTVPKXKERRLKLTLRKKDYHDDRTDFPDQNPTKLNSRSHKXVMSPKMRLIKKTITNNKQAIDHTNSXMMIIIEEDAYALHHKTTLKEDHDEELKKVSMPRVL

SEQ ID NO: 1568 - protein, 343 aa, Brassica napus
MAFCSIFCPRIPVRFRPKPISPFLSKPLFPLSYRVYSSLQPTPSTKDELGSVSIGFLGMGIMGSPMAQNLLKAGCDVTVWNRTKSKCDPLVGLGAKYKSSPEEVTATCDLTFAMLADPESAIDVACGKNGAVSGISSGKGYVDVSTVDAASSILISKQIKDTGALFLEAPVSGSKKPAEDGQLIFLTAGDKLLYEKAAPFLDIMGKSRFYLGDVGNGAAMKLVVNMIMGSMMASFAEGILLSQKVGLDPNVLVEVVSQGAINAPMYSLKGPSMIKSVYPTAFPLKHQQKDMRLALGLAESVSQSTPIAAAANELYKVAKSYGLSDEDFSAVIEALKAARSQQS

SEQ ID NO: 1569 - protein, 185 aa, Brassica napus
MAEGEEKNHRSSMAASANLGSLRSTTTSLFSNRPFSLSMLRSSLVLRTCLIKPTPLRLLVSWPPHHGSSVRAMSSSSSSLEETVKTTVAENPVVVYSKSWCSYSSEVKSLFNGLQVKPLVVELDQLGAEGSQLQTVLEKLTGQFTVPNVFIGGKHIGGCSDTLQLYNKGQLEPMLAEANAKTGRT

SEQ ID NO: 1570 - protein, 210 aa, Brassica napus
  misc_feature (193)..(193): Xaa can be any naturally occurring amino acid
  misc_feature (196)..(196): Xaa can be any naturally occurring amino acid
  unsure (1)..(210): unsure at all Xaa locations
MYSNFKEQAIEYVKQAVQEDNAGNYNKAFPLYMNALEYFKTHLKYEKNPKIREAITQKFTEYLRRAEEIRAVLDEGGSGPGSNGDAAVATKAKSKGKDGDGEDKEQSKLRAGLDSAIVREKPNVKWSDVAGLESAKQALQEAVILPVKFPQFFTGKRRPWRAFLLYGPPGTGKSYLAKAVATEADSTFFRVSXSDXVSKWMGESESWCQT

SEQ ID NO: 1571 - protein, 263 aa, Brassica napus
MCGILAVLGCTDDSQAKRVRVLELSRRLRHRGPDWSGIYQHGDNYLAHERLAIVDPDSGDQPLFNEDKTIVVTVNGEIYNHEELRKDLKNHKFRTGSDCDVISHLYEEHGENFVDMLDGVFSFVLLDTRDNSFMVARDAIGVTSLYIGWGLDGSVWISSEMKGLHEDCEHFEVFPPGVLYSSKSGGFKQWYNPPWYNESVPSTPYEPLAVRHAFEAAVTKRLMSDVPFGVLLSGGLDSSLVASITARHMASTKAAKRWGSQPP

SEQ ID NO: 1572 - protein, 125 aa, Brassica napus
MGSMFSGNRLNKEEMEVVVNKAKEIVSDHPVVVFSKTYCGYCQRVKQLLTQLGATFKVLELDEMSDGGEIQSALSEWTGQSTVPNVFIKGKHIGGCDRVMESNKQGKLVPLLTEAGAIANNSSQL

SEQ ID NO: 1573 - protein, 182 aa, Brassica napus
MALRSIKTPPFVAATTVVSSSIIKKPRSFRFFSKPSASLAVHNLHQPISIIRSNLIPKLKPSSPAAKFRCSASAALTPQLRDTLEKLVNSEKVVLFMKGTRDFPMCGFSNTVVQILKNLNVPFEDVNILENEMLRQGLKEYSNWPTFPQLYIGGEFFGGCDITLEAFQSGELQEVVERAICS

SEQ ID NO: 1574 - protein, 89 aa, Brassica napus
VVERRQRRMIKNRESAARSRARKQAYTVELEAELNQLKEENAQLKHALGELERKRKQQYFESLKTRAQPKLPKASGRLRTLVRNPSCPL

SEQ ID NO: 1575 - protein, 186 aa, Brassica napus
MAGGEIVVTPVDKIGFVPEEATIVGNTCLYGATGGQIFARGKAGERFAVRNSLAEAVVEGTGDHCCEYMTGGCVVVLGKVGRNVAAGMTGGLAYLLDEDDTLLPKINREIVKIQRVTAPAGELQLKSLIEAHVEKTGSSKGETILKEWEKYLPLFWQLVPPSEEDTPEASAAYVRTATGEVTFQSA

SEQ ID NO: 1576 - protein, 344 aa, Brassica napus
  misc_feature (47)..(47): Xaa can be any naturally occurring amino acid
  unsure (1)..(344): unsure at all Xaa locations
IPPPKSRRVTSEFIWPDLKNLKKKSRKRSHFFDLDNEFEADFKGFRXMIDSSFDCEDGFDVKPFAFTAATKPVASLPTNVATTGSVSDKKAVESDEKSGKRKRKNQYRGIRLRPWGKWAAEIRDPKKGSREWLGTFETAEEAARAYDAAARRIRGGKAKVNFPEEVISNLKKPVAKPNHTPALVQPPTHVGQYCNNNSFDNMGHDSLSFIEEKPQMYNNQFFDVGQYFSSDQGSNSFDCSEFGWSDHAPKTPPEISSMLVNNNRATFAEETIAAKKVKLSSEDETSDNDDLMAYLDNALWESPLEVEAMLGVDAAAAAGVAQEEANPMELWSLDDINFMLDGDF

SEQ ID NO: 1577 - protein, 185 aa, Brassica napus
MSNGTDQAQPPSEKLSLPVESRPKKRASPGDNWAPPPGWTTEEKVRTSGTKAGLVDKFYYEPVTNRKFRSRTEVMYYLEHGTPKKKNKKSVNNSDTKSQRSEDRGSYKRLTQSNKKANEQPPPPPPPMPLDFDFLNVPEKVIWTGTNGLQEAWCPFIGDYKIQESVSQDWDRAFTLLTANANMSV

SEQ ID NO: 1578 - protein, 134 aa, Brassica napus
KARQHMFKVHLGDTPHNLTESDFEYLGLKTEGFSGSDVSVCVKDVLFEPVRKTQDAMFFFKSPDGTWMPCGPRQPGAIQTTMQDLATKGLAEKIIPPPITRTDFEKVLARQRPTVSKSDLDVHERFTQEFGEEG

SEQ ID NO: 1579 - protein, 135 aa, Brassica napus
IVLEMQKSGELKQVFSEKGKSLEERLKSLINSEKVMLFMKGSPDEPKCGFSSKVVKALRDEDVSFGSFDILSDEEVRQGIKSFSNWPTFPQLYYKGELVGGCDIIMELSSSGDLKATLSEVKAKVPLFFFFCFWL

SEQ ID NO: 1580 - protein, 168 aa, Brassica napus
MAPTVKTAVVNTNGGDGGIKETRYRGVRKRPWGRYAAEIRDPYKKTRVWLGTFDTPEAAARAYDRAALRFRGAKAKTNFPYTYMVDNNESPTQSSTVESSSIPDLNLGSVGSKFPFPKVQVKPGMILFDEESTRSESDSSSVVMDRSPERRSRVLLDLDLNLPPKPED

SEQ ID NO: 1581 - protein, 332 aa, Brassica napus
  misc_feature (53)..(53): Xaa can be any naturally occurring amino acid
  misc_feature (150)..(150): Xaa can be any naturally occurring amino acid
  misc_feature (162)..(162): Xaa can be any naturally occurring amino acid
  unsure (1)..(332): unsure at all Xaa locations
MFLKIGQRGIRHLQRSSTASFTTVSASSIEKGQNRVVDASLTLIRERAKLKGXLVRLLGGAKASTSLLGVPLGHNSSFLQGPAFAPPRIREAIWCGSTNSSTEEGKELKDPRVLTDVGDVPVQEIRDCGVDDDRLMNVISESVKLVMEEXEPWRPLVLGGDXYISNPVIRAVSEKLGGPVDVLHLDAHPDIYDCFEGNKYSHASSFARIMEGGYARRLLQVGIRSINKEGREQGKRFGVEQYEMRTFSRDREVLENLKLGEGVKGVYISIDVDCLDPAFAPGVSHIEPGGLSFRDVLNILHNLEGDVVGADVVEFNPQRDTVDGMTAMVAAK

SEQ ID NO: 1582 - protein, 80 aa, Brassica napus
AAWYERRQMKKIYSPLLEGLLGLYLGFEWIQTNNLLAPIITHGIYSAVVLGNGLWKLHHHQQRLRLRVQKLETEGDNNSR

SEQ ID NO: 1583 - protein, 166 aa, Brassica napus
  misc_feature (39)..(39): Xaa can be any naturally occurring amino acid
  unsure (1)..(166): unsure at all Xaa locations
HLYYNLVHSFLLLSKINKLIVKSNHNKKSTHETLVRKHXIITMSGVWVFNKNGVMRLVENPYNQSGGDWSESSSSGGSQQQRMRRKILVHLPTSEVVSSYKSLERILKCLGWERYYNGDNADHLLQFHKRTSIDLISLPRDFSKFNSIHMYDIVVKNPNVFHVRDM

SEQ ID NO: 1584 - protein, 334 aa, Brassica napus
MSRIIGRKGINYIHRLNSASFTSVSASSIEKGQNRVIDASLTLIRERAKLKGELVRLLGGAKASTSLLGVPLGHNSSFLQGPAFAPPRIREAIWCGSTNSATEEGKELKDPRVLTDVGDVPVQEIIDCGVDDDRLMNVISESVKLVMEEKPLRPLVLGGDHSISYPVVRAVSEKLGGPVDILHLDAHPDIYDCFEGNKYSHASSFARIMEGGYARRLLQVGIRSINQEGREQGKRFGVEQYEMRTFSKDRPMLENLKLGEGVKGVYISIDVDCLDPAFAPGVSHIEPGGLSFRDVLNILHNLQADVVGADVVEFNPQRDTVDGMTAMVAAKLVR

SEQ ID NO: 1585 - protein, 218 aa, Brassica napus
MVKMGLKPNPVTPNPTHYNAKEIRYRGVRKRPWGRYAAEIRDPGKKTRVWLGTFDTAEEAARAYDKAARDFRGAKAKTNFLELNEKVLSGGGGFARSPSQSSTLDYASPPAVVTPATDGIVPPRLELSLGGGGGACYQIPMARPLYFLDLMGVGNGGRGQLPVSSAFRSPVMQVSTKMACGAQSDSDSSSVVDFEVVMEKRSQPLDLDLNLLPPVEQA

SEQ ID NO: 1586 - protein, 212 aa, Brassica napus
  misc_feature (124)..(124): Xaa can be any naturally occurring amino acid
  misc_feature (153)..(153): Xaa can be any naturally occurring amino acid
  unsure (1)..(212): unsure at all Xaa locations
MAKIGLKPDPVNNNAKEIRYRGVRKRPWGRYAAEIRDPGKKTRVWLGTFDTAEEAARAYDAAARVSRGAKAKTNFPNLLELSEKVPAAGGGFERSPSQSSTLDCASPPAAVTPASAGIAPPQLXELRLGNYQIPLARPVYFLDVMGVGNGGSXPPPVASAFRLPVMLGLQEVACVAQSDSDSSSVVDFEGVMEKRSQLFDLDLNLSPPSEQA

SEQ ID NO: 1587 - protein, 161 aa, Glycine max
  misc_feature (47)..(47): Xaa can be any naturally occurring amino acid
  unsure (1)..(161): unsure at all Xaa locations
SFRGKQIPEKILPLSPSKLAERQISQVPKEIFEAVKKLQLSRTDILXKWINTRGSISQLDGFFLRLRLGKWEEGPGGTGYHVAYINETQSQRQCSEQNTRKSLSVKVGSIKCMVESQYISNHDFLEEEIMEWWSNTSQAGAEISSEEYIIEKFKKKEMLGL

SEQ ID NO: 1588 - protein, 201 aa, Glycine max
MPAKMRIMRKMLVSDQTDTYTNSDNNTTHKFDDQKQQLSSPLGTDNSSSNNYSNHSNNTVRVCSDCHTTKTPLWRSGPRGPKSLCNACGIRQRKARRAMAAAAASASGNGTVIVEAKKSVKGRNKLQKKKEKKTRTEGAAQMKKKRKLGVGSAKASQSRNKFGFEDLTLRLRKNLAMHQVFPQDKKEAAILLMALSYGLVH

SEQ ID NO: 1589 - protein, 687 aa, Glycine max
  misc_feature (60)..(60): Xaa can be any naturally occurring amino acid
  misc_feature (240)..(240): Xaa can be any naturally occurring amino acid
  unsure (1)..(687): unsure at all Xaa locations
MQRTEFSQTLQSNMALPANETSMAERSQWVLNAPAPPSTWHNLMASVRNTISSYQKMWAXIRGQPGPKVVLSFLRSIFPILHWGRNYSPTKFRNDLLAGLTIASLCIPQSIGYATLAKLDPEYGLYTSVVPPLIYALMGTSREIAIGPVAVVSLLLSSMIQKLIDPAIDPNGYRKLVFTTTFFAGIFQAAFGLFRLGFLVDFLSHAAIGGFMGGAAIIIGLQQLKGLFGINHFTNQTDIXLAWKSVWESVDHPWNPRNFVLGCSFFIFILFTRFLGKRNKKLFWLPAISPLVSVMLSTLIVFLTRADKSGVNIVRHIKGGLNPSSINQIDLNSPHIGALAKIGLVVAAVALTESVAVGRSFASMKGYHLDGNKEMVSLGFMNIIGCFTSCYVATGSFSRTVVNFTAGCETLASNIVMAIVVLISLQCLTKLLYFTPTAILASIILSALPGLIDINEAYKIWKVDKLDFLACVGAFFGVLFASVELGLLVAGSYPRSPVGPHFNRKPHSLATLTYVLLIRSNSVDQVGISFTKIIWISIGAGTETLGRLPGTDVFCDAQQYPMAVKIPGVAIIRVKSSLLCFSNANSVRERILKWISREEAKGNIEDNTGSIIQLVILDTSNLVSIDTSGIASLEELHKSLVSSGKHLAIANPRWQVIYKLKATNFVTRIGGRVFLTIGEAIDCKLDF

SEQ ID NO: 1590 - protein, 117 aa, Glycine max
  misc_feature (27)..(27): Xaa can be any naturally occurring amino acid
  misc_feature (43)..(43): Xaa can be any naturally occurring amino acid
  unsure (1)..(117): unsure at all Xaa locations
HHFDSEADAGASKTYSQLAGTMRKNGXLAIRSMPCRAVECCTXNTGEHGPAKWHSVAIDIINGKEIEDVERSSDKCDVTHVNRTDYELIDIYEDGYVSVMTDNGHTKDDLKLSTDEA

SEQ ID NO: 1591 - protein, 350 aa, Glycine max
MSFLRSFARNKDISKVGRRGIHCMQKLCAEKISPDSLEKAQNRVIDAALTLVRENTRLKKELVHSLGGAVATSTLLGVPLGHNSSFLEGPAFAPPFIREGIWCGSANSTTEEGKDLKDLRIMVDVGDIPIQEMRDCGIGDERLMKVVSDSVKLVMEEDPLRPLILGGDHSISYPVVRAISEKLGGPVDVLHFDAHPDLYDEFEGNYYSHASSFARIMEGGYARRLLQVGIRSINKEGREQAKKFGVEQFEMRHFSKDRPFLENLNLGEGAKGVYISIDVDCLDPGYAVGVSHYESGGLSFRDVMNMLQNLKGDIVGGDVVEYNPQRDTPDRMTAMVAAKFVRELAAKMSK

SEQ ID NO: 1592 - protein, 168 aa, Glycine max
MDNTTTTHSTSSTYSITLLLLRVLTFIFLVMALIFISINKLTFDEIDAEIKFHDVYAYRYMLSTIVIGFAYNLLQMGFSIFTVVSGKRVLSSNGGYLFDFFGDKIIAYLLISGSAAGLGFTVELLQHIPSDSFTQKANVSASLLLVGFLFTAIASIFTSFALPKKDIN

SEQ ID NO: 1593 - protein, 328 aa, Glycine max
  misc_feature (264)..(264): Xaa can be any naturally occurring amino acid
  unsure (1)..(328): unsure at all Xaa locations
MELALSLGDTSKSFTFLDKAVTLPPNKDPPGFCLAPSFAEKRSDSERGTASGSSDPPVQLDLLPFSPVLRPQQHPPSHLRIPWLTQACGGAARVLDVNLFPAATAEDGDDGTSLSSSPNSAVSPFQMDFCTRNGNAAEFGSRNKREQQEAEGRASDDDENGSTRKKLRLSKEQSAFLEESFKEHTTLNPKQKLALAKQLNLRPRQVEVWFQNRRARTKLKQTEVDCEYLKRCCETLTEENRRLQKELQELRALKSSQPFYMQLXPATTLTMCPSCERVATNSTTTNQTSIVNNNASSQIPVELSLSKPRILPFPNGQVQAQAHQIASS

SEQ ID NO: 1594 - protein, 107 aa, Glycine max
MALPKAKEIVSSNSVVVFSKTYCPFCVDVKKLFGDLGANYKAIELDTESDGKELQAALVEWTDQRTVPNVFIGGNHIGGCDSTTALHTQGKLVPLLISAGAVAKSTA

SEQ ID NO: 1595 - protein, 213 aa, Glycine max
MAVLPSSSSNLELTISVPGFASSPVLLPLSSVKELDINQVPLEEDWMASNMEDEEEGSNGDPPRKKLRLTKEQSRLLEESFRQNHTLNPKQKESLAMQLKLRPRQVEVWFQNRRARSKLKQTEMECEYLKRWFGSLTEQNRRLQREVEELRAIKVGPPTVISPHSCEPLPASTLSMCPRCERVTSTADKPPSAAATLSAKVPPTQSRQPSAAC

SEQ ID NO: 1596 - protein, 923 aa, Glycine max
VLIPLLTSFAVCQLEEFVSIDCGGTSNYTDTSTGLAWISDSRIMQHGISVEVESPNRSMVQYQKRRDFPIESKKYCYTLSTEERRRYLVRATFQYGSLDSGDTYPQFQLYLDATKWATVSIYDASRIYVKEMIIRAPSNSIDVCMCCATTGSPFISTLELRPLNLSMYATDFEDNFFLEVAARINFGAPTEDAVRYPDDPYDRIWDSDLIKRQNYLVGVAPGTERISTTRNIDIETREYPPVKVMQTAVVGTKGVLSYRLNLEDFPANARAYAYFAEIEDLGQNESRKFKLKQPYIADYSNAVVNIAENANGSYTLYEPSYMNVTLEFVLSFSFVMTPDSTRGPLLNALEISKYVQIASKTDKQDTTVVNAFRLLSAQSSQTNEGDPCVPTPWEWVNCSTTTPPRITKIILSRRNVKGEIPSELSNMEALTELWLDGNLLTGQLPDMSKLINLKIVHLENNKLTGRLPSDMGSLPSLQALFIQNNSFSGEIPAGLISKKIIFNYDGNAELHRGKKKHFKMVLGISIGVLVILLILFLVSLVLLLNTRRKASKKKREEKGISGRTNSKPGYSFLRGGNLMDENTTCYITLSELKEATDNFSKKIGKGSFGSVYYGKMRDGKEIAVKSMNESSCHGNQQFVNEVALLSRIHHRNLVPLIGYCEEECQHILVYEYMHNGTLRDHIHESFKKQKLDWLARLRIAEDAAKGLEYLHTGCNPSIIHRDIKTGNILLDINMRAKVSDFGLSRLAEEDLTHISSIARGTVGYLDPEYYASQQLTEKSDVYSFGVVLLELIAGKKPVSSEDYSDEMNIVHWARSLTHKGDAMSIIDPSLEGNAKTESIWRVVEIAMQCVEQHGASRPRMQEIILAIQDAIKIEKGTENKLKSSSSFSGSSSSKPHSSRKTLLTSFLEIESPDVSNGCLPSAR

SEQ ID NO: 1597 - protein, 206 aa, Glycine max
MDKKQQCKTSQDPEVRKGPWTMEEDLILMNYIANHGEGVWNSLAKAAGLKRNGKSCRLRWLNYLRPDVRRGNITPEEQLLIMELHAKWGNRWSKIAKHLPGRTDNEIKNYWRTRIQKHIKQAENFQQQSSNNSEINDHQASTSHVSTMAEPMEMYSPPCYQGMLEPFSTQFPTINPDQSSCCTNDNNNINYWSMEDSWSMQLLNGD

SEQ ID NO: 1598 - protein, 113 aa, Glycine max
  misc_feature (19)..(19): Xaa can be any naturally occurring amino acid
  unsure (1)..(113): unsure at all Xaa locations
QDEMKPCIIGSMQQKDHPXGSSIIIPLPKVSQMHARINYKDGAFFLTDLRSLHGTWITDNEGRRYRVPPNYPARVRPSDVVEFGSDKASYRVKVTRSASSESEKEGTKLYQKV

SEQ ID NO: 1599 - protein, 214 aa, Glycine max
MVRGKVQLKKIEDTTSRQVTFSKRRSGLLKKAYELSVLCDAEVAVIVFSQNGRLYEFSSSDMTKILERYREHTKDVPASKFGDDYIQQLKLDSASLAKKIELLEHSKRELLGQSVSSCSYDELKGIEEQLRTSLQRVRQRKTQLYTEQIDRLRSQERNLLKENAKLSAMWQRAEKSSQQQWPRHTQAEAEPHCSSSQSLDVDTELFIGLPKQQC

SEQ ID NO: 1600 - protein, 173 aa, Glycine max
MLLQTQFLSCWVQHLSPGQTQGRLFLRINIKSEKASSDDSGPSKTGVGFGSSDTAAVPVSSKKKKKAQRERASIIRRSPLEKPAFVSEQQVGKAKEENKNESAFLLAWLGFGVVILVEGIALAASGFLPEQWDQFFVKFLYPSFTPTVFLFVAGAVAYGVFKYLQNEKITEQK

SEQ ID NO: 1601 - protein, 123 aa, Glycine max
FLSLLTENGNTNDDLPLPTDESVLTQIKDCFAEGKDLDVSCMSAMGDEHICPLIDVGPQNYLLVLAACCFYLRLHPLESLYIGWVTTWLMAYRFLAPLVLSMVLMDVCTQTISHLVWLSMLVL

SEQ ID NO: 1602 - protein, 319 aa, Glycine max
MANSLNSHFFVVVFILSLLAFSSNAQLSPTFYAKTCPNVQTIVSSAMRQAVAKEARIGASILRLFLHDCFVNGCDGSILLDDTATFTGEKNAGPNRNSARGFEVIDTIKTNVEASCNATVSCADILALATRDGIVLLGRPSWTVPLGRRDARTASQSAANNQIPGPSSDLSTLISMFASKGLTASDLTVLSGAHTIGQAQCQFFRTRIYNETNIDTNFAATRKTTCPATGGNTNLAPLETLTPTRFDNNYYADLVNRRGLLHSDQVLFNGGSQDSLVRSYSGNSAAFSKDFAAAMVKLGNISPLTGSSGEIRRNCRVVN

SEQ ID NO: 1603 - protein, 195 aa, Glycine max
MSSHALNTNVNALDHFEIPVTTPFQDVSASVPSIAAFCRSSSFRNIFLTENWAELPLKENDTNDMVIYGALRDAAATGWFPANGNEVSNVSVAVKMENEGQNSKTTAARGTRTPPKKGLSYRGVRRRPWGKYAAEIRDTKRNGVRVWLGTYETAEDAALAYDRAAFKMRGSKAKLNFPHLIGSDHEPIKVTLKKH

SEQ ID NO: 1604 - protein, 124 aa, Glycine max
MSSEAETQQPPAAPPVAPALSAADTKPGTTGSGAGSGGPGGLTSAAPAGGDKKVIATKVLGTVKWFNVRNGYGFINRNDTKEDVFVHQTAIKKNNPRKYLRSVGDGETVEFDVVEGEKGAEAAN

SEQ ID NO: 1605 - protein, 342 aa, Glycine max
MAAFSSQYYHSFVVDSACFSITPPIINTSSNFLPSPHYLHNNNIQETSYSVTDNKETSCFEQSSKVTISDIELSVVKNHSPETSMVVDKLEKGEQVTQKVVTRMEKKRRARNGSSSSDPLSKESTEGGKKKQKKPKEVTKDKKIGAEDPPTGYIHVRARRGQATDSHSLAERVRREKISKRMTTLQRLVPGCDKVTGKALVLDEIINYVQSLQNQVEFLSMKLASVNPMFFDSAMDLDTLMVRPDQKLSNIASPSPLPCVAQFRPHQAIAFADTITTPTTTTNSFPTANNDGYLLDYSSSLFLQGHRPNIFEDNGGQFWDVEDQRQKFLHPYRFGNNSGSFN

SEQ ID NO: 1606 - protein, 242 aa, Glycine max
LEDAVETLNESTENSNPNTNSPDLAVVLFHPHHAEIHLIAQGVATRCTKIEPSSNSRNSVYFRQVFAAFVKRVDFKVVKRVVITSEEFRRFVMSEARKSRMRSIEENQSRIMVVAGGDSLEKVMGDRAVMELVKDKKVAAFRELWEMVCDDSDRACYGPAEVERAREARAIETLLITDDLYRNEDVETRKKYASLVKSVKEGGGKALVYSSMHVSAPQLAQLTGVAAILRFPLPELEDVNGC

SEQ ID NO: 1607 - protein, 226 aa, Glycine max
MGGVAWTEEEDHLLKKCIQQYGEGKWHRVPLLAGLNRCRKSCRLRWLNYLRPNIKRGNFAEEEVEMIIKLHKLLGNRWSLIAGRLPGRTANDVKNYWNCHLSKKLNVIEAEDRPITRDVQVIRPQPRNIVGSSSVKRRGQNESPTDKGVQQESSMSSLTFDTADGQNHMLDSQQDNNIYACLDQQGIVSELSMDFQFEGFGAMMNGEGSSSQWDWGDLLLDMDLYK

SEQ ID NO: 1608 - protein, 133 aa, Glycine max
  misc_feature (26)..(26): Xaa can be any naturally occurring amino acid
  misc_feature (60)..(60): Xaa can be any naturally occurring amino acid
  misc_feature (115)..(115): Xaa can be any naturally occurring amino acid
  unsure (1)..(133): unsure at all Xaa locations
VDYPVRRGADFNFKDGAGPFNTYAQXAEPIRKNCCTDIIGRPCKVVPVTTSNTVKLGPAXASLVGMDIHSANNLEDIVPWSHKCDVPHVNRTDYQLIDIAEDGFLSLLTDNGNTXDDLKLPTDDSLLTHINDR

SEQ ID NO: 1609 - protein, 176 aa, Glycine max
MAETRRSTGTVKWFNAHKGFGFITPQDGTDDLFVHFTSIRSDGYRSLSDGQSVEFLLDYGDDGRTMAVDVTSAVRSRLPGGFRGGGGGRGRGGGRYGGGEGRGRGFGRRGGGPECYNCGRIGHLARDCYHGQGGGGGDDGRNRRRGGGGGGGGGCFNCGEEGHFARECPNVGKGNE

SEQ ID NO: 1610 - protein, 75 aa, Glycine max
  misc_feature (44)..(44): Xaa can be any naturally occurring amino acid
  unsure (1)..(75): unsure at all Xaa locations
VFYFHNRDVPYVNRTDYQFIDIAKEGVDTMLTEDGHTKEELKVXTDERVLTKIKDEEFVSHGQVMCVTATYCGGT

SEQ ID NO: 1611 - protein, 171 aa, Glycine max
  misc_feature (137)..(137): Xaa can be any naturally occurring amino acid
  unsure (1)..(171): unsure at all Xaa locations
MALALGNAIPLSNLKPCPKLSCCCMKKLFFTHSVPISRIPTTPKRTPTTVVRATSSFGSRLEDTIKKTVAENPVVLYSKTWCSYSSEVKILFKKLGVDPLVFELDEMGPQGPQLHKVLERITGQHTVPNVFILLVLXGGKHIGGCTDTLKLYRKGELEPLLSEANAKKTGS

SEQ ID NO: 1612 - protein, 72 aa, Glycine max
  misc_feature (21)..(21): Xaa can be any naturally occurring amino acid
  unsure (1)..(72): unsure at all Xaa locations
MAESRRSTGTVKWFNSQKGFXFITAQDGTDNLFVHFTSIRSNSYRSLSKGQSIKFLLNYSNNSHTITINITS

SEQ ID NO: 1613 - protein, 151 aa, Glycine max
  misc_feature (107)..(108): Xaa can be any naturally occurring amino acid
  misc_feature (110)..(110): Xaa can be any naturally occurring amino acid
  misc_feature (119)..(119): Xaa can be any naturally occurring amino acid
  unsure (1)..(151): unsure at all Xaa locations
MLKEPNSDILFESFSSKGVDHDPFHDCLSFDMIDNSRDPQEESHHQVIEEAMKTKKKSYIGVRRRPWGRFAAEIRDTTRKGIRVWLGTFDSAEEAALAYDQAAFSMXXSXAVLNFPVKXVKESLQEMNYSGCSRRCSPALELKERHNIRRK

SEQ ID NO: 1614 - protein, 202 aa, Glycine max
MVSATVDSDFAFLESVQQYLLGHDSINLMSETHQAASHDPFSDPNKCDGDSGNIAFRSEDATAVVARDHAPPTWKHYRGVRRRPWGKFAAEIRDPKKNGARVWLGTYDTEEKAALAYDKAAFKMRGQKAKLNFPHLIDSDNSDELSEPVMMTTSKRSLLEISSPSSSCSDDSSESQGTKRRKSLAELLNKLAKNRSQVKVEC

SEQ ID NO: 1615 - protein, 587 aa, Glycine max
MDTIKSFKGYGKVDELEQQAYQKKTRKRLIIIAVSSIVLFAVIIAAVAGVVIHKRNTSSSPSSDSPPQTELTPAASLKAVCHVTQYPNSCFSAISSLPESNTTDPELLFKLSLRVAIDELSKLSSFPSKLRANAEHDARLQKAIDVCGNVFGDALEQLNDSISALGSGAAEAGKIISPASVGDVETWISAALTDQDTCLDALAELNSTASRGALREIETAMRNSTEFASNSLAIVTKILGLLSKFDSPIHHRRLLGFPEWLGAAERRLLQVNSSETTPDAVVASDGSGQFRTIGEALRLVKKKSEKRFVVHVKEGRYVENIDLDKNTWNVFIFGDGKEKTVVVGSRNFMDGTPTFETATFAVKGKGFIAKDIGFVNNAGASKHQAVALRSGSDRSVFFRCSFDGFQDTLYAHSNRQFYRDCDITGTIDFIFGNAAAVFQNCKIMPRQPLPNQFNTITAQGKKDPNQNTGIIIQKSKFIPLGNNLTAPTYLGRPWKDFSTTVIMQSDIGSFLKPVGWISWVSNVEPVSTIFYAEYQNTGPGADVSQRVKWAGYKPTLTDVEADKFTVQSFIQGPEWLPNAAVEFDSTL

SEQ ID NO: 1616 - protein, 282 aa, Glycine max
MASQNPAEEENSKRHWSLEDFEIGKPLGRGKFGRVYVAREVKSKFVVALKVIFKEQIDKYRVHHQLRREMEIQTSLRHANILRLYGWFHDADRVFLILEYAHKGELYKELRKKGHLTEKQAATYILSLTKALAYCHEKHVIHRDIKPENLLLDHEGRLKIADFGWSVQSRSKRHTMCGTLDYLAPEMVENKAHDYAVDNWTLGILCYEFLYGAPPFEAESQSDTFKRIMKVDLSFPSTPSVSIEAKNLISRLLVKDSSRRLSLQKIMEHPWIIKNADFVGIC

SEQ ID NO: 1617 - protein, 144 aa, Glycine max
  misc_feature (62)..(62): Xaa can be any naturally occurring amino acid
  misc_feature (94)..(94): Xaa can be any naturally occurring amino acid
  misc_feature (107)..(107): Xaa can be any naturally occurring amino acid
  unsure (1)..(144): unsure at all Xaa locations
FAFLISYDNPGILAGLGCSASSQAKRGRGLELSRIQAHRGPDWSQLHQYGDHYLAHHRLAIXDPAHGEHPLFNADYTESVPVNGEIYNHEELMXQLPNDTFQTGCDXDVIAHLHEEHGDYYMDMLDGIFSAALLDSRDSMHIVA

SEQ ID NO: 1618 - protein, 389 aa, Glycine max
MVDQVQHPTIMDKVAGQLHLRSGLSSGIRSYDGAYRHPTMYQRPSFGNYSNAALQFPVMPTCKATMDLSAAATTASPVFVAAPAEKGHFLLDFLMGGVSAAVSKTAAAPIERVKLLIQNQDEMIKTGRLSEPYKGIGDCFKRTMADEGAISLWRGNTANVIRYFPTQALNFAFKDYFKRLFNFKKDRDGYWKWFAGNLASGGAAGASSLLFVYSLDYARTRLANDAKAAKKGGERQFNGLVDVYRKTLASDGVAGLYRGFNISCVGIIVYRGLYFGLYDSVKPVVLTGSLQDSFFASFALGWLITNGAGLASYPIDTVRRRMMMTSGEAVKYKSSLDAFTQILKNEGAKSLFKGAGANILRAVAGAGVLAGYDKLQVLVFGKKYGSGGA

SEQ ID NO: 1619 - protein, 396 aa, Glycine max
MDWNLKAPSWDLSEVDQANLPNMETMEGSSRYGMYRTKGEFSVDLKLGQVGNSGRESSVLTKSKDGGAVGVSKMISSSSSGSAKRARSLSNGTQTVSCLVDGCHSDLSNCRDYHRRHKVCEVHSKTAQVTIGGQKQRFCQQCSRFHSLEEFDEGKRSCRKRLDGHNRRRRKPQPEVVLTRSASFLSNYHQGTQLLSFSSSHVYPSTTVVNPTLGGVVTSGDVRLHGQNHHHHQMHLVDKQDLFLGSSPTGYKEGKHLAFMQGDHTLNNQSPHLPGASVGPAQMFLRTSPYSESGGLRCKMFCDSLTGSAHGNTSRALSLLSSPPQPHSPGNGLNQMVNPHSPLMQPLGLSLHDNSLGSVDPVLGPNGSDHSSSMHHIGSNGSQVNEAPPLFPFQWE

SEQ ID NO: 1620 - protein, 582 aa, Glycine max
MCGILAVLGCSDDSRAKRVRVLELSRRLKHRGPDWSGLHQHGDCFLAHQRLAIVDPASGDQPLFNEDKSVIVTVNGEIYNHEELRKQLPNHKFRTGCDCDVIAHLYEEHGEDFVDMLDGIFSFVLLDTRDNSFIVARDAIGVTSLYIGWGLDGSVWISSEMKGLNDDCEHFECFPPGHLYSSKERGFRRWYNPPWFSEATPSTPYDPLVLRHTFEQAVIKRLMTDVPFGVLLSGGLDSSLVASVTSRYLANTKAAEQWGSKLHSFCVGLEGSPDLKAAKEVADYLGTVHHEFTFTVQDGIDAIEDVIYHVETYDVTTIRASTPMFLMSRKIKSLGVKWVISGEGSDEIFGGYLYFHKAPNKEEFHRETCRKIKALHQYDCLRANKSTFAWGLEARVPFLDKAFINTAMSIDPESKMIKRDEGRIEKWILRRAFDDEEHPYLPKHILYRQKEQFSDGVGYSWIDGLKAHAAKHVTDKMMLNAGNIYPHNTPTTKEAYYYRMIFERFFPQNSARLTVPGGASVACSTAKAVEWDAAWSNNLDPSGRAALGVHISAYENQNNNKGVEIEKIIPMDAAPLGVAIQG

SEQ ID NO: 1621 - protein, 581 aa, Glycine max
MCGILAVLGCSDDSRAKRVRVLELSRRLKHRGPDWSGLHQHGDCFLAHQRLAIVDPASGDQPLFNEDKSVIVTVNGEIYNHEELRKQLPNHNFRTGSDCDVIAHLYEEHGEDFVDMLDGIFSFVLLDTRDNSFIVARDAIGVTSLYIGWGLDGSVWISSEMKGLNDDCEHFECFPPGHLYSSKERGFRRWYNPPWFSEAIPSAPYDPLVLRHAFEQAVIKRLMTDVPFGVLLSGGLDSSLVASITSRYLANTKAAEQWGSKLHSFCVGLEGSPDLKAAKEVADYLGTVHHEFTFTVQDGIDAIEDVIYHIETYDVTTIRASTPMFLMSRKIKSLGVKWVISGEGSDEIFGGYLYFHKAPNKEEFHRETCRKIKALHQYDCLRANKSTFAWGLEARVPFLDKAFINAAMSIDPEWKMIKRDEGRIEKWILRRAFDDEEHPYLPKHILYRQKEQFSDGVGYSWIDGLKAHAAKHVTEKMMLNAGNIYPHNTPKTKEAYYYRMIFERFFPQNSARLTVPGGASVACSTAKAVEWDAAWSNNLDPSGRAALGVHISAYENQNNKGVEIEKIIPMDAAPLGVAIQG

SEQ ID NO: 1622 - protein, 224 aa, Glycine max
MVRGKTQMKRIENATSRQVTFSKRRNGLLKKAFELSVLCDAEVALIIFSPRGKLYEFASSSMQESIERYRRHTKHVNPTTFRSVEQNMQHLKQEAENMMKKIDLLEAAKRKFLGEGLGACSIEELQRIEQQLERSLSNVRARKVFKEQIEQLKEKEKALLDENAKLTENARLSEKHDIHLQPATKNQNVNQPQCNAESSSSSDVETELFIGLPDTRARHISHHV

SEQ ID NO: 1623 - protein, 579 aa, Glycine max
MCGILAVLGCSDSSQAKRVRVLELSRRLKHRGPDWSGLHQYGDNYLAHQRLAIVDPASGDQPLFNEDKTVVVTVNGEIYNHEELRKQLPNHTFRTGSDCDVIAHLYEEHGENFVDMLDGIFSFVLLDTRDNSFIVARDAIGVTSLYIGWGLDGSVWISSELKGLNDDCEHFESFPPGHLYSSKERAFRRWYNPPWFSEAIPSAPYDPLALRHAFEKAVVKRLMTDVPFGVLLSGGLDSSLVAAVTARYLAGTNAAKQWGTKLHSFCVGLEGAPDLKAAKEVADYIGTVHHEFHYTVQDGIDAIEDVIYHIETYDVTTIRASIPMFLMSRKIKSLGVKWVISGEGSDEIFGGYLYFHKAPNKEEFHQETCRKIKALHKYDCLRANKSTFAWGLEARVPFLDKDFIRVAMNIDPEYKMIKKEEGRIEKWALRRAFDDEEHPYLPKHILYRQKEQFSDGVGYGWIDGLKAHAEKHVTDRMMLNAANIFPFNTPTTKEAYYYRMIFERFFPQNSARLSVPGGPSVACSTAKAVEWDAAWSNNLDPSGRAALGVHASAYGNQVKAVEPEKIIPKMEVSPLGVAI

SEQ ID NO: 1624 - protein, 356 aa, Glycine max
MSLLSDLINLNLSDTTEKVIAEYIWIGGSGMDLRSKARTLPGPVSDPSELPKWNYDGSSTGQAPGEDSEVILYPQAIFRDPFRRGNNILVICDAYTPAGEPIPTNKRHAAAKVFSHPDVVAEVPWYGIEQEYTLLQKDIQWPLGWPVGGFPGPQGPYYCGVGADKAFGRDIVDAHYKACIYAGINISGINGEVMPGQWEFQVGPSVGISAGDEIWAARYILERITEIAGVVVSFDPKPIKGDWNGAGAHTNYSTKSMREDGGYEVIKAAIDKLGKKHKEHIAAYGEGNERRLTGRHETADINTFLWGVANRGASVRVGRDTEKAGKGYFEDRRPASNMDPYVVTSMIADTTILWKP

SEQ ID NO: 1625 - protein, 152 aa, Glycine max
MKGGKSKTESKRADAKLAVNKKGAATKTRKPAGKGKAAKDPNKPKRPPSAFFVFMEEFRKVFNKEHPDNKAVSAVGKAAGAKWKTMSDAEKAPYVAKSEKRKVEYEKNMRAYNKKQAEGPTGGDEEESEKSVSEVNDEDDDEEGSGEEEDDD

SEQ ID NO: 1626 - protein, 187 aa, Glycine max
  misc_feature (173)..(173): Xaa can be any naturally occurring amino acid
  unsure (1)..(187): unsure at all Xaa locations
FPGRPTRPRFGHDTLVDAMLKDGLWDVYNDCAMGMCAELCADNHALTREDQDAFAIQSNERGIAARDSGAFAWEIIPVQVPVGRGKPPTLIERDESLDKFDPVKLKKLRPSFKENGGTVTAGNASSISDGAAALVLVSGQKAQELGLQVLARIKGYADAAQASELFTNHSALXIPKAIANAGLESSH

SEQ ID NO: 1627 - protein, 242 aa, Glycine max
MDLDFDSTFFLNQNLSFFPENSSIFGDTFSWDYNFVLDDIFNNLSDNSSQSQTKETSSASNVSSCIGSVELQEVSSNTTYKEVKKVRPPPPSPPLPSQQVAKEPRMYRGVRKRPWGKFAAEIRDSTRNGVRVWIGTFDTAEAAALAYDQAAFSTRGSLAVLNFPEEVVRESLKDMPSKPWEEGSSPVLALKRKHTMRTKSNSKKKTKVDQREQLDFSRTSQNVLVFKNLGAEYLKQLLTLTS

SEQ ID NO: 1628 - protein, 516 aa, Glycine max
  misc_feature (376)..(376): Xaa can be any naturally occurring amino acid
  unsure (1)..(516): unsure at all Xaa locations
MAIELASPNWVPTAAACLAALAALLLFLLRGLRRRKYNLPPGPKPWPIIGNLNLIGSLPHQSIHALSKTYGPIMHVWFGSNPVVVGSSVDMAKAILKTHDATLAGRPKFAAGKYTTYNYSDITWSQYGPYWRQARRMCLMELFSAKRLEEYEYIRKQELRGLLNELFNSANKTILLKDHLSNLSLNVISRMVLGKKYLEESENAVVSPDDFKKMLDELFLLNGVYNIGDFIPWMDFLDLQGYIKRMKALSKKFDMFMEHVLDEHIERKKGVEDYVAKDMVDVLLQLAEDPTLEVKLERHGVKAFTQDLIAGGTESSAVTVEWAITELLRRPEIFKKATEELDRVIGRERWVEEKDIVNLPYVNAIAKEAMRLHPVXAPMLVPRLAREDCQVGGYDIPKGTQVLVNVWTIGRDPSIWDNPTEFQPERFLTKEIDVKGHDYELLPFGAGRRMCPGYPLGLKVIQASLANLLHGFNWRLPDNVKNEDLNMDEIFGLSTPKKIPLETVVEPRLPHHLYSL

SEQ ID NO: 1629 - protein, 142 aa, Glycine max
  misc_feature (24)..(24): Xaa can be any naturally occurring amino acid
  misc_feature (113)..(113): Xaa can be any naturally occurring amino acid
  misc_feature (126)..(126): Xaa can be any naturally occurring amino acid
  unsure (1)..(142): unsure at all Xaa locations
FSFGIDAIEDVLYHIETYDVTTIXACTPICLMSRLIKSLGVKWVIPREGSSEIFGGYLYLHKAPYKEEFLREPCLWIKALDHYDRLRANRSTFGWGLEARVPFWDKACINAAXEFSPEWNMMKRDXGRIEKWVLRRAFDDEE

SEQ ID NO: 1630 - protein, 125 aa, Glycine max
MAESGEHDHDFTSGESGAAATYPKQCSALRKNEFVMIKGRPCKVVEMSTSKTGKHGHAKVHLVALDIFTNKKLEDICPSTHNMEVPVVKRKEYQLLSTNEDGFISLMDLETCDTKDDLRLPEGEI

SEQ ID NO: 1631 - protein, 307 aa, Glycine max
PFRMGNHKIVMCEAFDNKMQPHVTNNRARCKQTMDAAAKEHAWFGMEQEYTLLDVDQHPFGWPKAPFGFPGPQGPYYCGAGANKAYGRDIVDSHYRACLYAGILISGTNAEVMPGQWEFQVGPCEGIQMGDQLWMARFLLHRVAEEFGVIVSFDPKPVAGDWNGAGCHTNFSTEKMRNPGGYATILEAIECLSKSHHEHIAYYDPTGGRDNERRLTGLHETATIAKFSFGVASRCSSVRIPRQTEVEGYGYFEDRRPSSNCDPYMVTDALVRTCCLNVKKLSRTYTPSDAESLRKMIETMRQGKIQE

SEQ ID NO: 1632 - protein, 292 aa, Glycine max
MYSFHQKYWNQLRRPPPLGIREILAQIARYSFENLEQLNYSASGNRSGGNKSSSAFPPKRRILIDNNANSTYEAHAEPPLQRHAAESKKAQLLALLQLADNRYSQCLDEIHTVVSAFHAATELDPQIHAHFALQTISILYKDLRERISNYILAMGSNFNNSCSEENEWSAETSFLQKQWALQQLNRKDQLWRPQRGLPERSVWVLRAWMFQNFLHPYPKDAEKHLLAVKSGLTRSQVSNWFINARVRLWKPMIEEMYAEMNKRKACRNEEGMQSNHGNRISMSNQRFNQCQL

SEQ ID NO: 1633 - protein, 458 aa, Glycine max
  misc_feature (55)..(55): Xaa can be any naturally occurring amino acid
  misc_feature (82)..(82): Xaa can be any naturally occurring amino acid
  misc_feature (98)..(98): Xaa can be any naturally occurring amino acid
  misc_feature (351)..(351): Xaa can be any naturally occurring amino acid
  unsure (1)..(458): unsure at all Xaa locations
CGNKELPCGSHSSYQTILFYVSIYLIALGNGGYQPNIATFGADQFDEGDPREQHXKIVFFSYFYLALNIGSLFSNTILNYFXDDDGLWTLWFWASAGXSAALALILFLCGTRRYRYFKPNGNPLPRFCQVFVAATRKWKVKVLQDDKLYEVDEFSTDEGRKMLHTEGFRFLDKAAFITSKNFKQMEESKCSPWYLSTVTQVEEVKCILRLLPIWLCTILYSVVFAQMASLFVEQGDAMDTRISSFHIPPASMSTFDILSVAIVIFIYRRVLDPLVARTMKSKGLTELQRMGIGLVLAIMAMVSAGLVEHFRLKNAIEDCNECKGSSSLSIFWQVPQYVFVGASEVFMYVGXLEFFNAQTPDGLKSFGSALCMTSISLGNYVSSLLVAIVMKISATDEMPGWIPGNLNKGHLDMFYFLLAALTAADLVIYVLMARWYKYIKFQGNNENDTNKEDPEVGV

SEQ ID NO: 1634 - protein, 200 aa, Glycine max
MASHGVLENSPNAAINKAVIGRLMELPLPPNKVLATYVWIDGTGENLRAKSRTLDFIPKAVSDLPEWNYDGSSTYQSEGSNSDTYLRPVAMYRDPFRGGENKLVLCDTYKYNKKPTETNRRAACAAAMEAAKEHVPWFGIEQEYTLLDMDGRPFGWPKNGFPGPQGPYYCGVGANKVYARDIVEAHYRACLSAGINISGE

SEQ ID NO: 1635 - protein, 308 aa, Glycine max
MSTIAKRDLSSNEEESELRRGPWTLEEDSLLIHYIARHGEGRWNMLAKSAGLKRTGKSCRLRWLNYLKPDIKRGNLTPQEQLLILELHSKWGNRWSKIAQHLPGRTDNEIKNYWRTRIQKQARQLNIESGSKRFIDAVKCFWMPRLLQKMEQSNSPSPHHSSMTNMMNLGNSGEASMSSMSSSFNINPSMSSSSSPPQREFIMDDANHFNTMSNPINPSPDSFQFSQLLEISEHPKSPSNVFENNVCSYPIQDNCYVDTNNYGMEGINMDPLSAMDTYDFPQFDFQTAGNGWMLDSMGDSTLWNMEAM

SEQ ID NO: 1636 - protein, 487 aa, Glycine max
MCSFEDPLDENPPALISLGGNAKLSGYNDRIPCSLLSKSRDNVPVVSRDDDENSYGCTHPINTKTKSFRLKTGIGDNRISKRLASNFQKVAEKTKDHTHSNNDGDWKRTYCSKRNCNKHQSSQMNIPFKKRKLFNYRSVSNSNGLIRSGGIYYSPENCMNQDGCGSPPGMHKDPGMPSLEACQHQTLRSRGSHVNLRIKSFRVPELFIEVPETATIGSLKRTVMDAVTAVLGGELHIGVFLQGKKVKDDSKTLLQTGISHQNELDALGFTLEPNSSQSLPIVCAAHSPGPKADITQPVIRYPSSPAVIHQRIQGNSDMLPEHQVTSLGSHFENDHDSAPSPVNASVEKGMKDSKELVTVPEMDEELAMVPVHQKSKRSEIVQRRIRRPFSVDEVEALVQAVEKLGTGRWRDVKVCAFDNAKHRTYVDLKDKWKTLVHTARISPQQRRGEPVPQELLDRVLVAHAYWSHQQTKPQHKHHPETETVFSF

SEQ ID NO: 1637 - protein, 134 aa, Glycine max
MASRLTVTALVLIALATVSLQTSASSVGKFIDETITSHKIVIFSKTYCPYCRRAKAVFKELNQVPHVVELDEREDGSKIQDIMINIVGRRTVPQVFINGKHLGGSDDTVEAYESGHLHKLLGIETKDHDDHDDL

SEQ ID NO: 1638 - protein, 303 aa, Glycine max
MESIGVLMTCPMHSYIQEELAKRFNLFKLWHYPSFSAFAQAHAHSIRALVASAKVGVDAATIDSLPNLEIVSTYSVGYDNIDLHKCRHRAIPVTNTPNVLTDDVADVAIALALSLLCRICPRNSTWQFTPKLSGKAVGIVGLGRIGWAIAKRAEGFGCPVSYHSRSEKSETGYKYYSHIIDLAANSEVLFVACTLSEETRHIVNRGVIDALGPKGILINVGRGPHVDEPELVAALIEGRLGGAGLDVFENEPEVPEDLLGLENLVMTPHVGTDTLETCIAMGDLVIANLEAHFLGNPLFTPVL

SEQ ID NO: 1639 - protein, 320 aa, Glycine max
MAFHSLRYNVFCFSILFSLLIALASAELSSDFYASTCPNALSTIKSAVKSAVAKEHRMGASLLRLHFHDCFVNGCDASVLLDDTSSFTGEKSAAANLNSLRGFDVIDDIKSQLESACPGIVSCADIVAVAARDSVVALGGPSWTIGLGRRDSTTASKDAATSDIPSPLMDLNDLISAFSNKGFTSQEMVVLSGAHTTGQAKCQFFRGRIYNETNIDSDFATSAKSNCPSTDGDSNLSPLDVTTNVLFDNAYFKNLVNKKGLLHSDQQLFSGGSTDSQVTTYSTSSSTFYADFASAMVKMGNLSPLTGSSGQIRTNCRNVN

SEQ ID NO: 1640 - protein, 140 aa, Glycine max
  misc_feature (22)..(22): Xaa can be any naturally occurring amino acid
  misc_feature (43)..(43): Xaa can be any naturally occurring amino acid
  misc_feature (56)..(56): Xaa can be any naturally occurring amino acid
  misc_feature (61)..(61): Xaa can be any naturally occurring amino acid
  misc_feature (97)..(97): Xaa can be any naturally occurring amino acid
  unsure (1)..(140): unsure at all Xaa locations
QQRDVAHTVGPAHHECICTVSXGIGAIEHVLYHSVTYEVTTIXASSPRFLMSRKTXSLGVXWVIFAEGLDQIFGGYMYLYEAPHKALFHQMTIGMVXALAKHDCLRDNRSTSAWGLEARVPMLVKQCVRVAMIFGPEYNM

SEQ ID NO: 1641 - protein, 305 aa, Glycine max
  misc_feature (95)..(95): Xaa can be any naturally occurring amino acid
  misc_feature (127)..(127): Xaa can be any naturally occurring amino acid
  misc_feature (138)..(139): Xaa can be any naturally occurring amino acid
  misc_feature (212)..(212): Xaa can be any naturally occurring amino acid
  unsure (1)..(305): unsure at all Xaa locations
MASSVEKEGGASEETFSLELPAPPGWKKKFIPKKAGTPKKNEIVFTSPTGEEINSRKQLEKYLKAHPGGPAVSEFDWGTGETPRRSTRISEKAKXAPPAESEPPKKRTKRSSASQKETSLEEKEEEXKEAEMQEADDXXKDDNVIEKEKDFVKENQDDKSVENTDVNKSAHSGEAKPVENVEVLIEEEKSNAADGELPALKDKVDDKRTEGXEDFRKDEEKIEHPQEETKEYRGFGEQEKLETCLTADKRVEVEGVNKEEHVKSTCEFDVEEIEGTKVNSEEHHKLDEINKKAEAELTVNGNHGS

SEQ ID NO: 1642 - protein, 224 aa, Glycine max
MRKGRGGGASAAAAAAVNGSVLKEPRYRGVRKRPWGRFAAEIRDPLKKARVWLGTFDSAEDAARAYDTAARNLRGSKAKTNFPLSPFCYQHPTTDPFFYAGFHDQHHHHNNNNLNNPQRPTSSGMSSTVESFSGPRPPTTTTTTTTTTATPFLTATRRYPRTPPLVPEDCHSDCDSSSSVVDDSDDNIVSSSFRPPLPFDLNALPFDDDAAVVDDDLRCTALCL

SEQ ID NO: 1643 - protein, 355 aa, Glycine max
MMLGETHRANPTVHVPPWTPEIFSPYTGNADYSPYSLQEALSALQHYESTDAESDSEFPSREPEVPVDAYSCDHFRMFEFKVRRCARGRSHDWTECPYAHPGEKARRRDPRKYHYSGTACPDFRKGSCKKGDACEYAHGVFECWLHPARYRTQPCKDGTSCRRRVCFFAHTPEQLRVLPQQSPRSADSYDGSPLRHAIESSCAKTLAPAPFVSSPGSVSPPLESPPMSPMTVSVNEMVASLRNLQLGKVKSLPSSWNVMGPSGFGSPRGPMIRPGFFSLPTTPTQAPTRGGVNYFDKWDQSCEEEPVMERVESGRNIRARMFAKLSKENHLDGSDSGSGQIGDPDVGWVSELVSR

SEQ ID NO: 1644 - protein, 389 aa, Glycine max
MGYICDFCGDQRSMVYCRSDAACLCLSCDRNVHSANALSKRHSRTLLCERCNSQPAFVRCVEEKISLCQNCDWLGHGTSTSSSTQAREAINCYSGCPSAAELSSIWSFVLEIAAISESTCEQELGLMSINENKCVGVPPEDQNVSGSDEVTDLPALNKSLVGASLMPESSSEPCILDQPAGPTNECLSKLYCPATKCPALSENDNLYDDFNMDEVDLDLENYEELFGMALSHSEELFENGGIDSLFGTKGMSAGDFNSCSNAASADSILSTKTEPILCFTGRQAQSNLSFSGVTGDSSAGDYQDCGASSMLLMGEPPWFAPCPENSLQSANRSNAVMRYKEKKKTRMFDKKVRYASRKARADVRRRVKGRFVKAGDVYDYDPLSTTRSF

SEQ ID NO: 1645 - protein, 61 aa, Glycine max
MLQVFPKKLGTPRRSEIVFIAPSGEEISTKKQFEQYLKAHPGNPVISQFDWGTGETPRRSA

SEQ ID NO: 1646 - protein, 135 aa, Glycine max
  misc_feature (5)..(5): Xaa can be any naturally occurring amino acid
  unsure (1)..(135): unsure at all Xaa locations
PYEPXFTCVQIGSHQFKVSNRDSIFTERLKFCEVNDKLILNKVLLLGSASQTIIGRPIVPDAAVHAVVEEHALDAKVIIFKKKRRKNYRRTKGHRQELTKLRITDIQGIEKPQNVLPEKPPKPAKKEKEKVAVTA

SEQ ID NO: 1647 - protein, 369 aa, Glycine max
MKGVKGKFLKKLKSIKPILKQDLILQIKASDGYVHFLPKIPSFNLHSPFVSRENKPEKVVQSCEKMQDEPEVIDVAELMKDLEEEDDYNDNKENIGPCSQKPQQHHKGVLQNGNRAKTDSKQRGVLEEKKSSPENADNNNNRNSNRKIPLLDTDVPSFRRPDLNSGSLFDPNLLAAFEQAVKEHSRITEEQRRSRVEEESSQKVEDDDPDPLMFFEEKCPPGGDGMVIFYTTTLRGILKTFEDCNKIRFLLQSFKVLYFERDISMHKEFRDELWSSLEGKLVPPRLFVKGRYIGGAEEVLSLHEQGKLRKIFEGVPMDYSNGPCDACGGIRFVLCFKCNGSHKVMAENGESNQCLQCNENGLILCPYCC

SEQ ID NO: 1648 - protein, 394 aa, Glycine max; identical to SEQ ID NO: 329

SEQ ID NO: 1649 - protein, 260 aa, Glycine max
MNSISLGTFVFTPPPACKFRPLLQTKHQPIFHSLCSSGLTLSRISLTQKPTFLRATDSNTDAPISLPEGASFVSIPEIIEKDWSVLDCAEHRNIDRIIASGNVGQNSRVLVSTGSEDFVDTLVGLTPSVFVVHDSLLTLACIKEKYDRVKCWQGEIIYVPEKWAPFDAVFLYFLPALAFKLDQILGSLAGKCATGGRVIISHPKGREVLEQQRKQYPDVVVSDLPDKTYLQSVAAAHSFDVAEFVDEPGLYLAILICSRA

SEQ ID NO: 1650 - protein, 357 aa, Glycine max
MVRFCWRPAAVGDDGDVNGRVEGLLWYKDLGNHLYGDFSMAVIQANSSLEDRSQLESGPLTSDYLGPQGTFVGVYDGHGGTAASQFVSDNLFCNFKDLAGEHQGISENVIQSAFSATEEGFLSVVRKQWLSKPQIASAGTCCLAGIICNGMLYVANAGDSRAVLGRVERATRETTAIQLSAEHNVNIQTERDDVRTKHPHDPQIVVMKHNVWRVKGIIQVSRSIGDAYLKKDEFNREPLPNKFRLPEPFFKPILSYEPAISVHKLRPEDQFIIFASDGLWEQLSNQEVVNIVSNSPRNGIARRLVKAALRVAARKREMRVSDLQKIEQGVRRHFHDDITVIVVFLNHKLIDNSSLFN

SEQ ID NO: 1651 - protein, 69 aa, Glycine max
MNCFVSGIYGAMAVAGSFICSITGIDSLGGFHLSLDAILEGLGYAAPPIMALLFILDDEVVKLSPMVYQ

SEQ ID NO: 1652 - protein, 215 aa, Glycine max
IHLLQKDIQWPLGWPVGGFPGPQGPYYCGVGADKAFGRDIVDAHYKACIYAGINISGINGEVMPGQWEFQVGPSVGISAGDEIWAARYILERITEIAGVVVSFDPKPIKGDWNGAGAHTNYSTKSMREDGGYEVIKAAIDKLGKKHKEHIAAYGPIRGYFHDCRHNHSVEAMSKTCMFSPFGWKGTVMLFLVGFGLSLFLPFDWYYGWCLVGWCN

SEQ ID NO: 1653 - protein, 324 aa, Glycine max
MHETHSIGGGRFYGGGDRRLRPHHQQQQPPPLKCPRCDSLNTKFCYYNNYNLSQPRHFCKNCRRYWTKGGVLRNVPVGGGCRKSKRSNKPKTTTTTTTSNTNNNRSSFSATAPATAPTPPAPELEHHSHSHSSSESSTLTVTATEEMSAPPPTTSNAPSKNSLLLDNDHREAKMFANPNPNPSLDSGGIFSEIGNFTSLINLNNNEAFGFGNNKNNNSILDATSFRFGISVTNQVQAAAGGGHGQWQQQNHQEFGTASFLDHTVPLEFSSLQHKTGHQGGFGSLDWQPGADQGLFDLPNTVDQPYWTHAHWSDQDNTSSLFHLP

SEQ ID NO: 1654 - protein, 183 aa, Glycine max
MELALSLGDTPKPFSLPAKNDSVSFKIALGDDKRVSSDPPVQLDLLPSTPVLPSSRLRIPWLSDALGMERVTSEIPVRAVDDTDDGAALSSPNSAVSSFQMDFCFRNSRKSCEGASDEDDENGSTRKKLRLSKQQSVFLEESFKEHTTLNPKQKLALAKQLNLRPRQVEVWFQNRRARTKLKQ

SEQ ID NO: 1655 - protein, 509 aa, Glycine max
  misc_feature (116)..(116): Xaa can be any naturally occurring amino acid
  unsure (1)..(509): unsure at all Xaa locations
MFMEWSLTLDSSHSSSSTTNHNMFPTLGFPVNLSPSSDHNRTVLGEVDFFSGARNISSSHTNNDHGTPLKCDPHVNTGLQLLTANAGSDQSTVDDGASSDAEDKLVKITELDIFIXFILRMNAENQKLKEMLSHVSSNYANLQMHLAAVLQQQHNQRTENTEQGRKHGGMVPPRQFLDLVPSGTTEIDDQVSNSSLGERTRSTTPPSCNKNDDKDKKETTDIPHSGKLLNHTTDPSTSPEAAMRKARVSVRARSEAPMISDGCQWRKYGQKMAKGNPCPRAYYRCTMAVGCPVRKQVQRCAEDRTILTTTYEGTHNHPLPPAAMAMASTTAAAASMLLSGSMTSADGIMNPNLLTRAILPCSSMATLSASAPFPTVTLDLTHNQNAFQNYQRPQTPLFPSQPQDFIAGSTPPQLPQLIAQALYNQSKFSGLQLSQDVGPNNSQAPRPFLQPSQQVSLTDTISAITADPNFTAALVSAISSIIGGANPNNNSANNSSSNPNVINSATINQ

SEQ ID NO: 1656 - protein, 285 aa, Glycine max
  misc_feature (104)..(104): Xaa can be any naturally occurring amino acid
  unsure (1)..(285): unsure at all Xaa locations
MGLDQDANSSGLHLVLGLSLTASVKETAPSTKPDDHHLCVIKPTPTKPYPSKEPSLTLGLSGKGYHVPRNNVAINKVYCEDPLEFSRQTSPHSVVSSFSTGRVXTRERDLSCEDMEVDAEAEERVSSRVSDEDEDGTNARKKLRLTKEQSALLEESFKQHSTLNPKQKQALARRLNLRPRQVEVWFQNRRARTKLKQTEVDCEFLKKCCETLKDENRRLKKELQELKALKLAQPLYMPMPAATLTMCPSCDRLGGVNDNGSNKSPFSMAPKPHFYNPFANPSAAC

SEQ ID NO: 1657 - protein, 231 aa, Glycine max
MASGFGESTGRSPPSPSYFNNNNNNDAANFECNICFELAQDPIITLCGHLFCWPCLYKWLHFHSQSRECPVCKALVEEEKLVPLYGRGKSSTDPRSKSIPGDNIPHRPAGQRPETAPPPETNHFHQHGFGFMGGLGGFAPPPMATTRFGNFALSAAFGGFIPSLFNFQLHGFHDAAMYGGGAGFPHGFANTFHGVHAHGFPLRTHQGQQDYYLKKLLLFVVLCVVLAFIWQ

SEQ ID NO: 1658 - protein, 148 aa, Glycine max
EAGSSATYPMQCSALRKNGHVVIKNRPCKIVDMSTSKTGKHGHAKVHLVAIDIFTGKKLEELSPSTHNMDVPHVSRKEYQLLDIQDDGFLSLMSEDGTMKDDVKSPEGEIGAKIEKLFRDEEKDTNVIILTAMGEETAIEAKEAPRGA

SEQ ID NO: 1659 - protein, 355 aa, Glycine max
MSLLSDLINLNLSDITDKVIAEYIWVGGSGMDMRSKARTLSGLVNDPSALPKWNYDGSSTGQAPGEDSEVIYIHKQFRDPFRRGNNILVMCDAYTPAGEPIPTNKRNKAAKIFIHPDVAAEEPWYGLEQEYTLLQKDVQWPLGWPLGGFLGPQGPYYCGTGANKAFGRDIVDSHYKACIYAGFNISGINGEVMPGQWGFQVGPSVGISAADELWVARYILERITEIAGLVLSFDPKPIQGDWNGPGAHTNYSTKLMRDDGGYEIIKKAIAKLEKRHKEHIAAYGEGNERRLTGPDETADMNTFLWGVANRGASVRVGRQTLKAGKGYFEERRPASNMDPYVVTSMIADTTILWKP

SEQ ID NO: 1660 - protein, 716 aa, Glycine max
  misc_feature (27)..(27): Xaa can be any naturally occurring amino acid
  misc_feature (514)..(514): Xaa can be any naturally occurring amino acid
  misc_feature (526)..(526): Xaa can be any naturally occurring amino acid
  misc_feature (554)..(554): Xaa can be any naturally occurring amino acid
  misc_feature (563)..(563): Xaa can be any naturally occurring amino acid
  unsure (1)..(716): unsure at all Xaa locations
FIFQWLQQAERRIPPFRRRKSTPHEQXLSHHSSNNNNNIDSMSKAIAQYTEDARLHAVFEQSGESGRSFNYSESIRIASESVPEQQITAYLVKIQRGGFIQPFGSMIAVDEPSFRILGYSDNARDMLGITPQSVPSLDDKNDAAFALGTDVRALFTHSSALLLEKAFSAREISLMNPIWIHSRTSGKPFYGILHRIDVGIVIDLEPARTEDPALSIAGAVQSQKLAVRAISQLQSLPGGDVKLLCDTVVESVRELTGYDRVMVYKFHEDEHGEVVSESKRPDLEPYIGLHYPATDIPQASRFLFKQNRVRMIVDCHASAVRVVQDEALVQPLCLVGSTLRAPHGCHAQYMANMGSIASLVMAVIINGNDEEGVGGRSSMRLWGLVVCHHTSARCIPFPLRYACEFLMQAFGLQLNMELQLAAQSLEKRVLRTQTLLCDMLLRDSPTGIVTQSPSIMDLVKCDGAALYFQGNYYPLGVTPTEAQIRDIIEWLLAFHGDSTGLSTDSLGDAGYPGXLPRLGMQFVGWXVAYITEKDFLFWFRSHTAKEIKWGGAKXILRTRMMGXRMHPRSSFKAFLEVVKSRSLPWENAEMDAIHSLQLILRDSFKDAEHRNSKAVVDPHVSEQELQGVDELSSVAREMVRLIETATAPIFAVDVDGHVNGWNAKVSELTGLPVEEAMGKSLVHDLVFKESEETMNKLLSRALKGILSNTLAFWSIH

SEQ ID NO: 1661 - protein, 355 aa, Glycine max
MSLLSDLINLNLSDITDKVIAEYIWVGGSGMDMRSKARTLPGPVRDPSGLPKWNYDGSSTGQAPGEDSEVIYIHKPFQDPFRRGSNILVMCDAYTPAGEPIPTNKRNNAAKIFGHPDVAAEEPWYGIKQEYTLLQKDVQWPLGWPLGGFLGHKGPYYCGTGANKAFGRDIVDSHYKACIYAGFNISGMNPEVMPGQWEFQVGPSIGISAADELWEARYILERISEIAGVVLSFDPKPIPGDWNGAGAHTNYSTKSMRDDGGYEVIKAAIAKLEKRHKEHIAAYGEGNERRLTGHDETADMNSLLWGVANRGASVRVGRDTEKAGKGYFEDRRPASNMDPYVVTSMIADTTILWKP

SEQ ID NO: 1662 - protein, 292 aa, Glycine max
MASSVEKESGASEETFSLELPAPPGWKKQFIPKKAGTPKKNEIVFTAPTGEEINNRKQLEKYLKAHPGGPAVSEFDWGTGETPRRSTRISEKAKATPPTESEPPKKRTKRSSASQKETSQEEKEEETKEAEMQEVDDTTKDDNDIEKEKDVVMENQDGKSVEDTDVNKSTHSGEAKAGEYVEVPIEEEKSNAADGELPALKDKVDDKVFLRKDEEKIEQPQEETKEYRRTGVPEKSETCTTADKTVEVEGVNKEVRSTRQFEVGIIEGTKVNSDQINKKAEAELTVNGNLGS

SEQ ID NO: 1663 - protein, 158 aa, Glycine max
MDMRLMDLDSPFFNTLHRIMDLTEDAEKNLNAPTRTYVRDAKAMAATPADVKEYPNSYVFVIDMPGLKSGDIKVQVEDDNVLLISGERKREEEKEKEGGKYLRMERRLGKLMRKFTLPENANTDAISAVCQDGVLTVTVNKLPPPQPKKPKTIEVNIA

SEQ ID NO: 1664 - protein, 260 aa, Glycine max
METMNVQVMRSLSDMVIKKGPWTEEEDSVLINYVNVHGEGHWNSLARSSGLKRTGKSCRLRWFNYLRPNVRRGNITLQEQLLILELHSHWGNRWAKIAEQLPGRTDNEIKNYWRTRVVKQAKQLKCHVNSKQFRDALRFVWMPRLMEQIQASSSSYGLDQTTLCNTQTHRDNSMVSSYSSEVDLQPPSLSDTSITSSSYNLIGDGGLSTESAEKGSIYSLWQHWDYSDIQAFEPCNGFGDADLWTDENMWFLQQHLADEL

SEQ ID NO: 1665 - protein, 438 aa, Glycine max
RDLQNNNLMGVVPDSLGELEDLHLLNLENNKLQGPLPQSLNKETLEIRTSGNLCLTFSTTSCDDASFSPPIEAPQVTVVPQKKHNVHNHLAIILGIVGGATLAFILMCISVLIYKTKQQYEASHTSKMHMRNWGAAKVFSYKEIKVATRNFKEVIGRGSFGSVYLGKLPDGKLVAVKVRFDKSQLGADSFINEVNLLSKIRHQNLVSLEGFCHERKHQILVYEYLPGGSLADHLYGTNNQKTSLSWVRRLKIAVDAAKGLDYLHNGSEPRIIHRDVKCSNILLDMDMNAKVCDLGLSKQVTQADATHVTTVVKGTAGYLDPEYYSTQQLTEKSDVYSFGVVLLELICGREPLTHSGTPDSFNLVLWAKPYLQAGAFEIVDEDIRGSFDPLSMRKAAFIAIKSVERDASQRPSIAEVLAELKETYNIQLRFLESCQNEN

SEQ ID NO: 1666 - protein, 229 aa, Glycine max
VYRHYVHVLFRHLSHEGDILEDPANEPTKDMYMMSVDPEDAPDQAEYVEIGLESGLPVSVNGKRLSPASLLAELNEIGGKHGIGRIDMVENRLVGMKSRGVYETPGGTILFAAARELESLTLDRETIQVKDSLALKYAELVYAGRWFDPLRESMDSFMQKITETTTGSVTLKLYKGSVIVTSRMSPFSLYREDISSFESGQIYDQADAAGFIRLYGLPMKVRAMLEQGI

SEQ ID NO: 1667 - protein, 375 aa, Glycine max
  misc_feature (140)..(140): Xaa can be any naturally occurring amino acid
  unsure (1)..(375): unsure at all Xaa locations
MFHALMSLIARCWKPFGHGDDAANAAAAAGRECKDGLLWFRDIGKFAAGDFSMAVVQANQVLEDQSQIESGAFGSFVGVYDGHGGPDCSRYVCDNLFRNLQAILAESQSVVTSEAIQQAFRRTEEGFTALVSELWELPAXQIATTGTCCLVGVICRQTLFVASLGDSRAVLGRRVGNTGGMAAIQLSTEHNANFEAIRQELKELHPNDPQIVVLKHGVWRVKGIIQVSRSIGDVYMKHAQFNREPINAKFRLPEPMDMPFLSANPTILSHTLQPNDSFLIFASDGLWEHLSNDQAVDIVHSSPCAGSAKKLVKAALQEAARKREMRYSDLYKIDKKVRRHFHDDITVIVLFLNHNLISRGAVLNTPLTIRSALDH

SEQ ID NO: 1668 - protein, 294 aa, Glycine max
MGTVSNIGFPSVFRVPLDSQQALSKQMKNKSSCGFMVPPNHNYSVRPSPIRCNKLSESGIEENPTTTSTGERPSKIKDRMEEYNIAMKRMMRNPYEYHHDLGMNYTLITDNLIVGSQPQKPEDIDHLKKEEGVAYILNLQQDKDVEYWGVDLQSIIRRSRELEISHTRRPAKDFDPDSLQNELPKAVSSLEWAISEGKGRVYVHCTAGLGRAPAVAIAYLFWFCDMNLNEAYDMLTSKRPCGPNKRAIRGATYDLAKNDPWKEPFETLPEYAFEDIADWERNLIQDRARSLRGI

SEQ ID NO: 1669 - protein, 413 aa, Glycine max
APPPDQFDEKNEKQKNAREAFFSYFYFALNVGSLFSNTILVYYEDSGMWTMGFLVSLASAVIALVSYLAGYRKYRYVKGYGNPVIRVVQVFVATVRKWKVGPAKELQLYEVDGPESAIKGSRKIHHSNDFRFMDKAATITEKDAVNLKNHWRLCTVTQVEEAKCVLRMLPVWLCTIIYSVVFTQMASLFVEQGDVMNNKIGNFHLPAASMSVFDICSVLLCTGIYRQILVPLAGRFSGNPRGLTELQRMGVGLIIGMLAILAAGATEFERLKHITPGEKASSLSIFWQIPQYVLVGASEVFMYVGQLEFFNGQAPDGIKSFGSSLCMASISLGNYVSSLLVYMVMGITARGENPGWIPNNLNVGHMDRFFFLVAVLTALDFVLYLLCARWYKSINLGDGDMGSQEDEEVISKV

SEQ ID NO: 1670 - protein, 531 aa, Glycine max
MGWFTKLLKGSNRKSSGGRYHGKYEDDRISDNLDCSADDLMDIEKEEIGRAIALSLSEADKKGKKVIEDDSESEDDELCPLSDEEAESVGEVQQDEDDHHAKIQQDEDKHLDEVQLEEDEQLARAIQESLSISSPPRSETDSLFQPFAHLFPPVYRICSGCNAEIGHGRFLSCMGGYWHPECFCCHACKLPITDYEFSMSGNRRYHKSCYKELHHPRCDVCKNFIPPNSAGLIEYRAHPFWLQKYCPSHERDGTPRCCSCQRLESVDTKYLLLDDGRKLCLECLDSAIMDIHECQPLYVEIQEFYEGLHMKIEQQVPMLLVERQALNEAMEGEKNGHHHLPETRGLCLSEEQTVPTILRRPRIGAGYQLIDMITEPFRLVRRCEVTAILVLYGLPRLLTGSILAHEMMHAWLRLKGYGNLRPEVEEGICQVLAHMWLESEIIPGTGDEGASSSSSSSSSSSSSSSPSSSSSSKKGKRSDFEKKLGKYFKHQIESDSSAAYGDGFREGNQAVAKYGLRRTLDHIRLTGSFPY

SEQ ID NO: 1671 - protein, 249 aa, Glycine max
LELKIYGQWMSGGTRRLSKVANPTNHLSVVGNFVGALLGASMGLKEGPIFFYAIGLAHYIVVFVTLYQRLPTNETLPKELHPVFFMFVAPPVVASMAWASIQDSFDYGSRISYFIGLFLYFSLAVRVNFFRGFTFSLAWWAYTFPMASTASATVRYANEVTNVVTKTLSVILSLMSTLIIAAVLVSTILHALVFKDLFPNDHAIAISHGKRRPEKKCLALGYTSHDSVEIDLEASTPLPNGREINLHSI

SEQ ID NO: 1672 - protein, 593 aa, Glycine max
MAVDSEVPRAERSAKALQFIEEVTKNTDSVQERVLTEILTQNAETEYLKRFGLNGATDRDTFKSKVPVVTYEDLQPDIQRIANGDSSPILCSHPISEFLTSSGTSAGERKLMPTIHEEMDRRQLLYSLLMPVMNQYVSDLDKGKALHFLFIKAEAKTPGGLVARPVLTSYYKSEQFRKRPFDPYNVLTSPNEAILCPDSFQSMYTQMLCGLIMRHEVLRVGAVFASGLLRAIRFLQLNWEQLSHDILTGTLNPKITEPSIKERMSKILKPDPQLAAFIKNECSVENWERIIVRIWPNTKYLDVIVTGAMAQYIPTLDYYSGGLPKPCTMYASSECFFGLNLKPMSEPSDVSYTILPNMGYFEFLPHDDSSPVTLSKDSPPRLVELADVELGKYYELIITTYSGLCRYRVGDILQVTGFHNSDPQFRFVRRKNVLLSIDSDKTDEAELQKAIENASELLKEFNTSVVEYTSFADTKSIPGHYVIYWELMMKDSSHPPTNQVLNQCCLVMEESLNSVYRQGRVADNSIGPLEIRVVKNGTFEELMDYAISRGASINQYKVPRCVSFTPIMELLDSRVVSFHFSPAAPHWTPERRR

SEQ ID NO: 1673 - protein, 132 aa, Glycine max
  misc_feature (74)..(74): Xaa can be any naturally occurring amino acid
  unsure (1)..(132): unsure at all Xaa locations
MGYLCDFCGDQRSLVYCRSDAACLCLSCDRNVHSANALSRRHSRTLVCERCNSQPAFVKCVDEKISLCQNCEWXGHGTSPSSSMHKRQSINCYSGCPSAAEFSSIWSFFLDIPSLGEACEQELGLMSINENI

SEQ ID NO: 1674 - protein, 175 aa, Glycine max
MKPFLSNHTDSMYNCSQVGCSHPMNQQMVPQMLGLASTRIALPVDLAEDGPIYVNAKQYHGILRRRQSRAKLEAQNKLIKSRKPYLHESRHRHALNRVRGSGGRFLSAKQLPQSNAELVTDAYQKKDASEAENHPSSTGENASITFTAISALTSMSSNSVNFPNMAGSSQCSGLT

SEQ ID NO: 1675 - protein, 407 aa, Glycine max
MHLAPRHLSYVGPPPQYDNGSSILSFPHLFPPGYRICAGCKTEIGQGRFLSCMGGVWHPECFCCHACHLPITDYEFSMSSNRPYHKSCYREKHHPRCDVCKNFIPTNSSGLIEYRAHPFWLQKYCPSHELDGTSRCCSCERMEPRDTKYLLLDDGRKLCLECLDSSIMDTHECQPLYLEIQEFYEGLNMKLEQQIPMLLVERQALNEAMEGEKNGHHHLPETRGLCLSEEQTVTTISRRPRIAAGYRAIDMITEPYRLIRCCEVTAILVLYGLPRLLTGSILAHEMMHAWLRLKGYPNLSPEVEEGICQVLAHMWLESELYSGFGNDGASSSTSSLSSSSPSSSSVSTKKGKRSDFEKKLGDFFKHQIESDTSSAYGDGFRLGNQAMVKYGLKRTLDHIHMTGSFPY

SEQ ID NO: 1676 - protein, 333 aa, Glycine max
MRSTFCCHLNLSPVMIMKGFSAPISSYVSPRAQAVTEPPARIGFLGLGIMGSPMAHNLLKAGVDLTVWNRTKSKCDPLISLGAKYKPSPEEVAASCDVTFAMLADPQSAVDVACGKHGAANGMGPGKGYVDVSTVDGDTSKLINGHMKSTGALFLEAPVSGSKKPAEDGQLIFLTAGDKNLYEAVGSLLDIMGKSKFYLGDVGNGAAMKLVVNMIMGSMMASFSEGLLLSEKVGLDPDVLVQVVSQGAISAPMYSTKGPSMIQSLYPTAFPLKHQQKDLRLALGLAESVSQPTPIASAANELYKVAKSNGLSDQDFSAVIEALKSKFQHSETK

SEQ ID NO: 1677 - protein, 230 aa, Glycine max
METNYTLKLASYKVLTIVAFILLAISNIISACDNSTIPTNSTQTKNDYAATNYRNKTIIPSKSNYTQTFKNYIKTSCNFTTYPSICYKTLSPYATKIEADPLKLCNVSLSLALKAAKSASSAISKILKKNNLTEIAEQVVQDCFGNVKDSIGELKDSLDAMGDLGGVDRKFQISNVQTWVSASITNDQTCSDGFDEMNVDSTLTDKMRKIVLDVARKTSNALYFINNNAY

SEQ ID NO: 1678 - protein, 132 aa, Glycine max
LNYLRPDVRRGNITLQEQITILELHSRWGNRWSKIARHLPGRTDNEIKNYWRTRVIKQARNLKCDVDSKQFQDALRYVWMPRLIERTHPSLPIPSETHGPAHVDPNPTAPAQHELHGSGSGSGPSALEDVSS

SEQ ID NO: 1679 - protein, 684 aa, Glycine max
MVLQKRLEYGFNGYQAPAMPRASRSTRRRAKFRRAEDNQKCAFDLLATVAGKLLQERENPTMSSDTSLEKDQCGFVKECQDANKPSKSEISDEGSCDNSGFSRLSSQTNKKNCGLKEFTHLAIDGDVGIASIVTSSSCLERFIAEKMVDSNSHFKVENVTSKVNLDFSDYPKDSDFKLDGDTSKGKDELHKFEKVPIGSGIDMCNFEDPLDVNPPALISLGGNAKLSGYNDRIPCSLLSKSRDNVPVVSRDDDENSSGCTHPINTETKSFRPKTCIGKRMASNFQKVAEKTKNYALSNNDGDWKRTYLSKRNCNKHQSSQMNIPFKKRKLFNYRSVANSNGLIRRGGIYYSPENCMNQDGCDSPPGMHKDPGMSSLEACQHQTLRSIGSHVNLRIKSFRVPELFIEVPETATIGSLKRTVMDAVTAVLGGELHIGVFLQGKQVKDDSKTLLQTGISHHNELDALGFTLEPNSSQSLPIVCASHSPRPKADITEPVIRYPSSPAVIHQRIQGNSDMLPEHQVTSLGRHFESDHDSAPSPVNASVDKNMKDSKELVTVPEMDEELAMVPVHQKPKRSEIVQRRIRRPFSVDEVEALVQAVEKLGTGRWRDVKLCAFDNAKHRTYVDLKDKWKTLVHTARISPQQRRGEPVPQELLDRVLVAHAYWSQQQTKSQHKHHPETETVFSF

SEQ ID NO: 1680 - protein, 255 aa, Glycine max
MYGQSSSSSSSYESDLALLDSIRHHLLGESESIFGAPNFGSGRSSSFSSLDSCLSDNWGELPFKEDDTEDMVLYGVLRDAVNVGWVPSLDAGSPESVSSGFPAVKLEPDLMPALISPCPPPAAAAEEKKVVPAKGKHYRGVRQRPWGKFAAEIRDPAKNGARVWLGTFETAEDAALAYDRAAYRMRGSRALLNFPLRVNSGEPDPVRVKSKRSSSPESAAALPAKRKKVVVVGTVQEQVGSQVAECTRGEQLLVS

SEQ ID NO: 1681 - protein, 325 aa, Glycine max
MDGKGARSSNTLLSSEDEMDLRRGPWTVDEDLTLINYVATHGEGRWNTLALSAGLKRTGKSCRLRWLNYLRPDVRRGNITLEEQLLILELHSRWGNRWSKIAQYLPGRTDNEIKNYWRTRVQKHAKQLKCDVNSKQFKDTMRYIWMPRLVERIQATAAASATTTVTATTATNNAYTYGSNLNNNKFEVHDHKGKMGLTDPSVMNNDLVGSHVTQSYTPENSSTGASSSDSFGTQVSAISDLTEYYTVTVSGNNNNTNSADYYQPSQISYSDSCITSPSGLFPQGLDFQSMDPNTPWNMQSGDSSDSFWNVESMLFLEQQLMNDNM

SEQ ID NO: 1682 - protein, 623 aa, Glycine max
MASSACTKPIFPSAFTVSKSKLSRHVHVSFTSPKPIYYHYRKLSHASQRSLVVNSVLKTVDPTQTSLRRSNSEDVGSLGEKPTILVSEKLGEAGLQVLRGVGHVECAYELSQEELCTKISCCDALIVRSGTKVTREVFEAGKGRLKVVGRAGVGIDNVDLQAATEFGCLVVNAPTANTIAAAEHGIALLAAMARNVAQADASTKAGKWQRSKYVGVSMVGKTLAVMGFGKVGSEVARRAKGLGMHVIAHDPYAPADRARAIGVDLVSFDHAIATADFISLHMPLTPTTNKIFNDNTFAKMKKGVRIVNVARGGVIDEDALVRALDTGIVAQAALDVFTEEPPSKDSKLVQHENVTVTPHLGASTKEAQEGVAIEIAEAVLGALKGELSATAVNAPMVAPEVLSELAPYVVLAEKLGRLAVQLVCGGSGIKSVKIVYRSARGPDDLDTRLLRAMVTKGLIEPISNTIVNLVNADFIAKQKGLRISEERVVVDSSPEMPVDSIQVQISSVDSKFASAVSESGQISIDGRVKFGEPHLTCVGSFDVDVSLEGNLILCRQVDQPGMIGRVGNILGEQNVNVSFMSVGRTSRRNKAIMAIGVDEEPNKEALDNIGAVPAIEEFVFLKL

SEQ ID NO: 1683 - protein, 72 aa, Glycine max
SLVTPSMTLTRAKVEVNMPRKRKGNCSQHDRALERFYEQVVQAIQRHIHFDVVKCILVASPGFVREQFCDYM

SEQ ID NO: 1684 - protein, 387 aa, Glycine max
MVIEEGEMKSQGEVESWLQQEAKKNHHSPLFSSSSYLGRQTSSIYSLTLDEFQHSLCESGKNFGSMNMDEFLSSIWNAEENSQAITNNNVPLSSTLTILRKQPSLPRQPSLSLPAPLCRKTVDEVWSQIQKEQNKNNNISNVLNDNTESAPRQPTFGEMTLEDFLVKAGVVRETTCAPPLPVSHSHQPHYANNNNNVAMAPSFVGRHVGAVSNVVAPGYQQVVGEASGGYGKRDHNGGGYHCFGGGGGGYGVGPTMGMGGPVSPANSSDGIGNDGGQFGLDMGGLRGRKRVVDGPVEKVVERRQRRMIKNRESAARSRARKQAYTVELEAELNQLREENSQLKQALAELERGRKQQCFEEVNVSVKTKAQKAKEKLRALRRNMSCPL

SEQ ID NO: 1685 - protein, 289 aa, Glycine max
APPPSENPRSYYKCTHPSCPTKKKVERSLEGHITEIVYKGSHNHPKPLGRKNGSQSIHQTSSSCTNSGISDQSVGEEDLEQTSQTSYSGGGDDDLGNEAKRWKGENENDGHSYSSAGSRTVKEPRVVVQTTSEIDILDDGYRWRKYGQKVVKGNPNPRSYYKCVAPGCPVRKHVERAAHDMKAVITTYEGKHIHDVPLGRGNSSYSMNRTSLNNNTNTSTSNVTAPAPIRPSAVTNYSNSASFTNSLHDTKPPTSASQEPFPMDVLLSPGSIGFAANDLFLQSFLSKNF

SEQ ID NO: 1686 - protein, 516 aa, Glycine max
MATELASSPNWVPSAATCLAAFAALLLLFLRGLRRRRYNLPPGPKPWPIIGNLNLIGSLPHRSIHTLSKKYGPIMHVWFGSSSVVVGSSVEIAKAVLKTHDATLAGRPKFAAGKYTTYNYSDITWSQYGPYWRQARRMCLMELFSAKRLQEYEYIRKQELRCLLNELFNSANKTILLKDHLSSLSLNVISRMVLGKKYLEESQNAVVSPDEFKKMLDELFLLNGVYNIGDFIPWIDFLDLQGYIKRMKTLSKKFDMFMEHVLDEHIERKKGIKDYVAKDMVDVLLQLAEDPTLEVKLERHGVKAFTQDLIAGGTESSAVTVEWAISELLRRPEIFKKATEELDRVIGRERWVEEKDIVNLPYVNAIVKEAMRLHPVAPMLVPRLAREDCNLGGYDIPKGTQVLVNVWTIGRDPSIWDNPNEFQPERFLNKEIDVKGHDYELLPFGAGRRMCPGYPLGLKVIQASLANLLHGFNWRLPDNVRKEDLNMDEIFGLSTPKKLPLETVVEPRLPYHLYSL

SEQ ID NO: 1687 - protein, 225 aa, Glycine max; identical to SEQ ID NO: 605

SEQ ID NO: 1688 - protein, 442 aa, Glycine max
AVELIKKGHAYVDHQTPDEIKEHREKKLNSPWRDRPISESLKLFEDMKNGSIEEGKATLRMKQDMQSDNYNMYDLIAYRIKFTPHPHAGDKWCIYPSYDYAHCIVDSLENITHSLCTLEFETRRASYYWLLHALSIYQPYVWEYSRLNVSNTVMSKRKLNRLVTEKWVDGWDDPRLMTLAGLRRRGMTPTAINAFVRGIGITRSDGTLISVERLEYHVREELNKTASRAMVVLHPLKVVITNLEANSVIEVDAKKWPDAQADDASAFYKISFSNVVYIEHSDFRMQDSKDYYGLAPGKSVILRYAFPIKCTEVILADDNETILEIRAEYDPSKKTKPKGVLHWVAQPSPGVDPLKVEVRLFERLFLLENPAELDNWLGDLNPNSKVIIPNAYGVSSIQNAKVGDNFQFERLGYFVVDQDSTSEKLVFNRTVTLKDSYSKGGK

SEQ ID NO: 1689 - protein, 633 aa, Glycine max
MNGLRSERAPLLEAERAGRGKRDGASEGQASDLEHGDAVPAANVGFCRVLSLAKPEAGKLVIGTVALLIAATSSILVQKFGGKIIDIVSREMKTPEEKDEALNAVKNTILEIFLVVVFGSICTALRAWLFYTASERVVARLRKNLFSHLVNQEIAFFDVTRTGELLSRLSEDTQIIKNAATTNLSEALRNFSTALIGLSFMFATSWKLTLLALAVVPVLSVAVRKFGRYLRELSHKTQAAAAVASSIAEESFGAIRTVRSFAQEDYETTRYSEKVNETLNLGLKQAKVVGLFSGGLNAASTLSVIIVVIYGANLTIKGYMSSGDLTSFILYSLSVGSSISGLSGLYTVVMKAAGASRRVFQLLDRTSSMPKSGDKCPLGDQDGEVELDDVWFAYPSRPSHPVLKGITLKLHPGSKVALVGPSGGGKSTIANLIERFYDPTKGKILLNGVPLVEISHKHLHRKISIVSQEPTLFNCSIEENIAYGFDGKVNDVDIENAAKMANAHEFISKFPEKYQTFVGERGVRLSGGQKQRIAIARALLMDPKILLLDEATSALDAESEYLVQDAMESLMKGRTVLVIAHRLSTVKTADTVAVISDGQVVERGNHEELLNKNGVYTALVKRQLQTTKTEISV

SEQ ID NO: 1690 - protein, 333 aa, Glycine max
MAAISSLSLFFKLKFSLILISCVIGVTSAQLSSKFYDKSCPKALTTIRKEVERAVRNESRMGASLLRLHFHDCFVQGCDASVLLDDTANFTGEKNSFPNANSLRGFEVIDNIKSKLEGMCKGVVSCADILAVAARDAVVALGGQKWEVQVGRRDSTTASLDEANSDLPAPFLDLSGLITAFAKKNFTTQELVTLSGGHTIGLVRCRFFRARIYNESNIDPTFAQQMQALCPFEGGDDNLSPFDSTTPFKFDNAFYKNLVQLKGVVHSDQQLFTNNGSGPTNDQVNRYSRNMGNFKKDFADAMFKMSMLTPLTGSNGQIRQNCRLVNPPSTTVS

SEQ ID NO: 1691 - protein, 83 aa, Glycine max
SRADSARGKLFYNAVTVKCCRPFPKKLDTPRKSEIVFIAPTGDEISTKKQLEQYLKAHPGNPVISEFDWGTGETPRRSARISE

SEQ ID NO: 1692 - protein, 341 aa, Glycine max
MEVKGRISNSTITTTTIQSEDEMDLRRGPWTVDEDLALINYIANHGEGRWNSLARSAGLKRTGKSCRLRWLNYLRPDVRRGNITLEEQLLILELHGRWGNRWSKIAQYLPGRTDNEIKNYWRTRVQKQAKQLKCDVNSKQFKDAMRYLWMPRLVERIQAAAVAATTATATVGSPTASASATTTITTNNNATTYNYENNNNNNLNNSFEVHSGNMMLRNPAIMNINNFVGSHSYTPENNSTGASSDSFGAQVSPVSDLTQDYYNNVTVGNNNNNNNPNPEYYQQAHDQLSFLDCITSPSGLFDFQSMEPNTPWIQSNVGDTSTNGFWNVENMLLFQQLSDNM

SEQ ID NO: 1693 - protein, 220 aa, Glycine max
  misc_feature (45)..(45): Xaa can be any naturally occurring amino acid
  unsure (1)..(220): unsure at all Xaa locations
MNIFVPKFLLLSAVSSFSNSSSIKRERDQVLGGEEFEVVVEESSXRVVGDVDEDGNPRKKLRLTKEQAAVLEENFREHSTLNPKQKQELAMKLNLRARQVEVWFQNRRARTKLKQTESDCELLKKCCDTLTVENKKLQKELQELKSMQATPVPLYMQIPAATLSICPSCERICGGNENNGDNNNNGSSHTTTLLIGSKTHHHSFYKSNNYPFPHSSSAAC

SEQ ID NO: 1694 - protein, 258 aa, Glycine max
PPVRRVGVILHLKPVRDDSKTLLQTGISHDNHLDALGFALEPNCSQNRSSACATTDSLCVPGADMHQPLIGYPSSRAVIHQRIQGFSNMLAEHQATSLGNLVESDHDSAPSPINTSGEKNLTDSKELITVPEMGMEALAVLPVHQKSKRTEIAPRRIRRPFSVAEVEALVQAVEKLGTGRWRDVKLHAFDNAKHRTYVDLKDKWKTLVHTARISPQQRRGEPVPQELLDRVLTAHAYWSQQQTKQQLKHHSTKPCLLL

SEQ ID NO: 1695 - protein, 458 aa, Glycine max
SLPESIVSLPHLKSLYFGCNKRMSEGGPANLNSSLINTDYGRCKGKEPRFGQVFVIGAITCGSLLIALAVGIIFVCRYRQKLIPWEGFGGKNYIMETNVIFSLPSKDDFLIKSVSIQTFTLEDIEVATERYKTLIGEGGFGSVYRGTLNNSQEVAVKVRSATSTQGTREFDNELNLLSAIQHENLVPLLGYCNENDQQILVYPFMSNGSLQDRPYGEPAKRKILDWPTRLSIALGAARGLAYLHTFPGRSVIHRDVKSSNILLDHSMCAKVADFGFSKYAPQEGDSNVSLEVRGTAGYLDPEYYKTQQLSEKSDVFSFGVVLLEIVSGREPLDIKRPRNEWSLVEWAKPYVRASKMDEIVDPGIKGGYHAEAMWRVVEVALQCLEPFSAYRPNMVDIVRELEDALIIENNASEYMKSIDSLGGSNRYSIVIEKRVLPSTSSTAESTITTQALSHPQPR

SEQ ID NO: 1696 - protein, 248 aa, Glycine max
MGRGRVELKRIENKINRQVTFAKRRNGLLKKAYELSVLCDAEVALIIFSTRGKLYEFCSTNSMLKTLERYQKCSYGAVEVSKPGKELESSYREYLKLKARFESLQRTQRNLLGEDLGPLNTKDLEQLERQLDSSLKQVRSTKTQFMLDQLADLQNKEHMLVEANRSLTMKLEEINSRNQYRQTWEAGEQSMPYGTQNAHSQGFFQPLECTPTLQIGSDYRYIPEASEQQLAATTQAQQVNGFIPGWML

SEQ ID NO: 1697 - protein, 584 aa, Glycine max
MSGATTPLPSGVSTPDIRTRELKQPMDVAEYLFRRLHQVGVRSVHGLPGDYNLVALDYLPKCGLDWVGNVNELNAGYAADGYARIKGISAIITTFGVGELSAINAIAGAYSEYVPVVHIVGYPTTAAQKNNLLLHHTLGNGDFNSFADMSRKVSCAVSMLNDPHEAATLIDDAIKKCYVLSRPVYIALPSDMVGKKIEGERLKTPLNLEFSPNHEEKEDYVVDVVLKYLHAAKNPVILVDACAIRHRALKETDEFIKKTGIPTFVAPMGKSAVDETLPNYGGVYAGDGSNAGVRERVESADLIISIGAVKSDFNTAGFTYRTSQLNTIDLHSYGVAVKYSEYPGVRMNGVLTKVTAKLGKLNIESGPVPNNTVPKEHADSSDPTITQAWLWPRVGQWLRENDIVITETGTANFGIWETRFPKGVTAISQVLWGSIGYATGCLQGAALAAKELGRERTILFTGDGSFQLTAQEVSTMIRKNLNPIIFVICNDGYTIERCIHGWDAVYNDIQNWNYKDLPAAFGGKPEQFDTYQVKTKEELNKLFAEESFNTSKKLRFVELYMPRDDAPAALMLTAEAAAKRNLEG

SEQ ID NO: 1698 - protein, 199 aa, Glycine max
MDEVDLELENYEELFGMALSHSEELFENGGINSLFEAKDMSASAGDSHCQGAGAAEGSSAALVNPIQPACSNAASADSVMSTKTEPIVCFTARQSQSNISFSGVTKDSAGDYQDCGASSMLLMGEPPWCPPCPESSLHSANRSNAVMRYKEKKKTRKFEKKVRYASRKARADVRKRVKGRFVKAGDVYDYDPLNQTRSY

SEQ ID NO: 1699 - protein, 254 aa, Glycine max
MDFRDLAHKFSRCIVTIGNLGLQLLWYFLRIILSAWYFISVVGNLFESYFISCGVLKKYKSLHSGKVRYLAIVIESEEAYQISRVVKLLQWLDIIGVKNVCLYDMNGVLKKSKETIFKELKNAKSIEEVNEVVALHDPDHMTLEFLSYADGKEAVAKAANLIFVEHLKRHKLGGELDLILLEPQLNEALQIVGSKGPEPDLLLVYGPVRSHLGFPAWRLRYTEIIHMGSLNFLRYGSLMKAIYNFTKVHQNYGT

SEQ ID NO: 1700 - protein, 413 aa, Glycine max
  misc_feature (34)..(34): Xaa can be any naturally occurring amino acid
  unsure (1)..(413): unsure at all Xaa locations
SRSSFGADQFDDADEAEKEHKSSFFNWFYLSINXGALIAASVLVWVQTNVSWGWGFGIPAVAMAIAVVSFFSGTRLYRNQKPGGSPLTRMCQVIVASIRKSDVQVPNDKSGLYEIEEDSESAIEGSRKLDHTNGLRFLDKAAVLGDSDNVKDPVNPWRLCTVTQVEELKAIIRLLPIWATGIIFSTVYSQMGSYFILQGDTMNNRVGNIKLHISPATLSVFDTISVIFWVPVYDRIIVPVARKFTGRKNGITQLQRMGIGLFISIFAMVYSVILESMRLKMVRRHNYYDREQVPMSLYLQIPPYFIIGCAEVFTFIGQLEFFYEQAPDAMRSTCSALQLLTVSFGSYLSSLLITIVTKVTTRNGGPGWLPDKLNYGHLDYFFLLLTVLSVLNFVAFLQVSKLYSYKNPVGTLH

SEQ ID NO: 1701 - protein, 177 aa, Glycine max
MAITTNPLVVGRVIGDVLEPFASSIPLRVVYNNNKEVINSGELKPSQIINPPRVEVGGDDLRTLYTLVMVDPDAPSPSDPNMREYLHWLVTNIPATTSASFGQEVVSYESPRPTSGIHRFIFVLFRQPRRMSIPAPGWRQNFITRDFAEYYNLGLPVAAVYFNCQRQGGSGGRRLML

SEQ ID NO: 1702 - protein, 380 aa, Glycine max
MAKSSTEKNGLKKGPWTPEEDQKLIDYIQKHGHGKWRTLPKNAGLKRCGKSCRLRWANYLRPDIKRGRFSFEEEEAIIQLHSVLGNKWSTIAANLPGRTDNEIKNYWNTHIKKKLLKMGIDPVTHTPRLDVIQLASILNTSLYNSAPQFNYPSLSGIGRSVINPSHMLGLLTTLLSCQNRNYNPDVLNNNQLSGGSTLLQNQHQCSRMQLDSTQAFQPNQPQVSLQENHIAKSNSNPLNMEPQVMKTTLENQITPIATPFSQQNTLPNLWHYNTEGHISDLPTMAQSSSAMQCFSSPKFNSIYNNLLENQNLCNNNEGMPNFNLSSLLSSTPSSSSPISTLNSSSSTTFVNGTTEDERDTYGSSMLMYNISNGLNDSGLL

SEQ ID NO: 1703 - protein, 172 aa, Glycine max
MARENPLVIGGVIGDVLNPFTSSVSLTVSINNRAISNGLELRPSQVVNRPRVTVGGEDLRTFYTLVMVDADAPSPSNPVLREYLHWMVTDIPATTNASFGREVVFYESPNPSVGIHRIVFVLFQQLGRDTVITPEWRHNFNSRNFAEINNLAPVAAAYANCQRERGCGGRRY

SEQ ID NO: 1704 - protein, 353 aa, Glycine max
MMLGETHRPNPTVHVPPWAPEIFSPYTGNADYSPYSMQEALSALQHYESTDAESDSEVPSREPEVPVDAYSCDHFRMFEFKVRRCARCRSHDWTDCPYAHPGEKARRRDPRKYHYSGTACPDFRKGSCKKGDACEYAHGVFECWLHPARYRTQPCKDGTSCRRRVCFFAHTPDQLRVLPQQSPRSADSYDGSPLRHAIESSCAKSHPFVASPGSASSPVESPPMSPMTVSVNEMVASLRNLQLGKVKSLPSSWNVMGSSGFGSPRGPMIRPGFFSLPTTPTQAPTRGGVNYFDQWDQSCCEEEPVMERVESGRSIRARMFEKLSKENHLDGSGSESGQIGVPDVGWVSELVSR

SEQ ID NO: 1705 - protein, 595 aa, Glycine max
MAIATCDHDKNAKALQFIEDMTQNTESVQERVLAEILSQNSQTEYLKRFELNGATDRDTFKSKVPVVSYDDLKHDIHRIANGDRSPILCAHPISEFLTSSGTSAGERKLMPTIRQEMDRRQLIFSLPMPVMNQYVTDMDKGKALIFLFTKAEQKTPSGLVARPVSASMYKSDQFKNRPYDPYNVYTSPDEAILCPDSFQSMYTQMLCGLIMRHQVLRVGANFASGLLRSIHLLQLNWAQLSHDISTGTLNPKITDPAIKQRMTQILKPDPELAEFIVKECSGENWERIIPRIWPNTKYVEVVVTGAMAQYVPTLDYYSGGLPLASNIYGSSECFFGINLNPFCNPSDVSYTIMPNMGYFEFLPQDHDDDDGASSSGSSFTLSRLIDLDDVELGKSYEIVVTTYSGLCRYRVGDILRVTGFHNTAPQFSFVRRKNVLLSIDSDKTDEAELQNAVEKASVLLKEFKTSVVEYTSFADTKSIPGHYVIYWELLMKDSSNAPTTEALEQCCLTMEESLNAVYRQGRVADHSIGPLEIRVVKNGTFEELMDYAISRGASISQYKVPRCVTFTPITELLDSRVESVHFSPSEPHWTPERRR

SEQ ID NO: 1706 - protein, 151 aa, Glycine max
  misc_feature (55)..(55): Xaa can be any naturally occurring amino acid
  unsure (1)..(151): unsure at all Xaa locations
MKGGKSKTESKRADAKLAVNKKGAATKTRKPAGKGKAAKDPNKPKRPPSAFFVFXEFRKVFNKEHPDNKAVSAVGKAAGAKWKTMSDAEKAPYVAKSEKRKVEYEKNMRAYNKKQAEGPTGGDEEESEKSVSEVNDEDDDEEGSGEEEDDD

SEQ ID NO: 1707 - protein, 359 aa, Glycine max
MSSVFSEHKFQLQPSHQLLSLKKSLRDIDIPVPPRKLLTRRSAAVHDVSGDMFSDDTLRHKYLPHNGSTDSSDDDSDGDPYASDQFRMFEFKVRRCSRSRSHDWTDCPFVHPGEKARRRDPRRFHYSATVCPEFRRGQCDRGDACEFSHGVFECWLHPSRYRTEACKDGRNCKRKVCFFAHTPRQLRVLHSNENSNKKKCTNMSPHNNNNNTNNCCLVCHCSSSTRSPTSTLFGMSHFSPPLSPPSPSSPSRFETNHHHGVVKYNKDVLSELMCSMEGLNFGEASLLSAASKPHHHNNLSSWLDVSEDHNQKQFSTLSPTITACGSFSNNGNGRFLREESGVVDDVISPDLAWVNELLM

SEQ ID NO: 1708 - protein, 557 aa, Glycine max
MDKGWGLTLDTSSSQSLPLFPSNDNKMFPLLGFPVNLSRASKEDDENRKVVGEVDFFSDRNKPTPPPSHDHNVKPNIVKKEIDETPLHINTGLQLLTANTGSDQSTVDDGVSSDAENKRAKTTELAQLQVELQRMNSENKKLKEMLSHVTGNYTALQMHLVTLMQQNQQRTESTENEVVQGKVEDKNVGVGGGKVPRQFLDIGPSGTAEVDDQVSDSSSDERTRSSTPQNHNIEAGARDGARNNNGKSQLGREESPDSESQGWGPNKLQKVNPSNPMDQSTAEATMRKARVSVRARSEAPMISDGCQWRKYGQKMAKGNPCPRAYYRCTMAVGCPVRKQVQRCADDRTILVTTYEGTHNHPLPPAAMAMASTTAAAASMLLSGSMSSADGIMNPNLLARAILPCSTSMATLSASAPFPTVTLDLTHNPNPLQFQRPGAPFQVPFLQAQPQNFGSGAAPIAQAQALYNQSKFSGLQLSQDVGSSQLAPQAPRPPLQPSQQPSLADTVSAAASAITADPNFTAVLAAAISSIIGSAHNSNNNNSNNNTSRTTISSFSGN

SEQ ID NO: 1709 - protein, 325 aa, Glycine max
MIGYVFNTKAPMASYYFLLLVLVGATTASGAELCADFYSCTCPNLLPIVKKGVAKAIQKEPRMGASLLRLHFHDCFVNGCDASILLDDTSNFIGEQTAAANNQSARGFNVINDIKASVEKECPRVVSCADILALSARDSVVYLGGPSWEVGLGRRDSTTASRSDANNSIPGPFLSLTALINNFANQGLSVTDLVALSGAHTIGLAECKNFRAHIYNDSNVDPSYRKFLQSKCPRSGNDKTLEPLDHQTPIHFDNLYFQNLVSKKALLHSDQELFNGSSTDNLVRKYATNAAAFFEDFAKGMLKMSNIKPLTGSQGQIRINCGKVN

SEQ ID NO: 1710 - protein, 306 aa, Glycine max
  misc_feature (249)..(249): Xaa can be any naturally occurring amino acid
  unsure (1)..(306): unsure at all Xaa locations
MEMSFFYPVKLRIKSFRVPELFIEIPETATVGSLKRTVMEAVTAVLGGGLRVGVILHGKKVRDDSKTLLQTGISHDNHLDALGFALEPNCSRNRPSACATTDSLHIPSADMPQPLIGYPSSPAVIHQRIQGFSNMLAKHQATSSGNLVESDHDSAPSPINTSGEKYLSDSKELITVPEMGMEALAVLPVHQKSKRTEIAQRRIRRPFSVTEVEALVQAVEKLGTGRWRDVKLRAFDNAKHRTYVDLKCXDKWKTLVHTARISAQQRRGEPVPQELLDRVLTAHAYWSQQQTKQQLKHHSTKPCLLL

SEQ ID NO: 1711 - protein, 325 aa, Glycine max
MIPTYRYSVSSPMPIDLNEDHTHHVFSTSHQASSSSSSLSFSILFNPDHQGQGGSCCHWESKHLQSDEEAQKIVPSSESWEHPVSEKDENRSDLKLRVWKKEDKCENFQVEDNSTKWMPLKMRMMRRMMVSDQTGFDTEGMISNSKQIKNEEKNPPLTPLGTDDSNNYNSSANHSNITVRVCSDCHTTKTPLWRSGPKGPKTLCNACGIRQRKARRAIAVAATANGMNPVEAEKSQVKKGNKLHSKGMKSKTKGAPHMKKKRKLGAKYRKRFGAFEDLTVRLSKNLALQKVFPPDEKEAAILLMALSYGLLHGFPTDRYVNYLDL

SEQ ID NO: 1712 - protein, 361 aa, Glycine max
LIFLQRKEKEAIIKEGTTEIEMEGTRAKEGTLPPGFRFHPTDEELVTCYLVNKISDSNFTGRAITDVDLNKCEPWELPGKAKMGEKEWYFFSLRDRKYPTGVRTNRATNTGYWKTTGKDKEIFNSETSELIGMKKTLVFYKGRAPRGEKSNWVMHEYRIHSKSSYRTNRQDEWVVCRVFKKSGGAKKYHSSNHARTVNPYSLEIGPSIMPPPMMQLGDPSAHFLYGRNYMNSAELAELARVLRGGGSTSSVNLPIQSQLSYPTSSSAGGGGFIISGLNLNLGGGATATTQPILRPMQPSPPVHTMAQVLDVNSSMMTTSSLGAENNVGYGTEVSNNMNSHGNRYMGMDHHCMDLDNYWPSY

SEQ ID NO: 1713 - protein, 113 aa, Glycine max
  misc_feature (106)..(106): Xaa can be any naturally occurring amino acid
  unsure (1)..(113): unsure at all Xaa locations
MAANVGESAAVGGSSSDAAGGSFECNICFELPQEPIVTLCGHLFCWPCLYRWLHMHANTPECPVCKAIVEEDKLVPLYGRGKDRVDPRSKNTPGVDIPQRPAGQRXATAQQAD

SEQ ID NO: 1714 - protein, 195 aa, Glycine max
  misc_feature (140)..(140): Xaa can be any naturally occurring amino acid
  unsure (1)..(195): unsure at all Xaa locations
MSESEKQRVTGKVKWFDDQKGFGFITTDDSGEEFFVHQSSIRSDGFRSLALGESVEFLIDSDPEGRTKAVDVTGPDESPVQGTRGGGGGGRGSYGGGGGRGGYGGGGRGGRGGYGGGGGGYGGGGYGGGGGYGGGGGGGXGGGCYKCGETGHIARDCSQGGGGGGRYGGGGGGGGSCYNCGESGHFARDCPSSAR

SEQ ID NO: 1715 - protein, 177 aa, Glycine max
MSWCYCAKPMTLQLPKMLPRSSSFHSHVGGVTVTSSTLSLRLSSTLVFTHNLHFQPKLKRASTTVRCSSALTPQLKSTLDQVIASNKVVVFMKGTKDFPQCGFSNTVVQILKSLNVPFETINVLENDLLRQGLKEYSSWPTFPQVYIEGEFFGGCDITVDAYQKGELQELLEKAMLS

SEQ ID NO: 1716 - protein, 156 aa, Glycine max
LNLSNLCVLLRLFDYIQGKNNYKQKIEMTAPVISEVLPSDGPFCESSFVVSFYVPKENQANPPPAKGLQVQRWKTVFVAVRQFGGFVKDSSVGEEAAALKASIAGTKWADAVEKSQKRAGHASVYTVAQYNAPFEYDNRVNEIWFLFDIENELQTV

SEQ ID NO: 1717 - protein, 160 aa, Glycine max
MSDEEHHFDPQADAGASKSYPQQAGTIRKNGYIVIKSRPCKVVEVSTSKTGKHGHAKCHFVAIDIFNGKKLEDIVPSSHNCDVPHVNRTDYQLIDISEDGFVSLLTDNGNTKDDLKLPTDEALLAQIKDGFSEGKDLVVSVMSAMGEEQICSLKDIGPKN

SEQ ID NO: 1718 - protein, 113 aa, Glycine max
MALAKAKEIVASAPVVVFSKSYCPFCVQVKKLFTQLGASFKAIELDTESDGTEIQSALAEWTGQRTVPNVFINGKHIGGCDDTIALNKGGKLVALLTEAGAISGSSSKTTVTA

SEQ ID NO: 1719 - protein, 218 aa, Glycine max
MDTRIGSLDAAKPACNDVVSCNHTTSAAIQPCVPATVINGAGGDSTLGGHLARRLVEIGVTDVFSVPGDFNLTLLDHLIAEPALNLVGCCNELNAGYAADGYARARGVGACVVTFTVGGLSVLNAIAGAYSENLPLICIVGGPNSNDYGTSRILHHTIGLPDFSQELRCFQTITCFQAVVNNLEDAHELIDTAISTALKESKPVYISISCNLPGIPHP

SEQ ID NO: 1720 - protein, 150 aa, Glycine max
MSDEEHHFESKADAGASKTYPQQAGTIRKNGYIVIKGRPCKVVEVSTSKTGKHGHAKCHFVGIDIFTAKKLEDIVPSSHNCDVPHVNRTDYQLIDIAEDGFLSLLTENGNTKDDLKLPTDLCTEGYWAKELASIAGSLLFSFMQKLYIFV

SEQ ID NO: 1721 - protein, 203 aa, Glycine max
  misc_feature (153)..(153): Xaa can be any naturally occurring amino acid
  misc_feature (164)..(164): Xaa can be any naturally occurring amino acid
  misc_feature (167)..(168): Xaa can be any naturally occurring amino acid
  misc_feature (170)..(170): Xaa can be any naturally occurring amino acid
  misc_feature (173)..(173): Xaa can be any naturally occurring amino acid
  misc_feature (176)..(176): Xaa can be any naturally occurring amino acid
  misc_feature (179)..(179): Xaa can be any naturally occurring amino acid
  misc_feature (182)..(182): Xaa can be any naturally occurring amino acid
  misc_feature (184)..(184): Xaa can be any naturally occurring amino acid
  misc_feature (196)..(196): Xaa can be any naturally occurring amino acid
  misc_feature (199)..(199): Xaa can be any naturally occurring amino acid
  misc_feature (202)..(202): Xaa can be any naturally occurring amino acid
  unsure (1)..(203): unsure at all Xaa locations
MASISSAELNYLVYRYLQESGFTHAAFTFGYEAGINKCSIDGNLVPSGALVTFIQKGLQYFEMEANLSNCDADLEEDFSFLQPLDLITKDVHELRQMISERRKKLQKERKKEFEKEHEGERVRVREKDRREREKEVEKGRREREKEVEKDRRXREKEVEKDRRXREXXVXKDXREXEKXVEXDXREKEKEVEKDRXERXKEXV

SEQ ID NO: 1722 - protein, 395 aa, Glycine max
SPFLLLLYYLSHASGIVSPCWRLPEGEISSRHGDASGRLHGFPPPKDSGRHANGEFSMAVIQANNLLEDQSQLESGPLSLTEGNPQGTFVGIYDGHGGPEAARFVNDRLFNNIKKFTSENNGMSADVINKAFLATEEEFLSLVEKLWLHKPPIASVGSCCLIGIICSGELYIANAGDSRAVLGRLDEAMKEIKAIQLSVEHNASHASVREELHSLHPNDPQIVVMKHQVWRVKGLIQISRSIGDAYLKKAEFNKAPLLAKFRLSEPFDQPILKAEPAILVQKLCPQDQFLILASDGLWEQMSNQEAVDIVQSCPRNGAAKKLVKTALCEAAKKREMRYSDLRKIDRGVRRHFHDDITVIVLYLDSNFLSHANSRVPLVSIKGGGDSGYGIGIIDA

SEQ ID NO: 1723 - protein, 477 aa, Glycine max
GPGSTHASGIVGPNSNDYGTNRILHHTIGLPDFTQELRCFQAITCFQAVVNNLDDAHELIDTAISTALKESKPVYISISCNLPGIPHPTFARDPVPFFLAPKVSNQEGLEAAVEATAALLNNAVKPVIVGGPKLRVAKAQKAFLEFAEASGYPIAVMPSGKGLVPEHHPHFIGTYWGAVSSSFCGEIVESADAYVFVGPIFNDYSSVGYSLLIKKEKAIIVQPNRVTIGNGPSLGWVFMADFLTALAKKVKTNTAAVENYRRIYVPPGIPLRREKDEPLRVNVLFKHIQELLSGDTAVIAETGDSWFNCQKLHLPENCGYEFQMQYGSIGWSVGATLGYAQAATDKRVIACIGDGSFQVTAQDISTMIRCGQKTIIFLINNGGYTIEVEIHDGPYNVIKNWDYTRFVDAIHNGQGKCWTAKVRTEDDLTEAIAKATGPQKDSLCFIEVFVHKDDTSKELLEWGSRVAAANSRPPNPQ

SEQ ID NO: 1724 - protein, 229 aa, Glycine max
MFLFNLIELVYNSENTNTLPYLECYFSMQGGEPCSIWAEGFTQQRSNAKAIESLGRMLTEGIHTDITINASDGSIGAHRAVLAARSPVFRSMFSHNLQEKELSTINISDMSLESCQAFLNYLYGIIKHEEFLTHRLALLQAADKYDISDLRDVCHESLLEDIDTKNVLERLQNASLYQLMKLKMSCIRYLVKFGKIYEIRDDFNTFLRNADRDLISEVFHEVLDAWKGF

SEQ ID NO: 1725 - protein, 123 aa, Glycine max
  misc_feature (13)..(13): Xaa can be any naturally occurring amino acid
  unsure (1)..(123): unsure at all Xaa locations
CSPNHHESNSSSXVIWQDNIYPDDMTYEELLDLGEAVGTQSRGLSQELIDMLPTSKYKFGSLFKRKNSGKRCVICQMTYRRGDQQMKLPCSHVYHGECITKWLSINKKCPVCNTEVFGEESTH

SEQ ID NO: 1726 - protein, 144 aa, Glycine max
  misc_feature (31)..(31): Xaa can be any naturally occurring amino acid
  misc_feature (133)..(133): Xaa can be any naturally occurring amino acid
  unsure (1)..(144): unsure at all Xaa locations
PCHFTRPLREKADAAASKTFPQEAATIRKTXYIVIKNSSCKAVEASTSKTWQACDTLKCRLMYAIVHLSLAKKLEDIAPSSHNCDVPHANHIDYHLIDISEDVLVMLLTDTGDTNDDLRLPTDENLLSHINDXFAEGKDLVVYV

SEQ ID NO: 1727 - protein, 169 aa, Glycine max
  misc_feature (106)..(106): Xaa can be any naturally occurring amino acid
  unsure (1)..(169): unsure at all Xaa locations
VVLSHRCKLARMADETFEQVTSGASLTFPQQASALRKNGFVLLKGFPCKIVDMSTSKTGKHGHAKISITGVDIFTGKKYEDVTPSTHNMDVPHVSRLDYQLIDIWXGEKAPVSLLTEAGETKDDLNLPDDAELAGEIRAAFDEGKDIIVSVLAAMGIEQIISWKVDTKA

SEQ ID NO: 1728 - protein, 188 aa, Glycine max
MSGRVSGKVKWFNDQKGFGFISPDDGSDDLFVHQSQIKSDGFRSLAEGESVEFAIESESDGRAKAVDVTGPDGASVQGTRRGGDGGRSYGGGRGGGGGGYGGGGGYGGGGGYGGGGGYGGGGRGGGGGACYNCGESGHLARDCSGGGDMEAGGGGRYGGGGGGGGGGGSCYSCGESGHFARDCPSSAR

SEQ ID NO: 1729 - protein, 97 aa, Glycine max
MSTPGGEEDKKPASAGGEGGGAHINLKVKGQDGNEVFFRIKRSTQLKKLMNAYCDRQSVDMKAIAFLFDGRRLRAEQTPDELEMEDGDEIDAMLHQT

SEQ ID NO: 1730 - protein, 182 aa, Glycine max
MARVYVGSLDPAVTARELEDEFRVFGVLRSVWVARKPPGFAFVDFDDRRDAQDAIKDLDGKNGWRVELSRNASSGPGGRDRSGGSEMKCYECGESGHFARECRLRIGSGGLGSGRRRSRSRSRSRSRSPRYRRSPSYSRRSYSRSPRRRSVSPARGRSVSRSPVRGRDESPAYGNGYRRSRS

SEQ ID NO: 1731 - protein, 203 aa, Glycine max
MDCSSVLHSSNSSFFPFNENDPEEMLLYGMITSYQEKVIIKEEEVNSEENNNKNKKNNNKSSFRGVRSRPWGKFAAEIRDSTRHGVRVWLGTFDSAEAAALAYDQAAFSMRGSAAVLNFPVEKVKESLRDMNCTLSQLDGSSPVVALKRRHSLGRKMAAKKKKVEETHGDVRLENVVVLEDLGAEYLEHLLMMSSHDTTSCSW

SEQ ID NO: 1732 - protein, 323 aa, Glycine max
  misc_feature (114)..(114): Xaa can be any naturally occurring amino acid
  unsure (1)..(323): unsure at all Xaa locations
MAYRTSSITSLFLTLVLLGTILCDAQLSSTFYDSACPNALSTIRSVIRCAVSAERRMAASLIRLHFHDCFVQGCDASILLDDSSTIESEKSALHNANSIRGYNIIDQAKSEVEXVCPGVVSCADIVAVAARDASFAVGGPSWTVKLGRRDSTTASKSSATSDLPRFTDDLDTLISKFNNKGLTARDMVTLSGAHTIGQAQCFTFRGRIYNNASDIDAGFASTRQRGCPSVSNDDNDKKLAALDLVTPNSFDNNYFKNLIQKKGLLQSDQVLFSGGSTDSIVSEYSKNPTTFKSDFAAAMIKMGDIEPLTGSAGMIRKICSSVN

SEQ ID NO: 1733 - protein, 161 aa, Glycine max
  misc_feature (19)..(19): Xaa can be any naturally occurring amino acid
  misc_feature (103)..(103): Xaa can be any naturally occurring amino acid
  misc_feature (148)..(148): Xaa can be any naturally occurring amino acid
  misc_feature (155)..(155): Xaa can be any naturally occurring amino acid
  unsure (1)..(161): unsure at all Xaa locations
RVSYVGPPPSPDVGGVARXRAFAKKLSDAPLAIVDKRRQGHNVAEVMNLIGDVRGKVAVMMDDMIDTAGTISKGAELLHQEGAREVYACCTHGVFSPPAIERXSSGLFQEVIITNTIPLKEEKSFPQLTILSVANLLGETIWRVHDDXSVGHEPXSSLDID

SEQ ID NO: 1734 - protein, 476 aa, Glycine max
MAQLKASPACSTRATAPSFHTTGHLYHQFSKAKPLSLKELGLKTSVGANKLQVIKAAARIDTEVVSETTKGGGLRGKLNKVVLAYSGGLDTSVIVPWLRENYGCEVVCFTADVGQGIKELDGLEAKAKASGACQLVVKDLKEEFVREYIFPCLRAGAVYERKYLLGTSMARPVIAKAMVDVAKEVGADTVSHGCTGKGNDQVRFELTFFALNPKLNVVAPWREWDITGREDAIEYAKKHNIPVPVTKKSIYSRDRNLWHLSHEGDILEDPANEPKKDMYMMSVDPEDAPDQAEYVEIGIESGLPVSVNGKRLSPASLLAELNEIGGRHGIGRIDMVENRLVGMKSRGVYETPGGTILFAAARELESLTLDRETIQVKDSLALKYAELVYAGRWFDPLRESMDAFMQKITETTTGSVTLKLYKGSVTVTSRKSPFSLYRQDISSFESGQIYDQADAAGFIRLYGLPMRVRAMLEQGI

SEQ ID NO: 1735 - protein, 386 aa, Glycine max
MAKPVSIEVWNPSGKYRVVSTKPMPGTRWINLLVQNDVRLEICTEKKTILSVEDIIALIGDKCDGVIGQLTEDWGEQLFSTLSKAGGKAFSNMAVGYNNVDVDAANKYGVAVGNTPGVLTETTAELAASLSLAAARRIVEADEFMRAGLYDGWLPHLFVGNLLKGQTVGVIGAGRIGSAYARMMVEGFKMNLIYYDLYQSTRLEKFITAYATFLKASGETPVTWKRAATMDEVLQEADIISLHPVLDKTTYHLVNKERLAKMKKEAILINCSRGPVIDEAALVEHLKQNPMFRVGLDVFEEEPYMKPGLAELKNAIVVPHIASASKWTREGMATLAALNVLGKIKGYPVWFDANRVEPFLNENAQPPAASPSIVNAKALGLPTSKL

SEQ ID NO: 1736 - protein, 159 aa, Glycine max
MAGMVFGLDAPMMAALQHLLDIPDGEAGAAAGEKQGPTRAYVRDARAMAATPADVKELPGAYAFVVDMPGLGSGDIKVQVEDERVLVISGERRREEKEDAKYLRMERRMGKLMRKFVLPENADMEKISAACRDGVLTVTVDKLPPPEPKKPKTIQVQVA

SEQ ID NO: 1737 - protein, 196 aa, Glycine max
MAPPQKLFLAAIVAAVIVAATTGYAPNSAAEDIVHSSCVHASYPSLCVRTLSTYSGPTITNRRELAQAAVKISLSHARAAAKKLAAVRETVGKKRVKAAVVDCVEMIGDSVDELSRTLGVLKHLHVSGVSANEFRWQMSNAQTWASAALTDDDTCLDGFKGVEGKVKTEVKHWMTKVARVTSNALYMINQLDESRG

SEQ ID NO: 1738 - protein, 653 aa, Glycine max
MASSAMETCKSEDLHMQVDIEKNAKDIRSQWVLNAPEPPSPWRVVADSVSKTISHYKHKLSSLIDQPCTTLLLSVLQVVFPILAWGRNYTATKFRKDLLAGLTIASLCIPQSIGYATLAHLDPQYGLYTSVVPPLIYAVMGTSREIAIGPVAVVSLLLSSMMEKLVDPATDPVGYTKLILLATLFAGIFQTSFGLLRLGFLVDFLSHAAIVGFVAGAAIVIGLQQLKGLLGITHFTTKTDIVSVMKAVWEAVHNPWNPRNFILGCSFLVFILTTRCLGKRKKKLFWLASISPLVSVVVSTLIVFITRADKNGVKIVKHVKGGLNPSSIHQLDFNNPYIGEVAKIGLVVAVVALTESIAVGRSFASIKGYQLDGNKEMMSIGLTNIIGSFTSCYVATGSFSRTAVNYAAGCETLVSNIVMAITVLISLQFLTKLLYYTPTAILASVILSALPGLIDLSEAYKIWKVDKIDFLACAGAFFGVLFASVEIGLLVAVVISFSKIILISIRPGTETLGKLPGTDLFCDVYQYPMAVKVPGVMIIRVKSALLCFANANFVRERIIKWVTEEESEDDKGNSRSTIQFLILDTSNLVNIDTAGITALEELHKSLSSHGKQLAIANPRWQVIHKLKVSNFVGKIRGRVFLTVEEAVGCKSRC

SEQ ID NO: 1739 - protein, 152 aa, Glycine max
  misc_feature (109)..(109): Xaa can be any naturally occurring amino acid
  unsure (1)..(152): unsure at all Xaa locations
GQWEFQVGPTVGISAGDQVWVARYLLERITEIAGVVVTFDPKPIPGDWNGAGAHTNYSTESMRKDGGFKVIVDAVEKLKLKHKEHIAAYGEGNERRLTGKHETADINTXSWGVANRGASVRVGRETEQNGKGYFEDRRPASNMDPYVVTSMI

SEQ ID NO: 1740 - protein, 376 aa, Glycine max
MYRVHSKILKSNGAITNPPIFARYSSSSSSPSVPYVSNYQKQTAPSPTSSSGNRISPAILVIIVILAVVFFILGFLHLLVRFLIKQRSSSNSSISQSNRYPDMSESDAYQRQLQQLFHLHDSGLDQAFIDALPVFFYKEIIGLKEPFDCAVCLCEFLEQDKLRLLPMCNHAFHIECIDTWLLSNSTCPLCRGTLYSPGFAFENSVFDFESQLKEDGVSGSGGVGSVNKTTESYIVNGKRVFSVRLGNFRSTNNQDVVVERGEGESSSVNLDVRRCYSMGSFQYIVADSDLRVALGPSSGSMRQLLKGRAATNGSSFLDGDAVEGKKINIARKGESFSVSKIWQCSRKDKLTGSSDAHFHNSTVTSTLPWMNKVRGT

SEQ ID NO: 1741 - protein, 98 aa, Glycine max
MALVRSLLGAKKILGRSVTAAASTSKRATSAAPKGFLAVYVGESQKKRYVVPISYLSQPSFQALLNKSEEEFGFDHPMGGLTIPCSEDIFITVTSRFQ

SEQ ID NO: 1742 - protein, 338 aa, Glycine max
MAEEAQNSNSMNALPKVLVLGPPTCFITLQPLYSHKFHFLNPHTSSLSLQHFLHHHHHHHPSSISAVLCGASYSVTANVLCLLPALRLIVTTSAGTDHIDLAECRRRGIQVAGAGELFSEDVADMAVALLADVMRKISAADRYLRTQQNHDTTPWDFFTFGSKLAGKRVEIIGLGSIGMEVAKRLESFGCIILYNSKHKKASVSYPFYSSMVDLATTCDALVLCCALNEQTKHIINREVMLALGKQGFIVNVGRGGLIDEKELVKCLMEGEIGGAGLDVFENEPHVPKELLAMNNVVLSPHSAAFTVESMMNLCELMGGNLEAFFLNKPLITPVMLPQ

SEQ ID NO: 1743 - protein, 478 aa, Glycine max
MGWLSRIFKGSDHNKLSEGHYYKEDAGYYLPSTSGVTNDAWNQNQNQNENEDIDRAIALSLVEESRRANNNVNDYRSQLEEDEQLARAIEQSLNLESPPRYGNENMYQPPIQYFPLGSRICAGCYTEIGFGRYLNCLNAFWHPECFRCRACNLPISDYEFSTSGNYPYHKSCYKESYHPKCDVCKHFIPTNPAGLIEYRAHPFWIQKYCPTHEHDGTPRCCSCERMESQEAGYIALKDGRKLCLECLDSSIMDTNECQPLHADIQRFYDSLNMKLDQQIPLLLVERQALNEAREGEKNGHYHMPETRGLCLSEELSTFSRRPRLGTAMDMRAQPYRPTTRCDVTAILVLYGLPRLLTGSILAHEMMHAWLRLKGYRTLSQDVEEGICQVLAHMWLESELSSASGSNFVSASSSSASHTSRKGKRPQFERKLGEFFKHQIESDISPVYGDGFRAGQKAVRKYGLQRTLHHIRMTGTFPY

SEQ ID NO: 1744 - protein, 488 aa, Glycine max
  misc_feature (361)..(361): Xaa can be any naturally occurring amino acid
  unsure (1)..(488): unsure at all Xaa locations
MAIQMSSFVFVSLTILFCFSSLEKSFAFQTTKEDTESNNLHQYTHLVHLSSLLPSSSCSSSAKGPKRKASLEVVHKHGPCSQLNNHDGKAKSTTPHSEILNQDKERVKYINSRISKNLGQDSSVSELDSVTLPAKSGSLIGSGNYFVVVGLGTPKRDLSLIFDTGSDLTWTQCEPCARSCYKQQDAIFDPSKSTSYSNITCTSTLCTQLSTATGNEPGCSASTKACIYGIQYGDSSFSVGYFSRERLSVTATDIVDNFLFGCGQNNQGLFGGSAGLIGLGRHPISFVQQTAAVYRKIFSYCLPATSSSTGRLSFGTTTTSYVKYTPFSTISRGSSFYGLDITGISVGGAKLPVSSSTFSTXGAIIDSGTVITRLPPTAYTALRSAFRQGMSKYPSAGELSILDTCYDLSGYEVFSIPKIDFSFAGGVTVQLPPQGILYVASAKQVCLAFAANGDDSDVTIYGNVQQKTIEVVYDVGGGRIGFGAGGCK

SEQ ID NO: 1745 - protein, 437 aa, Glycine max
KAPQWGCIPPQYSETGVPGPPSSQLRRPPPPVNEVIALADSGFTRDEICSEPQQKGMVASLDTEEKSSETMGRKFSEPRQQQESPILKGNLDCVRECSTSVEGNLSSPGTSKTGERRRVKAEKTITLQVLRQYFAGSLKDAAKNIGVCTTTLKRICRQHGIKRWPSRKIKKVGHSLQKLQLVIDSVQGASGAFQINSFYSNFPDLASPNLSGTGFFSTLNQSDNPNSTSTQPEHGSLSPEGASKSPSSSSSQSSISSHSCSSMSELQQQHTTNIASDKDPATVGEYSADVVLKLIRNEAKLKSLSQDRAKLLPRSLSQETLGEHPKTQYQLPLLKTSSSKVDSHRVKVTYGDEKTRFRMLKNWVYEDLLQEIGRKFNVSDMSKFDVKYLDDDCEWILLTCDADLEECIDVCQSSESGTIKLSLQPSSHSVRSFLEFR

SEQ ID NO: 1746 - protein, 287 aa, Glycine max
MDKEFSTIPVAGRSSDDVSFADTVFGFWDSSNSSNDRDDDDDDDDDDETICTAENGKAFWEEQYQLLKAILCRTSSYETKVRQATKGVLRELNISEMLCICRRAEVAKSCRNCLLREVCDRLLNLGYNCAICKSKWRSSPEIPSGEHTYLEVRNNVSNTKRGAVKVVIELNFRAEFEMARANEEYNKLIKRLPEVFVGKSDRLRALVKIMCSASKKCMKEKKMHIGPWRKHKYMQAKWFSTCEMSTMESLPTIMNSAQQPKSKASMLTFDLLDNIIHGLHCTTVEVV

SEQ ID NO: 1747 - protein, 382 aa, Glycine max
  misc_feature (177)..(177): Xaa can be any naturally occurring amino acid
  misc_feature (338)..(338): Xaa can be any naturally occurring amino acid
  misc_feature (355)..(355): Xaa can be any naturally occurring amino acid
  unsure (1)..(382): unsure at all Xaa locations
MLKPRAFPNAFSLLLLLLHSLLALVSARGSHRTTWNTLTGSPPLVIARGGSSGIFPDSSEYAYELAAQISLKNLIVWCDVQLTKDGEGICISNIKLENATDIDKIFENRSKTYSVNGVQTSAYFAVDYTLTELRSNVLLIQGDFARNPNFDDNFEILTVNEMITITPASGPWLNIQXDAFYAQHNLSMKNFVLSVSRTVNVSYISSPEADFLRSIKAHINPRITKLVFRFLEKDEVDPSTNRTYGSLLKNLASIKTFASGILVPKGYIWPVDPTGLYLLPHTSLVSDAHKVGLEVFASDILNDIPISYNYSYDPVAEYLNFIDNGNFSVDGVLSDFPXTPSEAIDCFAHIGLNSXKKVNILVISKYGASGRYPSCTDLAYEK

SEQ ID NO: 1748 - protein, 193 aa, Glycine max
MAPRDSRATAFAGPGPGPSPAHKEIRYRGVRKRPWGRYAAEIRDPGKKTRVWLGTFDTAEEAARAYDTAAREFRGAKAKTNFPTPSELILNNNIRSPSQSSTLDSSSPPSPPPPLDLTLTPLSVAVTVFPVARPVLFFDAFARADAMIAVSRREMCGFERPAADFRRNDSDSDYNRRVLLDLDLNVPPLPEVA

SEQ ID NO: 1749 - protein, 579 aa, Glycine max
MCGILAVLGCSDSSQAKRVRVLELSRRLKHRGPDWSGLHQYGDNYLAHQRLAIVDPASGDQPLFNEDKTVVVTVNGEIYNHEELRKQLPNHTFRTGSDCDVIAHLYEEHGENFMDMLDGISSFVLLDTRDNSFIVARDAIGVTSLYIGWGLDGSVWISSELKGLNDDCEHFESFPPGHLYSSKERAFRRWYNPPWLSLAIPSAPYDPLALRHAFEKLWIKRLMTDVPFGVLLSGGLDSSLVAAVTARYLAGTKAAKQWGTKLHSFCVGLEGAPDLKATKEVAEYIGTVHHEFHYTVQDGIDAIEDVIYHIETYDVTTIRASIPMFLMSRKIKSLGVKWVISGEGSDVFFGGYLYFHKAPNKEEFHQETCRTIIVLHRYDCSRANKSTFVWGLEARVPFLDKEFIRVAMNIDPECKMIKKEEGRIEKWALRRAFDDEEHPYLPKHILYRQKEQFSDGVGYGWIDGLKAHAEKHVTDRMMLNAANIFPFNTPTTKEAYHYRMIFERFFPQNSCRLTVPGGTSVACSTAKAVEWDAAWSNNLDPSGRAALGVHASAYGNQVKAVEPEKIIPKMEVSPLGVAI

SEQ ID NO: 1750 - protein, 345 aa, Glycine max
MASGKLYAGGTRSLLLQNERLPCSSEVLESLWAQTSNPASFQGSKPVVDFENVSGSRMTDRPFFQALEKEENCDEDYEGCFHQPGKKRRLTSEQVQFLERNFEVENKLEPERKVQLAKELGLQPRQVAIWFQNRRARFKTKQLEKDYGVLKASYDRLKSDYESLVQENDKLKAEVNSLESKLILRDKEKEENSDDKSSPDDAVNSSSPHNNKEPMDLLIISKNATTTTTSENGTKVLSPLPLPIMVTCCKQEDANSAKSDVLDSDSPHCTSFVEPADSSHAFEPEDHSEDFSQDEEDNLSENLLMTFPSSCCLPKVEEHCYDGPPENSCNFGFQVEDQTFCFWPY

SEQ ID NO: 1751 - protein, 129 aa, Glycine max
MMRLRWSVLVMVTFAVSLFWLGPLQVKASNSVSAFVQNAIYSNRIAVFSKSYCPYCLRAKRLLAELNEKPFVVELDLRDDGFQIQSVLLDLIGRRTVPQVFVNGKHIGGSDDLSAAVQSGELQKLLSAS

SEQ ID NO: 1752 - protein, 196 aa, Glycine max
MAFAGTTQKCMACDKTVYLVDKLTADNRVFHKACFRCHHCKGTLKLSNYNSFEGVLYCKPHFDQLFKRTGSLDKSFEGTPKIAKPEKNWEEKPAATKVSSMFGGTRDKCAGCQKTVYPTEKVTVNGTPYHKSCFKCCHGGCVISPSNYIAHEGKLYCKHHHVQLIKEKGNLSQLEGDNEKSATNGKINGEEVAAET

SEQ ID NO: 1753 - protein, 447 aa, Glycine max
PPEEQQRGKEDEKNYSGFAGPPPPESSSNMFQVEPLKKQDMWKFNEPTKQTDFSPERTATKSEFPSIQSFSSEMAEGKPEIQSSSVPGSGYFDYTSASQSVREQKRTEDGFNWIKYGQKQVKGSENPRSYYKCTHPNCSVKKKVEKSLDGHITEIVYKGQHSHPKPQSTRRTNSQSIHQPSSSCTNSGITDHSVVTLGNPQMDHFSIQEDSSASVGEEEFEQTPQTSYSGGDGDNLGPDAKRWKGDNENDGYSVSASRSVREPRVVVETTSEIDILDDGFRWRKYGQKVVKGNSNARSYYKCTAPGCSVRKHVERAAHDIKAVITTYEGKHNHDVPAARGSGKYNSNRNSQNSNISAPIRPSAVNCYSNSSSFTNSLYNNTRLPATGNQESFSLDKFKNPGSFGYSDLNRPMGSHTNHAQYTDAAYSRAKDERKDDSFLQSFLSKDF

SEQ ID NO: 1754 - protein, 104 aa, Glycine max
MSATQEEDKKPGEQGGVHINLKVKGQDGNEVFFKIKRSTQLKKLMNAYCDRQSVDLNAIAFLFDGRRLRAEQTPDELDMEDGDEIDAMLHQTGGVANGMYLFCF

SEQ ID NO: 1755 - protein, 301 aa, Glycine max
QKKRDFLRISAAMALSLPTHPSPTVNPLRRSPKPTLRRVNHRVCVASAATPLLQVNDLRAKIVESNVDILHGVNLTINQGEVHAIMGKNGSGKSTFAKVLVGHPDYEVTGGSVVFKGENLLEMEPEERSLAGLFMSFQSPVEIPGVSIDLFLAMAYNARMKKLGRDEVGPIEFLPYLMEKLQLVNMKPDFLNRNVNQGFSGGERKRNEILQLAVLGADLAILDEIDSGLDVDALRDVANAVNRILTPEKSLLMITHYRRILDLLNPTHVHVMDKGKIARTGDISVVEAIESDGYEAVSALT

SEQ ID NO: 1756 - protein, 177 aa, Glycine max
  misc_feature (10)..(10): Xaa can be any naturally occurring amino acid
  misc_feature (35)..(35): Xaa can be any naturally occurring amino acid
  misc_feature (69)..(70): Xaa can be any naturally occurring amino acid
  unsure (1)..(177): unsure at all Xaa locations
MPRGSRDPLXVVGRVIGDVLDPFECSIPMRVTYQXKDVSNGCEFKPSQVVNQPRINIGGDDFRNFYTLXXVDPDAPSPSDPNFREYLHWLVTDIPATTGPTFGHEVVTYENPRPMMGIHRIVFVLFRQQGRETVYAPGWRQNFITREFAELYNLGLPVAAVYFNIQRESGCGGRRLC

SEQ ID NO: 1757 - protein, 180 aa, Glycine max
MSAVDPLVVARVIHDVLDPFTSTVLLSIGYNNRLLLRGAELRPSAVVSKPRVDVGGNDMRVLYTLMLVDPDAPSPSHPTLREYLHWMVADIPGTTGVSFGQELVVYERPEPRSGIHRMVFVLFQQLGRGTVFAPDMRHNFSCRSLARQYHLSIVAATYFNCQIEGGWGGRRFRPESSQGE

SEQ ID NO: 1758 - protein, 167 aa, Glycine max
  misc_feature (112)..(112): Xaa can be any naturally occurring amino acid
  unsure (1)..(167): unsure at all Xaa locations
MAGGADADGERRIGVAMDYSASSKRALEWAVRNLLRRGDTVVVLHVQRHGGEDAKHAVWAKSGSPLIPLSEYREPEVMKNYGVTCDAEVLDMLDTAARQLELKVVAKVYWGXDAREKLCDAVEEQRIDTIVMGSRGLGTIQRILLGSVTNYVLSNASCPVTVVKGDR

SEQ ID NO: 1759 - protein, 264 aa, Glycine max
MDFDSSFFQYQNFNSSFVNSSVCAEPFSWEDFLFFNEENTTTTTLNSFTITDHSSQSRIKESSSSDYSNSSGSLVSSTESSQLEVSSNLTHASHQLKETHASPQPQPPKEANKDKRPFRGVRRRPWGKFAAEIRDSTRNGVRVWIGTFDTAEAAALAYDQAALSTRGSMAVLNFPEEVVRESLKDMQNNNKPSLEDGSSPVLALKRKHTMRRKSKATNKKTKRGHGMELENIVLSQNVLVLEDLGSEYLEQLLSLTSSDDDFLC

SEQ ID NO: 1760 - protein, 84 aa, Glycine max
MAHMRRQIFVYLLFAWLLLAASALNHVTASVQAMQSVHFKLRTLEANPKQQNGHVIPSWVEEKKNRKSPSGPNPIGNQHPPSKP

SEQ ID NO: 1761 - protein, 512 aa, Glycine max
QQPKIISILLSSKNLTGNIPLDITKLTGLVELRLDGNMLTGPIPDFTGCMDLKIIHLENNQLTGALSTSLANLPNLRELYVQNNMLSGTVPSDLLSKDLDLNYTGNTNLHKGSRKKSHLYVIIGSAVGAAVLLVATIISCLVMRKGKTKYYEQNSLVSHPSQSMDSSKSIGPSEVAHCFSFSEIENSTNNFEKKIGSGGFGVVYYGKLKDGKEIAVKVLTSNSYQGKREFSNEVTLLSRIHHRNLVQLLGYCREEGNSMLIYEFMHNGTLKEHLYGPLTHGRSINWMKRLEIAEDSAKGIEYLHTGCVPAVIHRDLKSSNILLDKHMRAKVSDFGLSKLAVDGASHVSSIVRGTVGYLDPEYYISQQLTDKSDIYSFGVILLELISGQEAISNDSFGANCRNIVQWAKLHIESGDIQGIIDPVLQNNYDLQSMWKIAEKALMCVQPHGHMRPSISEVLKEIQDAIAIEREAEGNSDEPRNSVHSSINMGSMDLAATENYLSIDESIAQPIAR

SEQ ID NO: 1762 - protein, 248 aa, Glycine max
MSWNPHMEVHYNTISYPYNTAGSFIEYFEGLTYEHVNFIFSGASHAQESSYPSNSSFYKFGLSEPENNSYYRYSHGYEVNHHEPLVDEYRRPSENSLTINEQSPAVSTEWVEGGNTDTQDNSIECPRRHHSNSNDYQVIWQDNIDPDNMTYEELLELGEAVGTQSRGLTQEQISSLPVSKYKCGFFLRKKSRDERCVICQMEYRRGDKRITLPCKHVYHASCGNKWLSINKACPICYTEVFADKSKHK

SEQ ID NO: 1763 - protein, 162 aa, Glycine max
  misc_feature (108)..(108): Xaa can be any naturally occurring amino acid
  unsure (1)..(162): unsure at all Xaa locations
MSDSEEHHFESKADAGASKTYPQQAGTVRKNGFIVIKNRPCKVVEVSTSKIGKHGHAKCHFVAIDIFNGKKLEDIVPSSHNCDIPHVNRTEYQLIDISEDGFVSLLTXDGNTKDDLRLPTDETLVAQIKEGFESGKDLVVTVQSAMGEEQICALKDVGPSNS

SEQ ID NO: 1764 - protein, 171 aa, Glycine max
  misc_feature (161)..(161): Xaa can be any naturally occurring amino acid
  unsure (1)..(171): unsure at all Xaa locations
VHLRSLFQCLVPSPRSRLLLVHSAATRSRSQLDFGAAMSSDARDVCVVGVARTPMGSFLGGLSSLPATKLGSIAIEAALRRANVDPSLVQEVFFGNVLSANLGQAPARQAALGAGIPNTVVCTTVNKVCASGMKATMFAAQSIQLGINDIVVAGGMESMSXAPKYIAEARK

SEQ ID NO: 1765 - protein, 248 aa, Glycine max
MILHDGSSSNCNSSFNISPETVVMVDPLSSACDRRNLPSEEESKNNDHGSGNKWMSSKMRLMKKMMRPSISPTTDKAINSSPRFQNHQGLESRRYSQRSPRNNNGSSTPRVCSDCNTSTTPLWRTGPKGPKSLCNACGIRQRKARRAMAEAANGLVTPIACEKTRLHNKEKKSRMNHFAQFKNKYKSTTTTTTTTVGSSEGVRKLEYFNNFAISLRSNNSDFEQMFPRDEVAEAALLLMDLSCGFVHL

SEQ ID NO: 1766 - protein, 668 aa, Glycine max
MIMARSFSRGSLLPLAIVSLVCLFVISIAKEEATKLGTVIGIDLGTTYSCVGVYKNGHVEIIANDQGNRITPSWVAFTDSERLIGEAAKNLAAVNPERTIFDVKRLIGRKFEDKEVQRDMKLVPYKIVNKDGKPYIQVKIKDGETKVFSPEEISAMILTKMKETAEAFLGKKINDAVVTVPAYFNDAQRQATKDAGVIAGLNVARIINEPTAAAIAYGLDKKGGEKNILVFDLGGGTFDVSILTIDNGVFEVLATNGDTHLGGEDFDQRIMEYFIKLIKKKHGKDISKDSRALGKLRREAERAKRALSSQHQVRVEIESLFDGVDFSEPLTRARFEELNNDLFRKTMGPVKKAMEDAGLQKSQIDEIVLVGGSTRIPKVQQLLKDYFDGKEPNKGVNPDEAVAYGAAVQGSILSGEGGEETKDILLLDVAPLTLGIETVGGVMTKLIPRNTVIPTKKSQVFTTYQDQQTTVSIQVFEGERSLTKDCRLLGKFELSGIPPAPRGTPQIEVTFEVDANGILNVKAEDKGTGKSEKITITNEKGRLSQEEIERMVREAEEFAEEDKKVKERIDARNSLETYVYNMKNQIGDKDKLADKLESDEKEKIETAVKEALEWLDDNQSVEKEEYEEKLKEVEAVCNPIISAVYQRSGGAPGGGASGEEDGDSHDEL

SEQ ID NO: 1767 - protein, 138 aa, Glycine max
MGEASPESSGAAAGGPSIPGPPRKGKSCKGCLYYSSVLKSRGYNPICVGIPRSIPQVPGFVVEEPREEAAAQGHDLRQFKYACAGYSMFVDDRDAKSGENDAKALLPYCQGLELLVDSRMVERKSPAVEHASTRNPKP

SEQ ID NO: 1768 - protein, 167 aa, Glycine max
  misc_feature (31)..(31): Xaa can be any naturally occurring amino acid
  misc_feature (164)..(164): Xaa can be any naturally occurring amino acid
  unsure (1)..(167): unsure at all Xaa locations
ASANSPILLLPPFLPFAIYNKQCKHNELTLXALFLLLLLSPPRPAASMPPRDPLRSSCAKARYPTLCFQTLSNFSNLATKPLDLAQAAIKVSLARTRTLSVYFKTLNATSSRFGKRQRVAVSDCVEQISDSVTQLINTLNELQHLRAGTFQWQMSNAQTWTSAXLTN

SEQ ID NO: 1769 - protein, 428 aa, Glycine max
MASVSSQQQFRYTQPPSKVLHLRNLPWECTEEELIELGKPFGKVVNTKCNVGANRNQAFIEFADLNQAIAMISYYASSSEPAQVRGKTVYLQYSNRQEIVNNKTAADVAGNVLLVTIEGEDARLVSIDVLHLVFSAFGFVHKITTFEKTAGFQALVQFSDAETATSAKDALDGRSIPRYLLPEHMGPCSLKITYSGHSDLSVKFQSHRSRDYTNPYLPVAQSAMEGSGQPMVGLDGKRLEAESNVLLASIENMQYTVTLDVLHMVFSAFGPVQKIAMFDKNGGLQALIQYPDIQTAVVAKETLEGHCIYDGGFCKLHISYSRHTDLSIKVNNERSRDYTIPNVPPPVVNAQPSILGQHPVPMTGPPPQHYNGAQYAPVTEQTLMSHSQAGWGTGPPQSMQQMHNNPYTPSAMVPPQTTPGMQFPSHIQ

SEQ ID NO: 1770 - protein, 163 aa, Glycine max
EDERVGGDVLNVDLAAAVNNLFNLPETMEKFMFPSSRAHDHHHETRGVSSIIPVDILDTPKEYTFFMDVPGLSKSEIQVTVEDENTLVIRSNGKRKRQDGEDEGCKYLRLERRGPQNLQRKFRLPENANVSAITAKCENGVLTVVVEKHPPPQKSKTVEVAIA

SEQ ID NO: 1771 - protein, 188 aa, Glycine max
MSTSKSVSSSSEDDNELRRGPWTLEEDNLLSQYISSHGEGRWNLLAKRSGLKRTGKSCRLRWLNYLKPDVKRGNLTPQEQLIILELHSKWGNRWSKIAQNLPGRTDNEIKNYWRTRIQKQARHLKIDTDSREFQELVRRFWMPRLLQKAKESSSSAMSIQNQATPMPFDGVSQHSTVGTIPSHSHTPW

SEQ ID NO: 1772 - protein, 191 aa, Glycine max; identical to SEQ ID NO: 310

SEQ ID NO: 1773 - protein, 101 aa, Glycine max
MDKVTRLASEKGVVIFTKSSCCLCYAVNILFQELGVNPVVHEIDHDPEGREMEKALLRQGCTAPVPAVFIGGKLMGSTNEIMSLHLSGSLTQMLDPYQALS

SEQ ID NO: 1774 - protein, 118 aa, Glycine max
  misc_feature (8)..(9): Xaa can be any naturally occurring amino acid
  misc_feature (73)..(73): Xaa can be any naturally occurring amino acid
  misc_feature (106)..(106): Xaa can be any naturally occurring amino acid
  unsure (1)..(118): unsure at all Xaa locations
MASTTFRXXGVAAAAAAFIALAAFGSASASKTAFVKSTVKAHDVVIFSKSYCPYCKRAKAVFKELELKKDPYXVELDQREDGGDIQDALSDMVGRRTVPQVFIRGXHLGGSDDIVDAY

SEQ ID NO: 1775 - protein, 101 aa, Glycine max
MDKVTRLASEKGVVIFTKSSCCLCYAVNILFQELGVNPVVHEIDHDPEGREMEKALLRQGCTAPVPAVFIGGKLMGSTNEIMSLHLSGSLTQMLKPYQALS

SEQ ID NO: 1776 - protein, 142 aa, Glycine max
  misc_feature (96)..(96): Xaa can be any naturally occurring amino acid
  unsure (1)..(142): unsure at all Xaa locations
MGERVKGTVKWFNVTKGFGFISPDDGGEDLFVHQSSIKSDGYRSLNENDAVEFEIITGDDGRTKANDVTAPGGGALSGGSRPVEGGGDRGGRGGGXECYKCGEEGHISRDCPQGGGGGGGYGGGGGRGGGGGGGGCFSCGES

SEQ ID NO: 1777 - protein, 150 aa, Glycine max
TSSVSHGSGSVVEAEVSVSYRGVRRRPWGKFAAEIRDSTRNGVRVWLGTFDTAEAAALAYDQAALVMRGSMAVLNFPAEIVRQSLRNMEQYGSFQEGSSPVLELKKRHSMKRKSETKKHQLHDVMVLEDLGAEYLEHLLTLSQDMDMDAC

SEQ ID NO: 1778 - protein, 532 aa, Glycine max
  misc_feature (419)..(419): Xaa can be any naturally occurring amino acid
  misc_feature (437)..(437): Xaa can be any naturally occurring amino acid
  unsure (1)..(532): unsure at all Xaa locations
VVCNGMEGFYIPKLHLVMCKCGSCGSRKQTLSEWEKHTGCRSKKWKHSVKVKSTMLPLEKWMEENIPLDGIPEQLDQQQVLAFLQEKYEPVNVKWTTERCAVCRWVEDWEDNKIIICNRCQIAVHQECYGAKNVQDFTSWVCRVCETPDVERECCLCPVKGGALKPTDVEMLWVHVTCAWFRPQVVFQNHEAMEPAMGILKIPPNSFVKTCVICKQSHGSCISCCKCSTYFHVMCASRAGYTMELHSMEKNGTQVTRKLIYCAIHRVPNPDSVLVVHTPLGIFSPRTSLQNQKGCFRGSRLILSKNIELNESSTTENDLVEPLSAARCRVYRRSPNKRADVPIIHLLGGPSLHSLGAITQLNIFKDADESKVFTSFKERLHHLWETEKFRVCFGKSGIHGWGLFARRDIQEGEMVVEYXRGVHVRRSVADLREEKYXSEGKDCYLFKISEEVVVDATNRGNISRLINHSCMPNCYARIMSLGDQGSRIVLIAKTNVSAGEELTYDYLFDPDERDELKVPCLCKAPNCRRFMN

SEQ ID NO: 1779 - protein, 276 aa, Glycine max
  misc_feature (116)..(116): Xaa can be any naturally occurring amino acid
  unsure (1)..(276): unsure at all Xaa locations
MIEPTVTSSSGGSSQLRRRSTGIGRTCSLSTRDHGQKRKGTEEEALEEQSEDTELKSADGNKASQRTRSSRRNRAAEVHNQSERRRRDRINEKMRTLQQLIPNSNKTDKASMLEEXIEYLKSLQFQLQVMWMGGGMTPVMFPGIQHYMSQMGMGMGAPSLPSIHNPMQLPKVPHDQAMSVPQMPNQNLMCQNQVLGAFNYQTHMQNPCLPEQYAPYMGYHFMRSASQPMNVFRYGSQAVQHSQTMIAPGNNSSGPMSGTANIDDAVSGKAGSSTFN

SEQ ID NO: 1780 - protein, 131 aa, Glycine max
MASGFGESTGRSPPSPSYFNNNNNSDAANFECNICFELAQDPIITLCGHLFCWPCLYKWLHFHSQSRECPVCKALVEEEKLVPLYGRGKSSTDPRSKSIPGVNIPHRPAGQRPETAPPPETNHFHQHGFGF

SEQ ID NO: 1781 - protein, 356 aa, Glycine max
MSALADLINLDLSDSSEKIIAEYIWIGGSGLDMRSKARTLPGPVKDPSELPKWNYDGSSTGQAPGDDSEVIIYPQAIFKDPFRRGNNILVMCDAYTPAGEPIPTNKRHAAAKIFSDPTVAAEETWYGIEQEYTLLQKDTKWPVGWPVGGFPGPQGPYYCGVGADKAFGRDIVDAHYKACLYAGINVSGTNGEVMPGQWEFQVGPTVGIAAADQVWVARYILERITELAGVVLSLDPKPIPGDWNGAGAHTNYSTKSMREDGGYEIIKKAIEKLGLRHKEHIAAYGEGNERRLTGRHETADINTFLWGVANRGASIRVGRDTEKDGKGYFEDRRPASNMDPYTVTSMVAETTILWKP

SEQ ID NO: 1782 - protein, 486 aa, Glycine max
MVEKSSRTNLGHHQDFGMEAYSIDGVSSQSESKFYDDDGHVKRTGNVWTTSSHIITAVVGSGVLSLAWAMAQMGWVAGPVVMIFFSAVTLYTTSLLADCYRCGDPVTGKRNYTFMDAVQSILGGYYDTFCGVVQYSNLYGTAVGYTIAASISMMAIKRSNCFHSSGVKNPCHVSSNPYMIGFGIIQILFSQIPDFHKTWWLSIVAAIMSFAYSTIGLALGIAKVAETGTFKGSLTGVRIGTVTEATKVWGVFQGLGDIAFAYSYSQILIEIQDTIKSPPSEAKTMKKSAKISIGVTTTFYMLCGFMGYAAFGDSAPGNLLTGFGFFNPYWLIDIANAAIVIHLVGAYQVYAQPLFAFVEKWASKRWPEVDTEYKVPIPGFSPYNLSPFRLVWRTVFVIITTIVAMLIPFFNDVLGLLGALGFWPLSVFLPVQMSIKQKRTPRWSSRWIGMQILSVVCLIVSVAAAVGSVASIVLDLQKYKPFHVDY

SEQ ID NO: 1783 - protein, 392 aa, Glycine max
MCGGAIISDFIPAGPAGGAQRVTADILWPNLRKRFSKSLLDDDFEAGFREFEDDSEIEDVDDEDDEEEEELKKKKPFGFSRSNNKAASKPLSRGATTVKSVESKGQAEKCAKRKRKNQYRGIRQRPWGKWAAEIRDPRKGVRVWLGTFSTAEEAARAYDAEARRIRGKKAKVNFPDEPSGAASSKRLKANPEAQPMKKNLNSVKPKINQMFNFGDNLEGYYSPIDQVEQKPLVNQYVNRAPFAGNGVQVSPVTPSADVTAYFSSEHSSSSFDYSDLGWGEQVPKTPEISSMLSAAPLDGESQFVQGAADQNQKKNNLLDMASVQDDSAKTLSEELADIESQLKFFETPSFLDEAWADAALASLLSEDASQDAAGNPMNLWSFDDLPSMAGVF

SEQ ID NO: 1784 - protein, 299 aa, Glycine max
  misc_feature (150)..(150): Xaa can be any naturally occurring amino acid
  unsure (1)..(299): unsure at all Xaa locations
MCGGAIISDFILLFETSNILRVFWENWLKNGSTTAKSVAFQVRAEKFANRKRKNQYRGIRQRPWGKWAAEIRDPRKGVRVWLGTFNTAEEAARAYDAEARRIRGKKAKVNFPEEAPGTSVKRSKVNPQENLSHKFGAGNNHMDLVEQKPXVYQYANMASFPGSGNGLTSLPSSDDVTLYFSSDQGSNSFGWSEQGPKTPEISSMLSAPLDCESHFVQNANQQPNSQNVVSMEDDSAKRLSEERVDIESELKFFQMAYLEGSWGDTSLESLLSGDTTQDGGNLMNLWSFDDIPSMSSGVF

SEQ ID NO: 1785 - protein, 607 aa, Glycine max
MDTNIGSLSLDACKPANNDVGCPPNGAVSAIKPSVPATTMTSSDATLGRHLARRLVQVGVTDVFSVPGDFNLTLLDHLIAEPQLKNIGCCNELNAGYAADGYARCRGVGACVVTFTVGGLSVINAIAGAYSENLPLICIVGGPNTNDFGTNRILHHTIGLSDFSQELRCFQTVTCYQAVVNNIEDAHELIDTAISTCLKESKPVYISISCNLPGIPHPTFSREPVPFSLSPRLSNKMGLEAAVEAAAEFLNKAVKPVMVGGPKLRVANACDAFVELADACGYPFAVMPSAKGLVPEHKPHFIGTFWGAVSTAFCAEIVESADAYLFAGPIFNDYSSVGYSLLLKKEKAIIVQPERVVISNGPAFGCVLMKDFLRELAKRLKHNNTAYENYSRIFVPEGKPVKAEPREPLRVNVLFKHIQDMLSGETAVIAETGDSWFNCQKLKLPKGCGYEFQMQYGSIGWSVGATLGYAQAVPEKRVISCIGDGSFQVTAQDVSTMLRNEQKTIIFLINNGGYTIEVEIHDGPYNVIKNWNYTGLVDAIHNGEGKCWTTKVTCEEELVEAIQTATGDKKDCLCFIEVIVHKDDTSKELLEWGSRVCAANGRPPNPQ

SEQ ID NO: 1786 - protein, 860 aa, Glycine max
MASRSYVNLLDLAGGLLDIPHMPRTIPRIMTVPGVISDLDVYGRYDGDSDVSSSGYRERKILVANMLPLQAKRDIETGKWCFSLDEDSILLQLKDGFSSDTEVIYVGSLKVEIDAHEQEEVAQKLLEDFNCIPTFLPHDVQKKFYYGFCKQQLWPLFHYMLPMFPDHGDRFDRSLWQAYVSANKIFADKVMEIINPDDDFVWVQDYHLMVLPTFLRKRYNRVKLGFFLHSPFPSSEIYRTLPVRDEILRGLLNSDLIGFHTFDYARHFLSCCKRMLGLDYESKRGHIGLDYFGRTIFIKILPVGIHMGRLESVLNLQSTSAKLKEIREEFKGRKVILGVDDMDIFKGISLKLLAVEQLLQQNQDLKGKVVLVQIVNPARSSGKDVQEAKKETNLIAQRINDTFGSNNYQPVILIDRPVPRFEKSAYYAVAECCIVNAVRDGMNLVPYKYIVCRQGTALMDKALTRKSDSPRTSMLVVSEFIGCSPSLSGAIRVNPWNIDAVADALYSAVTMNDSEKQLRHEKHYRYISSHDVAYWARSFVQDLERACKDHYTKRCWGMGLGLGFRVVSLSPGFRKLSVDHIVSAYKRTGRRAIFLDYDGTIVPKSSINKTPSPEVISVLNDMCNDPKNTVFIVSGRGRDSLSKWFTSCKMIGLAAEHGYFLRWSKDSEWETSPLSPDLDWKKIVEPVMQLYTEATDGSNIETKESALVWHHQYADPDFGSCQAKELLNHLESVLANEPAVVTRGRHIVEVKPQGLNKGWVAEKVLSNMVNDGNPPDFVMCVGDDISDEDMFESILRTVSCPSLPVVPEIFACTVGQKPSKAKYYLDDPADVMKLLQGLGASSKPKPRHLAQFQVSFESTV

SEQ ID NO: 1787 - protein, 148 aa, Glycine max
  misc_feature (134)..(135): Xaa can be any naturally occurring amino acid
  unsure (1)..(148): unsure at all Xaa locations
ITHSLCTLEFDIRRPSYYWLLVALGLYQPHVWEYSRLNISHTMMSKRKLNRLVTEKWVDGWDDPRLLTLAGLRRRGVSANAINSFIRGIGITRSDNSLIRVDRLEYHIREELNKTASRTMVVLHPLKVVITNLXXEKSIDLDGKKWPD

SEQ ID NO: 1788 - protein, 356 aa, Glycine max
MSLLSDLINLNLSDTTEKVIAEYIWIGGSGMDLRSKARTLPGPVSDPSKLPKWNYDGSSTGQAPGEDSEVIIYPQAIFRDPFRRGNNILVICDTYTPAGEPIPTNKRHDAAKVFSHPDVVAEETWYGIEQEYTLLQKDIQWPLGWPVGGFPGPQGPYYCGVGADKAFGRDIVDAHYKACLYAGINISGINGEVMPGQWEFQVGPSVGISAGDEVWAARYILERITEIAGVVVSFDPKPIQGDWNGAGAHTNYSTKSMRNDGGYEVIKTAIEKLGKRHKEHIAAYGEGNERRLTGRHETADINTFLWGVANRGASVRVGRDTEKAGKGYFEDRRPASNMDPYVVTSMIADTTILWKP

SEQ ID NO: 1789 - protein, 243 aa, Glycine max
MKPKTCELCHQLASLYCPSDSAFLCFHCDAAVHAANFLVARHLRRLLCSKCNRFAAIHISGAISRHLSSTCTSCSLEIPSADSDSLPSSSTCVSSSESCSTNQIKAEKKRRRRRRSFSSSSVTDDASPAAKKRRRNGGSVAEVFEKWSREIGLGLGVNGNRVASNALSVCLGKWRSLPFRVAAATSFWLGLRFCGDRGLATCQNLARLEAISGVPAKLILGAHANLARVFTHRRELQEGWGES

SEQ ID NO: 1790 - protein, 409 aa, Glycine max
MSTSAKSRDVCIVGVARTPIGGLLGTLSSLSATELGSIAIKTALKRANVDPSLVQEVFFGNVLSANLGQAPARQAALGAGIPTSVICTTINKVCASGMKATMLAALTIQFGLNDVVVAGGMESMSNAPKYIAEARKGSRYGHDTIIDGMVKDGLWDVYNNFGMGVCAELCADQHVITRDEQDSYAIRSFERGISAQNAGHFAWEIVPVEVSTGRGRASKIVDKDEGLGKFDAAKLRKLRPSFKEVGGSVTAGNASSISDGAAALVLVSEEKARELGLHVIAKIKGYGDAAKAPELFTTAPSLAIPKAISNAGLDASQIDYYEINEAFSVVALANQKLLGLDPEKVNAHGGAVSLGHPLGCSGARILVTLLGVLRQKRGKYGVAAICNGGGGASALVLELMPVAVGRSLL

SEQ ID NO: 1791 - protein, 234 aa, Glycine max
MYVVFQDSYAIRSFERGISAQNAGHFAWEIVPVEVSTGRGRASTIVDKDEGLGKFDAAKLRKLRPSFKEVGGSVTAGNASSISDGAAALVLVSEEKARELGLHVIAKIKGYGDAAKAPELFTTAPSLAIPKAISNAGLDASQIDYYEINEAFSVVALANQKLLALNPEKVNVYGGAVSLGHPLGCSGARILVTLLGVLRQKRGKYGVAAICNGGGGASALVLELMPVAVGRSLL

SEQ ID NO: 1792 - protein, 213 aa, Glycine max; identical to SEQ ID NO: 309

SEQ ID NO: 1793 - protein, 316 aa, Glycine max
MASASCLGLVVLVAMASAASAQLSSTFYDTSCPNALATIKAGVTAALNTETRMGASLVRLHFHDCFVDGCDGSVLLADTGSFIGEQGAAPNNNSIRGMNVIDNIKTQVEAVCKQTVSCSDILAVAARDSVVALGGPTWTVLLGRRDSTTASKTNAENDLPPPTFDLQNLTTLFGNKQLSMADMVALSGAHTIGQSQCRFFRDRIYNETNINTTFATSLRANCPQSGGDSSLAPLDTATPNAFDNSYYTNLMSQKGLLHSDQVLFNGGGADNTVMSFATSAATFNSAFTTAMINMGNIAPKTGTQGQIRLVCSKVNS

SEQ ID NO: 1794 - protein, 161 aa, Glycine max
MTTTLERGFSEEQEALVVKSWNVMKKNSGELGLKFFLKIFEIAPSAQKLFSFLRDSTVPLEQNPKLKPHAVSVFVMTCDSAVQLRKAGKVTVRESNLKKLGATHFRTGVANEHFEVTKFALLETIKEAVPEMWSPAMKNAWGEAYDQLVDAIKSEMKPPSS

SEQ ID NO: 1795 - protein, 175 aa, Glycine max
MSRVYVGNLDSRVTERDLEDEFRVFGVIRSVWVARRPPGYAFIDFDDRRDAQDAIRELDGKNGWRVELSHNSRGGGGGRGGRSGGSDLKCYECGEPGHFARECRMRGGSGRRRSRSPPRFRRSPSYGRSPRGRSPRRRSLSPRGRSYSRSPPYRGREEVPYANGNGLRERRRSRS

SEQ ID NO: 1796 - protein, 180 aa, Glycine max
MSRVYVGNLDSRVTERDLEDEFRVFGVIRSVWVARRPPGYAFIDFDDRRDAQDAIRELDGIKNNGWRVELSHNSRGGGGGRGGRSGGSDLKCYECGEPGHFARECRMRGGSGRRRSRSPPRFRRSPSYGRRSYSPRGRSPRRRSLSPRGRSYSRSPPYRGREEVPYANGNGLRERRRSRS

SEQ ID NO: 1797 - protein, 178 aa, Glycine max
MSRVYVGNLDSRVTERDLEDEFRVFGVIRSVWVARRPPGYAFIDFDDRRDAQDAIRELDGKNGWRVELSHNSRGGGGGRGGRSGGSDLKCYECGEPGHFARECRMRGGSGRRRSRSPPRFRRSPSYGRRSYSPRGRSPRHRSLSPRGRSYSRSPPYRGREEVPYANGNGLRERRRSRS

SEQ ID NO: 1798 - protein, 230 aa, Glycine max
MSMLSFLFILMLLPSFEAIPSDEEVFINPSEVQTQDMQALIAQACMDIENQNSCLTNIHNELTKIGPPSPTSVVSAALKHTLNEARVAIDNITKITTFSVSYREQQAIEDCRELLDFSVSELAWSMGEMRRIRSGDTNAQYEGNLEAWLSAALSNQDTCLEGFEGTDRRLESYISGSLTQVTQLISNVLSLYTQLHSLPFKPPRNTTTPLTSHETLEFPEWMSEGDQELL

SEQ ID NO: 1799 - protein, 432 aa, Glycine max
MAQILAPSTQWQMRISKSSPNASPITSNMWSSLLWKQNKKVSPTSSAKFRVMAIKSDNSIINRLEGLLNLDITPFTDKIIAEYIWIGGTGIDVRSKSRTISKPVEHPSELPKWNYDGSSTGQAPGDDSEVILYPQAIFKDPFRGGNNILVICDSYTPQGEPIPTNKRHRAAEIFSNPKVQAEVPWYGIEQEYTLLQTNVKWPLGWPVGGYPGPQGPYYCSAGADKSFGRDISDAHYKACLYAGINISGTNGEVMPGQWEYQVGPSVGIEAGDHIWASRYILERITEQAGVVLSLDPKPIEGDWNGAGCHTNYSTKSMREDGGFEVIKKAILNLSLRHKDHISAYGEGNERRLTGKHETASINTFSWGVANRGCSIRVGRDTEKNGKGYLEDRRPASNMDPYVVTSLLAETTLLWEPTLEAEALAAQKLALKV

SEQ ID NO: 1800 - protein, 136 aa, Glycine max
  misc_feature (23)..(23): Xaa can be any naturally occurring amino acid
  misc_feature (27)..(28): Xaa can be any naturally occurring amino acid
  misc_feature (59)..(59): Xaa can be any naturally occurring amino acid
  misc_feature (75)..(75): Xaa can be any naturally occurring amino acid
  unsure (1)..(136): unsure at all Xaa locations
MCYATLMWFLNQDMVSEHPERFXVAEXXREKIFMQYRNEIPYACQVNVVNYKSSARDAXKNTSQVEILVEKNTQXIILIGREGKALKLLATAARLDVEDFLQKKVYLEIEVKVRANWRQDEGLFNHYGYGGQIRVI

SEQ ID NO: 1801 - protein, 229 aa, Glycine max
  misc_feature (13)..(13): Xaa can be any naturally occurring amino acid
  unsure (1)..(229): unsure at all Xaa locations
MGERVKGTVKWFXVTKGFGFISPEDGSEDLFVHQSAIKSDGYRSLNENDTVEFEVITGDDGRTKASDVTAPGGGALSGGSRPGDGGGDRGGRGGYGGGGYGGGGGGGGYGGGGGGYGGGGGGYGGGGGGRGCYKCGEEGHISRDCPQGGGGGGVYGGGGYGGGGGGGRECYKCGEEGHISRDCPQGGGGGGGGGGYGGGGGRGGGGGGGGCFSCGESGHFSRECPNKAH

SEQ ID NO: 1802 - protein, 132 aa, Glycine max
MTMIRSISMLTLLVTLAASISMVSSASSADFVKKTISSHKIVIFSKSYCPYCRRAKSVFSELNQVPHVVELDEREDGGSIQSALGEIVGRRTVPQVFINGKHIGGSDDTVDAHESGELAKLLGVSESTRAEL

SEQ ID NO: 1803 - protein, 464 aa, Glycine max
MANTLYNGATCRIPLRDESLAFSRHVSRSLSFLPITRAGKQSYAFAVKASSHSDFDVDLSLSPRVNAVKPSKTVAISDHATALVQAGVPVIRLAAGEPDFDTPAPIAEAGINAIREGYTRYTPNAGTMELRQAICHKLKEENGITYTPDQVVVSNGAKQSIAQAVLAVSSPGDEVIIPAPFWVSYPEMARLADATPVILPTLISDNFLLDPKLLESKITERSRLLILCSPSNPTGSVYPKELLEEIARIVAKHPRLLVLSDEIYEHIIYAPATHTSFASLPGMWDRTLTVNGFSKAFAMTGWRLGYIAGPKHFVAACGKIQSQFTSGASSIAQKAAVAALGLGHAGGEAVSTMVKAFRERRDFLVKSFREIDGVKISEPQGAFYLFLDFSFYYGREAEGFGKIEDSESLCRYLLDVGQVALVPGSAFGDDTCIRISYAESLTTLQAAVERVKRALIPLSSAALV

SEQ ID NO: 1804 - protein, 422 aa, Glycine max
  misc_feature (42)..(42): Xaa can be any naturally occurring amino acid
  misc_feature (48)..(48): Xaa can be any naturally occurring amino acid
  misc_feature (80)..(80): Xaa can be any naturally occurring amino acid
  unsure (1)..(422): unsure at all Xaa locations
MNNVAERPLNGDVEDDDEDDGGGLEAWERTYAEDRSWEALQXDESGPXRVRPIGPPPIYRAQYRRRLRTLAASAATARIXKGLIRYLYIVVDLSKAASERDFRPSRMAVMGKQVEAFIREFFDQNPLSHVGLVTIKDGIAHCITELGGSPESHIKALMGKLECSGDASLQNALELVLGYLNQIPSYGHREVLILYSALSTCDPGDLMETIQKCKKSKIRCSVIGLAAEMFVCKHLCEETGGTYSVALDESHFKELILEHAPPPPAIAEYSTANLIKMGFPQRSAEGSVAICTCHEEAKTGGGYTCPRCKVRVCELPTECRVCGLTLISSPHLARSYHHLFPIVMFDEVTPSSQNDSNPSFPNTCFGCQQSLLSQGNKPGLSVICPKCKQQFCLDCDIYVHESLHNCPGCESSRHSKSVTASQ

SEQ ID NO: 1805 - protein, 338 aa, Glycine max
  misc_feature (203)..(203): Xaa can be any naturally occurring amino acid
  misc_feature (214)..(214): Xaa can be any naturally occurring amino acid
  misc_feature (266)..(266): Xaa can be any naturally occurring amino acid
  misc_feature (278)..(278): Xaa can be any naturally occurring amino acid
  misc_feature (329)..(329): Xaa can be any naturally occurring amino acid
  unsure (1)..(338): unsure at all Xaa locations
MYSNFKEQAIEYVKQAVDEDNKGNYAKAFQLYMNALEYFKTHLKYEKNPKIKEAITQKFTEYLRRAEEIRAVLDDGPSGPASSGDAAVATRPKTKPKDGGKDGDGEDPEQAKLRAGLNSAIVREKPNVKWNDVAGLESAKQALQEAVILPVKFPQFFTGKRRPWRAFLLYGPPGTGKSYLAKAVATEADSTFFSVSSSDLVKXEKLVSNLFKVXDAVLVNQLDLKARQHMFKVHLGDTPHNLAESDFEHSARKTEGFSGSDISVCXPEDMWILCGPKXQSAVQTTIQDLAAKGLASKILPPPISRTDFDKVLARQRPTVSKSDLDVHEXFTKEFGEEG

SEQ ID NO: 1806 - protein, 446 aa, Glycine max
MPSVVTRSKTMYSNFKEQAIEYVKQAVQEDNAGNYAKAFPLYMNALEYFKTHLKYEKNPKIKEAITQKFTEYLRRAEEIRAVLDDGGPGPASNGDAAVAARPKTKPKDGESGGGGDGEDPEQAKLRAGLNSAIIREKPNVKWNDVAGLESAKQALQEAVILPVKFPQFFTGKRRPWRAFLLYGPPGTGKSYLAKAVATEADSTFFSVSSSDLVSKWMGESEKLVSNLFQMARESAPSIIFVDEIDSLCGQRGEGNESEASRRIKTELLVQMQGVGHNDQKVLVLAATNTPYALDQAIRRRFDKRIYIPLPDLKARQHMFKVHLGDTPHNLTESDFEYLASRTEGFSGSDISVCVKDVLFEPVRKTQDAMFFFKNPEGMWIPCGPKQQGAVQTSMQELAAKGLASKILPPPITRTDFEKVLARQRPTVSKADLDVHERFTKEFGEEG

SEQ ID NO: 1807 - protein, 579 aa, Glycine max
MCGILAVLGCSDSSQAKRVRVLELSRRLKHRGPDWSGLHQYGDNYLAHQRLAIVDPASGDQPLFNEDKTVVVTVNGEIYNHEELRKQLPNHTFRTGSDCDVIAHLYEEHGENFMDMLDGIFSFVLLDTRDNSFIVARDAIGVTSLYIGWGLDGSVWISSELKGLNDDCEHFESFPPGHLYSSKERAFRRWYNPPWFSEAIPSAPYDPLALRHAFEKAVVKRLMTDVPFGVLLSGGLDSSLFAAVTARYLAGTKAAKQWGTKLHSFCVGLEGAPDLKAAKEVAEYIGTVHHEFHYTVQDGIDAIEDVIYHIETYDVTTIRASIPMFLMSRKIKSLGVKMVISGEGSDEIFGGYLYFHKAPNKEEFHQETCRKIKALHKYDCLRANKSTFAWGLEARVPFLDKEFIRVAMNIDPECKMIKKEEGRIEKWALRRAFDDEEHPYLPKHILYRQKEQFSDGVGYGWIDGLKAHAEKHVTDRMMLNAANIFPFNTPTTKEAYHYRMIFERFFPQNSARLTVPGGPSVACSTAKAVEWDAAWSNNLDPSGRAALGVHASAYGNQVKAVEPEKIIPKMEVSPLGVAI

SEQ ID NO: 1808 - protein, 125 aa, Glycine max
MSLLSDLVNLNLSDSTEKIIAEYIWIGGSGMDIRSKARTLPGPVSDPSKLPKWNYDGSSTGQAAGDDSEVILYPQAIFRDPFRKGNNILVMCDAYTPAGNPIPTNKRHNAAKIFSNPKVASEELG

SEQ ID NO: 1809 - protein, 436 aa, Glycine max
MSDSDTRQNDITKPLDLENLRVVSAVGRGAKGVVFLARTGDRSSEECVALKVIPKALILQKAKLINDVEYTRVSFEEQVLRRFDHLLLPRLRGVFETEKVVGFGIDYCHGGTLHSLRKKQTEKMFSDDTIRFYAVELVLALEYLHNLGIVYRDLKPENVMIQDNGHIMLVDFDLSKKLNPKSPHSLSQNSSPSPNSKTKQTRKQRLMRFYSFCNSGILPCDSDSEPPLSSVNSVRHTESDLVEKSNSFVGTEEYVAPEIVSGKGHGFSVDWWSYGVVLYEMLYGTTPFKGSNRKETFYRILMKEPELTGEKTALRDLIGKLLEKNPDRRIQVNEIKGHNFFKGVKWDTVLHIARPPYIPENEVENKVGFSKSDVEVFVDNVFFPTGDDGGEKTKTLLDNNNNNNNNNNNNNNNNKVWIDELSHVPIGKKNDDFLIF

SEQ ID NO: 1810 - protein, 328 aa, Glycine max
  misc_feature (304)..(304): Xaa can be any naturally occurring amino acid
  unsure (1)..(328): unsure at all Xaa locations
ENITHSLCTLEFETRRASYYWLLHALSIYQPYVWEYSRLNVSNTVMSKRKLNRLVTEKWVDGWDDPRLMTLAGLRRRGMTPTAINAFVRGIGITRSDGTLISVERLEYHVREELNKTASRAMVVLHPLKVVITNLEANSVIEVDAKKWPDAQADDASAFYKISFSNVVYIEHSDFRMQDSKDYYGLAPGKSVILRYAFPIKCTEVILADDNETILEIRAEYDPSKKTKPKGVLHWVAQPSPGVDPLKVEVRLFERLFLSENPAELDNWLGDLNPNSKVIIPNAYGVSSIQNAKVGDNFQFERLXDSTSEKLVFNRTVTLKDSYSKGGK

SEQ ID NO: 1811 - protein, 107 aa, Glycine max
AMVDVAKEVGADAVRFELTFFALNPKLNVVAPWREWDITGREDAIEYAKKHNIPVPVTKKSIYSRDRNLWHLSHEGDILEDPANEPKKDMYMMSVDAEDAPDEAEYV

SEQ ID NO: 1812 - protein, 275 aa, Glycine max
VRFELTFFALNPKLNVVAPWREWDITGREDAIEYAKKHNIPVPVTKKSIYSRDRNLWHLSHEGDILEDPANEPKKDMYMMSVDAEDAPDEAEYVEIEIESGLPVSVNGKRLSPATLLTELNEIGGRHGIGRIDMVENRLVGMKSRGVYETPGGTILFAAARELEFLTLDRETIQVKDSLALKYAELVYAGRWFDPLRESMDAFMQKITETTTGSVTLKLYKGSVTVTSRKSPFSLYRQDISSFESGQIYDQADAAGFIRLYGLPMRVRAMLEQGI

SEQ ID NO: 1813 - protein, 373 aa, Glycine max
  misc_feature (94)..(94): Xaa can be any naturally occurring amino acid
  unsure (1)..(373): unsure at all Xaa locations
MLRLCYGPLDCCFGRRGGRAADGLLWHTDLKPHASGDFSIAVAQANYSLEDQSQVFTSPSATYVGVYDGHGGPEASRFVNKRLFPYLHKFATEXGGLSVDVIKKAFSATEEEFLHLVKLSMPISPQIASVGSCCLFGAISNNVLYVANLGDSRAVLGRRDTERKNSPVVAQRLSTDHNVADEEVRKEVEALHPDDSHIVVYSRGVWRIKGIIQVSRSIGDVYLKKPDFYRDLGFQQFGNPIPLKRSVMTAEPSIIIRELESEDLFLIFASDGLWEQLSDEAAVQIVFKHPRAGIAKRLVRAALHEAAKKREMRYDDIKKIDKGIRRHFHDDITVVVIYLDHHAGSSKQTAVGYTTAPVDIFSLNADGMLGTVA

SEQ ID NO: 1814 - protein, 356 aa, Glycine max
MSLLSDLINLNLSESTEKIVAEYIWVGGSGMDLRSKARTLPGPVSDPAKLPKWNYDGSSTDQAPGDDSEVILYPQAIFKDPFRRGNNILVICDVYTPAGEPLPTNKRYDAAKIFSHPDVAAEEPWYGIEQEYTLLQKDVNWPLGWPLGGFPGPQGPYYCGTGADKAYGRDIVDAHYKACIYAGINISGINGEVMPGQWEFQVGPSVGISAGDEVWAARYILERITEMAGVIVSFDPKPIPGDWNGAGAHSNYSTKSMRDEGGYEVIKKAIEKLGLRHKEHIAAYGEGNERRLTGRHETADINTFSWGVANRGSSIRVGRDTEKNGKGYFEDRRPASNMDPYVVTSMIAETTILWKP

SEQ ID NO: 1815 - protein, 143 aa, Glycine max
MSDTDEHHFESKADSGASKTYPQQAGAIRKGGHIVIKARPCKVVEVSTSKTGKHGHAKCHFVAIDIFNGKKLEDIVPSSHNCDVPHVDRQDYQLIDITDDGYVSLLTESGNTKDDLKLPTDDVLLGQIKTGFADGKDLILSVM

SEQ ID NO: 1816 - protein, 240 aa, Glycine max
MAEERFTGVVQWFNNGKGFGFIKPDDGGEDLFVHQSSIRSDGYRTLLEGDRVEFAIATGDNDKTKAVDVTGVDGAPLQPRAAAGNNNRAAGSGFGFGARRNGGGGAADCNRSSNSGGGGGGSGGGCFNCGGFGHLARDCVRGGGGSVGIGGGGGGGSCFRCGGFGHMARDCATGKGNIGGGGSGGGCFRCGEVGHLARDCGMEGGRFGGGGGSGGGGGKSTCFNCGKPGHFARECVEASG

SEQ ID NO: 1817 - protein, 140 aa, Glycine max
MVARLAVTALVLIALATISLQSSASASSVGKFVDETITSHKIVIFSKTYCPYCRRAKAVFKELNQVPHVVELDEREDGSKIQDIMVNIVGRRTVPQVFINGKHLGGSDDTVEAYESGHLHKLLGIEKKDHDDLMISESGC

SEQ ID NO: 1818 - protein, 430 aa, Glycine max
VTIPSELLSKDLVLNYSGNINLHRESRIKGHMYVIIGSSVGASVLLLATIISCLYMRKGKRRYHEQDRIDSLPTQRLASWKSDDPAEAAHCFSFPEIENATNNFETKIGSGGFGIVYYGKLKDGKEIAVKVLTSNSYQGKREFSNEVTLLSRIHHRNLVQLLGYCRDEESSMLVYEFMHNGTLKEHLYGPLVHGRSINWIKRLEIAEDAAKGIEYLHTGCIPVVIHRDLKSSNILLDKHMRAKVSDFGLSKLAVDGVSHVSSIVRGTVGYLDPEYYISQQLTDKSDVYSFGVILLELISGQEAISNESFGVNCRNIVQWAKLHIESGDIQGIIDPLLRNDYALQSMWKIAEKAFMCVQPHGHMRPTISEVIKEIQDAISIERQAEALREGNSDDMSKHSFHSSMNMGSMDLGGAESYLSIDESIAQPTAR

SEQ ID NO: 1819 - protein, 251 aa, Glycine max
MSCEPLPLMATPLQFQRPAIDDGDAQNQHNPMEFQILTSSHFRLPDGWVVEERPRASNPSHVDRYYYEPGTRRQFRSLLSVKRHLTGETRDCVISKRKNFIESGSGQQWNSLRAVENFLSGENACTATPKSAVKSGTGEKRACGVRSVRKPVHKRFSAADEKMTPKYLKHSIQSALPEKPDSQKKTKLEKDNRASMHNLTAPPPAKVSWVLSGPGGFWSPSLDDSIVPESEKLKWSEAFVLSIHNDGVTNS

SEQ ID NO: 1820 - protein, 211 aa, Glycine max
MVRGKTQLRRIENATSRQVTFSKRRNGLLKKAFELSVLCDAEVALIIFSPRGKLYEFASSSMQDTIERYRRHNRSAQTVNRSDEQNMQHLKQETANLMKKIELLEASKRKLLGEGLGSCSLEELQQIEQQLERSVSSVRARKNQVYKEQIDQLKEKERALYAENARLCEQYGGIQPQPATKDPKEIQPYAESSPSSEVETELFIGLLRSSY

SEQ ID NO: 1821 - protein, 488 aa, Glycine max
MSLSLAIKLHLASSSPSFSLLTLNNHQHANKLTTSETCSNTKVRPKPIYSTNPLIIPTCKVRPRVQYCGTMIKSSLIEPDGGALVDLVVPEGERGAKITLAESLPKVQLTRIDLEWVHVVGEGWASPLKGFMREDEYLQSLHFNSLRVKDGSVVNMSLPIVLAIDDETKERIGSSSHVGLLGPDGDCVAILRSIEIYKHNKEERIARTWGTTAPGLPYVEEVITPAGNWLIGGDLEVLKPIKYNDGLDNYRLSPKQLREEFDKRQADAVFAFQLRNPVHNGHALLMNDTRKRLLEMGYKNPILLLHPLGGFVKADDVPLDVRMEQHSKVLEDGVLDPETTIVAIFPSPMHYAGPTEVQWHAKARINAGANFYIVGRDPAGMGHPTEKRDLYDPDHGKKVLSMAPGLEKLNILPFRVAAYDTKVNKMAFFDPTRAKDFLFISGTKMRAFAKSGENPPEGFMCPSGWKVLVKYYESLQAEEPSQQPVLST

SEQ ID NO: 1822 - protein, 409 aa, Glycine max
WDEFFPHKELQCHPSLHGRVIACASIKALQAYLLWRQTICHLSNQHEQCLWRLVERGMNGKEAWDFIKGFDKGELNNLLFDEFNVKYNTLEPILRQGSCVLKTTGEDTVKYTDNGAPIKRHRRKIVTVHSKKIASKRFENEHTVLLKDLGGFVEEINNVTPEYVRSFEFDSKLMPCTWIVVRIDGCHFHRFSEIHEFVKPNDDRALNLMNLCAVAVLEKFWEDIVFAYGVSDEYSFILKKTTNLYQRRANTIISAIVSFFTSTYVMRWKDFFPQSELKYPPSFDGRAVCYPSTEILRDYLSWRQVDCHINNQYNSCFWKLVASGKSKREAQNSLKGGQLQKKIEELAIDYNKLPVMYRQGSSIYRDKVDNVLIHQENGESPENYGKVIVGHFDIIGPTFWLEHPNILDE

SEQ ID NO: 1823 - protein, 53 aa, Glycine max
TDYQLTDIAEDGFLSLLTENGNTKDDLKLPTDESLLTQIKDGFAEGKDLVVSD

SEQ ID NO: 1824 - protein, 457 aa, Glycine max
MTSKLIASNLRHQITKSAQNLRRQLLSTAAAAAVPEHDGNNSNSLGMTMKGVRISGRPLYLDVQATSPVDPRVLDAMLPFYISRYGNPHSRTHFYGWESDEAVEHARAQVASLIGASPKEIVFTSGATESNNISVKGVMHFYKDKKRHVITTQTEHKCVLDSCRHLQQEGFDVTYLPVESDGLIDLDKLRAAIRPDTGLVSVMAVNNEIGVVQPMERIGRICKEFNVPFHTDAAQALGKIPIDVEKWNVSLMSLSGHKIYGPKGVGALYMRRRPRIRVEPQMNGGGQERGIRSGTVPTPLVVGMGSACEVAKNEMEYDEKRISALQQRLLNGIREKLDGVVVNGSLERRYVGNLNLSFAYVEGESLLMGLKEVAVSSGSACTSASLEPSYVLRALGVEEDMAHTSIRFGIGRFTTEAEIDRAVELTVQQVEKLREMSPLYEMVKEGINIKDIQWAQH

SEQ ID NO: 1825 - protein, 391 aa, Glycine max
PESFFNWFYFSINMVLLCIFSISWIPATVAPPPPFGIPAVAMAIAAVSFFSGTRLYRNQKPGGSAITRICQVVMASIRKYNVEVPADESLLYETAETESAIKGSRKLDHTNELRFFDKAAVLAQSDKVKESTNPWRLCTVTQVEELKSILRILPVWATGIIFSTVYGQMSTLFVLQGQTMDTRVGNSTFKIPPASLSIFDTLSVIFWVPVYDRIIVPIATKFTGNKNGLTQLQRMGIGLFISIFSMVAAAILELIRLRMVRRHNYYQLEEIPMTIFWQVPQYFIIGCAEVFYFIGQLEFFYEQAPDAMRSFCSALSLTTVALGQYLSSLLVTIVTKISTRNGSPGWIPDNLNFGHIDYFFWLLALLSVVNLIAFLVVSMLYTYKRPVGTLR

SEQ ID NO: 1826 - protein, 113 aa, Glycine max
CRTKLKQTEVDCEYLKNCCENLTEENRRLQKEVQELRALKLSPQLYMNMNPPTTLTMCPSCERVAVSSTSFSSSATMPSAPPPANLNPAGPTIQRPVPVNPWAAMLNQHRGRP

SEQ ID NO: 1827 - protein, 234 aa, Glycine max
LDQPAGRQLRRPPPPYCPATKCPALSEDDNLYDDFNMDEVDLDLENYEELFGMALSHSEELFENGGIDSLFGTKGMSAGDSNCQEAIAAEGSSVGQVNAMQPACSNAASADSILSTKTEPILCFTGRQTQSNLSFSGVTGESSAGDYQDCGASSMLLMGEPPWFAPCPENSLQSANRSNAVMRYKEKKKTRMFDKKVRYASRKARADVRRRVKGRFVKAGDVYDYDPLSTTRSC

SEQ ID NO: 1828 - protein, 157 aa, Glycine max
MFSFCNSICLPLMSSQLTRSCYHGMRYFATVSNDPDTHDDFKPANKLENSNISLADVIEQDVKDNPVMIYMKGVPDFPQCGFSSLAVRVLQQYDVPLSARNILEDPELKNAVKAFSNWPTFPQVFIKGEFIGGSDIVLNMHQTGDLKEKLKDITSKQ

SEQ ID NO: 1829 - protein, 157 aa, Glycine max
MAFSSFLGRVLFASVFILSAYQEFNAYGVDGGPTAKALRPKFDAFAHQVHSKAGFQLPDIDMKILVAGAIALKGLGGILFILGSSFGAFLLLLHQMIATPILYDFYYYDSEDKEFIQLFIKFTQNMALFGALLFFIGMKNSIPRRQPKKKVPKTKTY

SEQ ID NO: 1830 - protein, 338 aa, Glycine max
MERYEILKDIGSGNFAVAKLVRDNYTNELFAVKFIERGQKIDEHVQREIMNHRSLKHPNIIRFKEVLLTPTHLAIVMEYASGGELFERICNAGRFSEDEARFFFQQLISGVSYCHSMQICHRDLKLENTLLDGSTAPRVKICDFGYSKSSVLHSQPKSTVGTPAYIAPEVLTRKEYDGKIADVWSCGVTLYVMLVGAYPFEDPADPRNFKKTIGKILSVQYSVPDYVRVSMECRHLLSQIFVASPEKRITIPEIKNHPWFLRNLPMELTEGGSWQMNDVNNPSQNVEEVLSIIQEARKSLNVPKVGGLLTGGSMDLDDFDADEDLEDLETSGEFVCPI

SEQ ID NO: 1831 - protein, 343 aa, Glycine max
  misc_feature (269)..(269): Xaa can be any naturally occurring amino acid
  unsure (1)..(343): unsure at all Xaa locations
MATATSQTLRFQSPSLSLSSKLPLSSAFSVSLRPRHRGSRPLVLVVSAGLDAKPTVLVAEKLGDAGLKLLKDFANVDCSYNLSTEELCTKISLCDALIVRSGTKVSREVFESSAGRLKVVGRAGVGIDNVDLAAATEHGCLVVNAPTANTVAAAEHGIALLAAMARNIAQADASVKAGKWQRNKYVGVSLVGKTLAILGFGKVGSEVARRAKGLGMTVIAHDPYAPADRARAVGVELVTFEEAIATADFISLHMPLTAATSKMLNDETXAKMKKGVRIVNVARGGVIDEDALVKALDSGIVAQAALDVFTEEPPPKDRHRFPAIQWRWIQTIDSLKVEPKQRG

SEQ ID NO: 1832 - protein, 116 aa, Glycine max
  misc_feature (84)..(84): Xaa can be any naturally occurring amino acid
  unsure (1)..(116): unsure at all Xaa locations
MGYICDFCGDQRSMVYCRSDAACLCLSCDRNVHSANALSKRHSRTLLCERCNSQPAFVRCVEEKISLCQNCDWLGHGTSTSSSXHKRQAINCYSGCPSAAELSSIWSFCVRNRCHK

SEQ ID NO: 1833 - protein, 434 aa, Glycine max
MEDERGSLLLPKNMEEHNPAHDRGTTELRNFRSYLRWVYVDHSNVCKAGLSWSVFFTLAFVVPTLSHFLLDCPTCDRDHSRPYHIPVQISLSVFAALSFISISSWDRRYGFRKFLFLDKLGDESLKIQRGYSEQMQGTMKLIMRWGLPCFIAECGYKIWWYVSGASQIPHYGNIYVSSIILCTLDLCSWLYRTSIFFLVCVLFRLICYLQILRLDEFARVFQRETEVGSILLEYLRMRRNLRIISHRFRGFILASLLLVTASQLIFLLMVTKPYADVDILKAGELALVSITLVSGLLILLRGATKITHKAHSITGLAAKWHICATINSFDNIEGETPTTANAISAQAIAANISWGSDDDEVGDEEDELDNTKLLLPIYTQTISFHKRQALVTYLENNRAGITVFGFMLDRTWLHSIFGIQLALCLWLLNKTVGV

SEQ ID NO: 1834 - protein, 815 aa, Glycine max
  misc_feature (19)..(19): Xaa can be any naturally occurring amino acid
  misc_feature (30)..(30): Xaa can be any naturally occurring amino acid
  unsure (1)..(815): unsure at all Xaa locations
IFQPGVFGRMMNVGSFPEXKRNCYKINITXGRTYLIRTNFLYGNYDGLNKAPQFDIHLGANRWYTVTISNASTPQANEIIYVPSLDYLQICLVDTDHGTPFISAIELRTLKNYTYVTQFGSLEYYNRWDLGSNNSYRYNHDVYDRFWYIYGDNKDWKQLSASIPADYLNQNDYKPPEIILSTAVTPVNASAPLVISWEPPDQTELYYVYMHFTEIQVLAKNQTRQFNITLNGNLLYGNMSPRYHSVRTIYTTSGISGKLINFSFVMTETSTLPPIINAIEIYRVKEFPQQDTYQGDVDAITTIKSSVYGMTRDWQGDPCSPVAYLWNGLNCTYRGNENPRITTLNLSSSELSGMIDPSISYLTMLEKLDLSNNNLNGEVPDFLSRLQHLKIINLDNNNLTGSIPSELVKKSKEGFLSLSVGQNLYLCESGQCNEKKKKKNIVTPLLASVSGVLILVVAVAAISWTLKKRKPKEKNQSEMSAQCTEQDDSLHQFKKQIYSHSDVLRITNNFNTIVGKGGFGTVYLGYIDGTPVAVKMLSTSSVHGYQQFQAEVKLLMRVHHANLTSLVGYCNEGDNKGLIYEYMANGNLHEHLSGKHIKSKFLTWEDRLRIAVDAALGLEYLQTGCKPPIIHRDVKSTNILLDEKLQAKLSDFGLSKIIPIDGGTHVSTVVAGTPGYLDPEYYISNRLTQKSDIYGFGVVLLEIITCQPVIAWNEERTHIIQWVRSLIGIGDIKGIVDSRLEGDFDINSAWKAVEIAMACVSLNPSERPIMRVIVTELKETLATELARTKHNSADSINSIEPVTMNLDTEFTPLAR

SEQ ID NO: 1835 - protein, 334 aa, Glycine max
MANKQHNHNDNNKELQPLLVLGPPFMFPTFEAQNLHNYRFLNAFSSQIPLHQFLAEQNVDPSSIQAILCSPRQKISADAIRLLPSLSLIVTTSNGTRHIDLAECSYRGIRVASIPGDQLAVDVADMTVGLLIDVMWNISAADRHLRKWGPSKPCNLSSGSKLEGKRVGIVGLGKIGREVAKRLEAFGCRIMYNSRNQKPFVSYPFYSNVVELAGNSDVLVLSCSLNEQTRHIVKREVMLALGKEGVIVNIGRGDLIDEKELVRCLMEGEIKGAGLDVFENEPNVPKELFPLDNVVLSPHAASLTSHRIYDVCERVAECLEAFFSSKLPEYPGLG

SEQ ID NO: 1836 - protein, 338 aa, Glycine max
MEGYEILKDIGSGNFAVAKLVRDNCTNELFAVKFIERGQKIDEHVQREIMNHRSLKHPNIIRFKEVLLTPTHLAIVMEYASGGELFERICNAGRFSEDEARFFFQQLVSGVSYCHSMQICHRDLKLENTLLDGSTAPRVKICDFGYSKSSVLHSQPKSTVGTPAYIAPEVLTRKEYDGKVADVWSCGVTLYVMLVGAYPFEDPEDPRNFKKTIGKILSVQYSVPDYVRVSMECRHLLSQIFVASPEKRIKIPEIKNHPWFLRNLPIEQMEGGSWQMNDVNNPSQSVEEVLSIIQEARKSLNVPKVGGLLIGGSMDLDDLDADEDLEDLQTSGEFVCPI

SEQ ID NO: 1837 - protein, 241 aa, Glycine max
  misc_feature (55)..(55): Xaa can be any naturally occurring amino acid
  misc_feature (184)..(184): Xaa can be any naturally occurring amino acid
  unsure (1)..(241): unsure at all Xaa locations
MYGQSCYESDLALLDSIRRHLLGDSEEHRFGAPNVNSGSTSMYSRSSSFGRLYPXLSNDWGELPLMEDDSEDMLLYGVLRDAVNVGWVPSLDASSPESFSSAFMPPVTVKSETDLFPAPEPICNPPVVQGPAPAVVPAKGKHYRGVRQRPWGKFAAEIRDPAKNGARVWLGTFETAEDAALAYXDRAAYRMRGSRALLNFPLRINSGEPEPVRVTAKRASAEPCSSSESGSWVKKRKKVVG

SEQ ID NO: 1838 - protein, 550 aa, Glycine max
  misc_feature (71)..(71): Xaa can be any naturally occurring amino acid
  unsure (1)..(550): unsure at all Xaa locations
MTTSFSDLLSSPTTNHHNLGVFERPHHESYSSDQTGSSGGVPKFKSTPPPSLPLSHNHPQTPIFSPSSYFXLNIPHGLSLAELLDSPVLLNSSNVLPSPTTGSFAGQGFNWKSSYGESQQHVKEEDKSFSSFSFQTQTHPPLPSSNGFQSSTGVVQTGWSFPEIAKQDGFASRISMSMVKTETTSAMQSLTPENNNHRNGFQSDHKNYQPQQVQTLSRRSDDGYNWRKYGQKQVKGSENPRSYYKCTYPNCPTKKKVEKSLDGQITEIVYKGTHNHPKPQAAKRNSLSASSSLAIPHSNHGSNELPHHQMDSVATPENSSISMDDDDFDHTKSGGDEFDNDEPDAKRWRIEGENEGISAVGSRTVREPRVVVQTTSDIDILDDGYRWRKYGQKVVKGNPNPRSYYKCTFPGCPVRKHVERASQDLRAVITTYEGKHNHDVPAARGSGNNSISRSLPIITNTTNNTTSVATSISTNNNSLQSLRPPAPPERPSLSHFNPNMQHSSGSFGFSGFGNPLMGSYMNQQSYNNVFTTTRDKEEPGDDSFLDSLLC

SEQ ID NO: 1839 - protein, 247 aa, Glycine max
MNDGRQMGVHYVDAGFPYAVNDNFVDFFQGFTHVPVNYAFAGSIPDQESVYWSMNMNPYKFGLSGPGSTSYYSSYEVNGHLPRMEIDRAEWEYPSTITTVEEPATTDSPPRRDGVTSMQTIPEECSPNHHESNSSSQVIWQDNIYPDDMTYEELLDLGEAVGTQSRGLSQELIDMLPTSKYKFGSLFKRKNSGKRCVICQMTYRRGDQQMKLPCSHVYHGECITKWLSINKKCPVCNTEVFGEESTH

SEQ ID NO: 1840 - protein, 298 aa, Glycine max
MLKSIVGCCKVYISESRNRTALESIERASKLFPLAPIINKFEDVTYNRVGYTLVSELGHSGPCHLANSVLAMVKAAFDTIDFEVHSGTHPRLGVVDHICFHPLLDASLDQAANAARCLATDMGSTLQVPTYLYGAAHEEGRTLDSIRRIFGYFKPNSSENQWIGGLKSDTLPLNPDSGPSQVTPAKGVVVIGATNWVDNYNVPLLSSDISAVQRIAKRVSGRGGGLPSVQAMALAHGEGVIEVACNLLDPNKVGGERVQQEVENLAREEGISVEMGYYTDFSQDQIISSYLEFFEEKI

SEQ ID NO: 1841 - protein, 506 aa, Glycine max
MLSETLAIPAVLLVILILILSSVLFHLQDERTNPPGPKPLPIIGNLHMLGKLPHRSLQALAKNYGPIMFIKLGQVPTVVVSSPETAELFLKTHDTIFASRPKTLASEYMSYGSKGLAFSEYGPYWRNVKKLCTTQLLSASKVEMFAPLRREELGVFVKSLEKAAASRDVVNLSEQVGELISNIVCRMILGRSKDDRFDLKGLAREVLRLTGVFNIADYVPWTGFLDLQGLKGKMKKMSKAFDEVFEQIIKDHEDPSASNKNSVHSEDFVDILLSHMHQAVNQQEQKYVIGRTNIKAIILDMIAGSFDTSAVAVEWAMSELLRNPSDMKKLQEELNNVVGENKLVEESDLSKLPYLNMVVKETLRLYPAGPLLVPRESLEDITINGYHIKKKTRILVNAWAIGRDPKVWSDNADMFCPERFVNSNVDIRGHDFQLLPFGSGRRGCPGIQLGLTTFGLVLAQLVHCFNWELPFGVSPDDLDMSEIFGLSLPRSKPLLAIPTYRLFIKA

SEQ ID NO: 1842 - protein, 162 aa, Glycine max
  misc_feature (40)..(40): Xaa can be any naturally occurring amino acid
  misc_feature (156)..(156): Xaa can be any naturally occurring amino acid
  unsure (1)..(162): unsure at all Xaa locations
MSDEEHHFESKADAGASKTYPQQAGTIRKNGYIVIKGRPXARVVEVSTSKTGKHGHAKCHFVGIDIFTAKKLEDIVPSSHNCDVPHVNRTDYQLIDIAEDGFLSLLTENGNTKDDLKLPTDESLLTQIKDGFAEGKDLVVSVMSAMGEEQICALKXDIGPKN

SEQ ID NO: 1843 - protein, 90 aa, Glycine max
  misc_feature (48)..(48): Xaa can be any naturally occurring amino acid
  misc_feature (63)..(63): Xaa can be any naturally occurring amino acid
  unsure (1)..(90): unsure at all Xaa locations
IRDVEDEEMWSFLYGMADWQLILMAAASSVGEELLYRAAVKGALVDIXFRGSNIIRDDQGMAXLIVLLFTFDTYAQAIGAANTAVINGSI

SEQ ID NO: 1844 - protein, 325 aa, Glycine max
MASNIQTLLVLVLATLGTFMIPSNAQLTPNFYKKVCPQALPIIRSVVHRAIIRERRIGASLLRLHFHDCFVNGCDGSVLLDDTHNFTGEKTALPNLNSIRGLEVVDEIKAAVDKACNRPAVSCADILAIAARDSVAILGGPHLWYGVLLGRRDARTASKDAANANLPPPFFNFSQLLSNFNSHGLDLKDLVALSGGHTIGFARCTTFRDRIYNDTMANINPTFAASLRKTCPRVGGDNNLAPLDPTPATVDTSYFKELLCKKGLLHSDQELYKGNGSESDKLVELYSRNPFAFARDFKASMIKMGNMKPLTGNKGEIRRNCRRVN

SEQ ID NO: 1845 - protein, 346 aa, Glycine max
MAAFSYQYHPFLVDPAFFPNNLNTPSPPPHQFQQLPHETSSFNVTNQETSCVDQSSKITISDNEPSVTENLSPQSSMVVDKLETGEQVTQKVNTPVEKKRKTRNGSSLTSNPQSKDAATERKNKKQRKGNGGLKEEDKAKEEKKEQRKCPEEPPTGYIHVRARRGQATDSHSLAERVRREKISERMKVLQRLVPGCDKVTGKALMLDEIINYVQSLQNQVEFLSMKLASVNPMFYDLATDLDTLLVRPEKLNSMASPSPPLPSVSHCNSPNNQATTFADTTTMTPTNIFHIASDYLLDNSVSFFLQGQRSNVFSEEDTGSHFWDAEDQRQKFLHPCGFSNNLCSFH

SEQ ID NO: 1846 - protein, 141 aa, Glycine max
  misc_feature (25)..(25): Xaa can be any naturally occurring amino acid
  misc_feature (56)..(56): Xaa can be any naturally occurring amino acid
  misc_feature (73)..(73): Xaa can be any naturally occurring amino acid
  misc_feature (81)..(81): Xaa can be any naturally occurring amino acid
  unsure (1)..(141): unsure at all Xaa locations
SRPKRPVRFESIQSTILFNEEHHFXSEGYAGAFKTYPHQAGTIRKNGYIVIECLSXLELEFYTFMTLRHGHAXIINFVMIXIFTAKKLDDIVPYFHNYDVPHVNRTDYQLIDIAEDGFLSLLTENGNTKDDLKLSTDESLL

SEQ ID NO: 1847 - protein, 441 aa, Glycine max
MSQPKIKRRVGKYEVGRTIGEGTFAKVKFARNSETGDPVALKILDKEKVLKHKMAEQIRREVATMKLIKHPNVVRLCEVMGSKTKIYIVLEFVTGGELFDKIVNHGRMSENEARRYFQQLINAVDYCHSRGVYHRDLKPENLLLDAYGNLKVSDFGLSALSQQVRDDGLLHTTCGTPNYVAPEVLNDRGYDGVTADLWSCGVILFVLVAGYLPFDDPNLMNLYKKISVAEFTCPPWLSFSARKLITRILDPDPTTRITIPEILDDEWFKKDYKPPVFEENGETNLDDVEAVFKDSEEHHVTEKKEEQPTAMNAFELISMSKGLNLENLFDTEQGFKRETRFTSKSPADEIINKIEEAAKPLGFDVQKKNYKMRLANVKAGRKGNLNVATEIFQVAPSLHMVEVRKAKGDTLEFHKFYKKLSTSLDDVVWKTEDDMQMRETK

SEQ ID NO: 1848 - protein, 419 aa, Glycine max
MNEIDVPSFFLCPISLDIMKDPVTVSTGITYDRESIETWLFSKKNTTCPITKLPLIDYTDLTPNHTLRRLIQAWCSMNASHGIERIPTPKPPVNKNQISKLLKDASHSPLTCLRRLKSISSGSETNKRCMEASGAVEFLASIVINTNRNIDSSHEADSNDGSGFELKTSACDEALSLLHNLHLSEQGLKTLLSFRNGEFIESLTRVMQKGFFESRAYAVFLLKSISEVAEPVQLLHLRQELFVELVQVLKDQISQKTSKATLQTLIQFSPWGRNRIRAVEAAAVPVLIELLLDCKERKPCEMMLVLLELLCQCAEGRAELLNHAAGLAIVSKKILRVSTLANDRAVKILLSVSRFSATPHVVQEMLKLGVVAKLCLVLQVDSGNKAKEKAREILKLHARAWRNSPCIPNNLLNSYPNYV

SEQ ID NO: 1849 - protein, 335 aa, Glycine max
  misc_feature (236)..(236): Xaa can be any naturally occurring amino acid
  unsure (1)..(335): unsure at all Xaa locations
MAGANLNLRHAYSIAQFVPTVSSPSPPYHRVQLRISPSRVLFSNLRANSPTSRTTRRSKTITSSSVSSAVDSDSLVGGGGEVRKIPLLEVKDLRAVIVESRQEILKGVNLVVYEGEVHAVMGKNGSGKSTFSKVLVGHPDYEVTGGSIVFKGQNLVDMEPEERSLAGLFMSFQSPVEIPGVSNMDFLNMAFNARKRKLGQPELDPIQFYSHLVSKLEVVNMKTDFLNRNVNEGFSXGGEKERNEILQLAVLGAELAILDEIDSGLDVDALQDVAKAVNGLLTPKNSVLMITHYQRLLDYIKPTFIHIMENGRIIKTGDNTLAKLLEKEGYKAISG

SEQ ID NO: 1850 - protein, 1074 aa, Glycine max
MEAVLRHQKAFGYSSEDVQMVIESMAAQGKEPTFCMGDDIPKTALSQKPHMLFDYFKQRFAQVTNPAIDPLREGLVMSLEVNIGKRRNILETGPENASQVMLSSPVLNEGELESLLKDSYLKPQVLPTFFDISKGIEGSLEKALNKLCEAADEAVRNGSQLLILSDHSEALEPTHPAIPILLAVGTVHQHLIQNGLRMSASIVADTAQCFSTHQFACLIGYGASAVCPYLALETCRQWRLSNKTVNLMRNGKMTTVSIEQAQKNYCKAVKAGLLKILSKMGISLLSSYCGAQIFEVYGLGKEVVDLAFRGSVSKIGGLTFDEVARETLSFWVKAFSEDTAKRLENFGFIQFRPGGEYHANNPEMSKLLHKAVRQKSQSAFSVYQQYLANRPVNVLRDLLEFKSDRAPIPVGKVEPASSIVQRFCTGGMSLGAISRETHEAIAIAMNRIGGKSNSGEGGEDPVRWKPLTDVVDGYSPTLPHLKGLQNGDTATSAIKQVASGRFGVTPTFLANADQLEIKIAQGAKPGEGGQLPGKKVSMYIARLRNSKPGVPLISPPPHHDIYSIEDLAQLIFDLHQVNPKAKVSVKLVAEAGIGTVASGVAKGNADIIQISGHDGGTGASPISSIKHAGGPWELGLTESHQTLIENGLRERVILRVDGGFRSGVDVMMAAIMGADEYGFGSVAMIATGCVMARICHTNNCPVGVASQREELRARFPGVPGDLVNYFLYVAEEVRGILAQLGYEKLDDVIGRTDLFQPRDISLAKTQHLDLNYILSNVGLPKWSSTEIRNQEPHTNGPVLDDVLLADPEVADAIENEKVVNKTIKIYNIDRAVCGRIAGVIAKKYGDTGFAGQLNITFTGSAGQSFACFLTPGMNIRLVGEANDYVGKGIAGGELVITPVDKTGFEPEDAAIVGNTCLYGATGGQVFVRGRAGERFAVRNSLAEAVVEGAGDHCCEYMTGGCVVVLGKVGRNVAAGMTGGLAYILDEDDTFIPKVNREIVKIQRVSAPVGQMQLKSLIEAHVEKTCSTKGAAILKDWDKYLSLFWQLVPPSEEDTPEANAKYDTTTADQVTYQSA

SEQ ID NO: 1851 - protein, 378 aa, Glycine max
MLSGLMNLLRACFRPGSDGFTLAGSDAGGRQDGLLWYKDSGQHLSGEFSMAVIQANNLLEDQSQIESGCLSSNESGPYGTFVGIYDGHGGPETSRFINDHLFHHLKRFTSEQQSMSVDVIRKALQATEEGSCCLVGVICNGTLYIANLGDSRAVLGRAVKATGEVLAMQLSAEHNASIESVRQELHASHPDDPNIVVLKHNVWRVKGLIQVSRSIGDVYLKKAEFNREPLYAKFRLREPYKMPILSSEPSISVHHLQPHDQFIIFASDGLWEHLSNQEAVDIVQNSPRSGSARRLVKAALQEAAKKREMRYSDLKKIDRGVRRHFHDDTTVIVVYLDSNLVSRESTVKFPGISVRGGGINLPHNTLAPCTTPTEIGGN

SEQ ID NO: 1852 - protein, 619 aa, Glycine max
MAASTSPNFTTSLHKNSHKTKFPSLPGKKTLHTKLSFSFSFPFNKSIRVKSIGTAKYDEVVVDEELDKIRRLQNGSDVRGVALEGEKGRTVDLTPPAVEAISESFGEWIIKGLKKEKGYPVENVRVSLGRDPRVTGSKLSVAVFAGLARAGCMVYDMGLATTPACFMSTLLPPFAYDASMMMTASHLPYTRNGLKFFTKRGGLTSTEVEEICEKAARKYANRMAKVSTLLNVLPTKVDFMSTYSMHLREIIKERINHPLHYDTPLQGFQIIVNAGNGSGGFFTWDVLDKLGADTFGSLHLNPDGMFPNHIPNPEDKTAMALTRAAVLQNSADLGIVFDTDVDRSGVVDSKGNPINGDKLIALMSAIVLREHPGSTIVTDARTSMALTRFITDRGGHHCLYRVGYRNVIDKGVHLNNDGIETHLMMETSGHGALKENHFLDDGAYMVVKIIIEMVRMKLAGSNEGIGSLIEDLEEPYESVELRINIISEPRLAKAKGIEAIEIFRNYIEEGRLKGWELDSCGDCWVSEGCLVDTNDTPAPIDAQMYRAKVSNDEHAQHGWVHMRQSIHNPNIAVNLQSSVRGGCLSMARAFRDEFLKASGVHTFLDITQVDKFAENGSKA

SEQ ID NO: 1853 - protein, 117 aa, Glycine max
  misc_feature (24)..(24): Xaa can be any naturally occurring amino acid
  misc_feature (34)..(34): Xaa can be any naturally occurring amino acid
  unsure (1)..(117): unsure at all Xaa locations
RGKRSERETKGEENDTDRACFRGXSSDEEDAEAXRKKLRRAKEQATGLEESGKEHNTLNRKQKGALAKQRGLRARQGEVWAQNRRARTKLEAKEGDCELLKRRCENLTEENRRSQKE

SEQ ID NO: 1854 - protein, 212 aa, Glycine max
MGRGGTAAAAVEIAEPGSRPVFFKEPRYRGVRKRPWGRFAAEIRDPMKKARVWLGTFDTADEAARAYDTAARTLRGPKAKTNFPLSPPFYHPDPFSDHRYFDGAGAGEDFQDHRRPTSSGMSSTVESFSGPRAAVPATAPVTAGRRYPRTPPVIPEDCRSDCDSSSSVVDDGEGDNVASSFPREPLPFDLNALPLDDADVATDDLFCTVLCL

SEQ ID NO: 1855 - protein, 133 aa, Glycine max
  misc_feature (16)..(16): Xaa can be any naturally occurring amino acid
  misc_feature (32)..(32): Xaa can be any naturally occurring amino acid
  unsure (1)..(133): unsure at all Xaa locations
SIRINGYILMDGLSCXVVEVCTSKIVNHVYAXGHFAGMDIITVMNLEYIVSSCLICDVTHVNRTDYQLIDIAEDGYVSLLTENGNTKDDLKLPTDDSWLTLIKDGFADGNDLVRSVVSAVGEEHICASEDIVP

SEQ ID NO: 1856 - protein, 322 aa, Glycine max
MASSCFSMTTPIFKIRFFLFLCFIGISSSQLSSDFYSTTCPNALSTIKSAVDSAVSNEARMGASLLRLHFHDCFVQGCDASVLLNDTSSFTGEQTAAGNVNSIRGFGVIDNIKSQVESLCPGVVSCADILTVAARDSVVALGGPSWTVQLGRRDSTTASLSSANSDLPRFDLSLQQLSDNFQNKGLTTAEMVALSGGHTIGQAKCSTFRTRIYNETNIDSSFATSLQANCPSVGGDSNLAPLDSSQNTFDNAYFKDLQSQKGLLHTDQVLFNGGSTDSQVNGYASDPSSFNTDFANAMVKMGNISPLTGSSGEIRTNCWKTN

SEQ ID NO: 1857 - protein, 328 aa, Glycine max
MTSVTSVELNLLVFRYFQESGFTHAAFAFGNEASINKSPIDGKLIPPGALITLVQKGLQYLEMEANLSNCDADLDEDFSFLQPLDLITKDVHELRKMVNERRKILQKNRNKESEKENEGGRGWLKEKGRHEREKECERDGEKAENLKELEQQHYNQSCREMVIDQEDLVTVKHAENKAFGGTEPMDVSTTSTLQPCQIPRSDVIVLEGHTSEVCACAWSPTGSLLASGSGDSTARIWTIAEGRCKSALLNGPPNVLVLKHVRGKTNEKSNDVTTLDWNGEGTLLATGSYDGQARIWTTNGELKSTLSKTQGPIFSFEWNKKGDYILTG

SEQ ID NO: 1858 - protein, 394 aa, Glycine max
MLSRLMDFLTACWRRRSFSDGKGGSEVTGRKEGLLWYKDAGQHLFGEYSMAVVQANNLLEDQSQIESGPLSLLDTGPYGTFVGVYDGHGGPETSRYVCDHLFQHLKRFASEQKSMSEEVIRKAYQATEEGFLSVVTKQWPMNPQIAAVGSCCLVGVICGGILYIANLGDSRAVLGRVVRATGEVLAIQLSSEHNVARESVRQEMHSLHPDDSKIVVLKHNVWRVKGLIQISRSIGDVYLKKAEFNKEPLYAKFRVREGFKRPILSSDPSISVHEIQQHDQFLIFASDGLWEHLSNQDAVDIVQNNPHNGIARRLIKAALQEAAKKREMRYSDLKKIDRGVRRHFHDDITVVVVFLDSNLVSRASSVRGPPLSVRGGGIPLPSRTLAPCAAPMET

SEQ ID NO: 1859 - protein, 249 aa, Glycine max
MGRGRVELKRIENKINRQVTFAKRRNGLLKKAYELSVLCDAEVALIIFSTRGKLYEFCSTNSMLKTLERYQKCSYGAVEVSKPGKELEQSSYREYLKLKARFESLQRTQRNLLGEDLGPLNTKDLEQLERQLDSSLKQVRSTKTQFMLDQLADLQNKEHMLVEANRSLTMKLEEINSRNQYRQTWEAGEQSMSYGTQNAHSQGFFQPLECNPTLQIGSDYRYNPEASEQQLAATTQAQQVNGFIPGWML

SEQ ID NO: 1860 - protein, 612 aa, Glycine max
MSSSFSVRFLAPPSSCFPSSRPKTWLCAATTPTVAPATASSEVEASRLEPRVEERDGFWVLKEEYRGGISPQEKVKLEKDPMKLFMEGGIEDLAKMSLEEIESSKHTKDDIDVRLKWLGLFHRRKQHYGRFMMRLKLPNGVTTSAQTRYLASVIRKYGKDGCADVTTRQNWQIRGVVLPDVPEILKGLDEVGLTSLQSGMDNVRNPVGNPLAGIDPDEIVDTRPYNNLLSQFITANSRGNPAMSNLPRKWNVCVVGSHDLFEHPHINDLAYMPANKDGRFGFNLLVGGFFSAKRCAEAIPLDAWVSADDVIPLCKAVLEAYRDLGFRGNRQKTRMMWLIDELHGLFPLSLSVSAWQVSDKSVWQMKGIEVFRSEVEKRMPGKQLERASEEELVKKKWERRDYLGVHPQKQDGLSYVGIHIPVGRVQADDMDELARLVDKYGTGELRLTVEQNIIIPNVDSNKIDALLNEPLLKERFSPEPSLLMKTLVACTGNQFCGQAIIETKERALKVTEEVERQVAVTRPVRMHWTGCPNTCGQVQVADIGFMGCMARDENGKATEGVDIFLGGRIGSDSHLAEVYKKGVPCKNLVPIVVDILVKHFGAVQRNREEGED

SEQ ID NO: 1861 - protein, 223 aa, Glycine max
  misc_feature (21)..(21): Xaa can be any naturally occurring amino acid
  misc_feature (55)..(55): Xaa can be any naturally occurring amino acid
  misc_feature (96)..(96): Xaa can be any naturally occurring amino acid
  misc_feature (104)..(104): Xaa can be any naturally occurring amino acid
  unsure (1)..(223): unsure at all Xaa locations
VPEESFKELNALNHKQKCALXKHLNVQRLQVEVWLQYGRARTKLKQSEVDCEFSXRVCESLREESRCLPKELQEVRGLKTSNPLYIQLSAITLPMXYFCDIVAXNSAFSSSSMSDTINANNSGAAACVTAGNHNHNNDSPSRIVGLFFGTVRFHPFVNSILKQVHQLTILSVQKDIKLKISGICLRRGWEIEEILYIGKLIILRVSYFEKHGAVLNTIKLELG

SEQ ID NO: 1862 - protein, 409 aa, Glycine max
  misc_feature (218)..(218): Xaa can be any naturally occurring amino acid
  misc_feature (361)..(361): Xaa can be any naturally occurring amino acid
  unsure (1)..(409): unsure at all Xaa locations
MLHVPITSVAISEQRQILNLFFCFSFVLLVLNMELLSLRLTPSPSASTSSLPAALAHCSKLCEFQPRKKKKVCFDAPRLAVRCVKASAQRTGDTIDDGETRTGFTTPAMEVTTFNRTTFTDAADFPVWEKIGAVVRLSYGLGIYGAMAVAGSFICSITGIDSLGGFHLSLDAILEGLGYAAPPIMALLFILDDEVVKLSPHARAIRDVEDEELWSFIXGMSPWQFILMVAASSVGEELFYRAAVQGALADIFLRGSNLITDVQGMASLTGVLPPFVPFAQAFAAVLTAVLTGSLYYMAASPKDPTYVVAPVLQSRSGRQDLKKLFEAWYEKRQMKKIYSPLLEGLLALYLGFEWIQNGYVXTDNILAPIITHGIYSTVILGHGLWKINDHRRRLRQRIQQLKSEEKNSN

SEQ ID NO: 1863 - protein, 841 aa, Glycine max
RNNKVRMIVDCHAKHVRVLQDEKLPFDLTLCGSTLRAPHSCHAQYMANMDSIASLVMAVVVNDNEEDGDTDAIQPQKRKRLWGLVVCHNTTPRFVPFPLRYACEFLAQVFAIHVNKEIELEYQIIEKNILRTQTLLCDLVMRDAPLGIVSESPNIMDLVKCDGAALIYKNKVWRLGVTPSESQIREIAFWLSEYHMDSTGFSTDSLSDAGFPSALSLGDVVCGMAAVRVTAKDVVFWFRSHTAAEIRWGGAKHEAGEKDDGRRMHPRSSFKVFLDVVKARSLPWKEYEIDAMHSLQLILRNAFKDTESMDLNTKAINTRLSDLKIEGMQELEAVTSEIVRLIETATVPILAVDVDGLVNGWNIKIAELTGLPVGEAMGKHLLTLVEDSSTDRVKKMLNLALLGEEEKNVQFEIKTHGSKMDSGPISLVVNACASRDLRDNVVGVCFVAHDITAQKNVMDKFTRIEGDYKAIVQNRNPLIPPIFGTDEFGWCCEWNPAMTKLTGWKREEVMDKMLLGELFGTHMAACRLKNQEAFVNLGVVLNKAMTGLETEKVPFGFFARNGKYVECLLSVSKKLDVEGLVTGVFCFLQLASPELQQALHIQRLSEQTALKRLNALSYMKRQIRNPLCGIIFSRKMLEGTALGTEQKQLLRTSAQCQQQLSKILDDSDLDSIIDGYLDLEMAEFTLHEVLVTSLSQVMTKSNGKSIRIVNDVAEQIVMETLYGDSLRLQQVLADFLLISINFTPNGGQVVVAGTLTKEQLGKSVHLVKLELSITHGGSGVPEALLNQMFGNNGLESEEGISLLISRKLLKLMNGDVRYLREAGKSAFILSAELAAAHNLKG

SEQ ID NO: 1864 - protein, 516 aa, Glycine max
MAEDDGYTKDGTVDYCGNPANKKETGTWKACPYILGNECCERLAYYGMSTNLVLYFKNRLNQHSATASKNVSNWSGTCYITPLIGAYLADSYLGRYWTIAVFSIIYAIGMTLLTLSASVPGIKPTCHGHGDENCRATTLESAVCFLALYLIALGTGGIKPCVSSYGADQFDDTDSAEKERKSSFFNWFYFSINIGALIASSLLVWIQDNVGWGWGFGIPAVAMAIAVVSFFSGTRLYRNQKPGGSAITRICQVVVASIRKYNVEVPADESLLYETAETESAIKGSRKLDHTDELRFFDKATVLARSDKVKESTNPWRLCTVTQVEELKSILRLLPVWATGIIFSTVYGQMSTLFVLQGQTMDTRVGNSTFKIPPASLSIFDTLSVIFWVPVYDRIIVPIARKFTGYKNGLTQLQRMGIGLFISIFSMIDNAGLEWGFGIPAVAMAIAVVSFFSGTRLYRNQKPGGSAITRICQVVMASIRKYNVEVPADESLLYETAETESAIKGSRKLDHTNELR

SEQ ID NO: 1865 - protein, 794 aa, Glycine max
MPAKDDGSDKEKCLDLFLKIGLDERTAKNTVANNKVTANLTSVIDEAGATDGCSRTVGNFLYTVATKYPANALPHRPTLLQYIVSLKVKTTAQLDAALSFLATTGSENLDLDRFEEACGVGVEVSEEDIKQAVSEVVEENKATILELRYRTNVGELLGHVRKRLPWGDAKVAKQLVDAKLYELLGDRTAADDEKPSRKKKEKPAKVEDKAAPVSTPEKSPEEDVNPFLIFPNPEENFKVHTEVPFSDGSILRCCNTRDLLDKHLKATGGKVLTRFPPEPNGYLHIGHAKAMFIDFGLAKDRDGGCYLRYDDTNPEAEKKEYIDHIEEIVQWMGWKPFKITYTSDYFQELYELAVELIKKGHAYVDHQTPDEIKEYREKKLNSPWRDRPISESLKLFEDMKNGSIEEGKATLRMKQDMQSDNYNMYDLIAYRIKFTPHPHAGDKWCIYPSYDYAHCIVDSLENITHSLCTLEFETRRASYYWLLHALGIYQPYVWEYSRLNVSNTVMSKRKLNRLVTEKWVDGWDDPRLMTLAGLRRRGMTPTAINAFVRGIGITRSDGTLISVERLEYHVREELNKTAPRAMVVLHPLKVVITNLEANSAIEVDAKKWPDAQADDASAFYKIPFSNVVYIEHSDFRMQDSKDYYGLAPGKSVILRYAFPIKCTEVILADDNETILEIRAEYDPSKKTKPKGVLHWVAQPSPGVDPLKVEVRLFERLFLSENPAELDNWLGDLNPNSKVIIPDAYGVSSIQNAKVGDNFQFERLGYFVVDRDSTSEKLVFNRTVTLKGSYSKGGK

SEQ ID NO: 1866 - protein, 479 aa, Glycine max
MMENGGKQTFEVSNDTLQRVGSKSFDDDGRLKRTGTIWTASAHIITAVIGSGVLSLAWAIAQLGWIAGPVVMILFSIVTYYTSTLLATCYRSGDQLSGKRNYTYTQAVRSYLGGFSVKFCGWVQYANLFGVAIGYTIAASISMMAIKRSNCYHSSGGKNPCKMNSNWYMISYGVSEIIFSQIPDFHELWWLSIVAAVMSFTYSFIGLGLGIGKVIGNGRIKGSLTGVTIGTVTESQKIWRTFQALGNIAFAYSYSMILIEIQDTIKSPPAESETMSKATLISVLVTTVFYMLCGCFGYASFGDASPGNLLTGFGFYNPFWLIDIANAGIVIHLVGAYQVYCQPLFSFVESNAAERFPNSDFMSREFEVPIPGCKPYKLNLFRLVWRTLFVILSTVIAMLLPFFNDIVGLIGAIGFWPLTVYLPVEMYITQTKIPKWGIKWIGLQMLSVACFVITILAAAGSIAGVIDDLKVYKPFVTSY

SEQ ID NO: 1867 - protein, 251 aa, Glycine max
MYGRSDSYESDLALLDSIRRHLLGESELIFGAPNFGSGRSSSFSSLDSCLSDDWGELPFKEDDSEDMVLYGVLRDAVNVGWVPSLDAGSPESVSSGFPAVKLEPDVMPALINPCPPPAPAVEEKKVVPPKGKHYRGVRQRPWGKFAAEIRDPAKNGARVWLGTFETAEDAALAYDRAAYRMRGSRALLNFPLRVNSGEPDPVRVTSKRSSSPESMAAAAPKRKKVMVVGTVQEQVGSQVVECTRGEQLLVS

SEQ ID NO: 1868 - protein, 212 aa, Glycine max
MASVSSQPQFRYTQPPSKVLHLRNLPWECTEEELIELGKPFGKVVNTKCNVGANRNQAFIEFADLNQAIAMISYYASSSEPAQVRGKTVYLQYSNRQEIVNNKTAADVPGNVLLVTIEGADARLVSIDVLHLVFSAFGFVHKITTFEKTAGFQALVQFSDAETATSAKDALDGRSIPRYLLPEHVGPCTLRITYSGHSDLSVLFQSHRSRYC

SEQ ID NO: 1869 - protein, 507 aa, Glycine max
  misc_feature (285)..(285): Xaa can be any naturally occurring amino acid
  misc_feature (315)..(315): Xaa can be any naturally occurring amino acid
  unsure (1)..(507): unsure at all Xaa locations
MAMENKKIIEYWVVSILCMLLSGHWISVQAAPAPSLITQLPGFNANFPSKHYSGYISIDGNTESGKNLFYYFVSSERSPEKDPVVLWLNGGPGCSSFDGFVYEHGPFNFEAANSKGNLPTLHINPYSWSKVSSVIYLDSPAGVGFSYSKNTSKYATGDLETASDTHLFLLKWFQQFPEFQANPFYIAGESYAGVYVPTLAFEVAKGIRSGTKPVINFKGYMVGNGVTDEIFDGNALIPFVHGMGLISDTIYENLQSSCKGNYYDAYSLDENDVCYKNIEKFDRAXFDGLNVYNILEPCYHFPDAATAKENGTLPXSFKQLGVTERPLPVRKRMFGRAWPFRAPVKPGLVPLWPQLAQTRHVACVSDEVASSWLNNVAVRKAIHAESEKVAGPWELCTGRIEYHHNAGSMIPYHKNLTRLGYKALIFSGDHDMCVPFTGSEAWTRSLGYKIVDEWRPWNSNNQVAGYLQAYENNLTFLTIKGAGHTVPEYKPREALDFYSRWLEGKLI

SEQ ID NO: 1870 - protein, 423 aa, Glycine max
  misc_feature (244)..(244): Xaa can be any naturally occurring amino acid
  unsure (1)..(423): unsure at all Xaa locations
SFTLSVSINYLQPSCYPDRKEEENICHRRDNLGSLWITRFSPKFTAPLREQPANDTEASTDLKEDKGNNDHKSMYMFKPLSSSPGLRNLEPMASMFARRFSAIKHIIPTNATDTTTQVNMLCLFCGTKGHQLSDCSAIAENKLEDLQKNIDSYGGLEEHSCLCIKCFQPNHWAISCPTSISTRKHELKANALVNDCGKQKHLIPSNEESARLLTDEDDRVLSGGSINDETDQRTGQNINLKLKXNEIITHKVGCNASFQKYCGSSLEENKFRENPISSPSKLTERQISHVPKKIFDAVKKLQLSRTDILKCINTHGSISQLDGFFLRLRLGKWEEGLGGTGYHVAYINETQSQRQCPEQNTRKCLSVKVGSIKCMVESQYISNHDFLEEEITEWWSNTSEAGAEIPSEEYLIEKFKKKEMLGL

SEQ ID NO: 1871 - protein, 201 aa, Glycine max
MSGRVSGKVKWFNDQKGFGFITPDDGSEELFVHQSQIKSDGFRSLAEGESVEFAIESESDGRAKAVDVTGPDGASVQGTRRGGDGGRSYGGGRGGGGGGYGGGGGYGGGGGYGGGGGYGGGGRGGGGGACYNCGESGHLARDCSQGGGGDRYGGGGGGGGRYGGGGGGRYGGGGGGGGGGGSCYSCGESGHFARDCPSSAR

SEQ ID NO: 1872 - protein, 311 aa, Glycine max
MRLAMSTPSKSIICSSEDDYELRRGPWSVEEDYLLTHYIANHGEGRWNLLAIRSGLRRTGKSCRLRWLNYLKPNVKRGNLTSEEQLLIFELHSKWGNRWSKIAQQLPGRTDNEIKNYWRTRIQKQAIYAKFEDHRRAGFVEFVKGLQMTRCLHKSQESSPSAMSTQDQAIPLPFDGVTVPHYSSFGIGTTPTIQITCHGDLNHLNQHEQNSDSEHHNSSCISSSESANIPNMSQPFGYTTSQFQALDNCDFGMCLYDGYSIDNNSYDRDALNLTTTMVAGNLELPVFDCQTLETNRLNKEFASSTWSMDEL

SEQ ID NO: 1873 - protein, 572 aa, Glycine max
  misc_feature (450)..(450): Xaa can be any naturally occurring amino acid
  unsure (1)..(572): unsure at all Xaa locations
MISITSTELNYLVFRYLHESGFTHSAFAFGYEAGIDKNKNDDSVVPPGALVTFIQKGIQYLELEANLSGSDADMDEDFSFLQPLDLITKGPTELHNIVKAKKENLRQHKFESNKIINDLSQDDPRREETEKERKEKENEHTLEKIRLEKDKEPPKPEYKEIQHTDQNHTEKPEDKITVENLENRAQGGAEPMEISQSPMSSPDDTPCGYVKLLKGHTSEVFACAWNPSAPLLASGSGDSTARIWKIADGACDSSVQNEPVNVVVLQHFKESTNEKSKDVTTLDWNGDGTLLATGSYDGQARIWSRDGELNCTLNKHRGPIFSLKWNKKGDYLLSGSVDKTAIVWNIKTGEWKQLFEFHTGPTLDVDWRNNVSFATCSTDKMIHVCKIGENRPIKTFSGHQDEVNAIKWDPSGSLLASCSDDHTAKIWSLKQDNFLHNLKEHVKVLRNVAXGIYTIRWSPTGPGTNSPNQQLVLASASFDSTIKLWDVELGSVLYSLNGHRDPVYSVAFSPNGEYLASGSMDRYLHIWSVKEGKIVKTYTGKGGIFEVNWNKDGDKVAACFSNNIVCVLDFRM

SEQ ID NO: 1874 - protein, 382 aa, Glycine max
FCCCRENYGCEVVCFTADVGQGIQELEGLEAKAKASGASQLVVKDLKEEFVSDYVFPCLRAGAVYERKYLLGTSMARPVIAKAMVDVAKEVGADAVSHGCTGKGNDQVRFELTFFALNPKLNVVAPWREWDITGREDAIEYAKKHNIPVPVTKTSIYSRDRNLWHLSHEGDILEDPANEPKKDMYIMSVDPEDAPDQPEYVEIGIESGLPVSVNGRRLSPASLLAELNEIGGKHGIGRVDMVENRLVGMKSRGVYETPGGTILFAAARELESLTLDRETIQVKDSLALKYAELVYAGRWFDPLRESMDAFMQKITETTTGSVTLKLYKGSVTATSRTSPFSLYRQDISSFESGQIYDQADAAGFIRLYGLPMRVRAMLEHGI

SEQ ID NO: 1875 - protein, 155 aa, Glycine max
MAFASFLGRVLFASVFILSAYQEFNEFGVDGGPAAKALRPKFDAFTHRVHSQVGFQLPEIDLKFLIAGAIALKGLGGVLFIFGSSFGALLLLLHQLIATPIHYDFYNYDSEDKEFTQLFIKFTQNMALFGALLFFIGMKNSIPRRVPKNAPKTKT

SEQ ID NO: 1876 - protein, 576 aa, Glycine max
  misc_feature (212)..(212): Xaa can be any naturally occurring amino acid
  unsure (1)..(576): unsure at all Xaa locations
MADGSSSNTKRNSLILHHPTNLKGGWNAAIFIIFVEFAERFAYQGLASNLIQYLTNVLNEPITQAAKDVNTWVGASSLFPLLGGFIADSYLGRFNTILLSSVIYFAGMVFLTLSVSALKHKFLFFLALYVLAIGDGGHKPCVQTFAADQFDEDTPEEKDAKSSFFNWWYLGIVAGSTASVFVVIYLHDNVGWGVGLGVLAGVLALALALFLXGIKRYRKEGPAGSPFTRLAQVFVAASRKWRVQATHGHHNYCYDEDEEHHEPHNHLHVQPKIHTLLHTHQYRFLDKAAIIDEIDAKTKTRDPWRLCSVTQVEEVKLVLRLIPIWLSCLMFTVVQAQVHTFFIKQGATMVRSIGPHFQVPPASLQGLVGVTILFAVPFYDRVFVPLARKITGKPTGITVLQRIGVGLFLSILNMVVSALVEAKRVGVAKESGLIDDPKAVLPISIWWLLPQYMITGISDAFTIVGLQELFYDQMPEALRSLGAAAYISIVGVGSFVGNIVIVVVEGVTSRAGEKWLGNNLNRAHLDYFYWVLAGLSAVNLCVYVWLAIVYVYKKVDEGHQTSDQQGSSHKKYKPGV

SEQ ID NO: 1877 - protein, 283 aa, Glycine max
IKQFPVCTTTLKRICRQHGIKRWPSRKIKKVGHSLQKLQLVINSVQGASGAFQIGSFYSNFPDLASPNLSGTGFFSTLNQSDYPNSTSTQPDHGSLSPEGASKSPSSSCSQSSISSHSCSSMSELQQHRTANGAGNKVSTTVSEDSAGVVLKRISSEAELKSLSQDRAKLLPRSQSQETLGEHPKTQYQQPLLKTSSSKVDSHRVKVAYGDEKTRFRMPKSWGYEDLLQEIARRFNVSDMSKFDVKYLDDDCEWVLLTCDADLEECIDVCQSSESGTIKPDAW

SEQ ID NO: 1878 - protein, 214 aa, Glycine max
MALQHGVIGSSRSSQNLFRIVVSLLLILTFLQLAASASASTSTTDSLKAYKKFIKDKCNSTTFPKVCYKSLSPYASKIKRNRVTLTKVSIYVALKAAKIAYSTLTKLSKSKGKLTHGEASVIADCRENIDETLDLLSQSSDELANLNGTSSAHDQFQWDNIKTWMSAAITDEGTCTDEFDEIQVRPSLQKKIKTTVYNLSWFTINALALVNRLY

SEQ ID NO: 1879 - protein, 320 aa, Glycine max
  misc_feature (238)..(238): Xaa can be any naturally occurring amino acid
  misc_feature (256)..(256): Xaa can be any naturally occurring amino acid
  misc_feature (305)..(305): Xaa can be any naturally occurring amino acid
  unsure (1)..(320): unsure at all Xaa locations
LEPIRLEQRWLLLQLLLLQSQRGSLLTLSLVAKPGTLKFRNQSSQSPAAAKPPPTLASRSSTTIPLPPLSPLPKSSSPKQPHRCTRLLRNRKPQNIKQDDVVFEYSDSEPESDGEYEAFDFSGDENVGEGEEETPSVKEKGVPAVMRCFDRAKIYVKSGDGGNGVVAFRREKYVPMGGPSGGDGGRGGDVYVEVDGAMNSLLPFRNSVHFRAGRGGHGQGSMQSGAKGEDLVGEGATXTVVRMSGEDNVLLEMVYXGQKGLLLPGGRGGRGNASFKSGTNKVPKIAENGEEGPEMWLELELKLVXDVGIVGAPNAGKSTL

SEQ ID NO: 1880 - protein, 539 aa, Glycine max
MGENEEAMQRLHFLKQPLNMEQLSIPQFNPSQMRARQHHHQNQFDGGNSNKRAGIPPSHPHPIPPISPYSQIPVSRQHNNISPTPTHTRSLSQPSFFSLDSLPPLSPSPFRDSSSTSVSEAADVSMEDRDVSSHSLLPPSPFSRTLNNSNLPLPPRKAHRRSNSDIPFGFSTVLQSSPPLIPLRNPVSAKPAQLVKRETPWDRGVENNNNNNVEGSGEKKSPEGEVVDDLFSAYMNLDSFDALNSSGTDDKNGGENRDDLDSRASGTKTNGGDSSDNEAESSVNESGHGGSEKREGMKRSAGGEIAPTTRHYRSVSMDSFIGKLNFGDESPKLPPSPGQRGGLMSPAGGIDGNSAAFSLEFGNGEFSGPELKKIMANEKLAEIALTDPKRAKRILANRQSAARSKERKMRYISELEHKVQTLQTEATTLSAQLTLLQRDSAGLTNQNSELKFRLQSMEQQAKLRDALNEALTAEVQRLKIATAELSSDSHGSSCLIPQHSVNPLMFQQQPPFASQQNIHLQQQQHRQNGNANSNSDLKQ

SEQ ID NO: 1881 - protein, 306 aa, Glycine max
  misc_feature (294)..(294): Xaa can be any naturally occurring amino acid
  unsure (1)..(306): unsure at all Xaa locations
MGPTSMAAGRVTRFLARHYPLEHHRDNADVEFDFLDDIGEALLAQSASSDECGHPNEMEEQFDQDEDHRDTVEENRTFWDKQHQLLQASICRTSSSESRIRHATKEALQEIQSAETVCGCGRQVAVITTCRNCLMREVSRRLQKAGYDSAICKTKWRSSPDIPSGEHNFLDVIDSTKKGEVRVIVELNFRGEFEMARGSEDYNRLVRRLPEVFVGKVERLSNLIKILCMGAKRCMKEKKMHMGPWRKHRYMQAKWLGPCEGNTSTTSLSVRYNSERILPRPKASMLTVDLLEKXLPNMHCTAVEVV

SEQ ID NO: 1882 - protein, 379 aa, Glycine max
MKIVRRDLVPNGPGSVKMVAVDSDDLWFAYNLIAPGDSVMAVTVRKVLREAANGGREAERVKLKLEIKVEELSDYDKEGSILRVRGKNILENEYVKIGAFHTLELELQRPFVLRKDVWDSLALEVLQQASDPGASADLAVVLMQEGLAHILLVGRSMTVTRSRIETSIPRKHGPAIAGYEKALDKFFQNVLQAFLKHIDFNVVRCAVIASPGFTKDQFHRHLFLEAERRQLRPIIENKSRIILVHTSSGYKHSLKEVLDAPNVMSLIKDTKAAQEVRVMKDFYDMLSNDPSRACYGMKHVEVANERLAVQMLLITDELFRNSDIATRKKYVNLVNSVKDSGGSVHVFSSMHVSGEQLAQISGIAAILRFPLPDLEDIEM

SEQ ID NO: 1883 - protein, 312 aa, Glycine max
MKRLGSSDSLGALMTICPPTDEHSPRNNHAYGREFQSMLEGLDEEGCVEEPGHHSEKKRRLSVDQVKALEKNFEVENKLEPDRKLKLAQELGLQPRQVAVWFQNRRARWKTKQLERDYGVLKANYESLKLNYDTLQQDHEALLKEIKELKSRLVQEENNNNTESDVSVKEEMLTTTLCETAIPGSDTKELSYECFNKSDEVGGGSSVFHVDFKDGSSDSDSSAILNEENNNHSPNNNAAISSCGVLQSHGLLLSPSSSSMNNCFQFQKQYQTTTTQYVKMEEHNFLSADEACNFFSDEQAPTLQWYCSEEWS

SEQ ID NO: 1884 - protein, 203 aa, Glycine max
MATTTLMKLAFMLLMNLVICSAESSIGRKSNPNPEEFVKSSCRATRYPVLCVKSLLAYASVIRRSDRQLATTALSVSISRSRSSAWLVKKMLKARGMKPREYRAVQDCVENIGDSVDRLRQSVTELGRTGEDFVWHMSNVQTWVSAALTDDSTCLDGFAGSAMNGNVKALIKDRIVHVAQVTSNALALVNRFASRHPSATQTP

SEQ ID NO: 1885 - protein, 1131 aa, Glycine max
MSTSRPSQSSSNSRRSRHSARMAQATVDAKIHATFEESGSSFDYSSSVRVSGTADGVNQPRSDKVTTAYLRGKMIQPFGCLLAIDEKNHMQTCKVIAYSENEPEMLTMVSHAVPSVGDHPALGIGTDIKTLFTAPSVSGLQKALGCADVSLLNPILVHCKTSGKPFYAIVHRVTGSLIVDFEPVKPYEVPMTAAGALQSYKLAAKAITRLQSLPSGNMERLCDTMVQEVFELTGYDRVMAYKFHEDDHGEVIREITKPCLEPYLGLHYPATDIPQASRFLFRKNKVRMIVDCHAKHVRVLQDEKLQFDLILCGSTLRAPHSCHAQYMANMDSIASLVLAVVVNDNEEDGDTDAVQPQKTERLWGLVVCHNTTPRFVPFPLRYAREFLPQVFADHVHKEIELEYQIIEKNILHHPGHLLCMLMRDAPLGIASESPNIMDLVKCDGAALIYRNKVWRLGVTPSEPQIREIALWLSEYHMDSTSFSTDSLFDAGFPSALSLGDVVCGMASVRVTAKDMVFWFRSHTAAEIRWGGAKHEAGEKDDSRRMHPRSSFKAFLEVVKARSLPWKEYEMDAIHSLQIILRNAFKEDTESLDLNAKAINTRLRDLKIEGINDLKIERMQELEAVTSEIVRLDYTATVPILAVDVDGLVNGWNIKIAELTGLPIGEATGKHLLTLVEDSSTDRVKKMLNLALLGEEEKNVQFEIKTLGSKMDSGPISLVVNRCASRDLRDNVVGVCFVAHDITAQKNVMDKFIRIEGDYKAIVQNRNPLIPPIFGTDEFGWCCEWNPAMMKLTGWKREEVMDKMLLGEIFGTQMAACRLKNQEAFVNLGVVLNKAMTGSETEKVPFGFFARNGKYVECLLSVSKKLDVEGLVTGVFCFLQLASPELQQALHIQRLSEQTASKRLNALSYMKRQIRNPLCGIVFSRKMLEGTDLGTEQKQLLRTSAQCQQQLSKILDDSDLDTIIDGYLDLEMAEFTLHEVLVTSLSQVMEKSNGKSIRIVNDVAGHIMMETLYGDSLRLQQVLADFLLISINFTPNGGQVVVAGSLTKEQLGKSVHLVKLELSITHGGSGVPEVLLNQMFGNNGLESEEGISLLIRAKLLKLMNGDVRYLREAGKSAFILSAELAAAHNLKA

SEQ ID NO: 1886 - protein, 249 aa, Glycine max; identical to SEQ ID NO: 429

SEQ ID NO: 1887 - protein, 197 aa, Glycine max
  misc_feature (192)..(192): Xaa can be any naturally occurring amino acid
  unsure (1)..(197): unsure at all Xaa locations
MPGKPDTDDWRVERGEQIQFQSSIYSHHQPWWRGVGENASKSSSDDQLNGSIVNGGGVPKEYQNIKHAMLSTPFTMEKHLAPNPQMELVGHSVVLTSPYSDAQYGQILTTYGQQVMINPQLYGMHHARMPLPLEMEEEPVYVNAKQYHGILRRRQSRAKAEIEKKVIKNRKPYLHESRHLHAMRRARGNGGXRFLNT

SEQ ID NO: 1888 - protein, 159 aa, Glycine max
  misc_feature (154)..(154): Xaa can be any naturally occurring amino acid
  unsure (1)..(159): unsure at all Xaa locations
MSDEEHHFESSDAGASKTYPQQAGNIRKGGHIVIKGRPCKVVEVSTSKTGKHGHAKCHFVAIDIFTAKKLEDIVPSSHNCDVPHVNRIDYQLIDISEDGFVSLLTDSGGTKDDLKLPTDDNLNALMKSGFEEGKDVVVSVMSSMGEEQICAVRXVGGGK

SEQ ID NO: 1889 - protein, 541 aa, Glycine max
MRKSAADRFRHLFNRSLLLLRHRHHHNHHPFPYSSSVSSLSPFSRSRFLSSTPFSMASDSPFPVTAQNINPKVLKCEYAVRGEVVTLAQNLQKDLQANPGSHPFDEILYCNIGNPQSLGQQPITFFREVLALCDHPAILDKSETQGLFSTDAIQRAWQIVDQIPGRATGAYSHSQGVKGLRDTIAAGIEERDGFPANPDDIFMTDGASPAVHNMMQLLIRSENDGILCPIPQYPLYSASIALHGGCLVPYYLDEATGWGLEIPELKKQLEAAKSKGINVRALVVINPGNPTGQVLGEANQRDIVEFCKQEGLVLLADEVYQENVYVPEKKFHSFKKVSRSMGYGENDITLVSFQSVSKGYHGECGKRGGYMEVTGFSAEVREQIYKVASVNLCSNISGQILASLVMSPPKVGDESYDSFMAEKENILASLARRAKTLEDAFNKLEGVTCNKAEGAMYLFPQIRLSEKAIKAAEAANATPDNFYCKRLLNATGVVVVPGSGFGQVPGTWHFRCTILPPEEKIPAIVTRLTEFHEKFMDEFRD

SEQ ID NO: 1890 - protein, 482 aa, Glycine max
MHIQMSSFLLASLALLFCISSLEKSFAFQATKESNNLRQYHFVHLNSLFPSSSCSSSAKGPKRKASLEVVHKHGPCSQLNHSGKAEATISHNDIMNLDNERVKYIQSRLSKNLGGENRVKELDSTTLPAKSGRLIGSADYYVVVGLGTPKRDLSLIFDTGSYLTWTQCEPCAGSCYKQQDPIFDPSKSSSYTNIKCTSSLCTQFRSAGCSSSTDASCIYDVKYGDNSISRGFLSQERLTITATDIVHDFLFGCGQDNEGLFRGTAGLMGLSRHPISFVQQTSSIYNKIFSYCLPSTPSSLGHLTFGASAATNANLKYTPFSTISGENSFYGLDIVGISVGGTKLPAVSSSTFSAGGSIIDSGTVITRLPPTAYAALRSAFRQFMMKYPVAYGTRLLDTCYDFSGYKEISVPRIDFEFAGGVKVELPLVGILYGESAQQLCLAFAANGNGNDITIFGNVQQKTLEVVYDVEGGRIGFGAAGCN

SEQ ID NO: 1891 - protein, 372 aa, Glycine max
  misc_feature (19)..(19): Xaa can be any naturally occurring amino acid
  misc_feature (22)..(22): Xaa can be any naturally occurring amino acid
  unsure (1)..(372): unsure at all Xaa locations
MSLLSDLINLNLSDTTEKXIAXYIWIGGSGMDLRSKARTLPGPASDPSKLPKWNYDGSSTGQAPGEDSEVIIYPQAIFRDPFRRGNNILVICDTYTPAGEPIPTNKRHDAAKVFSHPDVVAEETWYGIEQEYTLLQKDIQWPLGWPVGGFPGPQGPYYCGVGADKAFGRDIVDAHYKACLYAGINISGINGEVMPGQWEYQVGPSVGIEAGDHIWASRYILERITEQAGVVLSLDPKPIEGDWNGAGCYTNYSTKSMREDGGFEVIKKAILNLSLRHKDHISAYGEGNERRLTGKHETASINTFSWGVANRGCSIRVGRDTEKNGKGYLEDRRPASNMDPYVVTSLLAETTLLWEPTLEAEALAAQKLALKV

SEQ ID NO: 1892 - protein, 158 aa, Glycine max
MDIRLMDLDSPLFNTLHRIMDLTEDAEKNLNAPTRTYVRDAKAMAATPADVKEYPNYYVFVIDMPGLKSGDIKVQVEDDNVLLISGERKREEDKEKEGAKYLRMERRVGKFMRKFTLPENANTDAISAVCQDGVLTVTVNKLPPPQPKKPKTIEVKIA

SEQ ID NO: 1893 - protein, 202 aa, Glycine max
MEAISPKHLMTSLVIIIASSLTAHCGCAKRGGERPYKEANTLFIRTSCSSTTYPRLCYSSLVKHADLIQTNRVVLTGAALNVTLASVKSTSAMMSTLAKKQGLKPREVAAMQDCVEQLSDTVDELRRSIAEMSDLRAFNWEMIMSDVQTWVSAALTDETTCNDGFQEITAATDIKSTVRRLVIQVAQLTSNALALINKLANS

SEQ ID NO: 1894 - protein, 243 aa, Glycine max
MCHEPLLASSSVCSLGASNDPNLGFRKHEDTDDSTYLSDNDGEPEDMVKQDREGNRVKRSRNPEVHNLSEKKRREKINKKMRTLKDLIPNCNKVDKASMLDDAIDYLKTLKLQLQANFQIMSMGSGLWPLMMGFRPPQLPIPPLSAITDNRLIQMFGSPNQIPPMPMPHAPFFPIIGNSATQSHLANNTTTTAAATTNLAEHLANSLHGNATKLAPPSQISFQHHHTSTSTPTLATPFIFPQK

SEQ ID NO: 1895 - protein, 212 aa, Glycine max
MAYSSHKLFFLLFAIFFSHACAVNSSNASTTLHTNLSSLKSFCTTTAYPEVCSNSLKLSISINISPNIINYLLQSLQVAISETTKLSNLFHNVGHSNIIEKQRGAVQDCRELHQSTLASLKKSLSGIRSSNSKNIVDARSYLSAALTNKNTCLEGLDSASGIMKPSLVKSVIDTYKHVSNSLSMLPKPEMGAPNAKKNNKPLMNAPKWGIKQ

SEQ ID NO: 1896 - protein, 608 aa, Glycine max
  misc_feature (51)..(51): Xaa can be any naturally occurring amino acid
  misc_feature (59)..(59): Xaa can be any naturally occurring amino acid
  unsure (1)..(608): unsure at all Xaa locations
MYTFLLLLPIMSSSFSVRFLAPLPPSSSSCFPTSSLPKTWLCAAATPTVAXVNHHLLLXEVEASRLEPRVEERDGFWVLKEEYRGGISPQEKVKLEKDPMKLFMEGGIEELAKMSLEEIESSKHTKDDIDVRLKWLGLFHRRKQHHGRFMMRLKLKLPNGVTTSAQTRYLASVIRKYGKDGCADVTTRQNWQIRGVVLPDVPEILKGLDEVGLTSLQSGMDNVRNPVGNPLAGIDPDEIVDTRPYNNLLSQFITANSRGNPAMSNLPRKWNVCVVGSHDLFEHPHINDLAYMPANKDGRFGFNLLVGGFFSAKRCAEAIPLDAWVSADDVIPLCKAVLEAYRDLGFRGNRQKTRMMWLIDELGIEVFRSEVEKRMPGKKLERASKEELVKKQWERRDYLGVHPQKQEGLSYVGIHIPVGRVQADDMDELARLADEYATGELRLTVEQNIIIPNVDNNKIDGLLNEPLLKGRFSPEPSLLMKTLVACTGNQFCGQAIIETKERALKVTEEVERQVAVTRPVRMHWTGCPNTCGQVQVADIGFMGCMARDDNGKATEGVDIFLGGRIGSDSHLAQVYKKGVPCKDLVPVVVDILVKHFGAVLRNREEGED

SEQ ID NO: 1897 - protein, 341 aa, Glycine max
MQEIHSIGGGRFFGGGGDRRLRPHHQNHHQQPPIKCPRCDSLNTKFCYYNNYNLSQPRHFCKNCRRYWTKGGVLRNVPVGGGCRKSKRSNKPKTTTSAAATTSSNNNNNNPSSSSETAAATAPTPPQQPPPPLELEHNSHSHSSSESSTYTVAATEAMSAPTTNAVSNNNLLLDNNRESKMFANPNPYLEQSRSGGLFSDIESFSSLVNLNNQALGFGFGNNNSNISILDATSFRFGVSVTNPHGNDQVLAAPGGGHGQWQQQQQNHHEFGTASFLDHTVPLEFSSLQHKAGHQGGFGPLDWQPGGDQGLFDLPNTVDQPYWTHHTHWSDQDNPSSLFHLP

SEQ ID NO: 1898 - protein, 225 aa, Glycine max
  misc_feature (174)..(174): Xaa can be any naturally occurring amino acid
  unsure (1)..(225): unsure at all Xaa locations
MEVKGIRASNSTTTTTTIQSEDEMDLRRGPWTVDEDLALINYIANHGEGRWNSLARSAGLKRTGKSCRLRWLNYLRPDVRRGNITLEEQLLILELHGRWGNRWSKIAQYLPGRTDNEIKNYWRTRVQKHAKQLKCDVNSKQFKDAMRYLWMPRLVERIQAAAAATTTVAAAGSXGICSATTTITTNNNTTTYNYENNNNNNLNNSFEVHRQWEHDGEKSNNHEQQ

SEQ ID NO: 1899 - protein, 214 aa, Glycine max
  misc_feature (176)..(176): Xaa can be any naturally occurring amino acid
  unsure (1)..(214): unsure at all Xaa locations
MEDNNEECIAGLCLGLGLGLGSGHVPKKNKQKENKAVVCLDLAFELCPKGEKAVNNVNHHHDKVERISLERIHDYPNEKSTDSDNSNNNGCRKKLRLSKDQSSMLENSFKQHSTLNPVQKQALADRLNLKTRQVEVWFQNRRARTKLKQTEVDRELLKKHCQNLSDENKRLKKELXGTTCHLRLDRRHHAFHYSKPATLTTMCSSCDRELKLVN

SEQ ID NO: 1900 - protein, 191 aa, Glycine max
  misc_feature (181)..(181): Xaa can be any naturally occurring amino acid
  unsure (1)..(191): unsure at all Xaa locations
MEYGRLGPSDPGGSSRLNNVPPTSSGRKKIVLLSLFSVLLIAASAVTAVVVRSRIQQNTRAHETRLGKPTQAISRTCSKTRFKTLCVKSLLDFPGSEEASEKDLVHISFNVTLQHFSKALYSSAAMSYTAMDPRVRAAYDDCLELLDDSVDALARSLNTVSVGAVGSANDDVLTWLSAALXNQDTCAEGFT

SEQ ID NO: 1901 - protein, 176 aa, Glycine max
MSRVYVGNLDPRVSERDLEDEFRIYGVLRSVWVARRPPGYAFIEFDDRRDALDAIQALDGKNGWRVELSHNSKGGGRGGRGRGGEDTKCYECGEPGHFARECRLRIGSRGLGSGRRRSPSPYRRRRSPSYGYDRSSYSPRGRRSPRRRSISPPWGRNYSRSPPYRPRRDSPYANAD

SEQ ID NO: 1902 - protein, 164 aa, Glycine max
MNSDRKIGVALDFSKGSKIALKWAIDNLISNGDTLYIVHTKPSGGSESGNLLWSTTGSPLIPLSEFREKEVMRHYEVDTDAEVLDLLDTASRQKQVNVVAKLYWGDAREKIVEAVGDLKLDSLVMGSRGLGAIQRVLLGSVTNYVTANASCPITIVKDSAPSTI

SEQ ID NO: 1903 - protein, 199 aa, Glycine max
  misc_feature (181)..(181): Xaa can be any naturally occurring amino acid
  unsure (1)..(199): unsure at all Xaa locations
MSNLNGSDSPKIHVETPPVAPSAPSEGHLAPASHGGIGGILRRWKREDLIKRGSLGLRGVALLFSLISFFIMASNKHGDWREFDKYEEYRYLLAIAILSSLYTGAQAFRQIQELSTAKQLLQPRMAAMIDFFGDQIIAYLLISSASSAIPMTNRMREGADNIFTDSSAAAISMSIFAFLVXLAVSALISGYKLSTSTFI

SEQ ID NO: 1904 - protein, 304 aa, Glycine max
MQAGHQAMVSGLLLYPPSLKLLETMCREQVLRKEKGKSEMLEPAVTSSSGGSGSSLGKTCSLSTRNQGQKRKGIDVEESEEQSEDTELKSALGNKSSQRTGSARRNRAAEVHNLSERRRRDRINEKMKALQQLIPHSSKTDKASMLEEAIEYLKSLQLQLQLMWMGSGMAPIMFPGIQHYMSQMGMGMARPPFPPPIHNPMQLPRLPLDQSVSASQTPNQTLMSQNPILGAFNYHNQMQNPALSEQYARYMGYHLMQNASQPMNVFRYGPQGVRHSQTMITPSNSSGNMSGAANIDEAVSGKMG

SEQ ID NO: 1905 - protein, 196 aa, Glycine max
MAFAGTTQKCMACDKTVYLVDKLTADNRVYHKACFRCHHCKGTLKLSNYNSFEGVLYCRPHFDQLFKRTGSLDKSFEGTPKIAKPEKTGEEKPAATKVSSMFGGTRDKCAGCQKTVYPTEKVTVNGTPYHKSCFKCTHGGCVISPSNYIAHEGQLYCKHHHVQLIKEKGNLSQLEGDHEKSTEEEKINGEVVAAET

SEQ ID NO: 1906 - protein, 284 aa, Glycine max
MESGRIFFGASASSGNNMLFLGNTELAFRGRSIMSMEEASKRRPFFTSPDELYDEEYYEKQSPEKKHRLSSEQVHLLEKSFEEENKLEPERKTQLAKKLGLQPRQVAVWFQNRRARWKTKQLERDYDVLKSSYDTLLSSYDSIMKENEKLKSEVVSLNEKLQVQAKEVPEEPLCDKKVDPIPVDEDMAPIFGTRVEDHLSSGSVGSAVVDEGSPQVVVDSVDSYILADNYGGCVGPVERVQSEEEDGSDDGRSYLDVFVVSETEHQNHEEGETLGWWTNMYYVG

SEQ ID NO: 1907 - protein, 338 aa, Glycine max
MSIITRRGIRYMPRLDAAKVSAALLEKGQNRVIDASLTLIRERAKLKGELVRALGGAKATSTLLGVPLGHNSSFLQGPAFAPPRIREAIWCGSTNSTTEEGKELQDARVLTDVGDVPIQEIRDCGVDDHRLMNVIGESVKLVMEEDPLCPLVLGGDHSISFPVIRAVSEKLGGPVDVLHLDAHPDNYDAFEGNIYSHASSFARVMEGDYVRRLLQVGIRSITAEGRAQAKKFGVEQYEMRTFSRDRHFLENLKLGEGVKGVYISIDVDCLDPAFAPGVSHIEPGGLSFRDVLNILHNLQGDVVAGDVVELNPQRDTVDGMTAMVAAKLVRELAAKISK

SEQ ID NO: 1908 - protein, 236 aa, Glycine max
MAANVGESTSGSSSVAGDGGGSFECNICFELPQEPIVTLCGHLFCWPCLYKWLHIHSHSPECPVCKAVVEEDKLVPLYGRGKDRVDPRSKGVPSGAEIPNRPTGQRPATAPQADPNNHFPNANPNPWFMGGGGVPLANARWGNYTFSAAFGGLFPLLSFQVHGFPDATAYGQPAGFPYGYGHGHGHGHGHAFHGGNAHAAAPRHAPPGQQQQQADVYLKALLILVGFLVIASLITF

SEQ ID NO: 1909 - protein, 483 aa, Glycine max
MVSLISTSPPSSSFNIHPFFSPRGVQFRHNCVNYKRKTVRCAVTSADASPPPSTSLAKEPHKYFDHVIITVRAGDGGHGAVLNQQQQQQQQQQQGKTKLKKGKGSLKRDFDGSLILPMGGHGGDVVLYADESKDTLLEFHNKGRYHAKRGGNVDAMGVLTSMLRDGLAAPTLRIAVPVGTVVKSKRGKMLADLAQPWDEVLVARGGQGGISLLEMPQHKRKKMMALTTNVMRDDSDKVLIHGQPGEEVKLELILRVVADVGLIGLPNAGKSTLLAAITLAKPDIADYPFTTLMPNLGRLGGDPSLGAGMYSSEATLADLPGLIEGAHLGKGLGRNFLRHLRRTRLLVHVVDAATENPINDYRTVREELRMYNPEYLDRPYVVILNKIDLPEAKDKLPSLTQEIMRIGNDGAASDPKPSPEVLDPLSDETDRKEKRLEDYPRPLSVVGVSVLKGIRINEMLKEIRSALRKCSDSKEALSFSVPP

SEQ ID NO: 1910 - protein, 121 aa, Glycine max
DKRRPLHNVAEVMNLIGDVKGKVAVMVDDMIDTAGTIAEGAALLHEEGAREVYACCTHAIFSPPAIERLSSGLFHEVIITNTIPVAEKNYFPQLTIITVANLLGETIWRVHDDSSVSSIFQ

SEQ ID NO: 1911 - protein, 320 aa, Glycine max
MSDSAYRVQTTPRLAQWRIENLASCTYRKSDPFKIGNWNWVLFVKLFPEISNLTRDNPPIASFIVRVVSSVGGRQAITHPEIKDKVLKNNEDFVWAIEVPLTGKFIIDVEFLDLKTASPNGGEPCSIWAEGFTQQRSNAKAIESLGRMLTEGIHTDITINASDGSIGAHRAVLAARSPVFRSMFSHNLQEKELSTINISDMSLESCQAFLYYLYGIIKHEEFLTHRLALLQAADKYDISDLRDVCHESLLEDIDTKNVLERLQNASLYQLMKLKMSCIRYLVKFGKIYEIRDDFNTFLRNADRDLISEVFHEVLDAWKGF

SEQ ID NO: 1912 - protein, 299 aa, Glycine max
  misc_feature (274)..(274): Xaa can be any naturally occurring amino acid
  unsure (1)..(299): unsure at all Xaa locations
MSDSAYRVETTPRLAQWRIENLASCTYRKSDPFKIGNWNWHLSVEKNRVLFVKLFPEISNLTRDNPPIASFIVRVVSSVGDRKAITHPEIKDKVLKNNEDFVWAIEVPLTGKFIIDVEFLDLKTASPNGGEPCSIWAEGFTQQRSNAKAIESLGRMLTEGIHTDITINASDGSIGAHRAVLAARSPVFRSMFSHNLQEKELSTINISDMSLESCQAFLNYLYGIIKHEEFLTHRLALLHAADKYDISDLRDVCHESLLEDIDTKNVLDRLQNAXLFLQNADRDLIAEVFHEVLDAWKGF

SEQ ID NO: 1913 - protein, 234 aa, Glycine max
  misc_feature (113)..(113): Xaa can be any naturally occurring amino acid
  unsure (1)..(234): unsure at all Xaa locations
MKPFLLSHPDTMYNCSQVYCSHSLAHTSYPCGDPYFGSSIVAYGTQAITQQMVPQMLGLASTRIALPVELAEDGPIYVNAKQYHGILRRRQSRAKLKAQNKLIKSRKPYLHEXSRHRHALKRVRGTGGRFLSAKQLQQFNAELVTDAHSGPGPVNVYQKKDASEAESHPSRTGKNASITFTAISGLTSMSGNSVSFRRPEHNFLGNSPNIGGSSQCSGGLTFGGGARQCTSVGR

SEQ ID NO: 1914 - protein, 608 aa, Glycine max
MDTKIGSLDAPKPNSNDVVSCNLTSSAAIQPCLPATVINGAGCSDSTLGGHLARRLVEIGVTDVFSVPGDFNLTLLDHLIAEPALHLVGCCNELNAGYAADGYARARGVGACVVTFTVGGLSVLNAIAGAYSENLPLICIVGGPNSNDYGTSRILHHTIGLPDFSQELRCFQTITCFQAVVNNLEDAHELIDTAISTALKESKPVYISISCNLPGIPHPTFSRDPVRFSLSPRLSNKMGLEAAVEAAAEFLNKAVKPVLVGGPKLRVATASDAFVELADACGYALAVMPSAKGQVPEHHPHFIGTYWGAVSTAFCAEIVESADAYLFAGPIFNDYSSVGYSLLLKKEKAIIVQPDRVVIANGPAFGCVLMKDFLKALAKRLKHNNTAYENYHRIFVPDGHPLKAAPREPLRVNVLFQHIQNMLSGETAVIAETGDSWFNCQKLKLPKACGYEFQMQYGSIGWSVGATLGYAQAVPEKRVIACIGDGSFQVTAQDVSTMLRCGQKTIIFLINNGGYTIEVEIHDGPYNVIKNWNYTGLIDAIHNGEGKCWTAKVFCEEELVEAIATATGPKKDSLCFIEVIVHKDDTSKELLEWGSRVSAANSRPPNPQ

SEQ ID NO: 1915 - protein, 588 aa, Glycine max
MSSSFSVRFLAPPSSCFPSSRPKTWLCAATTPTVAPATASSEVEASRLEPRVEERDGFWVLKEEYRGGISPQEKVKLEKDPMKLFMEGGIEDLAKMSLEEIESSKHTKDDIDVRLKWLGLFHRRKQHYGRFMMRLKLPNGVTTSAQTRYLASVIRKYGKDGCADVTTRQNWQIRGVVLPDVPEILKGLDEVGLTSLQSGMDNVRNPVGNPLAGIDPDEIVDTRPYNNLLSQFITANSRGNPAMSNLPRKWNVCVVGSHDLFEHPHINDLAYMPANKDGRFGFNLLVGGFFSAKRCAEAIPLDAWVSADDVIPLCKAVLEAYRDLGFRGNRQKTRMMWLIDELGIEVFRSEVEKRMPGKQLERASEEELVKKKWERRDYLGVHPQKQEGLSYVGIHIPVGRVQADDMDELARLADEYATGELRLTVEQNIIIPHVDNNKIDGLLNEPLLKGRFSPEPSLLMKTLVACTGNQFCGQAIIETKERALKVTEEVERQVAVTRPVRMHWTGCPNTCGQVQVADIGFMGCMARDDNGKATEGVDIFLGGRIGSDSHLAQVYKKGVPCKDLVPVVVDILVKHFGAVLRNREEGED

SEQ ID NO: 1916 - protein, 159 aa, Glycine max
  misc_feature (142)..(142): Xaa can be any naturally occurring amino acid
  unsure (1)..(159): unsure at all Xaa locations
AIQAEYIWIDGDGGLRCKTMTIEKGKPSSVSELKEWNFDGSSTNQAPGENSDVYLRPVAMFKDPFRGGDNILVLCECYDNDGTVNKSNYRAHAKKVMDSAKEHEPWFGLEQEYTLFDADGQVYGWPKMGFPGPQGPYYCGVXAGKVFARDFMEGHYQAS

SEQ ID NO: 1917 - protein, 338 aa, Glycine max
  misc_feature (100)..(100): Xaa can be any naturally occurring amino acid
  unsure (1)..(338): unsure at all Xaa locations
MGRSPCCNKNGLKKGPWTPEEDQKLIDYIQKHGYGNWRVLPKNAGLQRCGKSCRLRWTNYLRPDIKRGQFTFEEEETIIQLHSILGNKWSAIASRLPGRXDNEIKNYWNTHIRKRLLRMGIDPVTHRPRLDLLDLSSILSSTLYGSTQMNIQRLLGTNTVVNPELLKLASSPFPSLQQRQHQNMCAQNCEENHLCDPQIQNQIPQDLAQEALPFNHTQFVESNMNIIPYPSIFQDSSFQQHSQPSDLHCNGIDHTSYVPQLPNYDYPPISELSTYNNSYNNNQNFSYTSVLSTPSSSPTPLNSNSTYVNGCSSTEDETESYVSSNNLLRFEIPDMLCV

SEQ ID NO: 1918 - protein, 372 aa, Glycine max
MELLSLRLTPSPSSSTSSLPAALAHCSKLCEFQPRKKKKACFDAPRLAVRCVKASAERTGDTIDDGEARSGFTTPAMEVTTFNRSTFSDAADFPVWEKIGAVVRLSYGIGIYGAMAVAGSFICSITGIDSLGGFHLSLDAILEGLGYAAPPIMALLFILDDEVVKLSPHARAIRDVEDEELWSFFYGMSPWQFILMVAASSVGEELFYRAAVQGALADIFLRGSNLITDVQGMASLTGVLPPFVPFAQAFAAVLTAVLTGSLYYMAASPKDPTYVVAPVLQSRSGRQDLKKLFEAWYEKRQMKKIYSPLLEGLLALYLGCEWIQTDNILAPIITHGIYSTVILGHGLWKINDHRRRLRQRIQQLKSEEKNSN

SEQ ID NO: 1919 - protein, 315 aa, Glycine max
  misc_feature (265)..(265): Xaa can be any naturally occurring amino acid
  unsure (1)..(315): unsure at all Xaa locations
MTVEKEDLGLSLSLSFPQNPPTHLHLNLVSSSPSSHNPQKPSWNDPFTSSAGSSFLRGIDVNRLPSVVDCEEEAGVSSPNSTVSSVSGKRSEREEANGEENDTDRACSRGIISDEEDAETSRKKLRLSKDQSIILEESFKEHNTLNPKQKLALAKQLGLRARQVEVWFQNRRARTKLKQTEVDCEFLKRCCENLTVENRRLQKEVQELRALKLSPQFYMHMTPPTTLTMCPSCERVAVPPSSAVDPAMRHHHVPPTQPRAFPIGXMGHRCRHYPAQALRCPPSQILTRRNKMTKFEKKKTVVIVGSHELCVQSVV

SEQ ID NO: 1920 - protein, 285 aa, Glycine max
  misc_feature (256)..(256): Xaa can be any naturally occurring amino acid
  unsure (1)..(285): unsure at all Xaa locations
MTVQKEDLGLSLSLSFPLLSSSPSSHNPQKPSWNDPIFTSSGEAGSFLRGIDVNRLPSVVDCEEEAGVSSPNSTVSSVSGKRSERETNGEENDTDRACSRGIISDEEDAETSRKKLRLSKDQSIVLEESFKEHNTLNPKQKLALAKQLGLRARQVEVWFQNRRARTKLKQTEVDCEFLKRCCENLTEENRRLQKEVQELRALKLSPQFYMHMTPPTTLTMCPSCERVAVPPSSAVDPATRHHHVPPSHPRAFPIGXHGQALRCPPSQILDSRKQNDKIEKKDRKP

SEQ ID NO: 1921 - protein, 159 aa, Glycine max
MQKQKLALAKQLNLQPRQVEVWFQNRRARTKLKQTEVDCEYLKRCCETLTEENRRLHKELQELRALKTSNPFYMQLPATTLTMCPSCERVATNSTSTSLSISATINATNSGAMASVKTSNNNNNNDSPSKAIGFPFGKPRFHPFVHTSQQPHQHQSTAS

SEQ ID NO: 1922 - protein, 213 aa, Glycine max
  misc_feature (43)..(43): Xaa can be any naturally occurring amino acid
  misc_feature (56)..(56): Xaa can be any naturally occurring amino acid
  misc_feature (64)..(64): Xaa can be any naturally occurring amino acid
  misc_feature (88)..(88): Xaa can be any naturally occurring amino acid
  misc_feature (106)..(106): Xaa can be any naturally occurring amino acid
  misc_feature (126)..(126): Xaa can be any naturally occurring amino acid
  misc_feature (135)..(135): Xaa can be any naturally occurring amino acid
  misc_feature (152)..(152): Xaa can be any naturally occurring amino acid
  unsure (1)..(213): unsure at all Xaa locations
LARKDLFACPRAGALDDTKSLLATFMARPACAGGMVDVGKQDXAPETVSHRCTGEXNDQVRFRXSFFALQPEQHALAPWREGDIHTGXEYALQYAKKHTLPVRETXTSICCRDRNLCHLIPDGDMXEDPDHEPRXDMSMMSAHSKHAPDESXYLDSEISSGLPVSLTGKTLSPATLLTDLHEIGGRHDTFSNDMADNLVAALNSSLLIILHVQ

SEQ ID NO: 1923 - protein, 386 aa, Glycine max
MAKPVSIEVWNPSGKYRVVSTKPMPGTRWINLLIQNDVRLEICTEKKTILSVEDIIALIGDKCDGVIGQLTEDWGEELFSALSKAGGKAFSNMAVGYNNVDVDAANKYGVAVGNTPGVLTETTAELAASLTLAAARRIVEADEFMRAGLYDGWLPHLFVGNLLKGQTVGVIGAGRIGSAYARMMVEGFKMNLIYYDLYQSTRLEKFVTAYAAFLKANGETPVTWKRAATMDEVLQEADIISLHPVLDKTTYHLVNKERLAKMKKEAILINCSRGPVIDEAALVEHLKHNPMFRVGLDVFEEEPYMKPGLAELKNAIVVPHIASASKWTREGMATLAALNVLGKVKGYPVWFDANRVEPFLNENARPPAACPSIVNAKALGLPTSKL

SEQ ID NO: 1924 - protein, 623 aa, Glycine max
  misc_feature (433)..(433): Xaa can be any naturally occurring amino acid
  unsure (1)..(623): unsure at all Xaa locations
FEPILSAQLKKKKKSRTMSSGPPLEFHLRSPPPPPKEASFCLWLLHPDPKSRPTLGELLQSEFLNEQRDDTEEREAAIELRQRIEDQELLLEFLLLLQQRKQEVAEKLQHTVSFLCSDIEEVTKQHVRFKEITGAELGSDERSASSFPSMTFVDSEDSAFLGTRKRVRLGMDVKNIEECDDDVGDDQKSNGSFLSKSSRLMKNFKKLESAYFLTRCRPAYSSGKLAVRHPPVTSDGRGSVVVTERSCINDLKSKEQCREGASAWINPFLEGLCKYLSFSKLKVKADLKQGDLLHSSNLVCSLSFDRDGEFFATAGVNKKIKVFECDSIINEDRDIHYPVVEMASRSKLSSICWNTYIKSQIASSNFEGVVQLWDVTRSQVISEMREHERRVWSIDFSSADPTMLASGSDDGSVKLWSINQAIPFLHLVECQLXKLNGVSVGTIKTKANVCCVQFPLDSARFLAFGSADHRIYYYDLRNLKMPLCTLVGHNKTVSYIKFVDTVNLVSASTDNTLKLWDLSTCASRVIDSPIQSFTGHANVKNFVGLSVSDGYIATGSETNEVFIYHKAFPMPALSFKFQNTDPLSGNEVDDAVQFVSSVCWHGQSSSTLLAANSTGNVKILEMV

SEQ ID NO: 1925 - protein, 157 aa, Glycine max
  misc_feature (145)..(145): Xaa can be any naturally occurring amino acid
  unsure (1)..(157): unsure at all Xaa locations
MVRGKTQMKRIENETSRQVTFSKRRNGLLKKAFELSVLCDAEVALIIFSTRGRLYEFSSSRCSSINKTVERYQRKIEDLGVSNKGIHENTQHLKEVDMSMAKKIEHLEDSRRKLLGDELDKCSIDELQQLENQLERSLDKIRATXNQLFRKRIEKLK

SEQ ID NO: 1926 - protein, 131 aa, Glycine max
MGITSSTSSPTSSPESRAMALAKAKEIVASAPLVVFSKTSCPFCVRVKQLFEKLGASYKAIELDKESDGAELQNALKEWTGQRTVPNVFINGKHIGGCDDTMALNNDGKLVPLLTEAGAIAGSASKTTITA

SEQ ID NO: 1927 - protein, 474 aa, Glycine max
FGSSVKIMHLENNKLTGPLPSYLGSLPSLQALFIQNNSFSGVIPSGLLSGKIIFNFDDNPELHKGNKKHFQLMLGISIGVLVILLILFLTSLVLLLILRRKTSQQKRDEKGVSGRSSTKPLTGYSFGRDGNIMDEGTAYYITLSELKEATNNFSKNIGKGSFGSVYYGKMKDGKEVAVKTMTDPSSYGNQQFVNEVALLSRIHHRNLVPLIGYCEEEYQHILVYEYMHNGTLREYIHECSSQKQLDWLARLRIAEDAAKGLEYLHTGCNPSIIHRDVKTSNILLDINMRAKVSDFGLSRLAEEDLTHISSVARGTVGYLDPEYYANQQLTEKSDVYSFGVVLLELLSGKKAVSSEDYGPEMNIVHWARSLIRKGDVISIMDPSLVGNLKTESVWRVAEIAMQCVEQHGACRPRMQEVILAIQDASNIEKGTESQLKLSSSGGNSKPQSSRKTLLASFLEIESPDLSNSCLPSAR

SEQ ID NO: 1928 - protein, 1161 aa, Glycine max
  misc_feature (527)..(527): Xaa can be any naturally occurring amino acid
  misc_feature (539)..(539): Xaa can be any naturally occurring amino acid
  misc_feature (567)..(567): Xaa can be any naturally occurring amino acid
  misc_feature (576)..(576): Xaa can be any naturally occurring amino acid
  unsure (1)..(1161): unsure at all Xaa locations
MLQQAERRIPPFRRRKSTPHEQRLSHHSSNNNNNIDSMSKAIAQYTEDGVHAVFEQSGESGRSFNYSESIRIASESVPEQQITAYLVKIQRGGFIQPFGSMIAVDEPSFRILGYSDNARDMLGITPQSVPSLDDKNDAAFALGPQSVPSLDDKNDAAFALGTDVRALFTHSSALLLEKAFSAREISLMNPIWIHSRTSGKPFYGILHRIDVGIVIDLEPARTEDPALSIAGAVQSQEALVRAISQLQSLPSADVKLLCDTVVESVRELTGYDRVMVYKFHEDEHGEVVSESKRPDLEPYIGLHYPATDIPQASRFLFKQNRVRMIVDCHASAVRVVQDEALVQPLCLVGSTLGAPHGCHAQYMANMGSIASLVMAVIINGNDEEGVGGRSSMRLWGLVVCHHTSARCIPFPLRYACEFLMQAFGLQLNMELQLAAQSLEKRVLRTQTLLCDMLLRDSPTGIVTQSPSIMDLVKCDGAALYFQGNYYPLGVTPTEAQIRDIIEWLLAFHGDSTGLSTDSLGDAGYPGXLPRLGMQFVGWXVAYITEKDFLFWFRSHTAKEIKWGGAKXILRTRMMGXRMHPRSSFKAFLEVVKSRSLPWENAEMDAIHSLQLILRDSFKDAEHRNSKAVVDPHVSEQELQGVDELSSVAREMVRLIETATAPIFAVDVDGHVNGWNAKVSELTGLPVEEAMGKSLVHDLVFKESEETMNKLLSRALKGEEDKNVEIKMRTFGPEHQNKAVFLVVNACSSKDFTNNVVGVCFVGQDVTGQKIVMDKFINIQGDYKAIVHSPNPLIPPIFASDDNTCCLEWNTAMEKLDPSNENVTVGRVDVIGKMLVGEVFGSCCQLKGSDSITKFMIVLHNALGGQDTDKFPFSFLDRHGKYVQTFLTANKRVNMEGQIIGAFCFLQIMSPELQQALKAQRQQEKNSFGRMKELAYICQGVKNPLSGIRFTNSLLEATSLTNEQKQFLETSVACEKQMLKIIRDVDLESIEDGSLELEKGEFLLGNVINAVVSQVMLLLRERNLQLIRDIPEEIKTLAVYGDQLRIQQVLSDFLLNIVRYAPSPDGWVEIHVRPRIKQISDGLTLLHAEFRMVCPGEGLPPELIQDMFNNSRWGTQEGLGLSMSRKILKLMNGEVQYIREAERCYFYVLLELPVTRRSSKKC

SEQ ID NO: 1929 - protein, 266 aa, Glycine max
MYWEVMAGNMGWSVIIEEEGWRKGPWTSEEDRLLIQYVKFHGEGRWNSVARLAGLKRNGKSCRLRWVNYLRPDLKKGHITPQEESIIQELHARWGNRWSTIARSLPGRTDNEIKNYWRTHFKKKTKTPSDAAEKARIRSSRRQQFQQQQQQLKQQQVQQQQQQQQQFQFNLDMKGIINLLEENNHRVPSISQEAQEMASMYPNTSEHQDYFYSMFNVNDNNVSAPECLNEEILWDGLWNLDDVLCNFNAASATSKASLHNLVAPFC

SEQ ID NO: 1930 - protein, 422 aa, Glycine max
MGQDTKNYNNIASSPLLEPLPSSNSKRASKLQTLGNIIVTVVGTGVLGLPFAFRIAGWVAGSLGVAIVGISTYYCMLLLVMCREKLASEEPLGESNTYGDLGYRSFGTPGRYLTEVIIVVAQCAGSVAYFVFIGQNLYSVFQGQGLSMASYIFMLVPVEIGLSWIGSLSALAPFSIFADVCNVVAMGIVVKEDIQRAFGKGFSFGQRTMITSNIGGLPFAAGMAVFCFEGFGMTLALENSMQDRRKFPILLAQTFGGITLVYILFGFCGYMAFGEETRDIVTLNLPRNWSSLAVQVGLCVGLAFTLPIMLHPINEIFEGKLKIILRNNNDSTGLENICMYISRAIVVVGLAVLASFVPEFGVYASFVGSTLCAMLSFVMPATFHLKLFGSSLPIWQKALDSIVLLSGLFFAFYGTYNTIVGV

SEQ ID NO: 1931 - protein, 148 aa, Glycine max
MSGRVSGKVKWFNDQKGFGFISPDDGSDDLFVHQSQIKSDGFRSLAEGESVEFAIESESDGRAKAVDVTGPDGASVQGTRRGGDGGRSYGGGRGGGGGGYGGGGGYGGGGGYGGGGGYGGGGRGGGGGSCYSCGESGHFARDCPSSAR

SEQ ID NO: 1932 - protein, 154 aa, Glycine max
VPPLVVWTCSLFDYIQGKNNYKQKIEMTAPVITEVSPSDGPFCKSSFVVSFFVPKLNQANPPPAKGLHVQRWNNMYVAARQFGGHVNDSNVAVEAAVLRASIDGTKWSGAIDKNQKAGHASVYTVAQYNDPFEYQNRVNEILFLFEMESERHAI

SEQ ID NO: 1933 - protein, 300 aa, Glycine max
MQQIHSMPGGRFFSGSGSADRRLRPHHQNQQALKCPRCDSLNTKFCYYNNYNLSQPRHFCKNCRRYWTKGGVLRNVPVGGGCRKSKRSSKPNKITPSETASPPPPPHPDHNNNSNSHSSSESSSLTAAAATTTEAVSAPETLNSDSNNNNNMQESKLLIPALETNNSLEQGTGDCGGIFSEIGPFTSLITTTTSTNEPLGSGFGFGNSTLPDASSFQWHYQKVSSNNEELKLPENSFLDHTVDLSGMHSKTSHGGGFGSLDWQGGADQGLFDLPNTVDHAYWSHTHWSDHDNSSSLFHLP

SEQ ID NO: 1934 - protein, 276 aa, Glycine max
EFGSRWKGPPKFKPQYTKDEAIQHVRDLYRESLKKYGAEGSRGKSAEDGEQNIDELSFTELRDKLIALDPLNKKHIISINKAEAEFWRKSEGYRVGWSDEILGFDCGGQQWVSEACFPAGKLANPSMKDLEYIEELKLLIEKEDIPAPAPIEQRWTASSRSSLSPASSPSGDDIFSWVGIIMYLPTMDGRQRKDITEEFFHYRHLTQAKLWDRYSAYEHWAKIEVPKDKEELAALQARLRKRFPVDAYNKARKELDPNRILSNNMLEKLFPQSDTI

SEQ ID NO: 1935 - protein, 101 aa, Glycine max
MSGVTADEDKKPAGDGGGAHINLKVKGQDGNEVFFRIKRSTQLKKLMNAYCDRQSVDLNSIAFLFDGRRLRGEQTPDELEMEEGDEIDAMLHQTGGGFPRP

SEQ ID NO: 1936 - protein, 589 aa, Glycine max
MKSSLILLFMICGGVIATPPEDPIRCSSKNTDCTITNTYGVFPDRSICHAGEVMYPNTEEELISAVASASKNKRKVKAATRFSHSIPKLVCPDGENGLLISTKNLNKILKIDKEARTMTVQSGVSLREIISKGAEAGLALPYTPYWWGLTIGGLMGTGAHGSTLWGKGSAVHEYVVELRIVTPAGRLEGYAKVRNLDESHQQHLNAARVSLGVLGVISQVTLKLEPLFKRSLTYLTKDDSDLGDELVTFGRKHEFADVTWYPSQQKAVYRIDDRVSINKSGNGLYDFFPFRPTLSAALTVVRATEELQEATRDANGKCVGAKLITATLSGIGYGLSNNDDKGIFLGYPIVGFSNRMQASGTCLDSLNDGLITACPWDSRIKGEFFHQTAFSIPLSAVKNFIEDVQKLVELEPKSLCGLETANGILMRYVTASSAYLGKSEDAVDFDITYYRSKDPLAPRLFQDILEEIEQIGLFKYGGLPHWGKNRNLAFLGAIKKYHNADKFLKVKEEYDPQGLFSSLWTDQMLGLQEGVTILKDGCAMEGMCICSQDSHCAPKKGYFCRPGRIYKEARVCTRDVKKTKEADDVKDEL

SEQ ID NO: 1937 - protein, 323 aa, Glycine max
  misc_feature (26)..(26): Xaa can be any naturally occurring amino acid
  unsure (1)..(323): unsure at all Xaa locations
RVSYVGPPPVKAATLPLTKQQVESTXAMQNLQPKIKAIQDRYAGNQERIQLETSRLYRQAGVNPLAGCLPTLATIPVWIGLYQALSNVANEGLLTEGFLWIPSLGGPTTIAARQSGAGISWLFPFVDGHPPLGWQDTAAYLVLPILLVVSQYVSMEIMKPPQTDPSQKNQLLILKFLPLMIGYFSLSVPSGLTIYWFINNVLSTAQQVWLRKLGGAKPVVNENAGGIITAGRAKRSDSQLARNGERFKQLKEEEKKKKVSKALPVEEVQSLASVSASDDGSDTESDNKGQEDAEEAYASKVGEEVQNYSRERRSKRSKRKRAV

SEQ ID NO: 1938 - protein, 213 aa, Glycine max
MASKLLLSLSLLLLTLTLHTSCTTALAKRTNPNPTITTTTDFIKSSCKATRYPAACVQTLSGHASAIRQSEQQLAVTALSVSGWRRRQKGSFVKRMGSVKGMKPREYNALRDCVENMNDSVDRLSQSVKELGLVMGKGKGKKDFTWHVSNVQTWVSAAITDQDTCLDGFDGPHVDANLRASVRPRVVDASQVTSNALALVNRFASKYRSASQT

SEQ ID NO: 1939 - protein, 151 aa, Glycine max
  misc_feature (19)..(19): Xaa can be any naturally occurring amino acid
  unsure (1)..(151): unsure at all Xaa locations
KPKGIEAIEIFRNYIEKGXLKGWELDSCGDCWVSEGCLVDTNDTPAPIDAQMYRAKVSNDEHAQHGWVHMRQSIHNPNIAVNLQSSVRGGCLSMARAFRDEFLKASGVHTFLDITQVDKFAENGSKAYFAILNKNAESLQIEAFIKAQTSV

SEQ ID NO: 1940 - protein, 584 aa, Glycine max
NSARVASSSGSLDTSASANSFTNFTFSTHPFMTTSFSDLLASPTDNNKPPHGGGGGLSERTGSGVPKFKSTPPPSLPLSPPPISPSSYFSIPPGLSPAELLDSPVLLNSSNILPSPTTGAFVARSFNWKSSSGGNQRIVKEEDKGFSNFSFQTQQGPPASSTATYQSSNVTVQTQQPWSYQETTKQDNFSSGKSMMKTEKSSSMQSFSPEIASVQNNHSNGFQSDYGNYPPQSQTLSRRSDDGYNWRKYGQKQVKGSENPRSYYKCTYPNCPTKKKVERSLDGQITEIVYKGTHNHPKPQNTRRNSSNSSSLAIPHSNPISAEIPDQSYATHGSGQMDSAATPENSSISIGDDDFEQSSQKCKSGGDEYDEDEPDAKRWKIEGENEGMSAPGSRTVREPRVVVQTTSDIDILDDGYRWRKYGQKVVKGNPNPRSYYKCTHPGCPVRKHVERASHDLRAVITTYEGKHNHDVPAARGSGSHSVNRPMPNNASNPTNTAATAISPLQVIQHSDNSHQNQRSQAPPEGQSPFTLEMLQSPGSFGFSGFGNPMQSYMNQQQQQLSDNVFSSRAKEEPRDDMFLESLLC

SEQ ID NO: 1941 - protein, 230 aa, Glycine max
  misc_feature (105)..(105): Xaa can be any naturally occurring amino acid
  unsure (1)..(230): unsure at all Xaa locations
MTSGFGESTRASAPSPSCSGNSSNDAGDFECNICFDLAQDPVITLCGHLFCWPCLYRWLHHHSHSQECPVCKALVQEEKLVPLYGRGKTQTDPRTKSYPGMEIPXRPSGQRPQTAPPPPPPEANPFGSYGFGLMGGFIPMATARFGNFTLSTAFGGFIPSLLNIHFHGFQDATVYGTTSGYPFGFNGFHGGNTRGFTQATGQVQRQEDNVLKNLLMLIGFLVLLTVIFVW

SEQ ID NO: 1942 - protein, 297 aa, Glycine max
EIACYLGLELGKIKIKRFADGEIYVQLQESVRGCDVFLVQPTCPPANENLMELLIMIDACRRASAKNITAVIPYFGYARADRKTQGRESIAAKLVANLITEAGANRVLACDLHSGQSMGYFDIPVDHVYGQPVILDYLASKTICSDDLVVVSPDVGGVARARAFAKKLSDAPLAIVDKRRHGHNVAEVMNLIGDVRGKVAVMVDDMIDTAGTIAKGAALLHQEGAREVYACTTHAVFSPPAIERLSSGLFQEVIITNTIPVAEQNYFPQLTVLSVANLLGETVWRVHDDCSVSSIFL

SEQ ID NO: 1943 - protein, 210 aa, Glycine max
  misc_feature (162)..(162): Xaa can be any naturally occurring amino acid
  unsure (1)..(210): unsure at all Xaa locations
ALHDLVGSSRSSQNVFRILVTVLLILTFVQLAASASTATDSLKAYKKFIKDKCNSTTYPKVCYKSLYPYASQIKRNSVTLTKLSIHVALKAAKSANSTLTKLSNSKGKLTHGETSVIADCRENIDETLDMLEQSAEGLAHLNGASTADEKFQWDSIKTWMSXAAITDEGTCTDEFDEIQVRPSLQENIKTTVYNVSWVTTNALALVTRLY

SEQ ID NO: 1944 - protein, 155 aa, Glycine max
  misc_feature (126)..(126): Xaa can be any naturally occurring amino acid
  unsure (1)..(155): unsure at all Xaa locations
PSWNDPIFTSSGEAGSFLRGIDVNRLPSVVDCEEEAGVSSPNSTVSSVSGKRSERETNGEENDTDRACSRGIISDEEDAETSRKKLRLSKDQSIVLEESFKEHNTLNPKQKLALAKQLGLRARQVXRTKLKQTEVDCEFLKRCCENLTEENRRLQ

SEQ ID NO: 1945 - protein, 236 aa, Glycine max
MDVKKGGSVVQAQVKLQKHNEKEMGMRKGPWAVEEDTILVNYIATHGEGHWNSVARCAGLRRSGKSCRLRWLNYLRPDVRRGNITLQEQILILDLHSRWGNRWSKIAQQLPGRTDNEIKNYWRTRVIKQAKQLKCDVNSKQFRDTLRYVWMPRLLERLQPTSQALEPNQSGLVLHASSSLLPSNSDHSIERGSDLWPGFNNQMLLEQGSGGDLLESLWDDDNMCFLQQLSYDLQMK

SEQ ID NO: 1946 - protein, 342 aa, Glycine max
MQTLIISHALNPIFLVTYFNFKTPITMILPNIKVRFFLLFCLIGIVSAQLSSTFYAKTCPNALSTIKSEVVSAVNNERRMGASLLRLHFHDCFVQGCDASVLLDDTSSFTGEKTAGPNAGSIRGFDVIDTIKSKVESLCPGVVSCADILAVAARDSVVALGGTTWTVQLGRRDSTTASLSSANSDLPGPTSSLSALISSFSNKGFSSKELVALSGSHTIGQAQCSSFRTRIYNDTNIDSSFAKSLQGNCPSTGGGSTLAPLDTTSPNTFDNAYFKNLQSKKGLLHSDQELFNGGSTDSQVNSYSSNPASFKTDFANAMIKMGNLSPLTGSSGQIRTNCRKTN

SEQ ID NO: 1947 - protein, 442 aa, Glycine max
  misc_feature (403)..(403): Xaa can be any naturally occurring amino acid
  unsure (1)..(442): unsure at all Xaa locations
MANALHNAAISRVMFGDQYSISRCVVPSLSTLPLRAMHKGKHVELNRTVMVVKAKTNSDFDDSDVDISLSHRVNAVKLSKTLSICDHATALLQAGVPVIRLFFGESDFDTPGAIAEAGMNAIREGYTRYTPNAGTLELRQAICHKLKEENGITYSPDQIVVSNGAKQSIVQAVLAVCSPGDEVIIPAPFYVSYPEMARLAHATPVILPSHISRSVYSKKLLEEIAQIVAKHPRLLVLSDENYEHIIYAPATHTSFASLPGMWDRTLIVNGLSKTFAMTGWRLGYIAGPKHFVAACEKIQSQFTSGASSISQKAGVAALGLGYAGGEAVSTMVKAFRERRDFLVESFREMDGVKICEPQGGFYVFLDFSSYYGREAEGFGVIENSDSLCRYLLDKGLVALVPGXAFGDDTCIRISFAESLTTLKTAVERIKKALIPLSSSALV

SEQ ID NO: 1948 - protein, 203 aa, Glycine max
  misc_feature (50)..(50): Xaa can be any naturally occurring amino acid
  misc_feature (185)..(185): Xaa can be any naturally occurring amino acid
  unsure (1)..(203): unsure at all Xaa locations
NKRYGAAKIFSHPDVTAEEPWYGIEQEYTLLQKDVNWPLGWPLGGFPGPXDAHYKACIYAGINISGINGDVMPGQWEFQVGPSVGISAGDEVWAARYILERITEIAGAIVSFDPKPIPGDWNGAGAHSNYSTKSMREEGGYEVIKKAIEKLGLRHKEHIAAYGEGNERRLTGRHETADINTFSWXVANRGSSIRVGRDTEKNG

SEQ ID NO: 1949 - protein, 161 aa, Glycine max
MAPVAAASSDSIKPRDVCIVGVARTPMGGFLGTLSSLSATKLGSIAIEAALKRANVDPSLVEEVFFGNVLSANLGQAPARQAALGAGISNSVICTTVNKVCASGMKAAMLAAQSIQLSINDVVVAGGMESMSNVPKYLAEARKGSRLGHDSLVDGMLKDGL

SEQ ID NO: 1950 - protein, 161 aa, Glycine max
ASFKETGGSVTAGNASSISDGAAALVLVSGEKALKLGLQVIAKITGYADAAQEPELFTTAPSLAIPKAIAKAGLETSQIDFYEINEAFAVVALANQKLLGLNSEKVNVHGGAVALGHPLGCSGARILVTLLGVLKQKNGKYGVGGICNGGGGASALVVELQ

SEQ ID NO: 1951 - protein, 196 aa, Glycine max
MAFAGTTQKCMACDKTVYLVDKLTADNRVYHKACFRCHHCKGTLKLSNYNSFEGVLYCRPHFDQLFKRTGSLDKSFEGTPKIAKPEKTGEEKPAATKVSSMFGGTRDKCAGCQKTVYPTEKVTVNGTPYHKSCFKCTHGGCVISPSNYIAHEGKLYCKHHHIQLIKEKGNLSQLEGDHEKSTEEEKINGEVVAAET

SEQ ID NO: 1952 - protein, 417 aa, Glycine max
  misc_feature (180)..(180): Xaa can be any naturally occurring amino acid
  unsure (1)..(417): unsure at all Xaa locations
CEGCFAHLGTNATKKDKTLVISKYGASGDYPACTDLAYNKAISDGVDVLDCPVQMSKDGTPFCLNSIDLIESTTVAQSSFSKFAMTIPEIKSGSGIFAFNLTWNDIKILTPSILNPFAKYRLFRNPRSKNAGTLLALSDFLSLTKNQTSLSGVAIIVENAAYLADKQGLSVIDAVIGALXSKAGYDKPGSQKVYIQSTNSSVLLKFKEKTSYELVYKIDETVGDAANAAVEDIKSFASSVVVNKDSVIPNNNKFLTAYTNIVPKLKNASLSVFVETFSNEFVSQAWDFFSDATVEINTYITGAQIDGIITDFPKTADRYRRNKCLGLGDNKPTYMEPVQPGSLFGLITKEFLPPAEAPFPPLTESEVAEPPLPPVAKIAPASSPNAGTKSPQGNSQPKVTVCFFLSTLAVFIASLLL

SEQ ID NO: 1953 - protein, 203 aa, Glycine max
MYEAASSDPRKPSAPATGFPVSYSTSTTEAEVYSYSYGPVVVPVPPPHPKPIVEWSTGLCDCFSDWGNSCMTFWCPCVTFGRVAEIVDRGSPSCVTSGALYSVISAIFFVIGVRWWCGWGWGWVYSCFYRSYMRQQYDLRGNACTDCLIHFFCEPCALCQEYRELQFRGFHMTIGWHGNVEQRSRGVAMTVATAPPVEQGMNR

SEQ ID NO: 1954 - protein, 427 aa, Glycine max
MSFRSIVRDVRDSFGSLSRRSFDVRLTGHHRGKSQGSVQDLHDQPLVIQNSRWASLPPELLFDIIRRLEESENTWPARKHVVACAAVCQSWRNMCKDIVKSPEFCGKLTFPVSLKQPGPRDGIIQCFIKRDKSNLTYHLFLCLSPALLVENGKFLLSAKRTRRTTYTEYVISMDADNISRSSNTYIGKLRSNFLGTKFIIYDTQPPYSSAHICPPGTGKTSRRFYSKKVSPKVPSGSYNIAQVTYELNVLGTRGPRKMHCVMHSIPASALDAGGTVPGQPELLPRSLEDSFRSISFSKSLDHSIEFSSSRFSEIGESCIEDDDGKMRPLVLKNKPPRWHEQLQCWCLNFRGRVTVASVKNFQLIAATQPAAGAPTPSQPAPPEHDKIILQFGKVGKDMFTMDYRYPLSAFQAFAICLSSFDTKLACE

SEQ ID NO: 1955 - protein, 248 aa, Glycine max
MGRGRVELKRIENKINRQVTFAKRRNGLLKKAYELSVLCDAEVALIIFSTRGKLYEFCSTNSMLKTLERYQKCSYGAVEVSKPGKELESSYREYLKLKARFESLQRTQRNLLGEDLGPLNTKDLEQLERQLDSSLKQVRSTKTQFMLDQLADLQNKEHMLVEANRSLTMKLEEINSRNQYRQTWEAGEQSMPYGTQNAHSQGFFQPLECNPTLQIGSDYRYNPEASEQQLAATTQAQQVNGFIPGWML

SEQ ID NO: 1956 - protein, 292 aa, Glycine max
MGEKDDDFGLSLSLSLGRVNQQQQHPPPLNHMHQPQQLQPVPMNHNKTLFGDLSQLPADRSSEMIRGIDVNSAAECDGVSSPNSAVSSVSGGDGKQSERDDDNNAAAVAGERTSCSRGSDDDDGGGSDASRKKLRLTKEQSMVLEETFKEHSTLNPKRKQALAEELNLKPRQVEVWFQNRRARTKLKQTEVDCEYLKRCYENLTEENRRLHKEVQELRALKLSPQMYMHMNPPTTLTICPSCERTHSFASSSTATIHSAVAATSSNRKLFGTNIRLPVSFNTRPFEGPIPRP

SEQ ID NO: 1957 - protein, 128 aa, Glycine max
  misc_feature (101)..(101): Xaa can be any naturally occurring amino acid
  unsure (1)..(128): unsure at all Xaa locations
MKPFLLSHPDTMYNCSQVYCSHSLAHTSYPCGDPYFGSSIVAYGTQAITQQMVPQMLGLASTRIALPVELAEDGPIYVNAKQYHGILEKRQSRAKLSAHNXLITSRKPFFYESPHLPALKLVRGTWGR

SEQ ID NO: 1958 - protein, 230 aa, Glycine max
  misc_feature (70)..(70): Xaa can be any naturally occurring amino acid
  misc_feature (93)..(93): Xaa can be any naturally occurring amino acid
  unsure (1)..(230): unsure at all Xaa locations
GLGPLEFLTKFRIPHPGRVGGRFFVDIMMPSMLSWVLGGNSDKLEGRPLSCRLTDKVRCSNKVSFVLCCXEDIVYLANDQLRRWFEDDEALEXRAINGEWILLPHGDGTGLSKPISLSRNEMKPFIIGSAPMQDNSGSSVTISSPQVSPTHARINYKDGAFFLIDLRSEHGTWIIDNEGKQYRVPPNYPARIRPSDVIQFGSEKVSFRVKVTSSVPRVSENESTLALQGV

SEQ ID NO: 1959 - protein, 430 aa, Glycine max
MDEIDVPPFFVCPISLELMKDPVTVSTGITYDRDSIEKWLFAEVKNDTCPVTKQPLLPDLTPNHTLRRLIQAWCTVNASHGVQRIPTPKPPVDKTLIEKLLRNTSASDSPSLQLRSLRTLKSIASESQSNKRCIESAEGAVNFLATIITTTTTTTTNLLDDDIELEIKTSTAHEALSLLHSIQLSESGLKALLNHPEFINSLTKMMQRGIYESRAYAVFLLNSLSEVADPAQLINLKTDLFTELVQVLKDQVSEKVSKATLQALIQVCSWGRNRVKAVEAGAVPVLVELLLECNERKPIEMVLVLLEILCQSADGRAGLLAHAAGVVIVAKKILRVSTMANDRAAKILLSVCRFSPTPGLVQEMVQLGVVAKLCLVLQVDSGNKAKEIAREILKLHARAWRNSPCISQFACFVSNEFVKERKSTLFLFCS

SEQ ID NO: 1960 - protein, 153 aa, Glycine max
IWVWKQWNSLRAVENFLSGENACTATPTRPVKSGTGEQRACGVRSGQKAVHKGSSVGEEVQITPKSLKHTIQSALSEKSDSRKKTKSEKDNRASMHNLTVPPPAKVSWVLSGSGGFWSPFLDDSIVPEPEKMKWSKAFVLSIHDDGDINGLNS

SEQ ID NO: 1961 - protein, 196 aa, Glycine max
MAFAGTTQKCMACDKTVYLVDKLTADNRVFHKACFRCHHCKGTLKLSNYNSFEGVLYCKPHFDQLFKRTGSLDKSFEGTPKIAKPEKNLEEKPAAAKVSSMFGGTREKCAGCQKTVYPTEKVTVNGTPYHKSCFKCCHGGCVISPSNYIAHEGKLYCKHHHVQLIKEKGNLTQLEGDNEKSATNGKINGEEVSAET

SEQ ID NO: 1962 - protein, 118 aa, Glycine max
  misc_feature (3)..(4): Xaa can be any naturally occurring amino acid
  misc_feature (7)..(7): Xaa can be any naturally occurring amino acid
  misc_feature (31)..(31): Xaa can be any naturally occurring amino acid
  misc_feature (79)..(79): Xaa can be any naturally occurring amino acid
  misc_feature (85)..(85): Xaa can be any naturally occurring amino acid
  misc_feature (105)..(105): Xaa can be any naturally occurring amino acid
  unsure (1)..(118): unsure at all Xaa locations
CKXXEVXTSETGKHGHAKCHFVGIDIFISSXLEDIVPFWGSCDVPHVNRTDYQRIDIAEDGFLSLLTENGNTKDDLKLXTDESVXTKIKDGFGEGKDLVVCEMSXMGEEQIWALKDIE

SEQ ID NO: 1963 - protein, 159 aa, Glycine max
MSDEEHHFESKADAGASKTFPQQAGTIRKNGYIVIKNRPCKVVEVSTSKTGKHGHAKCHFVGIDIFTGKKLEDIVPSSHNCDVPHVNRIDYQLIDISEDGFVSLLTETGGTKDDLRLPTDENLLTQIKDGFAEGKDLVVSVMSSMGEEQICALKDIGPK

SEQ ID NO: 1964 - protein, 327 aa, Glycine max
  misc_feature (233)..(233): Xaa can be any naturally occurring amino acid
  unsure (1)..(327): unsure at all Xaa locations
APPPAFCKDGKTFDTLEGADPSSLANKVAKVAGSINPGESASPASLGMAAGASVLETVKELAKDNDSSKEKNQVQPGLSGPLKKRIQQLVDSNPVMLFMKGTPEEPKCGFSRKVVVVLNEERVKFGSFDVLSDSEVREGLKKFSNWPTFPQLYCKGELLGGCDIAIAMHESGELKEVFKDHGIDTTNEAKEKESGNGKGGISKSTDLMFKHNKVENWRGERGSSCRDPFKIDXKNLIASSPVMLFMKGTPDAPRCGFSSRVADALRQEGLNFGSFDILTDEEVRQGLKVYSNWPTYPQLYYKSELIGGHDIVMELRNNGELKSTLSE

SEQ ID NO: 1965 - protein, 172 aa, Glycine max
MGFYAEDPLSGLTIGQAIYEVALMIAVLRWVLCLIFRVINDRRTTQSDETPTPEPCSQMTRDKDSILLLTTFGEIKERLPETEETCAVCLSQLSVEDEVRELMNCYHVFHRECIDRWLEHEHENHSATCPICRAPLLSSSCHHSSATCLPPPQPSWAVERLLYLFGDDLLPC

SEQ ID NO: 1966 - protein, 377 aa, Glycine max
MELGLSLGDSSRPLLGFMEKPREATSNQLGLGFNTTLSIGPIITRQKDHQQDEDEEYQDEETKPNNNNNTHRTEDPNDLCSKPNNNTVLHQLDFLPQLALPWHPPSENGSLSSELGGSSRGLDVNVQPPAAEDEAARSSSPNSAASSFQMDLCIYNSRGGSSNKRDFEGEAYDQRTSSRASDDDDNNGSGGNTRKKLRLSKEQSAFLEESFKEHNTLNPKQKLALAKQLNLQPRQVEVWFQNRRARTKLKQTEVDCEYLKRCCETLTEENRRLHKELQELRALKTSNPFYMQLPATTLTMCPSCERVATNSTSTSSSMSATINATNSGATACVKTGNNNNNNDSPSKPIGFPFGKPRFHPFVHSSQQQLHQHQSSAS

SEQ ID NO: 1967 - protein, 384 aa, Glycine max
MCGGAIISDFIPAGPASGARRVTADILWPSLRKRFSKPLLDDDFEAGFREFKDDSEIEDVDDEDDEDEEELKKKPFGFSRSSNKAASKPLSRGATTVKSVESKGQAEKCAKRKRKNQYRGIRQRPWGKWAAEIRDPRKGVRVWLGTFSTAEEAARAYDAEARRIRGKKAKVNFPDEPSGAASSKRLKANPEAQPMKKNLNSVKPKINQMFNFGDNLEGYYSPIDQVEQKPLVNQYVNRAPFAGNGVQVSPVTPSADVTAYFSSEHSSNSFDYSDLGWGEQVPKTPEISSLLSAAPLEGAADQVQKTNNSQDVVAAQDDSAKTLSEELADIESQLKFFETPSFLDEAWADATLASLLGGDATHDAAGNPMNLWSFDDLPSMAGVF

SEQ ID NO: 1968 - protein, 190 aa, Glycine max
  misc_feature (28)..(28): Xaa can be any naturally occurring amino acid
  misc_feature (130)..(130): Xaa can be any naturally occurring amino acid
  misc_feature (171)..(171): Xaa can be any naturally occurring amino acid
  unsure (1)..(190): unsure at all Xaa locations
GGSSSGPNRSSDSCRGWRRLFLRGINVXNKLPSPVDTKEEGGIYAANSTISCVSRKKSDIKPVDEKHDLDRNCSHGIMKEEDPDTSGKKLGLSLDLSSILEESFEEHYSLGLRAKLALAKQLWLRPRRVXVRFRNRKARNKLNHTEGDSRILERCCENLNEENFRVRKAVXELGARKLSPSFTCQRNPPR

SEQ ID NO: 1969 - protein, 118 aa, Glycine max
MSDEEHHFESKADAGASKTFPQQAGTIRKNGYIVIKNRPCKVPHVNRIDYQLIDISEDGFVSLLTETGGTKDDLRLPTDENLLTQIKDGFAEGKDLVVSVMSSMGEEQICALKDIGPK

SEQ ID NO: 1970 - protein, 362 aa, Glycine max
MAAAVSAAVSFPSTKSTSLPSRTSLIAPERVVFKKASLQNRDVSSSGRVVSIRAQVTTEAPAKVEKESKKQDEGVVVNKFKPKTPYIGRCLLNTKITGDDAPGETWHMVFSTEGEIPYREGQSIGVIPDGIDKNGKPHKLRLYSIASSAIGDFGDSKTVSLCVKRLVYTNENGEIVKGVCSNFLCDLKPGAEVTITGPVGKEMLMPKDPNATIIMLGTGTGIAPFRSFLWKMFFEKHEDYKFNGLAWLFLGVPTSSSLLYKEEFEKMQEKSPENFRLDFAVSREQTNEKGEKMYIQTRMAQYAEELWELLKKDNTFVYMCGLKGMEKGIDDIMVSLAAKDGIDWTEYKRQLKKAEQWNVEVY

SEQ ID NO: 1971 - protein, 159 aa, Glycine max
MSDEEHHFESKADAGASKTFPQQAGTIRKNGYIVIKNRPCKVVEVSTSKTGKHGHAKCHFVAIDIFTGKKLEDIVPSSHNCDVPHVNRIDYQLIDISEDGFVSLLTETGGTKDDLRLPTDENLLSQIKDGFAEGKDLVVSVMSSMGEEQICALKDIGPK

SEQ ID NO: 1972 - protein, 404 aa, Glycine max
MDWNLKAPSWDLVDHVDKATTLQQNIGTKAAPYAPPPYRMKGEFSVDLKLGHHHVGNSGTESALANKSKDAAAASGAAASAGVSKMASSPSGSSKRARTISSTSLTVSCLVDGCNSDLSNCRDYHRRHKVCELHSKTPEVTIGGFKQRFCQQCSRFHSLEQFDERKRSCRKRLDGHNRRRRKPQPEPLSRPGSFLSNYQGTQLLPFSSPHVYPSTAMVSPAWSGALVTSSADARLHNHNHHHHQQDLFLGSSHKEGKQVAFLHNNHPSTAAALSSQTPPPFPSSSVRHTLLRTDPLSETCGGARSKMFCESLTTTTTNNNSVHDTTPCALSLLSSSQTHTPGNGLNQMVQPPPSMSLMQPLGLSLQDNNSLESVDHCSSMYSLASDHGSQCNEAAPQLFPFQWE

SEQ ID NO: 1973 - protein, 210 aa, Glycine max
MGRGGTAAAAAEVAEPGLRPVYFKEQRYRGVRKRPWGRFAAEIRDPLKKARVWLGTFDTAEEAARAYDTAARTLRGPKAKTNFPLSPPFYHPDPFSDHRHFANTGEDFHDHRRPTSSGMSSTVESFSGPRAAVPATAPVATGRRYPRTPPVIPEDCRSDCDSSSSVVDDGEGDNVASSFPREPLPFDLNALPLDDADVATDDLFCTVLCL

SEQ ID NO: 1974 - protein, 259 aa, Glycine max
  misc_feature (39)..(39): Xaa can be any naturally occurring amino acid
  misc_feature (124)..(124): Xaa can be any naturally occurring amino acid
  unsure (1)..(259): unsure at all Xaa locations
MYYEDMAGNVGWGVIEEEGWRKGPWTSEEDRLLILYVKXHGEGRWNSAARLAGLKRNGKSCKLRWVNYLRPHLKKGQITNSARGIIQELHARWGNRWSTIARSLPGRTDNEIKNYWRTHFKKKXKTPSDAAEKARIHSSRRQHFQQQQQQLKQQQQQFQFNLDMKGIINLLEENDHRVPSISQEAQEMASMYPNTSEHQGYFYSIFNVNDNDNNVSAPESSNEEILWDGLWNLDDVLCNFNAASATSKASLHNLVSPFC

SEQ ID NO: 1975 - protein, 466 aa, Glycine max
  misc_feature (411)..(411): Xaa can be any naturally occurring amino acid
  unsure (1)..(466): unsure at all Xaa locations
MTSRSGQGSSGGGSSRTRVGKYELGRTLGEGNFAKVKFARHVETRENVAIKILDKEKLLKHKMIAQIKREISTMKLIRHPNVIRMYEVMASKTKIYIVLEFVTGGELFDKIARSGRLKEDEARKYFQQLICAVDYCHSRGVFHRDLKPENLLLDANGVLKVSDFGLSALPQQVREDGLLHTTCGTPNYVAPEVINNKGYDGAKADLWSCGVILFVLMAGYLPFEETNLSALYKKIFKAEFTCPPWFSSSAKKLINKILDPNPATRITFAEVIENDWFKKGYKPPVFEQANVSLDDLDSIFSDSTDSQNLVVERREEGPMAPVAPVTMNAFELISKSQGLNLSSLFEKQMGLVKRETRFTSKCSADEIISKIEKAAGPLGFDVKKNNCKLKIQGEKTGRKGHLSVATECCFXILEVAPSLYMVELRKSEGDTLEFHKFYKNLATGLKDIVWKAEPIDEEKDGANPSK

SEQ ID NO: 1976 - protein, 101 aa, Glycine max
MDKVTRLATEKGVVVFTKSSCCLCYAVNILFQELGVIPVVHEIDKDPEGKEIEKAITRLGCPTPVPAVFIGGKLVGSTNEVMSLHLSGSLTQLLKPYRALS

SEQ ID NO: 1977 - protein, 624 aa, Glycine max
MASISSAELNYLVYRYLQESGFTHAAFTFGYEAGINKCSIDGNLVPSGALVTFVQKGLQYFEMEANLSNCDADLEEDFSFLQPLDLITKDVHELRQMISERRKKLQKERKKEFEKEHEGERVRVREKDRREREKEVEKERREREKEVEKDRRERDKEVEKDRREREKEVEKDRREREKEVEKDRREKEKEVEKERRERQKEVVKDGEKVENDKEREQQHGDQTVREMFVDHEDRVPVKLEENGAVGGPEPMDISTTSTSQLCGIPSSDVTILEGHTSEVCACAWSPTGSLLASGSGDSTARIWTIAEGRCKPGSENGPLNVLVLKHVRGKTNEKSKDVTTLDWNGEGTLLATGSYDGQARIWTTNGELKSTLSKHKGPIFSLKWNKKGDYLLTGSCDQTAIVWDVKAEEWKQQFEFHSGPTLDVDWRNNVSFATSSTDNMIHVCKIGETHPIKTFAGHQGEVNCVKWDPTGSLLASCSDDITAKIWSMKQDTYLHEFREHSKEIYTIRWSPTGPGTNNPNKNLVLASASFDSTVKLWDVELGKLLYSLNGHRDRVYSVAFSPNGEYIASGSPDRSMLIWSLKEGKIVKTYTGDGGIFEVCWNKEGDKIAACFANNTVCVLDFRM

SEQ ID NO: 1978 - protein, 157 aa, Glycine max
LEPNRLERLELEPRKQKIWSMKQDTYLHDLREHSKEIYTIRWSPTGPGTNNPNHKLVLASASFDSTVKLWDVELGKLIYSLDGHRHPVYSVAFSPNGDYLVSGSLDRSMHIWSLRDGKIVKTYTGNGGIFEVCWNKEGDKIAACFANNTVCVLDFRM

SEQ ID NO: 1979 - protein, 299 aa, Glycine max
MTNPKLGYAGISDSGNHIPSSKKNHKKLLLSLLATLLVAASLVAIVVGVKNKNSDNSATSTPLSLSHHSHTIVKSACSSTFYPELCYSAIASEPNVTHKITTNRDVIQLSLKITFRAVEQNYFTVKKLFTEHDDLTKREKTALHDCLETIDETLDELREAQHNLELYPNKKTLYQHADDLKTLISAAITNQVTCLDGFSHDDADKHVRKALEKGQVHVEHMCSNALAMTKNMTDSDIANYEYNMRVENNGQNGNSNRKLLVENDVEWPEWISAADKRLLQAATVKADVTVAADGSGDFR

SEQ ID NO: 1980 - protein, 393 aa, Glycine max
MASSLLQPSSSSSLFAGTLRTLDFVDHSRARISAPYTVKCDMSESSNFVNGKPIIPVLNERTLPKFMESAREAKAVSRNSNRLKLFSGTANPTLSQEIARYMGLELGKISIKRFADGEIYVQLQESVRGCNVYLIQPTCPPANENLMELKIMIDACRRASAKNITAVIPYFGYARADRKTQGRESIAAKLVANLITKAGADRVLACDLHSGQSMGYFDIPVDHVHCQPVILDYLASKTISSSDLVVVSPDVGGVARARAFAKKLSDAPLAIVDKRRHGHNVAEVMNLIGDVKGKVAVMVDDMIDTAGTIAKGAALLHEEGAREVYACCTHAVFSPPAIERLSGGLFHEVIITNTIPVAEKNYFPQLTILTVANLLGETIWRVHDDSSVSSIFQ

SEQ ID NO: 1981 - protein, 375 aa, Glycine max
MLQALMNLFSLCWKPFGRDAADRIDSIGVTGREGKDGLLWFRDGGKYGSGDFSMAVVQANQVLEDQSQIESGPLGTFVGIYDGHGGPDASRYVCDHLFRHFQAISAESRGVVTPETIERAFRQTEEGYTALVSGSWNARPQIVSAGTCCLVGVIFQQTLFVANAGDSRVVLGKKVGNTGGMAAIQLSAEHNANLEAVRQELKELHPHDPQIVVLKHGVWRVKGIIQVSRSIGDVYLKHAQFNREPLNAKFRLPEPMNMPILSANPTILSHPLQPNDSFLIFASDGLWEHLSNEKAVDIVNSNPHAGSAKRLIKAALHEAARKREMRYSDLRKIDKKVRRHFHDDISVIVLFLNHDLISRGTVLDPALSIRSALDH

SEQ ID NO: 1982 - protein, 264 aa, Glycine max
  misc_feature (227)..(227): Xaa can be any naturally occurring amino acid
  unsure (1)..(264): unsure at all Xaa locations
IPGSTHASAHASGEAGSFLRGIDVNRLPSVVDCEEEAGVSSPNSTVSSVSGKRSERETNGEENDTDRACSRGIISDEEDAETSRKKLRLSKDQSIVLEESFKEHNTLNPKQKLALAKQLGLRARQVEVWFQNRRARTKLKQTEVDCEFLKRCCENLTEENRRLQKEVQELRALKLSPQFYMHMTPPTTLTMCPSCERVAVPPSSAVDPATRHHHVPPSHPRAFPIGXHGQALRCPPSQILDSRKQNDKIEKKIGSHELCVQSVV

SEQ ID NO: 1983 - protein, 300 aa, Glycine max
  misc_feature (151)..(151): Xaa can be any naturally occurring amino acid
  misc_feature (282)..(282): Xaa can be any naturally occurring amino acid
  unsure (1)..(300): unsure at all Xaa locations
NLKVHSLWVLRLVQVGNLGLQLPWYFLQIIVSAWYFISVVGNLFESYFISLKKYKSLHSGKVRYLAIVIESEEAYQISKVVKLSQWLDSIGVKNVCLYDMNGMKRFEESVMLKFLLLGPYNSIFFELFILGVLKKSKETMFQKLKNAKSIXVQEVSEVVTLHAPDHMTLEFLSYLDGKEAVAKAANLIFVENSKRHNLGGELDLQILLEPQMNKALQIVGSKGPEPDLLLVYGPVRSHLGFPAWRLRYTEIIHMGSLNFMRYGSLMKVINNFTKVHQNYGTXKRNLEVVNCASTKHRREE

SEQ ID NO: 1984 - protein, 389 aa, Glycine max
TASSHFFSSDSTTCPNSEVPLLLVILLFFLLLRTSNTKTKHYNSQFHRNTRINKTHNNKRSEKWRAQWRRRVARARKLSLWSFLLHLVGRSCFGGLWLAFKRGEKKRSYKNLEIQRNFAFSESGWSRCLSKFIPKKAGTPKKNEIVFTAPTGEEINNRKQLEKYLKAHPGGPAVSEFDWGTGETPRRSTRISEKAKAAPPIESEPPKKRTKRSSASQKETSQEEKEEKTKEAEMQEADYTTKDDNDIEKEKDVVMENQDVKSVEDTDVNKSTHSGEAKAGENVEVPIEKDKGIEVSEVFLRKDEEKIEQPQEETKEYRGSGEPEKLETCTIADKKVEVEGVNKEENIKSTREFEAEEIEGTKVNSEEYHKLDEINKAEAELTMNGNHGS

SEQ ID NO: 1985 - protein, 172 aa, Glycine max
TFPAIDPLRLTVGFWKVGLSGYEADEILYGDYGVVCELVGNKSITYAFNLGTCRDHVQRLLSGIKHLAATYVTIQQPEERVLTVHAPFDDKITSLIPRDAFFASKRKVTIKESIGEISGELICPYPPGIPVLIPGEVITKKAVDYLLHVRSKGGDITGASDPLLSSIVVCNV

SEQ ID NO: 1986 - protein, 345 aa, Glycine max
MERYEIIKDIGSGNFGVAKLVKEKWSGELYAIKFIERGFKIDEHVQREIINHRSLKHPNIIRFKELLLTPTHLAIVMEYASGGELFERICSAGRFSEDEARYFFQQLISGVSYCHSMEICHRDLKLENTLLDGSSAPRLKICDFGYSKSSVLHSQPKSTVGTPAYIAPEVLSRREYDGKVADVWSCGVTLYVMLVGAYPFEDPEDPRNFRKTLQRILSVHYSIPDYVRISKECRHLLSRIFVANPEKRITIPEIKMHPWFLKNLPLEFMDEGEGVLQNDDHVNEESSEITQSIEEILAIVQEARKPGEGPKVGEQFVGGSMDLDDIDADADIDDIETSGDFVCAL

SEQ ID NO: 1987 - protein, 300 aa, Glycine max
MGGTSVAAGRRVTRFLASHHRDVTCVVADVEFDFLDDIGETLLAQSASSDEMDRFDEDEDHRDTVEENRTFWDNQHQLLQTSICRTSSLESRIRHATKEALQEIQSAETVCGCGRQMAVTSCRNCLMREVSWRLQKAGYNSAICKTKWRSSPDIPSGEHNFLDVIDSTKKGKVRVIVELNFRGEFEMARGSEDYNRLVRRLPEVFVGKVERLSNLIKILCMGAKRCMKEKKMHMGPWRKHRYMQAKWLGPCERNTSTASLSVGYSERILPMAKPRPKASMLTVDLLEKLPNMHCNAVEVV

SEQ ID NO: 1988 - protein, 554 aa, Glycine max
MALKTLSTFFSPLSLPNTKFLTSKPCLILFEFPRSQKSRLPVADAEGTGAAAPSPGEKFLERQQSFEDAKLILKENNKNKKKKKKDNAIKASRAVASCYGCGAPLHTSDADAPGYVDPETYELKKKHHQLRTVLCRRCRLLSHGKMITAVGGHGGYPGGKLFVSAEELREKLSHLRHEKALIVKLVDIVDFNGSFLSRVRDLAGSNPIVLVVTKVDLLPRDTDLNCVGDWVVEATMRKKLNVLSVHLTSSKSLVGITGVISEIQKEKKGRDVYILGSANVGKSAFINALLKTMAINDPVAASAQRYKPIQSAVPGTTLGPIQINAFLGGGKLYDTPGVHLFHRQTAVVHSEDLPILAPQSRLRGLSFPSSIVSSDNVEEGASTIVNGLNEFSIFWGGLVRIDVLKVLPETCLTFYGPKRIPIHMVPTEQAVEFYQTELGFLLTPPSGGENAENWKGLESERKLQIKFEVVDRPACDIAISGLGWFTVEPVSRSHKISQPKPVETAGELILAVHVPKAVEIFVRPPIPVSKAGAEWYQYVELTEKQEEMRPKWYF

SEQ ID NO: 1989 - protein, 245 aa, Glycine max
MDEYFHQPEKKRRLSVEQVKFLEKSFDEENKLEPERMIWLAKELGLQPRQVAIWFQNRRARWKTKQMEKDYDSLQTSYNDLKANYDNLLREKDKLKAEVARLTEKVLGREKNESHLEQAETNGLQEPLHKSLVDSASEGEGSKVTFEACKQEDISSAKSDIFDSSESPQYTDGVHSALLETGDSSYVFEPDRSDVSQDEEDNLSKTLLPHYIFPKLEDVDYSDPPHGSCNFGIPEEDQAIWSWPY

SEQ ID NO: 1990 - protein, 304 aa, Glycine max
MASSNLFFDDIRSKVDVDPPQNEESTDVGELLNDPAQTALKPNGTVSSSVRELLECPVCLNAMYPPIHQCSNGHTICSGCKPRVHNRCPTCRHELGNIRCLALEKVAASLELPCKYQGFGCIGIYPYYSKLKHESQCAHRPYNCPYAGSECSIMGDIPYLVAHLKDDHKVDMHNGSTFNHRYVKSNPQEVENATWMLTVFSCFGQYFCLHFEAFQLGMAPVYIAFLRFMGDDDEAKNYSYSLEVGGNGRKMIWQGVPRSIRDSHRKVRDSFDGLIIQRNMALFFSGGDRKELKLRVTGRIWKEQ

SEQ ID NO: 1991 - protein, 317 aa, Glycine max
MSTSKSVSSSSEDDNELRRGPWTLEEDNLLSQYISSHGEGRWNLLAKRSGLKRTGKSCRLRWLNYLKPDVKRGNLTPQEQLIILELHSKWGNRWSKIAQNLPGRTDNEIKNYWRTRIQKQARHLKIDTDSREFQELVRRFWMPRLLQKAKESSSSAMSIQNQATPMPFDGVSQHSTVGTIPSHSHTPWQGPCMNEAGPTYMDQHEQNSDSEHNNGSCISLSESANFPKVPQHFGRTTITQYHALNNNDFGTFTYDGYNVSNNVYEMDNFKTPTTRVAEDAQYPTGDCQMVGSNWVNSDFACNMWNMDELWQFSKLQK

SEQ ID NO: 1992 - protein, 439 aa, Glycine max
  misc_feature (374)..(374): Xaa can be any naturally occurring amino acid
  misc_feature (382)..(382): Xaa can be any naturally occurring amino acid
  unsure (1)..(439): unsure at all Xaa locations
LIVYVVIPVSYWGLNVYNANRFPIFSSHLFTAQGQKYNIPKIVDNHFELNVAEYEKQGTSRFGSSFALTYGFGFATIASTLTHVVCFYGREIMERYRASSKGKEDIHTKLMRRYKDIPSWWFHSLLLVTLLVSLALCIFLKDQVQMPWWGLLFAGVLAFGFTLPISIITATTNQTPGLNIITEYVFGLIYPGRPIANVCFKTYGYISMAQAVSFLSDFKLGHYCIHFVHTCIYVQFIGTMLAGTINIGVAWWLLNSIKNICHDDLLPEGSPWTCPGDRVFFDASVIWGLVGPKRIFGSQGNYSAMNWFFLGGAVGPIIVWLLHKAFPKQSWIPLINLPVLLGATGMMPPATPLNYNAWIFVGTIFNFFICSTRXVLLTEHSXPLPPALDSGVAFMTVMLYFSLGLENKSLNWWGNDGEHCPLAACPTAKGIIVDGCPAN

SEQ ID NO: 1993 - protein, 552 aa, Glycine max
IVLKTDKQDTTVVNAFRLLSAQSSQTNEGDPCVPTPWEWVNCSTTTPPRITKIILSRRNLLRWLDGNLLTGQLPDMSKLINLKIIMHLENNKLTGPLPSYLGSLPSLQALFIQNNSFSGVIPSGLLSGKIIFNFDDNPELHKGNKKHFQLMLGISIGVLVILLILFLTSLVLLLILRRKTSQQKRDEKGVSGRSSTKPLTGYSFGRDGNIMDEGTAYYITLSELKEATNNFSKNIGKGSFGSVYYGKMKDGKEVAVKTMTDPSSYGNQQFVNEVALLSRIHHRNLVPLIGYCEEEYQHILVYEYMHNGTLREYIHECSSQKQLDWLARLRIAEDAAKGLEYLHTGCNPSIIHRDVKTSNILLDINMRAKVSDFGLSRLAEEDLTHISSVARGTVGYLDPEYYANQQLTEKSDVYSFGVVLLELLSGKKAVSSEDYGPEMNIVHWARSLIRKGDVISIMDPSLVGNLKTESVWRVAEIAMQCVEQHGACRPRMQEVILAIQDASNIEKGTESQLKLSSSGGNSKPQSSRKTLLASFLEIESPDLSNSCLPSAR

SEQ ID NO: 1994 - protein, 224 aa, Glycine max
  misc_feature (63)..(63): Xaa can be any naturally occurring amino acid
  unsure (1)..(224): unsure at all Xaa locations
MVRGKTQMKRIENETSRQVTFSKRRNGLLKKAFELSVLCDAEVALIIFSTRGRLYEFSSSRVXKTVERYQRKIEDLGVSNKGIHENTQHLKEVDMSMAKKIEHLEDSRRKLLGDELDKCSIDELQQLENQLERSLDKIRATKNQLFRKRIEKLKEEEKCLLEVNKRLREQYRIERQRCLSDQDVEFATKKEGEEVETELFIGRPERRMPLKLKPTTYSAHAYIA

SEQ ID NO: 1995 - protein, 333 aa, Glycine max
FQVHNMMQLLIRSENDGILCPIPQYPLYSASIALHGGCLVPYYLDEATGWGLEIPELKKQLEAAKSKGINVRALVVINPGNPTGQVLGEANQRDIVEFCKQEGLVLLADEVYQENVYVPEKKFHSFKKVSRSMGYGENDITLVSFQSVSKGYHGECGKRGGYMEVTGFSAEVREQIYKVASVNLCSNISGQILASLVMSPPKVGDESYDSFMAEKENILASLARRAKTLEDAFNKLEGVTCNKAEGAMYLFPQIRLSEKAIKAAEAANATPDNFYCKRLLNATGVVVVPGSGFGQVPGTWHFRCTILPPEEKIPAIVTRLTEFHEKFMDEFRD

SEQ ID NO: 1996 - protein, 250 aa, Glycine max
MNSISLGSFILTPCKFRPFLQTKHQPIFRTLSPIPLTQKPTFLRATDSNIDAPISLPEGASFVSIPEIIEKDWSVLDCAEHRTTDRIIASGNIEQSSRVLVSTGSEDFVDSLAGLTPSVFVVHDSLLTLACIKEKYDRVKCWQGEIIYVPEKWAPFDAVFLYFLPALPFKLHQILESLAGKCAPGGRVIISHPKGKEVLEQQRKQYPDVVVSDLPNKTYLQSVAAAHSFDVAEFVDEPGLYLAVLICSRA

SEQ ID NO: 1997 - protein, 196 aa, Glycine max
  misc_feature (40)..(40): Xaa can be any naturally occurring amino acid
  misc_feature (111)..(111): Xaa can be any naturally occurring amino acid
  unsure (1)..(196): unsure at all Xaa locations
QRVHTVAKTPYRGCPNVTHRANWENRHVVLPYLPGIRHEXKGLDEVGSTSPQSGMDNVRNPVGNPLAGIDPDEIVDTRPYNNLLSQFITANSRGNPTMSNLPRKWNVCVVXSHDLFEHPHINDLAYMPANKDGRFGFNLLVGGFFNTNTYTKSIPLNTCVSTDNIIPLYKSILRTYINLYFINNKQTTIIMCFIDE

SEQ ID NO: 1998 - protein, 222 aa, Glycine max
  misc_feature (93)..(93): Xaa can be any naturally occurring amino acid
  unsure (1)..(222): unsure at all Xaa locations
MRKGRGGGASAAAAAAVNGSVLKEPRYRGVRKRPWGRFAAEIRDPLKKARVWLGTFDSAEDAARAYDTAARNLRGSKAKTNFPLSPFCYQHPXTDPFFYAGFHDHQNNSNNNNDNLNNPQRPTSSGMSSTVESFSGPRPPTTTTTTTTPFLTTTRRYPRTPPLVPEDCHSDCDSSSSVVDDSDDNIVSSSFRPPLPFDLNALPFDDDAAVVDDDLRCTALCL

SEQ ID NO: 1999 - protein, 98 aa, Glycine max
  misc_feature (97)..(97): Xaa can be any naturally occurring amino acid
  unsure (1)..(98): unsure at all Xaa locations
MSGVTNNNEEDKKPTEQGAHINLKVKGQDGNEFFFRIKRSTQLKKLMNAYCDRQSVDFNSIAFLFDGRRLRAEQTPDELEMEDGDEIDAMLHQTGGXV

SEQ ID NO: 2000 - protein, 213 aa, Glycine max
MAGSGSAFSNITSFLRTQQPSSQPLDSSLFLSAPSSAPFLGSRSMMSFEGEGGKGCNGSFFRAFDMDDNGDECMDEYFHQPEKKRRLSASQVQFLEKSFEEENKLEPERKTKLAKDLGLRPRQVAIWFQNRRARWKTKTLEKDYEALHASFENLKSNYDSLLKEKDNLKAEVASLNEKVLARGKQEGHMKQQAESSCNFGFSEEDHALWTWAY

SEQ ID NO: 2001 - protein, 274 aa, Glycine max
  misc_feature (65)..(65): Xaa can be any naturally occurring amino acid
  unsure (1)..(274): unsure at all Xaa locations
ILKNGGKNLKGEFFLKKGIRDLGAGKGEFKRVGTQFNQASSFLQRGEMGFSRKAYELSVLCDAEXVALIIFSNRGKLYEFCSSSSMLKTLERYQKCSYGAVEVSKPAKELEQSSYREYLKLKARFESLQRTQRNLLGEDLGPLNIKELEHLERQLDSSLKQVRSTKTQFMLDQLSDLQTKEQMLVEANRSLTVKLEEINSRNHYRQSWEAGDQSMPYGGGGPENSHSQGFFQPLECNPTLHIGPDYRYNAVASDQITATTQPQQVSGFIPGWML

SEQ ID NO: 2002 - protein, 287 aa, Glycine max
FGSRQDGIDAIEDVIYHIETYDVTTIRASIPMFLMSRKIKSLGVKMVISGEGSDEIFGGYLYFHKAPNKEEFHQETCRKIKALHKYDCLRANKSTFAWGLEARVPFLDKEFIRVAMNIDPECKMIKKEEGRIEKWALRRAFDDEEHPYLPKHILYRQKEQFSDGVGYGWIDGLKAHAEKHVTDRMMLNAANIFPFNTPTTKEAYHYRMIFERFFPQNSARLTVPGGPSVACSTAKAVEWDAAWSNNLDPSGRAALGVHASAYGNQVKAVEPEKIIPKMEVSPLGVAI

SEQ ID NO: 2003 - protein, 420 aa, Glycine max; identical to SEQ ID NO: 518

SEQ ID NO: 2004 - protein, 365 aa, Glycine max
MDWDGKEFAWDPRGLELANGEGQKSEAASVDLRLGEEKTAPDVVAKDTKDSKTVSSPSGSSKRSRLQNGLQNMCCSVDGCNSDLSDCREYHRRHRVCEKHSKTPVVMVGGKQQRFCQQCSRFHSLGEFDEVKRSCRKRLDGHNRRRRKPQPPSLFMAAEKFMYNYKGPRILHFGSPEAYANPIMRDMWPAAAKTGAESGHDSPRLLYRIDKHKQDKGHPLWQENDPKVGSGDEAMPGTPICQPIHGTIAPSMGGKSNRKLSTDAKPGSFDSGCALYLLSTLQSQSPELSMVQSSITCPVQSPSGSVHFDAVNEYACSETERDKPSGQVLVFDAKTTNLHYNGMLQMDLDGFVENEDPLALPFLWE

SEQ ID NO: 2005 - protein, 506 aa, Glycine max
MAMENQNFLEYWVLPLLMMLLLGHWISVQAAPSPSLITQLPGFNANFPSKHYSGYISIDGNAESGKNLFYYFVSSESSPEKDPVVLWLNGGPGCSSFDGFVYEHGPFNFEAANSKGNLPTLHINPYSWSKVSNIIYLDSPAGVGLSYSKNTSRYVSPHLVFLLKFFVFNWQWFHQFPEFQANPFYIAGESYAGVYVPTLAFEVAKGIRSGTKPVINFKGYMVGNGVTDEIFDGNALIPFVHGMGLISDSIYENLQSSCKGNYYDAYSLDENDVCYKTIEKVDRAIDGLNVYNILEPCYHFPDAATAKENGTLPRSFKQLGVTERPLPVRKRMFGRAWPFRAPVKPGLVPLWPQLAQTRHVACVSDEVASSWLNNVAVRKAIHAESEKVAGPWELCSSRIEYHHNAGSMIPYHKNLTRLGYRALIFSGDHDMCVPFTGSEAWTRSLGYKIVDEWRPWNSNNQVAGYLQAYENNLTFLTIKGAGHTVPEYKPREALDFYSRWLEGKLI

SEQ ID NO: 2006 - protein, 177 aa, Glycine max
MSWCYCAKPMTLQLPLQSRAASSFHSHVGGVTVTFSTLSLRPSSPLVLTHNLHFQPKLKRASTTIRCSSALTPQLKSTLDQVIASNKVVVFMKGTKDFPQCGFSNTVVQILKSLNVPFETINVLENDLLRQGLKEYSSWPTFPQVYIEGEFFGGCDITVDAYQKGELQELLEKAMLS

SEQ ID NO: 2007 - protein, 162 aa, Glycine max
  misc_feature (138)..(139): Xaa can be any naturally occurring amino acid
  misc_feature (142)..(142): Xaa can be any naturally occurring amino acid
  misc_feature (151)..(151): Xaa can be any naturally occurring amino acid
  misc_feature (157)..(157): Xaa can be any naturally occurring amino acid
  unsure (1)..(162): unsure at all Xaa locations
MSAAEGAVVFSEEKEALVLKSWAIMKKDSANLGLRFFLKIFEIAPSARQMFPFLRDSDVPLETNPKLKTHAVSVFVMTCEAAAQLRKAGKITVRETTLKRLGGTHLKYGVADGHFEVTRFALLETIKEALPADMWGPXXRNXWGEAYDQLXAAIKQXMKPFE

SEQ ID NO: 2008 - protein, 183 aa, Glycine max
MGSKKTYEEEESTALFSHSQTQTDLLLPFNENDPQDMVIYQVLHEANALTNTFLPQPTRNITKKHYRGVRRRPWGKYAAEIRDSARHGARIWLGTFQTAEEAAMAYDRAAFKMRGSKALLNFPAEIVAAATATELSFKSSSNNNNNNNNNNPDAVSDSSAGSSCTNNSTWVNRNQSEITSGTG

SEQ ID NO: 2009 - protein, 117 aa, Glycine max
MGCRYPNNNNEKWSRCLLCRSKLKQTEMECEYLKRWFGSLTEQNRRLQREVEELRAIKVGPPTVISPHSCEPLPASTLSMCPRCERVTSTADKPPSAAATLSAKVPPTQSRQPSAAC

SEQ ID NO: 2010 - protein, 306 aa, Glycine max
MASAVEKEGGAREETFSLELPAPPGWKKQFIPKKAGTPKKNEIVFTAATGEEIHNRKQLEKYLKAHPGGPAVSEFDWGTGETPRRSTRISEKAKAAPPSVSEPPKKRTKRSSASQKETSQEEKEQEIKEAEMQEADDTTKDDNDIGKEKDVVKENQDDKCVEDTDVNKSTNSGEEAKAVENVEVPIDEKSNAADGELPALKDKVDDKGTEGSEVFLRKDEVKIEQPQEETKEYRGSGEPEKSETCTTADKTVEVEGVDKEEHVKSTHEFEVGEMEGTKVIGEEHHKLDEINKKAETELTVNGNHGS

SEQ ID NO: 2011 - protein, 547 aa, Glycine max
  misc_feature (203)..(203): Xaa can be any naturally occurring amino acid
  misc_feature (211)..(211): Xaa can be any naturally occurring amino acid
  misc_feature (229)..(229): Xaa can be any naturally occurring amino acid
  misc_feature (278)..(278): Xaa can be any naturally occurring amino acid
  misc_feature (351)..(351): Xaa can be any naturally occurring amino acid
  unsure (1)..(547): unsure at all Xaa locations
MCGILAVLGCVDNSQAKRARIIELSRRLRHRGPDWSGIDCYEDCYLAHQLLAIVDPTSGDQPLYNEDKTIVVTVNGEIYNHKQLRQKLSSHQFRTGSDCEVIAHLYEEYGEEFVNMLDGMFAFILLDTRDKSFIAARDAIGITPLYLGWGHDGSTWFASEMKALSDDCERFIAFPPGHIYSSKQGGLRRWYNPPWFSEDIPSXPRPPLPMXLLSGGLDSSLVAAVVNRXLAESESARQWGSQLHTFCIGLKGSPDLKAAKEVADYLGTRHHELYFTVXEGIDALEEVIYHIETYDVTTIRASTAMFLMSRKIKALGVKMVLSGEGSDEIFGGYLYFHKAPNKKELHEETCXKIKALHLYDCLRANKSTAAWGVEARVPFLDKEFINVAMSIDPEWKMIRPDLGRIEKWVLRNAFDDDKNPYLPKHILYRQKEQFSDGVGYSWIDGLKDHANKQVTDATMMAANFIYPENTPTTKEGYLYRTIFEKFFPKNSAKATVPGGPSVACSTAKAVEWDASWSKNLDPSGRAALGVHAAAYDGAVDTTKNGPL

SEQ ID NO: 2012 - protein, 206 aa, Glycine max
VGNLGLQLPWYFLQIIVSAWYFISVVGNLFESYFISLKKYKSLHSGKVRYLAIVIESEEAYQISKVVKLSQWLDSIGVKNVCLYDMNGVLKKSKETMFQKLKNAKSIEEVSEVVTLHAPDHMTLEFLSYLDGKEAVAKAANLIFVENSKRHNLGGELDLQILLEPQMNKALQIVGSKGPEPDLLLVYGPVRSHLGFPAWRLRYTEI

SEQ ID NO: 2013 - protein, 236 aa, Glycine max
LGGAARVLDVNLFRAATAEDGDDGTSLSSSPNSAVSPFQMDFCTRNCNAEFGGRNKREQQEAEGRASDDDENGSTRKKLRLSKEQSAFLEESFKEHTTLNPKQKLALAKQLNLRPRQVEVWFQNRRARTKLKQTEVDCEYLKRCCETLTEENRRLQKELQELRALKTSQPFYMQLPATTLTMCPSCERVATNSTTTNQTTTVNNNASQIPVELSLSKPRILPFPNGQAQAHQIASS

SEQ ID NO: 2014 - protein, 120 aa, Glycine max
MATSLSNMFLKGIAARSLSRPLNGLFYCTRYSTTVSNDSDMHDDFKPANKLENSGISLSNVIEQDVKDNPVMVYMKGVPDFPQCGFSSLAVRVLKHYDVPISARNILDDPDLKNAVKAFR

SEQ ID NO: 2015 - protein, 318 aa, Glycine max
  misc_feature (182)..(182): Xaa can be any naturally occurring amino acid
  unsure (1)..(318): unsure at all Xaa locations
MNFNCTANKEQKKTVDQSILLCCKFFVSESRNNATLNAIERAARSNPETVIVNMFHDRAYNRARYDLVSYVLHDCTGNPIYSPLHQTVIAMAEATFNAVNLEFHEGAHPRLGAVDDIVFHPLGHASLDEAAWLAKAVAADIGNRFSVPVFLYAAAHPTGKELDAIRRELGYYRPNSRGSQWXGWAMPETLPLSPDEGPNVVSRAKGITVIGARPWITFYNVPILCTDVSVARRIARKVSARGGGLPTVQTIAVVHEDSTEIACMLLDPKLVGADRVQNRVEMQAAEEGLDVEQGYFTDLSPEMFVEKYMKLINNANKS

SEQ ID NO: 2016 - protein, 111 aa, Glycine max
  misc_feature (65)..(65): Xaa can be any naturally occurring amino acid
  unsure (1)..(111): unsure at all Xaa locations
NFPEKGVFPSEPLQDRLKNLIASSPGMLFMKGSPDAPKCGFSSKVADALCQKGLNFGAFDILADXEVRQGFKVFSNWATYPQLFFKNELIGGHDNVKELRNNGELKSALFE

SEQ ID NO: 2017 - protein, 289 aa, Glycine max
  misc_feature (121)..(121): Xaa can be any naturally occurring amino acid
  misc_feature (150)..(150): Xaa can be any naturally occurring amino acid
  misc_feature (252)..(252): Xaa can be any naturally occurring amino acid
  unsure (1)..(289): unsure at all Xaa locations
MLLVICGRRYRDKALTRSQYFRGIDVNRLPSVVDCEEEAGVSSPNSTVSSVSGKRSERETNGEENDTDRACSRGIISDEEDAETSRKKLRLSKDQSIVLEESFKEHNTLNPKQKLALAKQXLGLRARQVEVWFQNRRARWVHFANIFVVXSLRVLLKLIFRTKLKQTEVDCEFLIWCCENLTEENRRLQKEVQELRALKLSPQFYMHMTPPTTLTMCPSCERVAVPPSSAVDPATRHHHVPPSHPRAFPIGXMGQALRCPPSQILDSRKQNDKIEKKIGSHELCVQSVV

SEQ ID NO: 2018 - protein, 214 aa, Glycine max
MRTQRLNHLLLSLFLFAAAFSSLHPTATAGDEGAPSAGDGDRDADFIRTSCNTTLYPEVCFTSLSRYANAVQQNPGHLARVAIAVSLSKVHRAASYVSNLTRDADYGGSTRAALALHDCFSNLGDAVDEIRGSLKQMRQIGSAGAGASSFLFQMSNVQTWLSAALTDEETCTDGFQDVADCPMKTGVCDRVSNVKKFTSNALALVNSYANKGMP

SEQ ID NO: 2019 - protein, 432 aa, Glycine max
MAQILAPSTQWQMRISKSSPNASPITSNMWSSLLWKQNKKVSPTSSAKFRVMAIKSDNSIINRLEGLLNLDITPFTDKIIAEYIWIGGTGIDVRSKSRTISKPVEHPSELPKWNYDGSSTGQAPGDDSEVILYPQAIFKDPFRGGNNILVICDSYTPQGEPIPTNKRHRAAEIFSNPKVQAEVPWYGIEQEYTLLQTNVKWPLGWPVGGYPGPQGPYYCSAGADKSFGRDISDAHYKACLYAGINISGTIGEVMPGQWEYQVGPSVGIEAGDHIWASRYILERITEQAGVVLSLDPKPIEGDWNGAGCHTNYSTKSMREDGGFEVIKKAILNLSLRHKDHISAYGEGNERRLTGKHETASINTFSWGVANRGCSIRVGRDTEKNGKGYLEDRRPTSNMDPYVATSLLAETTLLWEPTLEAEALAAQKLALKV

SEQ ID NO: 2020 - protein, 168 aa, Glycine max
DRLLNLGYNCAICKSKWRSSPEIPSGEHTYLEVRNNVSNTKRGAVKVVIELNFRAEFEMARANEEYNKLIKRLPEVFVGKSDRLRALVKIMCSASKKCMKEKKMHIGPWRKHKYMQAKWFSTCEMSTMESLPTIMNSAQQPKSKASMLTFDLLDNIIHGLHCTTVEVV

SEQ ID NO: 2021 - protein, 208 aa, Glycine max
MDKKQLCNTSQDPEVRKGPWTMEEDLILINYIANHGEGVWNSLAKAAGLKRTGKSCRLRWLNYLRPDVRRGNITPEEQLLIMELHAKWGNRWSKIAKHLPGRTDNEIKNYWRTRIQKHIKQAENFQQQISNNSEINDHQASTSHVSTMAEPMETYSPPFYQGMLEPFSSIQFPTINPDQSSCCTNDNNNSINYWSMEDIWSMQLLNGD

SEQ ID NO: 2022 - protein, 241 aa, Glycine max
MKGKTCELCDQQASLYCPSDSAFLCSDCDAAVHAANFLVARHLRRLLCSKCNRFAGFHISSGAISRHLSSTCSSCSPENPSADYSDSLPSSSTCVSSSESCSTKQIKAEKKRSWSGSSVTDDASPAAKKRQRSGGSEEVFEKWSREIGLGLGLGVNGNRVASNALSVCLGKWRWLPFRVAAATSFWLGLRFCGDRGLASCQNLARLEAISGVPVKLILAAHGDLARVFTHRRELQEGWGES

SEQ ID NO: 2023 - protein, 202 aa, Glycine max
  misc_feature (89)..(89): Xaa can be any naturally occurring amino acid
  misc_feature (142)..(142): Xaa can be any naturally occurring amino acid
  unsure (1)..(202): unsure at all Xaa locations
EDGAATRKKLRLKRERDLSCEEVVDAKEIDQRDLSCEGIIRATEEEEDGAATRKKLRLTKEQSALLEESFKQHSTLNPKQKQALSKQLXNLRPRQVEVWFQNRRARTKLKQTEVDCEFLKKCCETLTDENRRLQKELQELKXLKLAQAVYMPMPAATLAMCPSCERLGGSAVNGAGGSPKTSFSMAPKPHFFNPFANPSAAC

SEQ ID NO: 2024 - protein, 278 aa, Glycine max
MASVSSQQQFRYTQPPSKVLHLRNLPWECTEEELIELGKPFGKVVNTKCNVGANRNQAFIEFADLNQAIAMISYYASSSEPAQVRGKTVYLQYSNRQEIVNNKTAADVAGNVLLVTIEGEDARLVSIDVLHLAMEKLLTSLVFSAFGFVHKITTFEKTAGFQALVQFSDAETATSAKDALDGRGSSRYLLPEHIGPCGLKITYSGHSDLSVKFQSHRSRDYTNPYLPVAQSAMEGSGQPMVGLDGKRLEAESNVLFASIENMQYTVTLDVLHMVFSAF

SEQ ID NO: 2025 - protein, 157 aa, Glycine max
MEGKGFTEEQEALVVKSWNEMKKNSQELGLKFFKKILEIAPAAQQLFSFLKDSTVPLEENPKLKPHAMAVFVMTCESAVQLRKAGKVTVRESNLKRLGATHFKAGVAAEHFEVTKLALLETIKEAVPEMWSPAMKNAWEEAHDQLAEAIKSEMKPSD

SEQ ID NO: 2026 - protein, 200 aa, Glycine max
GNESEASRRIKTELLVQMQGVGHNDQKVLVLAATNTPYALDQAIRRRFDKRIYIPLPDLKARQHMFKARTIYSIVHLGDTPHNLTESDFEYLASRTEGFSGSDISVCVKDVLFEPVRETQDAMFFFRNPEGMWIPCGPKQQGAVQAAMQELAAKGLASKILPPPISRTDFDKVLARQRPTVSKSDLDVHERFTKEFGEEG

SEQ ID NO: 2027 - protein, 196 aa, Glycine max
  misc_feature (159)..(159): Xaa can be any naturally occurring amino acid
  unsure (1)..(196): unsure at all Xaa locations
MSESEKQRVTGKVKWFDDQKGFGFITTDDSGEEFFVHQSSIRSDGFRSLALGESVEFLIDSDPEGRTKAVDVTGPDESPVQGTRGGGGGGRGSYGGGGGRGGYGGGGRGGRGGYGGGGGGYGGGGYGGGGGYGGGGGGGGGGGCYKCGETGHIARDCSXQGGGGGGRYGGGGGGGGSCYNCGESGHFARDCPSSAR

SEQ ID NO: 2028 - protein, 212 aa, Glycine max
MASKLLLSLSLLLLTLTLHTSCTTALAKRTNPNPTITTTTDFIKSSCKATRYPAACVQTLSGHASAIRQSEQQLAVTALSVSVSKTRSCASFVKGMKPREYNALRDCVENMNDSVDRLNQSVKELGLVGMGMGMGKAKGKGKAKDFAWHVSNVQTWVSAAITDQDTCLDGLDGPHVDANLRASVRPRVVYASQVTSNALALVNHFASKYRSA

SEQ ID NO: 2029 - protein, 179 aa, Glycine max
MASSVEKEGGASEETFSVELPAPPGWKKLFIPKKAGTPKKNEIVFTAPTGEEINNRKQLEKYLKAHPGGPAVSEFDWGTGETPRRSTRISEKAKAAPPIESEPPKKRTKRSSASQKETSQEEKEEKTKEAEMQEADYTTKDDNDIEKEKDVVMENQDVKSVEDTDVNSTHSGEAKAGEN

SEQ ID NO: 2030 - protein, 344 aa, Glycine max
MATAVTAAVSFPATKSTSLSSRTSITAPDRIVFKKVSLQYRDVSTSGRVVSIRAQVTTEAPAKVEKESKKQEEGVIVNKFKPKNPYIGRCLLNTKITGDDAPGETWHMVFSTEGEVPYREGQSIGVIPDGVDKNGKPHKLRLYSIASSALGDFGDSKTVSLCVKRLVYTNENGELVKGVCSNFLCDLKPGAEVKITGPVGKEMLMPKDPNATVIMLATGTGIAPFRSFLWKMFFEKHDDYKFNGLAWLFLGVPTSSSLLYKEEFEKMKEKAPDNFRLDFAVSREQTNEKGEKMYIQTRMAQYAEELWELLKKDNTFVYMCGLKGMEKGIDDIMVSLAAKDGNIT

SEQ ID NO: 2031 - protein, 209 aa, Glycine max
MVRGKTQMRRIENATSRQVTFSKRRNGLLKKAFELSVLCDAEVALIIFSPRGKLYEFASSSMQDTIERYRRHNRSAQTVNRSDEQNMQHLKQETANLMKKIELLEASKRKLLGEGLGSCSLEELQQIEQQLERSVSNVRARKNQVYKEQIDQLKEKERALYAENARLCEQYGIQPQPATKDPKEIQPYAESSPSSEVETELFIGLPRSI

SEQ ID NO: 2032 - protein, 303 aa, Glycine max; identical to SEQ ID NO: 428

SEQ ID NO: 2033 - protein, 214 aa, Glycine max
MQLQLTLSSLFLSLLLTITLTSPTLAAQSKPQDLVRSSCVHARYPRLCLHTLSNYPGSANTPLDVARTALKVSLAHTRRASKFLHALSHDDSIIMRKRERSALRDCTEQISDSIDQLRRSLDELQHLRSETFRWQMSNALTWVSAALTDGDTCLEGFGGNARPDVKRRVTDVARVTSNALYMINRLGQSRTGKPKYKPRPRTQPGSASSTEKLN

SEQ ID NO: 2034 - protein, 315 aa, Glycine max
MQDEPEVIDVAELMKDLEEEEDDEMDLDDYNDNKENIGPCSQKPQQHHKGVLQNGNRAKTEPKQRGVLEEKWSSPAKAASNSNRKTPSLETDIPSFRRPDLNSGSLFDPNLLAAFEHAVKEHARMTEEQRRARVEEESSQKVEDDDPDPDPDPDPDPLMFFEEKCPPGGDGTVIFYTTTLRGIRKTFEDCNKIRFLLQSFKVLYFERDISMHKEFKDELWSSLEGKSLPPRLFVKGRYIGGAEEVLSLHEQGKLRKILVGVPMDYSNGPCDACGGIRFVLCFKCNGSHKVVEENGESNQCLQCKKKGLIVCPYCC

SEQ ID NO: 2035 - protein, 331 aa, Glycine max
STKLVCLSKLTMASFCSRLTICLALFVLIWGSANAQLSTNFYYHSCPNLFSSVKSTVQSAISKETRMGASLLRLFFHDCFVNGCDGSILLDDTSSFTGEKNANPNRNSARGFEVIDNIKSAVEKVCPGVVSCADILAIAARDSVQILGGPTWNVKLGRRDARTASQSAANNGIPAPTSNLNQLISRFSALGLSTKDLVALSGGHTIGQARCTNFRARIYNETNIETAFARTRQQSCPRTSGSGDNNLAPLDLQTPTSFDNYYFKNLVQKKGLLHSDQQLFNGGSTDSIVRGYSTNPGTFSSDFAAAMIKMGDISPLTGSNGEIRKNCRRIN

SEQ ID NO: 2036 - protein, 115 aa, Glycine max
MFVMQVMNLIGDVKGKVAVMVDDMIDTAGTIAKGAALLHEEGAREVYACCTHAVFSPPAIERLSGGLFHEVIITNTIPVAEKNYFPQLTIITVANLLGETIWRVHDDSSVSSIFQ

SEQ ID NO: 2037 - protein, 365 aa, Glycine max
MDWDGKEFAWDPRGLELLANGEGQKSEAASVDLRLGGEKIAPDVAKDTKESKTVSSPSGSSKRSRLQNGSQNMCCSVDGCNSDLSDCRDYHRRHRVCEKHSKTPVVLVGGKQQRFCQQCSRFHSLGEFDEVKRSCRKRLDGHNRRRRKPQPPSLFMAAEKFMYNYKGPRILHFGSPEAYANPIMRNMWPAAAKTGAESGYDPPRLLYRIDKHKQDKGHPLWQENDPKVGSGDEAMPGTPICQPIHGTIAPSTGGKSTRKLSTDAKPGSFDSGCALYLLSTLQSQSPELSMAQSSITCPMQSPSGSVHFDAVNEYSCSETEKDKPSGQVLVFDANTTNLHYNGMLQMGLDGLVENEDPLTLPFLWE

SEQ ID NO: 2038 - protein, 486 aa, Glycine max
MVEKSSRTNLGHHQDFGMEAYSIDGVSSQSESKFYDDDGHVKRTGNVWTTSSHIITAVVGSGVLSLAWAMAQMGWVAGPVVMIFFSAVTLYTTSLLADCYRCGDPVTGKRNYTFMDAVQSILGGYYDAFCGVVQYSNLYGTAVGYTIAASISMMAIKRSNCFHSSGGKSPCQVSSNPYMIGFGIIQILFSQIPDFHETWWLSIVAAIMSFVYSTIGLALGIAKVAEMGTFKGSLTGVRIGTVTEATKVWGVFQGLGDIAFAYSYSQILIEIQDTIKSPPSEAKTMKKSAKISIGVTTTFYMLCGFMGYAAFGDSAPGNLLTGFGFFNPYWLIDIANAAIVIHLVGAYQVYAQPLFAFVEKWASKRWPEVDTEYKIPIPGFSPYNLSPFRLVWRTVFVIITTFVAMLIPFFNDVLGLLGALGFWPLSVFLPVQMSIKQKRTPRWSGRWIGMQILSVVCFIVSVAAAVGSVASIVLDLQKYKPFHVDY

SEQ ID NO: 2039 - protein, 382 aa, Glycine max
MDPLCEFCRVVRAVVYCKSDSARLCLHCDGCVHSANSLSRRHSRSLLCDKCNSQPAMIRCMNHKLSLCQGCDWNPNDCSALGHRRLALNCYTGCPSLAEFSRLWSFVFDANSSLGGWESVGTLPKSESCTSQCLEQTDHNGGYFGLVSDKLDEIESCVRYQPRMDQSQIIPSNPNYTPYCKDEAFFFPQDSNQPKLQECPNLGIHDGNELCEGFNVDNVQLNFEIADEIFYCSQVATRYHLEDGGMDCLLMDKNIAVTESSSLIESAMEASSSIQQDCVAFQSSRAGGSASVMQVINSNTNCALMNPSCTKNISLGFPQGLVHSNMPLQFPNIVGENNSTEYQDCGLSRVGESPWESNLEGTCPQARDKAKMRYNEKKKTRT

SEQ ID NO: 2040 - protein, 285 aa, Glycine max
MTLLTVEDQSLHDMNFLWENHSWDPSNSDNSGESKENMKSLDQVEEKDEALMNKKRNRDQGNITSGEGKGEKCRESDHEMHIWTERERRKKMRNMFASLHALLPHLPSKIGLQGFNTADKSTVVDEAVAYIKNLEKTLEKLEKQKQERVQCVSTFGCEPSMFVTGQGSSNNNISNAIIGTTSNALSFPVAFDKTWASANLVLNIFGDEAQFSICTAHKPGLMTTIGFVLEKYKIEVITANISCIGYGNACMIQAHGKRVSHQFLDANSVEEIYKQAAGEIMLWIG

SEQ ID NO: 2041 - protein, 116 aa, Glycine max
GDWNGAGAHSNYSTKSMRDEGGYEVIKKAIEKLGLRHKEHIAAYGEGNERRLTGRHETADINTFSWGVANRGSSIRVGRDTEKNGKGYFEDRRPASNMDPYVVTSMIAETTILWKP

SEQ ID NO: 2042 - protein, 221 aa, Glycine max
HPDCSVTIKRPSFLISDARSPSMSTCVKSRDVCIVGVARTPIGGLLGTLSSLSATELGSIAIKTALKRANVDPSLVQEVFFGNVLSANLGQAPARQAALGAGIPTSVICTTINKVCASGMKATMLAALTIQFGLNDVVVAGGMESMSNAPKYIAEARKGSRYGHDTIIDGMVKDGLWDVYNNFGMGVCAELCADQHVITRDEQDSYAIRSFERGISAPNAG

SEQ ID NO: 2043 - protein, 257 aa, Glycine max
MSWNPHMELHYNTISYPYNTAGSFIEYFEGLTYEHVNFIFSGASHAQATRKIHNSKESSYPSNSSFYKFGISEPVNTSYYRYGHGYEVNHHEPSVDEYRRPSENSLTINEQSAAVSTEWVEGGNTGTRDNSIECPRRHHSNSNDYQVIWQDNIDPDNMTYEELLELGEAVGTQSRGLTQEQISSLPVSKYKCGFFLRKKSRDERCVICQMEYRRGDKRITLPCKHVYHASCGNKWLSINKACPICYTEVFADKSKHK

SEQ ID NO: 2044 - protein, 290 aa, Glycine max
MEFGFLGLGIMGKAMAINLLRHGFKVTIWNRTLSKCDELVQHGASVGETPATVVKKCKYTIAMLSDPSAALSVVFDKDGVLEHINGKCYIDMSTVDADTSSKISETIKAKGGYFLEAPVSGSKKPAEDGQLIILAAGDKALYDEVLPAFDVLGKKSFFLGEVGNGAKMKLVVNMIMGSMMNAFSEGLTLAERSGLNPGTLLDVLDLGAISNGMFKLKGPTMLQNSYSPAFPLKHQQKDMRLALALGDENAVSMPVAAAANEAFKKARSMGLGDLDFSAVHETLKAPDHSS

SEQ ID NO: 2045 - protein, 165 aa, Glycine max
  misc_feature (136)..(136): Xaa can be any naturally occurring amino acid
  unsure (1)..(165): unsure at all Xaa locations
MGERVKGTVKWFNVTKGFGFISPDDGGEDLFVHQSSIKSDGYRSLNENDAVEFEIITGDDGRTKANDVTAPGGGALSGGSRPVEGGGDRGGRGGYGGGGGGYGGGGGGYGGGGGGYGGGGGGYGGGGYGGGGGGGXRACYKWGERRAPAPPWLPEEGGRRPAPRP

SEQ ID NO: 2046 - protein, 384 aa, Glycine max
MASDFNLSPSDAHPETMDFLSLAWCNFAVQALQPEPQHGSVVLLDNNSMKQLEPSSPNAPPSMEKSDRMDGADFGSFPAWKSNNVKSWIWMQQAMHPELNYNSCFRKKWMPWKQIIPLKNVSIKKWFKEIKMKRKEDQRLQRAEVHAAISVAGIAAALAAIAAESSKNESNQDRDAAVASAAALVAAQCAKVAEAMGAKKELLSTVIGSAMSGTSASDILTLTGAAATSLKGAATLKVRSGCKNRLNGGVPILPLEDNNDLDFDFEKGRSILAQGAELYVETPEGKYMPRSVSVILNSEAKVVLMMRKHNLFKSKREGVVMTLHADLYKGSEADTCYLIVLTTRGGVFKLDMADDFRRYKTWATTINHMLKISSSFAKYELQFY

SEQ ID NO: 2047 - protein, 326 aa, Glycine max
MASSCSSFMITLALLVLVLGTNTSSANANPTLHTNFYYSSCPKLFDTVKRTVESAISKETRMGASLLRLFFHDCFVNGCDGSILLDDTSSFTGEKNAGPNRNSARGFEVIDQIKSAVEKVCPGVVSCADILAIAARDSVEILGGPTWDVKLGRRDSRTASQSAANNDIPRPTSNLNQLISRFNALGLSTKDLVALSGGHTIGQARCTTFRARIYNETNIDSSFARMRQSRCPRTSGSGDNNLAPIDFATPTFFDNHYFKNLIQKKGLIHSDQELFNGGSTDSLVRTYSTNPASFFADFSAAMIRMGDISPLTGSRGEIRENCRRVN

SEQ ID NO: 2048 - protein, 426 aa, Glycine max
MLYETDYTMTEIEIPQFFLCPISLQIMKDPVTTVTGITYDRESIEKWLLKAKDCTCPITKQPLPRSPEFLTPNHTLRRLIQAWCSANEANGVDQIPTPKSPLSIANVEKLVKDLEVSSRFQRALEKLHDLAIENGRNRRCMASAGVAEAMVHVITKSFIQGNKTTSCVEEALRILGLLWSSANMVDSSNNNNNIKRMVGENFDFLNSLTWALQLQTKNNVKLTNEAMPILKQVIEAKDSTALGNLKLEFFKVVVSVMKNRELSQQAVKSALHVLIETCPLGRNRMKIVEAGAVVELIELALEKPEKNMTELIFILLAHLCSCADGREQFLQHAAGIAVVSKRILRVSPTTDDRALHIFSLVSKFSASNEVVQEMLRVGAVSKLCMVLQADCASYLKEKARGVLRLHSKTWNNSPCIQVYLLTRFHR

SEQ ID NO: 2049 - protein, 308 aa, Glycine max
MGEKDDGLGLGLSLKLGWGENNDNNNNQQQHPFNVHKPPQSVPNQRVSVNSLFHFHDRSSEMRSFFRGIDVNLPPPPPSAALAAFDDENGVSSPNSTISSISGKRSEREGNGEENERTSSSRGGGGSDDDEGGACGGDADADASRKKLRLSKEQALVLEETFKEHNTLNPRQKQALAKQLNLMPRQVEVWFQNRRARTKLKQTEVDCEYLKRCCENLTEENRRLQKEVQELRALKLSPQLYMQMNPPTTLTMCPSCERVAVSSASSSSSATMPSALPPANLNPVGPTIQRPMPVNPWAAMLNQHRGRP

SEQ ID NO: 2050 - protein, 428 aa, Glycine max
MEKLASSSTATVVPTQHFLFQFHQHSLFFFPKTAFSTFHRNRTEPLSLLCCKSRHRRLEALSSKQDQLWVSEEELELELEEGEDSYLDGDDDDDDSSFLSLSDKPDRNMAMLDDYEGEELDFDYGPDHRSGYVALLGKPNVGKSTLANQMLGQKLSIVTDKPQTTRHRILCICSGTDYQMILYDTPGVLQKEMHLLDSMMMKNVRSAAVNADCVLVLVDARKTPEKIDGLLEEGIGDLKDKPPTLLILNKKDLVKPGELAKKLEWYEKFTEVDEVIPVSAKYGQGVEDVKDWILSKLPNGPAYYPKDIVSEHPERFFVAEIVREKIFMQYRNEIPYACQVNVVNYKARPNAKEYIQVEILVEKNTQKIILIGREGKALKLLATAARLDVEDFLQKKVYLEIEVKVRANWRQDEGLLNHYGYGGQIRVI

SEQ ID NO: 2051 - protein, 322 aa, Glycine max
MDEKGARSSNTLLSCEDEMDLRRGPWTVDEDLTLINYIATHGEGRWNTLALSAGLKRTGKSCRLRWLNYLRPDVRRGNITLEEQLLILELHSRWGNRWSKIAQYLPGRTDNEIKNYWRTRVQKHAKQLKCDVNSKQFKDTMRYLWMPRLVERIQAAATAPVTTTVTAAATNNAFTYGNNLNNNKFEVLNHKGRMGLTDPSVANNDFVGSHVTQSYTTPENSSTGASSSDSFGTQVSTISDLTEYYSVPENTNSADYYQPSQISNYSDNCITSPSGFLFPQGLDLQSMDPNTPWNMQSGDSSDNFWDVESMLFLEQQLMNDNM

SEQ ID NO: 2052 - protein, 197 aa, Glycine max
MIIIARLMFLLALFLLLVTNTGQMVFAQDDNNVRDACSVTRFQSLCVQTLGHFSRTAGTSPSKWARAGVSVSIGEVKNVEAYLAQVKRQGQLKGRNSVALSDCVETFGYAIDELHKSLGVLRSLSKSKFSTQMGDLNTWISAALTDEVTCLDGFEGSKGTNVKLLQNRVQNASYITSNALALINKLATEGLGSINDP

SEQ ID NO: 2053 - protein, 229 aa, Glycine max
  misc_feature (197)..(197): Xaa can be any naturally occurring amino acid
  unsure (1)..(229): unsure at all Xaa locations
MEDDEACITSLSLGLGIMGGHAQKKENKQKVHCLDLSFELCPKGKEEVEEAIDVDQQQQQQHANKAKGLLCLKHPNDETSPDSNNSNNGSRKKLKLTKEQSATLEDIFKLHSTLNPAQKQALAEQLNLKHRQVEVWFQNRRARTKLKQTEVDCEFLKKCCEKLTDENLRLKKELQELRAQKLGSTPLYIQLSKATTXTICSSCEKLLKPNEGNKGAINKLQNSIELGGI

SEQ ID NO: 2054 - protein, 210 aa, Glycine max
MASSLFQPSPSSAMTLSSSSTSSSSSLFTGTLRTLGFVDHSRARISAPNTKCDMSESSNFVNGKPIIPVLNERTLPKFMESAREAKTVSRNSNRLKLFSGRANPTLSQEIARYMGLELGKISIKRFADGEIYVQLQESVRGCNVYLIQPTCPPANENLMELKIMIDACRRASAKNITAGIPYFGYARADRKTQGRESIAAKLVANLITKA

SEQ ID NO: 2055 - protein, 170 aa, Glycine max
MGFYAEDTLSGLTIGQAIYEVALMIAVLRWVLCLIFRVMNDRRRTESDETPAAEACCQKEYNNTLVLTTFGEIKERLPQTEETCAVCLSQLSVEDEVRELMNCYHVFHRECIERWLEHEHENHIPTCPLCRAPLLSSCCHHSSTTCVPPPQPSWAVERLLYLFGDDLLPC

SEQ ID NO: 2056 - protein, 305 aa, Glycine max
MASAVEKEGGASEETLSLELPAPPGWKKQFIPKKAGTPKKNEIVFTAPTGEEINNRKQLEKYLKAHPGGPAVSEFDWGTGETPRRSTRISEKAKAAPPTQREPPKKRTKRSSASQKEISQEEKEEETKEAEMQEADDTTKGDNDIEKEKVVVNENHDKSVEDTDVNKSTRYGEEAKAGENVEVPIEEEKSNAADGELPALKDKADDKVTEGSEVFLRKDEEKIEQPQEETKEYSGFGEPEKLETCTTADKTVEVEGVNKEDHVKSTHEFEVGEIEGTKVNGEEHHKLDEINKAEAELTVNGTHES

SEQ ID NO: 2057 - protein, 357 aa, Glycine max
MEANCNMINMDDTCELVANNNVGFPTDAANNGIHKPSLLGANKTTLGHHVARRLVEIGIKDVFTVPGDFNLILLDYLVAEPELNLIGCCNELNAGYAADGYARYKGVGACVVTYNVGGLSILNAIAGAYCEDLPIICIVGGPNSNDYGSNKILHHSIGLPDYTQELRCFQPVTCHQVVVNNLDDAHERIDTAIATALRESKPVYISIACNLSAIPHHSFIDQPLPFYLTPKLTSERCLEIAVEITSEFLNKAVKPVMVGGPRLRMAKASDAFMEMVDASGYAFAMLPTAKGMVEESHPNFLGTYWGPASTPFCAEIVESADAYLFAGPIFNDIVSFGFTLPIKKDKAIMVLPNRVMI

SEQ ID NO: 2058 - protein, 169 aa, Glycine max
  misc_feature (111)..(111): Xaa can be any naturally occurring amino acid
  unsure (1)..(169): unsure at all Xaa locations
AGVSNPTHKEIRYRGVRKRPWGRYAAEIRDPGKKTRVWLGTFDTAEEAARAYDTAAREFRGTKAKTNFPTHAAVARSPSQSSTLDSSSPPPLDLTLAAPLTAAGALVFSGXRPVVFFDAFARAEVRASFDLPVAGFSDSDSSSVVDYERVPHRKVLDLDLNVPPPPEVA

SEQ ID NO: 2059 - protein, 555 aa, Glycine max
ETSTLPPIINAIEIYRVKEFPQQDTYQGDVDAITTIKSVYGVTRDWQGDPCSPKDYLWEGLNCTYPVNDSPRIITLNLSSSGLSGKIDPSILNLTMLEKLDLSNNSLNGEVPDFLSQLQYLKILNLENNNLSGSIPSTLVEKSKEGSLSLSVGQNPYLCESGQCNFEKKQKNIVTPIVASICGALILLVAVAILWTLKRRKSKEKSTALMEVNDESEISRLRSTKKDDSLAQVKKQIYSYSDVLKITNNFNTIIGKGGFGTVYLGYIDDSPVAVKVLSPSAVHGFQQFQAEVKLLIRVHHKNLTSLIGYCNEGTNKALIYEYMANGNLQEHLSGKHSKSTFLSWEDRLRIAVDAALGLEYLQNGCKPPIIHRDVKSTNILLNEHFQAKLSDFGLSKAIPTDGESLVSTVLAGTPGYLDPHCHISSRLTQKSDVYSFGVVLLEIITNQPVMERNQEKGHISRRVRSLIEKGDIRAIVDSRLEGDYDINSAWKALEIAMACVSKNPNERPIMSEIAIELKETLAIEIARAKHCDANPRHLVEAVSVNVDTEFMPLAR

SEQ ID NO: 2060 - protein, 289 aa, Glycine max
  misc_feature (24)..(24): Xaa can be any naturally occurring amino acid
  unsure (1)..(289): unsure at all Xaa locations
MGEKDDDFGLSLSLSLGRVNQQQXTLLLNHMHQPQQLQPVPMNHNKTLFGDLFQLPDRSSEMVRGIDVNSAAEYDGVSSPNSAVSSVSGGGKQSERDDDNAAAVAGERTSCSRGSDDDDGGGSDAARKKLRLTKEQSMVLEETFKEHNTLNPKRKQALAEELNLKPRQVEVWFQNRRARTKLKQTEVDCEYLKKCCENLTEENRRLHKEVQELRALKLSPQMYMHMNPPTTLTMCPSCERTHSSASSSPATIHSTVAAATSSNCKLLGANIRRPVPVNTWPFEGPIPRP

SEQ ID NO: 2061 - protein, 227 aa, Glycine max
MDSLKMLKGYGKVEHHLEDHRNPKPKPKFSKPFIAAISVFAILFLTLTFAFALASMLHHSHHTESQQQLLNSAESIRVVCNVTRFPGACLAAIPPSANATNPQAILSLSLRASLHALQSLNSSLGTKNSRALADCRDQLDDALGRLNDALSAAAALTEAKISDVQTWVSAAITDQQTCLDGLEEVGDVAAMEEMKKMMKRSNEYTSNSLAIVANIRNLLQRFHMALH

SEQ ID NO: 2062 - protein, 98 aa, Glycine max
MSTTESQRYKGTVKWFNEEKGFGFITPEDGGSDLFVHYSAIQTDGGFRTLSEGQSVEFLVTQDDSGRAAAVNVTTTTVKSSDSGNGENSGGDAANVEK

SEQ ID NO: 2063 - protein, 498 aa, Glycine max
MVKSCCVMCLCLILLHIFLRFVPIQSAPESAIVTQIPGFSGTLPSKHYAGYVTVDKSHGRNLYYYFVESEGKPSEDPVVLWLNGGPGCSSFDGFIYEHGPFNFEAAKTRGGLPTLHLNPYSWSKVSSVIYLDSPAGVGFSYSENKTDYITGDIKTATDSHAFLLKWFELYPEFLSNPFFIAGESYAGVYVPTLASEVVKGIDAGVEPKLNFKGYMVGNGVTDEQIDGNALVPFVHGMGLIPDELFEEVNRECNGNFYDPTSANCSSKLSKVDELVDEINIYNILEPCYHGTEAEKITESYIRMPSTFRKLGETERPFPVRKRMFGRAWPLRAPVRDGIVPTWPQLMNSKSAPPCTDDEVANSWLNNEAVRTAIHTAQKSVVSSWDLCTDRIYFDHDAGSMIKYHKNLTSKGYRALIFSGDHDMCVPYTGSQVWTRSVGYKIVDEWRPWSSNGQVAGYTQGYDKNLTFLTVKGSGHTVPEYKPREALDFYKRFLAGLPI

SEQ ID NO: 2064 - protein, 669 aa, Glycine max
SRWSISTTSIADGRWHIVTMSIDADLGEATCYLDGGYDGYQSGLPLCVGSSIWEQGTEVWVGVRPPTDIDAFGRSDSEGVESKMHIMDAFLWGRCLTDDEVSSLYTSMASADFSALDFPEDNWQWADSPSRVDGWDSDPADVDLYDRDDVDWDGQYSSGRKRRSERDGMMVDIDSFSRKYRKPRIETQEEINQRMLSVELAIKEALYARGERRFTDQEFPPNDHSLFVDPANPPAKLQVVSEWLRPGEIGRQNHLDCRPCLFSGAPNPSDVCQGRLGDCWFLSAVAVLAEVSRISEVIITPDYNEEGIYTVRFCVQGEWIPVVVDDWIPCELPGKPAFATSKKGYELWVSILEKAYAKLHGSYEALEGGLVQDALVDLTGGAGEEIDMRSGEAQIDLASGRLWSQLLRFKQEGFLLGAGSPSGSDVHISSSGIVQGHAYSILQVRDVDGHKLVQIRNPWANEVEWNGPWSDSSPEWTDRIKHKLKHVPQSKDGIFWMSWQDFQIHFRSIYICRIYPSEMRHSVHGQWRGYSAGGCQDYDTWNQNPQFRLTATGQDASFPIHVFITLTQGVGFSRTTAGFRNYQSSHDSQMFYIGMRILKTRGRRAAFNIYLHESVGGTDYVNSREISCEMVLEPEPKGYTIVPTTIHPGEEAPFVLSVFTKASVTLEAL

SEQ ID NO: 2065 - protein, 440 aa, Glycine max
  misc_feature (293)..(293): Xaa can be any naturally occurring amino acid
  misc_feature (397)..(397): Xaa can be any naturally occurring amino acid
  unsure (1)..(440): unsure at all Xaa locations
MSTSSQHQFRYTQTPSKVLHLRNLPWECSEEELRELCRPFGKIVNTKCNVGANRNQAFVEFVDLNQAISMVSYYASSSEPAMVRGKTVYIQYSNRHEIVNNKSPGDIPGNVLLVTIEGVEAGDVSIDVIHLVFSAFGFVHKIATFEKTAGFQALIQFTDAETASSARDALDGRSIPRYLLPAHVGSCNLRISYSAHKDLNIKFQSNRSRDYTNPMLPVNYTAIEGAVQTAVGPDGKRKEPDSNVLLASIENMQYAVTVDVLHTVFSAFGTVQKIAIFEKNGQTQALIQYPGIXIFNYIITASAAREALEGHCIYDGGYCKLHLSYSRHTDLNVKAFSDKSRDYTVPDPSLLAAQGPATAWQNPQAASMYPGSAPAYHTQVPGGQVPSWDPSLQAVRXELCISTWYFSCSIWCSSSNASLCASRSYACCFLTSCTKQPHGS

SEQ ID NO: 2066 - protein, 326 aa, Glycine max
MAAGTVFCAAATAASNLTTTTFLHNQTPPSTSSQPPLDSLFLSASSPFLGSRSIVSFGDVQGGKGCNDSFFRPYDENGDEDMDEYFHQPEKKRRLSVEQVKFLEKSFDEENKLEPERKIWLAKELGLQPRQVAIWFQNRRARWKTKQMEKDYDSLQASYNDLKANYDNLLREKDKLKAEVARLTEKVLGREKNESHLEQAETNGLQEPLHKSLVDSASEGEGSKVTFEACKQEDISSAKSDIFDSSESPQYTDGVHSALLETGDSSYVFEPDRSDVSQDEEDNLSKTLLPHYIFPKLEDVDYSDPPHGSCNFGIPEEDQAIWSWPY

SEQ ID NO: 2067 - protein, 412 aa, Glycine max
  misc_feature (131)..(131): Xaa can be any naturally occurring amino acid
  unsure (1)..(412): unsure at all Xaa locations
MSENMYPRLLFFDHTHSKMVWVKHQIQQKDGYLSYSPPLLASSSSSSSSSSSSSPPYPLGATFHKESSLPSSTPPPPPSGTRISPAVLFIIVVLAVLFFISGLLHLLVRFLIKHPSSASAQSNNRHQELSXSDALQRQLQQLFHLHDSGLDQAFIDALPVFQYKEIVGLKEPFDCAVCLCEFSEKDKLRLLPMCSHAFHISCIDTWLLSNSTCPLCRGTLLTQGFSVENPIFDFDDLMEDEMCPWNGENGFNTRQKTVVVEESVEKEKGVFPVRLGKFKKLSSVEGGGESEVGETSSSNLDARRCFSMGSYQYVVGNSDLRVALNHDEISKGQVTRLNKGMELDDGKLSVEEGDVEGKKISSVSKGDSFSVSKIWLWPKKGKLPTSLDGQIGMPMPSFLNTDFPRMRDTEGA

SEQ ID NO: 2068 - protein, 205 aa, Glycine max
MATTISCDFSSMESIQHYLLEPEHDSNALMNISNHEVCYSATYNAFPSPTFSLEGVVHDANDSLACKREHPREEREVHAPPVWKHYRGVRRRTWGKFAAEIRDPKKNGARIWLGTYETEEAAGLAYDRAAFKMRGSKAKLNFPHLIGSHAPPQPVRVTKALKRNSPEKRKNLADLLNRLAKNRSQILIQVLEMGLHANYVNVEQW

SEQ ID NO: 2069 - protein, 274 aa, Glycine max
MYGQSSYESDLALLDSIRRHLLGDSEEHKFGAPNVSSGNTPAYSRSSCFSRLYPCLSNDWGELPLKEDDSEDMLLYGVLRDAINAGWVPSLDASSPESFSSGFIPAVTVKSEPDLFPAPEPVYIPPAAQKAEPAVVPAKGKHYRGVRQRPWGKFAAEIRDPAKNGARVWLGTFETAEDAALAYDRAAYRMRGSRALLNFPLRINSGEPEPVRVTAKRYSPEPSSSSSDSASSTKRRKKVVGSTVTAQSGLRKEQVGSQVAHSAHVESSCWSTNA

SEQ ID NO: 2070 - protein, 169 aa, Glycine max
MPEMVDSNSTPSSSTGSRTVLLLLRVLTFVFLLIALILIAIVKQTDDETGVEIKFNDIYAYRYMISTIIIGFAYNLLQMALSIFTVVSGNRVLSGDGGYLFDFFGDKIISYLLISGSAAGFGVTVELGRGVPSNSFMDKANASASLLLIAFLFTAVASTFTSFALPKKD

SEQ ID NO: 2071 - protein, 385 aa, Glycine max
MECCKRVYEWLCNSKSYLIILSLQFGSAGMYLITMDALNKGMSHYVFVVYRNVIATIALGPFAFFLERKVRPKMTVRIFSEIMAVAFVEIILDQCFTFLGMKYTSASFASAVMNSVPSITFVLAIIFRLESMNLKELGCLAKVIGTAVSLGGAFLMALYKGPVVNIADSSASHVGRPDNVNDPSGSHWLIGACFLLIGCAGFSAFYILQAITLRKYPAEMSLATWVCFVGALQSSAVSFFMERNSPHVWSLAWDSRLVAYAYSGIVTSAIQFYVQGMVIKTTGPVFVTAFNPLRMIIVTALACIVLSEKLHLGSIIGGVVVVIGLYLVVWGKAKEQKHLMPPSPEKVILQRHQQLPVTVPISDDANDNNKPQLVIIEDRNIGPEH

SEQ ID NO: 2072 - protein, 152 aa, Glycine max
  misc_feature (20)..(20): Xaa can be any naturally occurring amino acid
  unsure (1)..(152): unsure at all Xaa locations
PKGVFGASKTYPHQAGNIRXKNGCIVIKGRPAEGVEVSTSMTVTRGHSKCHFVGSDIFIAKKLEDIVPSSHNCDVPHVICTDYQLIDIAEDGFLSLLTENGNTKDDLKLPTDESLLTQIKDGFAEGKDLVVSVMSAMGEEQICALKDIGPKN

SEQ ID NO: 2073 - protein, 464 aa, Glycine max
MNPDKFTHKTNEALVSAHEIATSNGHAQFTPLHLASSLISDKDGIFSQALSNAAGEESARAAERVINNALKKLPSQSPLPDEVPASNALVKAIRRAQTLQKKRGDTHLAVDQLILGLLEDSQIAELLNEAGVAASKVKSEVERLRGKEGKKVESATGDSTFQALKTYGRDLVEQAGKLDPVIGRDEEIRRVVRILSRRTKNNPVLIGEPGVGKTAVVEGLAQRIVKGDVPSNLCDVKLIALDMGALVAGAKYRGEFEERLKAVLKEVEDAEGKVILFIDEIHLVLGAGKGEGSMDAANLFKPMLARGQLRCIGATTLEEYRKYVEKDAAFERRFQQVYVAEPSVVDTISILRGLKERYEGHHGVRILDRALVVAAQLSSRYITGRHLPDKAIDLVDEACANVRVQLDSHPEEIDNLERKRMQLEVELHALEKEKDKASKARLVEVRKELDDLRDKLQPLMMKYK

SEQ ID NO: 2074 - protein, 507 aa, Glycine max
  misc_feature (450)..(450): Xaa can be any naturally occurring amino acid
  unsure (1)..(507): unsure at all Xaa locations
MWNPRALSAPLALLLLHSLLALISAQRSTWNTLSGGAPLVVARGGFSGMLPDSSDASYNLAVITSGPDVYIWCDVQLTKDGLGICQPDINLANSTYIASAYPNKTTSYLVNGVPTRGYFPLDYTLKDLSSVVLTQGVYSRSTLFDGNDFGILTVDDLVKLDQKPKGIWLNIQHDAFYAQHNLSMRSFVLSVSRSVVFSYISSPEVGFLRSIASRFNPKTTKLVFRFMGLSDVDPSTNRTYGSLLQNLTFIKTFASGILVPKGYIWPVDATLYLQSHTSLVSDAHKAGLEVFASDFVNDVPFSFNYSYDPLAEYLQFVDNGDFSVDGVLSDFPITPFEAIGCFAHLATNATKKDKTLVISKYGASGDYPACTDLAYNKAISDGVDVLDCPVQMSKDGTPFWLNFIDLIESTTVAQSSFSKFAMTIPEIKSGIGIFAFNLTWNDIKSLTPCXSILNPFAKYRLFRNPRSKNAGTLLALSDFLSLTKNQTSLSGVAIIVEVCASMPIHSL

SEQ ID NO: 2075 - protein, 342 aa, Glycine max
MGSLPVPAFPSKHCLDESSHIDEATLSALFKSQQSHLNFFFDHIDHSQTLAFTRALLNAAGTVFFTGVGKSGFVAHKISQTLVSLGVRSAFLSPVDALHGDIGILTNRDVLILLSKSGATEELLRLVPCARAKGALLIALTSVEGNALAAACDMSVHLPLQRELCPFNLAPVTSTAIQMVFGDTVAIALMEARNLTKEEYAANHPAGKIGKSLIFKVKDVMKKQDELPICRESDLIMDQLVELTTKGCGCLLVIGDGYRLIGTFTDGDLRRTLRASGEAIFKLTVGQMCNRNPRTIGPEAMAVDAMKKMEAPPSPVQFLPVINDESILIGIVTLHGLVSAGL

SEQ ID NO: 2076 - protein, 299 aa, Glycine max
MAAWLILLLLCMAMIQSTFASSSSSSCLPELPSFRYNLQSQCPISIPSNPPLQVDGNFVEGIFSDIKRTEYTSILFYASWCPFSRKMLPQFEILSSTFLQVEHLVLEKSSVLPSFFSKYGIHSLPAILLVNQTSKLRYHGPNNLLSLFEFYERKTGFAPSSNIVISPSTSTMSDENSTTNLFSLSMKETWSREPYLLFSVLFLCLRLLLFVLPKIVSHLRAFWISCIPHLNLQIFGETCQMMGRVLQVIDVRRIWNKLRLCKTRTFHEKARSARVWASSITSVSLGESSSARSSTQSLN

SEQ ID NO: 2077 - protein, 256 aa, Glycine max
  misc_feature (103)..(103): Xaa can be any naturally occurring amino acid
  unsure (1)..(256): unsure at all Xaa locations
RVHLSKHKGPIFSLKWNKKGDYLLTGSCDQTAIVWDVKAEEWKQQFEFHSGPTLDVDWRNNVSFATSSTDNMIYVCKIGETRPIKTFAGHQGEVNCVKWDPSXSLLASFSDDITAKIWSMKQDTYLHDLREHSKEIYTIRWSPTGPGTNNPNHKLVLASASFDSTVKLWDVELGKLMYSLDGHRHPVYSVAFSPNGDYLVSGSLDRSMHIWSLRDGKIVKTYTGNGGIFEVCWNKEGDKIAACFANNTVCVLDFRM

SEQ ID NO: 2078 - protein, 299 aa, Glycine max
MMVQKEDLGLSLSLNFPHHNTPNPQHPSLMSSSTHSSSPSGCNPQKPSWNEAFTSSDRNSDTCRGETRSFLRGIDVNRLPSAVDTEEETGVSSPNSTVSSVSGKRSEREEPNGEEHDMDRACSRGISDEEDAETARKKLRLSKDQSAILEESFKEHNTLNPKQKLALAKQLGLRPRQVEVWFQNRRARTKLKQTEVDCEVLKRCCENLTEENRRLQKEVQELRALKLSPQFYMQMTPPTTLTMCPSCERVAVPSSAVDAATRHHPMAQAQAQAQIRHRPIGPWASASPITHRPFDVFHH

SEQ ID NO: 2079 - protein, 207 aa, Glycine max
MEAICSKHLMTSLVIILASSLTLSQGAKKGSDSERPYQEASTVFIRTSCSSTTYPRLCYSSLVKHADLIQTNRVVLTGTALNVTLASAKSTSAMMSTLAKRQGLKPREVAAMKDCVEELADSVDELRRSISEMAQLTPSNFEMTMSDVETWVSAALTDESTCTDGFQETAAAGGSNVKNTVRGQILQVAQLTSNALALINQLANSHA

SEQ ID NO: 2080 - protein, 219 aa, Glycine max
MDSPSSFFNSPSSGFCSESSSPEAFSWEGYLPFNENDPEEMLLYGMIAGATTEEHSGERASSEESAAARKEKSYRGVRRRPWGKFAAEIRDSTRHGMRVWLGTFDSAEAAALAYDQAAFSMRGSAAILNFPAEIVRESLKEMNYAHDDSNNEEGCSPVVALKRKHSLRRKINVRKKKNNNNNSKLQSSTVDNAVVFEDLGPDYLEQLLMSSDHHIPTTF

SEQ ID NO: 2081 - protein, 103 aa, Glycine max
MSASGGRGSQEEEKKPSDQGAHINLKVKGQDGNEVFFRIKRSTQLKKLMNAYCDRQSVDFNSIAFLFDGRRLRAEQTPDELEMEDGDEIDAMLHQTGGGHKFL

SEQ ID NO: 2082 - protein, 478 aa, Glycine max
  misc_feature (249)..(249): Xaa can be any naturally occurring amino acid
  unsure (1)..(478): unsure at all Xaa locations
MVEYASRTNLSYCRDYGIEEDSIDDMPLKSDPECYDDDGHLKRTGTIWTTSSHIITAVVGSGVLSLAWAIAQMGWIAGPAVMILFSIVTLYTSSFLADCYRTGDPMFGKRNYTFMDAVSTILGGYSVTFCGIVQYLNLFGSAIGYTIAASLSMMAIQRSHCIIQSSDGENQCNISSIPYTICFGAVQIFFSQIPDFHNMWWLSIVASVMSFTYSIIGLVLGITKIAETGTFKGSLTGISIGTVTEAQKXWGVFQALGNIAFAYSYSFVLLEIQDTIKSPPSEVKTMKKAAKLSIAVTTTFYMLCGCVGYAAFGDSAPGNLLAGFGFHKLYWLVDIANAAIVIHLVGAYQVYAQPLFAFVEKETAKRWPKIDKEFQISIPGLQSYNQNIFSLVCRTVFVIITTVISTLLPFFNDILGVIGALGFWPLTVYFPVEMYILQKRIPKWSMRWISLELMSVVCLLVTIAAGLGSVVGVYLDLQ

SEQ ID NO: 2083 - protein, 216 aa, Glycine max
MQLQPTLSTLYLSLLLTITLTSPTLAAQSKPQDLVRSSCVHARYPRLCLRTLSNYPGPANTPLDVARAALRVSLAHTRRASKFLHALSHGGAAAMSKRQRSALRDCNEQISDSVDQLRRSLDELQHLRSETFKWQMSNALTWVSAALTNGDTCLDGFGGNARPDVKRRVTDVARVTSNALYMINRLGQSRTGKPKPKPKPRSRPQPRSASSTEKLN

SEQ ID NO: 2084 - protein, 159 aa, Glycine max
MDFRVMGLESPLFHTLQHMMDMSEDGAGDNKTHNAPTWSYVRDAKAMAATPADVKEYPNSYVFEIDMPGLKSGDIKVQVEDDNLLLICGERKRDEEKEGAKYLRMERRVGKLMRKFVLPENANTDAISAVCQDGVLSVTVQKLPPPEPKKPRTIQVKVA

SEQ ID NO: 2085 - protein, 865 aa, Glycine max
DKSRSCLNLLDLVSGDTLNFPRTPRSLPRVMTDPVIMSSGDGKQSNDDDLSFFSSEHHRKIIIVSNSLPLNAKRDKISGVWCFSYDEDSIFWQLKDGLSPEADVVYVGSLKADVDANEQEKVSLQLLEEFNCVPTFIPSDLYKQFHDGFCKQQLWPLFHYMLPMYPGNRRFDRSQWQAYVSANKIFADKVMEVLNPEDDYVWVHDYHLMVLPTFLRKRCSRVRLGFFLHSPFPSSEVYKTLPVRGEILKALLNADLVGFHTFDYARHFLFCCRRMLGLEHESKRGYIGLEYFGRTIFIKILPPGIHMGRLQSTLDHPSSSNKVREIHQQYKGKKLIVGVDDMDLFKGIGLKFLAMEQLLQQYPEQQGELILIQILNPPSSSDKDVEDAKEEAYISAKRINERFGLEGYEPIIIIDRHVPFYEKAAYYALAECCIVNAVRDGLNLVPYKYTVCRQGSSKLDEALEIASDSPRVSALVVSEFIGCSPSLSGAIRVNPWDIDAVAEALNLAITMPDGEKQLRHEKHYRYVSSHDVAYWARSFEQDLVFSCKDHYNNRCWGFGFGLNFRILSLSPSFRRLSIDHIVPAYERSSCRAIFLDYDGTVVPQASIVKPPSPEVISVLNNICSDVRNTVFIVSGRGKTSLSEWFDQCENLGIAAEHGYFIRWGKHTSWQMSHADTDFAWKKIAEPVMRSYMEATDGSSVETKESALVWHYRDADPDFGSWQAMELLDHLENVLANEPVVVKKGQHIIEVKPQGITKGSVAQEVLSSLTKKGKSPDFVLCIGDDRSDEDMFESILAKPYSTTSSSAPQIFACTVGQKPSKARYYLDDTVDVMALLEGLGATSGPKSRYSTETPFEKREVCFENDV

SEQ ID NO: 2086 - protein, 698 aa, Glycine max
  misc_feature (52)..(52): Xaa can be any naturally occurring amino acid
  unsure (1)..(698): unsure at all Xaa locations
MASENSLMRTPDFPQHFLHLEDSATHHMMPFCMHIAVLPIGRFMGSTLPTKXYRFLGWSLTFNPGPFNMKEHVIITIFANCGVSFGGGDAYSIGAITVMKAYYKQSLSFLCALFIVLTTQMLGYGWAGILRRYLVDPVEMWWPANLAQVSLFRALHEKEPKSKGLTRMQFFLIAMGASFLYYALPGYLFMVLTFFSWICWAWPHNITAQQIGSGYHGLGIGAFTLDWAGISAYHGSPLVSPWSSIVNVGIGFIMFIYIIVPVCYWKFNTFDAHKFPIFSNQLFTASGHKYDTTKILTPEYDLNVDAYNKYSKLYLSPLFALSIGSGFARFTATLTHVALFYGRDIWRQSRSAMSNAKLDIHGRLMKAYKQVPEWWFLSILFGSMALSLLMAFVWKTDVQLPWWGMLFAFGLAFIVTLPIGVIQATTNQQPGYDIIAQFMIGYVLPGQPIANLLFKIYGRISTVHALSFLSDLKLGHYMKIPPRCMYTAQLVGTLVAGVVNLAVAWWMLDSIKDICMDDKVHHDSPWTCPKYRVTFDASVIWGLIGPKRLFGPGGLYRNLVWLFLIGAVLPVPIWVLSKIFPEKKWIPLINIPVITYGFAGMPPATPANIASWLVTGMIFNYFVFRYNKRWWQKYNYVLSAALDAGTAFMGVLLWVLIFFALQNAGHNLKWWGSELDHCPLATCPTAPGIEVDGCPVFK

SEQ ID NO: 2087 - protein, 159 aa, Glycine max
MDFRVMGLEPPLFHTLQHMMDMSEDAAGENKTYSAPTRSYVRDAKAMAATPADVKEYPNSYVFEIDMPGLKSGDIKVQVEDDNVLLISGERKRDEEKEGVKYLRMERRVGKFMRKFVLPENANTDAISAVCQDGVLSVTVQKLPPPEPKKPRTIEVKVF

SEQ ID NO: 2088 - protein, 237 aa, Glycine max
MERSSEEEMLITKGPWTEQEDSLLFNYITVHGEGHWNSVARYTGLKRTGKSCRLRWLNYLRPNVRRGNITLQEQLLILDLHSRWGNRWSKIAEHLPGRTDNEIKNYWRTRVVKQAKQLKCDVNSKQFRDTLRFVWMPRMLERIRAQASSSAQAHQSSLISNSNTQAHSGLLSSALHAHAPSLSDSSASYNLMGADAGSCSSHSYYSDIAGNGFGGADLWTDQNICFLQHQLAHHDLF

SEQ ID NO: 2089 - protein, 240 aa, Glycine max
MERSSEEEMLITKGPWTEQEDSLLFNYITVHGEGHWNSLLSYSHSSRLKRTGKSCRLRWLNYLRPNVRRGNITLQEQLLILDLHSRWGNRWSKIAEHLPGRTDNEIKNYWRTRVVKQAKQLKCDVNSKQFRDTLRFVWMPRMLERIRAQASSSAQAHQSSLISNSNTQAHSGLLSSALHAHAPSLSDSSASYNLMGADAGSCSSHSYYSDIAGNGFGGADLWTDQNICFLQHQLAHHDLF

SEQ ID NO: 2090 - protein, 260 aa, Glycine max
MERSLSGSSEEEMSITKGPWTEEEDSVLFNYITVHGEGHWNSVARYTGLKRTGKSCRLRWLNYLRPNVRRGNITLEEQLLILDLHSRWGNRWSKIAEHLPGRTDNEIKNYWRTRVVKQAKQLKCEVNSKQFRDTLRFVWMPRMLERIQAQASSSSSSSSGQAHQTTLISNAQAHSDPCGVMTTNPSLLSEVSSSALDAHAPSLYDSSASYNLMGGGSSSSYSAEYCYYSDIAGNGFGGSDLWTDENICFLQQLLADHDLS

SEQ ID NO: 2091 - protein, 328 aa, Glycine max
MGATSMVRGGVTRFLPRREYLGCEKLQLGVGDVEFEFLDDGEIMSLVKSDESSGDEFHQSNEMELDDEDDGERVDGGSVEENRSFWDNQHQLLQNYLYRSTSIESRIRNVTKEAVQDIQNAEIVCSCSRQIISRSCRNCFIIEVSRRLQNSGYNSAICKTKWRSSPSNIPSGEHTFLDVIDSTSKKQEVRVIIELNFRAEFEMARASEEYNGLVSKLPEVYVGKIERLSNIIKVLCMGAKKCMKENKMHMGPWRKHKYMQAKWLGSCKRNTSTTTSSLNSMMGYSEVVMPKPKPRASLLTVDLMLENNNFKTEMLKLPNMHCTAVEVL

SEQ ID NO: 2092 - protein, 161 aa, Glycine max
MATSLSNMFLKGIAARSLSRPLNGLFYCTRYSTTVSNDSDTHDDFKPANKLENSGISLSNVIEQDVKDNPVMVYMKGVPDFPQCGFSSLAVRVLKHYDVPISARNILDDPELKNAVKAFSNWPTFPQIFIKGEFIGGSDIVLNMHQTGELKEKLKDITSKQ

SEQ ID NO: 2093 - protein, 268 aa, Glycine max
GCEKTTEGEALSVSVRRQTIEGARRNLNRMRQEIDKFKATDAGRLRAEYNRLVEGLALRGDLPATDAWLANPALPDDILKEAVPGNIRRAEHFIHVLRRLVQYLEGRVDTENVEKESPVSFVVSILNHAGIDQKALKFCYDRLHSLMMTLEITDTDEFLHIQTICDFATLVGTYARGFSIYSSFAKEGNLSDLFAKGEAFSTLFNVIGIGVGIQLASTICASMQGKLVAGPLLSIIHLYSVSEEMRATPINTLNPRRTAMVVADFLKV

SEQ ID NO: 2094 - protein, 193 aa, Glycine max
MAPRDSRATALIGPGPSLSPAHKEIRYRGVRKRPWGRYAAEIRDPGKKTRVWLGTFDTAEEAARAYDTAAREFRGAKAKTNFPTPSELILNNNNINARSPSQTSTLDSSSPPPPPPLDLTLTPLSSAVFPVARPVLFFDAFARADTMVAVSRRETCGFERPAADFRRGDSDSDYNRRILLDLDLNVPPLPEVA

SEQ ID NO: 2095 - protein, 569 aa, Glycine max
MCGILAVLGCVDNSQTKRARIIELSRRLRHRGPDWSGIHCYEDCYLAHQRLAIVDPTSGDQPLYNEDKTVIVTVNGEIYNHKQLRQKLSSHQFRTGSDCEVIAHLYEEHGEEFVNMLDGMFAFILLDTRDKSFIAARDAIGITPLYLGWGHDGSTWFASEMKALSDDCERFISFPPGHIYSSKQGGLRRWYNPPWFSEDIPSTPYDPTLLRETFERAVVKRMMTDVPFGVLLSGGLDSSLVAAVVNRYLAESESARQWGSQLHTFCIGLKGSPDLKAAKEVADYLGTRHHELYFTVQEGIDALEEVIYHIETYDVTTIRASTAMFLMSRKIKALGVKMVLSGEGSDEIFGGYLYFHKAPNKKEFHEETCRKIKALHLYDCLRANKSTAAWGVEARVPFLDKEFINVAMSIDPEWKMIRPDLGRIEKWVLRNAFDDDKNPYLPKHILYRQKEQFSDGVGYSWIDGLKDHANKQVTDATMMAANFIYPENTPTTKEGYLYRTIFEKFFPKNAAKATVPGGPSVACSTAKAVEWDAAWSKNLDPSGRAALGIHDAAYDAVDTKIDEPKNGTL

SEQ ID NO: 2096 - protein, 334 aa, Glycine max
MSSGSVRRVSRQDIQLVQNLIERCLQLYMSQKEVVETLLAQAKIEPGFTELVWQKLEEENEEFFKAYYARLVLKQQIMQFNKLLDQQVQLMQLHSSAVASLPMSNGSHIPAVTSLPNSNGSHIPAIPENPACYTSDRTQTSLKPENMQHAVDSRLSNVFNNGGSSLHTSMPAAVDMSVHGNRINGPASVLSAQSANMGLIQGMNGGGMIKSEPGYSGCSPYMFSTEGNVLETRPTIGGASVTSFTNVESNSHSLNEAVLDPDTSSFGFLGQIPRNFSLSDLTADFSQSSDILETYSRSPFLATDNENFLDRGEQDNNRLDSISEGLSYEDFGSE

SEQ ID NO: 2097 - protein, 594 aa, Glycine max
MATATSQTLRFQSPSLSLSSKIPLSAFSVSLRPQRRASRHLVLVVSAGLDAKPTVLVAEKLGDAGLKLLKDFANVDCSYNLSTEELCTKISLCDALIVRSGTKVSREVFESSAGRLKVVGRAGVGIDNVDLAAATEHGCLVVNAPTANTVAAAEHGIALLAAMARNVAQADASVKAGKWQRNKYVGVSLVGKTLAVLGFGKVGSEVARRAKGLGMNVIAHDPYAPADRARAIGVELVNFDEAIATADFISLHMPLTAATSKILNDETFAKMKKGVRIVNVARGGVIDEDALVRALDSGIVAQAALDVFTEEPPPKDSKLILHELVTATPHLGASTMEAQEGVAIEIAEAVVGALKGELAATAVNAPMVPSEVLTELKPFIDLAEKLGRLAVQLVAGGSGVKTVKVTYATSRGPDDLDTRLLRAMITKGLIEPISSVFVNLVNADFTAKQRGIRITEEKVILDGSPENPLEFVQVQIANVESRFASAISDSGEIKVEGRVKDGIPHLTKVGSFDVDVSLEGSIILCRQVDQPGMIGKVGSVLGEENVNVSFMSVGRIAPRKQAVMAIGVDEQPSKESLKKIGDIPAVEEFVFLKL

SEQ ID NO: 2098 - protein, 175 aa, Glycine max
VVAKSTCQGTLYPDLCVSTLATFPDLATKSVPQVISPGVRLELEPRQKGSYNCSGLKKMLKNLNPLDQRALDDCLKLFEDTNVELKATIDDLSKSTIGSKRHHDLQTMLSGAMTNLYTCLDGFAYSKGRVRDRIEKKLLEISHHVSNSMAMLNKVPGVKKLTTSESVVFPEYGNM

SEQ ID NO: 2099 - protein, 318 aa, Glycine max
MNFNCTANKEQKKTVDQSILLCCKFFVSESRNNATLNAIERAARSNPETVIVNMFHDRAYNRARYDLVSYVLHDCTGNPIYSPLHQTVIAMAEATFNAVNLEFHEGAHPRLGAVDDIVFHPLGHASLDEAAWLAKAVAADIGNRFSVPVFLYAAAHPTGKELDAIRRELGYYRPNSRGSQWAGWAMPETLPLSPDEGPNVVSRAKGITMIGARPWVTLYNVPILCTDVSVARRIARKVSARGGGLPTVQTIALVHEDSTEIACMLLDSKQVGADRVQNRVEMLAAQEGLDIEQGYFTDISPEMIVEKYMKLINSANKS

SEQ ID NO: 2100 - protein, 395 aa, Glycine max
MDSHSHIIAWGSGEDGQLGIGSNEEKEWVCLVKALQPHRIRSVVAGSRNSLAIADDGKLFTWGWNQRATLGHPAETKSENKTENTPSQVKALSSVKIVQAAIGGWHCLAVDDQGRAYAWGGNEYGQCGEEPERKDGTGRPLRRDIEIPQRCAPKLVVRQVAAGGTHSVVLTREGHVWTWGQPWPPGDIKQISVPVRVQGLENVRLIAVGAFHNLALQEDGTLWAWGNNEYGQLGTGDTQPRSQPIRVQGLSDLTLVDIAAGGWHSTALTDEGEVYGWGRGEHGRLGFGDSDKSSKMVPQKVQLLAGEDIVQVSCGGTHSVALTRDGHMFSFGRGDHGRLGYGRKVTTGQPMEVPIDLPPPQDPSGTATEGHWIAKLVACGGRHTLAIVEWKSNES

SEQ ID NO: 2101 - protein, 256 aa, Glycine max
LKTRPFLFRKASSLRSLAVPPFPNANASSPVFTVRASVFAQWPHLRYFSSEKKDDHSDEDDDGDEDYDDEEEDYVDDDDDDDVPVSRGKKVYTAEEKEAEAAAIGYRVVGPLQKDEDSVFKPYEPVFAVVQIGSHQFKVSNRDSIFTERLKFCEVNDKLILNKVLLLGSASQTIVGRPIVPDAAVHAVVEEHALDAKVIIFKKKRRKNYRRTKGHRQELTKLRITDIQGIEKPQNVLPEKPPKPAKKEKEKVAVTA

SEQ ID NO: 2102 - protein, 304 aa, Glycine max
MGSKPVVDFENVSGSRMTDRPFFQALEKEENCDEDYEGCFHQPGKKRRLTSEQVQFLERNFEVENKLEPERKVQLAKELGLQPRQVAIWFQNRRARFKTKQLEKDYGVLKASYDRLKSDYESLVQENDKLKAEVNSLESKLILRDKEKEENSDDKSSPDDAVNSSSPHNNKEPMDLLIISKNATTTTTSENGTKVLSPLPLPIMVTCCKQEDANSAKSDVLDSDSPHCTSFVEPADSSHAFEPEDHSEDFSQDEEDNLSENLLMTFPSSCCLPKVEEHCYDGPPENSCNFGFQVEDQTFCFWPY

SEQ ID NO: 2103 - protein, 162 aa, Glycine max
MTTSLSSILFKGIAARSFTAPLTRSCYHGMRYFATVSNDPDTHDDFKPANKLENSNISLADVIEQDVKDNPVMIYMKGVPDFPQCGFSSLAVRVLQQYDVPLSARNILEDPELKNAVKAFSNWPTFPQVFIKGEFIGGSDIVLNMHQTGDLKEKLKDITSKQ

SEQ ID NO: 2104 - protein, 209 aa, Glycine max
MKPFLSNHTDSMYNCSQVGCSHPMNQQMVPQMLGLASTRIALPVELAEDGPIYVNAKQYHGILRRRQSRAKLKAQNKLIKSRKPYLHESRHRHALKRVRGTGGRFLSAKQLQQFNAELVTDAHSGPGPVNVYQKKDASEAESHPSRTGKNASITFTAISGLTSMSGNSVSFRRPEHNFLGNSPNIGGSSQCSGGLTFGGGARQCTSVGR

SEQ ID NO: 2105 - protein, 213 aa, Glycine max; identical to SEQ ID NO: 431

SEQ ID NO: 2106 - protein, 375 aa, Glycine max
MGRAPCCDKNGLKKGPWTTEEDQKLIDYIQKHGYGNWRTLPKNAGLQRCGKSCRLRWTNYLRPDIKRGRFSFEEEETIIQLHSILGNKWSAIASRLPGRTDNEIKNYWNTHIRKRLLRMGIDPVTHSPRLDLLDINSILNASFYGSSQINIQRLLGMHQYVVNPELLKLASSLFSTSQQHNHDPDDMCAQKGQQNQLCDPQIQNHVPHFVQYQDPIQEVPACSTMFSTPCFSMPLTQPQLVEPNNVDQYTSSTFTDFSYQQLSDWHKDGIALSTLTDDYMPQLSSYNNYYSSNSHQNLMYPQVSEPSTFHSNNSNHQNFSFASVLSTPSSSPTPLNSNSTIINGSNTEDERDQSYDSSNMLKFEIPDILDVNEFM

SEQ ID NO: 2107 - protein, 329 aa, Glycine max
MAASGSSFSNITSFLRNQQPSSQPLDSSLFLSAPSIFVSGSRSMVSFEAEGGKGCNGSFFRAFDMDDNGDECMDEYFHKPEKKRRLSMNQVQFLEKSFEEENKLEPERKTKLAKDLGLRPRQVAIWFQNRRARWKTKTLEKDYEALHASFENLKSNYDSLLKEKDNLKAEVASLNEKVLARGKQEGHMKQQAESEEETKRLLHLQEQEPPQRLLLESVSEGEGSKVSSVVGGCKQEDISSARSDILDSDSPHYTDGVNSALLEHGDSSYVFEHDQSDMSQDEEDNLSKSLYPSYLFPKLEEDVDYSDPPESSCNFGFSEEDHALWTWAY

SEQ ID NO: 2108 - protein, 450 aa, Glycine max
MAKTLISSQSFIGTPLPSLPRHHLPHRTRLVATKVLVSLHEIPPIHSISRNIDFAGIVTRAEGLLYTLADAAVAADPAVAADSAASTTDAAVQKSGGWFGFISEAMEFVLKVLKDGLSAVHVPYAYGFAIILLTVIVKAATLPLTKQQVESTLAMQNLQPKIKAIQDRYAGNQERIQLETSRLYRQAGVNPLAGCLPTLATIPVWIGLYQALSNVANEGLLTEGFLWIPSLGGPTTIAARQSGAGISWLFPFVDGHPPLGWQDTAAYLVLPILLVVSQYVSMEIMKPPQTDPSQKNQLLILKFLPLMIGYFSLSVPSGLTIYWFINNVLSTAQQVWLRKLGGAKPVVNENAGGIITAGRAKRSDSQLARNGERFKQLKEEEKKKKVSKALPVEEVQSLASVSASDDGSDTESDNKGQEDAEEAYASKVGEEVQNYSRERRSKRSKRKRAV

SEQ ID NO: 2109 - protein, 345 aa, Glycine max
MASGKLYAGSNMSLLLQNERLPCSSEVLESLWAQTSNPASFQGSKPVVDFENVSGSRMTDRPFFQALEKEENCDEDYEGCFHQPGKKRRLTSEQVQFLERNFEVENKLEPERKVQLAKELGLQPRQVAIWFQNRRARFKTKQLEKDYGVLKASYDRLKGDYESLVQENDKLKAEVNSLESKLILRDKEKEENSDDKSSPDDAVNSSPHNNKEPIMDLLISKNATTSENGTEVSTLPLPIMVTCKQEDANSAKSDVLDSDSPHCTDYGNHPSSFVEPADSSHAFEPEDHSEDFSQDEEDNLSENFLTLPSSCCLPKVEEPCYDDPPENSCNFGFHVEDQTFCFWPY

SEQ ID NO: 2110 - protein, 183 aa, Glycine max
DLSITGLRRSGKSCRLRWLNYLRPDVRRGNITLQEQILILDLHSRWGNRWSKIAQQLPGRTDNEIKNYWRTRVIKQAKQLKCDVNSKQFRDTLRYVWMPRLLERLQPTSQALEPNQSGLVLHASSSLLPSNSDHSIERGSDLWPGFNNQMLLEQGSGGDLLESLWDDDNMCFLQQLSYDLQMK

SEQ ID NO: 2111 - protein, 305 aa, Glycine max
  misc_feature (19)..(19): Xaa can be any naturally occurring amino acid
  unsure (1)..(305): unsure at all Xaa locations
MASSNLFFDDIRSKVDVDXPPQNDESTDVGELVNDPAQTALKPNGTVSSSVRELLECPVCLNAMYPPIHQCSNGHTICSGCKPRVHNRCPTCRHELGNIRCLALEKVAASLELPCKYQGFGCIGIYPYYSKLKHESQCAHRPYNCPYAGSECSIMGDIPYLVAHLKDDHKVDMHNGSTFNHRYVKSNPQEVENATWMLTVFSCFGQYFCLHFEAFQLGMAPVYIAFLRFMGDDNEAKNYSYSLEVGGNGRKMIWQGVPRSIRDSHRKVRDSFDGLIIQRNMALFFSGGDRKELKLRVTGRIWKEQ

SEQ ID NO: 2112 - protein, 228 aa, Glycine max; identical to SEQ ID NO: 430

SEQ ID NO: 2113 - protein, 156 aa, Glycine max
  misc_feature (123)..(124): Xaa can be any naturally occurring amino acid
  unsure (1)..(156): unsure at all Xaa locations
LEPNTSSTCFFIPLPDPKGYMKPFLFLNLPNTEFNSSQVDCNHSMAHSSYPYGDPIFAYGPQAISHPQMIPPMLGLASTRVALPLDLAEDGPIYVNAKQYHGILRRRQSRAKLEAQNKLIKNXXKPYLHESRHRHALNRVRGSGGRFLSTNSLHSL

SEQ ID NO: 2114 - protein, 230 aa, Glycine max
MTSGFGESTRASAPSPSCSGNSSNDAGDFECNICFDLAQDPVITLCGHLFCWPCLYRWLHHHSHSQECPVCKALVQEEKLVPLYGRGKTQTDPRTKLYPGMEIPHRPSGQRPQTMPPPPPPEVNPFGSYGFGLMGGFIPMATARFGNFTLSTAFGGFIPSLLNIHFHGFQDATVYGTTSGYPFGFNGFHGGNARGFMQATGQVQRQEDNVLKNLLMLIGFLVLLTVIFVW

SEQ ID NO: 2115 - protein, 453 aa, Glycine max
MVMAKLKHPSSFVTLVALLLAVSLFVAPTSSTSRKTILKHHPYPTKGFRVMLRHVDSGKNLTKLERVQHGIKRGKSRLQRLNAMVLAASTLDSEDQLEAPIHAGNGEYLMELAIGTPPVSYPAVLDTGSDLIWTQCKPCTQCYKQPTPIFDPKKSSSFSKVSCGSSLCSAVPSSTCSDGCEYVYSYGDYSMTQGVLATETFTFGKSKNKVSVHNIGFGCGEDNEGDGFEQASGLVGLGRGPLSLVSQLKEQRFSYCLTPIDDTKESVLLLGSLGKVKDAKEVVTTPLLKNPLQPSFYYLSLEAISVGDTRLSIEKSTFEVGDDGNGGVIIDSGTTITYVQQKAYEALKKEFISQTKLALDKTSSTGLDLCFSLPSGSTQVEIPKLVFHFKGGDLELPAENYMIGDSNLGVACLAMGASSGMSIFGNVQQQNILVNHDLEKETISFVPTSCDQL

SEQ ID NO: 2116 - protein, 312 aa, Glycine max
MSTSKSVSSSSEDDNELRRGPWTLEEDNLLSQYIFNHGEGRWNLLAKRSGLKRTGKSCRLRWLNYLKPDVKRGNLTPQEQLIILELHSKWGNRWSKIAQHLPGRTDNEIKNYWRTRIQKQARHLKIYTDSREFQELVRRFWMPRLLQKAKESSSSNMSIQNQAIPMPFDYVSQHLTVGTIPPWQGPCMNEAGPTYMDQHEQNSDSEHNNGSCISLSESANIPKVPQHFGHTTITQFHALNTNDFGTFTYEGYNVNNNVYEMDNFKTTTTWVAEDAQYPIGDCQMVGSNWVNNDFACNMWNMDELWQFSKLQK

SEQ ID NO: 2117 - protein, 566 aa, Glycine max
MVGDFQVTMEKQSSFRASTMEKQKSFRGFMEKQKSFRIVMEKQLSFMGSERKKNKESPGKRGDLPIHLAARAGNLSRVKEIIQNYSNNETKDLLAKQNLEGETPLYVASENGHALVVSEILKYLDLQTASIAAKNGYDPFHIAAKQGHLEVLRELLHSFPNLAMTTDLSNSTALHTAATQGHIDVVNLLLESDSNLAKIARNNGKTVLHSAARMGHLEVVKALLNKDRSTGFRTDKKGQTALHMAVKGQNEEILLELVKPDPAVLSLEDNKGNTALHIATKKGRTQNVRCLLSMECININATNKAGETPLDVAEKFGSPELVSILRDAGAANSTDQRKPPNPSKQLKQTVSDIKHDVQSQLQQTRQTGMRVQKIAKKLKKLHISGLNNAINSATVVAVLIATVAFAAIFTVPGQYVEDKTHGFSLGQANIANNAAFLIFFVFDSLALFISLAVVVVQTSVVVIEQKAKKQLVFVINKLMWMACLFISIAFISLTYVVVGSHSRWLAIYATVIGSLIMLSTIGSMCYCVILHRMEETKLRAESRSFSMSHASDQEILNSEYKRMYAL

SEQ ID NO: 2118 - protein, 478 aa, Glycine max
MAQLKASPACSTRATAPSFHTTGHLYHHFWKAKPSSFKELGLRTSVGANKLQVIKAAARSDTEVVSETTKAGGLRGKLNKVVLAYSGGLDTSVIVPWLRENYGCEVVCFTADVGQGIKELEGLEQKAKASGACQLVVKDLKEEFVKDYIFPCLRAGAVYERKYLLGTSMARPVIAKAMVDVAKEVGADAVSHGCTGKGNDQACVRFELTFFALNPKLNVVAPWREWDITGREDAIEYAKKHNIPVPVTKKSIYSRDRNLWHLSHEGDILEDPANEPKKDMYMMSVDAEDAPDEAEYVEIEIESGLPVSVNGKRLSPATLLTELNEIGGRHGIGRIDMVENRLVGMKSRGVYETPGGTILFAAARELEFLTLDRETIQVKDSLALKYAELVYAGRWFDPLRESMDAFMQKITETTTGSVTLKLYKGSVTVTSRKSPFSLYRQDISSFESGQIYDQADAAGFIRLYGLPMRVRAMLEQGI

SEQ ID NO: 2119 - protein, 581 aa, Glycine max
MEYGRLGPSDPGGSSRLNPPRSSGRKNIVFLSLFAVLLIAASAVTAVAVRSRTKNTGGDGTSLGKFTQAISRTCSKTRFKMLCMKSLLDFPGSQGASEKDLVHISFNVTLQHFSKALYSSATISYTAMDPRVRAAYHDCLELLDDSVDALARSLNTVSVGAVGSANDDVLTWLSAALTNQDTCAEGFADAAGTVKDQMANNLKDLSELVSNCLAIFSGAGAGDDFAGVPIQNRRRLMAMREDNFPTWLNGRDRRLLSLPLSQIQADIVVSKDGNGTVKTIAEAIKKVPEYSSRRIIIYIRAGRYEEDNLKLGRKKTNVMFIGDGKGKTVITGGRNYYQNLTTFHTASFAASGSGFIAKDMTFENYAGPGRHQAVALRVGADHAVVYRCNIIGYQDTMYVHSNRQFYRECDIYGTVDFIFGNAAVVFQNCTLWARKPMAQQKNTITAQNRKDPNQNTGISIHNCRIMATPDLEASKGSYPTYLGRPWKLYARTVFMLSYIGDHVHPRGWLEWNTSSFALDTCYYGEYMNYGPGSALGQRVNWAGYRAINSTVEASRFTVGQFISGSSWLPSTGVAFIAGLST

SEQ ID NO: 2120 - protein, 150 aa, Glycine max
MQDTIERYRRHNRSAQTVNRSDEQNMQHLKQETANLMKKIELLEASKRKLLGEGLGSCSLEELQQIEQQLERSVSNVRARKNQVYKEQIDQLKEKERALYAENARLCEQYGGIQPQPATKDPKEIQPYAESSPSSEVETELFIGLLRSSY

SEQ ID NO: 2121 - protein, 150 aa, Glycine max
NLSLKLSSSSSSCCITKLFPISRINVSPTSVLVRASSSSSFGSRLEDTIKKTVAENPVVVYSKTWCTYSSEVKILFKKLGVDPLVFELDEMGPQGPQLQKVLERITGQHTVPNVFIGGKHIGGCTDTLKLYRKGELEPLLSEANAKKTES

SEQ ID NO: 2122 - protein, 204 aa, Glycine max
MDKKLGNTSHDPEVRKGPWTMEEDLILITYIANHGEGVWNSLAKAAGLKRTGKSCRLRWLNYLRPDVRRGNITPEEQLLIMELHAKWGNRWSKIAKHLPGRTDNEIKNYWRTRIQKHLKQASSSFQQQSSNSEIIYHPQACTSQVSTMAQPIETYSPPSYQGMLDPFSIQFPTNPHHSSCCTNDDDNNNYWSMEDIWSMQLANY

SEQ ID NO: 2123 - protein, 176 aa, Glycine max
MPSGSRDPLVVGGVIGDVLDPFEYSIPMRVTYNNRDVSNGCEFKPSQVVNQPRVNIGGDDLRNFYTLIAVDPDAPSPSDPNLREYLHWLVTDIPATTGASFGHEVVTYESPRPMMGIHRLVFVLFRQLGRETVYAPGWRQNFNTKEFAELYNLGLPVAAVYFNIQRESGSGGRRLY

SEQ ID NO: 2124 - protein, 389 aa, Glycine max
RAGSFFNWFYFSINIGALVSSTFIVWIQENAGWGLGFGIPALFMALAIGSFFLGTPLYRFQKPGGSPITRMCQVVVASVWKRNLVVPEDSNLLYETPDKSSAIEGSRKLGHSDELKCLDRAAVVSDAESKSGDYSNQWRLCTVTQVEELKILIRMFPVWATGIVFAAVYAQMSTLFVEQGTMMNTNFGSFRIPPASLSSFDVISVIFWVPVYDRIIVPIARKFTGKERGFSELQRMGIGLFISVLCMSAAAIVEIVRLKVAKEHGLVDEPVPVPLNIFWQIPQYFLLGAAEVFTFVGQLEFFYDQSPDAMRSLCSALSLLTTSLGNYLSSFILTVVTYFTTQGGNPGWIPDNLNKGHLDYFFWLLAGLSFLNTFVYIVAAKRYKQKKSA

SEQ ID NO: 2125 - protein, 374 aa, Glycine max
MLQALMNLFSLCWKPFGRDADRIDSIGVIGREGKDGLLWFRDFGKYGSGDFSMAVVQANQVLEDQSQIESGPLGTFVGIYDGHGGPDASRYVCDHLFRHFQAISAESRGVVTTETIERAFRQTEEGYMALVSGSWNARPHIASAGTCCLVGVIFQQTLFVANAGDSRVVLGKKVGNTGGMAAIQLSTEHNANLEAVRQELKELHPHDPQIVVLKHGVWRVKGIIQVSRSIGDVYLKHAQFNREPLNAKFRLPEPMNMPILSANPTILSHALQPNDSFLIFASDGLWEHLSNEKAVDIVNSNPHAGSAKRLIKAALHEAARKREMRYSDLRKIDKKVRRHFHDDISVIVLFLNHDLISRGTVLDPTLSIRSALDH

SEQ ID NO: 2126 - protein, 344 aa, Glycine max
MADSVSVDMEAISPPPEEHVVRTRHGCVSVAVYGDQDKPALITYPDLALNYVSCFQGLLFCPEACSLLLHNFCIYHISPPGHELGAAAIDPDDPILSADDLVDQIAEVLNYFGHSTVMCMGVTAGAYILTLFAMKYRHRVLGLILVSPLCKAPSWTEWLYNKVMSNLLYFYGMCGVVKEILLKRYFSKEVRGSDYLPESDIVQACQRSLDERQSLNVWRFLEAINGRYDISEGLRKLECRSLIFVGDMSCFHGEALHMTSKLDRRLSALVEVQACGSMVTEEQPHAMLIPMEYFLMGYGLYRPSKLSVSPRSPLSPSCISPELYSPESMGLKLKPIKTRISEEI

SEQ ID NO: 2127 - protein, 344 aa, Glycine max
MADSVSVDMEAISPPPEEHIIRTRHGRVSVAVYGDQDKPALITYPDLALNYVSCFQGLLFCPEACSLLLHNFCIYHISPPGHELGAAAIDPDDPILSADDLADQIAEVLNYFGHSTVMCMGVTAGAYILTLFAMKYRHRVLGLVLVSPLCKAPSWTEWLYNKVMSNLLYFYGMCGVVKEILLKRYFSKEVRGSDYLSESDVVQACQRSLDERQSLNVWRFLEAINGRYDISEGLRKLQCRSLIFVGDMSPFHAEALHMTSKLDRRLSALVEVQACGSMVTEEQPHAMLIPMEYFLMGYGLYRPSKLSVSPRSPLSPSCISPELYSPESMGLKLKPIKTRISVEI

SEQ ID NO: 2128 - protein, 352 aa, Glycine max
  misc_feature (90)..(90): Xaa can be any naturally occurring amino acid
  unsure (1)..(352): unsure at all Xaa locations
MADSVSVDMEAISPPPEEHIIRTRHGRVSVAVYGDQDKPALITYPDLALNYVSCFQGLLFCPEACSLLLHNFCIYHISPPGHEVSNFMSXILGAAAIDPDDPILSADDLADQIAEVLNYFGHSTVMCMGVTAGAYILTLFAMKYRHRVLGLVLVSPLCKAPSWTEWLYNKVMSNLLYFYGMCGVVKEILLKRYFSKEVRGSDYLSESDVVQACQRSLDERQSLNVWRFLEAINGRYDISEGLRKLQCRSLIFVGDMSPFHAEALHMTSKLDRRLSALVEVQACGSMVTEEQPHAMLIPMEYFLMGYGLYRPSKLSVSPRSPLSPSCISPELYSPESMGLKLKPIKTRISVEI

SEQ ID NO: 2129 - protein, 353 aa, Glycine max
  misc_feature (92)..(92): Xaa can be any naturally occurring amino acid
  unsure (1)..(353): unsure at all Xaa locations
MADSTSSDSLSLDIDSLSPSPQEHIIRTRHGSVSVAVYGDQDKPALITYPDLALNYVSCFQGLLFCPEAYYLLLHNFCIYHISPPGHESYCXLGAAEIDPDYPILSVDDLADQIAEVLNFFGLSAVMCMGVTAGAYILTLFAMKYRQRVLGLILVSPLCKEPSWTEWLYNKVVSNLLYFYGMCGVVKEILLKRYFSKEIRGGTQLPESDIVKSCRRLLDERQSLNVWRFLEAINGRPDISEGLRKLHCRSLIFVGDMSPFHSEAVHMTSKLDRRFSALVEVQACGSMVTEEQPHAMLIPMEYFLMGYGLYKPSKLSVSPRSPLSPSCISPELYSPESMGLKLKPIKTRISLEI

SEQ ID NO: 2130 - protein, 228 aa, Glycine max
GMARMAALMASTYKAYLGVGLGPLEFLTKFRIPHPGRVGGRFFIDKMMPLMLNWVLGGNSSKLEGRPVCCRLSDKANDQLHRWFEDNDALERAINGEWILLPCGDEAGPTKPICLTQDEMKPCIIGSMQQKDHPGSSIIIPLPQVSQMHARINYKDGAFFLTDLRSLHGTWITDNEGRRYRVPPNYPARVRPSDVVEFGSDKASYRVKVTRSASSESEKEGTKLYQKV

SEQ ID NO: 2131 - protein, 675 aa, Glycine max
  misc_feature (297)..(297): Xaa can be any naturally occurring amino acid
  unsure (1)..(675): unsure at all Xaa locations
MATTLCYNSLNPSTTVFSRTHFSVPLNKELPLDASPFVVGYNCGVGCRTRKQRKKVMHVKCAVVEAPPGVSPSAKDGNGTTPSKKQLRILVAGGGIGGLVFALAAKRKGFEVMVFEKDLSAIRGEGQYRGPIQIQSNALAALEAIDSEVADEVMRVGCITGDRINGLVDGVSGSWYVKFDTFTPAVERGLPVTRVISRMVLQEILARAVGEDIIMNASNVVNFVDDGNKVTVELENGQKYEGDVLVGADGIWSKVRKQLFGLTEAVYSGYTCYTGIADFVPADIETVGYRVFLGHKXYFVSSDVGAGKMQWYAFHKEPPGGVDEPNGKKERLLRIFEGWCDNAVDLILATEEEAILRRDIYDRIPTLTWGKGRVTLLGDSVHAMQPNMGQGGCMAIEDSYQLAWELENAWEQSIKSGSPIDIDSSLRSYERERRLRVAIIHGMARMAALMASTYKAYLGVGLGPLEFLTKFRIPHPGRVGGRFFVDIMMPSMLSWVLGGNSDKLEGRPLSCRLTDKANDQLRRWFEDDEALERAINGEWILLPHGDGTGLSKPISLSRNEMKPFIIGSAPMQDNSGSSVTISSPQVSPTHARINYKDGAFFLIDLRSEHGTWIIDNEGKQYRVPPNYPARIRPSDVIQFGSEKQPSYVQVSFRVKVTSSVPRVSENESTLALQGV

SEQ ID NO: 2132 - protein, 206 aa, Glycine max
MDKKPCNSSSHDPEVRKGPWTMEEDLILINYIANHGEGVWNSLAKASGLKRTGKSCRLRWLNYLRPDVRRGNITPEEQLLIIELHAKWGNRWSKIAKHLPGRTDNEIKNFWRTRIQKHIKQAETSQQHGNSENNDHQASTSTSKVSTMAHPNETFSPPSYQGTFEPFQPQFPTITDQSSCCTTTNDNNNYWSIEDIWSSMQLLNGD

SEQ ID NO: 2133 - protein, 150 aa, Glycine max
MRGPPCAWGASSLFRAWRKRKMMRLRWSLVVTVTFAVLLFWIGSLQVQASNSVSAFVQNAIYSNRIAVFSKSYCPYCLRAKRLLAELNEKPFVVELDLRDDGYQIQSVLLDLIGRRTVPQVFVNGKHIGGSDDLSAAVQSGELQKLLSAS

SEQ ID NO: 2134 - protein, 439 aa, Glycine max
MKFTPSSKFLGFSNHFHSLLAPSFSPTPKFSSSFSATMSTLSTQNDTVTHKTQQPLQIAKRLEKFQTTIFTQMSLLAIKHGAINLGQGFPNFDGPEFVKEAAIQAIRDGKNQYARGYGVPDLNIAIAERFKKDTGLVVDPEKEITVTSGCTEAIAATMIGLINPGDEVIMFAPFYDSYEATLSMAGAKVKGITLRPPDFAVPLEELKSTISKNTRAILINTPHNPTGKMFTREELNCIASLCIENDVLVFTDEVYDKLAFDMEHISMASLPGMFERTVTLNSLGKTFSLTGWKIGWAIAPPHLSWGVRQAHAFLTFATAHPFQCAAAAALRAPDSYYVELKRDYMAKRAILIEGLKAVGFKVFPSSGTYFVVVDHTPFGLENDVAFCEYLVKEVGVVAIPTSVFYLNPEEGKNLVRFTFCKDEETIRSAVERMKAKLRK

SEQ ID NO: 2135 - protein, 506 aa, Glycine max
  misc_feature (482)..(482): Xaa can be any naturally occurring amino acid
  unsure (1)..(506): unsure at all Xaa locations
MATPLAYQEHLPAAPSWLNKGDNAWQLTAATLVGLQSMPGLVILYASIVKKKWAVNSAFMALYAFAAVLICWVLVCYRMAFGEELLPFWGKGAPALGQKFLTKRAVVNETIHHFHNGTVESPPEEPFYPMASLVYFQFTFAAITLILLAGSVLGRMNIKAWMAFVPLWLIFSYTVGAFSLWGGGFLYQWGVIDYSGGYVIHLSSGIAGLTAAYWVGPRLKSDRERFPPNNVLLMLAGAGLLWMGWSGFNGGAPYAANIASSIAVLNTNICAATSLLVWTTLDVIFFGKPSVIGAVQGMMTGLVCITPGAGLVQSWAAIVMGILSGSIPWVTMMILHKKSTLLQKVDDTLGVFHTHAVAGLLGGLLTGLLAEPALCRLLLPVTNSRGAFYGGGGGMQFFKQLVAAMFVIGWNLVSTTIILLVIKLFIPLRMPDEQLEIGDDAVHGEEAYALWGDGEKYDPTRHGSLQSGNTTVSPYVNGARGXDYKLMSQEIRLCLAHTCMCINLYD

SEQ ID NO: 2136 - protein, 369 aa, Glycine max
  misc_feature (233)..(233): Xaa can be any naturally occurring amino acid
  unsure (1)..(369): unsure at all Xaa locations
MSTLLHSAPTSSPSFSRITTPRFAFAPITRISLRNGVRSKAIEAVKLENGRPSASEFVVSGSGNAIPSYVVAPNARVQDLVNRNDTRLRIFSGTANPALAQEIACYLGLELGKIKIKRFADGEIYVQLQESVRGCDVFLVQPTCPPANENLMELLIMIDACRRASAKNITAVIPYFGYARADRKTQGRESIAAKLVANLITEAGANRVLACDLHSGQSMGYFDIPVDHVYGQXRAFAKKLSDAPLAIVDKRRHGHNVAEVMNLIGDVRGKVAVMVDDMIDTAGTIAKGAALLHQEGAREVYACTTHAVFSPPAIERLSSGLFQEVIITNTIPVAEQNYFPQLTVLSVANLLGETVWRVHDDCSVSSIFL

SEQ ID NO: 2137 - protein, 289 aa, Glycine max
MALSLLIHCSPTVNPLRRSPKPTLRRVNHRVCVASAATPLLQVNDLRAKIVESNVDILHGVNLTVNQGEVHAIMGKNGSGKSTFAKVLVGHPDYEVTGGSVVFKGENLLEMEPEERSLAGLFMSFQSPVEIPGVSNDLFLAMAYNARMKKLGREEVGPIEFLPYLMEKLQLVNMKADFLNRNVNQGFSGGERKRNEILQLAVLGADLAILDEIDSGLDVDALRDVANAVNRILTPEKSLLMITHYRRILDLLNPTHVHVMDKGKIARSGDISMVEAIEADGYETVSALT

SEQ ID NO: 2138 - protein, 490 aa, Glycine max; identical to SEQ ID NO: 332

SEQ ID NO: 2139 - protein, 196 aa, Glycine max
MAFAGTTQKCMACDKTVYLVDKLTADNRVFHKACFRCHHCKGTLKLSNYNSFEGVLYCKPHFDQLFKRTGSLDKSFEGTPKIAKPEKNLEEKPAAAKVSSMFGGSREKCAGCQKTVYPTEKVTVNGTPYHKSCFKCCHGGCVISPSNYIAHEGKLYCKHHHVQLIKEKGNLTQLEGDNEKSATNGKINGEEVSAET

SEQ ID NO: 2140 - protein, 312 aa, Glycine max
MMGLDQDASSNSGLHLILGLALTATTTTTPSLPSISNKLDHVDHHHHLITLRPTTKSPYNSSEAEPSLTLGLSRESYLKVPKNIIGQNSNNKVSSCDDPLDHLSTQTNSPHHSAVSSFSSGRVKRERDLSCEEVVDATEIDQRDHSCEGIVRATDEDEDGTAARKKLRLSKEQSALLEESFKQHSTLNPKQKQALAKQLNLRPRQVEVWFQNRRARTKLKQTEVDCEFLKKCCETLTDENRRLQKELQELKALKLAQPLYMPMPAATLTMCPSCERLGGGINGGGGGSPKTPFSMAPKPHFFNPFANPSAAC

SEQ ID NO: 2141 - protein, 311 aa, Glycine max
MMGLDQDASSNSGLQLILGLALTATTTTTPSSPPSISNKLDHVDHHHHLITLRPTTKSSYNSSEAEPSLTLGLSRESYLKVPKSIIGHNNNKVSSCDDPLDLSTQTNSPHHSAVSSFSSGRVKRERDLSCEEVVDAKEIDQRDLSCEGIIRATEEEEDGAATRKKLRLTKEQSALLEESFKQHSTLNPKQKQALSKQLNLRPRQVEVWFQNRRARTKLKQTEVDCEFLKKCCETLTDENRRLQKELQELKALKLAQPLYMPMPAATLAMCPSCERLGGSAVNGAGGSPKTSFSMAPKPHFFNPFANPSAAC

SEQ ID NO: 2142 - protein, 586 aa, Glycine max
MDTIKSFKGYGKVDELEQQAYQKKTRKRLIIITVSSIVLIAVIIAAIAGVVIHKRNTSSSPSSDSPPQTELTPAASLKAVCDVTQYPNSCFSAISSLPDSNTTDPELLFKLSLRVAIDELSKLSSFPSKLRANAEHDARLQKAIDVCGNIFGDALDRLNDSISALGSSGGAGKIISPASVSDVETWISAALTDQDTCLDALGELNSTAASGALREIETAMRNSTEFASNSLAIVTKILGLLSQFAAPIHHRRLLGFPEWLGAAERRLLQVNSSETTLDAVVAQDGSGQFRTIGEALKLVKKKSEKRFVVHVKEGRYLENIDLDKNTWNVFIFGDGKDKTVVVGSRNFMDGTPTFETATFAVKGKGFIAKDIGFVNNAGASKHQAVAFRSGSDRSVFFRCSFNGFQDTLYAHSNRQFYRDCDITGTIDFIFGNAAAVFQNCKIMPRQPLPNQFNTITAQGKKDRNQNTGIIIQKSKFTPLENNLTAPTYLGRPWKDFSTTVIMQSDIGSFLKPVGWMSWVPNVEPVSTIFYAEYQNTGPGADVSQRVKWAGYKPTLTDGEAGKFTVQSFIQGPEWLPNAAVQFDSTL

SEQ ID NO: 2143 - protein, 392 aa, Glycine max
MSSVCAKQHKFYPSHQLLSPKKTLREIDIPPRKLLTRRAAACVGGTDVYSSEETMLQKFLPSNDSDEDDPYSSDHFRMFEFKVRRCTRSRSHDWTDCPFAHPGEKARRRDPRRYHYSGTVCPEYPRGGCSRGDACEYAHGVFECWLHPSRYRTEACKDGRNCKRKVCFFAHTPRQLRILPSATSSPSSNDMPCKKNLNKLLNHASKSNNNNNNNCCLFCHCGASSSVSPTSTLFGMSHFSPPVSPSSSSSPPPSPLKPRSVVSPISPISRYSAVNMNPHHGVVSYKDMFAELVNSLEGLSFNEGSPVSGAKAPNFPWLDVSLEEQQQQQNPFIVSSFGCEDKQNQFIFSPPSIQTPTNGKFCRNRFMGNDNKVVGGADVNGPDLAWVNELLM

SEQ ID NO: 2144 - protein, 328 aa, Glycine max
MALSPIRSSSFSSSAIVALAVLLLLTGTSSANLSKNFYSKTCPNVFNTVKSVVKSAVVREPRIGASIVRLFFHDCFVQGCDGSILLDDTPTFQGEKTAAANNNSVRGFEVIDAIKSEVEKICPGVVSCADILDIASRDSVVLLGGPFWNVRLGRRDSRSANFTAANTGVIPPPTSNLTNLITRFQDQGLSARDMVALSGAHTFGKARCTSFRDRIYNQTNIDRTFALARQRRCPRTNGTGDNNLANLDFRTPNHFDNNYFKNLLIKRGLLNSDQVLFNGGSTDSLVRTYSQNNKAFDTDFVKAMIRMGDIKPLTGSQGEIRKNCRRVN

SEQ ID NO: 2145 - protein, 324 aa, Glycine max
MALSSSSSSTSIFALALFTLLLIGSSSAQLSENFYDSKCPKVFYAVKSVLQSALAKEPRQGASIVRLFFHDCFVNGCDGSVLLDGPSSEKTAPPNNNSLRGYEVIDAIKSKVETVCPGVVSCADIVTIAARDSVAILGGPYWKVKLGRRDSTTGFFNLASSGVLPGPGSSLSDLIKRFDDQGLSTKDMVALSGAHTIGKARCASYRGRIYNENNIDSLFAKARQKNCPKGSNGTPKDNNVAPLDFKTPNHFDNEYFKNLINKKGLLHSDQELFNGGSTDSLVRAYSNNQKAFEADFVTAMIKMGNIKPLTGSNGQIRKQCRRPN

SEQ ID NO: 2146 - protein, 101 aa, Glycine max
MDKVMRLASEKGVVIFTKSSCCLCYAVNILFQELGVNPVVHEIDHDPEGREMEKALLRLGCTAPVPAVFIGGKLRGSTNEIMSLHLSGSLTQMLKPYQALS

SEQ ID NO: 2147 - protein, 313 aa, Glycine max
MGSIGVLLVAQVIPYLEQELDKRYKLFRAYDQPQTAQVLSQHASSIRAVVGNSNAGADAELIEALPKLEIVSSFSVGVDRIDLDRCKEKGIRVTNTPDVLTDEVADLAIGLMLALLRRICECDRYVRSGKWKKGDYKLTTKFSGKTVGIIGLGRIGQAIAKRAEGFNCPICYYSRTQKRDSNYKYYPSVVELASNCDILVVACPLTEETHHIINREVINALGPKGYLINIGRGKHVDEAELVPALLEGRLGGAGLDVFENEPTVPEELFGLENVVLLPHVGSGTIETRTAMADLVLGNLDAHFLGNPLLTPLV

SEQ ID NO: 2148 - protein, 500 aa, Glycine max
  misc_feature (151)..(151): Xaa can be any naturally occurring amino acid
  unsure (1)..(500): unsure at all Xaa locations
MSLPACPAEQLAQLLGPNTTDASAAASLICGQFAAVDSKFVDTAFAVDNTYLLFSAYLVFSMQLGFAMLCAGSVRAKNTMNIMLTNVLDAAAGGLFYYLFGFAFAFGSPSNGFIGKHFFGLKDIPSSSYDYSYFLYQWAFAIAAAGITSGXIAERTQFVAYLIYSSFLTGFVYPVVSHWFWSPDGWASAFKITDRLFSTGVIDFAGSGVVHMVGGIAGLWGALIEGPRMGRFDHAGRAVALRGHSASLVVLGTFLLWFGWYGFNPGSFNKILLTYGNSGNYYGQWSAVGRTAVTTTLAGSTAALTTLFGKRVISGHWNVTDVCNGLLGGFAAITAGCSVVEPWAAIVCGFVASIVLIACNKLAEKVKFDDPLEAAQLHGGCGTWGVIFTALFAKKEYVKEVYGLGRAHGLLMGGGGKLLAAHVIQILVIAGWVSATMGPLFWGLNKLKLLRISSEDELAGMDMTRHGGFAYAYEDDETHKHGMQLRRVGPNASSTPTTDE

SEQ ID NO: 2149 - protein, 595 aa, Glycine max
  misc_feature (144)..(144): Xaa can be any naturally occurring amino acid
  misc_feature (474)..(474): Xaa can be any naturally occurring amino acid
  unsure (1)..(595): unsure at all Xaa locations
MAVDSAISSPLGPPACEKDAKALRFIEEMTRNADAVQERVLEEILTRNAQTEYLKRFELDGAADRQAFKSKIPVITYEDVQPEIQRIANGDRSPILSAHPISEFLTSSGTSAGERKLMPTIKEELDRRQLLYSLLMPVMNLYVXPGLDKGKGLYFLFVKSETRTPGGLLARPVLTSYYKSDHFKTRPYDPYNVYTSPNEAILCSDSFQSMYTQMLCGLIERHHVLRLGAVFASGLLRAIRFLQLNWPELAHDIQTGTLNSRITDPAIRSYMDKVLKSDPELAQFVTQQCSKDNWEGIITRIWPNTKYLDVIVTGAMAQYIPTLNYYSGGGLPLACTMYASSECYFGLNLNPMCKPSEVSYTIMPNMAYFEFLPHDPKPGSTSSKLVELADVEVGKEYELVITTYAGLYRYRVGDILRVTGFHNSAPQFHFVRRKNVLLSIDSDKTDESELQKGIENASKLLSEFNTSVVEYTSXDTTTIPGHYVIYWELLTKDSTNSPSHEVLNRCCLEMEECLNSVYRQCRVADHSIGPLEIRVVRNGTFEELMDYAISRGASINQYKVPRCVNFTPIMELLDSRVVSVHFSQELPHWTPERRR

SEQ ID NO: 2150 - protein, 157 aa, Glycine max
MAFSSFLGRVLFASVFILSAYQEFNSYGVDGGPAAKALRPKFDAFAHQVHSKVGFQLPDIDMKFLVAGAIALKGLGGILFILSSSFGAFLLLLHQVITTPILYDFYNYHSEDKEFIQLFIKFTQNMALFGALLFFIGMKNSIPRRQPKKKAAKTKTY

SEQ ID NO: 2151 - protein, 323 aa, Glycine max
MASFHILVLVVAMVTLMIPTNANLSPHFYDKVCPQALPVIKSVVQRAIIRERRIGASLLRLHFHDCFVNGCDGSILLDDTRNFTGEKTALPNLNSVRGFSVVDEIKEAVDKACKRPVVSCADILAIAARDSVAIYGGPHYWYQVLLGRRDARTASKAAANSNLPPPSFSFSQLVSNFKSHGLNVRDLVALSGGHTLGFARCSTFRNRIYNASNNNIIDPKFAASARKTCPRSGGDNNLHPFDATPARVDTAYYTNLLHKKGLLHSDQELFKGKGTESDKLVQLYSRSPLVFARDFKASMIKMGNMKPLTGKKGEIRCNCRRVN

SEQ ID NO: 2152 - protein, 359 aa, Glycine max
MRLDGLWVPCTFTLYKSFLLLAMFCNTQTYNKMASFHIQYSFLVLVLAMVITLMNPTNATLSPHFYDKVCPQALPVIKSVVQRAIIRERRIGASLLRLHFHDCFVNGCDGSILLDDTRNFTGEKTALPNLNSVRGFSVVDEIKAAVDKACKRHVVSCADILAIAARDSIAIYGGPHYWYQVLLGRRDARTASKAAANSNLPPPTFSFSQLVSNFKSHGLNVRDLVALSGGHTIGFARCTTFRNRIYNVSNNIIDPTFAASVRKTCPKSGGDNNLHPLDATPTRVDTTYYTDLLHKKGLLHSDQELFKGKGTESDKLVQLYSRIPLAFARDFKASMIKMGNMKPLTGRQGEIRCNCRRVN

SEQ ID NO: 2153 - protein, 136 aa, Glycine max
  misc_feature (95)..(95): Xaa can be any naturally occurring amino acid
  unsure (1)..(136): unsure at all Xaa locations
SLSNMFLKGIAARSLSRPLNGLFYCTRYSTTVSNDSDTHDDFKPANKLENSGISLSNVIEQDVKDNPVMVYMKGVPDFPQCGFSSLAVRVLKHYXNWPTFPQIFIKGEFIGGSDIVLNMHQTGELKEKLKDITSKQ

SEQ ID NO: 2154 - protein, 407 aa, Glycine max
MAPVAAASSDSIKPRDVCIVGVARTPMGGFLGTLSSLSATKLGSIAIEAALKRANVDPSLVEEVFFGNVLSANLGQAPARQAALGAGISNSVICTTVNKVCASGMKAAMLAAQSIQLGTNDVVVAGGMESMSNVPKYLAEARKGSRLGHDSLVDGMLKDGLWDVYKDVGMGVCAELCADNHALTRDDQDNYAIQSFERGIAAQESGAFSWEIAPVEVSGGRGRPSTVVDKDEGLGKFDAAKLRKLRPSFKETGGSVTAGNASSISDGAAALVLVSGEKALKLGLQVIAKITGYADAAQEPELFTTAPSLAIPKAIAKAGLETSQIDFYEINEAFAVVALANQKLLGLNSEKVNVHGGAVALGHPLGCSGARILVTLLGVLKQKNGKYGVGGICNGGGGASALVVELQ

SEQ ID NO: 2155 - protein, 234 aa, Glycine max
MAATIITTCKLSLLLSLLSVSLLLGVRSDTLQNVGAIPPTCKRIECPSYDVIHVGNGYEIRRYNSPVWISNSPIQDISLVEATRTGFRRLFDYIQGKNNYKQKIEMTAPVISEVLPSDGPFCESSFVVSFYVPKENQANPPPAKGLQVQRWKTVFVAVRQFGGFVKDSSVGEEAAALKASIAGTKWADAVEKSQKRAGHASVYTVAQYNAPFEYDNRVNEIWFLFDIENELQTV

SEQ ID NO: 2156 - protein, 196 aa, Glycine max
MAFAGTTQKCMACDKTVYLVDKLTADNRVYHKACFRCHHCKGTLKLSNYNSFEGVLYCRPHFDQLFKRTGSLDKSFEGTPKIAKPEKTGEEKPAATKVSSMFGGTRDKCAGCQKTVYPTEKVTVNGTPYHKSCFKCTHGGCVISPSNYIAHEGKLYCKHHHVQLIKEKGNLSQLEGDHEKSAEQEKINGEVVAAET

SEQ ID NO: 2157 - protein, 518 aa, Glycine max
  misc_feature (265)..(265): Xaa can be any naturally occurring amino acid
  unsure (1)..(518): unsure at all Xaa locations
MKTCKVVGEVDFFSDRNKPTPPPSHDHNVKPNIVKKEIDQTPLHINTGLQLLTANTGSDQSTVDDGLSSDAEDKRAKTTELAQLQVELQRMNAENKKLKEMLSHVTGNYTALQMHLVTLMQQNQQRTESTENGVAQGKVEDKNHGVGGGKVPRQFLDIGPSGTAEVDDQVSDSSSDERTRSSTPQDNNTEAGTRDGARNNNGNKSELGREESPDSESQGWGPNKLQKVNPSNPMDQSTAEATMRKARVSVRARSEAPMISDGCQXWRKYGQKMAKGNPCPRAYYRCTMAVGCPVRLLVQRCADDRTILVTTYEGTHNHPLPPAAVWMVMASTTAAAATMLLSGSMSSADGVMNPNLLARAILPCSTSMATLSASAPFPTVTLDLTHNPNPLQFQRPGAPFQVPFLQAQPQNFGSGATPIAQALYNQSKFSGLQLSQDVGSSQLAPQAPRPPLQPSQHPSLADTVSAAASAITSDPNFTAVLAAAISSIIGGAHNSNNNNNNNSNNNTSRTTISSFSGN

SEQ ID NO: 2158 - protein, 326 aa, Glycine max
  misc_feature (243)..(243): Xaa can be any naturally occurring amino acid
  unsure (1)..(326): unsure at all Xaa locations
SYVGPPPRLNSAIVREKPNVKWNDVAGLESAKQALQEAVILPVKFPQFFTGKRRPWRAFLLYGPPGTGKSYLAKAVATEADSTFFSVSSSDLVSKWMGESEKLVSNLFQMARESAPSIIFVDEIDSLCGQRGEGNESEASRRIKTELLVQMQGVGHNDQKVLVLAATNTPYALDQAIRRRFDKRIYIPLPDLKARQHMFKVHLGDTPHNLAESDFEHLARKTEGFSGSDISVCVKDVLFEPVXLNKDAMFFFRNPEGMWIPCGPKQQGSVQTTMQDIAAKGLASKILPPPISRTDFDKVLARQRPTVSKSDLDVHERFTKEFGEEG

SEQ ID NO: 2159 - protein, 276 aa, Glycine max
MENAEEQQQQNEEVLSVELPAPSGWNKLFFPKKVGTPRKSEIVFIAPTGEEINTKKQLEQYLKAHPGNPVISEFDWGTGETPRRSARISEKVKSTPPADSDTPKKRARKSSGSKKDNKETESASEEGKAKSETEDPKAAEEEEDNEGNNDSGGKQLENGDKTEQIDEKAKKSDVDMEETDLNDTNNKLENDSAEIKNSHVKGENVITEKPEGEEAQKLEIEPAEKVAEEAADTEKSQGPLLTTELEKEENEEKTDTVILDANGGVEKENPNAAAEM

SEQ ID NO: 2160 - protein, 274 aa, Glycine max
  misc_feature (29)..(29): Xaa can be any naturally occurring amino acid
  misc_feature (49)..(49): Xaa can be any naturally occurring amino acid
  unsure (1)..(274): unsure at all Xaa locations
MRSEMMQQNDEVLSVELPAPSGGWNKLFXPKKLGTPRKSEIVFIAPTGXEISTKKQLEQYLKAHPGNPVISEFDWGTGETPRRSARISEKVKSTPPADSDTPKKRARKSSGSKKDNKETESASEEGKAKSDTEDPKAAEEEKNEGNDNSNSGGKQLENGDKTEQIDEQAKKPDVDMEENDLNDTNNKLENDSDEIKNSHVNGENVIAERPEGEEAQKQEVEPAEKVAEEAANTAETEKSLLTELEKEKNEEKTDTATLEANGGGEKENPNAAQM

SEQ ID NO: 2161 - protein, 359 aa, Glycine max
MMLGEHHRANPTVHVPPWPTHDDPTAEMYSAFLTNDVNAGEYSPYYLQEALTALQRFLPSNETDADSDTEAQPDAAVDAYSCDHFRMYEFKVRRCARGRSHDWTECPYAHPGEKARRRDPRKFHYSGAACPEFRKGNCKKGDTCEFAHGVFECWLHPARYRTQPCKDGTSCRRRVCFFAHTPEQLRVLPMQSPRSAANSSESYDGSPMRQMMSPAAFMSSPAASLSPPESPPVSPSINEMVASLRNLQLGKMKSMPQSRNVSVGSPGYGSPRGSVLRPGFCSLPTTPTQQPVRSGVNCFDFWDQSCEEEPVMERVESGRGIRAKMFEKLSKENSLEGSGTGSGQGSGAPDVGWVSELVN

SEQ ID NO: 2162 - protein, 350 aa, Glycine max
MMLGEHHRGNPTVLVPPWPAHDDPTAEMYSAFLTNDVNAGEYSPYHLQEALTALQRFLPSNETDADSDSSEAAQPDAAVDAYTCDHFRMYEFKVRRCARGRSHDWTECPYAHPGEKARRRDPRRFHYSGVACPEFRKGNCRKGDACEFAHGVFECWLHPARYRTQPCKDGTSCRRRVCFFAHTPEQLRVLPMQSPRSVANSSESYDGSPMRQVSLSSAAAAAFMSSPAASLSPPESPPSVNEMVASLRNLQLGKMKSMPHNRNVSVGSPRGSVLRPGFLSLPTTPTQQPVRSGVKCFDVWDESFEEEPVMERVESGRGIRAKMFEKLSKENSLDASASPPDLGWVSELVK

SEQ ID NO: 2163 - protein, 164 aa, Glycine max
MSSDRNIGVALDFSKGSKIALKWAIDNLLRNGDILYIVHIKPSGGSEFRNLLWSTTGSPLIPLSEFREKEVMHHYEVDTDAEVLDLLDTASREKQVTVVAKLYWGDAREKIVEAVGDLKLDSLVMGSRGLGAIQRVLLGSVTNYVTTNASCPITIVKDSAPSTN

SEQ ID NO: 2164 - protein, 468 aa, Glycine max
  misc_feature (262)..(262): Xaa can be any naturally occurring amino acid
  misc_feature (380)..(380): Xaa can be any naturally occurring amino acid
  misc_feature (382)..(382): Xaa can be any naturally occurring amino acid
  misc_feature (396)..(396): Xaa can be any naturally occurring amino acid
  misc_feature (410)..(410): Xaa can be any naturally occurring amino acid
  unsure (1)..(468): unsure at all Xaa locations
LISLGGNAKLSGYNDRIPCSLLSKSRDNVPVVSRDDDENSSGCTHPINTETKSFRPKTCIGKRMASNFQKVAEKTKNYALSNNDGDWKRTYLSKRNCNKHQSSQMNIPFKKRKLFNYRSVANSNGLIRRGGIYYSPENCMNQDGCGSPPGMHKDPGMPSLEACQHQTLRSRGSHVNLRIKSFRVPELFIEVPETATIGSLKRTVMDAVTAVLGGELHIGVFLQGKKVKDDSKTLLQTGISHQNELDALGFTLEPNSSQSLTXVCAAHSPGPKADITQPVIRYPSSPAVIHQRIQGNSDMLPEHQVTSLGSHFENDHDSAPSPVNASVEKGMKDSKELVTVPEMDEELAMVPVHQKSKRSEIVQRRIRRPFSVDEVEALVXAXEKLGTGRWRDVKVXLFDNAKHRTYVDLXDKWKTLVHTARISPQQRRGEPVPQELLDRVLVAHAYWSHQQTKPQHKHHPETETVFSF

SEQ ID NO: 2165 - protein, 541 aa, Glycine max
  misc_feature (194)..(194): Xaa can be any naturally occurring amino acid
  misc_feature (202)..(202): Xaa can be any naturally occurring amino acid
  unsure (1)..(541): unsure at all Xaa locations
MRKYAADRFRHLFNRSLLLLRHRHHHNHHPFPYSSSVSSLSPFSRSRFLSSTPFSMASDSPFPVTAQNINPKVLKCEYAVRGEVVTLAQNLQKDLQANPGSHPFDEILYCNIGNPQSLGQQPITFFREVLALCDHPAILDKSETQGLFSTDAIQRAWQIVDQIPGRATGAYSHSQGVKGLRDTIAAGIEERDGXPANPDDIXMTDGASPAVHNMMQLLIRSENDGILCPIPQYPLYSASIALHGGCLVPYYLDEATGWGLEIPELKKQLEAAKSKGINVRALVVINPGNPTGQVLGEANQRDIVEFCKQEGLVLLADEVYQENVYVPEKKFHSFKKVSRSMGYGENDITLVSFQSVSKGYHGECGKRGGYMEVTGFSAEVREQIYKVASVNLCSNISGQILASLVMSPPKVGDESYDSFMAEKENILASLARRAKTLEDAFNKLEGVTCNKAEGAMYLFPQIRLSEKAIKAAEAANATPDNFYCKRLLNATGVVVVPGSGFGQVPGTWHFRCTILPPEEKIPAIVTRLTEFHEKFMDEFRD

SEQ ID NO: 2166 - protein, 490 aa, Glycine max
MAIQMSSFLLASLAVFFFFSSLEKSFAFQAARKEDTESNNLHQYTHLVHLSSLLPSSSCSSSTKGPKTKASLEVVHKHGPCSQLNDHDGKAKSTTPHSDILNQDKERVKYINSRLSKNLGQDSSVEELDSATLPAKSGSLIGSGNYFVVVGLGTPKRDLSLIFDTGSDLTWTQCEPCARSCYKQQDVIFDPSKSTSYSNITCTSALCTQLSTATGNDPGCSASTKACIYGIQYGDSSFSVGYFSRERLTVTATDVVDNFLFGCGQNNQGLFGGSAGLIGLGRHPISFVQQTAAKYRKIFSYCLPSTSSSTGHLSFGPAATGRYLKYTPFSTISRGSSFYGLDITAIAVGGVKLPVSSSTFSTGGAIIDSGTVITRLPPTAYGALRSAFRQGMSKYPSAGELSILDTCYDLSGYKVFSIPTIEFSFAGGVTVKLPPQGILFVASTKQVCLAFAANGDDSDVTIYGNVQQRTIEVVYDVGGGRIGFGAGGCK

SEQ ID NO: 2167 - protein, 331 aa, Glycine max
MAASGSSFSNITSFLRNQQPSSQPLDSSLFLSAPSIFVSGSRSMVSFEAEGGKGCNGSFFRAFDMDDNGDECMDEYFHKPEKKRRLSMNQVQFLEKSFEEENKLEPERKTKLAKDLGLRPRQVAIWFQNRRARWKTKTLEKDYEALHASFENLKSNYDSLLKEKDKLKAEVASLTEKVLARGKQEGHMKQQAESESEETKGLLHLQEQEPPQRLLLQSVSEGEGSKVSSVVGGCKQEDISSARSDILDSDSPHYTDGVHSALLEHGDSSYVFEPDQSDMSQDEEDNLSKSLYPSYLFPKLEEDVDYSDPPESSCNFGFPEEDHVLWTWAYY

SEQ ID NO: 2168 - protein, 156 aa, Glycine max
MAFASFLGRVLFASVFILSAYQQFNEYGVDGGPATKALRPKFDAFTHRVHSQVGFQIPEINLKFLIAGAIALKGLGGVLFIFGSSFGALLLLLHQLIATPIHYDFYNYDSEDKEFTQLFIKFTQNMALFGAVLFFIGMKNSIPKRVPKKAPKTKTY

SEQ ID NO: 2169 - protein, 160 aa, Glycine max
MSDEEHHFESKADAGASKTYPQQAGTIRKNGYIVIKGRPCKVVEVSTSKTGKHGHAKCHFVGIDIFTAKKLEDIVPSSHNCDVPHVNRTDYQLIDIAEDGFLSLLTENGNTKDDLKLPTDESLLTQIKDGFAEGKDLVVSVMSAMGEEQICALKDIGPKN

SEQ ID NO: 2170 - protein, 356 aa, Glycine max
MSLLSDLINLNLSESTEKIIAEYIWVGGSGMDLRSKARTLPGPVSDPAKLPKWNYDGSSTDQAPGDDSEVILYPQAIFKDPFRRGNNILVICDVYTPAGEPLPTNKRYGAAKIFSHPDVAAEEPWYGIEQEYTLLQKDVNWPLGWPLGGFPGPQGPYYCGIGADKAYGRDIVDAHYKACIYAGINISGINGEVMPGQWEFQVGPSVGISAGDEVWAARYILERITEIAGAIVSFDPKPIPGDWNGAGAHSNYSTKSMREEGGYEVIKKAIEKLGLRHKEHIAAYGEGNERRLTGRHETADINTFSWGVANRGSSIRVGRDTEKNGKGYFEDRRPASNMDPYVVTSMIAETTILWKP

SEQ ID NO: 2171 - protein, 345 aa, Glycine max
MCGGAIISDFIPAAAIAGSRRLTADYLWPDLKKRKSDLDVDFEADFRDFKDDSDIDDDDDDHQVKPFAFAASSRLSTAAKSVAFQGRAEISANRKRKNQYRGIRQRPWGKWAAEIRDPRKGVRVWLGTFNTAEEAARAYDAEARRIRGKKAKVNFPEAPGTSSVKRSKVNPQENLKTVQPNLGHKFSAGNNHMDLVEQKPLVSQYANMASFPGSGNGLRSLPSSDDATLYFSSDQGSNSFDYAPEISSMLSAPLDCESHFVQNANQQQPNSQNVVSIEDDSAKTLSEELVDIESELKFFQMPYLEGSWGDTSLESLLSGDTTQDGGNLMNLWCFDDIPSMAGGVF

SEQ ID NO: 2172 - protein, 214 aa, Glycine max
MRTQRLNHLLLSLFLFAAAFSSLHPTATAGDEGAPSPGDGDGDADFIRTSCNTTLYPDVCFTSLSRYASAVQQNPGQLARVAISVSLSKVHRAASYVSNLTRDADYDGTTRAALALHDCFSNLGDAVDEIRGSLKQMRQIGAAGAGASSFLFQMSNVQTWMSAALTDEETCTDGFQDVADCPVKTDVCDRVTNVKKFTSNALALVNSYANKGMP

SEQ ID NO: 2173 - protein, 200 aa, Glycine max
MARISNWSLVFLLISTLLHIEPSLSSPSPSPSPSPSPFIKSSCSSTQYPALCVSSLSVYASSIQQDPHQLVQTALSLSLNRTQATKTFVANCNKFRGLKPREHAALKDCAEEISDSVDRLSRSLKELKLCKVKGEDFTWHISNVETWVSSALTDESTCGDGFSGKALNGKIKDSIRARMLNVAQVTSNALSLINHYAAQH

SEQ ID NO: 2174 - protein, 194 aa, Glycine max
MTQSSEFCIGNLRSHCFSCLKANSSDCITCLRRRVVDGLCERGFSTNLCISKWRTTKKFPGGCHEYIEVIANTSTRKKIHFLVELELREQFQIAKASENYRKLVSCLPEFYIGKLEYLTVIVRVMCNAAKKSMKEKKMHVGPWRKSSFMQMKWSGFNQICNSNKSLGSVATYPHAQASESYFRISGAPTLLVVT

SEQ ID NO: 2175 - protein, 275 aa, Glycine max
MESLEERVFMLMNEQYYYSNSNVSDQLHMHHHRSVSVENLNLWWENNTDSDDSAERILYWESQISLLQEILERYHLSGSKLRLEVGRIIKEVKASDFCSCLKANSSDCITCLRRRVVDGLCERGFSTNLCISKWRTTKKFPGGCHEYIEVIANTSTRKKIHFLVELELREQFQIAKASENYRKLVSCLPEFYIGKLEYLTAIVRVMCNAAKKSMKEKKMHVGPWRKSSFMQMKWSGFNQICNSNKSLGSVATYPHAQASESYFRISGAPTPLVVT

SEQ ID NO: 2176 - protein, 271 aa, Glycine max
MESLEERVFMFMDEQYYFSNSNESELHMHHHPSVSVENISWENNTDFDDSPERTLYWKSQIALLQKFKRYHLSGSKLRREVGRIIKEVKASDFCSCLKANSWDCTTCLRRRVVDVLCRTGFSTNLCISKWETTKKFPGGCHEYIEVIANTSTMKKIHFLVELELKEQFQIAKASENYQNLESCLPEFYIGKPEYLTAIVRVMCNAAKKSMKEKKMHVGPWRKSSFMQMKWSGFNQICNSNKSLGSVTTYSHAQTNQSYLRISGAPTPVLVT

SEQ ID NO: 2177 - protein, 175 aa, Glycine max
MPGGSRNPLVVGRVIGEVIDPFEISIPFRVTYGNREVGNGCELKPSQVANQPRVSVGGDDLRNFYTMVLVDPDAPSPSNPNFREYLHWLVTDIPETTGPNFGNEVVSYESPRPTMGIHRLVFVLFRQQFRQRVYAPGWRQNFNTREFAELYNLGLPVAAVFFNCQRESGSGGRTF

SEQ ID NO: 2178 - protein, 141 aa, Glycine max
FMKGKPEEPKCGFSRKVVEILKQEEVQFESFDILSDDEVRQGLKVFSNWSSYPQLYIKGELIGGSDIVLEMQKSGELKSVLTEKGIVPKETLEDKLRKLISSEPVMLFMKGIPDAPRCGFSSKVVDALRKDGIGFGSFDIL

SEQ ID NO: 2179 - protein, 167 aa, Glycine max
MDSSSHQLLPFNENDPEDMLLYGIITSCQEKKVTINQEQVNKKRSSFRGVRRRPWGKFAAEIRDSTRHGVRVWLGTFDNAEAAALAYDQAAFSMRGSGAVLNFPVEKVKESLRDMKLDGCSPVVALKRRHSLAAKRKKEDVLVFHDLGADYLEHLLMCSDLPSTTIV

SEQ ID NO: 2180 - protein, 911 aa, Glycine max
MNPEKFTHKTNEALASAHELAMSSGHAQLTPIHLAHALISDPNGIFVLAINSAGGGEESARAVERVLNQALKKLPCQSPPPDEVPASTNLVRAIRRAQAAQKSRGDTRLAVDQLILGILEDSQIGDLLKEAGVAVAKVESEVDKLRGKEGKKVESASGDTNFQALKTYGRDLVEQAGKLDPVIGRDEEIRRVVRILSRRTKNNPVLVGEPGVGKTAVVEGLAQRIVRGDVPSNLADVRLIALDMGALVAGAKYRGEFEERLKAVLKEVEEAEGKVILFIDEIHLVLGAGRTEGSMDAANLFKPMLARGQLRCIGATTLEEYRKYVEKDAAFERRFQQVFVAEPSVVDTISILRGLKERYEGHHGVRIQDRALVMAAQLSNRYITGRHLPDKAIDLVDEACANVRVQLDSQPEEIDNLERKRMQLEVELHALEKEKDKASKARLVEVRKELDDLRDKLQPLMMKYRKEKERVDEIRRLKKKREELLFALQEAERRYDLARAADLRYGAIQEVETAIQQLEGSTEENLMLTETVGPEQIAEVVSRWTGIPVTRLGQNEKERLIGLGDRLHSRVVGQDQAVNAVAEAVLRSRAGLGRPQQPTGSFLFLGPTGVGKTELAKALAEQLFDNENQLVRIDMSEYMEQHSVSRLIGAPPGYVGHEEGGQLTEAVRRRPYSVVLFDEVEKAHTSVFNTLLQVLDDGRLTDGQGRTVDFRNTVIIMTSNLGAEHLLSGLSGKCTMQVARDRVMQEVRRQFRPELLNRLDEIVVFDPLSHDQLRKVARLQMKDVASRLAEKGIALAVTDAALDYILSESYDPVYGARPIRRWLEKKVVTELSRMLVREEIDENSTVYIDAGPNGGELVYRVEKNGGVVNPTTGQKSDILIQIPNGHAPKTDAVQAVKKMKIEEIDDDEMEE

SEQ ID NO: 2181 - protein, 132 aa, Glycine max
ADHGFWFGLEQEYTLLDEFGWPYGWPKNGFPAPQGPYYCGVGTGKVFCRDIVEAHYKACMYAEIAISGTNAEVMPAQWEYQVGPCPGISLGDQLWMSRFLLHRVAEEFGAKVTFAPKPIPGDWNGAGLHTNV

SEQ ID NO: 2182 - protein, 150 aa, Glycine max
  misc_feature (17)..(18): Xaa can be any naturally occurring amino acid
  misc_feature (29)..(29): Xaa can be any naturally occurring amino acid
  misc_feature (63)..(63): Xaa can be any naturally occurring amino acid
  misc_feature (127)..(127): Xaa can be any naturally occurring amino acid
  misc_feature (129)..(129): Xaa can be any naturally occurring amino acid
  unsure (1)..(150): unsure at all Xaa locations
KNLVKGIRVNLNWYSLXXLNKKGEVIGGXNIVLKMKKNGKLRKILKKKGILLSETIKNKHKKXLLHSHIVMMFMKGTQNATKCGFSSRVDYVIEKKGLNFGSFDILIDEEVRKGLKVYLNWPTYPKXFXKSELIGGNDIVMELQNNGELK

SEQ ID NO: 2183 - protein, 182 aa, Glycine max
  misc_feature (136)..(137): Xaa can be any naturally occurring amino acid
  misc_feature (139)..(139): Xaa can be any naturally occurring amino acid
  misc_feature (142)..(142): Xaa can be any naturally occurring amino acid
  misc_feature (149)..(149): Xaa can be any naturally occurring amino acid
  misc_feature (152)..(152): Xaa can be any naturally occurring amino acid
  misc_feature (155)..(155): Xaa can be any naturally occurring amino acid
  misc_feature (160)..(160): Xaa can be any naturally occurring amino acid
  misc_feature (171)..(171): Xaa can be any naturally occurring amino acid
  unsure (1)..(182): unsure at all Xaa locations
MALKTLSTFFSPLSLPNTKFLTSKPCLILFEFPRSQKSRLPVADAEGTGAAAPSPGEKFLERQQSFEDAKLILKENNMNKMNKKKDYAIKASRAVASCYGCGAPLHTSDADAPGYVDPETYELKKKHHQLRTGLCXXCXLLXHGKMITXAVXGHXGYPGXKIFGSAEKLRXKIGSTGVRGKL

SEQ ID NO: 2184 - protein, 404 aa, Glycine max
LERMKVENHRLKNMLDQVNNNYNALQTHLVSLMKDQMDKEDDKQQPHQVFDGKLEEKQAGNGGGALVPRQFMDLGLATNADTNETSHSHSSSVIRSQDSPPTNNTEVASKKNGGASDEGLVFDQDKKEFGRGIEREDSPSDQGVAANNNVPKFSPPRNVDQAEATMRKARVSVRARSEAPMITDGCQWRKYGQKMAKGNPCPRAYYRCTMAAGCPVRKQVQRCAEDRTILITTYEGNHNHPLPPAAMAMAQTTSSAARMLLSGSMSSADGLMNASFLTRTLLPCSSSMATISASAPFPTVTLDLTQSPNPLQFPKQPSQFQIPFPGVPQNFANSQASLLPQIFGQALYNQSKFSGLQMSQDSDPSQLSNQSQRPPPHLADTVSAAIAADPNFTAALAAAITSII

SEQ ID NO: 2185 - protein, 304 aa, Glycine max
MANSKYEYVKCFEVEDEAMFPNIILVWIKASKLHKPHDSNTLKLMNSCAVEVLEEYADVVFAYGFSDEYTFVFKKTSKFHERRASKVLSIITSFFSSVFVRKWDEFFPHKELQCHPSLHGRVIACASIKALQAYLLWRQTICHLSNQHEQCLWRLVERGMNGKEAWDFIKGFDKGELNNLLFDEFNVNYNTLEPILRQGSCVLKTTGEDTVKYTDNGAPIKRRRRKIVTVRSKKIASKRFWNEHTVLLKDLGGFVEEINNVTPEYVRSFEFDSKLMPSTWIVVRIDGCHFHRFSEIHEFVKPND

SEQ ID NO: 2186 - protein, 327 aa, Glycine max
MELALSLGDTSKSFTFLDKAAVNLPTNKDPPGLFSLAPSFAATAAAADKRSDAAERRGFSSDPPVQLDLLPFSPVLRPQQQPPSQLRIPWLTEACGAARVLDVNLFRAATAEDGDDGTSLSSSPNSAVSPFQMDFCTRNCNAEFGGRNKREQQEAEGRASDDDENGSTRKKLRLSKEQSAFLEESFKEHTTLNPKQKLALAKQLNLRPRQVEVWFQNRRARTKLKQTEVDCEYLKRCCETLTEENRRLQKELQELRALKTSQPFYMQLPATTLTMCPSCERVATNSTTTNQTSIVNNNASSQIPVELSLSKPRILPFPNGQEPKPIK

SEQ ID NO: 2187 - protein, 401 aa, Glycine max
MEGKLSRAAKKITSSSIQELSQLAQRCNAINLAEGFPDFPSPPHLKNAAVSAINSDFNQYRHVQGVCDLLAKMVKQMHGLDIDPVTDVAICCGQSEAFAAAIFATIDPGDEVILFDPSYETYEGCVAMAGGVPIHVPLDPPQWTLDPSKLLRSFTEKTKAIVLNSPHNPTGKVFTKEELEIIAGECCSRNCLAITDEVYEHITYDNLKHISLASFPGMLERTVITSSLSKSFSVTGWRVGWAIAPAFLASAIRNIHGRVTDSAPAPFQEAALTALRSPPEYFESLRRDYQSKRDYIIKLLDGVGFKIVFIPQGSFFLFAELPDNWLLSDVEFVKKLIIEAGVVAVPGQGFFHTNLSSNEVSSLNYQKRYVRFAFCKSDTTLTTVAERLGKLLDAAGHLALH

SEQ ID NO: 2188 - protein, 356 aa, Glycine max
MSLLSDLINLNLSDITDKVIAEYIWVGGSGMDMRSKARTLSGPVKDPSKLPKWNYDGSSTGQAPGQDSEVILYPQAIFKDPFRRGSNILVMCDAYTPAGEPIPTNKRNNAAKIFGHPDVAAEEPWYGLEQEYTLLQKDVQWPLGWPLGGFPGPQGPYYCGTGANKAFGRDIVDSHYKACIYAGINISGINGEVMPGQWEFQVGPSIGISAADELWVARYILERITEIAGVVLSFDPKPIQGDWNGAGAHTNYSTKSMRNDGGYEVIKKAIAKLEKRHKEHIAAYGEGNERRLTGRHETADMNTFVWGVANRGASIRVGRDTEKAGKGYFEDRRPASNMDPYVVTSMIAETTILWKP

SEQ ID NO: 2189 - protein, 356 aa, Glycine max
MSLLSDLINLNLSDITDKVIAEYIWVGGSGMDMRSKARTLSGLVNDPSKLPKWNYDGSSTGQAPGQDSEVILYPQAIFRDPFRRGNNILVMCDAYTPAGEPIPTNKRNKAAKIFSNPDVAAEEPWYGLEQEYTLLQKDVQWPLGWPLGGFPGPQGPYYCGTGANKAFGRDIVDSHYKACIYAGINISGINGEVMPGQWEFQVGPSVGISAADELWVARYILERITEIAGVVLSFDPKPIQGDWNGAGAHTNYSTKLMRNDGGYEIIKKAIAKLEKRHKEHIAAYGEGNERRLTGRHETADMNTFLWGVANRGASIRVGRDTEKAGKGYFEDRRPASNMDPYVVTSMIAETTILWKP

SEQ ID NO: 2190 - protein, 154 aa, Glycine max
KDAREGDDNLSTVHHELHFTVQECIDALGEVIYHIETYDVTTIRASTPMFLMSRKIKSLGVKMVISGEGSDEIFGGYLYFHKAPNKKEFHEETCRKIKALHLYDCLRANKATSAWGVEARVPFLDKSFISVAMDIDPQWKMIKRDSVQIEKWVT

SEQ ID NO: 2191 - protein, 182 aa, Glycine max
MKFEIEDITVYFPYDNIYPEQYSYMVELKRALDAKGHCLLEMPTGTGKTIALSKPHSPLKLLYCTRTVHEMEKTLAELRLLHDYQLRHLGPAAKILALGLSSRKNLCVNPRVLAAENRDSVDAGCRKLTASWVRAVAAENPGVPTCEFFEQYERAGSSAVLPPRVYTLEDLRVYGKEKGWGP

SEQ ID NO: 2192 - protein, 326 aa, Glycine max
MLRTLVLKRSLGHHWHSHSQHLRLQRQFSSSPEPNSSVDAETRKYAGYAALLLFCGGATYYTFPLPDDAKHKKAQIFRYAPLPEDLHTVSNWSGTHEVQTRNFLQPENAEQLERELREARSRIRPVGSGLSPNGIGLSRTGMVNLALMDGILDVDKQSKTVRVQAGIRVQQLVDGLKDHGLTLQNFASIREQQIGGIIQVGAHGTGARLPPIDEQVIAMKLVTPAKGTIEISKDKDPELFYLARCGLGGLGVVAEVTLQCVDRQELVEHTVVSTMNEIKKNHKKLLSENKHVKYLYIPYTDSVVVVRCNPVSKWKGPPKFKPQYTK

SEQ ID NO: 2193 - protein, 625 aa, Oryza sativa
  misc_feature (128)..(128): Xaa can be any naturally occurring amino acid
  misc_feature (164)..(164): Xaa can be any naturally occurring amino acid
  unsure (1)..(625): unsure at all Xaa locations
MATAAAASRAALSRPHAAAAAARASPAAGARVTLPRRRSVRSAVISSSASAAAVAASEPAAGRVTLGAGTDGALWPKPAVLVAEKLSEAGLAVLRGFADVECAYGMSPAELLAKVAQFDALIVRSGTXKVTREVLEAGRGRLRVVGRAGVGIDNVDLQAATEAXGCLVVNAPTANTVAAARARASRLLASMARNVSQADAALKADWKWQRTKYVGVSLVGKTLAVMGFGKVGSEVARRAKGLGMHVIAHDPYAPADRARAIGAELVSFDEAIGRADFISLHMPLTPATSKVFNDESFSRMKNGVRIINVARGGVIDEDALVRALDSGKVAQAALDVFTEEPPAKDSKLVLHENVTVTPHLGASTVEAQEGVAIEIAEAVVGALRGELAATAVNAPMVPAEVMSELAPYVSLAEKLGKLAVQLVAGESGGIKGVKVVYTTARGPDDLDTRLLRAMVTKGIVEPVSSTFVNLVNADYTAKQRGLRITEERVSHESPAAEAPLESIQVRLSHVQSKFAGAISDGGDIVLEGRVKYGVPHLTVVGPYEVDVSLEGNLILCRQIDQPGMIGKVGNILGQTNVNISFMSVGRTFRGKQAIMAIGVDEEPDKETLEHIGHIPAIEEFVFLEL

SEQ ID NO: 2194 - protein, 235 aa, Oryza sativa
MAPRAATVEKVAVAPPTGLGLGVGGGVGAGGPHYRGVRKRPWGRYAAEIRDPAKKSRVWLGTYDTAEEAARAYDAAAREFRGAKAKTNFPFASQSMVGCGGSPSSNSTVDTGGGGVQTPMRAMPLPPTLDLDLFHRAAAVTAVAGTGVRFPFRGYPVARPATHPYFFYEQAAAAAAAEAGYRMMKLAPPVTVAAVAQSDSDSSSVVDLAPSPPAVTANKAAAFDLDLNRPPPVEN

SEQ ID NO: 2195 - protein, 669 aa, Oryza sativa
MARGATWTRRLHLHGLFLAVLLLLTLPAGSTAAAGGGGGTVIGIDLGTTYSCVGVYRNGHVEIIANDQGNRITPSWVAFTGGGERLIGEAAKNQAAANPGRTVYDAKRLIGRRFADAEVQRDMRLLPFAVVDKGGKPHVRVEVRGGDVRLLSPEEVSAMVLARMKETAEAYLGEEVTRAVVTVPAYFNDAQRQATKDAATIAGLAVERILNEPTAAALAYGVGKEGAGGKNVLVFDLGGGTFDVSVLAIDGGVYEVLATNGDTHLGGEDFDQRVMEHFVELVRRKHGRDIAGDARALGKLRRECERAKRALSIQHQVRVEVESLFDGVDLSEPLSRARFEELNNDLFRKTMAPVRKAMADARLSNADIDEIVLVGGSTRIPKVRQLLRDYFGGKQPNQGVNPDEAVAYGAAIQANIVGGDTDNKTRDMVVLDVTPLTLGLETAGGVMATLIPRNTPVPTKRAQLFSTYKDKQTTVTVKVFEGERSMTRDNRLLGRFDLAGIAPAPRGAPQIEVAFEVDADGILSVSAADRATGRSERITISGDDRKTSREEIDRMLGEAEEFADEDRRHRERAGARNSLEAYVYGVKNAVVGGEMAGAMDGGEKEKVEAAVMEAYEWLDGNQDVGKEEYEEKLRELEDVCNPVMSAVYQRSGGSRRDGDGGGDDDHDEL

SEQ ID NO: 2196 - protein, 948 aa, Oryza sativa
MERSTPGTMAARSWLLLLCFVAVATAGVLQARAQPDSNGFISVDCGLPGKTGFVDDKTKISYAADDGFTDGGACHNISAEYITPGLAKRYHTLRSFPDGKRNCYTLRSLVAGLKYLFRTTFFYGNYDGLNKLPVFDLYVGVNYWTMVNITGPGDAVIVEAIVVVPDDFVQVCLVNTGAGTPFISGLDLRPLKNTLYPQSNATQGLVLLGRLNFGPTDYTDVIRYPDDPHDRIWFPWVDSTKWSQISSTKKVQDLDNDMYETPTAVMQTAITPRNASRNIEFSWDPVPLPNDPTPGYIAIFHFSELQLLPGNAVREFYINLNGKPWSLTAFKPEYLYNDATFNRNPFLRYPQYNISINATANSTLPPLINAVEVFSVIPTATIGTDPEDVAAITAIKEKYQVVKNWMGDPCVPKMLAWDKLTCSYAISNPARIIGLNLSSSGLSGEVSSYFGNLKAIQNLDLSNNKLTGPIPDALSQLPSLTFLDLTGNQLSGSIPSGLLKRIQDGSLNLRYGNNPNLCTNGDSCQPAKKKSKLAIYIVIPIVIVLVVVIISVAVLLCCLLRRKKQAAMSNSVKPQNETVSNVSSNGGYGHSSSLQLKNRRFTYNELEKITNNFQRVLGRGGFGYVYDGFLEDGTQVAVKLRSESSNQGAKEFLAEAQILTRIHHKNLVSMIGYCKDGEYMALVYEYMSEGTLQEHIAGKNNNRIYLTWRERLRIALESAQGLEYLHKACNPPLIHRDVKATNILLNTRLEAKIADFGLSKTFNHVNDTHVSTNTLVGTPGYVDPEYQATMQPTTKSDVYSFGVVLLELITGKPSILREPGPISIIQWARQRLARGNIEGVVDAHMHGDHDVNGVWKAADIALKCTAQTSTQRPTMTDVVAQLQECLELEDRRCGMEDTYNNFYAGNNNDPNSSYNMYNTDQSTDVSQNNTMEHNFERVPTMATGPVAR

SEQ ID NO: 2197 - protein, 895 aa, Oryza sativa
MRSVSELVWSPDEGLSIKIAASSLSTRKTSLHWNADTLSIVISSPQQSGAGESGHIIDATVEDAEKMPSQLRTRSDSSARVFMSSPSRIRNTDAQQSTSIRSHGQDSKYCGGMDVMNEGKETSDNFCVDKLEKEDEVGSCPTRYCNDTSHSLGSASRKEVMPIIAEKQAFCATTVHDERSWAANAWRARLVKAISQKDSVLPKNADNIHSTSAFGSIGNTENMPGKLTSMLGNRNDSSQDQAMQEKHKDGLIVARCESVSAVNPVARCELASGVNPLARHESTSGCNPRKLEKGKEKLIYDMSNCVSNTNEGDDSNESIESCPSTKAPKRKHGQFSAAEMTSGNKRCRREDNESSCSGLFHKNDSSFFNWMSTLTNGVKVFDETTAVPLNQKFSAATGEEFPTNPVPLQNNCGVPLQSVGFNSLFQSLYSQNVMITSRNTCHQSESSYTANRLTLGFKSSKPVSMGRETLNVATETLAAGRIQMDSYGDRGAFQNQMGIFPLRAERNQNGFHGSSSNAASGHKDDFSESLWVSRLLPKTPMKVMDTTRCDEETDFCSANPKGLGDSSSPQDFNVEKELNNSQYFTSKGSDNETTSSKCAAPQDENKPSETMASIFAKRLDALRHANTSAVHVAITCDHGTPKGRNHKTSSFVVSYNSHDEQESGQKTHKSSGGEGRIVLWTGDKGKEQLSPGNDKELGEKVLSKHENQNCEGSSDGKVVPPKCNLETNTYIEEIDRKRLQNKEGAPNSMENQPDNKQMVPYGIVPNDVYDEASVVFGALQRLRLSRSDIIRWMRSPVMHTTLDGFFLRLRFGKWEEALGGTGYHVARINGVLDKNRLSVTIRNSTCQVDSRFVSNHDFHQDELKAWWSAAMKSGWKLPSQEELNTKLRERELLRF

SEQ ID NO: 2198 - protein, 250 aa, Oryza sativa
MNGSRQMELHYINTGFPYTITESFMDFFEGLTYAHADFAIADAFHDQANPYWAMMHTNSYKYGYSGAGNYYSYGHVYDMNDYMHRADGGRRIWDNATPVNNTESPNVVLQGGETPHANTSSTTEECIQQQVHQNSSSPQVIWQDNIDPDNMTYEELLDLGEAVGTQSRGLSQERISLLPVTKYKCGFFSRKKTRRERCVICQMEYRRGNLQMTLPCKHVYHASCVTRWLSINKVCPVCFAEVPGDEPKRQ

SEQ ID NO: 2199 - protein, 326 aa, Oryza sativa
MEYSYSYRFMLVCSVLVLCLNTRGARCQLSDDFYDYICPDVYTVVQQHVYAAMRTEMRMGASLLRLHFHDCFVNGCDGSILLDGDDGEKFALPNKNSVRGFEVIDAIKEDLENICPEVVSCADIVALAAGYGVLFSGGPYYDVLLGRRDGLVANQSGADNGLPSPFEPIKSIIQKFNDVGLDTTDVVVLSGGHTIGRARCTLFSNRLSTTSSSADPTLDATMAANLQSLCAGGDGNETTVLDITSAYVFDNRYYQNLLNQKGLLSSDQGLFSSDDGIANTKELVETYSADAHKFFWDFGRSMVKMGNISPLTGDDGQIRKNCRVVN

SEQ ID NO: 2200 - protein, 580 aa, Oryza sativa
MGQCYGKGASGRTADDEGGVVTEHQSPPPANGLPSTPPRQQAQAQAQQVGTPRRRGSKSGSTTPGHQTPGVAWPSPYPSGGASPLPAGVSPSPARSTPRRFFKRPFPPPSPAKHIKATLAKRLGGGKPKEGTIPEEGGVGAGGGGGGAADGAETERPLDKTFGFSKNFGAKYELGKEVGRGHFGHTCSAVVKKGEYKGQTVAVKIIAKAKMTTAISIEDVRREVKILRALSGHNNLVKFYDACEDGLNVYIVMELCEGGELLDRILARDENAPMKLIDFGLSDFIRPDERLNDIVGSAYYVAPEVLHRSYSMEADIWSIGVITYILLCGSRPFWARTESGIFRSVLRADPNFDDSPWPTVSAEAKDFVKRFLNKDYRKRMTAVQALTHPWLRDEQRQIPLDILIFRLIKQYLRATPLKRLALKALSKALREDELLYLKLQFKLLEPRDGFVSLDNFRTALTRYLTDAMKESRVLEFLHALEPLAYRRMDFEEFCAAAISPYQLEALERWEEIAGTAFQQFEQEGNRVISVEELAQELNLAPTHYSIVQDWIRKSDGKLNFLGFTKFLHGVTIRGSNTRRH

SEQ ID NO: 2201 - protein, 510 aa, Oryza sativa
MARRGRRSLASPAVAIALFVFLAYGGGGGGGGVCEAAPASAVVKSVPGFDGALPSKHYAGYVTVEEQHGRNLFYYLVESERDPAKDPLVLWLNGGPGCSSFDGFVYEHGPFNFESGGSAKSLPKLHLNPYSWSKVSSVIYLDSPAGVGLSYSKNTSDYNTGDLKTAADSHTFLLKWFQLYPEFLSNPFYIAGESYAGVYVPTLSHEVVKGLHDGVKPTINFKGYMVGNGVCDTVFDGNALVPFAHGMALISDDIYQEAQTACHGNYWNTTTDKCENALYKVDTSINDLNIYDILEPCYHSKTIKKVTPANTKLPKSFQHLGTTTKPLAVRTRMHGRAWPLRAPVRAGRVPSWQEFARGSRPSGVPCMSDEVATAWLNNDDVRAAIHAQPVSSIGSWLICTNVLDFIHDAGSMISYHKNLTGQGYRAFIYSGDHDMCVPYTGTEAWTRSLGYGVIDSWRPWHLNGQVSGYTQGYEHGLTFATIKGAGHTVPEYKPQESLAFYSRWLAGSKL

SEQ ID NO: 2202 - protein, 411 aa, Oryza sativa
MYSNFKEQAIEYVKQAVQEDNGGNYVKAFPLYMNALEYFKTHLKYEKDPKIKDAIAAKFTEYLRRAEEIRAVLDGHIGGGGGGGDSEQAKPRGMLRSAIVAAKPSVKWSDVAGLESAKEALQEAAILPIKFPHFFTGKRSPWKAFLLYGPPGTGKSYLAEAVATEVDSTFFSISSSDLVSKWMGESEKLVANLFQMARENAPSIIFIDEIDSLCGQRGECNENEASRRIKTELLVQMQGFDNSNDKVLVLAATNMPHVLDQAMRRRFDKCIYIPLPDLKARKDTFKIHIGDTPHSLTEGDFVSLAYQTEGFSGSDIAVCVKDALFQPVRKTQDAKFFIKADDDTWTPSEQSQPGSIQTTMQELASKGLAAKILLPPISKIDFDEVLVRQRPTVSKKDLVVYEKFTQEFTRL

SEQ ID NO: 2203 - protein, 717 aa, Oryza sativa
MASPEREEEEAARSPPPKRPRRDGDAPPEPQPARVGLNPADCDLDFDVGGGGLRGEALHDGGFAYCWSGARATVGVRGGGKYCFGCKVVAEQAVEMEDTAADQQHLCRVGVSRGGDPVGALGETGHSFGFGGTGKFSHQGKFVEYGVKFGVGDTVVCAVDLDSKPLASIGFSRNGEWLGIAKHFDASDKGLGLVESPVSSMQWESAIFPHVLLKNVVVEMQFSKEDGLQLVDGYELWPSACVDGNAVSGPVFAEQKECEIMMMVGLPASGKSTWAEKCIKEHKEKRFILLGTNLALVQMKVPGLLRKNNYGERFERLMDRATMIFNTLLTRAAKIPRNYIIDQTNVYKNARSRKLRPFANYRKTAVVVFPSPSELKVRAAKRFKEMGKDVPADAVNEMTANFVLPLSKDMPDSKEPFDEVIFVELSRDEAQRNLDEMKRLLPKASTPSYANFSNQNVSSTYSGTIAGTMPSLSPGYHRQMDSPYGSGVQTPRALTHQQAAWGVQGFQSPAGINHHQVHLSSYPNTPYQHQQIQSNHPSTPYQHQAQSTSYPSTPYQDQIHSSYPSNPTQHQIHLNYPSTPNQYQSHSTYPNTPFPGHGNSVYDSNGGPGPYNPNPYSMNTDMQQRIQAPIGDRNQSYAVVSNEAYGRSGYEAANSVGRPINTHPAVYNSGSGNYMPYMQHSHDVHNSGSQYSAPVPRPPYGAPPPNYMNPQTSIWHI

SEQ ID NO: 2204 - protein, 333 aa, Oryza sativa
MSQEGADLSQDVDESPYHTAVVTTNNLVRSIKAEKSNSSSSSGKPVETDIGLKVASPTMFGFNTKIEGTGKNMAVKREEGEGGGRPGVSSGVSTRDTNGKGKNAMDMEHALHIWTERERRKKMKNMFSTLHGLLPKIPGKTDKASIVGEAIGYIKTLEDVVQKLETIKTERVRAHQWAAAAAAAVAANGGGEGSSHSHSQPPRHATAVTVAVAEPAPVAAAVNAQAPQKKAAAAAAPTLQTWSAPNITLTMAGVDAFINMCLPRQRASFTTVAFVLEKHQIDVVTSTISADHDKSLFSVHVRLNEASLQSTEGLTPEAKYKLAVSELMVRLAE

SEQ ID NO: 2205 - protein, 605 aa, Oryza sativa
MELALVGDPSNGVAKPSCDSVGSLPAVSSKAVIHPPVTSAAGATLGRHLARRLVQIGATDVFAVPGDFNLTLLDYLIAEPGLKLIGCCNELNAGYAADGYARARGVGACAVTFTVGGLSVLNAIAGAYSENLPVICIVGGPNSNDYGTNRILHHTIGLPDFSQELRCFQTITCYQAVINNLDDAHEQIDTAIATALRESKPVYISVGCNLAGLSHPTFSREPVPLFISPRLSNKANLEHAVEAAADFLNKAVKPVMVGGPKIRVAKAKKAFAGIAESSGYPFAVMPSAKGLVPEHHPRFIGTYWGAVSTTFCAEIVESADAYLFAGPIFNDYSSVGYSLLLKREKAVIVQPDRVVVGNGPAFGCILMTEFLDALAKRLDRNTTAYDNYRRIFIPDREPPNGQPDEPLRVNILFKHIKELLSGDTAVIAETGDSWFNCQKLRLPEGCGYEFQMQYGSIGWSVGATLGYAQAAKDKRVISCIGDGSFQMTAQDVSTMLRCGQKSIIFLINNGGYTIEVEIHDGPYNVIKNWDYTGLIDAIHNSDGNCWTKKVRTEEELIEAIATATGAKKDCLCFIEIIVHKDDTSKELLEWGSRVSAANSRPPNPQ

SEQ ID NO: 2206 - protein, 888 aa, Oryza sativa
MNICAAILLFYILQFVHGQPDSQGSTQWKATADSQCSHVSFRGFISIDCGIPEKSSYQDPTSSIIYVSDYGFISTGANHNISSAYIKPSLAQRNYNVRFFPDGTRNCYTLRSLQEGNKYFVRAVFYYANYDSLNKLPVFDLYLGANYWHEVKFSNADAVNWMDIIVVAPADYLQVCLVNKGTGTPFISGLDLRPLKSTLYPEANTTQSLVLINSNRFNMGPTDNSITRYPLDPHDRLWSTYDTIPDWTEISATSVVQNYLTDVYDVPSAVMQSAATVNSSRINFTWDPSDPSVNISSKYFFVLYFSELQSVPSNGLRQFDIIVNNNTWNTQPYTPPFLFADSLSGTVQGLASYSVSLVATKNATLPPILNAMEMYLVKPLTEFATDPRDARAMMEVQQNYDVKKNWMGDPCAPKAFAWEGLNCSYPPADSSKITSLNLSSSGLAGSIATYFGDLKSLQYLDLSSNDLSGPIPYNLLQKSQNGSLSLRVGYNAKLCGNDTECGSGQKKIKGSLLSAIIITIVATVALIVVLFLLLRRMLKAKDKRRAAGPTYESALLENREFSYRELKHITNNFSQQVGKGGFGAVFLGYLENGNPVAVKVRSESSSQGGKEFLAEAQHLTRIHHKNLVSLIGYCKDKNHLALVYEYMPEGNLQDHLRATTNKPLTWEQRLHIALDAAQGLEYLHVACKPALIHRDVKSRNILLTTNLGAKIADFGLTKFYQVTELPCHILPILFRYYRNYHISEKSDVYSFGVVLLELITGRPPVIPIDESVSIHIGEFVHQSLDHGSIESIVDARMGGGGGYDINSVWKVADLALHCKREVSRERPTMTEVVAQLKESLELESHGDRKHLVTGDDDVSVSNLGEETALEVEEQSGEISRVSPGPAVR

SEQ ID NO: 2207 - protein, 644 aa, Oryza sativa
MATTAAAAAAALSAAATAKTGRKNHQRHHVLPARGRVGAAAVRCSAVSPVTPPSPAPPATPLRPWGPAEPRKGADILVEALERCGVSDVFAYPGGASMEIHQALTRSPVITNHLFRHEQGEAFAASGYARASGRVGVCVATSGPGATNLVSALADALLDSVPMVAITGQVPRRMIGTDAFQETPIVEVTRSITKHNYLVLDVEDIPRVIQEAFFLASSGRPGPVLVDIPKDIQQQMAVPVWDTSMNLPGYIARLPKPPATELLEQVLRLVGESRRPILYVGGGCSASGDELRWFVELTGIPVTTTLMGLGNFPSDDPLSLRMLGMHGTVYANYAVDKADLLLAFGVRFDDRVTGKIEAFASRAKIVHIDIDPAEIGKNKQPHVSICADVKLALQGLNALLQQSTTKTSSDFSAWHNELDQQKREFPLGYKTFGEEIPPQYAIQVLDELTKGEAIIATGVGQHQMWAAQYYTYKRPRQWLSSAGLGAMGFGLPAAAGASVANPGVTVVDIDGDGSFLMNIQELALIRIENLPVKVMVLNNQHLGMVVQWEDRFYKANRAHTYLGNPECESEIYPDFVTIAKGFNIPAVRVTKKSEVRAAIKKMLETPGPYLLDIIVPHQEHVLPMIPSGGAFKDMILDGDGRTVY

SEQ ID NO: 2208 - protein, 175 aa, Oryza sativa
MANDSLTRSHIVGDVLDQFSNSVPLTVMYDGRPVFNGKEFRSSAVSMKPRVEIGGDDFRFAYTLVMVDPDAPNPSNPTLREYLHWMVTDIPSSTDDSFGREIVTYESPSPTMGIHRIVMVLYQQLGRGTVFAPQVRQNFNLRSFARRFNLGKPVAAMYFNCQRPTGTGGTEANLI

SEQ ID NO: 2209 - protein, 327 aa, Oryza sativa
MAQPTWSARRVTAALVVMVVVVLAVAGGSWAQLSPSFYSFSCPGVFNAVKRGMQSAIAREKRIGASIVRLFFHDCFVQGCDASLLLDDTASFTGEKTANPNNGSVRGFEVIDAIKSAVETICPGVVSCADILAIAARDSVAILGGPSWDVKVGRRDSRTASLSGANNNIPPPTSGLANLTSLFAAQGLSQKDMVALSGSHTIGQARCTNFRAHIYNETNIDSGFAMRRQSGCPRNSGSGDNNLAPLDLQTPTVFENNYYKNLVVKKGLLHSDQELFNGGATDALVQSYISSQSTFFADFVTGMIKMGDITPLTGSNGEIRKNCRRIN

SEQ ID NO: 2210 - protein, 759 aa, Oryza sativa
MGRRSSASSAAAGEPLLPAAASAKGGGGGGGRASMLQRCVSRADDELQWFRSCLRWVCMDHSGPWGAALSWLLFLLLAVAVPAAAHFLLAFRASRRPFSAVVQVSLSAASAAGFLCLSSSFRRIGLRRLLYLDKLRTKSDRVRLNYTARLSFSFRLLASLVAPCFAAEAAYKVWWYATSGDRVPFFGNDVLSNAVACSVEMAAWMYRSAIYLLTCVLFRLICHLQGLRLEDFAGTLLVEVEEGRAGVERVLREHLDIRKQLKVISHRFRKFIVASLLIATASQFASLLLTTRHDSVDDLLNTSELALCSVVLMSGLIIILSSAAKITHQAQALTGQTTKWHACCTIEPVPDEEAEPGSNHSSMLEVEPVSDSDGESSEETGDEDLLENTKIMLPQAHVISFQKRQALVTYLENNRAGITVFGFTLDRSYLHTIFMLEWTLFLWLLGKTIGFSYRSSQKGTGEELAGAPLPPLCLRALIKGLVADHGEAAPAVYAHTAKLGLDHRLAVRDGLVELYLARVELASAWALFDGFPAGWPGRRFLRMPVKKNVLVPAAAATSRPAVGPPRPGNDHPTAGRPAQSREKTILIPPQVSSPIGYRRCHLPAAAAINNHGDQQKRGLLELYQTGPIWAKSPAITKTWAEMWPINTTTDSAAAPATATSLAAASPPSSLLASQRSSPPWEAVAGGSGSGRPSPPQPPRHRGSPGGTPGLHGLPMEMTTGEMEAAIVALPAKKEALREAPSSSPRRLPLQALPPLSRLD

SEQ ID NO: 2211 - protein, 316 aa, Oryza sativa
MVAPSPDAGKPLVILLRPLYPEFAAALDGRFRFVLAADADEGNAAEARAVLVPALTPVSADLVARLPKLEIVVATSTGVDHIDLDACRRRGISVTNAGEVFAPDVADYAVGLVVAVLRRVAAAEAYLRRGRWAADGDYPLATKVSGKRVGIVGLGSIGGLVARRLAAFGCVIAYNSRSPKASAPYKFYPSVRELAAESDVLVLSCALTEETRRMVGREVMEALGKGGVLVNVGRGGLVDEAELVRCLREGVLGGAGLDVYENEPEVPPELWGMDNVVLSDHRAVITPESIQGVVDVVKANLDAFFSGKPLVSQVQL

SEQ ID NO: 2212 - protein, 157 aa, Oryza sativa
MGFVSFAGRVLFASVFLLSAYQEFSEFGADGGPAAKALRPKYNVFTKNISAHLGVAVPHVELKHIVAATIGLKGLGGLLFILSSSFGAYLLLIYLAFITPVVYDFYNYDMEKSEFVQLFMKFTQNLALFGALLFFLGMKNSIPKRQAKKKAPKSKTN

SEQ ID NO: 2213 - protein, 269 aa, Oryza sativa
  misc_feature (14)..(14): Xaa can be any naturally occurring amino acid
  misc_feature (119)..(119): Xaa can be any naturally occurring amino acid
  unsure (1)..(269): unsure at all Xaa locations
MATARLILLLTVCXAACVRGSCCFCSAQEVIVGGVGEQLATAPPAAPAPSPPPPYCGSVRTAVEAHNIIGWKTVPADCAEYVSDYLTGERYGRDSDVVINEAIAYAESLKLSGHGKEIXARGFDVDETALSTLPYQAKHGYGTKPYDHASFVQYVAGGSAPALQGTLRLYRRLLQLGIKPVFLTDRTEDQRAVTTHNLLSQGYYSWEKLLLQPVGLQTTTQAFKTGERQKLVSAGYVIIGNIGDQWSDILGSPEGYRTFKYPNPIYYVA

SEQ ID NO: 2214 - protein, 475 aa, Oryza sativa
MASGQKVVKPMEVSVEAGNAGEAAWLDDDGRARRTGTFWTASAHIITAVIGSGVLSLAWAIAQLGWVAGPAVMLLFAFVIYYTSTLLAECYRTGDPATGKRNYTYMDAVRANLGGAKVTFCGVIQYANLVGVAIGYTIASSISMRAIRRAGCFHHNGHGDPCRSSSNPYMILFGAVQIVFSQIPDFDQIWWLSIVAAVMSFTYSGIGLSLGIVQTISNGGIQGSLTGISIGVGVSSTQKVWRSLQAFGDIAFAYSFSNILIEIQDTIKAPPPSEAKVMKSATRLSVATTTVFYMLCGCMGYAAFGDAAPDNLLTGFGFYEPFWLLDVANVAIVVHLVGAYQVFVQPIFAFVERWASRRWPDSAFIAKELRVGPFALSLFRLTWRSAFVCLTTVVAMLLPFFGNVVGLLGAVSFWPLTVYFPVEMYIAQRGVPRGSARWVSLKTLSACCLVVSIAAAAGSIADVIDALKVYRPFSG

SEQ ID NO: 2215 - protein, 368 aa, Oryza sativa
MGRAPCCEKSGLKKGPWTPEEDEKLIAYIKEHGQGNWRTLPKNAGLSRCGKSCRLRWTNYLRPDIKRGRFSFEEEEAIIQLHSILGNKWSAIAARLPGRTDNEIKNYWNTHIRKRLLRMGIDPVTHAPRLDLLDLTSLLKPAAAAAYYPTQADLDTLRALEPLAGYPDLLRLASAILPAATTTGAAAAAAAEQAQLFLPWLLQAQMAQQQQQVTPPPPPPPQAAATEQFLQATSTACHQMPGLVHASPTQQLAQQPQDHMAAATCHRRGAVQHPSYDNQLDYVPALMQMASDASNLQQWSSTVSSSNNHNVNSGVSTPLSSPAAAGQINSSFTTTTTTYGLNASGDVDDAGLLINMHLSELLDVSDYM

SEQ ID NO: 2216 - protein, 617 aa, Oryza sativa
DTACRRLTASWVRDRAASDPDSTPLCDFFESFDRAAAAGDLASYMPPGVYTLADLRALGRDRGICPYFLARQMVKYANVVVYSYQYLIDPKVASIVSREMQKECVVVFDEAHNIDNVCIEALSVSIRKQTLEGRFKATDANRLRAEYNRLVDGLAQRGNLPISDAWLANPALPEDILKEAVPGNIRRAEHFLAVLRRLVRFLDGRLETENVENEMPVAFVASIHSQAGIDQKMLRFCYDRLHSLMLTLEITDTDEFMHIQTICDFATLIGTYTRGFSIIIEPYDERMPDIRDPVIQLSCHDASLAIQPVFERFQTVVITSGTLSPIDLYPRLLNFNPVISRSFTMSLTRDCICPMVLTRGSDQLPVSTKFDMRSDPGVVRNYGRLLLEMASAVPDGIVCFFVSYSYMDGIVNSWNEMGILQDIMQHKLVFIETPDVVETTLALDNYRKACDCGRGAIFFSVARGKVAEGIDFDRHYGRLVIMFGVPFQYTLSRILLARLEYLRETFQIKEGDFLTFDALRQAAQCVGRVIRSKADYGMMIFADKRYSRHDKRSKLPGWILSHLHDAHLNLSTDMALHIAREFLRRMAQPYDKTGSGGNKTLLTEEDLQNMAQDAMEM

SEQ ID NO: 2217 - protein, 758 aa, Oryza sativa
MKFDLEGLTVHFPYAAIYPEQHAYMGELKRALDARGHALLEMPTGTGKTSALISLITSYSLASPSRPLRLIYCTRTVQEMEKTLAELRLLFAHLPAAASRSLLALGLSSRKNLCVHPQASAAAARDSVDTACRRLTASWVRDRAASDPDSTPLCDFFESFDRAAAAGDLASYMPPGVYTLADLRALGRDRGICPYFLARQMVKYANVVVYSYQYLIDPKVASIVSREMQKECVVVFDEAHNIDNVCIEALSVSIRKQTLEGAERNLRRISQEIDRFKATDANRLRAEYNRLVDGLAQRGNLPISDAWLANPALPEDILKEAVPGNIRRAEHFLAVLRRLVRFLDGRLETENVENEMPVAFVASIHSQAGIDQKSPGCRNSARGSLMLTLEITDTDEFMHIQTICDFATLIGTYTRGFSIIIEPYDERMPDIRDPVIQLSCHDASLAIQPVFERFQTVVITSGTLSPIDLYPRLLNFNPVISRSFTMSLTRDCICPMVLTRGSDQLPVSTKFDMRSDPGVVRNYGRLLLEMASAVPDGIVCFFVSYSYMDGIVNSWNEMGILQDIMQHKLVFIETPDVVETTLALDNYRKACDCGRGAIFFSVARGKVAEGIDFDRHYGRLVIMFGVPFQYTLSRILLARLEYLRETFQIKEGDFLTFDALRQAAQCVGRVIRSKADYGMMIFADKRYSRHDKRSKLPGWILSHLHDAHLNLSTDMALHIAREFLRRMAQPYDKTGSGGNKTLLTEEDLQNMAQDAMEM

SEQ ID NO: 2218 - protein, 238 aa, Oryza sativa
MVENRLVGMKSHSVYETLGDTIMAAAIRELESLTLDREIMQWKDILALKIRQVGLCWPLVRPTPAIHGCLHGEEPLQPVRGGHFLQHGIGRIDMVENRLVGMKSHGVYKTPGDTIMAAAVRELESLTLDREIMQWKDILALKYTKLVYVGRWFDPLQQSMDAFMEKVTETTTGSVTLKLYKGSVNIASRKSPYILYGEDISSFENGKIYNQAKTLRDSSGCMVSPHECGQCWTRVYKI

SEQ ID NO: 2219 - protein, 669 aa, Oryza sativa
MARDKQSALIVAAFVLLCSGCLCGVADGAKGGRKTKGPVIGIDLGTTYSCVGVYRNGHVDIVANDQGNRITPSWVAFTDDERLVGEAAKNQAALNPDRTIFDIKRLIGRRFDDEEVQRDVKYLPYKVVDKGGKPYVEVRVKAGEVKVFSPEEISAMILAKMKETAESYLGQRVTDAVVTVPAYFNDAQRQATKDAGTIAGLNVPRIINEPTAAAIAYGLDRKGAGEMTNVLVYDLGGGTFDVSVLSLDHGVFEVLATSGDTHLGGEDFDRRVMDHFIRLVKRQHGRDIGGDGRALGKLRRECERAKRALSRQHQVRVEIEALFVGVDFSETLTRAKFEELNMDLFKKTLGPVRKAIADAKLKKSDIDEIVLVGGSTRIPKVQELLKEMFDGKEPTKGINPDEAVAYGAAVQGSIISGEGGAETKDILLLDVTPLTLGIETAGGVMTKLIPRNTRIPVKKSQVFTTYEDHQTTVSIKVFEGERSLTKDCRELGRFDLSGIAPAPRGVPQIEVTFEVDENGILHVTASDKAAGRSKSITITNDKGRLSQEEIDRMVREAEEFAEEDRRVRERVDARNRLENYVYRMRSAVRDGGMAGKIGDDDRERMESALTEALEWLEDNDGGARTAEKEDYEEKLKEVEQVCGPIIKQVYKKSGDASAGAGDDDDVNEL

SEQ ID NO: 2220 - protein, 818 aa, Oryza sativa
MEGSRVDAVAGGRRWGEGEEGGRRGGGGGGGGGGGGTGGGGGGGGRRGGEDGGEVSLREWLDRPGRAVEAPECLHVFRQVAESVAIAHAQGVAVGSARPSCFVVSPPFARVAFIESASGSDVSGSCSGSDGSEEADPEPSPPRRRRDGASGGEDRGGKTFPLRSVLAMELTWYTSPEEADDRGGATFASDVYRLGVLLFEVRVLEIKCALFCTFETMEEKMRAMANLRHRVLPPQLLLKWPKEASFCQLLMHPVPETRPKMSDVLQSEFLNRSRNSLEEREAALRLREEIEEQELLLDFLLQLQRRKQDIADNLQDTVAFLSSDINEAHQQSALGQCGNFSFELDKEVCSETVEDQSDCGSRKRFRPELPAVDMEEQNRSLEECSGTVPSSVLIQESVLSKSSRLMKNFKKLETAYFLTRSKLAKQVGNPVSSCHQVVKRTTGSPVVTEGSSIDDFALEGHYGTRQRGWMNSFLEGLCSYLSFSKLKVKAELKQCDLLNSSNLVCSVGFDRDKEFFATAGVNKKIKVFEYNMIVNEHCDIHYPVVEMSNRSKLSCICWNSYMKSHIASSDFEGIVQVWDVTRSQVFVEMREHERRVWSVDFSLADPTKLVSGSDDGSVKLWNMNQAILFLHLAGSVGTIRTRANVCSVQFQPDSARSIAIGSADHKIYCYDLRNIRAPYCTLVGHTKTVSYVKYVDASTIVSASTDNSLKLWDLSMSQARIIDSPLQTFTGHTNTKNFVGLSISDGYIATGSETNEVFVYHKAFPMPVLAYKFSVTDPISGQEIDDPSQFISCVCWRGQSSTLLSANSSGNIKILEMD

SEQ ID NO: 2221 - protein, 378 aa, Oryza sativa
TGPPGRQCYGSMELTESKCDGGQEVSLLDAQLELYWNTFAVIKSMALKSALDLRIADAVHLHGGAATLAEIASEVALHPSKIPCLRRLMRALTVSGVFAAAVKPGDGGGGEPVYELTPSSRLLVGSSNLSGIMSMILHPTLVVPFLGVGEWLRRDREPPEEDPYCIFKQAHGRSLWELAGRDAAFDALINDGMVSDSRVIMDYVVREHGEVFRGIASLVDLAGGLGAAAQVISKAFPEVRCSVMDLGHVVAKAPAGTDVEYIAGDMFESVPPADAVFLKWVLHDWGDDDCIKILKNCKKAIPPRDKGGKVIIMDIVVGAGPSDQKHREVQALFDMYIMFVNGIERDEQEWKKVFMGAGFSGYKIMPVLGFRSMIEVYP

SEQ ID NO: 2222 - protein, 228 aa, Oryza sativa
MDTIKSFKGYGKVDELEQQAYQKKTRKRLIIIAVSSIVLFAVIIAAVAGVVIHKRNTSSSPSSDSPPQTELTPAASLKAVCHVTQYPNSCFSAISSLPESNTTDPELLFKLSLRVAIDELSKLSSFPSKLRANAEHDARLQKAIDVCGNVFGDALEQLNDSISALGSGAADAGKIISPASVGDVETWISAALTDQDTCLDALAELNSTASRGALREIDTAMRNSTEFA

SEQ ID NO: 2223 - protein, 190 aa, Oryza sativa
MVGGEVMCEAAAPRYRGVRKRPWGRFAAEIRDPAKRARVWLGTYDSAEAAARAYDVAARNLRGPLARTNFPLVSSLPLPSPHYHLPGKAAAAAPPVAGPACSASSTVESSSGPRGPRPAATAAAVPRRRVPRPAPPAPDAGCHSDCASSASVVDDADDASTVRSRVAAFDLNLPPPLDRDHVDLCTDLRL

SEQ ID NO: 2224 - protein, 350 aa, Oryza sativa
MSQRRVAGPMGVMSKQQQEAMAEEMMELRRGPWTLEEDNLLMNYIACHGEGRWNLLARCSGLKRTGKSCRLRWLNYLKPDIKRGNLTPEEQLLILELHSRWGNRWSRIAQHLPGRTDNEIKNYWRTRVQKQARQLKVDANSTVFRDAVRCYWMPRLLEKMAGAATDPTPPPPPPLHHHAAMATASSSPFDFDTHLQQAEAATACVVPNNVYHHHIDPSPSTSTSAGSTAAAAAFQPLPCFSELRWDQQMQSSGELDDGAAGVFVDSASALGSLSLDGLDLGPAEYYSDSTLLDYLNSSCTGSAMMTMMTASGNAGSYNYCGGAMDGGDTWRSDEVCQAAARKLGEWGGGI

SEQ ID NO: 2225 - protein, 912 aa, Oryza sativa
MNPDNFTHKTNEALVAAHEIASEAGHAQLTPLHLVAALAADKGGILRQAISQASGGDAGAPDSFERVVSGALKKLPSQSPPPDSVPASTALIKVIRRAQSAQKKRGDSHLAVDQLLLGLLEDSLISDCLKEAGVSAARVRAELEKLRGGEGRKVESASGDTNFQALKTYGRDLVEQAGKLDPVIGRDEEIRRVVRILSRRTKNNPVLIGEPGVGKTAVVEGLAQRIVRGDVPSNLLDVRLIALDMGALVAGAKYRGEFEERLKAVLKEVEEAEGKVILFIDEIHLVLGAGRTEGSMDAANLFKPMLARGQLRCIGATTLEEYRKYVEKDAAFERRFQQVFVAEPSVPDTISILRGLKEKYEGHHGVRIQDRALVVAAQLSARYIMGRHLPDKAIDLVDEACANVRVQLDSQPEEIDNLERKRIQLEVEHHALEKEKDKASKARLVEVKKELDDLRDKLQPLTMKYRKEKERIDEIRKLKQRREELQFTLQEAERRMDLARVADLKYGALQEIDVAIAKLESETGENLMLTETVGPEQIAEVVSRWTGIPVTRLGQNDKERLVGLADRLHQRVVGQAEAVSAVAEAVLRSRAGLGRPQQPTGSFLFLGPTGVGKTELAKALAEQLFDDENLLVRIDMSEYMEQHSVARLIGAPPGYVGHEEGGQLTEQVRRRPYSVILFDEVEKAHVAVFNTLLQVLDDGRLTDGQGRTVDFRNTVIIMTSNLGAEHLLAGMVGKNSMKVARDLVMQEVRRHFRPELLNRLDEIVIFDPLSHEQLRKVARLQMKDVAVRLAERGVALAVTDAALDVILSLSYDPVYGARPIRRWIEKRVVTQLSKMLIQEEIDENCTVYIDAAPHKDELAYRVDNRGGLVNAETGQKSDILIQVPNGAATGSDAAQAVKKMRIMEDEDGMDEE

SEQ ID NO: 2226 - protein, 412 aa, Oryza sativa
MEAKLSAASRRVAPSPIQQLSHLAQRAGAVNLAEGFPDFPAPAHVKAAAAAAIAADLNQYRHVQGICDALAETMKRDHGLRVDPLTDFAVCCGQSEAFAAAIFAIIDQGDEVLLFDPAFETYQTCIELARGVPVYVPLDPPSWTLNEDKFLKSFTNRTKAVVLNSPHNPTGKVFSREELLIIAQACQKMDCFAITDEVYEYITYDENKHISLASLPGMQERTIITSSLSKTYSVTGWRIGWACAPANIASAIRNIHVKLTDSAPAPFQEAALVALTSPPDFYSSLKQDYTARRDFILQVLTDFGFRISFKPQGSIFVFVELPRSWQLSDMDFVTNLIKNAGVAAVPGRGFFHSSTDDPSYHHRYVRFAFCKSNDTLNAAAEKMRKLAVSHDARLLRPTDDGEAGQTASATSP

SEQ ID NO: 2227 - protein, 363 aa, Oryza sativa
  misc_feature (290)..(290): Xaa can be any naturally occurring amino acid
  unsure (1)..(363): unsure at all Xaa locations
MELGLSLGEAMADAGRELVLGLGMGRREEAAEAGRRDHEVRRELEFGSMSSRCGGSSPEPTVRLTLLPMVPGLGLPWPPPPPPSSESRHLEASTRGFDVNRPPSSGGGGGGGGAEEEQDDVAGAALSSSPNNSAGSFPMDDFSGHGLGGNDAAPGGGGGDRSCSRASDEDDGGSARKKLRLSKEQSAFLEESFKEHSTLNPKQKLALAKQLNLRPRQVEVWFQNRRARTKLKQTEVDCEYLKRCCETLTEENRRLQKELAELRALKTVHPFYMHLPATTLSMCPSCERVXASNSAPATASSAATSSTAAPPAAPSSGGIAATSSSAAAAAAPDHRPSSFAALFSSPRGFPLSVAPQAQPPTSS

SEQ ID NO: 2228 - protein, 703 aa, Oryza sativa
MTIPMAHSSRPTLGFPLGTALLIFVIFSLSGIFSCCYHWDKLRAFLWSRHPDVILQEGQHTVISIASPSKTTSDHKNEKAEKECGLPVIMPGDRIPKFFARPCPHEKCLPAAEEEEAEPIPGVALMHTSYWWHLAILKYEPAIDGAYRGWRQFGWGFAVAMRADGCPLCWTAIRVQTVYDAYGPLTLYRDLVSQGKLQHDIYQENVATQLDNLLRRLEQYEMEMEDYHARLSMWENTREKQRRRLLVQEAEDKQRDGVWIDEKRGFLDKLVSRKRRGNIEPGVGKWVSYLNREKKLDTLVGQKPVAPIAPKGIYLYGNVGSGKTMLMDMFYGATEGLIKHRRRFHFHEAMLEIHDHMHDVWKRRDEDKSIESSAFSWISSLPFDGKIKEWLIGEEKYKQNTQQNHILLAVADKFLVDRQANKSGASILCFDEIQDGMQREIFLDLLSKLDENCNKILVGTETDYRRLIPTDGLTQIHYFWPLTSDIRSMYEAMWHDITRQTGGNIISVTIPVMFGRYLEIPKSCNGVARFDFEYLCGRPVGAADYIAIARNYHTIFISDIPAMSMKIRDKARRFITLIDELYNHHCRLVCLAASSIDDLFQGTDEGPLFDLESFQFEGEAEGAKLRRDVLAEGNVGAAPSPTGLVAILSGQEEMFAFRRAISRLIEMQTSLYLERVERVHSSLQQQSSVLTKSSTVSQSAPSV

SEQ ID NO: 2229 - protein, 906 aa, Oryza sativa
MERSLLPWLLLLLCFADGVFQSRAQPDSKGFISIDCGIQPNTSYVHNTTKISYVADDDFTDGGSNYNVSPEYIKPQLSQRYYNLRAFPDGARNCYTARSLAPGIKYLIRASFLYGNYDGLNKLPVFHLYIGVNFWTMVNITSLGLGGSRYEEAIVVVPDDFVQVCLINTGTGTPFISSLELRPLDKRLYPQVNATLGLLQLNRLNFGPTDNSLVRYPDDPHDRFWGNWDSYTSSLWKEISTASRVDNLDGDIFDAPTAVMQTAVTPRNASGNIYFFWEPWPQPNDPTPPYTVIFHFSELEILTNNASRQFYINLNGEPLIDTAYEPTYLTARYLYGLEPLERTSRYNITINATANSTLPPLINAAEIFSIISTAVIGTDSQDASSMMAIKDKYQVKKNWMGDPCMPKTFAWDKLTCSYPNSSGARIISLNLSSSGLSADISSAFGNLKALQYLDLSNNSLTGSIPDVLSQLPSLRVLDLTGNQLSGSIPSGILKRIQDGSLNVRYGNNPNLCINGNSCKAAKKKSKLAIYTVIPAVLVVLIASVTTLFCLLRRKKQGPMNNSLEQQNEMSTSTSHVLINSGYGDNVSLRLENRRFTYKELEKITNKFKRVLGRGGFGYVYHGFLEDGTEVAVKLRSESSSQGAKEFLIEAQILTRIHHKNLVSMISYCKDGIYMALVYEYMPEGTLEEHIVGENKKGKILNMEREAQYRIGICTRDVKATNILLNTRLEAKIADFGLSKASSYDNITHVSTNALVGTLGYVDPEYQMTMQATTKSDVYSFGVVLLELVTGKPAILHEPNPISVIHWTRQRLARGNIEDVVDTCMPSDYDVNGVWKAMDIAFTCTAQASTQRLTMTEVVMQLQECLELEDARCAIGDAHNEFYPDPRSDHNLSYNTYVSDRSNDVLE

SEQ ID NO: 2230 - protein, 146 aa, Oryza sativa
MTSARPYYVGRASRRREESSSSSSRPSDSEQLEEPSKPVMALDKAKEIVASSPVVVFSKTYCPFCARVKRLLAELAASYKAVELDVESDGSELQSALADWTGQRTVPCVFIKGKHIGGCDDTMAMHKGGNLVPLLTEAGAIATPSL

SEQ ID NO: 2231 - protein, 73 aa, Oryza sativa
DGFVSVRTEKGSTKDDLRLPTDDNLLREIKDGFGEGQDSVATAMPAMAYMLPCDGADFSRKLSYPEPWAQYSY

SEQ ID NO: 2232 - protein, 233 aa, Oryza sativa
MGHTAAAAAAAGPALGLTKPNAVEPPQVSFAAKDVEMASERVKGTVKWFDATKGFGFITPDDGGEDLFVHQSSLKSDGYRSLNDGDVVEFSVGSGNDGRTKAVDVTAPGGGALTGGSRPSGGGDRGYGGGGGGGRYGGDRGYGGGGGGYGGGDRGYGGGGGYGGGGGGGSRACYKCGEEGHMARDCSQGGGGGGGYGGGGGGYRGGGGGGGGGGCYNCGETGHIARECPSKTY

SEQ ID NO: 2233 - protein, 185 aa, Oryza sativa
MANDSLATGRVIGDVLDPFISTVDLTVMYGDDGMPVISGVELRAPAVAEKPVVEVGGDDLRVAYTLVMVDPDAPNPSNPTLREYLHWMVTDIPASTDATYGREVVCYESPNPTTGIHRMVLVLFRQLGRETVYAPAVRHNFTTRAFARRYNLGAPVAAVYFNCQRQAGSGGRRFTGPYTSRRRQA

SEQ ID NO: 2234 - protein, 178 aa, Oryza sativa
MSMSRDPLVVGSIVGDVVDHFGASALLRLFYNHREMTSGSELRPSQVAGEPAVQITGGRDGRALYTLVMVDPDAPSPSNPSKREYLHWLVTDVPEGGDTSKGTEVVAYESPRPTAGIHRLVFIVFRQTVRQSIYAPGWRSNFNTRDFAACYSLGSPVAAAYFNCQREGGCGGRSISQC

SEQ ID NO: 2235 - protein, 749 aa, Oryza sativa
MGRGSHGCSVLGSSLLLLFCLGSAAAQKASTWKTLSGNPPAIIAKGGFSGLFPDSSDFAYGFVAAASSPDTALWCDVQLTKDGAGICLPDIRMDNCTNIANVYPKGKKTYSVNGVSTPGWFSVDYDSTGLSKVNLVQSLFSRVPYYDGTLPILPVESVFANYKAPAVWLNVQHDSFYSQFNLSMRSYILSVSKQYIADYISSPEVNFLTSLSGRVNKKTKLVFRLLNELAVEPSTNQTYGSMLKNLTFIKTFASGILVPKNYIWPVTQDNYLQPSTSVVGDAHKAGLEVYAADFANDFLLSYNYSYDPLTEYLNFIDNGAFSVDGVLTDFPITPSEAIGCFSNLNNSKTDNAKPLIISHNGASGDYPDCTDLAYQKAVTDGADVIDCPVQVTKDGIPICMSSIDLMDVTTVSTSQFSSQTTVIKDIKNGAGVYSFNLTWDDIAKNLKPKISNPMTTFDVYRNPRNKNAGSFMRLSDFLAFAKGKELSGVMISIEHAAFMAEKLGFGVVDAVIKALDDSGYSKQTAQKVMIQSTNSSVLVKFKEQTKYNLVYMLEEDVRDAAPSSLADIKKFANAVSVRTTSIYPESKHYLINQTSHIVQTLQSAGLPVYVYVLMNEFVSQPNDFFADATTQINTYVQKKGAGVDGIITDFPATVHRYRLSPCTSKESNLPTFMLPVQPGGLSGTIIDPAAQPPAMAPMPLLTDSDVAESPLPPVKNVTAPAPGASRAIKMRTDASIIVALLVLCASLII

SEQ ID NO: 2236 - protein, 269 aa, Oryza sativa
MVMEDGEMSLSNLVLGFFEEAEREQRWPENGDDDDEGSSGSGAAESKAFWQNQHSQLHEALAKTSQVESRIREDTEEAIRKMRAAGAVCSCARRAAAGDCRSCTLRHVDERLRDAGYNSAICKSKWTRSPDIPSGEHSYVDVVVQTRSGKAVRVVVELNFRAEFEVARASAEYRALVTALPEVFVGRADRLRAVVKAMCAAAKQCMKENNMHMGPWRKHKYMQSKWLGTPERVAAAAAAPVAVWSPEKQTKFRASMLSFDFARAAVEVA

SEQ ID NO: 2237 - protein, 200 aa, Oryza sativa
MARVYVGNLDPRVTAREIEDEFRVFGVLRSVWVARKPPGFGFIDFDDRRDAEDAIRDLDGKNGWRVELSTKAGSGRGRDRSGGSDMKCYECGEPGHFARECRLRIGSGGLGSGRRRSRSRSRSPRYRGRSRSRSPRYRRSPSYGRSPRDRSPKRRSYSRSPPPARARSYSRSPPPPRERSYSRSPAQPANREESPYANNA

SEQ ID NO: 2238 - protein, 233 aa, Oryza sativa
MAANVGESTSSGTNGDAAGGSFECNICFELPQEPIVTLCGHLFCWPCIYRWLHIHAHSPECPVCKAVVEEDKLVPLYGRGKDRVDPRSKNIPEADIPNRPTGQRPATAPQADPNNNFAHANPNANANPWFMGTGVPLANARWGNYAFSAAFGGLFPMLSFQVHGFPDANPYAQPAGFHYGYGHGHGFHGGHMGHAAHGVPRQGPLEQPQQADIYLKALLIMVGFLVVASLLAF

SEQ ID NO: 2239 - protein, 452 aa, Oryza sativa
  misc_feature (343)..(343): Xaa can be any naturally occurring amino acid
  misc_feature (362)..(362): Xaa can be any naturally occurring amino acid
  unsure (1)..(452): unsure at all Xaa locations
MGEESSPAAAPAVEVLSYFVCPISLEIMRDPVTLSTGITYDRESIERWVFTDGHGECPVTKQRLAPADREPTPNHTLRRLIQGWCAVHAVERFPTPRPPVDAARVAAIVDAARPLLRRRRQREELMASLRELADIVAESDRNRRCVQGASGAVEFLLSVVKERASVAGVDDATSAKPEETTCGGVHDPAKASSPEEAALSILHSLKLSEESFKRVLEGSGGEDFLETMACVLRRPSYLSRMQGIHLLKSALPAMAPARLTSARAALVDGVVGVVADRPSAKAVKVALHVLCRLCPWARNRVKAVDAGAVSALVRLLLDEGCGGGGGDRRACELAAVAIDHICXGCAEGRLALVAHPAGLSAXVACSADRCPHTAGAESAVRALHAVARHSATSAVLQEMLPVGVVARLLFLVQVGASGERTRARAREMLKMHARVWRDSPCLASHLNASYPR

SEQ ID NO: 2240 - protein, 241 aa, Oryza sativa
MGGEAERCALCGAAAAVHCEADAAFLCAACDAKVHGANFLASRHHRRRVAAGAVVVVEVEEEEGYESGASAASSTSCVSTADSDVAASAAARRGRRRRPRAAARPRAEVVLEGWGKRMGLAAGAARRRAAAAGRALRACGGDVAAARVPLRVAMAAALWWEVAAHRVSGVSGAGHADALRRLEACAHVPARLLTAVASSMARARARRRAAADNEEGWDECSCSEAPNALGGPHVSDTARQK

SEQ ID NO: 2241 - protein, 250 aa, Oryza sativa
MATRRCLLRLLSRRLLAHTPQPASLASIATRTLASLAKPLVPQASRVLASPRLFPSRCHYASNRSSGDEEEGDDDDHYDEEGSGDEWGEEEEEAVAAKPPSGKTEEEKVAEAAEIGYTVVGPLGADEKPFKPYEPVFAVVQIGSHQFKVSNGDSIFTERLKFCDVNDKLILNRVLMLGSQSQTVIGRPTLPDATVHAVVEEHALDAKVIIFKKKRRKNYRRTKGHRQELTKLRITNIEGIDKSEATAVAA

SEQ ID NO: 2242 - protein, 243 aa, Oryza sativa
MATARLLLVLTVVAAAGSCFCSAQEAKPPPYCGSVRTAIEAHNIIGWKTFTADCAKYLADYLTGDRYPRDADVVINEAIAYAESLKLSGSGKEIWVFDVDETALSTLPYQANHGYGVQPYDQASFIQYVSEGSAPALQGTLRLYQRLLQLGVKPVFLTDRTEDQRTVTTNNLLSQGYCSWEKLLFQPVGLQTTTQAFKTDERQKLVDAGYVIVGNIGDQWTDILGSPEGCRTFKYPNPMYYVA

SEQ ID NO: 2243 - protein, 465 aa, Oryza sativa
  misc_feature (257)..(257): Xaa can be any naturally occurring amino acid
  unsure (1)..(465): unsure at all Xaa locations
MDDPGAADPGARPHHVSPGQPPVVPRSPTPLDLSSAAAAAAAASYRRLSPSLRPPAHPQARLPSPYPQIPSSSSSAAAGSSGHHARSLSQPLFFSLDSLPPLPYADLAAPPAIPPSPPSSSSDPPPPGLPPRKGGHRRSQSDIPFGFSHLSPPLPPPAPVKREAATAAEGCRSDGDDFALYDLVNSYMDLDGMEALNSSEERHEDRDSRASGTRTGSVADSSENEAESHSTPVERKDGGGKSRHCRSLSVDSFIEKXLNFDESPKLPLPSPSGGLSRSGSGSLDGGAASLFGAEFANGEFTEAEKKKIMANERLAEIALTDPKRVKRILANRQSAARSKERKMRYIQELEHKVQVLQTEATTLSAQLTMLQRDSTGLATQNNELKIRLQAMEQQAQLRDALNEALTAEVQRLKLATGEITDGRMSKGLQQQMNSQLIQLQQLQIQQQQSSQTTQQGQQQQPQKSA

SEQ ID NO: 2244 - protein, 234 aa, Oryza sativa
MAANVGESTSGSSSGGADSGGSFECNICFELPQEPIVTLCGHLFCWPCLYKWLHIHSHSPECPVCKAVVEEDKLVPLYGRGKDRVDPRSKNVPGADIPNRPAGQRPATAPQANPNTHFPNANPNPWFMGGGIPLANARWGNYTFSAAFGGLFPLLSFQVHGFPDATAYGQPAGFPYGYGHGHGHGHGHAFHGGHAHAAAAPRHGPPGQQQQADVYLKALLILVGFLVIASLITF

SEQ ID NO: 2245 - protein, 386 aa, Oryza sativa
MAKPISIEVWNPSGKYRVVSTKSMPGTRWIRLLADNDCRLEICTETKTILSVDDILALIGDRCDGVIGQLTEEWGEVLFSALKRAGGTAFSNMAVGYNNVDVEAANRNGIAVGNTPGVLTETTAELAASLSLAAARRIVEADQFMRAGLYDGWLPHLFVGNLLKGQTVGVIGAGRIGSAYARMMIEGFKMNLIYYDLYQSTRLEKFVTAYGQFLKANGEQPVTWKRAATMEDVLREADVISLHPVLDKTTYHLINPERLAIMKKEAVLVNASRGPVIDEVALVEHLKANPMFRVGLDVFEDEPYMKPGLADMKNAVVVPHIASASKWTREGMATLAALNVLGKIKGYPVWGNPNLVEPFLKEDATPPAACPSIVNAKQLGLPSSKL

SEQ ID NO: 2246 - protein, 591 aa, Oryza sativa
MCGILAVLGVADVSLAKRSRIIELSRRLRHRGPDWSGIHCYQDCYLAHQRLAIVDPTSGDQPLYNEDKSVVVTVNGEIYNHEELKANLKSHKFQTASDCEVIAHLYEEYGEEFVDMLDGMFAFVLLDTRDKSFIAARDAIGICPLYMGWGLDGSVWFSSEMKALSDDCERFISFPPGHLYSSKTGGLRRWYNPPWFSESIPSTPYNPLLLRQSFEKAIIKRLMTDVPFGVLLSGGLDSSLVASVVSRHLAEAKVAAQWGNKLHTFCIGLKGSPDLRAAKEVADYLGTVHHELHFTVQEGIDALEEVIYHVETYDVTTIRASTPMFLMSRKIKSLGVKMVLSGEGSDEIFGGYLYFHKAPNKKEFHEETCRKIKALHLYDCLRANKSTSAWGVEARVPFLDKNFINVAMDIDPEWKMIKRDLGRIEKWVLRNAFDDEEKPYLPKHILYRQKEQFSDGVGYSWIDGLKDHANEHVSDSMMMNASFVYPENTPVTKEAYYYRTIFEKFFPKNAARLTVPGGPSVACSTAKAVEWDAAWSKNLDPSGRAALGVHDAAYEDTLQKSPASANPVLDNGFGPALGESMVKTVASATAV

SEQ ID NO: 2247 - protein, 762 aa, Oryza sativa
  misc_feature (658)..(658): Xaa can be any naturally occurring amino acid
  misc_feature (673)..(673): Xaa can be any naturally occurring amino acid
  unsure (1)..(762): unsure at all Xaa locations
MASSHHQEVQEQGHGDGEEEEQDNSQITSPLLRSSMRLGSPEENSPVEQVALTVPVGDDPATPVLTFRIWVLGTASCVVLSFLNTFFWYRKEPLTVTAISAQIAVVPLGRLMAAALPERVFFRGRPWEFTLNPGPFNVKEHVLITIFANAGAGSVFAINVITAVRVFYGKRISFFVSLLVVLTSQVLGFGWAGIFRRYLVEPAAMWWPSNLVQVSLFRALHEKERRSKGGMTRTQFFLVAFVCSFAYYIFPGYLFQMLTSLSWICWIFPKSVLAQQLGSGLHGLGIGAIGLDWSSISSYLGSPLASPWFATANIAAGFFIYIYVITPIAYWINLYKAQNFPIFSDGLFTVTGQKYNISTIIDSQFHFDTKAYEKNGPLYISTFFSISYGLGFACLTATVVHVLLFHGSEIWQLSRSAFQDKKMDIHTKLMKRYKQVPEWWFISILIASVAITMFTCEYYIEQLQLPWWGVLLACALAIFFTLPIGIVTATTNQTPGLNIITEYIMGYLYPGRPVANMCFKVYGYIGPQQALAFLQDFKLGHYMKIPPRTMFMAQVVGTLIAAFVYLGTAWWLMDTIPNICNTELLPPGSPWTCPYDHLFYDASVIWGLMGPRRILGDLGTYSAVNWFFLGGAMAPLLVWFAHKAFPSQKWILLVNMPXVLIAGISQMPPATSXVNYTAWIFVAFLSGYVVYKYRRDWWERHHYLLSGALDAGLAFMAVLLYLCLGVEKISLNWWGNDLDGCPLASCPIAEGITVQGCPVASA

SEQ ID NO: 2248 - protein, 310 aa, Oryza sativa
MEMMRMAMSPAMSSATAAAASEDEGDLRRGPWTVEEDMLLVDYIANHGEGRWNSLARCAGLRRTGKSCRLRWLNYLRPDVRRGNITADEQLLILDLHSRWGNRWSKIAQYLPGRTDNEIKNYWRTRVQKHAKQLRCDVNSKEFRDVVRHVWMPRLIERIQADAAAAGEVAAPAPVSAAATRSMSSPAGAMYLHHQQIPLAAGAMVVAPAVSSEAYHHHGCGGGGDTSCSEPSQAAVTMSPDDASSTLRSSSAAAENDTIHGDVLSGSWSELLATTTTTIAATAGLPDFDELGDFEDNLWSLEDIWLHQQC

SEQ ID NO: 2249 - protein, 292 aa, Oryza sativa
  misc_feature (78)..(78): Xaa can be any naturally occurring amino acid
  misc_feature (122)..(122): Xaa can be any naturally occurring amino acid
  misc_feature (274)..(274): Xaa can be any naturally occurring amino acid
  misc_feature (279)..(279): Xaa can be any naturally occurring amino acid
  unsure (1)..(292): unsure at all Xaa locations
MVMEDGEMSLSNLVLGFFEEAEREQRWPENGDDDDEGSSGSGAAESKAFWQNQHSQLHPHAYPRNTDVITIFSVELVXIWAKYLLVLRETMRAWMCTREALAKTSQVESRIREDTEEAIRKXRAAGAVCSCARRAAAGDCRSCTLRHVDERLRDTGYNSAICKSKWTRSPDIPSGEHSYVDVVVQTRSGKAVRVVVELSFRAEFEVARASAEYRALVTALPEVFVGRADRLRAVVKAMCAAAKQCMKENNMHMSPWRKHKCMQSKWLGHPRRGXAAEAXPVAVWSPAKADQG

SEQ ID NO: 2250 - protein, 519 aa, Oryza sativa
MANSEYEYVKREFELDSLLPPSNWIVVRIDGCHFHRFSKIHTFEKPNDERALRLMNACATSMLEKFPDIVFAYGVSDEYSFVFREETEFYQRRESKILSLCVSYFTSVYVMKWKDFFPNKELKEPPYFDGRVVCYPNLKTIRDYLAWRQVDCHINNQYNTCFWSLVKSGKTEKEAQQALKGTFSKDKNELLSQQFQINYDDEPAIFRKGSCVYRDKVETMVKTDRCGNPIKRTRLVITNANVDIIGPEFWENHPYILREEKCRYENVKKFDINHRLPPCNWTVVRIDICKFEQFSLIHSFDKPNDEAALRLMNASASLMMESFPDIVFGYGFSNEYSFVFQDKTELYQRQESLILSSCTSRFTLFYMMKWKDFFPNKDLVEPPHFEAELLCYPKQKILCDYLSSRQAECHTTNQYSTCFWMLVKSGKSENEAREILKGTLSKDKNELLFQQFHLNYNNEPAVFRKGSCTYRQKVEESADAEGRENTTRERWDVIVAHADMGTEFWRKHPYILRKLDLLG

SEQ ID NO: 2251 - protein, 352 aa, Oryza sativa
MAMGMEGSGGGGSAKKKEESLPPGFRFHPTDEELITYYLRQKIADGGFTARAIAEVDLNKCEPWDLPEKAKMGEKEWYFFSLRDRKYPTGVRTNRATNAGYWKTTGKDKEIFTGQPPATPELVGMKKTLVFYKGRAPRGEKTNWVMHEYRLHSKSIPKSNKDEWVVCRIFAKTAGVKKYPSNNAHSRSHHPYTLDMVPPLLPALLQQDPFGRGHHPYMNPVDMAELSRFARGTPGLHPHIQPHPGYINPAAPFTLSGLNLNLGSSPAMPPPPPPPPQSILQAMSMPMNQPRSTTNQVMVTEQMIPGLANGVIPQGTDGGFTTDVVVGGTGIRYQNLDVEQLVERYWPGSYQM

SEQ ID NO: 2252 - protein, 486 aa, Oryza sativa
MGWLTKFFRGSTHKISEGQYHSKPAEETIWNGPSNSAVVTDVPSEFDNEESARAISLSLLEEEQRKAKAIEKDMHLEEDEQLARAIQESLNVESPPRARENGNANGGNMYQPLPFMFSSGFRTCAGCHSEIGHGRFLSCMGAVWHPECFRCHACNQPIYDYEFSMSGNHPYHKTCYKERFHPKCDVCKQFIPTNMNGLIEYRAHPFWLQKYCPSHEVDGTPRCCSCERMEPRESRYVLLDDGRKLCLECLDSAVMDTSECQPLYLEIQEFYEGLNMKVEQQVPLLLVERQALNEAMEGEKTGHHHLPETRGLCLSEEQTVSTILRRPRMAGNKVMEMITEPYRLTRRCEVTAILILYGLPRLLTGSILAHEMMHAWLRLKGYRTLSPDVEEGICQVLAHMWIESEIIAGSGSNGASTSSSSSASTSSKKGGRSQFERKLGDFFKHQIESDTSMAYGDGFRAGNRAVLQYGLKRTLEHIRLTGTFPF

SEQ ID NO: 2253 - protein, 486 aa, Oryza sativa
MGWLTKFFRGSTHKISEGQYHSKPAEETIWNGPSNSAVVTGVPSEFDNEDIARAISLSLLEEEQRKAKAIEKDMHLEEDEQLARAIQESLNVESPPRARENGNANGGNMYQPLPFMFSSGFRTCAGCHSEIGHGRFLSCMGAVWHPECFRCHACNQPIYDYEFSMSGNHPYHKTCYKERFHPKCDVCKQFIPTNMNGLIEYRAHPFWLQKYCPSHEVDGTPRCCSCERMEPRESRYVLLDDGRKLCLECLDSAVMDTSECQPLYLEIQEFYEGLNMKVEQQVPLLLVERQALNEAMEGEKTGHHHLPETRGLCLSEEQTVSTILRRPRMAGNKVMEMITEPYRLTRRCEVTAILILYGLPRLLTGSILAHEMMHAWLRLKGYRTLSPDVEEGICQVLAHMWIESEIIAGSGSNGASTSSSSSASTSSKKGGRSQFERKLGDFFKHQIESDTSMAYGDGFRAGNRAVLQYGLKRTLEHIRLTGTFPF

SEQ ID NO: 2254 - protein, 509 aa, Oryza sativa
  misc_feature (167)..(167): Xaa can be any naturally occurring amino acid
  misc_feature (389)..(389): Xaa can be any naturally occurring amino acid
  unsure (1)..(509): unsure at all Xaa locations
MDVVVESPPVRDEKKVDVAAIGGAPPIVFESFAPSTQRDSTIIKKEEKMEAAKAEMGEVREENERLKTMLTRIVSDYKSLHTHFLDVVKVKEQTAAELSGDDDDDEPDDLVSLSLCTRPNAAARSRKGHERTPSSGGGGDDGRLSLGLSCARGGVASDDDDDKQASXRRALPPMPVLNLSSDSSGDAAGAGAGEPTQPNKASRSSSGGGDGADDEVLQQQQAKKARVSVRVKCDTPTMNDGCQWRKYGQKISKGNPCPRAYYRCTVAPNCPVRKQVQRCADDMSILITTYEGTHSHPLPPAAAAMASTTSAAAAMLTSGSTTSTMHGGGGVHHHLPFASAVGGGGGVGLLGPTTISTATSCPTVTLDLTAPHSLLHPSSASPYAAAAAXGYESSRALPAAWSSGYLAYGGAAAAQPYYAKGVAPSPFGHHFGMMGMAAAAARPAPEQLFGGQTTSPYLQRAIGGGGVAPAAVTDTIAKAITSDPSFQSVLAAAITSYMGRGGGAAAPNK

SEQ ID NO: 2255 - protein, 340 aa, Oryza sativa
MGGVAAGTRWIHHVRRLSAAKVSTDALERGQSRVIDASLTLIRERAKLKAELLRALGGVKASACLLGVPLGHNSSFLQGPAFAPPRIREAIWCGSTNSSTEEGKELNDPRVLTDVGDVPIQEIRDCGVEDDRLMNVVSESVKTVMEEDPLRPLVLGGDHSISYPVVRAVSEKLGGPVDILHLDAHPDIYDAFEGNIYSHASSFARIMEGGYARRLLQVGIRSITKEGREQGKRFGVEQYEMRTFSKDREKLESLKLGEGVKGVYISVDVDCLDPAFAPGVSHIEPGGLSFRDVLNILHNLQGDVVAGDVVEFNPQRDTVDGMTAMVAAKLVRELTAKISK

SEQ ID NO: 2256 - protein, 378 aa, Oryza sativa
ERETRRRRRRRERERERGGGPSGVEVGGGGWGTPGGSVVSIDVERISFGGKEHHIHTNHGPVSVAVYGDHDKPALVTYPDIALNHMSCFQGLLFCPEAASLLLHNFCIYHISPPGHELGAAPISPNAPIPSVDDLADQVADVLDFFGLGSVMCLGVSAGAYILTLFAAKYRDRVLGLILVSPLCKPPTWTEWFYNKVASNLLYYYGMCGLVKEGLLQRYFSKEVRGCSDLPESDIVQACRSLLDQRQSMNVWRFVQTMNMRYDLTEDLKQLQCRTLIFVGEYSQFHTEAVHMTSKLDRRYCALVEVQACGSLITEEQPHAMLIPMEYFFMGYGLYRPSQLDCSPRSPLSPFCISPDLLSPESMGVKLKPIKTRVRLEV

SEQ ID NO: 2257 - protein, 610 aa, Oryza sativa
  misc_feature (256)..(256): Xaa can be any naturally occurring amino acid
  unsure (1)..(610): unsure at all Xaa locations
GKRENPISIWCGGGCASSRLCRRRATMRRLLLAGILRRASSSPSSHHHLHLVRALSASSPLPASDADLRKYAGYALLLLGCGAATYYSFPLPPDALHKKAVPFKYAPLPDDLHAVSNWSATHEVHTRVLLQPDSLPALHDALAAAHGERRKLRPLGSGLSPNGLALSRAGMVNLALMDKVLDVDAKKKTVTVQAGIRVAELVDTLREHGLTLQNFASIREQQVGGIIQVGAHGTGARLPPIDEQVISMKLVTPAKXGTIELSREKDPDLFYLARCGLGGLGVVAEVTLQCVERHQLIEHTFVSSADEVKKNHKKWLSENKHIKYLWIPYTDTVVVVQCNPPSRWRTPKFTSKYGKDEAIQHVRDLYRESLKKYRTKAESNDPEVDQLSFTELRDRLLALDPLDKDHVIRINKAEAEYWKKSEGYRMGWSDEILGFDCGGQQWVSETCFPAGTLAKPNMKDLDYIEELLQLIEKEDIPAPAPIEQRWTACSRSPMSPASSSQEDDIFSWVGIIMYLPTSDARQRKEITEEFFNYRSKTQTNLWDGYSAYEHWAKIEVPKDKDELTELLARLRKRFPVDAYNKARMELDPNKVLSNAKLEKLFPVTEVQHVK

SEQ ID NO: 2258 - protein, 459 aa, Oryza sativa
  misc_feature (289)..(289): Xaa can be any naturally occurring amino acid
  unsure (1)..(459): unsure at all Xaa locations
MAASTSATSFSTPTKPASSSSSSSSPNSVCFARASGRCRMASVVVRAEAVDATISPTVSALRPSKTMAITDQATALRQAGVPVIGLAAGEPDFDTPHVIAEAGMNAIKDGYTRYTPNAGTLELRKAICNKLQEENGISYSPDQVLVSNGAKQCITQAVLAVCSPGDEVLIPAPYWVSYPEMATLAGATPVILPTSISENFLLRPELLASKINEKSRLLILCSPSNPTGSVYPKELLEEIADIVKKYPRLLVLSDEIYEHIIYQPAKHTSFASLPGMWDRTLTVNGFSKXAFAMTGWRLGYLAAPKHFVAACGKIQSQFTSGASSISQKAGLAALNLGYAGGEAVSTMVKAFQERRDYLVKSFKELPGVKISEPQGAFYLFIDFSSYYGSEVEGFGTIKDSESLCMFLLEKAQVALVPGDAFGDDKCIRMSYAAALSTLQTAMEKIKEAVALIKPRVAAK

SEQ ID NO: 2259 - protein, 1624 aa, Oryza sativa
MATLPRAAAAAAPSPAAALLPLPRAAPLLAGRAAARSAARRLRARGTRAPPLAAARRGWGGVSPRAVLDLPRRREAAEKPAQKAADLNEILSERGACGVGFVANLKNEPSFNIVRDALVALGCMEHRGGCGADNDSGDGSGLMSGIPWDLFNDWANKQGLAPLDRTNTGVGMVFLPQDENSMEEAKAVVAKVFTDEGLEVLGWRTVPFNVSVVGRYAKETMPNIQQIFVKVAKEDNADDIERELYICRKLIERATKSASWADELYFCSLSSRTIVYKGMLRSEILGQFYLDLQNELYKSPFAIYHRRYSTNTSPRWPLAQPMRLLGHNGEINTIQGNLNWMRSREATLQSPVWRGREHEIRPFGDPKASDSANLDSTAELLLRSGRSPAEAMMILVPEAYKNHPTLSIKYPEVIDFYDYYKGQMEAWDGPALLLFSDGRTVGACLDRNGLRPARYWRTSDDFVYVASEVGVIPMDESKVVMKGRLGPGMMITVDLQTGQVLENTEVKKSVASANPYGSWLQQSTRSIKPVNFQSSVAMDNETVLRHQQAFGYSSEDVQMVIETMASQGKEPTFCMGDDIPLAVLSQKPHMLFDYFKQRFAQVTNPAIDPLREGLVMSLEVNIGKRRNILEVGPENADQVTLSSPVLNEGELESLLNDSKLKPKVLSTYFDIRKGLDGSLDKAIKVLCDEADAAVRNGSQLLVLSDRSEALEPTRPAIPILLAVGAIHQHLIQNGLRMSASIVADTAQCFSTHQFACLIGYGASAICPYLALETCRQWRLSNKTVNLMRNGKMPTVTIEQAQRNFIKAVKSGLLKILSKMGISLLSSYCGAQIFEIYGLGQEVVDLAFCGSVSKIGGLTLDELGRETLSFWVKAFSEDTAKRLENFGFIQSRPGGEYHANNPEMSKLLHKAVREKSDNAYTVYQQHLASRPVNVLRDLLELKSDRAPIPIGKVEPATSIVERFCTGGMSLGAISRETHEAIAIAMNRIGGKSNSGEGGEDPIRWSPLADVEDGYSPTLPHLKGLQNGDTATSAIKQVASGRFGVTPTFLVNAEQIEIKIAQGAKPGEGGQLPGKKVSAYIARLRNSKPGVPLISPPPHHDIYSIEDLAQLIYDLHQINPKAKVSVKLVAEAGIGTVASGVSKGNADIIQISGHDGGTGASPISSIKHAGGPWELGLSETHQLACLQTLIQNGLRERVVLRVDGGFRSGLDVLMAAAMGADEYGFGSVAMIATGCVMARICHTNNCPVGVASQREELRARFPGVPGDLVNYFLFVAEEVRATLAQLGFEKLDDIIGRTDILKAKHVSLAKTQHIDLKYLLSSAGLPKWSSSQIRSQDVHSNGPVLDETILADPDISDAIENEKEVSKTFQIYNVDRAVCGRVAGVIAKKYGDTGFAGQLNITFTGSAGQSFGCFLTPGMNIRLVGEANDYVGKGMAGGELVVVPVEKTGFVPEDAAIVGNTCLYGATGGQVFVRGKTGERFAVRNSLGQAVVEGTGDHCCEYMTGGCVVVLGKVGRNVAAGMTGGLAYILDEDDTLVPKVIVKVNKEIVKMQRVNAPAGQMQLKGLIEAYVEKTGSEKGATILREWEAYLPLFWQLVPPSEEDSPEACAEFERVLAKQATTVQSAK

SEQ ID NO: 2260 - protein, 349 aa, Oryza sativa
MELELSLGDSPAPVKATIAPTPVLIPTCMGDEEDLELVLGVRATRRDEQDDQTTCTQSSEEAMEGEEDETRPHGEAPVESLSFPLFVSSAETGSANSEMCTRGFDVNTRPADGGAEAGRPSSPSSMQEASTRQQVADQEAADDEDNGGGGARKKLRLSKEQSSFLEDSFKEHSTLTPKQKSDLANRLNLRPRQVEVWFQNRRARTKLKQTEVDCEHLKRCCERLTRENRRLQREVAELRGALRTTTSSYPPLYGLHHLPAAAGTVFRVCPSCEHSKVVAAAASESFSPRVFAGGGAPAAITAAAAVPSPGAGSPPSSSAALFGARRPHFGPFAAAVIPPVLRRQPSATS

SEQ ID NO: 2261 - protein, 337 aa, Oryza sativa
  misc_feature (122)..(122): Xaa can be any naturally occurring amino acid
  misc_feature (137)..(137): Xaa can be any naturally occurring amino acid
  unsure (1)..(337): unsure at all Xaa locations
MGCLLMLCLVSPLLLATSVHGNPWYGYGYGLFPQFYDHSCPKAKEIVQSIVAQAVARETRMAASLVRLHFHDCFVKGCDASVLLDNSTTIISEKGSNPNMNSLRGFEVVDEIKAALEAACPXGTVSCADILALAARXDSTVLVGGPYWDVPLGRRDSLGASIQGSNNDIPAPNNTLPTIITKFKRQGLNIVDVVALSGGHTIGMSRCTSFRQRLYNQSGNGMADYTLDVSYAAQLRQGCPRSGGDNNLFPLDFVSPAKFDNFYFKNILSGKGLLSSDQVLLTKSAETAALVKAYADDVNLFFKHFAQSMVNMGNISPLTGSQGEIRKNCRRLNNYYH

SEQ ID NO: 2262 - protein, 487 aa, Oryza sativa
MGMERPQEKVATTTTAAFNLAESGYADRPDLDDDGREKRTGTLVTASAHIITAVIGSGVLSLAWAIAQLGWVIGPAVLVAFSVITWFCSSLLADCYRSPDPVHGKRNYTYGQAVRANLGVAKYRLCSVAQYVNLVGVTIGYTITTAISMGAIKRSNWFHRNGHDAACLASDTTNMIIFAGIQILLSQLPNFHKIWWLSIVAAVMSLAYSTIGLGLSIAKIAGGAHPEATLTGVTVGVDVSASEKIWRTFQSLGDIAFAYSYSNVLIEIQDTLRSSPAENEVMKKASFIGVSTTTTFYMLCGVLGYAAFGNRAPGNFLTGFGFYEPFWLVDVGNVCIVVHLVGAYQVFCQPIYQFAEAWARSRWPDSAFVNGERVLRLPLGAGDFPVSALRLVWRTAYVVLTAVAAMAFPFFNDFLGLIGAVSFWPLTVYFPVQMYMSQAKVRRFSPTWTWMNVLSLACLVVSLLAAAGSIQGLIKSVAHYKPFSVSS

SEQ ID NO: 2263 - protein, 334 aa, Oryza sativa
MCITKNTYVINKTSVHRPKSPGSRSRAKSGRNPHLHHHHHRPVSFLLASLSRIVALVHQHPANMAAMATAPCFPATPGLPARGAVAARSRMAAGGSRSQRRRSSSGVFLCRSSTTGSSRMEDYNTAMKRMMRNPYEYHHDLGMNYAIISDSLIVGSQPQKPEDIDHLKDEEKVAFILCLQQDKDIEYWGIDFQTVVNRCKELGIKHIRRPAVDFDPDSLRTQLPKAVASLEWAISEGKGRVYVHCTAGLGRAPAVAIAYMFWFENMNLKTAYEKLTSKRPCGPNKRAIRAATYDLAKNDPHKESFDSLPEHAFEGIADSERRLIQERVRALREA

SEQ ID NO: 2264 - protein, 480 aa, Oryza sativa
  misc_feature (368)..(368): Xaa can be any naturally occurring amino acid
  misc_feature (384)..(384): Xaa can be any naturally occurring amino acid
  misc_feature (393)..(393): Xaa can be any naturally occurring amino acid
  misc_feature (435)..(435): Xaa can be any naturally occurring amino acid
  misc_feature (463)..(463): Xaa can be any naturally occurring amino acid
  unsure (1)..(480): unsure at all Xaa locations
MGKAAAMEVSASAAAEAGMMVGHGEWRDDDGRARRMGTVWTASAHIITAVIGSGVLSLAWAIAQLGWVAGPAVMLLFAFVIYYTSTLLAECYRSGDPCTGKRNYTYMDAVRANLGGSKVRLCGVIQYANLFGVAIGYTIAASISMLAIKRADCFHEKGHKNPCRSSSNPYMILFGVVQIVFSQIPDFDQIWWLSIVAAIMSFTYSTIGLSLGIAQTVANGGFMGSLTGISVGTGVTSMQKVWRSLQAFGDIAFAYSYSIILIEIQDTIKAPPPSEAKVMKRATMVSVATTTVFYMLCGCMGYAAFGDKSPDNLLTGFGFYEPFWLLDVANAAIVVHLVGAYQVFVQPIFAFVERWAAARWPDGGFISXRELRVGPFSLSVFRLXTWRTAFVCXTTVVSMLLPFFGDVVGLLGAVSFWPLTVYFPVEMYIAQRGVXRRGSARWLCLKVLSAACLVVSVVAAAGXSIADVVDALKVYRPFSG

SEQ ID NO: 2265 - protein, 308 aa, Oryza sativa
MMDLGLSLGLGLASQGSLTSSTTTTSSPGAGSSSPWAAALNSIVGDVRRDQAAAHAAAAVGVGVGGEEMYQGRASTSPDSAAALSSASGKRERELERSGSGVDDDDGADGAGGRKKLRLSKDQAAVLEECFKTHSTLNPKQKVALANRLGLRPRQVEVWFQNRRARTKLKQTEVDCEYLKRWCERLADENKRLEKELADLRALKAAPSPASASAMQPSSSAAATLTMCPSCRRVATAGAPHQPNHQQCHPKSNTTISSSSTAAAAVAVAGGNVLPSHCQFFPAAAAAADRTSQSTWNAAAPLVTRELF

SEQ ID NO: 2266 - protein, 736 aa, Oryza sativa
  misc_feature (520)..(520): Xaa can be any naturally occurring amino acid
  unsure (1)..(736): unsure at all Xaa locations
MELKPQVASRPHAPKKWQLPSHSQFEPRIIVHLVHKPIQSDVTTPHKYATYKVVSREPGPRCFFRGKVHEASWLRASPYYKRGTRTRRATRFPHLSDSELRRRLCAAAAAALVVCFPNSLIPQRAITMGLHKEASSSSSRLDAAPLLPHHGHGGGGAGHHLSSQPKTFANVFIAVVGSGVLGLPYTFSRTGWVAGSVLLLAVAALTFHCMMLLVACRRRLAYDHPKIASFGDLGAAVCGPAGRHVVDAMLVLSQASFCVGYLIFISNTMAHLYPVGDSSPSSPLLTAKAIFIWVMLPFQLGLNSIKTLTLLAPLSIFADVVDLGAMGVVLGQDVSTWLANKPPVFASAGPTEILYGLGVAVYAFEGIGMVLPLEAEAADKRKFGGTLALSMAFIAVMYGLFGAMGYLAFGAATRDIITTNLGTGWLSVTVQLGLCINLFFTMPVMMNPVYEVAERLLCRKRYAWWLRWLLVMVVGLMAMLVPNFADFLSLVGSSVCVLLGFVLPAAFHLKVFGAEVGWPXGLAGDVAVIVVGTALAVSGTWTSLAQIFSSSDVAMICIGPRIIFVLGLPLDGRVEEEDGWRCRRHRISWERVDGSGRQERCVVTGEEKLEDRRTHPRPPQLPPAAHALRLSRGEPCLPLRIARQGLSRRDTYTSESLVVLEAHEAAVPACLDKTEAVLSTDPPLTDFQGTLQIDVWFHGRRRAGASWRHANGSSSPFGKRLVPHCHHVGRPIPPHA

SEQ ID NO: 2267 - protein, 357 aa, Oryza sativa
  misc_feature (290)..(290): Xaa can be any naturally occurring amino acid
  unsure (1)..(357): unsure at all Xaa locations
MASLTDLVNLNLSDTTEKIIAEYIWIGGSGMDLRSKARTLSGPVTDPSKLPKWNYDGSSTGQAPGEDSEVILYPQAIFKDPFRKGNNILVMCDCYTPAGEPIPTNKRHNAAKIFSSPEVASEEPWYGIEQEYTLLQKDINWPLGWPVGGFPGPQGPYYCGIGADKSFGRDIVDSHYKACLYAGINISGINGEVMPGQWEFQVGPSVGISAGDQVWVARYILERITEIAGVVVSFDPKPIPGDWNGAGAHTNYSTKSMRNDGGYEIIKSAIEKLKLRHKEHISAYGEGNEXRRLTGRHETADINTFSWGVANRGASVRVGRETEQNGKGYFEDRRPASNMDPYIVTSMIAETTIIWKP

SEQ ID NO: 2268 - protein, 388 aa, Oryza sativa
MASEMSKNVKVTDDQEVTSQERDQSGGTKVGGEEEIAPLARQSSILSLTLEELQNSLCEPGRNFGSMNMDEFVANIWNAEEFQATTGGCKGAMEEAKVVDSGSGSGDAGGSGLCRQGSFSLPLPLCQKTVEEVWTEINQAPAHTSAPASALQPHAGSGGVAANDRQVTLGEMTLEDFLVKAGVVRGSFTGQAAMGSGMVNGPVNPMQQGQGGPMMFPVGPVNAMYPVMGDGMGYPGGYNGMAIVPPPPPAQGAMVVVSPGSSDGMSAMTHADMMNCIGNGMMIENGTRKRPHREDGCAEKTVERRQRRMIKNRESAARSRARKQAYTVELEAELNYLKQENARLKEAEKTVLLTKKQMLVEKMMEQSKEKMNANRGGSQLRRSGSCMW

SEQ ID NO: 2269 - protein, 311 aa, Oryza sativa
MAPPLAAAAAAAAAVSSSSPLFSSSSSRPLPRRHLPPSSVSLRPRRRSIAAASAAVESAGRPLLEARDLVACVKENGQEILSGVNLTIREGEIHALMGQNGSGKSTLMKVLAGHPEYEVTGGTVLFKGENLIDMEPEERSLAGLFMSFQAPVEIPGVNNYDFLLMALNARREKKGLPALEPLQVYPIIEEKVNALNMNAEILNRAVNEGFSGGERKRNEILQLSVLGADLALLDEIDSGLDVDALEYVAKAVNGILTPNSSLMMITHYQRLLDLIKPSYVHIMEKGKIVKTGDRALANYIDESGYKAIATA

SEQ ID NO: 2270 - protein, 487 aa, Oryza sativa
MAKDVEMAVRNGDGGGGGGYYATHPHGGAGGEDVDDDGKQRRTGNVWTASAHIITAVIGSGVLSLAWATAQLGWVVGPVTLMLFALITYYTSGLLADCYRTGDPVSGKRNYTYMDAVAAYLGGWQVWSCGVFQYVNLVGTAIGYTITASISAAAVHKANCYHKNGHDADCGVYDTTYMIVFGVVQIFFSMLPNFSDLSWLSILAAVMSFSYSTIAVGLSLARTISGATGKTTLTGVEVGVDVTSAQKIWLAFQALGDIAFAYSYSMILIEIQDTVKSPPAENKTMKKATLLGVSTTTAFYMLCGCLGYAAFGNAAPGNMLTGFGFYEPYWLIDFANVCIVVHLVGAYQVFCQPIFAAVETFAARRWPGSEFITRERPVVAGRSFSVNMFRLTWRTAFVVVSTVLAIVMPFFNDILGFLGAVGFWPLTVYYPVEMYIRQRRIQRYTSRWVALQTLSLLCFLVSLASAVASIEGVSESLKHYVPFKTKS

SEQ ID NO: 2271 - protein, 604 aa, Oryza sativa
MSLEHNKMMITLVRLLPLVLVVALAWPAAEAPAAASPPPDPVQCSSGSGTADCTVSSAYGVFPDRSTCRAAAAVYPSTEEELVRAVANATASGTKMKVATRYSHSIPQLACPGDGDGEGLVISTRRLNRVVAVDAGRMEVTVESGISLRELIAEAGKAGMALPYAPYWWGLTVGGMLGTGAHGSSLWGKGSAVHEYVVGMRIVTPAPAADGYAKVRVLTAADPELDAAKVSLGVLGVISQVTLALQPLFKRSVTFMERDDDDLADQVTKFGYQHEFADIAWYPGIGRAVYRVDDRLPMNASGEGVLDFIGFRATPRLLIRTNRLAEELFERAGNGNGKCVTSRVTHAALSSAGYGLMRRSGGLFTGYPVVGPQHLMQASGGCITGPEDALLTACPWDPRVRGSSFFHQTTFSLPVSRAGAFVEEVRRLRDMNPKALCGVELYDGILIRYVKASTAHLGKPAAGGGQSDDMVDFDMTYYRSRDPNRARLFEDVLEEIEQMGVFKYGGLPHWGKNRNLAFVGAARKYPRIGEFLRIKDAYDPDGLFSSDWSDMMLGIGGRAPTRDAPGCALEGMCVCSQDAHCAPEQGYVCRPGKVYKDARVCTKV

SEQ ID NO: 2272 - protein, 145 aa, Oryza sativa
  misc_feature (126)..(126): Xaa can be any naturally occurring amino acid
  unsure (1)..(145): unsure at all Xaa locations
MAAPITSRTETLQKYLKLDQKGMIMAEYVWVDAEGGTRSKSRTLPEKDYKPEDLPVWNFDGSSTKQAPGENSDVYLRPCAVYPDPFRGSPNIIVLAECYDSDGTPNKYNFRHDCVKVMKTYADEEXPWFGLEQEYTLLGSDDRPY

SEQ ID NO: 2273 - protein, 181 aa, Oryza sativa
MEQERREAKSRTSALPGQRRLRRRVQGEDYLPKEDDFAMASSPLRGPRKPFRPIKPRGYRAGDRQTAHQGPMSPYNIMYPCKCPFRKVVILTTTVLPSVTLLPRILFIHPTTVMFHMNRTNYQLIDISEDGLFVSLLTESGNTKDDLGLPTETISWGRSRLDLVKARKEEEIYALKDIGTK

SEQ ID NO: 2274 - protein, 399 aa, Oryza sativa
MCGGAIISGFIPPSAAAAAAAAAAAAKKQQGRRVTADVLWPGMLRKGKAGAAEEDFEADFREFERGMSDDEAEGGGGEEEEEEEDDVVVEVPPPATARFVVRAAAKAAPPTADGMLTTKLVQHDGPTARSAKRKRKNQYRGIRQRPWGKWAAEIRDPSKGVRVWLGTYNTAEEAARAYDAEARKIRGKKAKVNFPDEPAVAQKLSLKQNAAKQEKLAPPLKSCGDDAFFQLNSSDNDLFAMLAKVPAKPAEPVDLMPPVKPLASTETFEMNMLSDTSSNSFGSSDFGWEDDTLTPDYTSVFVPNAAMPAYGEPAYLTGGAPKRMRNNYGIAVPQGNGMPNLAQNMPTFDPEMKYLPLPYVESSSDESMDNLLQNDATQDGASNEGIWSLDELLMAAGAY

SEQ ID NO: 2275 - protein, 166 aa, Oryza sativa
MESAMFGLETPLMTALQHLLDIPDGEGGAAGKQGATGGPTRAYVRDARAMAATPADVKDLPGAYAFVVDMPGLKSSDIKVQVEEERLLVISGERRRGGGEEEKEESCKYLRMERRMGKFMRKFVLPDNADVDKISAVCQDGVLTVTVEKLPPPEPKKPKTIEVKVA

SEQ ID NO: 2276 - protein, 316 aa, Oryza sativa
MDSLGVLLVAPMNAYLEQELDRRCRLFRLWESPADRRDDYLRAHASSIRAVVPYALQGVDAAMIDALPSLEIVSSFSVGIDRVDLDACLRRGVRVTNTPDVLTDDVADLAVGLAIAALRKIPQADRYVRAGKWKSKGDFTLTTRFSGKRVGIIGLGRIGLAVAKRVEAFDCPVNYYQRTKQDHPGYTYYPSVVELAASSDVLVVACPLNEHTRHIVNREVMEALGPRGVLINIGRGPHVDEAAMVAALADGRLGGAGLDVFEDEPNVPEALLGMDNVVLVPHVGSATHETRTAMADLVLGNLEAHVAGKPLLTQVV

SEQ ID NO: 2277 - protein, 247 aa, Oryza sativa
  misc_feature (14)..(14): Xaa can be any naturally occurring amino acid
  misc_feature (41)..(41): Xaa can be any naturally occurring amino acid
  unsure (1)..(247): unsure at all Xaa locations
HAFVGLGGGRGMPXVVMRVDLMSAYAQHLRNIIKERVAHPXGKFPHHMPNPEDTTAMSLTRDAVLDHGADLGVVFDTDVDRSGVVDATGAAINGDRLIALMSAIVLDEHPGTTVVTDARTSDGLTRFIQARGGHHCLYRVGYRNVIDKGVQLNADGVETHLMMETTGHGALKENNFLDDGAYIVVKIIIEMVRMRLVGLEGSVGTLIMDLEEPAESQLMRMNILGEAKYAKQWALSSRDFGPYPEAN

SEQ ID NO: 2278 - protein, 814 aa, Oryza sativa
IFRSFLSIDCGLDQDSRTDSLVGGITYVSDGAYVDAGENRRVTTVYKDDWKGPRYQTLYTLRSFPTSVTGERSCYSLPTKKGDKYNVRLEFLYGNYDGLDSASLTFNLTLGVNHWDTVILDTTIHYGYKAYAAVFVAWAMSAPVCLVNTGGGTPFVSTVELRPFESLAYPTDNQSLSLYERKSMRSGADVDIIRFPDDQYDRYWYAWELTGNDPYSNISTQSAIELNTTFMVPLRVLQTAFVPDNKTREFTVSIDSGMQSGPISPPYLKGWSIINWSSDSEDLSIKLVATATSSLPPILNAYEVYSRIIHEYPMTFSQDFDAIMAIKHEYGIRKNWMGDPCYPSNSVWDGVECTNPGDDKTMRIISLDLSNSELQGQISYNFTLFSALKYLNLSCNQLTGTIPDYLRKSNGSIVFSYESDGDMCKKPITSSSRNRAATLAVYVAAPVLVVAMLVVAYLIWRAKRKPHFSTDDSPTVPEQISPPGHWTNHWDHLQKPENRRFTYEELAKFTDSFKCLIGHGGFGNVYYGCLEDNTEVAVKMRSESSSHGLDEFLAEVQSLTKVNHRNLVSLIGYCWEKDHLALVYEYMSSGNLSDYLRGKTSMGGTMNWATRVRVMLEAAQGLEYLHKGCNLPIIHGDVKTNNILLGGNLKAKIADFGLSKTYHSDSQTHISAIAAGSMGYIDPEYYITGRLTESSDVYSFGVVLLEVTSGEPTIIPGNGHIVERVKQKMVTGNISSVADARLGGSYNVNSMWKVLDAAMMCTADIAAQRPMMSAVVMQLKESLELEEAHGDMGDMENIARDNKFSMSMLGPSAR

SEQ ID NO: 2279 - protein, 446 aa, Oryza sativa
MAPPSAMNTSRAEEKAIDDWLPITSSRNAKWWYSAFHNVTAMVGAGVLSLPFAMSELGWGPGVAAMIMSWVITLYTLWQMVEMHECVPGRRFDRYHELGQHAFGDKLGLWIVVPQQLIVEVGVCIVYMVTGGKSLKKFHDLVAPPSAPPIRTSYFIVIFGCLHLVLSQLPNFNSITGVSLAAAVMSLSYSTIAWAASLHHHNHNNGAAAGGVDYSLTAATPAGRTFNFLSALGDVAFAYAGHNVVLEIQATIPSTPERPSKGPMWRGVVLAYGVVAVCYLPVAFAGYYVFGNAVDDNVLITLERPAWLIAAANIFVVVHVVGSYQIYAMPVFDMLETFLVKKLRFKPGMPLRLIARSLYVLFTMFVAIAVPFFGGLLGFFGGFAFAPTTYFLPCIMWLSIMKPKRFGLSWCINWFCIIIGVLLSVFAPIGGLRSIIVNAQSYKFFS

SEQ ID NO: 2280 - protein, 311 aa, Oryza sativa
MAKATCISLLVVVALATAASAQLSATFYDTSCPRAMSIIKSAVTAAVNSEPRMGASLLRLHFHDCFVQGCDASVLLSGNEQDAPPNKDSLRGYGVIDSIKAQIEAVCNQTVSCADILTVAARDSVVALGGPTWTVPLGRRDSTGASAALAISDLPPFTASLQELVDAFAKKGLSVTDMVALSGAHTIGQAQCSTFRGRIYNETNIDSAFATQRQANCPRTSGDMNLAPLDTTTANAFDNAYYTNLLSNKGLLHSDQVLFNNGSTDNTVRNFASNAAAFSSAFATAMVNMGNIAPKTGTNGQIRLSCSKVNS

SEQ ID NO: 2281 - protein, 316 aa, Oryza sativa
  misc_feature (232)..(232): Xaa can be any naturally occurring amino acid
  unsure (1)..(316): unsure at all Xaa locations
TPLPPAPPAMAKAQKNGGWFGFISEALEVVLKVLKDGLSAVHVPYSYGFAIILLTVIVKAATLPLTKQQVESTLAMQNLQPQIKAIQQRYAGNQERIQLETARLYKQAGVNPLAGCFPTLATIPVWIGLYQALSNVANEGLLTEGFFWIPSLGGPTTIAARQSGAGISWLLPFVDGHPPLGWHDTICYLVLPVLLVASQFVSMEIMKPPQTDDPSQKNTLLVLKFLPFMIEXKAQPAQPGERFKQLKEEESKRKGNKALAAGDSDLSASTSEDEESDDETTEEGGPEERYNSSSNKKLPNYSGKKGKRSKRKRMVQ

SEQ ID NO: 2282 - protein, 309 aa, Oryza sativa
MEKPEWSMDDFEIGKYIGEGKFGKVYLAREKQSGYVVALKVTFKAKLDKYRFHAHLRREIEIQHGLDHPNVLRLFAWFHDAERVVLVLEYAARGELYKLLRTVRRFSERTAATYVASLAGALAYCHKKQVIHRDIKPENLLLDIEGRLKIADFGWAVRSNAKRHTLCGTIDYLAPEMIEKKAHDHAVDNWTLGILCYEFLYGSPPFEAAEQDDTLRRIVKVDLSFPSTPYVSADAKDLICKVKFVVLIIPIVYVTLKWVELLSFELRVRMQLLVKDSNKRLSLDDIMKHPWIVKNADPSGSCSDQKART

SEQ ID NO: 2283 - protein, 324 aa, Oryza sativa
MAQPTSSARCSLVVMVVVVLAVAGGSSAQLSPSFYSYSCPGVFDAVKCGMQSAIANEKRIGASIVRLFFHDCFVQGCDASLLLDDTASFTGEKMANPNNGSVRGFEVIDAIKSAVETICPGVVSCADILAIAARDSVAILGGPSWDVKVGRRDSRTASLSGANNNIPPPTSGLANLTSLFAAQGLSQKDMVALSGSHTIGQARCTNFRAHIYNETNIDSGFAMSRQSGCPRSSGSGDNNLAPLDLQTPTVFENNYYKNLVVKKGLLHSDQELFNGGATDALVQSYISSQSTFFADFVTGMIKMGDITPLTGSNGEIRKNCRRIN

SEQ ID NO: 2284 - protein, 470 aa, Oryza sativa
MAARDAIGVNPLYIGRGSDGAVWISSEMKALNEDCVEFEIFPPGHLYSSAAGGLRRWYKPQWFAENVPATPYQPLLLREAFEKAVIKRLMTDVPFGVLLSGGLDSSLAGGVTKRHLIKTEAAEKFGAERHSFVVGLEGSPDLIAAREVADHLGTIHHEFHFTVQDGIDAIEEVIYHDETYDVTTIRASTPMFLMARKIKALGVKMVLSGEGSDELLGGYLYFHFAPNKEEFHKETCRKVKALHQYDCLRANKATSAWGLEVRVPFLDKEFINVAMSMDPEWKMYNADLGRIEKWVMRKAFDDEEHPYLPKHILYRQKEQFSDGVGYNWIDGLKAFTEQQVSDEMMKNAAKVYPHNTPVNKEAYYYRMIFERLFPQESARETVPWGPSIACSTPAAIEWVEQWKASHDPSGRLIASHNSASASANHTNHANANANGNSNGKANGNCAMAANGTNGVGLVVANGTANGKMEA

SEQ ID NO: 2285 - protein, 705 aa, Oryza sativa
MASLSSFLLAAAVATLFVVGSYATELTFKVNEGSSATSLELITNVAISEVEIKEKGASDWTALKESSSNTWTIKSGSPLKGPFSVRFLVKNGGYRVVDDVIPESFTAGSVYKSADAAHDHAGALAPHRRASPLRRRGRLFLACRVPAAAPSARGVAAEAAAGRPTVLVTEKLGDAGLELLRRFANVDCAYELTAEELRAKVSLVDALVVRSATRVTREVFEAARGRLRVVGRAGVGIDNVDLQAATEAGCLVVNAPTGNTVAAAEHAIALLAAMARNVAEADASLKAGKWQRNKYVGVSLVGKTLAIMGFGKVGSEVARRAKGLGMDIISHDPYAPVDRARAIGVDLVSFDEAISTADFISLHMPLTPSTAKLFDDETFANMKKGVRIINVARGGVVDEDALLRALDNGTVSQAALDVFTEEPPPKDSKLVHHEHVTVTPHLGASTSEAQEGVALEIAEAVLGALKGELAATAVNAPMVPAEVLSELSPYVILAEKLGRLVVQLVAGGSGIKGVKIGYSSSRDPDDLDTRVLRAMVTKGIIEPISSAFVNIVNADYVAKQRGLRISEERILLDGSPEIPIDSIQVHLANVESKFAGALSDEGDIRVEGEVKDGKPHLTLVGPFSVDVSLEGNLILCRQVDQPGIIGKVGSILGKMNVNVNFMSVGRTAPGKQAIMAIGVDEEPEKEALKLIGDIPSVEEFVFIKL

SEQ ID NO: 2286 - protein, 155 aa, Oryza sativa
MGQQLPQLNCLGLLVISGIRDTFSKKYIEGIASSSSSTPESRKMALAKAKETVASAPVVVYSKSYCPFCVRVKKLFEQLGATFKAIELDGESDGSELQSALAEWTGQRTVPNVFINGKHIGGCDDTLALNNEGKLVPLLTEAGAIASSAKTTITA

SEQ ID NO: 2287 - protein, 343 aa, Oryza sativa
MESGRLIFSTAGSGAGQMLFLDCGAGGGGVGGGAMFHRGARPVLGMEEGGRGVKRPFFTTPDELLEEEYYDEQLPEKKRRLTPEQVHLLERSFEEENKLEPERKTELARKLGLQPRQVAVWFQNRRARWKTKQLERDFDRLKASFDALRADHDALLQDNHRLHSQVMSLTEKLQEKETTTEGSAGAAVDVPGLPAAADVKVAVPDAEEPALEEAAAAFEEQQEQQVKAEDRLSTGSGGSAVVDTDAQLVVGCGRQHLAAVDSSVESYFPGGDEYHDCVMGPMDHAAGGIQSEEDDGAGSDEGCSYYADDAGVLFADHGHHHHHQHADDDEEDGQQISCWWMWN

SEQ ID NO: 2288 - protein, 497 aa, Oryza sativa
  misc_feature (204)..(204): Xaa can be any naturally occurring amino acid
  misc_feature (219)..(219): Xaa can be any naturally occurring amino acid
  unsure (1)..(497): unsure at all Xaa locations
MATCADTLGPLLGTAAANATDYLCNQFADTTSAVDSTYLLFSAYLVFAMQLGFAMLCAGSVRAKNTMNIMLTNVLDAAAGALFYYLFGFAFAFGAPSNGFIGKHFFGLKQVPQVGFDYSFFLFQWAFAIAAAGITSGSIAERTQFVAYLIYSAFLTGFVYPVVSHWIWSADGWASASRTSGSLLFGSGVIDFAGSGVVHMVGGXGRTLGRPHRGPPHWXRFDHAGRSVALRGHSASLVVLGSFLLWFGWYGFNPGSFLTILKSYGPPGSIHGQWSAVGRTAVTTTLAGSTAALTTLFGKRLQTGHWNVIDVCNGLLGGFAAITAGCSVVDPWAAIICGFVSAWVLIGLNALAARLKFDDPLEAAQLHGGCGAWGVIFTALFARKEYVDQIFGQPGRPYGLFMGGGGRLLGAHIVVILVIAAWVSFTMAPLFLVLNKLGLLRISAEDEMAGMDQTRHGGFAYAYHDDDASGKPDRSVGGFMLKSAHGTQVAAEMGGHV

SEQ ID NO: 2289 - protein, 1171 aa, Oryza sativa
MASGSRATPTRSPSSARPAAPRHQHHHSQSSGGSTSRAGGGGGGGGGGGGGAAAAESVSKAVAQYTLDARLHAVFEQSGASGRSFDYTQSLRASPTPSSEQQIAAYLSRIQRGGHIQPFGCTLAVADDSSFRLLAYSENTADLLDLSPHHSVPSLDSSAVPPPVSLGADARLLFAPSSAVLLERAFAAREISLLNPLWIHSRVSSNPFYAILHRIDVGVVIDLEPARTEDPALSIAGAVQSQKLVVRAISRLQALPGGDVKLLCDTVVEHVRELTGYDRVMVYRFHEDEHGEVVAESRRSNLEPYIGLHYPATDIPQASRFLFRQNRVRMIADCHAAPVRVIQDPALTQPLCLVGSTLRSPHGCHGQYMANMGSIASLVMAVIISSGGDDDHNIARGSIPSAMKLWGLVVCHHTSPRCIPFPLRYACEFLMQAFGLQLNMELQLAHQLSEKHILRTGTLLCDMLLRDSPTGIVTQSPSIMDLVKCDGAALYYHGKYYPLGVTPTEVQIKDIIEWLTMCHGDSTGLSTDSLADAGYSGAADLGDAVSGMAVAYITPSDYLFWFRSHTAKEIKWGGAKHHPEDKDDGQRMHPRSSFKAFLEVVKSRSLPWENAEMDAIHSLQLILRDSFRDSAEGTSNSKAIVNGQVQLGELELRGIDELSSVAREMVRLIETATVPIFAVDTDGCINGWNAKVAELTGLSVEEAMGKSLVNDLIFKESEETVNKLLSRALRGDEDKNVEIKLKTFGPEQSKGPIFVIVNACSTRDYTKNIVGVCFVGQDVTGQKVVMDKFINIQGDYKAIVHNPNPLIPPIFASDENTCCSEWNTAMEKLTGWSRGEVVGKLLVGEVFGNCCRLKGPDALTKFMIVLHNAIGGQDCEKFPFSFFDKNGKYVQALLTANTRSRMDGEAIGAFCFLQIASPELQQAFEIQRHHEKKCYARMKELAYIYQEIKNPLNGIRFTNSLLEMTDLKDDQRQFLETSTACEKQMSKIVKDASLQSIEDGSLVLEKGEFSLGSVMNAVVSQVMIQLRERDLQLIRDIPDEIKEASAYGDQYRIQQVLCDFLLSMVRFAPAENGWVEIQVRPNIKQNSDGTDTMLFPFRFACPGEGLPPEIVQDMFSNSRWTTQEGIGLSICRKILKLMGGEVQYIRESERSFFHIVLELPQPQQAASRGTS

SEQ ID NO: 2290 - protein, 354 aa, Oryza sativa
MELGLSLGDAVTVADGGRLELVLGLGVGVGAGVRRGEEEERGRREDVVGAGRWAAMAAASPEPSVRLSLVSSLGLHWPSETGRSEAAARGFDVNRAPSVAAGAPGMEDDEEGPGAAPALSSSPNDSGGSFPLDLSGQGLRGHAEAAAQGGGGGGGGERSSSRASDDDEGASARKKLRLSKEQSAFLEESFKEHSTLNPKQKVALAKQLNLRPRQVEVWFQNRRARTKLKQTEVDCEYLKRCCETLTEENRRLHKELAELRALKTARPFYMHLPATTLSMCPSCERVASNPATASTSAPAAATSPAAAPTAAARTAVASPEPHRPSSFAALFAAPLGFPLTAAQPRPPPPASNCL

SEQ ID NO: 2291 - protein, 395 aa, Oryza sativa
MAPPPASSLPTAVLAWGSGEDGQLGMGGYEEEDWARGVAALDALAVSAVVAGSRNSLAICADGRLFTWGWNQRGTLGHPPETKTESSPAPVDALAGVSIVQAAIGGWHCLAVDDKGRAYAWGGNEYGQCGEEAERKEDGTRALRRDIPIPQGCAPKLKVRQVAAGGTHSVVLTQDGHVWTWGQPWPPGDIKQISTPVRVQGLENVKVIAVGAFHNLALTEDGILWAWGNNEYGQLGTGDTQPRSQPIRVEGLSDLSLVDIAAGGWHSTALTKEGEVYAWGRGEHGRLGFGDDKSSHMVPQKVELLAGEDIIQVSCGGTHSVALTRDGRMFSYGRGDHGRLGYGRKVTTGHPMEVPIDLPPPGTSGGDSGGQWQARYVACGGRHTLAIATWTEADE

SEQ ID NO: 2292 - protein, 285 aa, Oryza sativa
  misc_feature (91)..(91): Xaa can be any naturally occurring amino acid
  misc_feature (109)..(109): Xaa can be any naturally occurring amino acid
  misc_feature (179)..(179): Xaa can be any naturally occurring amino acid
  unsure (1)..(285): unsure at all Xaa locations
MVTAARLLPLILFLTAVAVGCSAWEMNIRLPTERLAYGGGEAVVAPIIHALRPLLGSGRQLAARAGVACDSWRLGVEAHNVIDWRTVPAEXRGLHRPLHARRTLPPRLXVVVDEAVAYAETLKLAGNGKEIWVFDIDETSLSNLPYYAKHGFGATPYNATSFREYVAEGSAPALPETRXLYYRLLELGVKPVFLTGRTEDQRTITVTNLHRQGFSGWEKLLLKPAVHATGELQGSAVEYKSGERQKLQDAGFIIVGNIGDQWSDILGAPEGARTFKLPDPLYYIG

SEQ ID NO: 2293 - protein, 306 aa, Oryza sativa
MVVEEAVVAAGNEMSLSNMVLGFYEEAELQSSPPGDCAAAAGDDDDGSDDEGSGGAAKCRAFWKEQQSQLYEALAKMSSAESRIQADAEEAMRQMRAAAAGACSCASRGAAAAAAGSGGCRSCTLRFLAERLRDAGYNSAICRSKWPRSPEIPSGEHSYVDVVAPTRSGKAVRVVVEPSFRGEFEMARGGAGYRALVASLPEAFVGRADRLRGVVRVMCAAAKQCARESGMHMAPWRKQRYMEAKWLATPERVAPPGNAGGAGDAVAVGSPSSPLSPGMTNRQMQPKFRASMLTLDFGGRTAVEVV

SEQ ID NO: 2294 - protein, 262 aa, Oryza sativa
MASASASLSLAFSPLLLPTPRPRPYSRPINPGFPTPLRLRLACSPPSRRAGPVAAVPDGVAVADVVEKDWSFLDAAAAAAAAGGSLPRALAAGALSPASRVLAVTPAPSFVDALLSGHPCELLVAAHESLYVLAGIKEGHDEVRCFHLEGGGGGRGGGVVEGVPERFDAFDAVFVCYFPGMGVSAAALLKSLAKRCSKGGRVVIFLDQGRQSLEQHRREHPEVVTADLPTRPSLEKATAGSKFEILEFVDEPTLYLAVLQFQ

SEQ ID NO: 2295 - protein, 186 aa, Oryza sativa
  misc_feature (66)..(66): Xaa can be any naturally occurring amino acid
  misc_feature (74)..(74): Xaa can be any naturally occurring amino acid
  misc_feature (87)..(87): Xaa can be any naturally occurring amino acid
  unsure (1)..(186): unsure at all Xaa locations
MQRDHRRSSPPAAASSSERSSDSAPNTDDGKEGVDSDDEEIVGRVPEFGLALPGTSTSGRGSVRVXAGDAAATXAAVTSSSSPAAQXAGVAGSSSSGRRLGRSPGDKEHRRLKRLLVNRVSAQQARERKKAYMSELEARVKDLERSNSELEERLSTLQNENQMLRQVLKNTTANRRGPDSSAGGDS

SEQ ID NO: 2296 - protein, 1164 aa, Oryza sativa
  misc_feature (1125)..(1125): Xaa can be any naturally occurring amino acid
  unsure (1)..(1164): unsure at all Xaa locations
MASGSRATPTRSPSSARPAAPRHQHHHSQSSGGSTSRAGGGGGGGGGGGGGAAAAESVSKAVAQYTLDARLHAVFEQSGASGRSFDYTQSLRASPTPSSEQQIAAYLSRIQRGGHIQPFGCTLAVADDSSFRLLAYSENTADLLDLSPHHSVPSLDSSAVPPPVSLGADARLLFAPSSAVLLERAFAAREISLLNPLWIHSRVSSKPFYAILHRIDVGVVIDLEPARTEDPALSIAGAVQSQKLAVRAISRLQALPGGDVKLLCDTVVEYVRELTGYDRVMVYRFHEDEHGEVVAESRRNNLEPYIGLHYPATDIPQASRFLFRQNRVRMIADCHAAPVRVIQDPALTQPLCLVGSTLRSPHGCHAQYMANMGSIASLVMAVIISSGGDDDHNISRGSIPSAMKLWGLVVCHHTSPRCIPFPLRYACEFLMQAFGLQLNMELQLAHQLSEKHILRTQTLLCDMLLRDSPTGIVTQSPSIMDLVKCDGAALYYHGKYYPLGVTPTEVQIKDIIEWLTMCHGDSTGLSTDSLADAGYPGAAALGDAVSGMAVAYITPSDYLFWFRSHTAKEIKWGGAKHHPEDKDDGQRMHPRSSFKAFLEVVKSRSLPWENAEMDAIHSLQLILRDSFRDSAEGTSNSKAIVNGQVQLGELELRGIDELSSVAREMVRLIETATVPIFAVDTDGCINGWNAKVAELTGLSVEEAMGKSLVNDLIFKESEETVNKLLSRALRGDEDKNVEIKLKTFGPEQSKGPIFVIVNACSSRDYTKNIVGVCFVGQDVTGQKVVMDKFINIQGDYKAIVHNPNPLIPPIFASDENTCCSEWNTAMEKLTGWSRGEVVGKLLVGEVFGNCCRLKGPDALTKFMIVLHNAIGGQDCEKFPFSFFDKNGKYVQALLTANTRSRMDGEAIGAFCFLQIASPELQQAFEIQRHHEKKCYARMKELAYIYQEIKNPLNGIRFTNSLLEMTDLKDDQRQFLETSTACEKQMSKIVKDASLQSIEDGSLVLEKGEFSLGSVMNAVVSQVMIQLRERDLQLIRDIPDEIKEASAYGDQYRIQQVLCDFLLSMVRFAPAENGWVEIQVSYLSSFSIPEGNTYSHAGISCVEFGRGQVKYLVKFIFVGHICCSTXRFACPGEGLPPEIVQDMFSNSRWTTQEGDLGSSDGEPSL

SEQ ID NO: 2297 - protein, 934 aa, Oryza sativa
MPSASAALVLLFVAFSLSNAQPGFISLDCGGDDDYTDGIGIQWTSDAKFVSAGQKANLLLQNQQLQQYTTVRSFPADNRKYCYTMNVRNRTRYLVRATFLYGNFDNSNVYPKFDLSLGPTPWTTVVIDDATTPVVQEAIILAAAPTLSVCLSNASTGQPFISTLELRQFNGSLYYTTDEKQFFLRLSARINFGAESNASVRYPDDPFDRIWESDLVRRANYLVDVAPGTERISTTKPIFVSTNEEPPQRVMQTAVVGKNGSLTYRIDLEDFPGNAWGVSYFAEIEDLTPNQTRKFKLVIPGKPEFSKPTVDVEENAQGKYRLYEPGYTNIPLPFVFSFGFKKTNDSSEGPILNAMEIYKYIEISVGSQDANIMASLVSRYPEAGWAQEGGDPCLPASWSWVQCSSEAAPRIFSISLSGKNITGSIPVELTKLSGLVELKLDGNSFTGQIPDFTGCHDLQYIHLEDNQLTGALPPSLGELPNLKEFFSGNSDLRMGHSNTGRTIVIIVCAVVGAILILVAAIVCYLFTCKRKKKSSDETVVIAAPAKKLGSFFSEVATESAHRFALSEIEDATDKFDRRIGSGGFGIVYYGKLTDGREIAVKLLTNDSYQGIREFLNEVTLLSRIHHRNLVSFLGYSQQDGKNILVYEFMHNGTLKEHLRGGPDDVKINSWVKRLEIAEDAAKGIEYLHTGCSPTIIHRDLKSSNILLDKNMRAKVADFGLSKPVVDGSHVSSIVRGTVGYLDPEYYISQQLTEKSDMYSFGVILLELISGHEPISNDNFGLHCRNIVEWARSHMESGDIHGIIDQSLDAGYDLQSVWKIAEVATMCVKPKGVLRPSISEVLKEIQDAIAIELQRELPSSIHHLMSKTSPSEAVNTTGSLQDLEQNASFDELLMRPGLRLNGTGRAAQAASEILNETAILVEQFQGKRNRDFVMN

SEQ ID NO: 2298 - protein, 300 aa, Oryza sativa
MMMAREVSSEEEAGGGDELRRGPWTVEEDLLLVNYIAAHGEGRWNALARCAGLKRTGKSCRLRWLNYLRPDVRRGNMTAEEQLLILELHGRWGNRWSKIAQHLPGRTDNEIKNYWRTRVQKHAKHLNCDVNSQQFKDLMRYLWMPRLLERIHRSSQSQSHDADDADLSVSAATSCITSDLVVDAHHPPLAMADSNDSAAMWQQHQAPQMSVAGAPPPTTTMAQHVVLPTAAASCHQMQDQFVCARAAETTTCCWSESESLPGLAGLYYDDAAAALPEFDVETMAMWGPEDDPWYTQMLGL

SEQ ID NO: 2299 - protein, 759 aa, Oryza sativa
MASSHHQEVQEQGHGDGEEEEQDNSQITSPLLRSSMRLGSPEENSPVEQVALTVPVGDDPATPVLTFRIWVLGTASCVVLSFLNTFFWYRKEPLTVTAISAQIAVVPLGRLMAAALPERVFFRGRPWEFTLNPGPFNVKEHVLITIFANAGAGSVFAINVITAVRVFYGKRISFFVSLLVVLTSQVEVTSTCSQFNNKTHPASSSSEFYATIRRFRRLGHSAMQVHAAAENQNSVYLEISQFFLVAFVCSFAYYIFPGYLFQMLTSLSWICWIFPKSVLAQQLGSGLHGLGIGAIGLDWSSISSYLGSPLASPWFATANIAAGFFIYIYVITPIAYWINLYKAQNFPIFSDGLFTVTGQKYNISTIIDSQFHFDTKAYEKNGPLYISTFFSISYGLGFACLTATVVHVLLFHGRYPPLPSPSRYTKLMKRYKQVPEWWFISILIASVAITMFTCEYYIEQLQLPWWGVLLACALAIFFTLPIGIVTATTNQTPGLNIITEYIMGYLYPGRPVANMCFKVYGYIGPQQALAFLQDFKLGHYMKIPPRTMFMAQQVVGTLIAAFVYLGTAWWLMDTIPNICNTELLPPGSPWTCPYDHLFYDASVIWGLIGPRRIFGDLGTYSAVNWFFLGGAIAPLLVWFAHKAFPGQKWILLVNMPVLIAGISQMPPATSVNYTAWIFVAFLSGYVVYKYRRDWWERHNYLLSGALDAGLAFMAVLLYLCLGLEKISLNWWGNDLDGCPLASCPIAEGITVQGCPVASA

SEQ ID NO: 2300 - protein, 333 aa, Oryza sativa
GHCIHTQSCLHCRLTMASCLSVLLLLCLALAGSVSGQQLSATFYSRSCPRALAIIRAGVRAAVAQEPRMGASLLRLHFHDCFVQGCDASVLLNDTANFTGEQGANPNVGSIRGFNVVDNIKAQVEAACKQTVSCADILAVAARDSVVALGGPSWRVLLGRRDSTTASLALANSDLPPPSFDVANLTASFAAKGLSQADMVALSGAHTVGQAQCQNFRDRLYNETNIDAAFAAALKASCPRPTGSGDGNLAPLDTTTPTAFDNAYYTNLLSNKGLLHSDQVLFNGGAVDGQVRSYASGPSRFRRDFAAAMVKMGNIAPLTGTQGQIRLVCSKVN

SEQ ID NO: 2301 - protein, 641 aa, Oryza sativa
MPPKRQRSAAGPSGEAPVNSLDDGCLMHIFSFLSPIPDEDVTKHLLQGMIRRVCLSARNCEFMTPRVSNTPPDRYNTALVCHRWRFLACHPRLWLRVERPIRNTIEPGVYPNLESAVSAARPGDTILIAAGGTHVARNIQIKKPLCIQFFFVVDATLSLRLSFAYCQIGGGELPDDTVLTCSRGSDNALEFHSTCKIANLTIRAELGCCLLHRSGRLTIEECLLQCEQNPLDYLSFPIISTAIEYDSFSSLKEQGHGVTVVRTRIEGGAKAVRTNGTLALQHVRAIYSRSSVFFWFEVGERHLARDTVHFDIKLLWAQPDVPASSSEVSMMDSISIGLSMASVTYLDDAHSEVIDPPKNEEMLDVTELVDDHTQHSPKPNAMVSGNVRELLECPVCLNAMYPPIHQCSNGHTLCSGCKPRVHNRCPTCRHELGNIRCLALEKVAASLELPCKYQNFGCLGIYPYYCKLKHESQCQYRPYTCPYAGSECTVAGDIQYLVSHLKDDHKVDMHNGSTFNHRYVKSNPHEVENATWMLTVFSCFGQYFCLHFEAFQLGMAPVYIAFLRFMGDDAEAKNYSYSLEVGGSGRKMTWQGVPRSIRDSHRKVRDSYDGLIIQRNMALFFSGGDKKELKLRVTGRIWKEQ

SEQ ID NO: 2302 - protein, 311 aa, Oryza sativa
MSAASGAACGVCGGGVGECGCLLHQRRGGGGGGGGGGVRCGIAADLNRGFPAIFQGVGVEETAVEGDGGAQPAAGLQEFQFFGHDDHDSVAWLFNDPAPPGGTDHQLHRQTAPMAVGNGAAAAQQRQAFDAYAQYQPGHGLTFDVPLTRGEAAAAVLEASLGLGGAGAGGRNPATSSSTIFQVFNGVSTVNYLQMSFCGSTFTDAVSSIPKDHAAAAAVVANGGLSGGGGDPAMDREAKVMRYKEKRKRRRYEKQIRYASRKAYAEMRPRVKGRFAKVPDGELDGATPPPPSSAAGGGYEPGRLDLGWFRS

SEQ ID NO: 2303 - protein, 675 aa, Oryza sativa
MSATEVMEECTETARERREEERLRNVNLDDWLPITSSRTAKWYYSAFHNVTAMVGAGVLGLPFAMSQLGWPTGVAAIASSFAITLYTLWQLVELHEPAPGGGKRFDRYHELGQAAFGRRLGVCLIVPLQLIVQVGTDIVYMVTGGQTLKKFVELACDGRCADIRLTFYIMMFASAQFVLSQCPNFNSISAVSAAAAAMSLCYSMIAFFASVLKAHPAAAAAVDYGFKATTAAGRVFGAFNALGAVSFAFAGHNVVLEIQATIPSTPERPSKRPMWRGVVVAYAVVALCYFTVAFGGYHAFGNAVAPNVLISLEKPRWLVAAANLMVVVHVIGAYQVYAMPVFDMIETVLAKKLHLRPGLPLRVTARSAYVALTMFIGITFPFFDGLLGFFGGFGFAPTTYFIPCIIWLIMRKPAKYSLSWLMNWHENQAVGCVAWATAAISHPTIASVSVVVRGIGSWRTTSGSWRTTSGSSSRRAVTPRNSLAQTWWASSHAGSTPLKPDHPPTRCRSQAKERGSRQSWERGIMDAPLRRQSWEYGIASVGVVVHGTGSWRTTSGSSSRRAISSSSSGAGGSSGSRRRHGGRAVVREALPKNLITRLPGADLRPRREAVGSRGNVGSWTRRYGGSRGNVGSWLQKSSDVTPVSHALALAHALGPARARVWLSDPHLNQSIGSLQ

SEQ ID NO: 2304 - protein, 121 aa, Oryza sativa
MEVGNGKCGGGGAGCELCGGVAAVHCAADSAFLCLVCDDKVHGANFLASRHRRRRLGVEVVDEEDDARSTASSSCVSTADSASSTPPPATARRIFRPPEIESTKNAKLVGNDSMYASSLIN

SEQ ID NO: 2305 - protein, 582 aa, Oryza sativa
TYAAGVVAAPMEATTTDGTTDHAGKPAVRSKSGTWRACPFILGNECCERLAYYGMSANLVNYMVDRLRQGNAGAAASVNNWSGTCYVMPLVGAFLADAYLGRYRTIAAFMALYIVGLALLTMSASVPGMKPPNCATISASSCGPSPGQSAAFFVALYLIALGTGGIKPCVSSFGADQFDDADPREHRSKASFFNWFYMSINVGALVASSVLVWVQMNVGWGWGFGIPAVAMAVAVASFLMGSSLYRHQKPGGSPLTRMLQVVVAAARKSRVALPADAAALLYEGDKLACGTRRLAHTEQFRWLDRAAVVTPTTDKDDDTGSRWRLCPVTQVEELKAVVRLLPVWASGIVMSAVYGQMSTMFVLQGNTLDPRMGATFKIPSASLSIFDTLAVLAWVPVYDRLIVPAARRFTGHPRGFTQLQRMGIGLLISVFSMVAAGVLEVVRLRVAAAHGMLDSTSYLPISIFWQVQYFIIGAAEVFAFIGQIDFFYDQAPDDMRSTCTALSLTSSALGNYLSTLLVVIVTAASTRGGGLGWIPDNLNRGHLDYFFWLLAALSAVNFLVYLWIANWYRCKTITTTEAAAQT

SEQ ID NO: 2306 - protein, 742 aa, Oryza sativa
MERRDNFLQPPAAAAAPAAGGGKGLPVPATGDATNLTSSSSSTSSLTLSPPDFLRQVQAALKRHRPTGSMQSNQPRATRVLVSRGEGSTKAVANPSVAQNPEGKVMQQRRGLLGASRLRNAAPDQNKAVVSSQDELLLTTPLTLGTITDTHDQNGGQNHQPKSDTDLLVDRKKSSMEVSSSQMASANALVGEDFKKDLFYLTSDPQLTSQTGDNFPVAQVADDQGKNHKEIGIASAAVEMDIKYDAANLSRRIDEACDQNHGEPMTRCSAMGSSVTAVSLYSGPTIQSKSAAQIDQYASPAQMPQCGRESSGVSGHGSQKLHGVAMNHADCNTNKQQVDTNGGMDKPVSSSAVCLPSQGLSGNDQSLSAKDDGAPRRSKVEKECRKKNYDPDVFFKVNGKLYQKLGKIGSGGSSEVHKVISAECTIYALKKIKLKGRDYPTAYGFCQEIEYLNKLKGKSNIIQLIDYEVTDKSLLQDDSLSPRDGRIKDDHYIYMVLEYGEIDLANMVAQEWKKRNTSNMKIDENWLRFYWQQMLKAVNTIHEERIVHSDLKPANFLLVRGALKLIDFGIAKAIMNDTTNIQRDSQIGTLNYMSPEAFMCNEQDSGGNVIKCGRPSDIWSLGCILYQMVYGKTPFADYKNFWAKFKVVTDKNHKIKYEPVDNPWLIDLMQRCLAWDRNDRWRIPQLLEHPFLVPLVPRDLPSIDQDPCRLLMERVRVHWANPKLHSFIAELEKDQCRPATQM

SEQ ID NO: 2307 - protein, 559 aa, Oryza sativa
  misc_feature (43)..(44): Xaa can be any naturally occurring amino acid
  misc_feature (71)..(71): Xaa can be any naturally occurring amino acid
  misc_feature (225)..(225): Xaa can be any naturally occurring amino acid
  unsure (1)..(559): unsure at all Xaa locations
MERQTSFRLGALEKLKSFRGMEKQKSFKMMSTDNFRRHRDSPXXKRGDTPLHLAARSGNAAGAQRIIAEFXPEVAAERAAQANHDGETPLYVAAERGHTDVVREILKVSDVQTAGVKANNSFDAFHIAAKQGHLEVLKELLQAFPALAMTTNSVNATALDTAAILGHTEIVNLLLESDANIARIARNNGKTVLHSAARLGHVEIVRSLLSRDPGIGLRTDKKGQXTALHMASKGQNAVIVIELLKPDISVIHLEDNKGNRPLHVATRKANIVIVQTLLSVEGIEVNAVNRSGHTALAIAEQLNNEELVNILREAGGVTAKEQVHPPNPAKQLKQTVSDIRHDVQSQIKQTKQTKMQVQKIKKRLEKLHIGGLNNAINSNTVVAVLIATVAFAAIFTVPGNFVEDITQAPPGMSLGQAYVASNPAFLVFLVFDALALFISLAVVVVQTSLIVVEQKAKRRMVFVMNKLMWLACLFISVAFIALTYVVVGRDDWWLAWCTMAIGAVIMLTTLGSMCYCIIAHRMDERKIRKASTSQSRSWSQTVDSDPDLLNSEYKKMYAL

SEQ ID NO: 2308 - protein, 181 aa, Oryza sativa
  misc_feature (72)..(72): Xaa can be any naturally occurring amino acid
  unsure (1)..(181): unsure at all Xaa locations
QEAAPCLSLLYLVLRRLSLTCLDTSLLGRFDDLDQRGKISAEYIWIGGTGQDLRSKTRVLSKVPKSPSDLPXWNYDGSSTGQAPGEDSEVYLVPRAVYKDPFRRGDNILVLCDAYEPPRVQPDGTVSGIKAIPTNTRAACADVMEKVKDQEPWFGIEQEYTVLNATTKWPLGWPTCGYPGP

SEQ ID NO: 2309 - protein, 660 aa, Oryza sativa
MEDTAAAVETPVTVSTFGVSRHPDTARLVLSSPKPPGVREEFVGVVRKAFRPRASGGGGAGRTPPARWGWALTALQTVFPVLQWGRTYNFKLFRSDVMAGLTLASLGIPQSIGYANLAKLDPQYGLYTSVVPPLIYAVMGTSREIAIGPVAVVSLLLSSMVSKIVDPAVDPVTYRALVFTVTFLAGVFQVSFGLFRLGFLVDFLSHAAIVGFMAGAAIVIGLQQLKGLLGLSHFTNSTDVVSVIKAVCSALRDPWHPGNFLIGCSFLIFILATRFIGRRYKKLFWLSAISPLLSVILSTAAVYATRADKHGVKIIQRVHAGLNPSSASQLRLSGPYTVDCAKTAIICAVIALTEAIAVGRSFASIRGYKLDGNKEMIAMGCSNVAGSLSSCYVATGSFSRTAVNFSAGARSTVSNIVMSITVFIALELLMKSLYYTPIAVLASIILSALPGLIDIKEALSIWKVDKMDFLTCLGAFVGVLFGSVEIGLAVALAISFAKIIIQSIRPQVEVLGRLQGTNIFCSIRQYPVACRIPSVLTIRIDTSFLCFINSTFIKERIIEWIREEVETSDEKARERVQSVVLDMSNVVNIDTSGISALEEIHKELASLSIQMAIAGPGWQAIQKMKLAGVVDQVGGDWIFLTVGEAVEACVTMQKGTALEC

SEQ ID NO: 2310 - protein, 384 aa, Oryza sativa
  misc_feature (20)..(20): Xaa can be any naturally occurring amino acid
  misc_feature (297)..(297): Xaa can be any naturally occurring amino acid
  unsure (1)..(384): unsure at all Xaa locations
MAEQANQPTVLQKFGGQFHXLAPAFSEGVRARNICPSVSSYDRRFTTRSYMTQGLVNGGINVPMMSSSPIFANAPAEKGGKNFMIDFLMGGVSAAVSKTAAAPIERVKLLIQNQDEMIKAGRLSEPYKGIGDCFGRTIKDEGFASLWRGNTANVIRYFPTQALNFAFKDYFKRLFNFKKDKDGYWKWFGGNLASGGAAGASSLFFVYSLDYARTRLANDAKAAKGGGERQFNGLVDVYRKTLKSDGIAGLYRGFNISCVGIIVYRGLYFGMYDSLKPVVLTGSLQDNFFASFALGWXLITNGAGLASYPIDTVRRRMMMTSGEAVKYKSSMDAFSQILKNEGAKSLFKGAGANILRAIAGAGVLSGYDQLQILFFGKKYGSGGA

SEQ ID NO: 2311 - protein, 316 aa, Oryza sativa
FRAVQAEGWTQLRHHHREAQHQVERCRRPRERQASAAGGRHIACQVPAVLLYGPPGTGKSYLAKAVATEADSTFFSISSSDLVSKWMGESEKLVANLFQMARENAPSIIFIDEIDSLCGQRGEGNESEASRRIKTELLVQMQGVGHNDDKVLVLAATNTPYALDQAVRRRFDKRIYIPLPDLKARQHMFKVHLGDTPHNLNESDFESLARRTDGFSGSDIAVCVKDVLFEPVRKTQDAMFFFKADGDMWMPCGPKQSGAVQTTMQELASKGLAAKILPPPISRTDFEKVLARQRPTVSKKDLEVHERFTKEFGEEG

SEQ ID NO: 2312 - protein, 1091 aa, Oryza sativa
MSSSRPTQCSSSSSRTRQSSRARILAQTTLDAELNAEYEEYGDSFDYSKLVEAQRTTGPEQQARSEKVIAYLHHIQRAKLIQPFGCLLALDEKTFNVIALSENAPEMLTTVSHAVPSVDDPPKLRIGTNVWSLFTDPGATALQKALGFADVSLLNPILVQCKTSGKPFYAIVHRATGCLVVDFEPVKPTEFPATAAGALQSYKLAAKAISKIQSLPGGSMEVLCNTVVKELFDLTGYDRVMAYKFHEDDHGEVFAEITKPGLEPYLGLHYPATDIPQAARFLFMKNKVRMICDCRARSIKIIEDESLHLDISLCGSTLRAPHSCHLQYMENMNSIASLVMAVVVNENEDDDEVGADQPAQQQKRKKLWGLLVCHHESPRYVPFPLRYACEFLAQVFAVHVNKEFELERQVREKSILRMQTMLSDMLLRESSPLSIVSGTPNIMDLVKCDGAALLYGGKVWRLQNAPTESQIRDIAFWLSDVHRDSTGLSTDSLHDAGYPGAAALGDMICGMAVAKINSKDILFWFRSHTAAEIRWGGAKHDPSDKDDSRRMHPRLSFKAFLEVVKMKSLPWNDYEMDAIHSLQLILRGTLNDDIKPTRAASLDNQVGDLKLDGLAELQAVTSEMVRLMETATVPILAVDSNGLVNGWNQKVAELTGLRVDEAIGRHILTVVEESSVPVVQRMLYLALQGKEEKEVKFEVKTHGSKRDDGPVILVVNACASRDLHDHVVGVCFVAQDMTVHKLVMDKFTRVEGDYKAIIHNPSPLIPPIFGADEFGWCSEWNAAMTKLTGWHRDEVINKMLLGEVFDSTNASCLVKNKDAFVSLCILINSALAGDETEKAPFSFFDRNGKYIECLLSVNRKVNADGVITGVFCFIQVPSHELQHALHVQQASQQNALTKLKAYSYMRHAINNPLSGMLYSRKALKNTGLNEEQMKEVNVADSCHRQLNKILSDLDQDSVMNKSSCLDLEMVEFVLQDVFVAAILSDFLFVSVKFSPVGGSVEISCSLTKNSIGENLHLIDLELRIKHQGKGVPADLLSQMYEDDNKEQSDEGMSLAVSRNLLRLMNGDVRHMREAGMSTFILSVELASAPAK

SEQ ID NO: 2313 - protein, 189 aa, Oryza sativa
  misc_feature (125)..(125): Xaa can be any naturally occurring amino acid
  misc_feature (131)..(131): Xaa can be any naturally occurring amino acid
  unsure (1)..(189): unsure at all Xaa locations
TPTARPGTRAWAAARPPGRRRRLRPPPLLPLVRVALEPIDSGAHPGTHPRLGAVEHICFHPLAHASLRHVADLAGAVAADIGDKLQVPMFLYGAAHRDGRTLAYIRRQLGYFKPNSSGDQWRGAXETDAMXVAPDTRPERPSRSKGVLSTTTTALSSNLPPLPTHPRRRSPSCTSSSPVMPHAAIPTSC

SEQ ID NO: 2314 - protein, 635 aa, Oryza sativa
MLLISHDVLDIMYPNDVFDRFWWTPVYSTEWLNISTNGTFMGYYSDDHIRVPRDVLRTAITTSATSVHLNITVHAASVGQLPPPTERAYFHFLHFASFEQQQHVSLVATNDSVLPPLLNAIEIYYSIPHDDTITSPDDVDAIMAIKTQYQVKKNWMGDPCLPKESIWTGLQCRQDGVESKIISLDLSYSNLHGAISADFSLLQSLRYLNLSYNNLNGSVPHSLTSSNCYIVFRYDTNDGDLCNGKSPKKKNISVLTVAIVTPIAAVLLVSAILIFCFCHKKRKQQMTLDQYSVQPTGISNSVSHVDIKGHVLMSDDHEFTYEELVKITNNFSECIGEGGFGPVYLGQLQRSIQVAVKMCSRKSVHGQGIKEFLAEVDSLKTVHYKYLVMLIGYCTNKNHLALIYEYMPNGSLFDHIRGKKANVQTMSWLQRARIVHEAAQGLNYLHSGCVLPIIHRDVKSHNILLGEDMHAKISDFGLSKSYINEAQTHISVTAAGTIGYIDPEYYFSSRLTMRSDVFSFGVVLLETVTGEPPIVPGVGHVVQRVKQKVSDGDISAIVDPRLEDAYDIGSVWKVVDIALLCTREVSDDRPTMTEVVEQLKHALALEEARHIDGHRDNGQGSIKPDLSANWGPLAR

SEQ ID NO: 2315 - protein, 798 aa, Oryza sativa
  misc_feature (141)..(141): Xaa can be any naturally occurring amino acid
  unsure (1)..(798): unsure at all Xaa locations
MGTGGGEGDKSAVLPLEALLALGLDQRTAENALVNSKVTANLAAVIAEAGISGCDKTVGNLLYTVATKYPTNALVHRPVLIDYIVSTKIKNPAQLDAALSFLTNTGPDSLDTGKFEEACGVGVVVSIEEIKSTVNEVLKHXNMEALLEQRYHYLMLGNLCGQVRKRHPWGDAKATKDEIDKKLAEILGPKTDADNVKPVKKKKEKAAKVEEKKAAVVTAAPPSEEELNPYSIFPQPEENFKVHTEIFYSDGNIWRAHNSKEILEKHLKATGGKVMTRFPPEPNGYLHIGHAKAMFIDFGLAKERNGHCYLRFDDTNPEAEKKEYIDHIQEIVHWMGWEPYKVTYTSDYFQALYEHAVELIRKGLAYVDHQTAEEIKEYREKKMNSPWRDRPIEESLKLFEDMRRGLIAEGAATLRMKQDMQNDNKNMSDLIAYRIKFTPHPHAGDKWCIYPSYDYAHCMVDSLENITHSLCTLEFDIRRPSYYWLLVALGLYQPYVWEYSRLNISNTVMSKRKLNRLVTEKWVDGWDDPRLLTLAGLRRRGVSSTAINSFICGIGITRSDNSLIRVDRLEYHIREELNKTASRAMVVLNPLKVVITNLEDEKVIDLDGKMWPDAPADDASSYYKVPFSRIVYIEKTDFRLKDSKDYYGLAPGKSALLRYAFPIKCTEVVYGDNPDDIIEIRAEYDPSKTTKPKGVLHWVAQPAPGVEPLKVEVRLFDKLFLSENPAELEDWLGDLNPNSKEVIKGAYAVPSLATAVLGDKFQFERLGYFAVDTDSTPENIVFNRTVTLRDSYGKAGPK

SEQ ID NO: 2316 - protein, 324 aa, Oryza sativa
MASATNSSLSLMLLVAAAMASVASAQLSATFYDTSCPNALSTIKSVITAAVNSEARMGASLLRLHFHDCFVQASFTQPIGCDASVLLSGQEQNAGPNVGSLRGFSVIDNAKARVEAICNQTVSCADILAVAARDSVVALGGPSWTVLLGRRDSTTASEALANTDLPAPSSSLAELIGNFSRKGLDATDMVALSGAHTIGQAQCQNFRDRIYNETNIDSAFATQRQANCPRPTGSGDSNLAPLDTTTPNAFDNAYYSNLLSNKGLLHSDQVLFNGGSADNTVRNFASNAAAFSSAFTTAMVKMGNISPLTGTQGQIRLSCSKVNS

SEQ ID NO: 2317 - protein, 297 aa, Oryza sativa
MSAASGAACGVCGGGVGECGCLLHQRRGGGGGGGGGGVRCGIAADLNRGFPAIFQGVGVEETAVEGDGGAQPAAGLQEFQFFGHDDHDSVAWLFNDPAPPGGTDHQLHRQTAPMAVGNGAAAAQQRQAFDAYAQYQPGHGLTFDVPLTRGEAAAAVLEASLGLGGAGAGGRNPATSSSTIMSFCGSTFTDAVSSIPKDHAAAAAVVANGGLSGGGGDPAMDREAKVMRYKEKRKRRRYEKQIRYASRKAYAEMRPRVKGRFAKVPDGELDGATPPPPSSAAGGGYEPGRLDLGWFRS

SEQ ID NO: 2318 - protein, 321 aa, Oryza sativa
MAGAVLVRRMVVVVAIAALVAPGEVAAQLTPTYYDGSCPSLQSIVRSAMAAAVQQEPRMGASILRLFFHDCFVNGCDASVLLDDSSTITGEKNAGPNANSLRGFEVIDSIKSQVEAACPGTVSCADILAVAARDGVNLLGGPTWAVQLGRRDTRTASQSAANSNLPSPSSSAAALVSAFASKGLDSRDMVALSGAHTIGAARCATFRARVYNDTNISPGFAVRRRQVCPASGGDGNLAPLDALSSVRFDNGYFRNLMGRFGLLHSDQELFNGGPVDSIAQQYAANGAAFSRDFVTAVVKMGNISPLTGSSGEVRSNCRKPN

SEQ ID NO: 2319 - protein, 647 aa, Oryza sativa
  misc_feature (485)..(485): Xaa can be any naturally occurring amino acid
  unsure (1)..(647): unsure at all Xaa locations
MEQKEEEKELKADKNLRRRGEEMIKGDSKQLASMYMKEEMIKGERQLGTHEDRLKDEVIKDGDKISDGNFFKSLQNISSTKEEVCSPGPIERSCMDSSLLNMKAQNKGQDDKLESTRAEMGEVREENERLKTLLSRISHDYRSLQTHFYDVLQQGRAKKLPDSPATDIEEPELVSLRLGTSTSKCKKEDKSTTSSEVKGSTEDFLKIKGGLSLGLSDCRVDANNSEKVQPDVMTLSPEGSFEDARDDTAETTEQWPPSKMLKNLRSVGAEAEDDIAPQPQVKKARVSVRARCDAPTMNDGCQWRKYGQKIAKGNPCPRAYYRCTVAAGCPVRKQVQRCADDMSILITTYEGTHNHPLSVSATAMASTTSAAASMLISGSSSTSLAAYPAAAASPALAFDASSKPPLIGGRPFFLPTAAAAAITSTPSYPTITLDLTSPAAAATSSHAAFSLSNRFSHTRYPSTGFTFSGSGPSSAPWPGYLSYGXASLSAHPYNAGGGKSSSSFEAALSSINGSRQQGGGGGGGSAPPLYQMQQKAAAAAPPPPSVITDTIAKAITADPSFHTALAAAITSYVGKKGSPPASGGEDSKVGLKWGEHLGLGLTHSSLSTAAAAAASSSSQMFLQPSLGLSGSTTSASTSPVANREQAH

SEQ ID NO: 2320 - protein, 293 aa, Oryza sativa
MEVGFLGLGIMGKAMAANLLRHGFRVTVWNRTLSKVVFDKDGVLEQIGEGKGYVDMSTVDAATSCKISEICHFIIDFHSIRTSHDYDIRTPAYRTYVTIELVCACAAIKQKGGAFVEAPVSGSKKPAEDGQLVILAAGDKVLYDDMVPAFDVLGKKSFFLGEIGNGAKMKLVVNMIMGSMMNALSEGLSLADNSGLSPQTLLDVLDLGAIANPMFKLKGPSMLQGSYNPAFPLKHQQKDMRLALALGDENAVSMPVAAASNEAFKKARSLGLGDLDFSAVYEVLKGAGGSGKA

SEQ ID NO: 2321 - protein, 623 aa, Oryza sativa
MGQCYGKGASGRTADDEGGVVTEHQSPPPANGLPSTPPRQQAQAQAQQVGTPRRRGSKSGSTTPGHQTPGVAWPSPYPSGGASPLPAGVSPSPARSTPRRFFKRPFPPPSPAKHIKATLAKRLGGGKPKEGTIPEEGGVGAGGGGGGAADGAETERPLDKTFGFSKNFGAKYELGKEVGRGHFGHTCSAVVKKGEYKGQTVAVKIIAKAKMTTAISIEDVRREVKILRALSGHNNLVKFYDACEDGLNVYIVMELCEGGELLDRILARGGRYAEEDAKAIVVQILSVVAFCHLQGVVHRDLKPENFLFTTRDENAPMKLIDFGLSDFIRPDERLNDIVGSAYYVAPEVLHRSYSMEADIWSIGVITYILLCGSRPFWARTESGIFRSVLRADPNFDDSPWPTVSAEAKDFVKRFLNKDYRKRMTAVQALTHPWLRDEQRQIPLDILIFRLIKQYLRATPLKRLALKALSKALREDELLYLKLQFKLLEPRDGFVSLDNFRTALTRYLTDAMKESRVLEFLHALEPLAYRRMDFEEFCAAAISPYQLEALERWEEIAGTAFQQFEQEGNRVISVEELAQELNLAPTHYSIVQDWIRKSDGKLNFLGFTKFLHGVTIRGSNTRRH

SEQ ID NO: 2322 - protein, 548 aa, Oryza sativa
  misc_feature (230)..(230): Xaa can be any naturally occurring amino acid
  unsure (1)..(548): unsure at all Xaa locations
MAAPPLLSLSQRLLFLSLSLPKPQLAPNPSSFSPTRAASTAPPPPEGAGPAAPSRGDRFLGTQLAAEAAARVLAPEDAERRRRRREKRKALARKPSAAACYGCGAPLQTADEAAPGYVHPATYDLKKRHHQLRTVLCGRCKLLSHGHMITAVGGHGGYPGGKQFVSADQLRDKLSYLRHEKALIIKLVDIVDFNGSFLARVRDFAGANPIILVITKVDLLPRDTDLNCIXGDWVVEAVVKKKLNVLSVHLTSSKSLVGVTGVISEIQQEKKGRDVYILGSANVGKSAFISAMLRTMAYKDPVAAAAQKYKPIQSAVPGTTLGPIQIEAFLGGGKLYDTPGVHLHHRQAAVIHADDLPSLAPQSRLRARCFPANDTDVGLSGNSLFWGGLVRIDVVKALPRTRLTFYGPKKLKINMVPTTEADEFYEREVGVTLTPPAGKEKAEGWVGLQGVRELQIKYEESDRPACDIAISGLGWVAVEPLGVPSSNPDESAEEEDNESGELHLRVHVPKPVEIFVRPPLPVGKAASQWYRYQELTEEEEELRPKWHY

SEQ ID NO: 2323 - protein, 465 aa, Oryza sativa
MNKNAAPEDVESGEHERTGTVWTATAHIVTAVIGSGVLALAWSVAQLGWVAGPLALAGFACVTYYTSTLLANAYRAPHPVTGTRNRTYMDAVRSYLSPREVFMCGIAQYVNLWGTMVGYTITATISMVAIRRSDCIHRNGAGAAARCDNTSATVLMLAFSIVQVVLSQFPGLEHITWLSVVAAVMSFAYSFIGLGLSVAEWVSHGGHLSGRIQGATAASSSKKLWNVLLALGNIAFAYTFAEVLIEIQDTLKPSPPENKTMKNPAVRGIGATTIFYISVGCAGYAAFGSDAPGNILTASGMGPFWLVDIANMCLILHLIGAYQVYAQPIFATMERWISSRWPEAKFINSEYTVNVPLIQRGSVTVAPYKLVLRTVVVIATTVVAMMIPFFNAVLGLLGAFSFWPLTVYFPISMHIAQEKITRGGRWYLLQGLSMVCLMISVAVGIGSVTDIVDSLKVATPFKTVS

SEQ ID NO: 2324 - protein, 593 aa, Oryza sativa
  misc_feature (210)..(210): Xaa can be any naturally occurring amino acid
  misc_feature (243)..(243): Xaa can be any naturally occurring amino acid
  unsure (1)..(593): unsure at all Xaa locations
MAALRDVLLSIAQTPHRLRRRALVTWTPAQETSEVRDRSGARMKRRLEWYDLVGLGVGGMLGAGVFVTTGRVARDTAGPAVFASYVIAGVSALLSSFCYAEFSVRVPAAGGAFSYLRVTFGELVGFFGGANILMEYVLSNAAVARSFTDYLASTCGITEPDAWRIQVDGIAKGYNALDFPAVALILVLTLCLCYSTKESAMLNMVITVFXHLLFLVFIILAGLGNGNARNLVSPHGRAPYGVXRGVLDGAAIVYFSYIGYDSASTMAEEIRDPARALPVGIAGSVLVVSALYCLMSLALCAMLPYTEIAESAPFSAVFREKAGWEWAGSVVGAGASLGIVASLLVAMLGQARYLCVIARARLVPAWLAKVHPSTGTPMNATIFLDRANGSIKYTNNFTEVKVLTTVSDHENCNAGLCTASIALFTELQVVFEMISIGTLLVFYLVANALIYHRYAKLGANRSLHVLLFLLILTLSSLGFSLSRRIHGQCRWGMALFGATSVTITAMFHCAVRRDMPEPPSEWMVPLMPWPAAASVFLNVFLMTTLKVMSFQRFGLWSFVIIVFYVCYGVHSTYSAEENEAVNAMIHHANMDIS

SEQ ID NO: 2325 - protein, 536 aa, Oryza sativa
MRKNPSEQEEEEKETEKKANEIEVQFPFRPTDPTHLPQPQVDAQVHHPCSIRTNTTTQTTYRCDTRSRAKRYHPPIHGGLHLRHLLLHSHQARLLLLLLLKSQLRLLRQVSIGVALGGWIFAGSLAAIGDVMTASGRCRMASVVVRAEAVDATISPTVSALRPSKTMAITDQATALRQAGVPVIGLAAGEPDFDTPHVIAEAGMNAIKDGYTRYTPNAGTLELRKAICNKLQEENGISYSPDQVLVLIPAPYWVSYPEMATLAGATPVILPTSISENFLLRPELLASKINEKSRLLILCSPSNPTGSVYPKELLEEIADIVKKYPRLLVLSDEIYEHIIYQPAKHTSFASLPGMWDRTLTVNGFSKAFAMTGWRLGYLAAPKHFVAACGKIQSQFTSGASSISQKAGLAALNLGYAGGEAVSTMVKAFQERRDYLVKSFKELPGVKISEPQGAFYLFIDFSSYYGSEVEGFGTIKDSESLCMFLLEKAQVALVPGDAFGDDKCIRMSYAAALSTLQTAMEKIKEAVALIKPRVAAK

SEQ ID NO: 2326 - protein, 496 aa, Oryza sativa
MGENGVVASKLCYPAAAMEVVAAELGHTAGSKLYDDDGRLKRTGTMWTASAHIITAVIGSGVLSLGWAIAQLGWVAGPAVMLLFSFVTYYTSALLADCYRSGDESTGKRNYTYMDAVNANLSGIKVQVCGFLQYANIVGVAIGYTIAASISMLAIKRANCFHVEGHGDPCNISSTPYMIIFGVAEIFFSQIPDFDQISWLSILAAVMSFTYSTIGLGLGVVQVVANGGVKGSLTGISIGVVTPMDKVWRSLQAFGDIAFAYSYSLILIEIQDTIRAPPPSESGVMRRATVVSVAVTTLFYMLCGCTGYAAFGDAAPGNLLTGFGFYEPFWLLDVANAAIVVHLVGAYQVYCQPLFAFVEKWAQQRWPKSWYITKDIDVPLSLSGGGGGGGRCYKLNLFRLTWRSAFVVATTVVSMLLPFFNDVVGFLGAVGFWPLTVYFPVEMYIVQKRIPRWSTRWVCLQLLSLACLAITVASAAGSIAGILSDLKVYKPFATTY

SEQ ID NO: 2327 - protein, 402 aa, Oryza sativa
  misc_feature (235)..(235): Xaa can be any naturally occurring amino acid
  misc_feature (311)..(311): Xaa can be any naturally occurring amino acid
  unsure (1)..(402): unsure at all Xaa locations
MGALRRWLPCCCCCCRGGGGGGGGGSVGDGLVWDVALKAHASGDYSVAVAQANEALEDQAQVFVSPAATLVGVYDGHGGPEAARFVNKRLFSLIQEFAAQSGGISAEVLEKAFGETEEEFVASVQRSWPSQPRILSVGSCCLVGAIEDGTLYVANLGDSRAVLGRRSAAGAAHGRKGKNRVVPERLSRDHNVADEDVRRELKELHPDDSHIVLNTHGVWRIKGIIQIKLLIDAYXVSRSIGDVYLKKPEICKSNPMLQQTICPFPLRRPVMSAVPTIKTRKLRPGDQFVIFASDGLWEQLTDEAAVAIVAXGSPRRGVAMRLVRAAQLEAARKKDVKYERIRTIEKGQRRHFHDDITVVVLFLDKCRGKAGRGDEIDGTDGPVDVFSLSPDDREDPTRPVLR

SEQ ID NO: 2328 - protein, 784 aa, Oryza sativa
MTPARRMPPVIGRNGVAYESPSAQLPLTQADMLDSHHLQQALQQQYFDQIPVTTTAAADSGDNMLHGRADAGGLVDEFESKSCSENVDGAGDGLSGDDQDPNQRPRKKRYHRHTQHQIQEMEAFFKECPHPDDKQRKELSRELGLEPLQVKFWFQNKRTQMKNQHERHENAQLRAENDKLRAENMRYKEALSSASCPNCGGPAALGEMSFDEHHLRVENARLRDEIDRISGIAAKHVGKPPIVSFPVLSSPLAVAAARSPLDLAGAYGVVTPGLDMFGGAGDLLRGVHPLDADKPMIVELAVAAMDELVQMAQLDEPLWSSSSEPAAALLDEEEYARMFPRGLGPKQYGLKSEASRHGAVVIMTHSNLVEILMDVNQFATVFSSIVSRASTHEVLSTGVAGNYNGALQVMSMEFQVPSPLVPTRESYFVRYCKNNSDGTWAVVDVSLDSLRPSPVQKCRRRPSGCLIQEMPNGYSKVTWVEHVEVDDSSVHNIYKPLVNSGLAFGAKRWVGTLDRQCERLASAMASNIPNGDLGVITSVEGRKSMLKLAERMVASFCGGVTASVAHQWTTLSGSGAEDVRVMTRKSVDDPGRPPGIVLNAATSFWLPVPPAAVFDFLRDETSRSEWDILSNGGAVQEMAHIANGRDHGNSVSLLRVNSANSNQSNMLILQESCTDASGSYVVYAPVDIVAMNVVLNGGDPDYVALLPSGFAILPDGPSGNAQAAVGENGSGSGGGSLLTVAFQILVDSVPTAKLSLGSVATVNSLIACTVERIKAAVCRDSNPQ

SEQ ID NO: 2329 - protein, 386 aa, Oryza sativa
MMMMGEGVSSVPPWSHLPVSGVDVLGGGGGGGDEMTPYVIAALRDYLPANDVGVGADEEEEAAAMAAAVDAYACDEFRMYEFKVRRCARGRSHDWTECPFAHPGEKARRRDPRKYHYSGTACPDFRKGGCKRGDACEYAHGVFECWLHPARYRTQPCKDGTACRRRVCFFAHTPDQLRVLPAQQSSPRSVASSPLAESYDGSPLRRQAFESYLTKTIMSSSPTSTLMSPPKSPPSESPPLSPDGAAAIRRGSWPGVGSPVNDVLASFRQLRLNKVKSSPSGGWSYPSSSAVYGSPKAATGLYSLPTTPLASTATVTTASSFMPNLEPLDLGLIGDEEPVQRVESGRALREKVFERLSRDGAISGDATAFATAGVGLDVDWVSDLIN

SEQ ID NO: 2330 - protein, 530 aa, Oryza sativa
MCGILAVLGVADVSLAKRSRIIELSRRLRHRGPDWSGIHCYQDCYLAHQRLAIVDPTSGDQPLYNEDKSVVVTVNGEIYNHEELKANLKSHKFQTASDCEVIAHLYEEYGEEFVDMLDGMFAFVLLDTRDKSFIAARDAIGICPLYMGWGLDVCRIKILVLIYVPSKKFKVFVTGHEVGFFFDVISGSLFKAIIKRLMTDVPFGVLLSGGLDSSLVASVVSRHLAEAKVAAQWGNKLHTFCIGLKGSPDLRAAKEVADYLGTVHHELHFTVQEGIDALEEVIYHVETYDVTTIRASTPMFLMSRKIKSLGVKMVLSGEGSDEIFGGYLYFHKAPNKKEFHEETCRKIKALHLYDCLRANKSTSAWGVEARVPFLDKNFINVAMDIDPEWKMIKRDLGRIEKWVLRNAFDDEEKPYLPKHILYRQKEQFSDGVGYSWIDGLKDHANEHNAARLTVPGGPSVACSTAKAVEWDAAWSKNLDPSGRAALGVHDAAYEDTLQKSPASANPVLDNGFGPALGESMVKTVASATAV

SEQ ID NO: 2331 - protein, 297 aa, Oryza sativa
MENHPVQCMAKTNYDFLARNNYPMKQLVQRNSDGDSSPTKSGESHQEASAVSDSSLNGQHTSPQSELTKYDLTQIVFVPSDINNNDSCGERDHGTKSVLSLGNTEAAFPPSKFDYNQPFACVSYPYGTDPYYGGVLTGYTSHAFVHPQITGAANSRMPLPVDPSVEEPIFVNAKQYNAILRRRQTRAKLEAQNKAVKGRKPYLHESRHHHAMKRARGSGGRFLTKKELLEQQQQQQQQKPPPASAQSPTVLQVHMVIGNNRSNPQFVANPLRPIFDAKLVAASSEQMCKTGNPVPGF

SEQ ID NO: 2332 - protein, 937 aa, Oryza sativa
MLKQKDLMVISYSCSAGTKLTWILSLLLILVAATQVHGVSPPGFLNVDCGLTNRSTYNDTDTTLTYVSDREFVESGKSYDIMAQYMADATNEQEKTLRSFPDGQRNCYTLPTNSSKKYLIRATFTYGNYDGLNSSEKGSLFIFGLHIGVNFWTTVNLTKWDPSSTVWKEVITVAPDKSVSVCLINMGSGTPFISTLDLRPLQDTMYPFVNASTSVSYFSRIRFGSVDEYITRFPTDQYDRFWEGWVFTMHTFPWVNKSSNGKVAELPNIDTFGLPPAILGSASTINGNFSWLNISVSASNSLATDLELLPVFHFVELGNNGSKRIFDIYNVDEPQALFSNFSPPSFLSSMFHNWFLRKGRRAYFQLRKTPDSQLPPLINAYEVYSRVQVENFTTASSDVDSMKTIKEKYMVIKNWNGDPCSPREYIWNGLTCTYPNGGQNPRIVEINLSGSGLQGELEISFMKMSSLKKLDLSHNNLTGTIPDYQVNSLTVIDLSNNQLNGSIPDSILQRYKAGLLELRLEGNPICSKVRASYCGNKKNTRTRILLISVLVPVTSLLVVLFIFWRLCWKGKSRKSEEEDYDMYEEETPLHIDIRRFTYAELKLITNNFQSIIGKGGFGTVYHGILENNDEVAVKVLVETSIAESKDFLPEVQTLSKVHHKNLVALVGYCQNKKCLALVYDFMPRGNLQQLLRGGYDSLNWEERLHIALDAAQGLEYLHESCTPSIVHRDVKTPNILLDKNLVAKISDFGLSRAFNAAHTHISTVAAGTLGYLDPEYHATFQLTVKTDVYSFGIVLLEIVTGQPPVFMDPQTVHLPNWVRQKIANGSVHDVVDKKLLDQYDATHLQTVIDLAMNCLENASIDRPSMTEVVSVLKVCLPISSERQSATSTPRKKNVMDAEIPRQFQLMISGASTTSYEGSSFQSGYTGGVSEISHISGR

SEQ ID NO: 2333 - protein, 609 aa, Oryza sativa
PLPPPPPASPSAGSGSGSASTRRRLAAGPLLQDMAARFGPLLLVLPLSSALLVLSAATAPRGRPSQVDVGRQLREELWERNQGHEMLRSWRDGDPCSPSPWEGFSCRWKDGNLFVVKLNFSSKKLQGPIPAAIGNLTELDEIDLQDNNFTGSIPESFFDLTHLLKLSVKCNPFLNNQLPHGLSISVEFSYGGCAYHSPPGASNQRIAVIGGVAGGSLACTFALGFFFVCFNKREKNPQKKDCSSTRNPVFEECSTHKATNSAVQQLSLKSIQNATCNFKTLIGEGGFGSVYRGTLAHGEEVAVKVRSTSSTQGTREFNNELRLLSAVRHDNLVPLIGYCCEKDQEILVYPFMSNGSLQDRLYGEASKRKVLDWPTRLSVCIGAARGLAHLHGFAGRCIIHRDVKSSNILLDHSMCGKVADFGFSKYAPQEGDSNASMEVRGTAGYLDPEYYSTQSLSTKSDVFSFGVVLLEIVTGREPLDVQRPRDEWSLVEWAKPYIREYRIEEIVDPGIKGQYCSEAMWRVLEVASACTEPFSTFRPSMEDVVRELEDALIIENNASEYMRSIESTGTLGSNRYLSIDRKMFASGSARFASFDATKGHLQTMPSLPG

SEQ ID NO: 2334 - protein, 332 aa, Oryza sativa
  misc_feature (196)..(196): Xaa can be any naturally occurring amino acid
  unsure (1)..(332): unsure at all Xaa locations
MAAMAAASLLCARAAAAAPTLRLRGGGRGARLVFSCSASSSSPSGEGGFSGKVGFLGLGIMGAPMASNLINAGCDVTVWNRTRSKCDPLLSLGAKYEPSPADVASSCDVTFAMLADPESAVEVACGANGAAQGMAPGKGYVDVSTVDAATSKLIGKHITSTGASFLERCDFSSCTAPVSGSKKPAEDGLLIFLTAXSRFFLGDVGKGADMKLVVNMVMGSMMVSFSEGLLLSEKVGLDPNTLVEVISQGAISAPMFSLKGPSMVKAAYPTAFPLKHQQKDLRLALALAESVSQSIPTVAAANELYKVAKSLGLADQDFSAVIEALKAKEQSK

SEQ ID NO: 2335 - protein, 285 aa, Oryza sativa
MEMVLQRTSHHPVPGEQQEAAAELSSAELRRGPWTVDEDLTLINYISDHGEGRWNALARAAGLKRTGKSCRLRWLNYLRPDVKRGNFTAEEQLLILDLHSRWGNRWSKIAQHLPGRTDNEIKNYWRTRVQKHAKQLNCDVNSKRFKDAMKYLWMPRLAERIHARAGAVDDSGDYSNNDLSCVSGVTMATVANCFDGSPSMVTSSSSDSFTSESQDLKKINLHVHGDDEKMNSEDWMQEVDHEFWSTEIQPNNEQFQDQQLNGWVQGFSEGLSETLWSLEDIWKMQ

SEQ ID NO: 2336 - protein, 188 aa, Oryza sativa
  misc_feature (124)..(125): Xaa can be any naturally occurring amino acid
  unsure (1)..(188): unsure at all Xaa locations
GQSGEAEAEASGGVHANPSSPARMQEQATSSRPSSSERSSSSGGHHMEIKEGMESDEEIGRVPELGLEPGGASTSGRAAGGGGGGAERAQSSTAQASARRRGRSPADKEHKRLKRLLRNRVSAXXARERKKAYLNDLEVKVKDLEKKNSELEERFSTLQNENQMLRQILKNTTVSRRGPGSTASGEGQ

SEQ ID NO: 2337 - protein, 200 aa, Oryza sativa
MSRSSLAMALLLAAFAAAATANSGAAPAASDFIRKSCRATQYPAVCVQSLASYGGAGAPPPRSPRELARAALSVSVDKARSASTYVGHICGPGGGRGGAGGAGPVRDCLENMADSVGHLRDAAQELGGNMGRAGSPGFKWHLSNVQTWCSAALTDENTCLDGLSRGVDAATRSAIRGKIVEVAQVTSNALALVNRVAPAN

SEQ ID NO: 2338 - protein, 329 aa, Oryza sativa
MCGGAILAELIPSAPAARRVTAGHVWPGDANKAKKKGARADDFEAAFRDFDNDSDDEEMMVEEAEEEEATSEHKPFVFRAKKAAAAASSRRRKPAQYRGVRRRPWGKWAAEIRDPVKGIRVWLGTFTNAEAAALAYDDAARAIRGDRAKLNFPSATTPDTRKRGRATAAAAPAVKATPVINLVEEEDEEEVAAAMASIKYEPETSESSESNALPDFSWQGMSASDEFAVAAAALSLDSDDDLAKKRPRTEPEDTTDSGSGDDTDALFDALLFADQYNHFNGGAYESLDSLFSADAVQTTAAAAAADQGMGLWSFDDGCCLVDVEASLSF

SEQ ID NO: 2339 - protein, 479 aa, Oryza sativa
MSSSATVVPLAYQGNTSASVADWLNKGDNAWQLVAATVVGLQSVPGLVVLYGGVVKKKWAVNSAFMALYAFAAVWICWVTWAYNMSFGEKLLPIWGKARPALDQGLLVGRAALPATVHYRADGSVETAAVEPLYPMATVVYFQCVFAAITLILVAGSLLGRMSFLAWMIFVPLWLTFSYTVGAFSLWGGGFLFHWGVIDYCGGYVIHVSAGIAGFTAAYWVGPRAQKDRERFPPNNILFTLTGAGLLWMGWAGFNGGGPYAANSVASMAVLNTNICTAMSLIVWTCLDVIFFKKPSVVGAVQGMITGLVCITPAAGVVQGWAALVMGVLAGSIPWYTMMILHKRSKILQRVDDTLGVFHTHGVAGLLGGLLTGLFAEPTLCNLFLPVADSRGAFYGGAGGAQFGKQIAGGLFVVAWNVAVTSLICLAINLLVPLRMPDDKLEVGDDAVHGEEAYALWGDGEMYDVTKHGSDAAVAPVVV

SEQ ID NO: 2340 - protein, 500 aa, Oryza sativa
MVRGEAIAKELNLRHRGVTYSVLFYAAWCPFSSKFRPIFEALSTMFPQIYHFTVEESSAMPSLFSRYGVRGFPAILLVNETTMVRYWGPKDLSSLVDFYKETTGFDPIAYFDVDHQDSTGDFRPVTPGDRSLRKIAKDEPFVLLAVLFIILKVAAHFVPIVVSHLKTFLVPEAGAADSCLIYCDCYMYITVYKKLTKCFWKMLLLYVNLLFTGDLWHPNPSTATVKIFNEGLSAVQFDMSRGTASMDAISLDEWELLPDNKSSYFMEEFTSDHGTVVGKDDQFLFGASLIMINMDHFTPASHPSPYDCILDDETKNIFLPIHLSEEVYVGDPVIKFKDIDVVKIESYREEFVPKVTEIFDAEEEAEMIKSPVSAEEVDVDDDDEVMAMVAPDQCVEEEEGAQKDKEHNGFSVGKLRVNGVGALCSFGVAAATLCIFLLGGRQQQLHKTQNQKTPFQMYADNERIQQVVQQASRLNQAVSTVMGGASTRASISFGGYYDGF

SEQ ID NO: 2341 - protein, 367 aa, Oryza sativa
MDQLLALAVAVPLFALASALAAASATPVNKSCLNGSTGAAVSIGYGGASASAGAGAGVSLGTDAYWLACPLAEEIVRDVVERAVAADPRMAASLLRLHFHDCFVNGCDGSVLLDDKPLFIGEKTAGPNANSLRGFEVIDAIKAELENACPETVSCADVLAIAARDSVVASGGPSWQVEVGRKDSRTASLQGANTNLPAPTSGVATLVQKFRNVGLSAKDMVALSGAHTIGKARCTTFSARLAGVGASAGGGATPGDLSFLESLHQLCAVSAGSALAHLDLVTPATFDNQYYVNLLSGEGLLPSDQALASAGAAAAGAEDVAGLIAAYAFDALLFFDDFASSMLRMGRLAPGAGTASGEVRRNCRVVN

SEQ ID NO: 2342 - protein, 252 aa, Oryza sativa
MVPSERGDVATAIRPAAADKLVHGPISDKKCRKKVPRKVHKSEREKLKRGHLNDLFGELGNMLEADRQSNGKACILTDTTRILRDLLSQVKSLRQENSTLQNESNYVTMERNELQDENGALRSEISDLQNELRMRATGSPGWGHGATGSPLPVPPSPGTVFPSQQPMQPSPMTTSTVFPLQQPLPQPTVIEPSARQPLELKLFLEAPPAEDPEPSEDQEAPNNVARPQPRYPTEASSWPISLGLPRMEDEQM

SEQ ID NO: 2343 - protein, 488 aa, Oryza sativa
  misc_feature (206)..(206): Xaa can be any naturally occurring amino acid
  unsure (1)..(488): unsure at all Xaa locations
MASSTGGLDHGFTFTPPPFITSFTELLSGGGGDLLGAGGEERSPRGFSRGGARVGGGVPKFKSAQPPSLPLSPPPVSPSSYFAIPPGLSPTELLDSPVLLSSSHILASPTTGAIPAQRYDWKASADLIASQQDDSRGDFSFHTNSDAMAAQPASFPSFKEQEQQVVESSKNGGAAASSNKSGGGGNNKLEDGYNWRKYGQKQMKGXSENPRSYYKCTFPGCPTKKKVERSLADGRITQIVYKGAHNHPKPLSTRRNASSCATAAACADDLAAPGAGADQYSAATPENSSVTFGDDEADNASHRSEGDEPEAKRWKEDADNEGSSGGMGGGAGGKPVREPRLVVQTLSDIDILDDGFRWRKYGQKVVKGNPNPRSYYKCTTVGCPVRKHVERASHDTRAVITTYEGKHNHDVPVGRGGGGGRAPAPAPPTSGAIRPSAVAAAQQGPYTLEMLPNPAGLYGGYGAGAGGAAFPRTKDERRDDLFVESLLC

SEQ ID NO: 2344 - protein, 100 aa, Oryza sativa
  misc_feature (43)..(43): Xaa can be any naturally occurring amino acid
  misc_feature (75)..(75): Xaa can be any naturally occurring amino acid
  unsure (1)..(100): unsure at all Xaa locations
MALEKARHLASSSPVFIFSKTYCGFCDRVKQLFKQLGASYHRXLNMDKEQDGDAIQAALYEWTGQRTRPNVFIGXKHIGGCDAVTAKHHSGQLVPLLTEA

SEQ ID NO: 2345 - protein, 783 aa, Oryza sativa
GRGAGPRFVTGPWIDARAVQGTRGLGLRLQPLRCVASFLSACPFRSRPLGPPTPQPLIPHADQQRRPARPPLHLRLRLRLRFLFSSSLPPSSERKRELTSRCPAGRGGEQGFAFGWSSRLCTRSTAANSSFLDFFTLSPRTAQMSDGNDFAELLWENGQAVVHGRKKHPQPAFPPFGFFGGTGGGGGGSSSRAQERQPGGIDAFAKVGGGFGALGMAPAVHDFASGFGATTQDNGDDDTVPWIHYPIIDDEDAAAPAALAAADYGSDFFSELQAAAAAAAAAAPPTDLASLPASNHNGATNNRNAPVATTTTREPSKESHGGLSVPTTRAEPQPQPQLAAAKLPRSSGSGGGEGVMNFSLFSRPAVLARATLESAQRTQGTDNKASNVTASNRVESTVVQTASGPRSAPAFADQRAAAWPPQPKEMPFASTAAAPMAPAVNLHHEMGRDRAGRTMPVHKTEARKAPEATVATSSVCSGNGAGSDELWRQQKRKCQAQAECSASQDDDLDDEPGVLRKSGTRSTKRSRTAEVHNLSERRRRDRINEKMRALQELIPNCNKACYVLQIDKASMLDEAIEYLKTLQLQVQMMSMGTGLCIPPMLLPTAMQHLQIPPMAHFPHLGMGLGYGMGVFDMSNTGALQMPPMPGAHFPCPMIPGASPQGLGIPGTSTMPMFGVPGQTIPSSASSVPPFASLAGLPVRPSGVPQVSGAMANMVQDQQQGIANQQQQCLNKEAIQGANPGDSQMQIIMQNVPVLKRSMAEEFHMVEDATRLQAVILDFQCSFL

SEQ ID NO: 2346 - protein, 468 aa, Oryza sativa
MDRRAVVYDAEAVDDHERQGTVWTATSHIVAAVVGSGVLALAWTVAQLGWVVGPLVLVGFSCVTYYTSTLLANCYRYPDPVTGTANREYIDAVRCYLGPKNVMLCGCAQYVNLWGTLVGYTITASASMIAVKRVNCFHREGYGAGDCGASGSTYMVVFGVFQLLLSQLPSLHNIAWLSVVAVATSFGYSFISLGLCAAKWASHGGAVRGTLAGADLDFPRDKAFNVLLALGNIAFSYTFADVLIEIQDTLRSPPAENKTMKRASFYGLSMTTVFYLLLGCTGYAAFGNDAPGNILTGFAFYEPFWLVDIANICVIVHLIGAYQVFAQPIFARLESYVACQWPDAKFINATYYVRVPGRWWPAATVAVAPLKLVLRTIIIMFTTLVAMLLPFFNAVLGLIGALGFWPLSVYFPVSMHVARLGIRRGEPRWWSLQAMSFVCLLISIAASIGSVQDIVHNLKAAAPFKTVN

SEQ ID NO: 2347 - protein, 180 aa, Oryza sativa
  misc_feature (22)..(22): Xaa can be any naturally occurring amino acid
  misc_feature (43)..(43): Xaa can be any naturally occurring amino acid
  misc_feature (71)..(72): Xaa can be any naturally occurring amino acid
  unsure (1)..(180): unsure at all Xaa locations
KKTLGILGMGGIGQAVAHRAKXFGMKIQYHNRSQLPPNEENGXRYVSFEELLKTSDVLSLNLALNPKTKHXXGKAQFDQMKDGVIIVNTARGALIDEAALVDALKSGKVWTCGLDVFEEEPKIHPGLLECENAVLLPHVGTATYETQRDMEILVLDNMKSAITKDKLLTQVPEQVSKANM

SEQ ID NO: 2348 - protein, 237 aa, Oryza sativa
MDSVVDGGLDTRLSLAVGCCPPRRRPVLLFGEVLPSPEKKVAAAAVVAAGKRGREQRGEAEAEATTTRQRRSCKKGRRGRGDDDDDDGDRRSPSGGGGDEEGASRKKLRLTGEQATLLEDSFRAHNILSHAEKQELAGKLGLSARQVEVWFQNRRARTKLKQTEADCDLLRRWCDHLAADNARLRRDLAELRRSSSSPPVSGLAVATPVVCPSCAHDDKRRLAFATAAAAAGDMASN

SEQ ID NO: 2349 - protein, 504 aa, Oryza sativa
MPLLLHPRFPSSHAAACAHRAAAAHRDARPALRLPELHATRRRRNNVACRATRAREAPPQQQNTAAALSKEAHKYFDHAVVTVRAGDGGHGAVLAMPASPSTDAPKSPRRRSDKGKRSGVKKVSYKRNYDGSVALPMGGHGGDVVVYADEAEETLLRFHEKARYCAKRGGNVGATGTLSSRMHNGFAGETLRIPVPVGTVVKRKKGAVLADLAHPGDEVIVARGGQGGISLIDVPEYRRRKAMVLSPNIMRDVSDRVLIHGQPGEEVSLELILRVVADVGLVGLPNAGKSTLLSAITLARPDIADYPFTTLMPNLGRLGGDPALGALQFSSEATLADLPGLIEGAHLGKGLGRNFLRHLRRTRVIVHVVDAAADDPVDDYKIVREELRMYNPQYLERPYVVVLNKIDLPKAQDRLSSLAFEISSIGCEECDGNNTSEDSLNGNTGEHNTSSETKVEGGEKELRDYPRPQAVVGASVLKHIGIDEMLKEIRAALRKCFDHRLPEP

SEQ ID NO: 2350 - protein, 117 aa, Oryza sativa
MSSNGSGDKNNLKDEINQLIADNKVMVFSATYCPYCTKAKKILGKYKLNGYKVVEIDTTDSADGYLKILGDMTGAHTVPRVFINGTCIGGGDDTEKLEKNGELEPKLKEAGALENES

SEQ ID NO: 2351 - protein, 645 aa, Oryza sativa
WLQSGNDGDMKMRVIVVEGDETSNAPKDVCCEYTLDGSVDIKGSPAVKGKSGGWLAGGLILRKYFVLNSADFTISFPAETGQQKMETKSMTGLSMNQGLATLAFFGVNVNLVLFLTRVLQQSNGDAANNVSKWTGTVYMFSLIGAFLSDSYWGRYKTCAIFQAIFVLGLALLSLSSRLYLIRPVGCGTEHVPCEPHSGAELGIFYIALYMIAFGNGGYQPNVATFGADQFDGEDPAESHSKVSFFSYFYLALNLGSLFSNTFLSFLEDEGNWALGFWVSTAAAATALLLFLGGTLRYRYIRPSGNPVGRIFQVAFAACRNWKAGESPGAVTLYESDEKADSGGRKLLHTEGFRFLDRAAVVGANPKLGTCTQPRDPWKLCTVTQVEEVKSILRLLPIWLCTILYSVVFTQMASLFVVQGAAMRRTTRFPGFSVPPSSMSAFDILTVATTIFLYRRAVCPLVSRLTGRHTGPTELQRMGLGLVLGAMAMATAGTVEHFRKAGATTAMSSDLHIMWQVPQYALIGVSEVMMYVGQLEFFNGEMPDALKSFGSALCMMSMSLGNYFSDVIVSAVTKATAVRGRPGWIPADLNEGHLDKFFFLLAVLAVADFAVYLVCASRYRSGTVDVDRSDGEEEDGVAGRQMAATV

SEQ ID NO: 2352 - protein, 134 aa, Oryza sativa
LYTAFALIHKERPPPNVVGRMVLVGDVQDKVAILVDDIADTCGTLAKAAATVNEHGAREVYAIVTHGILSGNAIDTINQSCLKGLVVTNTVPLGDKTERCPKLKVIDVSATLGEAIRRTHNGESVSYLFNNVPV

SEQ ID NO: 2353 - protein, 294 aa, Oryza sativa
  misc_feature (31)..(31): Xaa can be any naturally occurring amino acid
  unsure (1)..(294): unsure at all Xaa locations
LPASAPRLAARRPASAPRAGAWSTLSPEYSXGDLCCARSRSSLAVDRPVQIRVVYTVRGCSSIYGSDLGLMENRVGESSATAVDGGGGAKDSGSFECNICLELAQDPVVTLCGHLFCWPCLYEWLHVHAHSRECPVCKAGLEEEKLVPLYGRGKASTDPRSRSVAGVQIPSRPAGQRPATASQPDHHHDHLPHHDPWFMGGAGAPVAGGRWGNYTFSAAIGGLFPLLSFQVHGFPQAAAYGPAAGFPYGYGHSFHGWHGHGFPHQAPQGQHVDVFLKVLLVLVGVLVIASLIVF

SEQ ID NO: 2354 - protein, 884 aa, Oryza sativa
  misc_feature (280)..(280): Xaa can be any naturally occurring amino acid
  unsure (1)..(884): unsure at all Xaa locations
FKLRSPTRRHFGLVYMLFMHREYRAGFISIDCGLPEKTSYVDDATKLKFTSDDAFTDAGTIHNVSSEFATPTTTTDRSLYNVRSFPAGARNCYTVPSVVPGSKYLVRAKFLYGNYDGLNKPPVFDLHLGVNFWQTVTVPSADWLGNAEVIAVVPDDFLQVCLVNTGAGTPFISGLDLRPLPSSLYAPANATQGLVLLDRRNFGASGSTVIRYPDDTYDRVWWPWSNPPAEWSDISTADKVQNTIAPVFDVPSVVMQTAITTRNSSIPIQFSWDTKPNHVXIFTLYVTELELLAGNAVRQFNVTINGVIWTKAPYKPVYLSTDAMYNGDRPYRGITRYNFSLNAAGSSTLPPILNAAEAFSVISTADLATDAQDVSAITAIKAKYQVNKNWTGDPCAPKTLAWDGLTCSYAISTPPRITGVNMSYAGLSGDISSYFANLKEIKNLDLSHNNLTGSIPNVISQLQFLAVLDLTGNQLNGSIPSSLLKRTSLLFDRYGNNPNLCSNSSSCQLPQKKSNSMLAVYVAVPVVVIGAVAVFLIFFIRKKKNKCVQSHSQNGSGGSLLELHNRQFTYKDLAVITNNFQRVLGKGGFGPVYDGFLKDGTHVAVKLRDESSSQGYSEFLTEAQILTRIHHKNLVSMIGYCKDGDNMALVYEYMSEGTLQEHIANSRRRFLPWRRRLQIALESAQGLEYLHKGCNPPLIHRDVKATNILLNAMLEAKIADFGLSKAFNRNNDTHVSTNTLAGTPGYVDPEYLMTMQPTTKSDVYSFGVVLLELVTGKPALLRDLDNTSIIQWVQQHLARGNIEDVVDARMHGDHDINSVWKVVDIALKCTMQESIHRPTMTGVVAMLQECIELENRHLKDYAANSENHNSSYNTYGVDQSTNVI

SEQ ID NO: 2355 - protein, 351 aa, Oryza sativa
MLVLGGRKPTSWAVKEGRSRGSWRQGVVTGGRGGMVPARQGGMGGCMAQAARADAAATGHNFKEQAIEYVKQAVQEDNGGNYVKAFPLYMNALEYFKTHLKYEKDPKIKDAIAAKFTEYLRRAEEIRAVLDGHIGGGGGGGDSEQAKPRGMLRSAIVAAKPSVKWSDVAGLESAKEALQEAAILPIKFPHFFTGTGKSYLAEAVATEVDSTFFSISSSDLVSKWMGESEKLVANLFQMARENAPSIIFIDEIDSLCGQRGECNENEASRRIKTELLVQMQVKDALFQPVRKTQDAKFFIKADDDTWTPSPTWSEFTVNGLMSWAPSSPHAPSTFLAVLHVRHLCGLNAAMG

SEQ ID NO: 2356 - protein, 174 aa, Oryza sativa
MSRDPLVVGHVVGDIVDPFVTTASLRVFYNSKEMTNGSELKPSQVLNQPRIYIEGRDMRTLYTLVMVDPDAPSPSNPTKREYLHWMVTDIPETTDARFGNEIVPYESPRPTAGIHRFVFILFRQSVRQTTYAPGWRQNFNTRDFAELYNLGSPVAALFFNCQRENGCGGRRCVR

SEQ ID NO: 2357 - protein, 161 aa, Oryza sativa
  misc_feature (78)..(78): Xaa can be any naturally occurring amino acid
  unsure (1)..(161): unsure at all Xaa locations
MADNDAQHEHTFDSADAGASQTYPMQCSALRKNGFVVIKQRPGKIVEMTTSKTGKHGHAKVHLVAIDIFTGKKLEDLXPSTHNMDVPNVRRQEYQLLDLSDDGFLSLMTDDGATKDDVKIPDGEVGDKIKKLFVDDGKDTNVIVLTAMGEEAAIDAKEAPK

SEQ ID NO: 2358 - protein, 454 aa, Oryza sativa
MDSLGVLLVAPMNAYLEQELDRRCRLFRLWESPADRRDDYLRAHASSIRAVVPYALQGVDAAMIDALPSLEIVSSFSVGIDRVDLDACLRRGVRVTNTPDVLTDDVADLAVGLAIAALRKIPQADRYVRAGKWKSKGDFTLTTRFSGKRVGILGLGRIGLAVAKRAEAFDCPISYHSRSEKPFPKYKFYPNVVDLAANCDVLVVACSLNPETRHIVNRKVIDALGPEGVLINIARGAHVDEPELISALLEKRLGGAGLDVFEDEPFAPEQLFELDNVVLVPHFSGKRVGIIGLGRIGLAVAKRVEAFDCPVNYYQRTKQDHPGYTYYPSVVELAASSDVLVVACPLNEHTRHIVNREVMEALGPRGVLINIGRGPHVDEAAMVAALADGRLGGAGLDVFEDEPNVPEALLGMDNVVLVPHVGSATHETRTAMADLVLGNLEAHVAGKPLLTQVV

SEQ ID NO: 2359 - protein, 533 aa, Oryza sativa
MATCAADLAPLLGPVAANATDYLCNRFADTTSAVDATYLLFSAYLVFAMQLGFAMLCAGSVRAKNTMNIMLTNVLDAAAGALFYYLFGFASLRDCLRTPSNGFIGKQFFGLKHMPARPGSDYDFFLFQWAFAIAAAGITSGSIAERTQFVAYLIYSAFLTGFVYPVVSHWIWSADGWASASRTSGPLLFGSGVIDFAGSGVVHMVGGVAGLWGALIEGPRIGRFDHAGRSVALKGHSASLVVLGTFLLWFGWYGFNPGSFTTILKTYGPAGGINGQWSGVGRTAVTTTLAGSVAALTTLFGKRLQTGHWNVVDVCNGLLGGFAAITAGCGVVDPWAAIICGFVSAWVLIGLNLAARLKFDDPLEAAQLHGGCGAWGILFTALFARQKYVERSTAPAAYGLFMGRRKLLVGAVIQILVIFGWVSCTMGPLFYGLKKLGLLRISGRDETSGMDLTRHGGFAYVYHDEDEHDKSGVGGFMLRSAQTRVEPAAAGCLQQQQPSVTNPEASTSQRRKKSRVSLPLRSRSSRHKFDPHI

SEQ ID NO: 2360 - protein, 968 aa, Oryza sativa
MPCSPPSYLFIIVTGVLLVLVHSQTSLGNPLKMAGKNQITIICPQKITGAKSCYDQYFGKFLVVTDFVTRKQIKVDQRNNLGKQRLFSNGTYFHISVDEDFISIDCGLPSGFSYVDEKTNITYISDDQYIDTGENHNISSQLQGAEQFRSGLNLRSFPTGGRNCYTLYPAIKGQKYLIRGMFMHGNYDNKGQDLVSSPVTFDIRIGLNFWNRLNIINATMTYTSEAIVVAIVNSVSVCLVDNGEGTPFISSLEMRPMKSSNYPAATPNHPLLLQDRRSMGASRIIRYPDDPYDRVWWLPQITSGLIKISTRSLISRYTDDVYEVPVAVLKTAATTSSTSTALNFLWAAPTGWDATPGYLIGLHFTDFQQGQLREFDIYYNNDLWNYDNKKTKPPYLLANYINGTTPYTSDNYLYNISLVATNASVLPPMLNAIEIYYQVQQDEKMTYSEDVEAMMTVKIDYQVKKNWMGDPCLPEKYTWSGLKCRSQGVTSRIISLNLSNNDLTGSLPESLTNLPNIHVLDLSGNQLNGTFPEALCKNRALTLRYDTANGDPCSPRSSKKKHKAVLAVAVVVPVVIVVILISAMLMLLFWKKQAIVKSRGQEQYGDHIHIPENREFTYEELVKITNNFSVFIGEGGFGPVFHGQLKDGTQLAVKMRSPTSMSGKGMPEFLAEVESLTTVHHRYLVLLVGYCTDQDHLGLVYEYMPNGSLYDHLRGKNAIIQRLSWQHRAKIAHEAAQGLDYLHTGCVLPIVHRDVKSHNILLGCDLTAKISDFGLSKSYLNVAQSHITATAAGTLGYIDPEYCLSGRLTISSDVFSFGVVLLEIVTGEPPIIPTNGHIVQRIKEKVNMGNIEAIADPRLHGEFDISSIWKVVDIALLCTKEASSERPTMSMVVAQLKDALALEEARLSYSTSDISQGGANAELSINSMPTASLSNLEEYAKKSLLPAVALFALCLHGVSDKSGDIAST

SEQ ID NO: 2361 - protein, 330 aa, Oryza sativa
  misc_feature (218)..(218): Xaa can be any naturally occurring amino acid
  misc_feature (291)..(291): Xaa can be any naturally occurring amino acid
  misc_feature (316)..(316): Xaa can be any naturally occurring amino acid
  unsure (1)..(330): unsure at all Xaa locations
MGFLFARSSGYSFVALALLACVLLAPCQAAKAGLSIKFYAKTCPGVDTIVRSVVAQAVAKEPRMGASIIRLFFHDCFVNGCDASILLDDTLTFTGEKNAGANINSVRGYEVIDAIKSQVEAACKGVVSCADIVALASRDAVNLLGGPTWNVQLGRKDSRTASGTAANANLPGPASSGASLVAAFAGKGLSAREMTALSGAHTVGRARCLMFRGRIYGXEANINATFAAALRQTCPQSGGGDGNLAPFDDQTPDAFDNAYFKNLVAQRGLLHSDQELFNGGSQDALVRKYAXGTPRMFAGDFAKAMVKMGGLMPAAXGTPTEVRLNCRKVN

SEQ ID NO: 2362 - protein, 308 aa, Oryza sativa
MVVEEAVVAAGNEMSLSNMVLGFYEEAELQSSPPGDCAAAAGDDDDGSDDEGSGGAAKCRAFWKEQQSQLYEALAKMSSAESRIQADAEEAMRQMRAAAAGACSCASRGAAAAAAAAGGGGCRSCTLRFLAERLRDAGYNSAICRSKWPRSPEIPSREHSYVDVVAPTRSGKAVRVVVEPSFRGEFEMARGGAGYRALVASLPEAFVGRADRLRGVVRVMCAAAKQCARESGMHMAPWRKQRYMEAKWLATPERVAPPGNAGGAGDAVAVGSPSSPLSPGMTNRQMQPKFRASMLTLDFGGRTAVEVV

SEQ ID NO: 2363 - protein, 221 aa, Oryza sativa
MPSSRAGPRHVVLVMLFFAAAVAARGADAASPVTTRPCGAAAAASFLCSRCATTVYPAVCYDSLLPYAGAFQDSRVRLARAAADVAAARLRDFSASLDELVHGSGDVGAVTTPPRVAAAVRDCVGTVSSAAGLARRSSAALDRLDAGAAAGGGGSRLARWEVSNAKTWLSAAMANVATCADGFADADSWSAAGIEEVVAGEAANVSKYTSNALALVNGIPL

SEQ ID NO: 2364 - protein, 326 aa, Oryza sativa
MVSSAMAAVAVAFAVVVAATMSSAQLDPHFYDGLCPAALPTIKRIVEEAVAAEPRMGASLLRLHFHDCFVNGCDGSILLDDTPFFTGEKNAAPNMNSVRGFDVIDRIKDAVNAACRRNVVSCADIVAVAARDSIVALGGPSYHVPLGRRDARTASQAAANSSIPAPTLNLDGLVSSFAAQGLSVQDLVLLSGAHTLGFSRCTNFRDRLYNETATLDASLAASLGGTCPRTAGAGDDNLAPLDPTPARFDAAYYASLLRARGLLHSDQQLFAGGGLGATDGLVRFYAANPDAFRRDFAESMVRMASLSPLVGSQGEVRVNCRKVNYY

SEQ ID NO: 2365 - protein, 428 aa, Oryza sativa
MAMELDRSLIACEEPPSEPMDLLSSAWCSSAIQVLQTGSMDCSMALVENPVMAPENDRRDLLPKNDRSLVVDSSGFSTTQWKYDDLKSWIWLQKAIHPELDYDLKKKWLPRKMAPWSGISLKKWVKERKQKRKEEARLHKAEVHAAVSVAGVAAALAAIAAESSTPAATMKETAVVSAAALVAAQCAKVAEAAGATRDQVAAAVNAAVAATDASNVITLTAAAATSLRGAAALRGRRSSGGGGGGGSQNERMDHASSALSQDDLDFDFNYARSKAALAKGDEMFVAMPDGKWKLHTVSAATSKGGKVVMRIKKMNLVMAFSNAKESKKPNAQVDRATAIPVHLLTLRENDRAGVIHDVQPCAPEKPSRDEDATYPIEVTTSKGKVELRADDYGVYKRWVTALTHMLAAPTAICKAHELPPPPPPHRRN

SEQ ID NO: 2366 - protein, 269 aa, Oryza sativa
MVMEDGEMSLSNLVLGFFEEAEREQRWPENGDDDDEGSSGSGAAESKAFWQNQHSQLHEALAKTSQVESRIREDTEEAIRKMRAAGAVCSCARRAAAGDCRSCTLRHVDERLRDTGYNSAICKSKWTRSPDIPSGEHSYVDVVVQTRSGKAVRVVVELSFRAEFEVARASAEYRALVTALPEVFVGRADRLRAVVKAMCAAAKQCMKENNMHMGHWRKHKYMQSKWLGAPERVAAAAAAPVAVWSPEKQTKFRASMLSFDFARAAVEVA

SEQ ID NO: 2367 - protein, 362 aa, Oryza sativa
MCGGAILSDLIPPPRRVTAGDLWLEKTKKQQQQKKKNKGARRLPLRQEEEDDFEADFEEFEVDSGEWEVESDADEAKPLAAPRSGFAKGGLKNTTVAGADGPAARSAKRKRKNQFRGIRQRPWGKWAAEIRDPRKGVRVWLGTFNSPEEAARAYDAEARRIRGKKAKVNFPDGAPVASQRSHAEPSSMNMPAFSIEEKPAVMSAGNKTMYNTNAYAYPAVEYTLQEPFVQIQNVSFVPAMNAIEDTFVNLSSDQGSNSFGCSDFSQENDIKTPDITSMLAPTMTGVDDSAFLQNNASDAMVPPVMGNASIDLADLEPYMKFLIDGGSDESIDTLLSSDGSQDVASSMDLWSFDDMPVSAEFY

SEQ ID NO: 2368 - protein, 431 aa, Oryza sativa
MVPRDRVNAAAAGGGGEGRLVQSTANLIAAMGLTTRTTTNRKAIPYFILSGIVNKKCDKKAPKRIHKSEREKLKRDKQNDLFNELGNLLEPDRQNNGKACVLGETTRILKDLLSQVESLRKENSSLKNESHYGSNYHYLENKATLLLIHNPTFHAAKQVALERNELHDDNSMLRTEILELQNELRTRMEGNPVWSHVNTRPALRVPYPTTGVFPVQHLPHLPVTTTAAFPQQLPVIIEQHYAATPRELQLFPESATSEDSEPSQEHGISDHVTRPQPRYPTPTATLPVNLFPVFPGRQDQQCSSGTSGTNEEDRIDGKTFKKPRRPYEKERLDAELKLTIVFKNGMAKSIHHARVLIRQHHIRVGRQLVNIPSFIVRLESEKHIAFSLTSPLGGSPAVRVKRKNQKASGGGGDGEEEEEKELGHRNLSNMI

SEQ ID NO: 2369 - protein, 864 aa, Oryza sativa
MEEGDPQPSISLARTPSEGAAAAVDLDLLEQLLSADNAWLEVAANTSRSPNFFATPSNCLTDASVATTTPANSWWIQPSGASTSVRERFDQALAYIRETQSDADVLVQLWVPVKGNDGQLVLTTSGQPFTLDQRSNSLIQFREVSTKYQFSADVASGSSPGLPGRVFIDVRYFTSYEYPRINHAQYLDVHGTMGLPVFERGNYSCLGVIELIMTKQKLNFTSELNTICSALQAVNLTSTEVSSIPRAKLNSASYKDALPEILEVLRAACITHKLPLAQTWVTCAQQGKRGSRHSDENYKYCISTIDAACYVNEPRMQSFHEACSEHHLLRGQGVAGKAFTTNQPCFLPDIGSSTKLEYPLSHHAKIFNLKGAVAIRLRCTRTGIADFVLEFFLPTDCEVLEEQKAVLDSLSGTMRSVCQTLRVVTDKEMEDEAMREMNELNSFSPRGKNKVEELSFGDNTRGDREEASWTTLVGTSQKGSDLAELHTHGMLSHGGHGSSQAGDQTSKEGSKVKRRTKTEKTVSLQVLRQYFAGSLKDAAKSLGGQPSHAPYSQNVSIVITLFFRDSCYCMKVQVCPTTLKRICRQHGINRWPSRKIKKVDHSLRKLQQIIDSVHGAETAFQLNTLYKDLTNTSVSSDNNLSGSVTVPLANQNNLDFEMHQHHRLSSNIPSTSLSHSSCSQSSDSSPSCSGGATKHSPQVGADQVRSGCLPQHSPVQTLQTEAASINEHFSGQEAPIDLLQDVAEKANGEQHMSQSPSSPKQTANVGMRVKVTFGSEKVRFRLKPECDFQELKQEISKRLSIADMNSLIVKYLDDDSEWVLMTCDADLHECFHVYKLADIQTIKISVHLAASPTTRITIGHTGFS

SEQ ID NO: 2370 - protein, 250 aa, Oryza sativa
MSTDLTIPPSMEAPGADIQALIQRLRLHRPRPSPYAAAAAPSPDAAAPPAELLFRPRRAAVLICLFRGAAGELRVLLTKRSSKLSSHSGEVSLPGGKAEEGDADDAATALREAKEEIGLDPASVTVVASLEHFLSKHLLVVVPVVGILSDIQAFKPVLNVDEVDSIFDVPLEMFLKDEKRTSEEREWMGQEFTIHYFNYEKGSEKYVIWGLTAGILIHAASVVFQRPPDFPARTVQFNLPKYSKECSSMP

SEQ ID NO: 2371 - protein, 479 aa, Oryza sativa
MANSEYEYVKREFELDSLLPPSNWIVVRIDGCHFHRLNFSRVLSLFFLQSFVFREETEFYQRRESKILSLCVSYFTSVYVMKWKDFFPNKELKEPPYFDGRVVCYPNLKTIRDYLAWRQVDCHINNQYNTCFWSLVKSGKTEKEAQQALKGTFSKDKNELLSQQFQINYDDEPAIFRKGSCVYRDKVETMVKTDRCGNPIKRTRLVITNANVDIIGPEFWENHPYILREALRLMNASASLMMESFPDIVFGYGFSNEYSFVFQDKTELYQRQESLILSSCTSRFTLFYMMKWKDFFPNKDLVEPPHFEAELLCYPKQKILCDYLSSRQAECHTTNQYSTCFWMLVKSGKSENEAREILKGTLSKDKNELLFQQFHLNYNNEPAVFRKGSCTYRQKVEESADAEGRENTTRERVVYALSTLVEKWLASLHWPFISFISFMCKTCAPKMQFQLTELRIVMIYLYLAEWKIRLKQRRGTPVW

SEQ ID NO: 2372 - protein, 329 aa, Oryza sativa
VAAPPATGGKRPVLLLRRINDRLAAELRSRFRVLNFYESSAPLLAFLAAAAAGPDPPLAAVVVAGGAIQVNAAFLDAVPSLGCVVTTGAGVDHIDLAECARRGVAVAGAGTVFSTDVADHAVGLLVDVLRRISASDRYVRRGLWAARGDYPLGSKLSGKHVGIIGLGSIGSLIAKRLQAFGCTISYNSRRPKDSVSYNYFPDVTDLAAASDVLIVACALNDETRHIVDSSVLEALGKDGVVVNIARGGIVDEAELIRALKEGRIAGAGLDVFEKEPDVPAELLSMDNVVLTAHEAVFTTESNWDLADLMIANLEAFFSGGPLLTPVLPK

SEQ ID NO: 2373 - protein, 662 aa, Oryza sativa
  misc_feature (104)..(104): Xaa can be any naturally occurring amino acid
  unsure (1)..(662): unsure at all Xaa locations
NQAPVCLVNTGQGTPFVNRVELRPLEDALYPDHVKANQSMNTYRRYTMGTINIAYLYRYPSDPYDRYWWAEDSNPMWGYLNSKRDIQPESITEVPSAVLQKAVXQKSQPRQFNIYFNSYDKPYLYSPSYLAAGVVYSPSWYGESDGEFNVTLVATAKSVLLPMLNAYEIYTPIKHKTPMTFSKDVDAIMAIKVEYGVLNKNWMGDPCYPTQYAWEGVKCKNSSENIPRIISIDLSNSNLHGVISSNFTSLTALEYLNLSGNQLNGPIPDSLCKLNAGLLVFSYESNGDMCNKTTSLTRSKNRAAILAISVAAPMLVVIALFVGYLMWKAKRKPNTSAYNPPRVPEPMNAPVSEKYHWDHLEKNENRQFTYEELEKFTNNFQRLIGQGGFGCVYHGCLEDHTEVAVKIHSENSRHGFSEFLAEVQSLSKVHHKNLVSLVGYCSEKAHLALVYEYMSGGTLFDHLRDKTGVGESLNWASRVRILLEAAQGLDYLHTGCNRPIIHRDVKTSNILLGQNLQAKIADFGLSKVYVSDTQTHMSATAAGSMGYIDPEYYLTGRITESSDIYSFGVVLLEVVTGERPIIQGQGHIIQRIKMKVVAGDISSIADARLRGDYDVNSIWKVVEIAMLCTEPVAAQRPTMASVVAELKDSLHLKFTHLKFRDQ

SEQ ID NO: 2374 - protein, 186 aa, Oryza sativa
MAAACSSAAFLAYPGSLGAGPRPLRLFRAFAAASSSGSGSKKKARKSKGAGNKGEASGGGGGKGKEKALEPPPAVIRRAPAGSASVFQQPEPGFTPGGGGGGKGPTEEERRQRQANENAFLLAWLGLGLIILAEGLALAASGFLPEEWDSFFVKFLYPSFTPTVSKRMRRVETRLESKWFIFAMVI

SEQ ID NO: 2375 - protein, 925 aa, Oryza sativa
  misc_feature (335)..(335): Xaa can be any naturally occurring amino acid
  misc_feature (365)..(365): Xaa can be any naturally occurring amino acid
  unsure (1)..(925): unsure at all Xaa locations
MEEAAAAVHRRWRRRLLPKLMLLLCAVVHGQQPDSLGFISIDCGIPDGGGYSDESTRGLRYVPDAGFLDAGAGLSAGINPPYTDRDLAARYLTVRYFPGAASAAGERGGCYTLRQLSPGGRYLVRATFYYGNYDGAIAMLPVVFDLHLGANRWTAVNVTAADAIYIFEAVVSPPADFLQVCLVNIGKGTPFISGLDLRPLKPELYPEATANQSLLLLNHDRPPARFAFNRYQFWRPASYYKLFRYPFDPYDRLWQPYGDDPSWTNITVAAAVDVTNISRSDDPSPILRSAATPANATVRRLDFPWSSDDAATTTYLLLLYFAELQRLPAGAARRXFDVLVDGDASAGGGRRGYTPRYLAAEVVRXDAKAMMEIRDNYELKKNWMGDPCAPKAFAWVGLNCGYSSSDPALVTALNLSSSVLIGPVNLSFGDLKSLQYLDLSNNSLSGPIPDFLVQMPALKFLDLSSNKLSGSIPSDLLQKRENGSLVLRIGNNANLCYNGANNTCAPESKQSKRILVIAIAVPIVAATLLFVAAKFILHRRRNKQDTWITNNARLISPHERSNVFENRQFTYRELKLMTSNFKEEIGKGGFGTVFLGYLEDGTPVAVKMCSKTSSEGDKKFLAEAQHLTRVHHRNLVSLIGYCKDKKHLALVYEYMQGGNLEDRLRGEASIAAPLTWHQRLKIALDSAQGLEYLHKSCQPPLIHRDVKTRNILLSGDLDAKIADFGLTKVFAGDVVTHVTTQPAGTLGYLDPEYYHTSRLSEKSDVYSFGVVLLELVTGRPPAVPLGDGDGGGGESVHLAVWARQRLAEGDIESVADAAMGGCFEVNSAWKVAELALRCKERPSRERPAMADVVAELKECLELEASRALGRGHSCYSSGSGGGSSVATTTTTSGAANISAAASAASVSDAQIGELRQESVLELGPR

SEQ ID NO: 2376 - protein, 1092 aa, Oryza sativa
MLASRIPLKRCTAAAVVPLPGELEMEEGPTPPAGGGEGSGAAVVPAKRRRERVVPSRFRDSVVSLPLPPAKKGRPAKKAAAREGGDGEVYDVEVRAVEQQGATAAAFGAVETAVWPGDERPAQTEEELYRACRNIRRSSSSSGFSGSVVTSLSNAGGSVAPEGKPVVVVECKPKREGGDKKEDFYWPEDFVLGDVVWARSGKKCPAWPAVVIDPLLHAPAVVLNSCIPGALCVMFFGFSSGGHGRDYGWIKQGMIFPFVDYLDRFQGQALYKLKANRFRQAIEEAFLAERGFCELEMDEGCSLEKSVNDQSVPDGLQEGSGSNNDQECQSEAQVVGKSTGCCDSCGNRVPPKIAKKKKQAGEQLLCRHCDKLLQSKQYCGICKKIWHHTDGGNWVCCDECQIWVHVECDLTCINMEDLENADYFCPDCKSKRKTVPPVEQMNTPNSSECASTSKEKLPEMIPVFCFGMDGMYLPKKHMILCQCNSCKERLMSLSEWERHTGSRKKNWKMSVKLKSNGDPLVTLLDDIPCANVKSSTPSINKEELLKLLGTLALEFMLVSAVANSFRPVNARWTTERCAVCRWVEDWDYNKIIICNRCQIAVHQECYGARDVQDFTNWVCRACELPKQKRECCLCPVKGGALKPTDIDQLWVHVTCAWFQPKVSFPVDETMEPAMGILSIPSEYFKKACVICKQMHGACTQCYKCSTYYHAMCASRAGYRMELQYSEKNGRNITRMVSYCAFHSTPDPDNVLIVKTPEGVFSTKFLPQNNEKQSGTRLVRKENLQEKVLPAKISDCPAARCLPYEMLKNKKEPGEAIAHRIMGPRHHSQESIEGLNACMKIENKRVSCGRSGIHGWGLFAAKKIQEGQMVIEYRGDQVRRSVADLREARYHREKKDCYLFKISEDVVVDATEKGNIARLINHSCMPNCYARIMSVGDEKSQIILIAKRDVSAGEELTYDYLFDPDESEDCRFFSAVQFQFQIGREWRCCSHPRVETDLKTLARRFWKVAAPYWWSEDKVQARLRLAAVFALTLATTGISVGFNFLGRDFYNALAVFSLARQGPGTIYQATAVLLGRFCCKNTDCLYKNYITYH

SEQ ID NO: 2377 - protein, 991 aa, Oryza sativa
MLASRIPLKRCTAAAVVPLPGELEMEEGPTPPAGGGEGSGAAVVPAKRRRERVVPSRFRDSVVSLPLPPAKKGRPAKKAAAREGGDGEVNDVEVRAVEQQGATAAAFGAVETAVWPGDERPAQTEEELYRACRNIRRSSSSSGFSGSVVTSLSNAGGSVAPEGKPVVVVECKPKREGGDKKEDFYWPEDFVLGDVVWARSGKKCPAWPAVVIDPLLHAPAVVLNSCIPGALCVMFFGFSSGGHGRDYGWIKQGMIFPFVDYLDRFQGQALYKLKANRFRQAIEEAFLAERGFCELEMDEGCSLEKSVNDQSVPDGLQEGSGSNNDQECQSEAQVVGKSTGCCDSCGNRVPPKIAKKKKQAGEQLLCRHCDKLLQSKQYCGICKKIWHHTDGGNWVCCDECQIWVHVECDLTCINMEDLENADYFCPDCKSKRQTVPPVEQMNTPNSSECASTSKEKLPEMIPVFCFGMDGMYLPKKHMILCQCNSCKERLMSLSEWERHTGSRKKNWKMSVKLKSNGDPLVTLLDDIPCANVKSSTPSINKEELLKLLANSFRPVNARWTTERCAVCRWVEDWDYNKIIICNRCQIAVHQECYGARDVQDFTNWVCRACELPKQKRECCLCPVKGGALKPTDIDQLWVHVTCAWFQPKVSFPVDETMEPAMGILSIPSEYFKKACVICKQMHGACTQCYKCSTYYHAMCASRAGYRMELQYSEKNGRNITRMVSYCAFHSTPDPDNVLIVKTPEGVFSTKFLPQNNEKQSGTRLVRKENLQEKVLPAKISDCPAARCLPYEMLKNKKEPGEAIAHRIMGPRHHSQESIEGLNACMDQKDEKSFATFRERLRYLQKIENKRVSCGRSGIHGWGLFAAKKIQEGQMVIEYRGDQVRRSVADLREARYHREKKDCYLFKISEDVVVDATEKGNIARLINHSCMPNCYARIMSVGDEKSQIILIAKRDVSAGEELTYDYLFDPDESEDCRVPCLCKALNCRGYMN

SEQ ID NO: 2378 - protein, 175 aa, Oryza sativa
MELSVVGGEPLRAVAMQQLLDLDLPDELERQLNPPTRAYVRDRRAMANTPMDVKELRASGALVLAVDMPGVAPADVRVEVEDGNVLAISGERRRPAGDGDDGGEGVKYLRMERRMGKFMRRFPLPESADLDGVRAEYKDGVLTVTVDKKPPPEPKKPRVVEVKVAGAGEPKGKGK

SEQ ID NO: 2379 - protein, 888 aa, Oryza sativa
MAVGLPIVFGCHDYSGFTNIDCGFVDGESYTDSTTNLTYVPDHEFVEGGTHHEVVPKLISGSTDEQEKTLRSFPDGQRNCYTIPSTSGKKYLIRTTFTYGNYDGLRSSENGSLFLFGLHIGVNFWTTVNLTKQDSSDTIWKEVLTVAPDEFIYVCLVNFGSGTPFISALELRQLDDPMYPFLNLFVSVSYFTRMRFGAVDDFITRYPTDLFDRFWEAAQCYSYPWLNLTTNQTVNKLPGNDNFQVPTLIVQKASTINSGFSWLNISITAGDNLNGQSLELLPIFHFAEIEKNRPNRTFQIYSDGNELHQAFSPSYLQVDSVYLRDRYLHESGTTFTLCKTNSSELPPLINAFEAYSLVRMENLTTDTIDVSSMKQVKTQYNVQRRSWNGDPCSPKEYTWEGVKCNYYDGKQNPRIILVNLSASRLSGWINPSFRNMSLEILDLSHNNLSGTIPYNQVNSLKSLNLSYNQLIGSVPDYLFKRYKAGLLELRLEGNPMCSNISESYCAMQADKAKKNTATLLIAVIVPVVAITLMLFLWMLCCKGKPKEHDDYDMYEEENPLHSDTRRFTYTELRTITNNFQSIIGNGGFGTVYHGILGNGEEVAVKVLRETSRALSKDFLPEVQTLSKVHHKNLVTFLGYCLNKKCLALVYDFMSRGNLQEVLRGGLEYLHESCTPAIVHRDVKTANILLDENLVAMISDFGLSRSYTPAHTHISTIAAGTVGYLDPEYHATFQLTVKADVYSFGIVLLEIITGQPSVLVDPEPVHLPNWVRQKIARGSIHDAVDSRLMHQYDATSVQSVIDLAMNCVGNVSIDRPSMTEIVIKLKECLLAGTGKKQLVSGSYKQKDAMDAGIARQFQLLISGVPIDGDGCACATHREEMINHCNGKMK

SEQ ID NO: 2380 - protein, 455 aa, Oryza sativa
FQLRFSSFTVQLRFSQVQRHNRQFHRICSRNIALLAFTHLTVRSSLIDPDGGALVDLVAAPGRAALRGEAEALPRVRLAPVDVEWAHVLAEGWASPLRGFMREHEYLQSLHFNCIRLPDGAGVVNMSLPIVLAIGDREKEEIGSSPDVALHGPDGAVLAILRRVEIYPHNKEERIARTWGTTAPGLPYVDEAIAQAGNWLIGGDLEVIEPIKYNDGLDHYRLSPQQLRNEFDKRGADAVFAFQLRNPVHNGHALLMNDTRRRLLEMGFKNPILLLHPLGGFTKADDVPLPVRMEQHSKVLEDGVLDPETTIVSIFPSPMHYAGPTEVQWHAKARINAGANFYIVGRDPAGMGHPTEKRDLYNPDHGKKVLSMAPGLEKLNILPFKVAAYDTVAKKMAFFDPSRSKDFLFISGTKMRAFAKSGENPPDGFMCPGGWKVLVDYYNSLQTEEAAVATV

SEQ ID NO: 2381 - protein, 399 aa, Oryza sativa
MAKPISIEVWNPSGKYRVVSTKSMPGTRWIRLLADNDCRLELTEEWGEVLFSALKRAGGTAFSNMAVGYNNVDVEAANRNGIAVGNTPVSSAALCFLISRLSYWMGVLTETTAELAASLSLAAARRIVEADQFMRAGLYDGWLPHLFVGNLLKGQTVGVIGAGRIGSAYARMMIEGFKMNLIYYDLYQSTRLEKFVTAYGQFLKANGEQPVTWKRAATMEDVLREADVISLHPVLDKTTYHLINPERLAIMKKEAVLVNASRGPVIDEVALVEHLKANPMFRVGLDVFEDEPYMKPGLADMKNAVVVPHIASASKWTREGMATLAALNVLGKIKGYPVWGNPNLVEPFLKEDATPPAACPSIVNAKQLGRPAIVKALRTGARSIILYLSVQDHTPLHEV

SEQ ID NO: 2382 - protein, 329 aa, Oryza sativa
MGDSGGSVVSVDVERISFGGKEHHIQTNHGSVSVAVYGDHDKPALVTYPDIALNHMSCFQGLLFCPEASSLLLHNFCIYHISPPGHELGAAPVSPSSPVASVDELADQVSDVLDFFGLGPVMCLGVTAGAYILTLFATKYRERVLGLILVSPLCRTPSWTEWFHNKVMSNLLYYYGMCNMVKDCLLQRYFSKFLDQRQSMNVWRFIHTINERHDLTESLKELQCRTLIFVGQNSQFHAEAVHMTSKLDERYSALVEVQGCGSVVTEEQPHAMLMPLEYFLMGYGLYRPSQISCSPRSPLNPFCISPELLSPESMGVKLKPIKTRANLEV

SEQ ID NO: 2383 - protein, 327 aa, Oryza sativa
MGWSSSRAMLVARAVALAVVFLAAEAQLSPGYYNATCPGVVSIVRRGMAQAVQKESRMGASILRLFFHDCFVNGCDASILLDDTANFTGEKNAGPNANSVRGYEVIDAIKAQLEASCKATVSCADIITLAARDAVNLLGGPNWTVPLGRRDARTTSQSAANTNLPPPGASLASLLSMFSAKGLDARDLTALSGAHTVGWARCSTFRTHIYNDTGVNATFASQLRTKSCPTTGGDGNLAPLELQAPNTFDNAYFTDLLSRRVLLRSDQELFGSGAGNGTTDAFVRAYAANATTFAADFAAAMVRLGNLSPLTGKNGEVRINCRRVNSS

SEQ ID NO: 2384 - protein, 411 aa, Oryza sativa
MSLAADLAAVERGGHMVPSKAAGVDGDGEPRRTGTMWTASAHIITAVIGSGVLSLAWGVAQLGWVAGPAVMLLFGAVIYCCSVLLVECYRTGDPYTGQRNRTYMDAVRANLGGTKVVFSQIPNLHKMWWLSTLASAMSLSYSAIGIALGVAQIVVLDMFEIEFAANGGIRGTITGVFVGAGAGVTSMQKDTVKPVAPPSTETKVMRKAVAVSVATTTAVYLMCGCVGYAAFGNDSPDNLLTGFGFFEPFWLLDLANAGVVVHLVGTYQVVAQPVFAFLDGRAAAGAWPGSAALGKRRRVLRVGSLAEIEVSPFRLAWRTAFVCVTTAASTLLPFFGSMVGLIGAASFWPLTVYFPVEMYIAQRRVPRGSAQWLSLQALSAGCLVVSVAASAGSIAGVVEAFKAHNPFCWTC

SEQ ID NO: 2385 - protein, 955 aa, Oryza sativa
MKIPFVTKWSHRSHEPAAPSNPAAQQQPPPPSPAGVSSAAAAAVVEEAEMETGGDDFITQEEEYQIQLAMALSASASVSAPSGGGGSGDTEGEQIRKAKLMSLGRGDLSAAADRGVGDSAEALSRRYRDYNFLDYNEKVIDGFYDIFGLSGESARQGKMPSLAELQTSIGDLGFEVIVVDHKFDSALQEMMEVAQCCMLGCPDTTVLVRRIAEVVAGHMGGPVIDATEMFTKWLGKSIEQRTSHQTSLLPIGRIDIGLSRHRALLFKILADSVGIPCKLVKGSHYTGVEDDAINIVKMNNEREFLVDVMAAPGTLIPADVFISKGTPFNLTKPLVQNQVVELASNIENDPSAAHSEHVGNRLHMFGNGNSLSENQSGCEKTMIAGSEVSQLWTLAPQMQSDQQSTSAGAHSMQKEDLKLTPDSQENEESKKQISETDSFRGIELGKSSLAFKGLNNRNNEYQRHRENIAPAPGRSQQPLVMKNWSACNDISNKQYNIAERLVRRRNTSDNAASSSQLAWSTAKHYNPNGRERNDRLCAAPGRNYDNRKVGASTTATASATGERLDRPNLAPVHYYDDKPNEKGPHDLEKVPIYSRFDSQIYSSMQGYSPEVKENKENYDRHDNMRLHPDPRRSPLDRFMDTSRQNSESVSPPQAGSSTVDMVLGEVSECEILWEDLLIGERIGLGSYGEVYHADWNGTEVAVKKFLDQEFYGDALAEFRCEVRIMRRLRHPNIVLFMGAVTRPPHLSIVSEYLPRGSLYTIIHRPDCQIDEKCRIKMALDVARGMNCLHTSVPTIVHRDLKSPNLLVDNNWTVKVCDFGLSRLKHGTFLSSKSTAGTPEWMAPEVLRNEQSNEKCDVYSFGVILWELATLQMPWSGMNPMQVVGAVGFQDRRLDIPMEVDPLVASIIQDCWQKDPNLRPSFSQLTSYLNTLQRLVIPCHQETAGSYVPQEISLYR

SEQ ID NO: 2386 - protein, 408 aa, Oryza sativa
MGALCDFCGEQRSMVYCRSDAASLCLSCDRNVHSANALSRRHTRTLLCDRCASQPAMVRCLVENASLCQNCDWNGHSAGSSAAGHKRQTINCYSGCPSSSELSKIWTFVSDIPNVAPEPNCEQGISMMSISDSGVSNQDNAAGDSSLLDIASATLMSDLGTAGKPKSLIGSSSEAGVNLLPLATDQMAGSVDSTSAKVPYTADQDMFSKDSIYEDFCVDDVDLSFENYEELFGTSHIQTEQLFDDAGIDSYFESKEIPSGNSDEQPKLMQPVTSNAVSADSGMSIPGAKGDSSLCIPVRQARSSISLSFSGLTGESSAGDYQDCGVSPVLLMGEPPWHPPGPEGSFAGATRDDAITRYKEKKKRRKFDKKIRYASRKARADVRKRVKGRFVKAGEAYDYDPLCETRSY

SEQ ID NO: 2387 - protein, 395 aa, Oryza sativa
MEPNYSDYHPNSVPFDAYYEHGHGHLDDHGHGHHHLIPAHPEPSYSYGNWSFLHADATATSSSESSSASASSGAAHIVGASGPSASFVRQLHFGGEYYDDDAADISALMEAASISCWTTNGGAGASTSQTTGLEGVEVMRRAAAPAPDNGSSDKEEAARPLIGVRKRPWGKYAAEIRDSTRNGARVWLGTFNTPEQAALAYDQAALSVRGPGAVLNYPLHRVRESLRTLELGAAAAASESPVLTLKRRHRIRKRSTTKKALAGKEADEAPATTSSEGKKKRQVNTTSHSHDGAWRRHLLSSGRLSMEGSTAAGGHGGLAGGRGEAAGSNVRAADDDEDGEAAAGSSVHVANDDDDGSEAAAVSSMHAADNDDEAVAGSGVRMTTTTAARRRSGAG

SEQ ID NO: 2388 - protein, 468 aa, Oryza sativa
MVQIEPLEVSLEAGNQADSALLDDDGRPRRTGTFWTASAHIITAVIGSGVLSLPWATAQLGWVGGPAVMVVFGGVTYFTATLQAECYRTGDEETGARNYTYIGAVRAILGGANAKLCGIIQYANLVGTAVGYTIAASISMQAIKRAGCFHANGHNVPCHISSTPYMLIFGAFEIVFSQIPDFHEIWWLSIVAAVMSFTYSGVGLGLGIAQTVADGGFRGTIAGVTNVTATQKAWRSLQALGNIAFAFAFSNVYTEIQDTIKAPPPSEAKVMKQASLLSIVATSVFYALCGWMGYAAFGNAAPDNLLTGFGFFEPFWLVDAANVAIAVHLIGAYQVYCQPVFAFVERKASRRWPDSGFVNSELRVWPFAISAFRLAWRSVFVCFTTVVAMALPFFGVIVGLLGAISFWPLTVYLPTEMYIAQRGVRRGSALWIGLRALAVAGFVVSAAATTGAVANFVGDFMKFRPFSG

SEQ ID NO: 2389 - protein, 393 aa, Oryza sativa
MAGVVITGRALVAAVAVVVAVLLGGAAEAQQLSPNFYSRTCPNLATIVRSGMASAVRTEPRMGASILRLFFHDCFVNGCDGSILLDDTSTFTGEKSAGPNANSARGFEVIDAIKTQVEASCKATVSCADILALAARDGVNLLGGPTWSVALGRKDSRTASQSAANSNLPGPGSSLATLISMFGNQGLSARDMTALSGAHTIGRAQCQFFRSRIYTERNINASFASLRQQTCPRSGGDANLAPFDVQTPDAFDNAYYQNLVSQRGLLHSDQELFNGGSQDGLVRQYSTNPSQFSSDFVSAMVKMGNLLPSSGTATEVRLNCRKVIISDDHRLRRRPGNQCAGEISKHKKRRNVKYLFDNKRTKKFLVHLPQLDFVDVANLQFAKCRIEMVAHAR

SEQ ID NO: 2390 - protein, 350 aa, Oryza sativa
  misc_feature (248)..(248): Xaa can be any naturally occurring amino acid
  misc_feature (263)..(263): Xaa can be any naturally occurring amino acid
  unsure (1)..(350): unsure at all Xaa locations
MDPGRVVFDSGVARRACPGGAQMLLFGGGGSANSGGFFRGVPAAVLGMDESRSSSSAAGAGAKRPFFTTHEELLEEEYYDEQAPEKKRRLTAEQVQMLERSFEEENKLEPERKTELARRLGMAPRQVAVWFQNRRARWKTKQLEHDFDRLKAAYDALAADHHALLSDNDRLRAQVISLTEKLQDKETSPSSATITTAAQEVDQPDEHTEAASTTGFATVDGALAAPPPGHQQPPHKDDLVSSGGTNDXGDGGGAAVVVFDVPXGANDRLSCESAYFADAAEAYERDCAGHYALSSEEEDGGAVSDEGCSFDLPDAAAAAAAMFGAAGVVHHDAADDEEAQLGSWTAWFWS

SEQ ID NO: 2391 - protein, 627 aa, Oryza sativa
MASSASLQRFLPPYPHAAASRCRPPGVRARPVQSSTVSAPSSSTPAADEAVSAERLEPRVEQREGRYWVLKEKYRTGLNPQEKVKLGKEPMSLFMEGGIKELAKMPMEEIEADKLSKEDIDVRLKWLGLFHRRKHQYGRFMMRLKLPNGVTTSEQTRYLASVIEAYGKEGCADVTTRQNWQIRGVTLPDVPAILDGLNAVGLTSLQSGMDNVRNPVGNPLAGIDPDEIVDTRSYTNLLSSYITSNFQGNPTITNLPRKWNVCVIGSHDLYEHPHINDLAYMPAVKGGKFGFNLLVGGFISPKRWEEALPLDAWVPGDDIIPVCKAVLEAYRDLGTRGNRQKTRMMWLIDELVNHFFLHSSTPLTELRMSQCSYQLIAVLALQGMEAFRSEVEKRMPNGVLERAAPEDLIDKKWQRRDYLGVHPQKQEGMSYVGLHVPVGRVQAADMFELARLADEYGSGELRLTVEQNIVIPNVKNEKVEALLSEPLLQKFSPQPSLLLKGLVACTGNQFCGQAIIETKQRALLVTSQVEKLVSVPRAVRMHWTGCPNSCGQVQVADIGFMGCLTKDSAGKIVEAADIFVGGRVGSDSHLAGAYKKSVPCDELAPIVADILVERFGAVRREREEDEE

SEQ ID NO: 2392 - protein, 180 aa, Oryza sativa
  misc_feature (81)..(81): Xaa can be any naturally occurring amino acid
  misc_feature (90)..(90): Xaa can be any naturally occurring amino acid
  misc_feature (128)..(128): Xaa can be any naturally occurring amino acid
  misc_feature (137)..(137): Xaa can be any naturally occurring amino acid
  misc_feature (156)..(156): Xaa can be any naturally occurring amino acid
  unsure (1)..(180): unsure at all Xaa locations
MSRGRDPLALSQVIGDVLDPFIKSAAMRINYGEKEITNGTGVRSSAVFTAPHVEIEGRDQTKLYTLVMVDPDAPSPSKPEXREYLHWLVXHDIPEAIDARFGHEIVPYEAPRPPAGIHRLVFVLFQHXARQTVYAPXGWRPNFNVRDFSAFYHLGXPVAALYFNCQKESGVGGRRFQGPS

SEQ ID NO: 2393 - protein, 210 aa, Oryza sativa
  misc_feature (18)..(18): Xaa can be any naturally occurring amino acid
  misc_feature (128)..(128): Xaa can be any naturally occurring amino acid
  misc_feature (167)..(167): Xaa can be any naturally occurring amino acid
  misc_feature (197)..(197): Xaa can be any naturally occurring amino acid
  misc_feature (199)..(199): Xaa can be any naturally occurring amino acid
  misc_feature (204)..(204): Xaa can be any naturally occurring amino acid
  unsure (1)..(210): unsure at all Xaa locations
SIESLRSFLIDVNQRQLXIRVIGCGHSPSSLAMSNEVLVSMKYFNKILEIDATNKEIHCESGVLLSTLNETLPQHNLSLPVQGSVSNLTIGGVVSTATHGSGIKFGSISSYVRSMTLMKLTGEIEEYXIDDADEDLFRCLTCSLGTFGIILSIRLEVSSLFYLELNXNPMEFHTFLNTLPIHYTSSDHFRYMWYPHXNXGIAYXLTRIPR

SEQ ID NO: 2394 - protein, 602 aa, Oryza sativa
MELALVGNPSNGVAKPSCNSVGSLPVVSSNAVIHPPVTSAARATLGRHLARRLVQIGATDVFAVPGDFNLTLLDYLIAEPGLKLIACCNELNAGYAADGYARALVGAFVTFTVGGLSVLNAIAGAYSENLPVICIVGGPNSNDYGTNRILHHTIGLPDFSQELRCFQTITCYQAVINNLDDAHEQIDTAIATALRESKPVYISVGCNLAGLSHPTFSREPVPLFISPRLSNKANLEYAVEAAADFLNKAVKPVMVGGPKIRVAKAKKAFAIAESSGYPFAVMPSAKGLVPEHHPRFIGTYWGAVSTTFCAEIVESADAYLFAGPIFNDYSSVGYSLLLKREKAVIVQPDRVVVGNGPAFGCILMTEFLDALAKRLDRNTTAYDNYRRIFIPDREPPNGQPDEPLRVNILFKHIKEMLSGDTAVIAETGDSWFNCQKLRLPEGCGYEFQMQYGSIGWSVGATLGYAQAAKDKRVISCIGDGSFQMTAQDVSTMLRCGQKSIIFLINNGGYTIEVEIHDGPYNVIKNWDYTGLIDAIHNSDGNCWTKKVRTEEELIEAIATATGAKKDCLCFIEIIVHKDDTSKELLEWGSRVSAANSRPPNPQ

SEQ ID NO: 2395 - protein, 329 aa, Oryza sativa
MREASGMSGGEDVRKVSRQDIQLVQNLIERCLQLYMNQKEVVETLSFQAKIEPSFTELVWQKLEEENREFFKAYYVRLMLKNQIMVFNKLLEDQYRLMCKEQPSGVPSMPPTTNGSNMGTLNQNACFLPDTTPSTAMPDSLLPNGSSSGIVNGTPSSDQFIYAGKVIHGLPSSMDASSSLLAAHNSTAGRFNGDNGTTIKTEASYSGNSDFGFCNESAFLEPCQSIGDASGGSFSSSELNGQPLGDPIMDMDSSSFGFLSQIPRNFSFSDLTEDFSQSAEILENYGRSPFIPSEPNNFSESTPGDHAEIGNRRLDTISEGVSYEDFGSD

SEQ ID NO: 2396 - protein, 451 aa, Oryza sativa
MAICSTDNELVELLWHNGGVVAQPQAAQARVVSSSGRGQSASVLTGDDTETAAWFPDTLDDALEKDLYTQLWRSVTGDAFPAAAAAGPSSHHAPPPDLPPPAARPPMRSGIGSSWTGDICSAFCGSNHIPETAAQRCRDAGAALPPERPRRSSTHDGAGTSSSGGSGSNFGASGLPSESASAHKRKGREDSDSRSEDAECEATEETKSSSRRYGSKRRTRAAEVHNLSERRRRDRINEKMRALQELIPHCNKTDKASILDEAIEYLKSLQMQVQIMWMTTGMAPMMFPGAHQFMPPMAVGMNSACMPAAQGLSHMSRLPYMNHSMPNHIPLNSSPAMNPMNVANQMQNIQLREASNPFLHPDGWQTVPPQDKEFNVGFAQRVVFLEIAENIDMMNRLHPYCCYQQQEQQLGEPEDYVWEPYHHCKLPSSQQKPEGGDLEFMSKLVASIISC

SEQ ID NO: 2397 - protein, 613 aa, Oryza sativa
  misc_feature (261)..(261): Xaa can be any naturally occurring amino acid
  misc_feature (270)..(270): Xaa can be any naturally occurring amino acid
  misc_feature (472)..(472): Xaa can be any naturally occurring amino acid
  unsure (1)..(613): unsure at all Xaa locations
MDKGALVVQVMDDSSNGGVGAAAAGGSFSSLRAYGRALAQTPRRLARRACAATSPGEEMSRVRARSGARMARRLRWHDLVGLGLGGMVGAGVFVTTGRATRLYAGPGVVVSYAIAGLCALLSAFCYTEFAVDMPVAGGAFSYLRVTFGELAAFLTGANLIMEYVFSNAAVARSFTAYLGTAVGVDAPSKWRIAVPGLPKGFNEVDLVAVGVILLISVCICYSTKESSVVNMVLTAVHVAFILFIIVMGFWRGDTRNLTRPXVDLTHNPGXGFFPHGAAGVFNGAAMVYLSYIGYDAVSTMAEEVERPSRDIPVGVSGSVVLVTLLYCLMAASMSMLLPYDAIDTEAPFSGAFKGSSGWGWVSNVIGAGASLGILTSLMVAMLGQARYLCVIGRSGVMPAWLAKVHPCTATPVNASAFPGVFTAALALFTELDVLLNLVSIGTLFVFYMVANAVVYRRYVAADDDDADHRRAXWPTLVFLAAFSLVALCFTLLWQFAPAGRARTGLLAACGAAAVATVGAFRALVAEARRPELWGVPAMPWVPAASAFLNVFLLGSLDRPSYVRFGFLTAAAVLVYVLYSVHASYDAEEGGGAGAGAAALDGAKVQDEAADFKV

SEQ ID NO: 2398 - protein, 955 aa, Oryza sativa
MLGALLRLLSACGGVWPTSPAPPARSSSSSSAAAAADQAAAEGRDGLLWWRDLARCHAGELSVAVVQGNHVLEDQCRVESGPPPLAATCIGVFDGHAGPDAARFACDHLLPNLRGEHRPPSPFLPAAAPPETRDLGLIRAEAASGPEGVTADAIRDAFLATEEGFLAVVSRMWEAQPDMATVGTCCLVGVVHQRTLFVANLGDSRAVLGKKVGRAGQITAEQLSSEHNANEEDVRQELMAQHPDDPQIVALKHGVWRVKGIIQVSRSLGDAYLKHSQYNTEQIKPKFRLPEPFSRPILSANPSIIARCLQPSDCFIIFASDGLWEHLSNQQAVEIVHNHQRAGSARRLIKAALHEAARKREMRYSDLMKIDKKFSPQTNRINVHIPEAGTLPRVEGALLRIIIVKYTVGITTCEGSMDSAAASADGGAFLEFVDYAISMLSSSSSGGNGDESPGAGPAPARPPWGWAVAQVLKSCCAYSSGVTAAILLSDLFQSWTEQSKSLTAKRKVELTNLLKTRNRRRRLPNTITIDSIHEKNFLSPKSVLEAVVIDVFVIPGTNIYMLTLGDMWSTSTIDLYLHRRYYNYIGQHDVLKKGREVMLTGCCLRTAMEGSGHARILPTEYMVMLLDEEEDEDAMLLAAQFCMYSFSSMMLDENRNNISYSFYARIEKIESLEPFGSTERKQIVLVDNDDAKIKFVLWGEQVLLANLFSVGSMLALHRPFIANYVHNNHEESQELCLEYGSATQVYLVPIAQQEEQVLLTPTQIRSQGSRLSCVPSDHMASQVTLPRDLHGSVDFSKYPFRVYVSDLHDKMVGVSLFGMVTSVCKASTSGTYFYLEIEDATGVVLMKLNFIGLWSLGRVGVGHMVYMSGLTCTLSSTNKLEVAWTEKEPGSLFVNISLLPALLNSTCLHNLSLLSDLPHSTNRTHICHVRLDHIDVNSLKMTVKRFLPGALGKQP

SEQ ID NO: 2399 - protein, 396 aa, Oryza sativa
MPLSYSAAAAAAPSPLAARSRGLLRRPPRSSPVVVRCKKIDQLRAVNGIPPYAPVSNRSLLSPVTLPIIRDANIKNDTRLRIFSGTANPSLSQEIASYLGLELGKINIKRFADGEIYVQLQESVRGCDVFLVQPTCPPANENLMELLIMIDACRRASAKNITAVIPYFGYARADRKSQGRESIAAKLVANMITEAGANRVLVCDLHSSQAMGYFDIPVDHVYGQPVILDYLASKTICSDDLVVVSPDVGGVARARAFAKKLSDAPLAIVDKRRHGHNVAEVMNLIGDVRGKVAVMMDDMIDTAGTIAKGAELLHQEGAREVYACCTHAVFSPPAIERLSSGLFQEVIITNTIPLKEDKSFPQLTILSVANLLGETIWRVHDDCSVGHEPYSSLDID

SEQ ID NO: 2400 - protein, 330 aa, Oryza sativa
MPLSYSAAAAAAPSPLAARSRGLLRRPPRSSPVVVQWYDDQYAVIDRVVDVAMRCKKIDQLRAVNGIPPYAPVSNRSLLSPVTLPIIRDANIKNDTRLRIFSGTANPSLSQEIASYLGLELGKINIKRRASAKNITAVIPYFGYARADRKSQGRESIAAKLVANMITEAGANRVLVCDLHSSQAMGYFDIPVDHVYGQVMNLIGDVRGKVAVMMDDMIDTADISLPNINILMKPIKLGTIAKGAELLHQEGAREVYACCTHAVFSPPAIERLSSGLFQEVIITNTIPLKEDKSFPQLTILSVANLLGETIWRVHDDCSVGHEPYSSLDID

SEQ ID NO: 2401 - protein, 326 aa, Oryza sativa
MSSPPVLLLCRLFPGTFTDVAHRFRLLDFYASALPIHAFLAAVAAHADPPRVVLVFGGGPIPVGAELLDAVPSLRCIITVSAGTNHIDLRECARRGVQVANAGGIYSTDVADYAVGLLLDVLRHVSAGDRFVRRGLCPEQRGGDFLPLGSKIGGRRVGIIGLGSIGSAIARRLEAFGCVVSYHNRRRREDVAYAYFPTATDLAASSDVLVVACALTAETRRIVDRGVLDALGERGVVVNVARGANVDEAELVRALAEGRVAGAGLEVFDDEPNVPPELWAMDNVVLTPHQAIFTPESMADLSRVVLANLDAFFAGEPLLTRVEASE

SEQ ID NO: 2402 - protein, 852 aa, Oryza sativa
MPFFIPPSVCALGFLSIDCGLEGDDSYPDDQTGITYVPDGPYVDSGENHRVTTVYRNYWGQDYRTLKTLRSFPSASGKRNCYSLPTNVGDKYLVRLEFLYGNYDSMDSSLLKFNLSLGVNHWNTVNLDTTDDQDGYNFYEAVFVAWASWAPVCLINIGQGIPFVSTVELRLLGTLPYPAIIGNQSLSLYVRRSIGSSADDDMRYPDDQYDRYWIMGETTGAADMSNISTPTIIPPSVPFAVPSPILQKAVVPADNSMKLVFHSDQLDAQLRDHLVILHFADFQNNKSREFTVSIDSGVQSGPFSPPYLKVLSITTDWSSDTEGKYNFTLTATSTSSLPPILNAYEVYGRIIHDNPMTFSQDFDAIMAIKYEYGIRKNWMGDPCFPPEFAWDGVECSSDGKTMRIISLDLSNSELHGLISNNFTLLTALKYLNLSCNQLNGAIPDSLRRKNGSMVLSYESGGDMCKKPVSPSSRNRAAALAVSVVVPMLAVAILGLAYLFWRAKRKHNNDPPTVLELTGAPGHKTNHWDRLQKPENRRFTFEELQKFTDNFKRLIGHGGFGHVYYGSLEDSTEVAVKMRSESSLHGLDEFLAEVQSLTTVHHRNLVSLFGYCWDDDHLALVYEYMSSGNLCDYLRGKTSMTETFNWATRVKIALEAAQGLDYLHKGCNLPIIHGDVKTNNILLGRNLKAKIADFGLSKTYHSDSQTHISASIAAGSMGYIDPEYYTTGRLTESSDVYSFGVVLLEVTTGEPPIIPGNGHVVQRVKQKIVTGNISSIVDTRLGGSYNVSSMWKVLDAAMMCTTNIAAERPTMATVVMQLKESLELEEAHGERGDMENQARDNTYLMSTFGPLAR

SEQ ID NO: 2403 - protein, 955 aa, Oryza sativa
MAPLCCCLLRARRLLFFFFFFFFFFFAVAVVLFSSVSVAQIPGFQSIDCGGSGNYTDEVGLEWTGDEAYVGGGAGTTASISSISGQGRRPYRTVRYFPADGRKYCYRVSVKARTRYLVRASFLYGNFDGSRVFPEFDLYVGASRWSTIVIYDESKVVTREMVALAQSGPSLSVCLANATTGHPFISTLELRPLNASLYHTAFEAAFFLSLAARINFGAPTADPVRYPDDPYDRVWESDMARRPNFLVDAAPGTIRVATDNPVFVASGERPPQKVMQTAVVGTLGALTYRLDLNGFPGSGWACSYLAEIEDDAAATARRFKLYIPGLAEVSKPTVDIGENAPGKYRVYQPGYDNISLPFVLPFAFRKTDDSARGPILNAMEIYSYIPILPASPDAVAMDALAARYQQQQHSWAREGGDPCVPAPWSWLTCTSSRVIAIRLDNNMLTGPIPDLSACTNLTVIHLENNQLEGGVPSYLSGLPKLSELYLENNRLSGVIPRALLSRTIVFKYSGNKHVRVGKQEEEERNVIIGICALMGIGLLLAAALCYAYNVSVSGRKQLQGASAGGNSKSKSIVVSAEQKKKATPVAGGGGGEIDNMMAAMAARGPLEFEVRELEEATSKFARKIGSGGFGVVYYGRLGDGREIAVKVASSNESIQGKKQLANEVALLSRIHHRNLVAFLGYCWERDSSSYMLVYEYMHNGSLKEQLQMMSISWLRRLQVAEDAAKGIEYLHCGCTPAIIHRDIKTSNILLDAHMRAKVSDLGLSKSNKATNSTTNTITTHVRGTLGYLDPHYYVSQQLTHKSDLYSFGIILLELISGRPPILLTPGAGAMASLGPWAKSHYESGDIEAIVDPSLRGRYRDVHSVWKVAETAVRCIDADPRGRPSMPEVVKDIQEAIALEMPSSESERPAASFFSPGAGAAGARSSATVRSHDLVMDNLMYDSSFCDSLNLPRTPR

SEQ ID NO: 2404 - protein, 593 aa, Oryza sativa
MAVGDGGGGGVRRRGCGCSKEDFFPEESFSSWEAYGRALRSTGARLADRLTARSLDATELHEVRARSGADMKRDLTWWDLAWFGVGAVIGAGIFVLTGQEARNAVGPAVVISYVVSGVSAMLSVFCYTEFAVEIPVAGGSFAYLRVELGDFMAFVAAGNILLEYCIGGAAVARAWTSYFATLLNHHPNDFRIHAASLAADYSRLDPIAVAVIAIICLLSVLSTKASSRFNYVLSVLHVAVIAFIIVAGLTKADAANLTRDFMPYGPRGVFAASAVLFFAYIGFDAVSTMAEETRDPARDIPVGLVGAMALTTALYCALAVTLCLMVPYGEIDPDAPFSVAFADRGMGWAKYVVAFGALKGMTTVLLVSAVGQARYLTHIARTHMMPPWLARVHPGTGTPVNATVAMLLATAVIAFFTDLNVLSNLLSISTLFIFMLVAVALLVRRYYVSGETSRADRNRLAACIAAILASSVATATCWGLDRGGWVPYAVTVPAWLAATASLWALVPQARAPKLWGVPMVPWLPSASIAINVFLLGSIDSKSFMRFGIWTAALLVYYLFVGLHASYDTAKALAADAVAGKVEDGDAKTSAPPM

SEQ ID NO: 2405 - protein, 321 aa, Oryza sativa
MASRTWHRWLLLVFFLLSDDASGQLSTSYYADSCPSVEKVVHATVASAIQAERRMGASLIRLFFHDCLVQGCDASILLDDVPATGFVGEKTAAPNNNSVRGYEVIDQIKANVEDVCPGVVSCADIVALAARDSTALLGGPSWAVPLGRCDSTTASRSEANSDLPGPGSNLTMLIARFGNKGLSPRDMTALSGSHTVGFSQCTNFRAHIYNDANIDPSFAALRRRACPAAAPNGDTNLAPLDVQTQNAFDNAYYGNLLVRRGLLHSDQVLFNGGSQDALVRQYAANPALFAADFAKAMVKMGNIGQPSDGEVRCDCRVVNDS

SEQ ID NO: 2406 - protein, 300 aa, Oryza sativa
MSVAAEGKEKGVGGGGGGAGAGACELCGAAARVYCGADEATLCWGCDAQVHGANFLVARHARALLCRGCARPTPWRAAGPRLGPTASLCERCVRRGGGGRGGGGGGGAAGGGGRGGGGDEEMGGEGDEEEEDEDEEVVVEEEEDEDDEDEEGEGEGENQVVPWAEEAEATPPPVASSTSSSSREAAANGANAADRVKEDQPCSTSQPSLCRYASSAHHGGGGRSDEATSSRNGGGVGGRFLASRHRKRSPSDFRRSGLAQSLIDSKLAFRFQEHCKSTFPSSSLSILPCTWQLFLRQLKQ

SEQ ID NO: 2407 - protein, 262 aa, Oryza sativa
  misc_feature (83)..(83): Xaa can be any naturally occurring amino acid
  unsure (1)..(262): unsure at all Xaa locations
MESRPGGTNLVEPRGQGALPSGIPIQQPWWTTSAGVGAVSPAVVAPGSGAGISLSGRDGGGDDAAEESSDDSRRSGETKGTRXDGSTDQEKHHATSQMTALASDYLTPFSQLELNQPIASAAYQYPDSYYMGMVGPYGPQAMSAQTHFQLPGLTHSRMPLPLEISEEPVYVNAKQYHGILRRRQSRAKAELEKKVVKSRKPYLHESRHQHVMRRARGPGGRFLNTKKNEDGAPSEKAEPNKGEQNSGYRRIPRDFQLLQKET

SEQ ID NO: 2408 - protein, 279 aa, Oryza sativa
MARQVLSSSLLPARPGHHPVPCKSSHSTQLSDAMVLESTREERRERLQGAMMERAEDLRLSLSLSSPLIAPQKRFLEMPLLPAAKRSEVVAAEEERAGLRGGGGSDEEDGGCGIDGSRKKLRLSKDQSAVLEDSFREHPTLNPRQKATLAQQLGLRPRQVEVWFQNRRARTKLKQTEVDCEFLKRCCETLTEENRRLQKEVQELRALKLVSPHLYMNMSPPTTLTMCPSCERVSNTNNNSTATAAKPLEFGGHATHAAAHHNLGSKSWGFFPAVLHAMF

SEQ ID NO: 2409 - protein, 142 aa, Oryza sativa
WAGTREAEGAEAAPAAAVGWTVRLLPVVSSPNSTLSSLSGKRGAPSAAAAAVGGSDDEDSDDGSRKKLRLSKDQAAVLEDTFNKHNTLNPKQKAALARQLNLKPRQTEVDCELLKRCCETPTDMKLKRGPPLPLPPPPPPLL

SEQ ID NO: 2410 - protein, 404 aa, Oryza sativa
MASAAAEVPSYFVCPISLQLMRDPVTLPTGISYDRAAIARWLAAPGARRTCPVTRQPLEHGLELTPNHTLRRLIQSWAASVSPGSAVDEEVAALRPVSSDEVASLLSDAAAAQVGALRRLRELAAECEDSRAMLESQGGVFDVLSRVVTSGSACSTAREEAVGVLASLRIPEQELIGVSTRHGNLAESLTAVLRSSNLQSRAHAVQLVRTLADAVVPAWVIGLNAELLAEVVGVVRDRVSARATKASLHALAALCPYGRHRVKIVGAGAVAALVELLLDEPERRVCELALAVLDRLCTCAEGRAELVAHAAGVAVVGKKVLRVSEAASERAVRVLRSVARHAATPAVLQEMAQCGVVGKLCLALRSEQCGVKTKEKAHEVLKLHSRVWRASPCLSPSFLALYPS

SEQ ID NO: 2411 - protein, 872 aa, Oryza sativa
  misc_feature (588)..(588): Xaa can be any naturally occurring amino acid
  unsure (1)..(872): unsure at all Xaa locations
MELLALVVVLLVLESGVLAVDQPAGFLSIDCGLEADDSYPDDLTGITYVPDGHYTDAGENHKVTTVYRNAWWGPDTRTLYTVRSFPSAEGQRNCYSLPNDVRSKYLVRLKFLYGNYDGLDSSSLKFNLTLGVKHWDTVSIDTTDGNDGYNVHEAVFVAWASWAPVCLINIGQGTPFMSMVELRPLGILPYPAVMGNVSLSLYVRSNVGSSPDDDKLVRYPDDQYDRFWFTDAYTEADPSTTNISTQSTIQPSTEFAVPSPVLQKAVVPSGNSTKLVFFSDQLDALLHDHFVIPHFADFQNKKSREFTVSIDNGVQSSPYSTPYLKVLSVTGGWSSNSEGKYNFTIAATATSALPPILNAYEVYGRIIHDNPTTFSQDFDAIMAIKYEYGIKKNWMGDPCFPPEYVWDGVKCSDPGDKIMRIISIDLSNSELNGSISNSFTLFTALKYLNLSCNQLNGTIPDSLLKNNGSIDFSYESDGNMCKTHATPSLSRNRAVTLAVSVVAPVLVLAILVLAYLIWRAKRKLNTSSTDLAMVPELMGAPGHITNHWDHLQKPENRRFTYQELEKFTENFKHLIGHGGFGHVYYGCXEDSTEVAVKMRSELSSHGLNEFLAEVQSLTKVHHRNLVCLVGYCWEKEHLALVYEYMSRGNLCDYLRGKTGTGEILNWKTRVRVALEAAQGLDYLHKGCNLPIIHGDVKTNNILLGQNFKAKIADFGLSKTYHSDSQTHISATAAGSMGYIDPEYYTTGRLTESSDVYSFGVVLLEITTGEPPIIPENGHIVQRVKQKIVSGNISSVADAHLGGAYNVSSIWKVVNIAMMCTIDIATQRPKMGDVVVQLKESLDLVEVHGDRGDMENLASDTMSSMSTFGPSAR

SEQ ID NO: 2412 - protein, 447 aa, Oryza sativa
MARISSMLFGRSFGTSDGSYQLIKPLAIAPRGRGAPTRDGTTTPVRPSVSSPQLAPLEDRGVHHHHHHSSSPTIPNPSSSDSPPGDLCCARSRSSLAVDRPVQIRVVYTVRGCSSIYGSDLGLMENRVGESSATAVDGGGGAKDSGSFECNICLELAQDPVVTLCGHLFCWPCLYEWLHVHAHSRECPVCKAGLEEEKLVPLYGRGKASTDPRSRSVAGVQIPSRPAGQRPATASQPDHHHDHLPHHDPWFMGGAGAPVAGGRWGNYTFSAAIGGLFPLLSFQVHGFPQAAAYGPAAGFPYGYGHSFHGWHGHGFPHQAPQGQHVDVFLKALEDGHQSWNQLPRGREGSPARRRQHSKPDLPSEHVVEEDVVRRLEILGAKGEGRVTIDATFLEEISRPGALLECKSKEELAFGRILCVLEKISTSKGMLAIEECLDNEDTVDIKDP

SEQ ID NO: 2413 - protein, 163 aa, Oryza sativa
MADSNADLGDDDQFNTADAGASATYPQQCSALRKNGFVLLKNRPCKIMEMSTSKTGKHGHAKVNLVGIDIFTGKRYEDMCPSTHNMDVPNVKRTEYSLMDVDRDGYLTLMDDASDTRSDLKLPEGDLGPEIRTKFESDESIKITVLKAMGEEAVIGYKLDTKG

SEQ ID NO: 2414 - protein, 356 aa, Oryza sativa
MGDSSRSVSIDVERISFGGKEHRVRTRYGSVSVSVFGDEDKPALITYPDVALNYMSCFQGLFFCPEAASLLLHNFCIYHITPQGHELGAAPISSDVPVPSVDELVDQVADVLDFFGLGSVMCLGVTAGAYILTLFAVKCMYTLSQTKYRDRVIGLMLVSPLCKAPSWSEWLYNKVLLNLLYYYGSRGLVKECLLQRYFSTEVRGNGQDPESEIVQACRSLLHERQGSNVWRFLQAINERHDLTEALKKLQCRTLIFVGENSQFHDDAVHMTTKLDRRYCALVEVQACGSLVTEEQPHAMLIPMEYFLMGYGLYRPSQLDSSPRSTLNPFCISPELLSPESMGVKLKPIKTRISLKV

SEQ ID NO: 2415 - protein, 165 aa, Oryza sativa
  misc_feature (23)..(23): Xaa can be any naturally occurring amino acid
  unsure (1)..(165): unsure at all Xaa locations
MSDEQHEHTFDSTDAGASTTYPXMQCSALRKGGHVVIKGRPCKIVDMSTSKTGKHGHAKVHLVAIDIFTNKKLEDLSPSTHNMDVPNVTNETFELIDIEGDGFLQLMDSNGEMREDIKLPEGSDKAEEVAKEIRRLHELKQQDENKEVFIVVTKAMGEEVPTQAK

SEQ ID NO: 2416 - protein, 233 aa, Oryza sativa
MVRGRTELKRIENPTSRQVTFSKRRNGLLKKAFELSVLCDAEVALIVFSPRGRLYEFASAPSLQKTIDRYKAYTKDHVNNKTIQQDIQQVKDDTLGLAKKLEALDESRRKILGENLEGFSIEELRGLEMKLEKSLHKIRLKKTELLEQQIAKLKEKERTLLKDNENLRGKHRNLEAAALVANHMTTTTAPAAWPRDVPMTSSTAGAADAMDVETDLYIGLPGTERSSNRSETG

SEQ ID NO: 2417 - protein, 859 aa, Oryza sativa
MALLAGFTVFVLAASVPATGQQDGFLSIDCGLEGDKNGYTDNSNGIVYTPDGAPYVDTGVTNNVSAQYVNTWDRALNTLRSFPLTLFGERNCYALPTVPGAIYLVRLRFAYGNYDNMNSESVQFDLSLGVNKWDEVSIASMDVEYSSEAIFVAWASWASVCLFNTNQGTPFVSSVELRPLGGLHYPAIMANQSMYLYERRNMGPSSTDPIIRYPDDPYDRYWYPWETENDPMYSNVSAPSTLIIPPSPSYAVPSPVLETAVVPADNNKSVLSIIQTNDKEIHEYLVLVHYADFQSTLQRQFQAYSNGDPIQGTGGPYVADYTGQTVGTIDWISAETSGKYNITLAATDSSQLPPIVNAFEVYGRIPLDNPSTFPTDYTCKIISLAYNKLNRWIKELRLIKVPHKVDAIMTIKFEYGIKKNWMNDPCFPSNLVWNGVRCSTGSDNTMRIISLDLSNSNLHGSISNNFTLLTALEYLNLSGNQLSGTIPSSLCENNAGSFVFRFSYLFNVDIGDNFVHLDSTYGPERMNAPESVKNRWNHLPKTENRRFTYEELEKYTDNFKRLIGHGGFGHVYYGCLEENIEVAVKIRSESSSHGLDEFLAEVQSLTKVHHRNLVSLVGYCWENDHLALVYEYMSGGNLCDHLRGKIGADKSLNWATRLRILVDAGQGLDYLHKGCNLPIIHGDVKTNNILLGQNLKAKIGDFGLSKTYHSDTQTHISATAAGSVGYIDPEYYSTGRLTESSDVYSFGVVLLEVATGESPIIPGHGHIVQRVKQKIVTGNISSVADSRLDAYNVSSMWKVVDTAMRCTADVATQRPVMATVVAQLKEGLALEDAHEERVDHENIASDTASSMSKFGPSPR

SEQ ID NO: 2418 - protein, 888 aa, Oryza sativa
  misc_feature (107)..(107): Xaa can be any naturally occurring amino acid
  misc_feature (218)..(218): Xaa can be any naturally occurring amino acid
  misc_feature (494)..(494): Xaa can be any naturally occurring amino acid
  misc_feature (600)..(600): Xaa can be any naturally occurring amino acid
  unsure (1)..(888): unsure at all Xaa locations
MWSSSLPSYLFTLVTGLLPLLVHSQTASLDEGFISIDCGLSSGSSYLDEKTGLNYTSDDGYIYTGENHDISAEYNGQELFKTGLNLRSFPTGGRNCYTLSPATTGQXKYLVRATFMHGNYDGKGNDLVSSPLVFDVHMGLHFWDRISVSNSAKTYIAEVIVVAEVNSISVCLMDIGSGIPFISSLEMRQMKSSLYPAAKANQSIALQERHSMGTSSLXRYPDDPYDRLWWPWQGSSRLLNISTNQTIKRYWNDKFEVSARILQAAVTSPATSIPLNFSWTIPTSWPTIEAVPAYYVDVHYTEFQKPQGREFNTYYNGALWPANENPITPPYLLADYTFSTSQYTSDNGFYNICLVATNTSILPPSLTAFEIYYLVQHNGTMTSLEDVDAMMTLKTEYQVKMNWMGDPCLPENYTWTGLKCQSDGVTSGVTSLDLSNSDLKGAISDKFSLLKSLQYLNLSYNDLNGSVPDSLVNLPLLALDLSGNHLISTIPDAXCTKQSLTLRYDTTNGDPCNGKSQEKKNTVVLFVAIFVPVLIVAILVSTLLVCYFFRKQATTHKEDHEDHIHISDGREFTYTELIEMTNNFSVCIGEGGYGPVFHGXLKEGTQVAVKMHSPTSTIGKGMTEFLAEVESLTTVHHRYLVFLVGYCSNKNHLALIYEYMPNGSLYDHIRGKNAIVQTLGWHDRARIALEAAQGLDYLHTGCMLPIIHRDLKSQNILLGHDMVAKISDFGLSRSYLNDAQSHISVTAAGTLGYIDPEYCLSGRLTISSDVFSFGVVLLEIVTGEPPIISTTVHIVQRVKEKVSMGNIEAIVDPRFGGEYDTNSVWKVVDIALLCTKEASHERPTMSTVVAELKVALALEKARASGSISDISQGGANFELSINSLLSAR

SEQ ID NO: 2419 - protein, 753 aa, Oryza sativa
MGTGGGEGDKSAVLPLEALLALGLDQRTAENALVNSKVTANLAAVIAELALAYSAQAVACYVLLSTNGLANEQAGISGCDKTVGNLLYTVATKYPTNALVHRPVLIDYIVSTKIKNPAQLDAALSFLTNTGPDSLDTGKFEEACGVGVVVSIEEIKSTVNEVRKRHPWGDAKATKDEIDKKLAEILGPKTDADNVKPVKKKKEKAAKVEEKKAAVVTAAPPSEEELNPYSIFPQPEENFKVHTEIFYSDGNIWRAHNSKEILEKHLKATGGKVMTRFPPEPNGYLHIGHAKAMFIDFGLAKERNGHCYLRFDDTNPEAEKKEYIDHIQEIVHWMGWEPYKVTYTSDYFQALYEHAVELIRKGLAYVDHQTAEEIKEYREKKMNSPWRDRPIEESLKLFEDMRRGLIAEGAATLRMKQDMQNDNKNMSDLIAYRIKFTPHPHAGDKWCIYPSYDYAHCMVDSLENITHSLNRLVTEKWVDGWDDPRLLTLAGLRRRGVSSTAINSFICGIGITRSDNSLIRVDRLEYHIREELNKTASRAMVVLNPLKVVITNLEDEKVIDLDGKMWPDAPADDASSYYKVPFSRIVYIEKTDFRLKDSKDYYGLAPGKSALLRYAFPIKCTEVVYGDNPDDIIEIRAEYDPSKTTKPKGVLHWVAQPAPGVEPLKVEVRLFDKLFLSENPAELEDWLGDLNPNSKEVIKGAYAVPSLATAVLGDKFQFERLGYFAVDTDSTPENIVFNRTVTLRDSYGKAGPK

SEQ ID NO: 2420 - protein, 447 aa, Oryza sativa
MSDGARVEAAPRLAQWRVDVLPCYTYRKSEPFRIGLWNWYLSVERNNKQTCVKKTIVHPGIFDKPLKHEGFVWAIDSTVTGRFVIEIEFLDLKIADPSYNSLTGSNSAFQGGEPASIWASHQIKKSSDNTALSSLARMLQEGILTDITINATDGSIMAHRAILASRSPVFRSMFSHDLKEKELSTVDISDMSLEACQAFLNYIYGDLRSEEFLTHRLALLRAADKYDISDLKEACHESLLEDIDTKNVLERLQMAHLYRLQKLKDGCLRFLVDFRKVYEMHDDFKVFLQTADRDIIAEIFQGTGATTAAVLGLSSTASSPMATHARRAAEARVWRGGLRATETREWRRAPTRRDGPISLDGRLAGIVLRARSRNSSPHRLNPRSSSGSGVYGSGGGGGRADETAGLKGDPYAVGVDAVMEFPGSPSYGPDRVIYLRPLSGEFPGYYG

SEQ ID NO: 2421 - protein, 330 aa, Oryza sativa
MSDGARVEAAPRLAQWRVDVLPCYTYRKSEPFRIGLWNWYLSVERNNKQTCVKVFAELSNSAKNTTPAPIASFITKLLISFPPNQKTIVHPGIFDKPLKHEGFVWAIDSTVTGRFVIEIEFLDLKIADPSGGEPASIWASHQIKKSSDNTALSSLARMLQEGILTDITINATDGSIMAHRAILASRSPVFRSMFSHDLKEKELSTVDISDMSLEACQAFLNYIYGDLRSEEFLTHRLALLRAADKYDISDLKEACHESLLEDIDTKNVLERLQMAHLYRLQKLKDGCLRFLVDFRKVYEMHDDFKVFLQTADRDIIAEIFQGILTTWSGR

SEQ ID NO: 2422 - protein, 580 aa, Oryza sativa
MGEVAEDIYTQDGTVDVKGNPATKKNTGNWRACPYILANECCERLAYYGMSTNLVNYMKTRLGQESAIAANNVTNWSGTCYITPLLGAFLADAYMGRFWTIASFMIIYILGLALLTMASSVKGLVPACDGGACHPTEAQTGVVFLALYLIALGTGGIKPCVSSFGADQFDENDEGEKRSKSSFFNWFYFSINIGALVASSVLVYVQTHVGWGWGFGIPAVVMAVAVASFFVGTPLYRHQRPGGSPLTRIAQVLVASARKWGVEVPADGSRLHETLDRESGIEGSRKLEHTGQFACLDRAAVETPEDRSAANASAWRLCTVTQVEELKSVVRLLPIWASGIVFATVYGQMSTMFVLQGNTLDASMGPHFSIPAASLSIFDTLSVIVWVPVYDRLIVPAVRAVTGRPRGFTQLQRMGIGLVISVFSMLAAGVLDVVRLRAIARHGLYGDKDVVPISIFWQVPQYFIIGAAEVFTFVGQLEFFYDQAPDAMRSMCSALSLTTVALGNYLSTLLVTIVTHVTTRNGAVGWIPDNLNRGHLDYFFWLLAVLSLINFGVYLVIASWYTYKKTADSPDDKAEHAGAN

SEQ ID NO: 2423 - protein, 507 aa, Oryza sativa
MASVDLELGRPLSAAAAAYPPPLRRSINDDDVDDDGKPKRTGGLKCEMSALSLRNFMIIEKVSRGTEWTASAHIVTAVVGSGVLSLAWSTAQLGWVAGPATLVVFAVITYYTSVLLADCYRAGGDQVSGKRNYTYMDAVESYLGGRQVWFCGLCQYVNLVGTAIGYTITASISAAAVYKSNCFHKNGHSADCSVFTTSYMVVFGVVQVFFSQLQSLHEVAWLSVLAAVMSFSYSAIAVGLSLAQTISGPTGMTTMSGTVIGIDVDLSHKIWQALQALGNIAFAYSYSLVLIEIQDTIRSPPAESKTMRKANALAMPVITAFYTLCGCLGYAAFGNAAPGNMLTGFGFYDPYWLVGLANACIVVHLVGAYQVMSQPVFTAVESWASSRWPRCGFFVTGGGGTRLISVNAFRLAWRTAYVVACTAVAAVVPFFNDVLGLLGAVGFWPLTVYFPVEMYIRRRKLERSSKRWVALQSLNAVCFVVTLASAVASVQGIAESMAHYVPFKSKL

SEQ ID NO: 2424 - protein, 344 aa, Oryza sativa
MGSLPVSSPECAPGRRVTVAASDLAPLFGAQRRHLDHFFDRLDLSQAAAFAQALVDAPGAVFFTGVGKSGIVARKLAQTLASLGFTRAGFLSPVDALHGDIGSVFPGDLLVLLSGSGPADELLALAPCARAKGAHLISLTSAASGADCPLAAVCDLNVHLPLQAEVCPFGLAPVTSTAIQMVFGDTVVAAIMEARRLSRDQYASNHPAGKIGKSLIFKVKDVMKKQNELPLCKEGDMIMDQLTELTSKGCGCLLVVDDEYHLIGTFTDGDLRRTLKASGQAIFNLTVGEMCNRHPRTITADAMAVQAMEKMESPPSPVQFLPVVDSNNVVCGIITLHGLVSAGL

SEQ ID NO: 2425 - protein, 233 aa, Oryza sativa
EEQGRPTQLGEPKIFSCRIPKKAFVHTPRVEMYSRRILLHTPFSGQPSGPSQPVSGATIVEGGSPGSNFDANIVMILAVLLCALICALGLNSIVRCALRCSSRMVVDPEPSRVTRLAQSGLRRKALRSMPILLYSTGLKLNTVSPMCAICLSDFEDGEHVRVLPKCNHGFHVRCIDRWLLARSTCPTCRQSLFGAPQKASGCSESEGSQAEPAPARPVLAPLRPEGLVTPYDF

SEQ ID NO: 2426 - protein, 240 aa, Oryza sativa
MILKLILGLLWCLVHLVISFFGSLSHLKNDLECYLISFKLLPKYRNLHLERLAYLGVVVDSREAKNALKVKQLLRWFSTIGINYLILYDIEGVLKELIQPGIETSTDGNPINSLDVVADTKASCYRHGGMFMECLSSSDGKEAIAKVANLLYSTCCNSDNKSEIAFTEADMTHALKAVGTGGPEPDLLLVYGPGRFHLGFPAWRLRYTEIMYVGPLESMKYGTIVKALYRFSRKYQNYGK

SEQ ID NO: 2427 - protein, 964 aa, Oryza sativa
MERSLLPWLLLLLCFADGVFQSRAQPDSKGFISIDCGIQPNTSYVHNTTKISYVADDDFTDGGSNYNVSPEYIKPQLSQRYYNLRAFPDGARNCYTARSLAPGIKYLIRASFLYGNYDGLNKLPVFHLYIGVNFWTMVNITSLGLGGSRYEEAIVVVPDDFVQVCLINTGTGTPFISSLELRPLDKRLYPQVNATLGLLQLNRLNFGPTDNSLVRYPDDPHDRFWGNWDSYTSSLWKEISTASRVDNLDGDIFDAPTAVMQTAVTPRNASGNIYFFWEPWPQPNDPTPPYTVIFHFSELEILTNNASRQFYINLNGEPLIDTAYEPTYLTARYLYGLEPLERTSRYNITINATANSTLPPLINAAEIFSIISTAVIGTDSQDASSMMAIKDKYQVKKNWMGDPCMPKTFAWDKLTCSYPNSSGARIISLNLSSSGLSADISSAFGNLKALQYLDLSNNSLTGSIPDVLSQLPSLRVLDLTGNQLSGSIPSGILKRIQDGSLNVRYGNNPNLCINGNSCKAAKKKSKLAIYTVIPAVLVVLIASVTTLFCLLRRKKQGPMNNSLEQQNEMSTSTSHVLINSGYGDNVSLRLENRRFTYKELEKITNKFKRVLGRGGFGYVYHGFLEDGTEVAVKLRSESSSQGAKEFLIEAQILTRIHHKNLVSMISYCKDGIYMALVYEYMPEGTLEEHIVGENKKGKILNMEREAQYRIGICTRCIILTIPMDPYALQQTLLGLEYLHKGCNPPIIHRDVKATNILLNTRLEAKIADFGLSKASSYDNITHVSTNALVGTLGYVDPEYQMTMQATTKSDVYSFGVVLLELVTGKPAILHEPNPISVIHWTRQRLARGNIEDVVDTCMPSDYDVNGVWKAMDIAFTCTAQASTQRLTMTEVVMQLQECLELEDARCAIGDAHNEFYPDPRSDHNLSYNTYVSDRSNDVSQNSGVSMMEHNFGRVPTMASGPAAR

SEQ ID NO: 2428 - protein, 974 aa, Oryza sativa
MKKSLQKSLRDPMVKSFDQGLPRIVFFIVTIYTINREQKNVILNVSMSQWEAAFVVTLSLLFCIHGQLDNLGFISIDCGYITRPSYPDFKTNLTYVADVGFTNTGFIHTVDVGNLQRDLAQRYTTVRYFPNGTRNCYTLKQLTRGGKYLVRATFGYGNYDAFNSPPAFDLYLGANYWVKVNITNSSRAYVHETIAVSPSEFLQVCLVNTGSGTPFISGLDLRPMWHNVAQSLVLLSFFRETVSFGFNRFHFGTDEHHIRYPVDRYDRFWQRYEDIPGWEDVPDKINGTVKSPQNDTYGAPSDLMRSASTAVNASRMDLPWSSDASMDVGIGPEYIVVLYFAEVQAISDNLLRQFLVSVDNTPLAAAFSPRHMLADVFSGTVLGSDQHSISLITTIISDLPPLISAMEIFLGRTLNESSTGSSDAIAMMTIQTKYSVKRNWEGDPCAPEAFVWDGLSCIHTSIGDIQYNPRGLHRITALNLSFSELIGDIDASFGQLLLLRHLDLSYNNLSGSIPDFLGQMPLLTFLTGNNPNLCGNHTCDPISNKNKRNKFIGFVIAAAIVATVFALSLSALFIWYRRRKTNPDVLPEADPYKSRRFKYKELQVITNDWRNVIGEGGFGHVYAGQLEDVTDVAVKVESQTSLRGNHKQFLAEVQHLTRVHHKNLVSLIGYCNDKKHRCLVYEYMDGGTLEGRLRGREDPPEPPLTWLQRVNIALGSANGLNYLHTMCSPRLIHRDVKAGNILLTANLEAKISDFGLTRPSIHGTVETRTITQLAGTPGYMDPESLQASHPSESNDVYSFGVVLMVVITGRTAIVTINGTEKNLAQCVRDWLSSGRGIEAIADPMIRDDCNLSSVEMVAQLALDCTEPAGQDRPTMADVVTTLTESLQLEMSWSSPHSMRSSTTISSSAGFTGSGRADHDAAADSIAVLQVEQAVVETSTRGFTILDRAPRSQTLDELMNTGSEFSIHGQYVWLP

SEQ ID NO: 2429 - protein, 488 aa, Oryza sativa
MGENVVGTYYYPPSAAAMDGVELGHAAAGSKLFDDDGRPRRNGTMWTASAHIITAVIGSGVLSLGWAIAQLGWVAGPAVMVLFSLVTYYTSSLLSDCYRSGDPVTGKRNYTYMDAVNANLSGFKVKICGFLQYANIVGVAIGYTIAASISMLAIGRANCFHRKGHGDPCNVSSVPYMIVFGVAEVFFSQIPDFDQISWLSMLAAVMSFTYSVIGLSLGTVQVVANGGLKGSLTGISIGVVTPMDKVWRSLQAFGDIAFAYSYSLILIEIQDTIRAPPPSESAVMKRATVVSVAVTTVFYMLCGSMGYAAFGDDAPGNLLTGFGFYEPFWLLDIANAAIVVHLVGAYQVFCQPLFAFVEKWAAQRWPESPYITGEVELRLSPSSRRCRVNLFRSTWRTAFVVATTVVSMLLPFFNDVVGFLGALGFWPLTVYFPVEMYVVQKKVPRWSTRWVCLQMLSVGCLVISIAAAAGSIAGVMSDLKVYRPFKGY

SEQ ID NO: 2430 - protein, 416 aa, Oryza sativa
  misc_feature (101)..(101): Xaa can be any naturally occurring amino acid
  unsure (1)..(416): unsure at all Xaa locations
MCGGAIISGFIPPSAAAAAAAAAAKKQQGRRVTADVLWPGMLRKGKAAAAEEDFEADFREFERGMSDDEAEGGGGEEEEDDDDVVVVVPPPAAARFVVRAXAAKAAPPTADGMLTTKLVQHDGPTARSAKHKRKNQYRGIRQRPWGKWAAEIRDPSKGVRVWLGTYNTAEEAARAYDAEARKIRGKKAKVNFPDEPAVAQKLSLKQNAAKQEKLAPPLKTCGDDAFFQLNSSDNDLFAMLAKVPAKPAEPVDLMPPVKPLASTETFEMNMLSDTSSNSFGSSDFGWEDDTLTPDYTSVFVPNAAMPAYGEPAYLTGGAPKRMRNNYGIAVPQGNGMPNLAQNMPTFDPEMKYLPLPYVESSSDESMDNLLQNDATQDGASNEGIWSLDELLMAAGAYWASRDEMFWSVWSVTSKPC

SEQ ID NO: 2431 - protein, 409 aa, Oryza sativa
MAKALLSSSLLPSLQPRAAAARLPMLTLPSLRRHGGRRASACRVRASLHGLDSIAGLDLHAALERAEAALYTLADAAVVAADAAAGGGGGGGGGGGEAAASVAQKNGGWFGFISEALEVVLKVLKDGLSAVHVPYSYGFAIILLTVIVKAATLPLTKQQVESTLAMQNLQPQIKAIQQRYAGNQERIQLETARLYKQAGVNPLAGCFPTLATIPVWIGLYQALSNVANEFVSMEIMKPPQTDDPSQKNTLLVLKFLPFMIGWFSLSVPSGLSIYWFTNNILSTAQQVWLRKLGGAKPVVNQGGSGIITAGRAKRTSAQPAQPGERFKQLKEEESKRKGNKALAAGDSDLSASTSEDEESDDETTEEQGGPEERYNSSSNKKLPNYSGKKGKRSKRKRMVQLIQLASTVV

SEQ ID NO: 2432 - protein, 459 aa, Oryza sativa
MAKALLSSSLLPSLQPRAAAARLPMLTLPSLRRHGGRRASACRVRASLHGLDSIAGLDLHAALERAEAALYTLADAAVVAADAAAGGGGGGGGGGGEAAASVAQKNGGWFGFISEALEVVLKVLKDGLSAVHVPYSYGFAIILLTVIVKAATLPLTKQQVESTLAMQNLQPQIKAIQQRYAGNQERIQLETARLYKQAGVNPLAGCFPTLATIPVWIGLYQALSNVANEGLLTEGFFWIPSLGGPTTIAARQSGAGISWLLPFVDGHPPLGWHDTICYLVLPVLLVASQFVSMEIMKPPQTDDPSQKNTLLVLKFLPFMIGWFSLSVPSGLSIYWFTNNILSTAQQVWLRKLGGAKPVVNQGGSGIITAGRAKRTSAQPAQPGERFKQLKEEESKRKGNKALAAGDSDLSASTSEDEESDDETTEEGGPEERYNSSSNKKLPNYSGKKGKRSKRKRMVQ

SEQ ID NO: 2433 - protein, 449 aa, Oryza sativa
MAEDAPPSSLPLLLPRKSLSSSSAQRKQQYARCVSHAGDELHSFRSCLAWMCVDHSTRARGAASWAAFLLLAVAAPSAATLALPSPVGGGGSPFDGQVQVSLTLAAALAYLTLTALLQGRGLRRLLYLDRLRDDSEEVRSGYIEELAGSFRVLACFLLPCTLAEAAYKAYWYLAAPPFRSPWWSAAACAVEVASWAYRTAVFFMVCVLFRTICYLQILRMKGFAREFCRFADVAAVLESHRRIRKQLHRISHRYRRFILCCLVLVTTSQFAALLATTRPHAQINLATAGELALCSLSLVAGLLVCLQSAAKITHKTQAITSVAAGWHADATINAFDNDQEDPNPDLPRIVGYLVPVNAYWMASGESSSDSSSSSSSSDDDDSGHPKSKYIPFQNNHCFQQRQALVTYLENNRAGITVYGFVVDRTWLHALFMIEFSLVMWLLGKTVGIS

SEQ ID NO: 2434 - protein, 305 aa, Oryza sativa
  misc_feature (42)..(42): Xaa can be any naturally occurring amino acid
  misc_feature (201)..(201): Xaa can be any naturally occurring amino acid
  misc_feature (272)..(272): Xaa can be any naturally occurring amino acid
  unsure (1)..(305): unsure at all Xaa locations
MATAGDEQQQQAAAAQTAEVTEAAAKEVVSVEMPAPEGGTRXFTPQRGGRFEIVFVSPTGEEIKNKRQLSQYLKAHPGGPASSEFDWGTGDTPRRSARISEKVKAFDSPEGEKIPKRSRNSSGRKGKQEKKEATENEEAKDAEADKEAPSEDAPKETDVETKPAEEAKEAPSEDAPKDTDVEMKTAEDASKTADADTPAPXAPAGTEKEDAKPAESEAAPPAPSEGGEKKEDAKPAEPEAAAAPPSNPTEPSAPKAAAAAPVENSADKGPHXQDSQPPSAAAPAKESSPVNNGQLPAGASAVKCT

SEQ ID NO: 2435 - protein, 318 aa, Oryza sativa
MATQWVLVVVAVMAVLFAGGAAGGQLSTRYYDGKCPNVQSIVRAGMAQAVAAEPRMGASILRMFFHDCFVNGCDASILLDDTANFTGEKNAGPNANSVRGYEVIDAIKTQVEASCNATVSCADILALAARDAVNLLGGPTWTVQLGRRDALTASQSAANGNLPGPGSDLATLVTMFGNKGLSPRDMTALSGAHTLGQARCATFRSRIFGDGNVDAAFAALRQQACPQSGGDTTLAPIDVQTPDAFDNAYYANLVKKQGLFHSDQELFNGGSQDALVRKYAGNAGMFAADFAKAMVRMGALLPAAGTPTEVRLNCRKVN

SEQ ID NO: 2436 - protein, 588 aa, Oryza sativa
  misc_feature (385)..(385): Xaa can be any naturally occurring amino acid
  unsure (1)..(588): unsure at all Xaa locations
MESNGGGGGSPKEAAVVVPSSGDATLGGHLARRLVQVGVSDVFAVPGDFNLTLLDHLIAEPGLRVVGCCNELNAGYAADGYARARGVGACAVTFTVGGLSVLNAIGGAYSENLPLICIVGGPNSNDYGTNRILHHTIGLPDFSQELRCFQPLTCYQAVVNNLDDAHDQIDRAISTAIRESKPVYISVSCNLPAVPHPTFSRDPVPYFLSPRLSNQASLHAALDATLAFLDKAVKPVLVAGPKLRVAKAGGAFVDLADASGHAVAAMPSAKGLVPETLPRFIGTYWGAVSTAFCAEIVESADAYLFAGPIFNDYSSVGYSCLLKKEKAVVVQPDRVTVGNGPAFGCVMMRDFLSELAKRVRKNTTAFDNYKRIFVPEGQLPECEAXGEALRVNVLFKHIQRMIGGTEIGAVMAETGDSWFNCQKLRLPEGCGYEFQMQYGSIGWSVGALLGYAQAVQKRVVACIGDGSFQVTAQDVSTMLRCGQRSIIFLINNGGYTIEVEIHDGPYNVIKNWDYVGLVNAIHNGEGRCWATRVRCEEELEAAIATATGDKADSLCFIEVVAHKDDTSKELLEWGSRVSAANSRPPNPQ

SEQ ID NO: 2437 - protein, 467 aa, Oryza sativa
MGGAGEGDGQTEPLLEKLSNSSSSEIDKRTAYQVMSSRPTPHMLAHRTRETDQLEGTAWTATAHIITAVIGSGVLSLAWSVAQLGWVGGPAAMVLFAGVTLVQSSLLADCYIFHDPDNGVVRNRSYVDAVRAIQKANCYHREGHDAPCSVGGDGYYMLMFGLAQVVLSQIPGFHDMAWLSVLSAAMSFTYSLIGFGLGVAKVITNGVIKGGIGGIAMVSATQKVWRVSQAIGDIAFAYPFASVLLEIEDTLRSPPPESETMRTASRASIAVTTFFYLCCGCFGYAAFGDATPGNLLTGFGFYEPYWLIDFANLCVAVHLLGGYQARTGFEISVYSQPVFAAVERRMGGAGAGVVEVAVPAAVAWPSRWRRGCRVNVYRLCFRTAYVAATTALAVWFPYFNQVVGLLGAFTFWPLSIHFPVEMYLVQKKVAPWTPRWLAVRAFSAACLATGAFASVGSAVGVFSSKTS

SEQ ID NO: 2438 - protein, 596 aa, Oryza sativa
MASSASLQRFLPPYPHAAASRCRPPGVRARPVQSSTVSAPSSSTPAADEAVSAERLEPRVEQREGRYWVLKEKYRTGLNPQEKVKLGKEPMSLFMEGGIKELAKMPMEEIEADKLSKEDIDVRLKWLGLFHRRKHQYGRFMMRLKLPNGVTTSEQTRYLASVIEAYGKEGCADVTTRQNWQIRGVTLPDVPAILDGLNAVGLTSLQSGMDNVRNPVGNPLAGIDPDEIVDTRSYTNLLSSYITSNFQGNPTITNLPRKWNVCVIGSHDLYEHPHINDLAYMPAVKGGKFGFNLLVGGFISPKRWEEALPLDAWVPGDDIIPVCKAVLEAYRDLGTRGNRQKTRMMWLIDELGMEAFRSEVEKRMPNGVLERAAPEDLIDKKWQRRDYLGVHPQKQEGMSYVGLHVPVGRVQAADMFELARLADEYGSGELRLTVEQNIVIPNVKNEKVEALLSEPLLQKFSPQPSLLLKGLVACTGNQFCGQAIIETKQRALLVTSQVEKLVSVPRAVRMHWTGCPNSCGQVQVADIGFMGCLTKDSAGKIVEAADIFVGGRVGSDSHLAGAYKKSVPCDELAPIVADILVERFGAVRREREEDEE

SEQ ID NO: 2439 - protein, 148 aa, Oryza sativa
MAKPSAAPVTGVPVGSAAWSSGLFDCFDDCGLCCMTCWCPCITFGRVAEIVDRGSTSCGASGALYALLAMVTGCQCIYSCTYRGKMRAQYGLADAACGDCCVHCWCESCALCQEYRELVARGYDPKLGWHLNVERGAAAAPAVQHMGR

SEQ ID NO: 2440 - protein, 279 aa, Oryza sativa
  misc_feature (226)..(226): Xaa can be any naturally occurring amino acid
  unsure (1)..(279): unsure at all Xaa locations
CTIQHAQFVEFRCATTLIASTHCLLFSLLRSLDFSLSPLIRSASASPFHTCASCSSWSLVSSSSSRFDFLFFSSLFRGGEGRGGRMGAQEQEQEKQQAKTSTTSSLPSSSERSSSSAPNNLKEGGGGVESDEEIRRVPEMGGGGGSASSGAGADERQGKEDGKQQGGGGGGAAAAGGGQEQAPPARKRGRSAGDKEQNRLKRLLRNRVSAQPARERKKAYMTELEXAKPKDLELRNAELEQRVSTLQNENNTLRQILKNTTAHAGKRGWPLKRGRRQGP

SEQ ID NO: 2441 - protein, 240 aa, Oryza sativa
  misc_feature (208)..(208): Xaa can be any naturally occurring amino acid
  unsure (1)..(240): unsure at all Xaa locations
MSRPSVIIKLILGLLWFIVHLAISLFSLWFDLIYSIECYLISFGLIPKYRKFQLDRLKHLAVVVDSREAKNVAKINQLLCWLSNVGVKYVCLYDIDGVLKKTFAPAMNGSRYGNSGKYLDVGANTKALTCCHKEMTIECISGSDGKDGIAKAASLLCSTCVNGNRNTCGNGEIVFTEADMSGALKAIGCGGPEPDLLLVYGPARCHLXFPAWRLRYTENMHMGTLNFMKYGAIVKAFYKF

SEQ ID NO: 2442 - protein, 460 aa, Oryza sativa
MDTFFPLICFTENMRLQYPGRIPLNSTVEQKARKVAVLVALSASGSAPVLYRTMDALCDFCREQRSMVYCRSDAASLCLSCDRNVHSANALSRRHTRTLLCDRCVGQPAAVRCLEENTSLCQNCDWNGHGAASSAAGHKRQTINCYSGCPSSAELSRIWSFSMDIPTVAAEPNCEEGINMMSINDNDVNNHCGAPEDGRLLDIASTALMSDLPTGDKFKPLIGSSSGDGMNLLPLNSDQPAEPVSTTPKAPCVTDKDMFNDGSVYGDFCVDDADLTFENYEELFGTSHVQTEQLFDDAGIDSYFEMKDVPADESNEQPKPVQPECSNVASVDSGMSNPAARADSSHCIPGRQAISNISLSFSGLTGESSAGYFQDCGVSSMILMGEPPWHPPGPESSSAGGSRDNALTRYKEKKKRRKFDKKIRYASRKARADVRKRVKGRFVKAGEAYDYDPLSQTRSY

SEQ ID NO: 2443 - protein, 187 aa, Oryza sativa
MAAACSSAAFLAYPGSLGAGPRPLRLFRAFAAASSSGSGSKKKARKSKGAGNKGEASGGGGGKGKGKALEPPPAVIRRAPAGSASVFQQPEPGFTPGGGGGGKGPTEEERRQRQANENAFLLAWLGLGLIILAEGLALAASGFLPEEWDSFFVKFLYPSFTPTVILFLGGTVGYGVFKYFEGEKSNS

SEQ ID NO: 2444 - protein, 85 aa, Oryza sativa
MSGSRSSSPNSKSEWSRKENKMFEEALAYYGEDTPNRWDKVASAMGGIKSAEEIRCHYEDLTDDVKTIESGRVQFPKYKTQGYWT

SEQ ID NO: 2445 - protein, 400 aa, Oryza sativa
MNTTSANELMMHRHVQAAPYAAAPQQQGGKQRAPGLPPTPPPPPAAASSHSSHGDVCMDDTARGGLLPPRKAHRRSRSDVPFGYFQPLPPPSPKMEAGGGWALPGCGGAGDVDLLNAYMSLEGMGGADGLNNSDGDSRGSSMRTNGADSSENESEDYVGADSQALLWGGAGGGEAAGKKRRNNAAGEKAARHARSLSMDSLMGKLSFAANGEPAKFSLEFGSGEFTPAEMKRNMADEKLAEMALADPKRVKRVLANRQSAARSKERRMRYIAELEQKVQILQTEATTLSAQLTLLQRDSSGMATQNNELKFRLQSMEQQAQLRDALNEALTAEVQRLKLAANEVCDTSSSSNLAHQIQLRCQNQMLDLHKQQQQQVEQIPFYQLELPEQQNGTARNHESK

SEQ ID NO: 2446 - protein, 450 aa, Oryza sativa
MQGSVGVHGILLLAAAAVLTQCLLAAAVNTPVVQCASGTTKCTVTNAFGAFPDGSTCHVAAAAFPATEEELVRVVAGAAASGTKMKVATRLGHNFMKLSCPGGDGLVISTNALNRVVGVNAARMEITVESGVTLSELIDAAAHAGLALPHAPYWLDLTVGGLLSTGAHGSSVSGKGGAVHEYVTGMRVVTPAPASEGYAKVRVVNAGDPDLDAVKVSLGVLGVISQVTLALQPLFNRSVSFRRRGDGDLAERAVAFAGEHEFGDVVWYPARGEAVFRIDDRVATTKTNTISSGDFQNVIQSSRSTEQQQHGDVLPFQAGISVPLSRASAFIRDAQRLLDMNPGALCGGENGGILIRYVKASTAYLGKTEDSVEFDTTSCRHDGDAAMPEEMEQMALRKYGGVPHWGKNRNVAFDGAIAKFPKAGEFMKVKDAYDPDGLFSSEWSDAYADA

SEQ ID NO: 2447 - protein, 166 aa, Oryza sativa
MALVEDNNAVAVSFSEEQEALVLKSWAILKKDSANIALRFFLKIFEVAPSASQMFSFLRNSDVPLEKNPKLKTHAMSVFVMTCEAAAQLRKAGKVTVRDTTLKRLGATHLKYGVGDAHFEVVKFALLDTIKEEVPADMWSPAMKSAWSEAYDHLVAAIKQEMKPAE

SEQ ID NO: 2448 - protein, 365 aa, Oryza sativa
  misc_feature (192)..(192): Xaa can be any naturally occurring amino acid
  unsure (1)..(365): unsure at all Xaa locations
MPLSYSAAAAAAPSPLAARSRGLLRRPPRSSPVVVRCKKIDQLRAVNGIPPYAPVSNRSLLSPVTLPIIRDANIKNDTRLRIFSGTANPSLSQEIASYLGLELGKINIKRFADGEIYVQLQESVRGCDVFLVQPTCPPANENLMELLIMIDACRRASAKNITAVIPYFGYARADRKSQGRESIAAKLVACLXQPVILDYLASKTICSDDLVVVSPDVGGVARARAFAKKLSDAPLAIVDKRRHGHNVAEVMNLIGDVRGKVAVMMDDMIDTAGTIAKGAELLHQEGAREVYACCTHAVFSPPAIERLSSGLFQEVIITNTIPLKEDKSFPQLTILSVANLLGETIWRVHDDCSVGHEPYSSLDID

SEQ ID NO: 2449 - protein, 237 aa, Oryza sativa
  misc_feature (78)..(78): Xaa can be any naturally occurring amino acid
  unsure (1)..(237): unsure at all Xaa locations
MAQAVVPAMQCQVGAVRARPAAAAAAAGGRVWGVKRTGRGTSGFRVMAVITETTGVVTRMEHLLNMDTTPFTDKIIAXYIWVGGTGIDLRSKSRTISKPVEDPSELPKWNYDGSSTGQAPREDSEVILYPQAIFKDPFRGGNNILAMCDTYTPAGEPIPTNKRNRAARLFSDPKVVSQVPWFGIEQEYTLLHRDVNWPLGWPVGGYPGPQGPYYCAVGSDKSFGRDRTDDETHQGHF

SEQ ID NO: 2450 - protein, 409 aa, Oryza sativa
  misc_feature (38)..(38): Xaa can be any naturally occurring amino acid
  unsure (1)..(409): unsure at all Xaa locations
MYSNFKEQAIEYVKQAVQEDNAGNYVKAFPLYMNALEXYFKTHLKYEKNPKIKEAITAKFTEYLRRAEEIRAVLDEGGGGGGANGGDAAVATRPKTKGKDGEGGGDDSEQSKLRAGLNSAIITEKPNIKWNDVAGLESAKQALQEAVILPVKFPQFFTGKRRPWRAFLLYGPPGTGKSYLAKAVATEADSTFFSISSSDLVSKWMGESEKLVANLFQMARENAPSIIFIDEIDSLCGQRGEGNESEASRRIKTELLVQMQGVGHNDDKVLVLAATNTPYALDQAVRRRFDKRIYIPLPDLKARQHMFKVHLGDTPHNLNESDFENLARRTDGFSGSDIAVCVKDVLFEPVRKTQDAMFFFKADGDMWMPCGPKQSGAVQTTMQELASKGLAAKVRLIDISSTAHVRRGF

SEQ ID NO: 2451 - protein, 312 aa, Oryza sativa
MCGGAILADFTPARVPRRLTAAELLPVTPTPPAAERRTTRKRKSDVDFEAEFELFEDDDDDDEFELSDDGDESLAVSFSSDVSSSSRPRRRVAAAAAGRRKASKKSKYRGVRRRPSGRFAAEIRDPKKGRRVWLGTYGSAEEAAMAYDREARRIRGKGARLNFPRDGDGSPRRSNDRPCWTIDLNLPAAAVSGDDDDAMAVDAADADAGSAGRAAAYADQEALSAAKCKIKQCPRDEQMASATPELMEEDASSSRNMVPLSMALQLQYAAMIAECDREMEEIAAVERDLERRRRQVFERRGHLVRQASLLLD

SEQ ID NO: 2452 - protein, 262 aa, Oryza sativa
  misc_feature (107)..(107): Xaa can be any naturally occurring amino acid
  unsure (1)..(262): unsure at all Xaa locations
VAVLGMDESRSSSSAAGAGAKRPFFTTHEELLEEEYYDEQAPEKKRRLTAEQVQMLERSFQEENKLEPERKTELARRLGMAPRQVAVWFQNRRARWKTKQLEHDFDXTTAAQEVDQPDEHTEAASTTGFATVDGALAAPPPGHQQPPHKDDLVSSGGTNDDGDGGAAVVVFDVTEGANDRLSCESAYFADAAEAYERDCAGHYALSSEEEDGGAVSDEGCSFDLPDPAAAAAAMFGAAGVVHHDAADDEEAQLGSWTAWFWS

SEQ ID NO: 2453 - protein, 703 aa, Oryza sativa
  misc_feature (356)..(356): Xaa can be any naturally occurring amino acid
  unsure (1)..(703): unsure at all Xaa locations
LIKHGSAADDGLHRAFLRGIRVSSVSGGRTAARYPSDPYDRYWWAEDSNPMWGYLNSKRDIQPESITEVPSAVLQKAVQVAGNGRMLNITWEGNTPDLQVTVFLHFADFQKSRPRQFNIYFNSYDKPYLYSPSYLAAGVVYSPSWYGESDGEFNVTLVATAKSVLLPMLNAYEIYTPIKHKTPMTFSKDVDAIMAIKVEYGVLNKNWMGDPCYPTQYAWEGVKCKNSSENIPRIISIDLSNSNLHGVTSSNFTSLTALEYLNLSGNQLNGPIPDSLCKLNAGLLVFSYESNGDMCNKTTSLTRSKNRAAILAISVAAPMLVVIALFVGYLMWKAKRKPNSMYALHILSVLKYINYXCFFFFFSVQPASAYNPPRVPEPMNAPVSEKYHWDHLEKNENRQFTYEELEKFTNNFQRLIGQGGFGCVYHGCLEDHTEVAVKIHSENSRHGFSEFLAEVQSLSKVHHKNLVSLVGYCSEKAHLALVYEYMSGGTLFDHLRDKTGVGESLNWASRVRILLEAAQGLDYLHTGCNRPIIHRDVKTSNILLGQNLQAKIADFGLSKVYVSDTQTHMSATAAGSMGYIDPEYYLTGRITESSDIYSFGVVLLEVVTGERPIIQGQGHIIQRIKMKVVAGDISSIADARLRGDYDVNSIWKVVEIAMLCTEPVAAQRPTMASVVAELKDSLVPDPPPHHAVAMSPTFGPSAR

SEQ ID NO: 2454 - protein, 625 aa, Oryza sativa
MAATIPASPATLQPCKKNVSGSMLIRSPPRPWRRRLPQHVVIVDASSSSRGPKAATGGRLETSTDAAAVAGEDGDVIRRLQNGPDVRGVALEGENGRAVDLTPLAVEVIAESFGEWLREELQQLESGRDGGEVRVSVGRDPRLSGARLGAALFAGLARAGCSVFDVGLATTPACFMSTKLPRFSYDASIMMTASHLPYTRNGLKFFMKRGGLTSGEVEGVCDRAARKYVARKMGLGGGRGMPPVVMRVDLMSAYAQHLRNIIKERVAHPTHYDTPLKGFKVIVNAGNGCGGFFTWDVLEKLGADTTGSLHLEPDGKFPHHMPNPEDTTAMSLTRDAVLDHGADLGVVFDTDVDRSGVVDATGAAINGDRLIALMSAIVLDEHPGTTVVTDARTSDGLTRFIQARGGHHCLYRVGYRNVIDKGVQLNADGVETHLMMETTGHGALKENNFLDDGAYMVVKIIIEMVRMRLVGLEGSVGTLIMDLEEPAESKLMRMNILGEAKYAKQRGTQAVETFRNHIQEGKLNGWVLDDCGDCSVSQGCLVDTNDDPFDVDAYMYRAKFFDEYKGELGWVHIRQSVHNPNIAINMQSSIPGGCKSMAKDLLDRYLLTSGVNEFVDITEVQKFVK

SEQ ID NO: 2455 - protein, 242 aa, Oryza sativa
MVTVREEIRKGPWTEQEDLQLVCTVRLFGERRWDFIAKVSGLNRTGKSCRLRWVNYLHPGLKRGRMSPHEERLILELHARWGNRWSRIARRLPGRTDNEIKNYWRTHMRKKAQERKSNMSPSSSSSSLTYQSCHPETPSMIIGIEEQELHGGSGCITSIMKSTPVDMDGYPMDQIWMEIEAPNVLPGPCFDEAKDSASNSLSGPLLPYPMWDYYCPETCLRMDDEIKVAPQFGYGKGVGPCY

SEQ ID NO: 2456 - protein, 350 aa, Oryza sativa
MSQEGADLSQDVDESPYHTAVVTTNNLVRSIKAEKSNSSSSSGKPVETDIGLKVASPTMFGFNTKIEGTGKNMAVKREEGEGGGRPGVSSGVSTRDTNGKGKNAMDMEHALHIWTERERRKKMKNMFSTLHGLLPKIPGKVANAIEKFYISLIYQDLTDKASIVGEAIGYIKTLEDVVQKLETIKTERVRAHQWAAAAAAAVAANGGGEGSSHSHSQPPRHATAVTVAVAEPAPVAAAVNAQAPQKKAAAAAAPTLQTWSAPNITLTMAGVDAFINMCLPRQRASFTTVAFVLEKHQIDVVTSTISADHDKSLFSVHVRLNEASLQSTEGLTPEAKYKLAVSELMVRLAE

SEQ ID NO: 2457 - protein, 428 aa, Oryza sativa
MAQAVVPAMQCQVGAVRARPAAAAAAAGGRVWGVRRTGRGTSGFRVMAVSTETTGVVTRMEQLLNMDTTPFTDKIIAEYIWVGGTGIDLRSKSRTISKPVEDPSELPKWNYDGSSTGQAPGEDSEVILYPQAIFKDPFRGGNNILVMCDTYTPAGEPIPTNKRNRAAQVFSDPKVVSQVPWFGIEQEYTLLQRDVNWPLGWPVGGYPGPQGPYYCAVGSDKSFGRDISDAHYKACLYAGINISGTNGEVMPGQWEYQVGPSVGIEAGDHIWISRYILERITEQAGVVLTLDPKPIQGDWNGAGCHTNYSTKSMREDGGFEVIKKAILNLSLRHDLHISAYGEGNERRLTGLHETASIDNFSWGVANRGCSIRVGRDTEAKGKGYLEDRRPASNMDPYVVTALLAETTILWEPTLEAEVLAAKKLALKV

SEQ ID NO: 2458 - protein, 418 aa, Oryza sativa
  misc_feature (123)..(123): Xaa can be any naturally occurring amino acid
  unsure (1)..(418): unsure at all Xaa locations
MATQRLSNVLSHITPGKSPLEQITSQNPDDVVITLAIRTPLTKAKKGGFKDTPLDGLVFKILEQVVRKSNLDPQLVEDVCLGNVSDAKAAYYVRAACLAAGFPTTTAASSVNRFCSSGLKAVXDIAAQIQSGAIEVGLAVGAEHMTAGGDRLTRPFVDEIVNANQNAADCLQPMGQTSENVGADFNITREQQDRYAAESYRRAEAAQKAGWFEDEITPITVKVKDPKTGEGKDITLTKDEGPRWGTTFEGLNKIRPAFPDFGDKSTGGNSSQVTDGAAAVLLMKRSKALELGQPIVAKFVGATVAGLAPRIMGIGPSVAVPKLLTKYNLTIDDIDLVELNEAFASMAVYCKDALKIDHAKLNVRGGAIALGHPLGCTGARQIVTGLSECRRRKAKVLLTTMCIGTGMGMAGLFVNEQL

SEQ ID NO: 2459 - protein, 152 aa, Oryza sativa
  misc_feature (41)..(41): Xaa can be any naturally occurring amino acid
  misc_feature (128)..(128): Xaa can be any naturally occurring amino acid
  unsure (1)..(152): unsure at all Xaa locations
ARGADDEDNGGGGARKKLRLSKEQSSFLEDSFKEHSTLTPXKLKQTEVDCEHLKRCCERLTRENRRLQREVAELRGTLRTTTSSYPPLYGLHHLPAAAGTVFRVCPSCEHSKVVAAAASESFSPRVFXGAGAPAAITAAAAVPSPGAGSPPS

SEQ ID NO: 2460 - protein, 358 aa, Oryza sativa
MSQRRVAGPMGVMSKQQQEAMAEEMMELRRGPWTLEEDNLLMNYIACHGEGRWNLLARCSGLKRTGKSCRLRWLNYLKPDIKRGNLTPEEQLLILELHSRWGNRWSRIAQHLPGRTDNEIKNYWRTRVQKQARQLKVDANSTVFRDAVRCYWMPRLLEKMAGAATDPTPPPPPPLHHHAAMATASSSPFDFDTHLQQAEAATACVVPNNVYHHHIDPSPSTSTSAGSTAAAAAFQPLPCFSELRWDQQMQSSGELDDGAAGVFVDSASALGSLSLDGLDLGPAEYYSDSTLLDYLNSSCTGSAMMTMMTASGNAGSYNYCGGAMDGGDTWRSDELMDELFHHIDQDRSTSDRSSKNQK

SEQ ID NO: 2461 - protein, 384 aa, Oryza sativa
MAAVREVGSKAELEAAAGGARAAAVHFWAAWCEASKQMDEVFAHLAVDFSHAVFLRVEAEEQPEISEAYGVTAVPYFVFLKEGKTVDTLEGANPASLANKVAKLAGPASVAESAVPASLGVAAGPAVLEKVQEMAQQNGASATSSAEDALNKRLEQLVNSHPVFLFMKGTPEQPRCGFSRKVVDVLKQEGVEFGSFDILTDNDVREGMKKFSNWPTFPQLYCKGELLGGCDIVIAMHESGELKDVFKEHNIPLQPQGSKNEEAVKAKPDTEKSGAVSEPALLTAAQKERLESLVNFSTVMAFIKGTPEEPKCGFSGKLVHILKQEKIPFSSFDILTDDEVRQGLKLLSNWPSYPQLYINGELIGGCDIVLELEKSGELKSTLSE

SEQ ID NO: 2462 - protein, 109 aa, Oryza sativa
MSGVWVFKNGVVRLVEKQQATAGTAVAGGRRKALVHTPSGQVVSSYAALEARLTALGWERYYEDPSLFQFHKRGSLDLISLPADFSAFSSVHMYDIVVKNRDSFRVVDA

SEQ ID NO: 2463 - protein, 478 aa, Oryza sativa
NFSNTTILPSWPKFGKIYSSYNLNIPFLCFELHLHKLHFSFSHSVFLAAASNSSALGVVHRHGPCSPVQARPRGGGGAVTHAEILERDQARVDSIHRKVAGAGGAPSVVDPARASEQGVSLPAQRGISLGTGNYVVSVGLGTPAKQYAVIFDTGSDLSWVQCKPCADCYEQQDPLFDPSLSSTYAAVACGAPECQELDASGCSSDSRCRYEVQYGDQSQTDGNLVRDTLTLSASDTLPGFVFGCGDQNAGLFGQVDGLFGLGREKVSLPSQGAPSYGPGFTYCLPSSSSGRGYLSLGGAPPANAQFTALADGATPSFYYIDLVGIKVGGRAIRIPATAFAAAGGTVIDSGTVITRLPPRAYAPLRAAFARSMAQYKKAPALSILDTCYDFTGHRTAQIPTVELAFAGGATVSLDFTGVLYVSKVSQACLAFAPNADDSSIAILGNTQQKTFAVAYDVANQRIGFGAKGCRPSMARHGD

SEQ ID NO: 2464 - protein, 374 aa, Oryza sativa
MGGGTNGNGGGAASAMDVYLPRTQGDVDDDGKERRTGTVWTATAHIITAVIGSGVLSLAWAMAQLGWVAGPITLLLFAAITFYTCGLLSDCYRVGDPATGKRNYTYTDAVKSYLGGWHVWFCGFCQYVNMFGTGIGYTITASISAAAINKSNCYHWRGHGTDCSQNTSAYIIGFGVLQALFCQLPNFHQLWWLSIIAAVMSFSYAAIAVGLSLAQTIMDPLGRTTLTGTVVGVDVDATQKVWLTFQALGNVAFAYSYAIILIEIQDTLRSPPPENATMRRATAAGISTTTGFYLLCGCLGYSAFGNAAPGNILTGFGFYEPYWLVDVANACIVVHLVGGFQVFCQPPAPPPSRASSTRSRPTCPSRPGPDSTSP

SEQ ID NO: 2465 - protein, 580 aa, Oryza sativa
  misc_feature (51)..(51): Xaa can be any naturally occurring amino acid
  misc_feature (212)..(212): Xaa can be any naturally occurring amino acid
  misc_feature (227)..(227): Xaa can be any naturally occurring amino acid
  unsure (1)..(580): unsure at all Xaa locations
MAAKPSSSSSSTGGHHTVDIRAAQAQPEDARQSAMSGPINIRGERRPPPMXRAFSRQVSLGSGVTVLGMDKVGKNGGRGQQRALPRSGKSLGVLNHTGALGQAAAGDGAARRGDFSMFRTKSTLSKQNSLLPSRIREPDLELPPHVEGPSVGRQGGEDPLNKSVPAGRYFAALRGPELDEVRDYEDILLPKDEVWPFLLRFPVGCFGVCLGXLAARPILWGALAASXPAMRFLHVTPMINVALWLLALAVLVAVSVTYALKCVFYFEAIRREYFHPVRVNFFFAPSIAAMFLTIGLPRAVAPERLHPAVWCAFVAPLFGLELKIYGQWLSGGKRRLCKVANPSSHLSVVGNFVGAILAARVGWAEAGKFLWAIGVAHYIVVFVTLYQRLPTNEALPKELHPVYSMFIATPSAASLAWAAIYGSFDAVARTFFFMALFLYMSLVVRINFFRGFRFSIAWWSYTFPMTTASLATVKYAEAEPCFTSRALALSLSLMSTTMVSLLLVSTLLHAFVWRSLFPNDLAIAITKDRQNGAFKPHGKGRKAGKRVYDIKRWAKQAPLSLVSSITKSNSADKEEEEKTE

SEQ ID NO: 2466 - protein, 413 aa, Oryza sativa
MEEQQQVEVEVEVPSYFVCPISLQIMRDPVTLPTGITYDRDGIERWLLTAGTCPLTKQPVPPDCDPTPNHTLRRLIQSWCALHADHGVDLVPTPKPPADRARVADLVSRLRAATSSAALLDALRELRDVAAESERNRKLLAAVPGAVDVLAAVVVASCRDAKAACDEALEIVCSLELSERCLARLVERNEELVDALVATLQRTNTTSRAHAALLLEAVTAVMPSNRLVSLPEEVFGEAVQLLRDRVSSPATRAALHVLVGTTSWGRNRVKAVDAGAVAVLVDMLLDGPVERRGCELALAALDRMCGCAEGRAALVSHGAGVAVVGRKVLRVSEVASEKAVRVLRSVARHAATAAVVQEMGQTGAVEKLCVVAQSEQCGERTRERARETLRLHARAWRNSPCLQPHLQALYPSC

SEQ ID NO: 2467 - protein, 265 aa, Oryza sativa
MVPRDRVNAAAAGGGGEGRLVQSGIVNKKCDKKAPKRIHKSEREKLKRDKQNDLFNELGNLLEPDRQNNGKACVLGETTRILKDLLSQVESLRKENSSLKNESHYVALERNELHDDNSMLRTEILELQNELRTRMEGNPVWSHVNTRPALRVPYPTTGVFPVQHLPHLPVTTTAAFPQQLPVIIEQHYAATPRELQLFPESATSEDSEPSQEHGISDHVTRPQPRYPTPTATLPVNLFPVFPGRQDQQCSSGTSGTNEEDRIGRS

SEQ ID NO: 2468 - protein, 512 aa, Oryza sativa
MSSEVTSVPPTPTPPPVSTPPSQIQSPAAPASSRASPLRGMGTPNIASPVRKAVASVSGYLGEVGQMTRLADPRDAWLPITESRSGNAYYAAFHSLSSGIGFQALVLPVAFSLLGWTWAIICLTVAFAWQLYTLWLLVKLHEPVAGGTRYSRYMYLATTVFGEKWGKILALLPVMYLSAGTCTALVIVGGGSMKLLFNIACGEVCLARPLTTVEWYLVFVCVAALLSQLPNLNSIAGVSLVGATAAVAYCTMIWVVSVAKGRVAGVSYDPVRTTDEEDGAIGILNGLGIIAFAFRGHNLVLEIQATMPSTLKHPSHVPMWKGVKAAYVIIALCLYPVAVGGFWAYGDQIPPNGILSALYKFHSQDVSRVVLGTATLLVIVNCLTTYQIYAMPVFDNMETGYVHKKNRPCPWWMRAGFRALFGAINLLIAVALPFLSELAGLLGGISLPVTLAYPCFMWVAIMRPAKGTAMWYTNWGLGSLGMGLSFVLIVGNLWGLVEKGLHVKFFKPADFQ

SEQ ID NO: 2469 - protein, 321 aa, Oryza sativa
MASRTWHCLLLLVFFLLSDDASGQLSTSYYADSCPSVEEVVHATVASAIQAERRMGASLIRLFFHDCFVQGCDASILLDDVPATGFVGEKTAAPNNNSVRGYEVIDQIKAKVEDVCPGVVSCADIVALAARDSTALLGGPSWAVPLGRCDSRTASRSEANSDLPGPGSDLTTLIARFRSKGLSPRDMTALSGSHTVGFSQCTNFRAHIYNDANIDPSFAALRRRACPAAAPNGDTNLAPLDVQTQNAFDNAYYGNLLVRRGLLHSDQVLFNGGSQDALVRQYAANPALFAADFAKAMVKMGNIGQPSDGEVRCDCRVVNDS

SEQ ID NO: 2470 - protein, 162 aa, Oryza sativa
MSASDDEQHNATFESADAGSSLTFPMQCSALRKNGHVVIKGRPCKIIDMSTSKTGKHGHAKVHLVATDIFTSKKYEDISPSTHNMDVPNVSRNEFQLVNIDDGYLNLMTNDGDTKDDVRVPDGELGEQIQAAFDDGKDLMVTIVSAMGEEHCLSFKDAPQGK

SEQ ID NO: 2471 - protein, 239 aa, Oryza sativa
MLPPHLTENGTVMIQFGHKMPDYESSATQSTSGSPREVSGMSEGSLNEQNDQSGNLDGYTKSDEGKMMSALSLGKSETVYAHSEPDRSQPFGISYPYADSFYGGAVATYGTHAIMHPQIVGVMSSSRVPLPIEPATEEPIYVNAKQYHAILRRRQLRAKLEAENKLVKNRKPYLHESRHQHAMKRARGTGGRFLNTKQQPEASDGGTPRLVSANGVVFSKHEHSLSSSDLHHRRAKEGA

SEQ ID NO: 2472 - protein, 1120 aa, Oryza sativa
GEVRRGKNRTHPQYTLDARLHAVFEQSGASGRSFDYTQSLRASPTPSSEQQIAAYLSRIQRGGHIQPFGCTLAVADDSSFRLLAYSENTADLLDLSPHHSVPSLDSSAVPPPVSLGADARLLFAPSSAVLLERAFAAREISLLNPLWIHSRVSSKPFYAILHRIDVGVVIDLEPARTEDPALSIAGAVQSQKLAVRAISRLQALPGGDVKLLCDTVVEYVRELTGYDRVMVYRFHEDEHGEVVAESRRNNLEPYIGLHYPATDIPQASRFLFRQNRVRMIADCHAAPVRVIQDPALTQPLCLVGSTLRSPHGCHAQYMANMGSIASLVMAVIISSGGDDDHNISRGSIPSAMKLWGLVVCHHTSPRCIPFPLRYACEFLMQAFGLQLNMELQLAHQLSEKHILRTQTLLCDMLLRDSPTGIVTQSPSIMDLVKCDGAALYYHGKYYPLGVTPTEVQIKDIIEWLTMCHGDSTGLSTDSLADAGYPGAAALGDAVSGMAVAYITPSDYLFWFRSHTAKEIKWGGAKHHPEDKDDGQRMHPRSSFKAFLEVVKSRSLPWENAEMDAIHSLQLILRDSFRDSAEGTSNSKAIVNGQVQLGELELRGIDELSSVAREMVRLIETATVPIFAVDTDGCINGWNAKVAELTGLSVEEAMGKSLVNDLIFKESEETVNKLLSRALRGDEDKNVEIKLKTFGPEQSKGPIFVIVNACSSRDYTKNIVGVCFVGQDVTGQKVVMDKFINIQGDYKAIVHNPNPLIPPIFASDENTCCSEWNTAMEKLTGWSRGEVVGKLLVGEVFGNCCRLKGPDALTKFMIVLHNAIGGQDCEKFPFSFFDKNGKYVQALLTANTRSRMDGEAIGAFCFLQIASPELQQAFEIQRHHEKKCYARMKELAYIYQEIKNPLNGIRFTNSLLEMTDLKDDQRQFLETSTACEKQMSKIVKDASLQSIEDGSLVLEKGEFSLGSVMNAVVSQVMIQLRERDLQLIRDIPDEIKEASAYGDQYRIQQVLCDFLLSMVRFAPAENGWVEIQVRPNIKQNSDGTDTMLFLFRFACPGEGLPPEIVQDMFSNSRWTTQEGIGLSICRKILKLMGGEVQYIRESERSFFHIVLELPQPQQAASRGTS

SEQ ID NO: 2473 - protein, 269 aa, Oryza sativa
TKPASSSSSSSSPNSVCFARAEAVDATISPTVSALRPSKTMAITDQATALRQAGVPVIGLAAGEPDFDTPHVIAEAGMNAIKDGYTRYTPNAGTLELRKAICNKLQEENGISYSPDQVLVSNGAKQCITQAVLAVCSPGDEVLIPAPYWVSYPEMATLAGATPVILPTSISENFLLRPELLASKINEKSRLLILCSPSNPTGSVYPKELLEEIADIVKKYPRLLVLSDEIYEHIIYQPAKHTSFASLPGMWDRTLTVNGFSKAFAMTGW

SEQ ID NO: 2474 - protein, 899 aa, Oryza sativa
MPTNPMWANLSTTSNIQEESTMFGVPSAILQKAVTVAGNGTMLNIMSEDRSFFEFMVFLHLADFQDNKIRQFNVYFNSDNPLPYIPQYLAADYVYSRNWYSSTDGKFNITLAATAKSLLPPMLNALEIYTLVAHSTPTTFSKDFDAIMAIKFEYGIKKNWMGDPCSPSRFAWDGVICRNTSDNIPRIISLDLSNSNLHGVISNNFTLLTALENLNLTGNQLNGTIPDSLCKLNAGSFIFSYNSDQDLCKKTSPSSSRSRATILAISIAAPVMVVAILGLSYLIWRVKRKSNIFAYNPPRVPEPTNASRNEKYHWDHLQENENRQFTYKELEKITDNFQLIIGEGGFGRVYHGRLEDNTEVAVKMLSGTSSSGFNGFLAEVQSLTKVHHKNLVSLVGYCSEKAHLALVYEYMSRGNLFDHLRGKSGVGENLNWAMRVRVLLDAAQGLDYLHKGCNKSIIHRDVKTSNILLGQNLRAKIADFGLSRTYISDSQSHMSATVAGSMGYIDPEYYQTGWITENNDVYSFGVVLLEVVTGELPILQGHGHIIQRVKQKVDSGDISSIADQRLGDDYDVNSMWKVVEIALLCTEPVAARRPSMAAVVAQLKESLTLEEARQERGLKENPTDDVVVAMVPTFDYWRSGFGNDWNFLVLEMIGFNRFGPAPNPHVAHVNANPHIPPPMHNIYNAPNHAYGGYPQDARYDQYNHIVPPQPPIPRPPNPQPRPENMDEKIRNIIREAFELKPRNRAKVYQKSYPDNFDNIPYHRTFRVPEFTKFNGENGSIGHRGRTMVLIRLEQVVSTKGKEVVVEEPRPKMIVPKSPEVGVWKENKGETSSSRTPRKPMVSFDMLLNKYEKKGVEQRHNKGRSDAPQGNDMIATEWRRYRREEQLEAAAVVATFVAGG

SEQ ID NO: 2475 - protein, 276 aa, Oryza sativa
MSSSSAAALGSDDGCSPAELRPSRYESQKRRDWQTFTQYLAAHRPPLELRRCSGAHVLEFLRYLDRFGKTRVHEPPCPSYGGRSPSAAGPVAAAAAACQCPLRQAWGSLDALVGRLRAAYDERHGRAGEPDAVAGAGAVATDSTSSSSAAAANPFAARAVRLYLRDVRDAQAMARGISYHKKKKRRGGNMNGARGGGGGGARAGVNDGDATAPPVAVTPGLPLPPLPPCLNGVPFEYCDFGSVLGGAHGAHGGHGGGGGGFYGAGVYLPFLYNTFS

SEQ ID NO: 2476 - protein, 249 aa, Oryza sativa
MIRRHVGRGVGRRVLFTGLVIPITLGLLPRSLTRKGLKGREAITAKLSANLLTEAGSDRVIVCDIHSTQALGYFDIPVDHIHGQPVILDYLASKTISKDLVVVSPDVGGVVRARAFAKKLSDAPLAIVDKRRQGHNMSEVMHLIGDVKGKVAIMVDDMIDTAGTITSAAALLKQEGAEAVYACSTHAVFSPPAIERLSGGIFEEVIVTNSILLPEHKCFPQLTVLSMANLVAETIWHVHRDGSVSSIFQ

SEQ ID NO: 2477 - protein, 129 aa, Oryza sativa
PTGLVSSTVFNGELVGGSDPVRGMHQSGGVYKVFSDKGVFAKESLQGPLKALISSAPLMLFLKGPPIAPPFGFGSKVGNALKQPGVSFGAFGLLSRVGVWQGLKAFSNWAPFPQLFSNSKLVGGFGIVF

SEQ ID NO: 2478 - protein, 262 aa, Oryza sativa
RSVGIRVDHAFVHVTDLTIPPSMEAPGADIQALIQRLRLHRPRPSPYAAAAAPSPDAAAPPAELLFRPRRAAVLICLFRGAAGELRVLLTKRSSKLSSHSGEVSLPGGKAEEGDADDAATALREAKEEIGLDPASVTVVASLEHFLSKHLLVVVPVVGILSDIQAFKPVLNVDEVDSIFDVPLEMFLKDEKRTSEEREWMGQEFTIHYFNYEKGSEKYVIWGLTAGILIHAASVVFQRPPDFPARTVQFNLPKYSKECSSMP

SEQ ID NO: 2479 - protein, 410 aa, Oryza sativa
MAICSTDNELVELLWHNGGVVAQPQAAQARVVSSSGRGQSASVLTGDDTETAAWFPDTLDDALEKDLYTQLWRSVTGDAFPAAAAAGPSSHHAPPPDLPPPAARPPMRSGIGSSWTGDICSAFCGSNHIPETAAQRCRDAGAALPPERPRRSSTHDGAGTSSSGGSGSNFGASGLPSESASAHKRKGREDSDSRSEDAECEATEETKSSSRRYGSKRRTRAAEVHNLSERRRRDRINEKMRALQELIPHCNKTDKASILDEAIEYLKSLQMQVQIMWMTTGMAPMMFPGAHQFMPPMAVGMNSACMPAAQGLSHMSRLPYMNHSMPNHIPLNSSPAMNPMNVANQMQNIQLREASNPFLHPDGWQTVPPQVSGPYASGPQVAQQNQIPKASASTVLPNSGAEQPPTSDGI

SEQ ID NO: 2480 - protein, 205 aa, Oryza sativa
  misc_feature (107)..(107): Xaa can be any naturally occurring amino acid
  unsure (1)..(205): unsure at all Xaa locations
MSAAVAASSGAPAADVEKGAAAADANVDGGGAPAAAAASGEGVVSAVVRRWRRQDLLEKSGSALRVAAWAFSLLAFVVMGANDHGDWRQFEHYEEYRYVVAIGVLAXFIYTTLQLVRHGVRLTGGQDLQGKVAVLVDFAGDQVTAYLLMSAVSAAIPITNRMREGADNVFTDSSAASISMAFFAFLCLALSALVSGFKLAKQTYI

SEQ ID NO: 2481 - protein, 212 aa, Oryza sativa
  misc_feature (174)..(174): Xaa can be any naturally occurring amino acid
  unsure (1)..(212): unsure at all Xaa locations
MELAPFAAASSSSSSSTVTNTCKLRLRLSYTHCSIGFAPRVRRWIRAAAEGRGGDQRRSGRLAADGPRVVEVAAPPAAPVVTGGGGGGGGFAARDAELAMWERLGAVVRLSYGIGIYAAMALTGRFICQMAGIDCTGGFHPSLSALVEGLGYAAPPIMALLFILDDEVRQYSPXHGRAIRDVEDYELRSIFNGCTMGVHLMGRVAKWEGDQW

SEQ ID NO: 2482 - protein, 484 aa, Oryza sativa
MASVDLELGRPLSAAAAAYPPPLRRSINDDDVDDDGKPKRTGTEWTASAHIVTAVVGSGVLSLAWSTAQLGWVAGPATLVVFAVITYYTSVLLADCYRAGGDQVSGKRNYTYMDAVESYLGGRQVWFCGLCQYVNLVGTAIGYTITASISAAAVYKSNCFHKNGHSADCSVFTTSYMVVFGVVQVFFSQLQSLHEVAWLSVLAAVMSFSYSAIAVGLSLAQTISGPTGMTTMSGTVIGIDVDLSHKIWQALQALGNIAFAYSYSLVLIEIQDTIRSPPAESKTMRKANALAMPVITAFYTLCGCLGYAAFGNAAPGNMLTGFGFYDPYWLVGLANACIVVHLVGAYQVMSQPVFTAVESWASSRWPRCGFFVTGGGGTRLISVNAFRLAWRTAYVVACTAVAAVVPFFNDVLGLLGAVGFWPLTVYFPVEMYIRRRKLERSSKRWVALQSLNAVCFVVTLASAVASVQGIAESMAHYVPFKSKL

SEQ ID NO: 2483 - protein, 176 aa, Oryza sativa
MPAPEGWTKKFTPQRGGRFEIVFVSPTGEEIKNKRQLSQYLKAHPGGPASSEFDWGTGDTPRRSARISEKVKAFDSPEGEKIPKRSRNSSGRKGKQEKKEATENEEAKDAEADKEAPSEDAPKETDVETKPAEEAKEAPSEDAPKDTDVEMKTAEDASKTADAAPAKESSPVNNGQ

SEQ ID NO: 2484 - protein, 538 aa, Oryza sativa
MSGNPSFSQLGAVDAAMNGGYFMAASGNGADVPLFHPAMAPPHDHGGSFGYGDAAAAAMDVGAHFAAANNLVLASLATQLFGAAPAAAAHGHGDYLGATTPPEEEMGGGYDVAVGDSSGGAVSLACLGHGQPGDMAAGWCSTSARKPSCNWSSSNAGVHGGSYYLAGVPEAAGFVSAAAASELSLSLCSKSSSDSMLNAGGDQCSSAASRSGLTQMSRVVVVEPEPPLVPYYPAANFAVVVARSRYAAVAQQVLNDAVGCVLGGVADAAADSASGVDSGSSRPSSCSVAGGAPSSAIRHEDQLIASSGEHTHGGGDASAQWLRSELLTMLQLMDQKYNQCLDEIQSTTARFNTLTHATARAAGMSSSSICAPFAHRAVSAMYHGLRRRIAGEIMSAAAAAGRPCRGGESSSAVTGGERERSWESAFIQKHWAVQQLRRGEQQCWRPQRGLPEKSVAVLKAWMFENFLRPYPKDSEKEMLAARSGLSRNQVSNWFINARVRLWKPMIEEMCEELKRSSGGGAGNQALAMEHMNSQDVVS

SEQ ID NO: 2485 - protein, 114 aa, Oryza sativa
  misc_feature (44)..(44): Xaa can be any naturally occurring amino acid
  unsure (1)..(114): unsure at all Xaa locations
FRNHIQEGKLNGWVLDDCGDCSVSQGCLVDTNDDPFDVDAYMYXAPAKFFDEYKGELGWVHIRQSVHNPNIAINMQSSIPGGCKSMAKDLLDRYLLTSGVNEFVDITEVQKFVK

SEQ ID NO: 2486 - protein, 1084 aa, Oryza sativa
  misc_feature (474)..(474): Xaa can be any naturally occurring amino acid
  unsure (1)..(1084): unsure at all Xaa locations
MWPCSRPSGSPASRLGLRFPSILNNAARCASGRSFYTTSRCLQGASQSSPSSIEQEPIELTPYGDLTIGVPTEVRSGERRVAMTPQNAALLLKKGFKQVLIEHGAGFAAQFPAHAYEEAGATLVNASRVWYDSNIILKVRPPRISTRGLIGVNNYIEGFREGGVLISTLQPSLDKNKPVVDSMLQKGITSFAMDMIPRITRAQTFDVLSSMANIAGYKAVLEASNHFGRYLTGQTTAAGKIPPCKALVIGAGVAGLSAIATARRMGAIVRGFDTRSAAREQVQSLGAEFIEVDIQEDGSGGGGYAKVMSKEFIEAEMKLFMEQCKEVDMVITTALIPGRPAPTLITEEMVDAMKPGSVIVDLAAEAGGNCETTVPGQLIVHKGVTVIGYTDLPSRLPTQASTLYSNNITKFLLSMSPKEGHFGIDMNDEVVRRSIATYKKQMVPILPPVAPPPPPAAKTAEIVKEEVKAVTPWXKAVREVTTVTGGMGAVLALGKFTGPLFMSNFFTFSLASLIGYRVVWGVSPALHSPLMSVTNAISGVVGIGGFFIMGGGYLPQTIPQLLGAASVLMAFVNVTGGFVISKRMLDMFRRPTDPPEYQWLYAVPAALTGAGFIAAASTGMGGIVQAGYLVSSVLCIGSLTGLASQVTARAGNMLGMLGVGTGVAASLLAVGFSPETLVQCLGVAGIGSLIGALIGRRITPTDLPQTVAALHSVVGLAAVLTSIGSVMAAVDHLDSLHMITAYLGTLIGGVTFTGSIVAFMKLAGKMSSRPTILPGRHLVNTGLLGANVATMGAFLALAPGAPAIAATCLAANAALSFAKGFATTAAIGGADMPVVITVLNAYSGFALVAGGFMLNSPILTSVGALIGTSGSILSYIMCVAMNRSLTNVLFGGIAPPPSNKEAKKIEGEITKTTIEETVDSLKNAQKVVIVVGYGMAVAKAQYPIAEFVAGLRKQGVEVKFAIHPVAGRMPGQCNVLLAEASVPYEIVLEMDEINEEGFDDVDLTVVIGANDTVNPIALEPDSPIAGMPIIDAYKSKQVIVMKRGMGSGYADIPNPMFYAPNTKMLFGDAKASCDAIKAALDASK

SEQ ID NO: 2487 - protein, 265 aa, Oryza sativa
  misc_feature (121)..(121): Xaa can be any naturally occurring amino acid
  unsure (1)..(265): unsure at all Xaa locations
MESRPGGTNLVEPRGQGALPSGIPIQQPWWTTSAGVGAVSPAVVAPGSGAGISLSGRDGGGDDAAEESSDDSRRSGETKDGSTGQEKHHATSQMTALASDYLTPFSQLELNQPIASAAYQXYPDSYYMGMVGPYGPQAMSAQTHFQLPGLTHSRMPLPLEISEEPVYVNAKQYHGILRRRQSRAKAELEKKVVKSRKPYLHESRHQHAMRRARGTGGRFPDPRKMGIVPFPFWSGCRCSARFYLCNSCLVWEQIVLELKKETNSD

SEQ ID NO: 2488 - protein, 141 aa, Oryza sativa
  misc_feature (113)..(113): Xaa can be any naturally occurring amino acid
  unsure (1)..(141): unsure at all Xaa locations
ALDAYTPLGFELYSNETLQIFHPHLLVHLLQKAKAKLSMLKSKVICCKLYISESQNAKVVDAITRIGQKDPEVVLLSKFEDDHYNRVRYTLASYIINENSTGEVKFSPMRRVXLEMIEKAFSTINLETHTGTHPRIGVIDD

SEQ ID NO: 2489 - protein, 305 aa, Oryza sativa
MKRPSCRGSSMAIIHDTSDQQEDNMRSYMDGGGAAAYEEEEEEVEDDDGGGGGGGGGGGGGLGEKKRRLAAEQVRALERSFEADNKLDPERKARIARDLRLHPRQVAVWFQNRRARWKTKQIERDFAALRSRHDALRLECDALRRDKDALAAEIADLRDRVDGQMSVKLEAVAADEHQPPPPPPPPPLAYNSKVVDGSTDSDSSAVFNEEASPYSGAAIDHHHHQTPASYDTAGFTSFFAPSTTLTSSLSFPSMFHASSHFDGHQELLVGGGGAGAVADADLGGAGFFAGDEHAGGLSWYGAEGW

SEQ ID NO: 2490 - protein, 117 aa, Oryza sativa
GQNSCSEQDIKMALEKAKHLASSSPVFIFSKTYCGFCDRVKQLFKQLGASYQAIELDKEQDGDAIQAALHEWTGQRTVPNVFIGGKHIGGCDAVTAKHQQGQLVPLLTEAKAINSEK

SEQ ID NO: 2491 - protein, 160 aa, Oryza sativa
MSDSEEHHFESKADAGASKTYPQQAGTIRKNGYIVIKNRPCKVVEVSTSKTGKHGHAKCHFVAIDIFNGKKLEDIVPSSHNCDVPHVNRTEYQLIDISEDGFVSLLTESGNTKDDLRLPTDDSLLGQIKTGFGEGKDLVVTVMSAMGEEQICALKDIGPK

SEQ ID NO: 2492 - protein, 317 aa, Oryza sativa
RRPFWTLVLKILFLFFCFVLQEIASYLGVDLGTVLIKRFADGEIYVQLQESVRGCDVFLVQPTCSPVNENLMELFVMIDACRRASARSITVVIPYFGYARADRKAQGREAITAKLSANLLTEAGSDRVIVCDIHSTQALGYFDIPVDHIHGQPVILDYLASKTISKDLVVVSPDVGGVVRARAFAKKLSDAPLAIVDKRRQGHNMSEVMHLIGDVKGKVAIMVDDMIDTAGTITSAAALLKQEGAEAVYACSTHAVFSPPAIERLSGGIFEEVIVTNSILLPEHKCFPQLTVLSMANLVAETIWHVHRDGSVSSIFQ

SEQ ID NO: 2493 - protein, 169 aa, Oryza sativa
MAANGSNVVSRGAVRFTEEQEALVLKSWAIMKNDSAHIGHRFFLKIFEVAPSARQLFSFLRNSDVPLEKNPKLKIHAMAVFVMTCEAAAQLRKTGRVTVRDTTIKRLGSTHFKNGVSDAHFEVAKFALLETIKEAVPASMWSPAMKGAWGEAYDHLVAAIKQGMKPAAA

SEQ ID NO: 2494 - protein, 1128 aa, Oryza sativa
MSSSRPTQCSSSSSRTRQSSRARILAQTTLDAELNAEYEEYGDSFDYSKLVEAQRTTGPEQQARSEKVIAYLHHIQRAKLIQPFGCLLALDEKTFNVIALSENAPEMLTTVSHAVPSVDDPPKLRIGTNVRSLFTDPGTTALQKALGFADVSLLNPILVQCKTSGKPFYAIVHRATGCLVVDFEPVKPTEFPATAAGALQSYKLAAKAISKIQSLPGGSMEVLCNTVVKELFDLTGYDRVMAYKFHEDDHGEVFAEITKPGLEPYLGLHYPATDIPQAARFLFMKNKVRMICDCRARSIKIIEDESLHLDISLCGSTLRAPHSCHLQYMENMNSIASLVMAVVVNENEDDDEVGADQPAQQQKRKKLWGLLVCHHESPRYVPFPLRYACEFLAQVFAVHVNKEFELERQVREKSILRMQTMLSDMLLRESSPLSIVSGTPNIMDLVKCDGAALLYGGKVWRLQNAPTESQIRDIAFWLSDVHRDSTGLSTDSLHDAGYPGAAALGDMICGMAVAKINSKDILFWFRSHTAAEIRWGGAKHDPSDKDDSRRMHPRLSFKAFLEVVKMKSLPWNDYEMDAIHSLQLILRGTLNDDIKPTRAASLDNQVGDLKLDGLAELQAVTSEMVRLMETATVPILAVDSNGLVNGWNQKVAELTGLRVDEAIGRHILTVVEESSVPVVQRMLYLALQGKEEKEVKFEVKTHGSKRDDGPVILVVNACASRDLHDHVVGVCFVAQDMTVHKLVMDKFTRVEGDYKAIIHNPSPLIPPIFGADEFGWCSEWNAAMTKLTGWHRDEVINKMLLGEVFDSTNASCLVKNKDAFVSLCILINSALAGDETEKAPFSFFDRNGKYIECLLSVNRKVNADGVITGVFCFIQVPSHELQHALHVQQASQQNALTKLKAYSYMRHAINNPLSGMLYSRKALKNTGLNEEQMKEVNVADSCHRQLNKILSDLDQDSVMNKSSCLDLEMVEFVLQDVFVAAVSQVLITCQGKGIRVSCNLPERYMKQTVYGDGVRLQQILSDFLFVSVKFSPVGGSVEISCSLTKNSIGENLHLIDLELRIKHQGKGVPADLLSQMYEDDNKEQSDEGMSLAVSRNLLRLMNGDVRHMREAGMSTFILSVELASAPAK

SEQ ID NO: 2495 - protein, 256 aa, Oryza sativa
MERQGLDLGLSLGLGLTTAATWPAAGFCLNSGMAEQEVIRRDDVVAATAAEDERFACSPGSPVSSGSGKRGSGSGSGDEVDDAGCDVGGGGARKKLRLSKDQAAVLEECFKTHHTLTPKQKVALAKSLNLRPRQVEVWFQNRRARTKLKQTEVDCEHLKRWCDQLADDNRRLHKELAELRALKATPTPPAAAPPLTTLTMCLSCKRVANAGVPSPAAAIFPGHPQFLCGFRDHAGAASSSYGGASSGLAKAVRAAR

SEQ ID NO: 2496 - protein, 871 aa, Oryza sativa
  misc_feature (471)..(471): Xaa can be any naturally occurring amino acid
  misc_feature (821)..(821): Xaa can be any naturally occurring amino acid
  unsure (1)..(871): unsure at all Xaa locations
MAPLCTSEEVNLLVYHYLKESGFHHASFSLRHESRLDDTPLSKEAIVEPGQLVRFLQKGLLYASVEAHVADDGSEKPCSAAFHLIGPPHVCDGNPRPTPPPAPATRLSPEPDPFAALQPRSDHKEAATQTPAPAATANGVHLAKASTTSSIRSADDSDRSSRVASSSKKKIEDVAEEDNASSALKPKDVKRKASASVSSEADREDKRLRTSEASAKQDSDALRVDGEHASSHKDRRNGDASSRSASPVAEKKAAVQEQRSKDREASSGKKKKGGKSAAGENGEGSKKRTDKEGSSRSKDPKAPIPRPKGDNFVEDAQITTLSGHTGEVFISAWNPTVPNMLASGGGDATVRIWEVPEQAGESPEAPTICKHLPATQSKDISTLDWNPDGTLLASGSYDGIVRLWTPQGDLHLVMSMHQGPVISVRWNRKGNMLLTGSADGTIIVWDLNSGKPRHTFPLHSDSVLDVEWLSXADGSLKPKTSSDVPPPMPHGLSPSVADTYFASCSADNSITLCKLGEPKPVKTFKGHTDEVNAIRFDPSQTLLASVSDDMTAKIWALDIGTNAGGAASTVSSGGDNLRKRASQRRGGSAHLDGMDVDEEPTPRPNEDGSGDRDREKDRATPGTASGNAASGAAPAASNKEASSPAPGSNGHAGSAANHTTSSALIATTAKGPNKGLRLTLSGHTKELYALAWCPTGPGSANPDQPRMLATSSFDWTARLWNADTGECLRVIDAHEDNVYTLRFSPCARYLATGGIDKKVVISRVDNGALVQQYVGGGAIFDIAWKDLHDTVETKQEEGEKEEGAADQPLRLAKRHQLAISXADRKLTVLNLADLDAVKSTATFKAPPPAEAKSEASTAAEKPPKKQARGGV

SEQ ID NO: 2497 - protein, 201 aa, Oryza sativa
  misc_feature (120)..(120): Xaa can be any naturally occurring amino acid
  unsure (1)..(201): unsure at all Xaa locations
MARVYVGNLDPRVTAREIEDEFRVFGVLRSVWVARKPPGFAFIDFDDRRDAEDAIRDLDGKNGWRVELSTKAGSGRGRDRSGGSDMKCYECGEPGHFARECRLRIGSGGLGSGRRRSRSXRSRSPRYRGRSRSRSPRYRRSPSYGRSPRDRSPKRRSYSRSPPPARARSYSRSPPPPRERSYSRSPAQPANREESPYANNA

SEQ ID NO: 2498 - protein, 294 aa, Oryza sativa
HVEHHVCCVAEDNMRSYMDGGGAAAYEEEEEEVEDDDGGGGGGGGGGGGGLGEKKRRLAAEQVRALERSFEADNKLDPERKARIARDLRLHPRQVAVWFQNRRARWKTKQIERDFAALRSRHDALRLECDALRRDKDALAAEIADLRDRVDGQMSVKLEAVAADEHQPPPPPPPPPLAYNSKVVDGSTDSDSSAVFNEEASPYSGAAIDHHHHQTPASYDTAGFTSFFAPSTTLTSSLSFPSMFHASSHFDGHQELLVGGGGAGAVADADLGGAGFFAGDEHAGGLSWYGAEGW

SEQ ID NO: 2499 - protein, 452 aa, Oryza sativa
  misc_feature (43)..(43): Xaa can be any naturally occurring amino acid
  unsure (1)..(452): unsure at all Xaa locations
MAAKAAALSSSPFVSSRRLSSPAASLRARTPRCVMGSEQVRVXVVEEEGKTKKRMGVAEPRSAPPAVWTPRAPAQEARLAALRTDGRDSRLKIFSGTANRPLAQEIASYLGVDLGKVLIKRFADGEIYVQLQESVRGCDVFLVQPTCSPVNENLMELFVMIDACRRASARSITVVIPYFGYARADRKAQGREAITAKLSANLLTEAGSDRVIVCDIHSTQALGYFDIPVDHIHGQPVILDYLASKTISKDLVVVSPDVGGVVRARAFAKKLSDAPLAIVDKRRQGHNMSEVMHLIGDVKGKVAIMVDDMIDTAGTITSAAALLKQEGAEAVYACSTHAVFSPPAIERLSGGIFEEVIVTNSILLPEHKCFPQLTVLSMANLVAETIWHVHRDGSSSISTSETHSLPLTKEASDALPGYNQPRGHMTLLPTTKEASDAPTYGGVVILASEAQL

SEQ ID NO: 2500 - protein, 485 aa, Oryza sativa
MASSSSLLVRGRAFALVVAVALVAAPRRINGGAAGPAARTNDPNWHVFSVSSLLPSSACTASKAASNSSALGVVHRHGPCSPVQARPRGGGGAVTHAEILERDQARVDSIHRKVAGAGGAPSVVDPARASEQGVSLPAQRGISLGTGNYVVSVGLGTPAKQYAVIFDTGSDLSWVQCKPCADCYEQQDPLFDPSLSSTYAAVACGAPECQELDASGCSSDSRCRYEVQYGDQSQTDGNLVRDTLTLSASDTLPGFVFGCGDQNAGLFGQVDGLFGLGREKVSLPSQGAPSYGPGFTYCLPSSSSGRGYLSLGGAPPANAQFTALADGATPSFYYIDLVGIKVGGRAIRIPATAFAAAGGTVIDSGTVITRLPPRAYAPLRAAFARSMAQYKKAPALSILDTCYDFTGHRTAQIPTVELAFAGGATVSLDFTGVLYVSKVSQACLAFAPNADDSSIAILGNTQQKTFAVAYDVANQRIGFGAKGCS

SEQ ID NO: 2501 - protein, 932 aa, Oryza sativa
  misc_feature (181)..(181): Xaa can be any naturally occurring amino acid
  unsure (1)..(932): unsure at all Xaa locations
MPSASAALVLLFVAFSLSNAQPGFISLDCGGDDDYTDGIGIQWTSDAKFVSAGQKANLLLQNQQLQQYTTVRSFPADNRKYCYTMNVRNRTRYLVRATFLYGNFDNSNVYPKFDLSLGPTPWTTVVIDDARTPVVQEAIILAAAPTLSVCLSNASTGQPFISTLELRQFNGSLYYTTDEKXFFLRLSARINFGAESNASVRYPDDPFDRIWESDLVRRANYLVDVAPGTERISTTKPIFVSTNEEPPQRVMQTAVVGKNGSLTYRIDLEDFPGNAWGVSYFAEIEDLAPNQTRKFKLVIPGKPGFSKPTVDVEENAQGKYRLYEPGYTNIPLPFVFSFGFKKTNDSSEGPILNAMEIYKYIEISVGSQDANIMASLVSRYPEAGWAQEGGDPCLPASWSWVQCSSEAAPRIFSISLSGKNITGSIPVELTKLSGLVELKLDGNSFTGQIPDFTGCHDLQYIHLEDNQLTGALPPSLGELPNLKELYIQNNKLSGEVPQALFKKSIIFNFSGNSDLRMGHSNTGRTIVIIVCAVVGAILILVAAIVCYLFTCKRKKKSSDETVVIAAPAKKLGSFFSEVATESAHRFALSEIEDATDKFDRRIGSGGFGIVYYGKLTDGREIAVKLLTNDSYQGIREFLNEVTLLSRIHHRNLVSFLGYSQQDGKNILVYEFMHNGTLKEHLRGGPDDVKINSWVKRLEIAEDAAKGIEYLHTGCSPTIIHRDLKSSNILLDKNMRAKVADFGLSKPVVDGSHVSSIVRGTVGYLDPEYYISQQLTEKSDMYSFGVILLELISGHEPISNDNFGLHCRNIVEWARSHMESGDIHGIIDQSLDAGYDLQSVWKIAEVATMCVKPKGVLRPSISEVLKEIQDAIAIELQRELPSSIHHLMSKTSPSEAVNTTGSLQDLEQNASFDELLMAPRSQVEVAHTDYRLF

SEQ ID NO: 2502 - protein, 692 aa, Oryza sativa
MVFQKRSSLEMESGGGSHVAEMPRVPKSARGKRSIRKKESQGQVMCAFDLLATVAGKLLDEGEGSLGNASSGTPAVDASPKDVRVKQEQCDEEAKHFKNEVMDQDSCNESALVSHIAFQRPVNHHGRKGEDPEGSHAVIEDPKAKSEALDKESSMISCTKAELGCNFAAIADRWSPESVESGAFTGDAAAIAMPATTSGFHKNAPDMYNLLDPMDVDVKPPPLVSSDSTGEMPLYGNKIRRSTSFPRVPKGGAGFTVDRDEDDDDKSSGCTHPSTATNRGFRPNCTAGHSRVKKLLACKHRKVAPARMHKGDLSYSDVDRKPSFRNKKMYYTRQRTQRSTFKRRKMFDRHSAQVSEEYAKANTKFAARDSHAVSLEANKGTNSTAFQKSQESSDCHVKLRIKSFKVPELLIEIPETATVGSLKKTVLEAVNAILGGGLRVGVLHHGKKVRDDNKTLMQAGISHDEVLDNLGFSLEPNCAPHPSQLSPPEDNEFMETVDTTEPLARIAPADSSSKHGEVDASQELALAPLSANYQGSDHDFVHSPGGMSSPDKASTNSRAIVPVTPADSNAGAIVPANKAKRSPEQGQRRIRRPFSVAEVEALVLAVEKLGTGRWRDVKLRAFDNAKHRTYVDLKDKWKTLVHTASISPQQRRGEPVPQELLDRVLAAQAYWSQQQAKLQPKTPPLAEALLLT

SEQ ID NO: 2503 - protein, 588 aa, Oryza sativa
  misc_feature (93)..(93): Xaa can be any naturally occurring amino acid
  misc_feature (132)..(132): Xaa can be any naturally occurring amino acid
  misc_feature (221)..(221): Xaa can be any naturally occurring amino acid
  misc_feature (225)..(225): Xaa can be any naturally occurring amino acid
  unsure (1)..(588): unsure at all Xaa locations
MAPTAVDSKRISDITEDGSMDRRGNPAVKAKTGNWRSSILLLVNYGLVTCAFFGVGVNLVVFLRRVLHQDNAEAANSISKWTGTVYIFSLIGXAFMSDSYWGRYITCAIFQMIYVTGLVILSLASWFLLVKXPTGCGAAGEHCDAPSSAGVALFYLSTYMIAFGNGGYQPSIATFGSDQFDETDPREARSKVAFFSYFYLALNVGSLFSNTVLVYYEDEGXWVMXFWVSGPAGGGHGDSCSSCYGTPNYRHFKPTGNPLTRIAQVFVAAFRKWRAEVPRSELLHEVDGDESQIAGIRKILHSDQIRFLDKAATVTEEDYCTPENMQDPWRLCTVTQVEEVKCILKMLPIWLCTIVYSVVYTQMASLFVEQGTTMNTNIGSFHVPAASMSVFDILSVLAFIAIYRRVLVPVMSRLSGNPQGLTELQRMGVGLVVGMAAMVVAGVVEVERLKRVGAPDQPSSLSVLWQVPQYALIGASEVFMYVGQLEFFNGQAPDGVKSFGSSLCMASISLGNYVSIMLVSVVTSLTAGDRRPGWIPGNLNSGHLDRFYFLLAALSLVDLAVYVACAVWYKGIKLDSNEEKANKITVHV

SEQ ID NO: 2504 - protein, 218 aa, Oryza sativa
MARRSGLMLLLLAAAAVASAAVPPSCERIECPSYEVVDSANGFEIRRYSDAMWASTAPIEDISFVAATRTGFLQLFNYIQGKNAYNETIEMTAPVLTQVAPSDGPFCVSSFVVSFYVPAKNQPDPPPAEGLHVQRWAGARYAAVRRFGGFVADSDVGEQAALLDASLQGTRWAAAVSDGRRADPTSSYTVAQYNSPFEFSGRVNEIWMLFDAKDASDM

SEQ ID NO: 2505 - protein, 791 aa, Oryza sativa
MASSHQEDREEEEEHSHGDDEITAPFSQQDRRHRSLAHSFFRLVAALIGSCVYAVRPSTSRGSPELEEEENSPIEQVALTVPVSDEPETPVLTFRMWVLGTASCAVLSFLNQFFWYRKEPLTITAISAQIAVVPLGRLMAAALPERAFFRGRPWEFTLNPGPFNVKEHVLITIFANSGAGTVYAIHVITAVRVFYGKHISFFVSLLVVLTTQVVDDQVLGFGWAGIFRRYLVEPAAMWWPSNLVQVSLFRALHEKEARSKGGLTRNQFFLVAFICSFAYYIFPGYLFQMLTSLSWICWVFPHSVLAQQLGSGLSGLGIGAIGLDWSTVSSYLGSPLASPWFATANVAAGFFFIMYIITPIAYWFNFYKAQNFPIFSDGLFTSTGQKYNISSIVDSHFHFDTKAYEKNGPLYLSTFFAVTYGVGFASLTATIVHVLLFHGSEIWQLSKSAFQEKRMDIHTKLMRRYKQVPEWWFVCILIANIAVTIFACEYYIEQLQLPWWGVLLACAIAFFFTLPIGIITATTNQTPGLNIITEYIMGYLYPGRPVANMCFKVYGYISMSQALTFLQDFKLGHYMKIPPRTMFMAQVVGTLIAAFVYIGTAWWLMETIPNICNTELLPSDSPWTCPGDHVFYDASVIWGLISPRRIFGDLGTYSAVNWFFLGGAIAPVLVWFAHKAFPNQNWILLINMPVLIGATGQMPPATAVNYTTWILVGFLSGYVVYRYRRDWWERHNYLLSGALDAGLAFMAVLIYLCLGLENISLNWWGNDLDGCPLASCPTAKGVVVDGCPVYT

SEQ ID NO: 2506 - protein, 314 aa, Oryza sativa
MDLEMEMMRMAMSPAMSSATAAAASEDEGDLRRGPWTVEEDMLLVDYIANHGEGRWNSLARCAGLRRTGKSCRLRWLNYLRPDVRRGNITADEQLLILDLHSRWGNRWSKIAQYLPGRTDNEIKNYWRTRVQKHAKQLRCDVNSKEFRDVVRHVWMPRLIERIQADAAAAGEVAAPAPVSAAATRSMSSPAGAMYLHHQQIPLAAGAMVVAPAVSSEAYHHHGCGGGGDTSCSEPSQAAVTMSPDDASSTLRSSSAAAENDTIHGDVLSGSWSELLATTTTTIAATAGLPDFDELGDFEDNLWSLEDIWLHQQC

SEQ ID NO: 2507 - protein, 150 aa, Oryza sativa
  misc_feature (85)..(85): Xaa can be any naturally occurring amino acid
  misc_feature (107)..(107): Xaa can be any naturally occurring amino acid
  unsure (1)..(150): unsure at all Xaa locations
SCRYGRNSGDHASGPSAVARRCLPNSTLSSLSGKRGAPSATTTAGGGSDNEDSGGGYRKKLRLSKDQAPVLDDTFKEHNTVNPKXRRRWLARQLNLKQPQVEVWFQXRRARTKLRQMEVDCELRAAPAAAAPATAAPCSPPAAGRRGREE

SEQ ID NO: 2508 - protein, 218 aa, Oryza sativa
MGEESPAAGGGAAAAAAGKPSGTALPRRGKSCKGCLYYSSMLRSRGFNPVCVGIPRSIPQVPSYVVDEPREEAAAQGHDLRQFKYACAGYSMFVVDNKDGRSGEKEGKTLLPYCQGLELLVDSRLVEKKSPNNEPATASYRKEAATSSRQQGQRPGQLTGQDFYARKASFQISPSCCCRFRKSAGLVASGVAKNLNKTAIYIKENVADILYPDRRPPK

SEQ ID NO: 2509 - protein, 921 aa, Oryza sativa
  misc_feature (23)..(23): Xaa can be any naturally occurring amino acid
  unsure (1)..(921): unsure at all Xaa locations
MKKSLQKSLRDPMVKSFDQGLPXWEAAFVVTLSLLFCIHGQLDNLGFISIDCGYITRPSYPDFKTNLTYVADVGFTNTGFIHTVDVGNLQRDLAQRYTTVRYFPNGTRNCYTLKQLTRGGKYLVRATFGYGNYDAFNSPPAFDLYLGANYWVKVNITNSSRAYVHETIAVSPSEFLQVCLVNTGSGTPFISGLDLRPMWHNVAQSLVLLSFFRETVSFGFNRFHFGTDEHHIRYPVDRYDRFWQRYEDIPGWEDVPDKINGTVKSPQNDTYGAPSDLMRSASTAVNASRMDLPWSSDASMDVGIGPEYIVVLYFAEVQAISDNLLRQFLVSVDNTPLAAAFSPRHMLADVFSGTVLGSDQHSISLITTIISDLPPLISAMEIFLGRTLNESSTGSSDAIAMMTIQTKYSVKRNWEGDPCAPEAFVWDGLSCIHTSIGDIQYNPRGLHRITALNLSFSELIGDIDASFGQLLLLRHLDLSYNNLSGSIPDFLGQMPLLTFLDLTGNNPNLCGNHTCDPISNKNKRNKFIGFVIAAAIVATVFALSLSALFIWYRRRKTNPDVLPEADPYKSRRFKYKELQVITNDWRNVIGEGGFGHVYAGQLEDVTDVAVKVESQTSLRGNHKQFLAEVQHLTRVHHKNLVSLIGYCNDKKHRCLVYEYMDGGTLEGRLRGREDPPEPPLTWLQRVNIALGSANGLNYLHTMCSPRLIHRDVKAGNILLTANLEAKISDFGLTRPSIHGTVETRTITQLAGTPGYMDPESLQASHPSESNDVYSFGVVLMVVITGRTAIVTINGTEKNLAQCVRDWLSSGRGIEAIADPMIRDDCNLSSVEMVAQLALDCTEPAGQDRPTMADVVTTLTESLQLEMSWSSPHSMRSSTTISSSAGFTGSGRADHDAAADSIAVLQVEQAVVETSTRYVTCE

SEQ ID NO: 2510 - protein, 192 aa, Oryza sativa
MSDSEEHHFESKADAGASKTYPQQAGTIRKNGYIVIKNRPCKDQILVRFTNFGQGHVVVMGELVYSCYELYSDKVVEVSTSKTGKHGHAKCHFVAIDIFTAKKLEDIVPSSHNCDVPHVNRTEYQLIDISEDGFVSLLTENGNTKDDLRLPTDDNLLSQIKDGFGEGKDLVVTVMSAMGEEQICALKDIGPK

SEQ ID NO: 2511 - protein, 296 aa, Oryza sativa
QVVLSQIPGFHDMAWLSVLSAAMSFTYSLIGFGLGVAKVITNGVIKGGIGGIAMVSATQKVWRVSQAIGDIAFAYPFASVLLEIEDTLRSPPPESETMRTASRASIAVTTFFYLCCGCFGYAAFGDATPGNLLTGFGFYEPYWLIDFANLCVAVHLLGGYQVYSQPVFAAVERRMGGAGAGVVEVAVPAAVAWPSRWRRGCRVNVYRLCFRTAYVAATTALAVWFPYFNQVVGLLGAFTFWPLSIHFPVEMYLVQKKVAPWTPRWLAVRAFSAACLATGAFASVGSAVGVFSSKTS

SEQ ID NO: 2512 - protein, 278 aa, Oryza sativa
GDAVFPCPGRLAVDTMLVLSQASFCVGYLIFISNTMAHLYPVFAPSSNALLSPKALFIWAMLPFQLGLNSIFADVVDLGAMGVVLGEDVSVWLAKPPPVFAFGGLSAILYGIGVSVYAFEGIGMVLPLEAEAANKKKFGTTLGLSMGFIAVMYGLFGAMGYIAFGDATRDIITTNLGTGWLSAAVQLGLCINLFFTMPVMMHPVYEVAERLLHGKRYCWWLRWLLVLAVGLSAMYVPNFTDFLALVRSSVCVLLGFVLPASFHLKVFGAEMSWSGVLS

SEQ ID NO: 2513 - protein, 177 aa, Oryza sativa
MAWFEREGLAKIGMSDSEEHHFESKADAGASKTYPQQAGTIRKNGYIVIKNRPCKGFGKVVEVSTSKTGKHGHAKCHFVAIDIFNGKKLEDIVPSSHNCDVPHVNRTEYQLIDISEDGFVSLLTESGNTKDDLRLPTDDSLLGQIKTGFGEGKDLVVTVMSAMGEEQICALKDIGPK

SEQ ID NO: 2514 - protein, 292 aa, Oryza sativa
MAQEDVGHLSDAGLALGLSLGGGGGGTTDAAAAHRGGCRRPSPSSQCPPLEPSLTLSLPDDAAAGAAATATATASGGGGPAHSVSSLSVGAAAAAAVKRERAEEADGERVSSTAAGRDDDDDGSTRKKLRLTKEQSALLEDRFREHSTLNPKQKVALAKQLNLRPRQVEVWFQNRRARTKLKQTEVDCEFLKRCCETLTEENRRLQRELQELRALKFAPPPPSSAAHQPSPAPPAPFYMQLPAATLTICPSCERVGGPASAAKVVAADGTKAGPGRTTTHHFFNPFTHSAAC

SEQ ID NO: 2515 - protein, 1128 aa, Oryza sativa
MSSSRPTQCSSSSSRTRQSSRARILAQTTLDAELNAEYEEYGDSFDYSKLVEAQRTTGPEQQARSEKVIAYLHHIQRAKLIQPFGCLLALDEKTFNVIALSENAPEMLTTVSHAVPSVDDPPKLRIGTNVWSLFTDPGATALQKALGFADVSLLNPILVQCKTSGKPFYAIVHRATGCLVVDFEPVKPTEFPATAAGALQSYKLAAKAISKIQSLPGGSMEVLCNTVVKELFDLTGYDRVMAYKFHEDDHGEVFAEITKPGLEPYLGLHYPATDIPQAARFLFMKNKVRMICDCRARSIKIIEDESLHLDISLCGSTLRAPHSCHLQYMENMNSIASLVMAVVVNENEDDDEVGADQPAQQQKRKKLWGLLVCHHESPRYVPFPLRYACEFLAQVFAVHVNKEFELERQVREKSILRMQTMLSDMLLRESSPLSIVSGTPNIMDLVKCDGAALLYGGKVWRLQNAPTESQIRDIAFWLSDVHRDSTGLSTDSLHDAGYPGAAALGDMICGMAVAKINSKDILFWFRSHTAAEIRWGGAKHDPSDKDDSRRMHPRLSFKAFLEVVKMKSLPWNDYEMDAIHSLQLILRGTLNDDIKPTRAASLDNQVGDLKLDGLAELQAVTSEMVRLMETATVPILAVDSNGLVNGWNQKVAELTGLRVDEAIGRHILTVVEESSVPVVQRMLYLALQGKEEKEVKFEVKTHGSKRDDGPVILVVNACASRDLHDHVVGVCFVAQDMTVHKLVMDKFTRVEGDYKAIIHNPSPLIPPIFGADEFGWCSEWNAAMTKLTGWHRDEVINKMLLGEVFDSTNASCLVKNKDAFVSLCILINSALAGDETEKAPFSFFDRNGKYIECLLSVNRKVNADGVITGVFCFIQVPSHELQHALHVQQASQQNALTKLKAYSYMRHAINNPLSGMLYSRKALKNTGLNEEQMKEVNVADSCHRQLNKILSDLDQDSVMNKSSCLDLEMVEFVLQDVFVAAVSQVLITCQGKGIRVSCNLPERYMKQTVYGDGVRLQQILSDFLFVSVKFSPVGGSVEISCSLTKNSIGENLHLIDLELRIKHQGKGVPADLLSQMYEDDNKEQSDEGMSLAVSRNLLRLMNGDVRHMREAGMSTFILSVELASAPAK

SEQ ID NO: 2516 - protein, 164 aa, Oryza sativa
MAEFADVEEFSSASGSGASLTIPTQCSAIKKNGFAVLKGKPCKIVETSTSKTGKHGHAKVHLVGIDIFTGKKYDEICPSTHNMLVPNIKKEELLLIDISADGYLSLMLPDGNTKDDLKVPEDPPELKKQITDAWASSQKNSKDVFVTVLNSMGMEKAITVKESN

SEQ ID NO: 2517 - protein, 322 aa, Oryza sativa
MAQAVVPAMQCQVGAVRARPAAAAAAAGGRVWGVRRTGRGTSGFRVMAVSTETTGVVTRMEQLLNMDTTPFTDKIIAEYIWVGGTGIDLRSKSRTISKPVEDPSELPKWNYDGSSTGQAPGEDSEVILYPQAIFKDPFRGGNNILVMCDTYTPAGEPIPTNKRNRAAQVFSDPKVVSQVPWFGIEQEYTLLQRDVNWPLGWPVGGYPGPQGPYYCAVGSDKSFGRDISDAHYKACLYAGINISGTNGEVMPGQWEYQVGPSVGIEAGDHIWISRYILERITEQAGVVLTLDPKPIQGDWNGAGCHTNYRFHYLLLMLKYPAA

SEQ ID NO: 2518 - protein, 121 aa, Oryza sativa
MPPTKDKDEISVSNLVEKYIHENDVMIFSKSWCPYCKKIKEALRSAKIEFYAIELDKIPEGEEIENEIIKKTKQETVPNIFIKQEHIGGCDDTLAALKSGRVNKLLYPEESHRKEINVDQE

SEQ ID NO: 2519 - protein, 216 aa, Oryza sativa
  misc_feature (135)..(135): Xaa can be any naturally occurring amino acid
  misc_feature (149)..(149): Xaa can be any naturally occurring amino acid
  misc_feature (173)..(173): Xaa can be any naturally occurring amino acid
  misc_feature (181)..(181): Xaa can be any naturally occurring amino acid
  unsure (1)..(216): unsure at all Xaa locations
MARVYVGNLDPRVTAREIEDEFRVFGVLRSVWVARKPPGFAFIDFDDRRDAEDAIRDLDGKNGWRVELSTKAGSGRGRDRSGGSDMKCYECGEPGHFARECRLRIGSGGLGSGRRRSRSRSRSPMYRGRSRSRSXPRYRRSPSYGRSPXDRSPKRRSYSRSATPARAQSYSRXTSTPRERXSYSRSQDASKRGSPLGNMGTGYSMRTFGARCLEAV

SEQ ID NO: 2520 - protein, 1743 aa, Oryza sativa
MAAAAWGGTTQKCDSCGRTVYTVEELAADGRVYHRPCFRCTHCKATLQFSNYSSVEGVLYCKPHYDQILKSTGSLEKSFEGTSKSAKAEKSNGNKGQPNRFSSMFVGTQDKCVVCNKTVYPLEKVNLNGSSYHKSCFRCTHGGCTLSPSNNVTHEGKLYCKTHHSQLFMVKGNFSNFEDSTPNAKVDIEKQPEHEDATKNPGGPGQGDGLTEKPLESELTPEKPSQDDIVAEKQSQSSVDVPKQSESSTTVQRSEEGERVTKGESNSHVVSKKPLESSVEKPFQSSAVNLQPSGSSAAVRKPWQRNLPTDKPLLSNTTTEKSTPSSAAIEESLPSNGVDAKQPESSTASTVVKRPWQRRVATENLPQSISPSDKPSSTSADDVKPSENSKLIRKPWQRAVAAEAQIQNSGPTEKSSLTNDTKPSESTTSIKRPWEHKVVNEKPLQNNIDTEKPLQNNTDTEKSSSSAIDVKLAETSTTPTVPQEHSGITEKPSQTSADDVKPSESTAAVVKKQWQRNIGFQKQPQSSVTDAKTPESRGMGKRLWQRNVPTEKQSQSGASVVTPSQVSVASTNPLQSSVVVKKPWQRSVSREKEPEKDISSNKPLQNRVLAEEAEKTNVTADNKSQIIQDKKNNGATTENSSQISESAKKLPLTANKSQADTSTEKLSESDILAVASSQITEPSKKPSENTAENEKPSQTDIATDELPLTQSVEAMSEPSPSDAAHQEISEREILTDKLPESTMAVEKLSQTATLTEKPSKEDAAEKLPQTNEPSEQPHESEETAEKPLQNEANAESTTKQSDLSLEKPPQVDANVGNPTEPESDATSGVNSSDAQIRPTAEQLVGPQGIVSAEKTSDQILEANTDPAADQSSESQDVAPAKVATEQPLENQKAAASEQPLEPQHEAYEENPQEHNSDATAKESSEPERDTASDQLAEQPSESRTAGEKATLRESDVVTEDPAEPQIDAAAERSAEVLSESQTGVETPVLHQSDRTNEVPSEPQTDEASDKSTEQPLEPENDASVEDEKPPEIESDDVHDKPSESTPDTETLPHNTPKSSISISEAADGNVSEEAPPQSSASIETPSESAIAVEEPKHDDEASIKPSEDSSALEEPPQDDSASVEPSENTITLEKASEEDEGSVKPSEGNDALEKTLEEDEASAKLPEDSTTFEKPSEKDDAGTKQTEDPVTLEKEPEEDKGSVEPTQDNAGLEKPLEEDEASAKPSEDSVALDKLSVEDDDSAKPSEDSMDLEKPEAHKPSEEEDGATKSSPEDAAVEEAPLQVSEEGRRREFSMAPKRKPPARAAAAKLDPDGMFRGVSAFVVPHAVQSRRLEVAAPPSNPSQPPPTLSPVLRVSWLSSSVQVWKQRLAQMGGRVQEKLAAKGGGGAVTHVLAADAKALLRELDAAWLHRFRGSVVSFEWLEECLKSGERLPEHKFAINYEEEFKPKKEGGAAGSGVLQSAKRSKISSDGPENRKETAGGNRESRDAIAHPNEDSDVVKGPSTCTSSQSASGDSKETIASQNAFKAEEASSGESSTYAPPDLNRNITEIFGKLINIYRALGDDRRSFSYYKAIPVIEKLPFKIESADQVKDLPAIGKSLKDHINEIVNTGKLSKLEHFENDEKVRTVSLFGEVWGVGPATALKLYDKGHRTLDDLQKDDSLTSAQRIGLKFFDDIKQRIPRHEVSEMEKLLQEVGTDILPGVIIVCGGSYRRGKSSCGDMDIIITHPDGERYTSKLSKIVGY

SEQ ID NO: 2521 - protein, 163 aa, Oryza sativa
VSCLNLRLSGEVALPGGKAEEGDADDAATALREAKEEIGLDPSLVTVVASLEHFLSKHLLVVVPIVGILSDIEAFKPVLNVDEVDDIFDVPLEMFLKDENRTSEEREKMGQTFTIHYFNYEKENQKYLIWGLTARILIHAASVVYQRPPDFPERRVHFNLPKF

SEQ ID NO: 2522 - protein, 322 aa, Oryza sativa
MSDMASGQKAKQQVMKPMEVSVEAGNAGDAAWLDDDGRARRTGTFWTASAHIITAVIGSGVLSLAWAIAQLGWVAGPAVMLLFAFVIYYTSTLLAECYRTGDPATGKRNYTYMDAVRANLGGAKVTFCGVIQYANLVGVAIGYTIASSISMRAIRRAGCFHHNGHGDPCRSSSKPYMILFGVVQIVFSQIPDFDQIWWLSIVAAVMSFTYSGIGLSLGIVQTISHGGIQGSLTGISIGVGVSSTQKVWGSLQAFGDIPFPYSFSNILIEIPDPIKAPPPPKAKGKKTQQGLNWATTPGVLHAGGGGMGYTGVLGEPGAPNNL

SEQ ID NO: 2523 - protein, 227 aa, Oryza sativa
  misc_feature (26)..(26): Xaa can be any naturally occurring amino acid
  unsure (1)..(227): unsure at all Xaa locations
MRLSLPNLGMEAFRSEVEKRMPNGVXLSALRPDDLIDKKWQRRDYLGVHPQKQEGMSYVGLHVPVGRVQAADMFELARLADEYGSGELRLTVEQNIVIPNVKNEKVEALLAEPLLQKFSPQPSLLLKGLVACTGNQFCGQAIIETKQRALLVTSQVEKLVSVPRAVRMHWTGCPNSCGQVQVADIGFMGCLTKDSAGKIVEAADIFVGAALEDPSLRTRACDVIALL

SEQ ID NO: 2524 - protein, 111 aa, Oryza sativa
MCGIFACHRHPDVEKFKPTALKLAKQIRHRGPDWSGSVIANHTILCHERLSIVGVESGAQPLTNADDSIILAVNGEIYNHRHIRKNLKEQYHFKTTSDCEVIIPLYTEFDT

SEQ ID NO: 2525 - protein, 247 aa, Oryza sativa
MAQDDEDVGLALGLSLGSGGHRRQRESRDEAPSSAAASLLTLRLPAESGGQPQVVVKREVVRAEEEEYEYEYERALYSSSAAAADDDEGCNSRKKLRLSKEQSALLEDRFKEHSTLNPKHKVALAKQLNLRPRHVEVWFQNRRARTKLKQTEVDCELLKRCCETLTEENRRLHRELQQLRALTHSTAAGFFMATTLPVPAATLSICPSCERLATAAAAGASPTAAADRTNKPTAPHLFSPFAKSAAC

SEQ ID NO: 2526 - protein, 276 aa, Oryza sativa
MGHTRSETRGKKNQSNPNQIRERRGLGFRLLGGRSMAAAARHRGTVKWFNDTKGFGFISPDDGSEDLFVHQSSIKADGFRSLAEGEQVEFAISESEDGRTKAVDVTGPDGSFVKGGAGGGGGGGGGFGSRGGGGSGGGGRSYGGSWGGGRRSGGGGPGGGCFKCGESGHMARDCFNGGGVGVGGGGGGGGGAGGGCFKCGEMGHMARDCFNSGGGGGGGGGGGGGGACYNCGETGHLARDCYNGGGGGGGGRFGGGGDRSCYNCGEAGHIARDCHK

SEQ ID NO: 2527 - protein, 131 aa, Oryza sativa
MVPRDRVNAAAAGGGGEGRLVQSGIVNKKCDKKAPKRIHKSEREKLKRDKQNDLFNERANSLPEPDRQNNGKACVLGETTRILKDLLSQVESLRKENSSLKNESHYVSSSELNVLFVFLQNISSIVLLQLI

SEQ ID NO: 2528 - protein, 101 aa, Oryza sativa
MSSPAGEDEKKPAGGEGGGAHINLKVKGQDGNEVFFRIKRSTQLKKLMNAYCDRQSVDIKSIAFLFDGRRLNAEQTPDQLEMEDGDEIDAMLHQTGGSLPA

SEQ ID NO: 2529 - protein, 279 aa, Oryza sativa
MRPVFCGNLDYDARQSEIERLFSKYGRVERVDMKSGFAFVYMEDERDADEAIHRLDRIEFGRKGRRLRVEWTKEDRSGGRRGNSKRSPNNTRPTKTLFVINFDPINTRTRDLERHFDQYGKISNVRIRRNFAFVQYELQEDATKALEGTNGSTLMDRVISVEYALRDDDEKRNGYSPERRGRDRSPDRRDYRGRSASPYGRGRERGSPDYGRGRERGSPDYGRGGDRGSPDYHRGASPQGGNKGDERGSPPNNYDRERREASPGYDRPRSRSPARYERE

SEQ ID NO: 2530 - protein, 363 aa, Oryza sativa
MAAHYKWEATPVRLVPSNSSQDRVVYVCSVLLSLLPCVEMAGVVITGRALVAAVAVVVAVLLGGAAEAQQLSPNFYSRTCPNLATIVRSGMASAVRTEPRMGASILRLFFHDCFVNGCDGSILLDDTSTFTGEKSAGPNANSARGFEVIDAIKTQVEASCKATVSCADILALAARDGVNLLGGPTWSVALGRKDSRTASQSAANSNLPGPGSSLATLISMFGNQGLSARDMTALSGAHTIGRAQCQFFRSRIYTERNINASFASLRQQTCPRSGGDANLAPFDVQTPDAFDNAYYQNLVSQRGLLHSDQELFNGGSQDGLVRQYSTNPSQFSSDFVSAMVKMGNLLPSSGTATEVRLNCRKVN

SEQ ID NO: 2531 - protein, 519 aa, Oryza sativa
  misc_feature (433)..(433): Xaa can be any naturally occurring amino acid
  unsure (1)..(519): unsure at all Xaa locations
MLPRSRTLPPRIHDGVVVVERDVRRYQQLPQQVEMEMTTTKRQQDHQVETMTTKKIDEEDEEVDDDGRAKRRGTVWTAASHIITAVIGSGVLSLAWAIAQLGWVVGPTVMLLFAAVSYFTSNLLADCYRTGDPATGRRNYTYMEAVKANLGGAKVKVCGCIQYLNLLGVAIGYTIAASISMMAIQRSNCFHARGEQDPCHASSNVYMIMFGIVQVFFSQIPDFDQVWWLSILAAVMSFTYSAVGLALGAAQVAQNRTFAGSAMGVAVGFVTKTGDVVTPAQKVWRNLQALGDIAFAYSYSIILIEIQDTLRSPPAEARTMRKATGISVVVTSVFYLLCGCMGYAAFGDDAPGNLLTGFGFYKPYWLLDVANMAIVVHLVGAYQVYCQPLFAFVERRAERRWPNGLPGGDYDLGWIKVSVFRLAWRTCFVAVTXTVVAMLLPFFNDVVGILGALGFWPLTVYFPVEMYIAHRRIRRWTTTWVGLQALSLACLLVSLAAAVGSIAGVLLDLKSYRPFRSTY

SEQ ID NO: 2532 - protein, 474 aa, Oryza sativa
MNLAGFLATPATATATRHEMPLNPSSSASFLLSSLRRSLVASLRKASPAAAAALSPMASASTVAAENGAAKAAAEKQQQQPVQSTLGPGVTVAKRLEKFKTTIFTQMSMLAIKHGAINLGQGFPNFDGPDFVKEAAIQAINAGKNQYARGYGVPELNSAIAERFLKDSGLQIDPEKEVTVTSGCTEAIAATILGLINPGDEVILFAPFYDSYEATLSMAGANVKAITLRPPDFSVPLEELKAAVSKNTRAIMINTPHNPTGKMFTREELEFIATLCKENDVLLFADEVYDKLAFEADHISMASIPGMYERTVTMNSLGKTFSLTGWKIGWAIAPPHLTWGVRQAHSFLTFATCTPMQAAAAAALRAPDSYYEELRRDYGAKKALLVNGLKDAGFIVYPSSGTYFVMVDHTPFGFDNDIEFCEYLIREVGVVAIPPSVFYLNPEDGKNLVRFTFCKDDETLRAAVERMKTKLRKK

SEQ ID NO: 2533 - protein, 276 aa, Oryza sativa
MEKPEWSMDDFEIGKYIGEGKFGKVYLAREKQSGYVVALKVTFKAKLDKYRFHAHLRREIEIQHGLDHPNVLRLFAWFHDAERVVLVLEYAARGELYKLLRTVRRFSERTAATYVASLAGALAYCHKKQVIHRDIKPENLLLDIEGRLKIADFGWAVRSNAKRHTLCGTIDYLAPEMIEKKAHDHAVDNWTLGILCYEFLYGSPPFEAAEQDDTLRRIVKGFAFPHSYVLQMLGFIAALVKLNKDFFGTYELPGGKMELQGVSGKGRISFRTRYSR

SEQ ID NO: 2534 - protein, 422 aa, Oryza sativa
MGLGNEASSSSSRLLDPAPLLPHHGGDGAGKLSSQPKTFANVFIAVVGAGVLGLPYTFSRTGWAAGSILLLSVAALTFYCMMLLVACRRRLADEHPKIASFGDLGDAVFRGPGRLAVDTMLVLSQASFCVGYLIFISNTMAHLYPVFAPSSNALLSPKALFIWAMLPFQLGLNSIKTLTLLAPLSIFADVVDLGAMGVVLGEDVSVWLAKPPPVFAFGGLSAILYGIGVSVYAFEGIGMVLPLEAEAANKKKFGTTLGLSMGFIAVMYGLFGAMGYIAFGDATRDIITTNLGTGWLSAAVQLGLCINLFFTMPVMMHPVYEVAERLLHGKRYCWWLRWLLVLAVGLSAMYVPNFTDFLALVGSSVCVLLGFVLPASFHLKVFGAEMSWPGVLSDVLLVLLGLSLAVFGTYTSLLEIFHSSST

SEQ ID NO: 2535 - protein, 79 aa, Oryza sativa
DYQLIDISEDGFVSLLTESGNTKDDLRLPTDDTLTNQLKLFIINIKNGFGEEGKDMILTVMSAMGEEQICAVKEIGAKN

SEQ ID NO: 2536 - protein, 114 aa, Oryza sativa
MSLTTSQVDTVKSTAPVLKIHGETITSLFYKNLIGTYPDLRNIFNLSHQHDGAQAKALAGAVLAYATYIDKPEFLASTIERIAQRHVSLKVTEDQYALVGEQLIKAIGEVLGDA

SEQ ID NO: 2537 - protein, 90 aa, Oryza sativa
  misc_feature (27)..(27): Xaa can be any naturally occurring amino acid
  misc_feature (37)..(37): Xaa can be any naturally occurring amino acid
  misc_feature (49)..(49): Xaa can be any naturally occurring amino acid
  misc_feature (51)..(51): Xaa can be any naturally occurring amino acid
  misc_feature (56)..(56): Xaa can be any naturally occurring amino acid
  misc_feature (58)..(59): Xaa can be any naturally occurring amino acid
  misc_feature (63)..(63): Xaa can be any naturally occurring amino acid
  misc_feature (66)..(68): Xaa can be any naturally occurring amino acid
  misc_feature (71)..(71): Xaa can be any naturally occurring amino acid
  unsure (1)..(90): unsure at all Xaa locations
AGIGGTVKWFNDTKGFGFISPDDGSEXDLFVHQSSIXADGFRSLAEGEXVXFAISXNXXGRTXAVXXXGPXGSFLQGPPAAGRCLGKSRF

SEQ ID NO: 2538 - protein, 178 aa, Oryza sativa
MAGSGRDDPLVVGRIVGDVLDPFVRITNLSVSYGARIVSNGCELKPSMVTQQPRVVVGGNDMRTFYTLVMVDPDAPSPSNPNLREYLHWLVTDIPGTTGATFGQEVMCYESPRPTMGIHRLVFVLFQQLGRQTVYAPGWRQNFSTRNFAELYNLGSPVATVYFNCQREAGSGGRRVYP

SEQ ID NO: 2539 - protein, 558 aa, Oryza sativa
MATTAAAAAAALSAAATAKTGRKNHQRHHVLPARGRVGAAAVRCSAVSPVTPPSPAPPATPLRPWGPAEPRKGADILVEALERCGVSDVFAYPGGASMEIHQALTRSPVITNHLFRHEQGEAFAASGYARASGRVGVCVATSGPGATNLVSALADALLDSVPMVAITGQVPRRMIGTDAFQETPIVEVTRSITKHNYLVLDVEDIPRVIQEAFFLASSGRPGPVLVDIPKDIQQQMAVPVWDTSMNLPGYIARLPKPPATELLEQVLRLVGESRRPILYVGGGCSASGDELRWFVELTGIPVTTTLMGLGNFPSDDPLSLRMLGMHGTVYANYAVDKADLLLAFGVRFDDRVTGKIEAFASRAKIVHIDIDPAEIGKNKQPHVSICADVKLALQGLNALLQQSTTKTSSDFSAWHNELDQQKREFPLGYKTFGEEIPPQYAIQVLDELTKGEAIIATGVGQHQMWAAQYYTYKRPRQWLSSAGLGAMGFGLPAAAGASVANPGVTVVDIDGDGSFLMNIQELALIRIENLPVKVMVLNNQHLGMVVQWEDRFYKAAYV

SEQ ID NO: 2540 - protein, 96 aa, Oryza sativa
MSSADASNSNNTSKTDEYIKLKVVGQDNSEVHFKVKMTTSMGKLKKSYAERQGVQVGSLRFLFDGKRINDDETPKLLEMEDNDTIDVYQEQVGGSC

SEQ ID NO: 2541 - protein, 317 aa, Oryza sativa
  misc_feature (13)..(13): Xaa can be any naturally occurring amino acid
  unsure (1)..(317): unsure at all Xaa locations
MALSRRLLPLLLXRGSTPSLSPARALSTAAVKADAPAAAAAAAEEEAMTIKGVRISGRPLYMDMQATTPVDPQPLEEIGRICKEKGVPFHTDAAQALGKIPIDVHQMGIGLMSLSAHKIYGPKGVGALYLRRRPRIRVEPQMSGGGQERGIRSGTVPTPLVVGFGAACEIAAKEMDYDHRRASVLQQRLLDGIRGQVDDIVINGSMEHRYPGNLNLSFAYVEGESLLMGLKEVAVSSGSACTSASLEPSYVLRALGVEEDMAHTSIRFGIGRFTTEEEVDRAIELTVHQVKKLRDMSPLYEMAKAGIDLKSIQWAQH

SEQ ID NO: 2542 - protein, 318 aa, Oryza sativa
MEEQKHTDKAKAKLSMLKSKVICCKLYISESQNAKVVDAITRIGQKDPEVVLLSKFEDDHYNRVRYTLASYIINENSTGEVKFSPMRRVLLEMIEKAFSTINLETHTGTHPRIGVLDDMSFHPLNQATMEDAAQLAKTVASDIGNFLQVPVFLYGAAHPTGKPVTAVRRELGYFQPNYMGIQWMGQVLPDILPVKPDEGPDHVSRERGAIMIGAAPLPLNYNVPVLSKDIPTIRRITRRVTGRGGGLPTVQALALSHGDDCTEIACFLDPDHVSADQVQQQVEQIAAEQGLEVEKGYFTDFSKDAMLEKYFKIVLSVD

SEQ ID NO: 2543 - protein, 114 aa, Oryza sativa
GQHRISGIGGGAPVDIMETPGEYAFVLDVPGLSKSDIQVTLEEDRVLVMKSSNGAGNGKRKREEEEGECKYIRLERRASPRAFARKFRLPEDADTGGISARCENGVLTVTVKKR

SEQ ID NO: 2544 - protein, 252 aa, Oryza sativa
RCRHSFRRIPPLAVAKSPPPLAPPPPRARPARGAKHLCVLQLRATGDEARLPQPRPQRPRLRQDRFIVKAQLVPEEEDDLWHAYNLIVPGDTLQSVTVRKVLREMASGGRDAERVRLKLEIVVESVDYDKEGSVLRVRGKNITENDHVKIGQFHTVELELKRQFTLTKELWDWLALDTIQQACDPTASADLAVILMQEGLAHLFLIGRSITVTRARIETSIPRKHGPAIAGYESVWKLVLILCNLIVLSIPN

SEQ ID NO: 2545 - protein, 621 aa, Oryza sativa
  misc_feature (306)..(306): Xaa can be any naturally occurring amino acid
  misc_feature (564)..(564): Xaa can be any naturally occurring amino acid
  unsure (1)..(621): unsure at all Xaa locations
MCGILAVLGAADWSQAKRAHVLSCSRRLKHRGPDWSGLYQCEGNFLAQQRLAIVSPLSGDQPLYNADRTIVVVANGEIYNHKKIRKQFASKHTFSTGSDCEVIIPLYEEYGEDFVDMLDGVFAFVLYDTRTKTYMAARDAIGVNPLYIGRGSDGAVWISSEMKALNEDCVEFEIFPPGHLYSSAAGGLRRWYKPQWFAENVPATPYQPLLLREAFEKAVIKRLMTDVPFGVLLSGGLDSSLVAAVTKRHLIKTEAAEKFGAELHSFVVGLEGSPDLIAAREVADHLGTIHHEFHFTVQDGIDAIEXEVIYHGATSARSNRRASTPMFLMARKIKALGVKMVLSGEGSDELLGGYLYFHFAPNKEEFHKETCRKVKALHQYDCLRANKATSAWGLEVRVPFLDKEFINVAMSMDPEWKMYNADLGRIEKWVMRKAFDDEEHPYLPKHILYRQKEQFSDGVGYNWIDGLKAFTEQQVSDEMMKNAAKVYPHNTPVNKEAYYYRMIFERLFPQESARETVPWGPSIACSTPAAIEWVEQWKASHDPSGRLIASHNSASASANHTNHXNANANGNSNGKANGNCAMAANGTNGVGLVVGHGTANGKMESIRSELGAPTAIDRAKR

SEQ ID NO: 2546 - protein, 641 aa, Oryza sativa
MGKNLRIKTGNRAPLLAQGETSRALSDLEEGSNVQPENVGFCRVIKLARHDAGKLVIATMALLVASLSNILVPKYGGKIIDIVSRDVRRPEDKAQALDDVTGTILYIVIIVVTGSVCTALRAWLFNSASERVVARLRKDLFSHLVNQEIAFFDVTRTGELLSRLSEDTQIIKNAATTNLSEALRNITTTSIGLGFMFATSWKLTLLALVIVPVISIAVRKFGRFLRELSHQTQAAAAVASSIAEESFGAIRTVRSFAQESHEVLRYGEKVDETLKLGLKQAKVVGMFSGGLNAASTLSVVIVVIYGANLTINGYMTTGSLTSFILYSLTVGSSVSALSGLYTTVMKASGASRRVFQLLDRVSSMANSGDRCPTNENDGEVELDDVWFAYPSRPSHMILKGITLKLTPGSKVALVGPSGGGKTTIANLIERFYDPLKGRILLNGVPLPEISHQFLHRKVSIVSQEPVLFNCSIEENIAYGLEGKASSADVENAAKMANAHNFICSFPDQYKTVVGERGIRLSGGQKQRVAIARALLMNPRVLLLDEATSALDAESEYLVQDAMDSLMKGRTVLVIAHRLSTVKSADTVAVISDGQIVESGTHDELLSRDGIYTALVKRQLQGPRFEGTSNATAEIEPISNGQ

SEQ ID NO: 2547 - protein, 127 aa, Oryza sativa
YYNLPRDDDGLLHPDEHYLKNRTDSNCSQSSCTNLSSILEHRPSLVSRMPNIKIFGGSSHPELTRLICARLGLEPGRVITRKFSNGEISVEINESVRGEDVFIVQSGCGEINDNIMELLIMINACKI

SEQ ID NO: 2548 - protein, 96 aa, Oryza sativa
  misc_feature (2)..(2): Xaa can be any naturally occurring amino acid
  misc_feature (15)..(15): Xaa can be any naturally occurring amino acid
  misc_feature (41)..(41): Xaa can be any naturally occurring amino acid
  misc_feature (60)..(60): Xaa can be any naturally occurring amino acid
  misc_feature (72)..(72): Xaa can be any naturally occurring amino acid
  unsure (1)..(96): unsure at all Xaa locations
MXLAKGKETVASAPXVVYSKSYCPFCVRVNKLFEQLGATFXKAIELDGESDGSDLHSALXDWTGPRTVPHVXLTGKHIAGSSPLPGIAMNGTCCPP

SEQ ID NO: 2549 - protein, 129 aa, Oryza sativa
VHLLERSFEEENKLEPERKTELARKLGLQPRQVAVWFQNRRARWKTKQLERDFDRLKASFDALRADHDALLQDNHRLHSQVMSLTEKLQEKETTTEGSAGAAVDVPGLPAAADVKVAVPDAEEPALEEA

SEQ ID NO: 2550 - protein, 271 aa, Oryza sativa
MAAAAAGMGGGGGVQHQETTTTVVQVAAEASRKKVEVRSAGRRGRREMRRIEDATSRQVTFSKRRSGLLKKAFELSVLCDAEVALIVFSPRGRLYQFASASSDLQRTIDRYLNHTKNSSAHEEGEESCVQKWRSEATTLGKKIEAIEGYKSKLLGEGLGSCSVQELQELEVQLEKSLCSIRQKKQKMLMDQILELREKEMNLLKENMVLRDQCKALSSPWSTSVGELKNKQADDDVHRHEDYSGGGVRDDDDRRMRDDVETDLVIGRPGSI

SEQ ID NO: 2551 - protein, 136 aa, Oryza sativa
MAALLGRRFGMAAAALIALAALGSAASGTASKSSFVKSTVKAHDVVIFSKSYCPYCRRAKAVFKELELKKEPYVVELDQREDGWEIQDALSDMVGRRTVPQVFVHGKHLGGSDDTVEAYESGKLAKLLNIDVKEDL

SEQ ID NO: 2552 - protein, 459 aa, Oryza sativa
MDVYLPRTQGDVDDDGKERRTGTVWTATAHIITAVIGSGVLSLAWAMAQLGWVAGPITLLLFAAITFYTCGLLSDCYRVGDPATGKRNYTYTDAVKSYLGGWHVWFCGFCQYVNMFGTGIGYTITASISAAAINKSNCYHWRGHGTDCSQNTSAYIIGFGVLQALFCQLPNFHQLWWLSIIAAVMSFSYAAIAVGLSLAQTIMDPLGRTTLTGTVVGVDVDATQKVWLTFQALGNVAFAYSYAIILIEIQDTLRSPPPENATMRRATAAGISTTTGFYLLCGCLGYSAFGNAAPGNILTGFGFYEPYWLVDVANACIVVHLVGGFQVFCQPLFAAVEGGVARRCPGLLGGGAGRASGVNVFRLVWRTAFVAVITLLAILMPFFNSILGILGSIAFWPLTVFFPVEMYIRQRQLPRFSAKWVALQSLSLVCFLVTVAACAASIQGVLDSLKTYVPFKTRS

SEQ ID NO: 2553 - protein, 466 aa, Oryza sativa
MAVHHSLEVAAAGGDGGGGRCYDDDGHPARTGTVWTCVAHIITAVIGSGVLSLAWSVAKLGWVGGPACMACFALVTYVSAALLSDCYRRGDDDKGPRSRSYMDAVRAFLGNQHTWACGLLQYASLYGCGVAYTITTATSMRAILRSNCYHTHGHDAPCKYGGSYYMLMFGAAQLFLSFIPDFHDMAWLSVLAAVMSFSYSFIGLGLGLANTIANGTIKGSITGAPTRTPVQKVWHVSQAIGDIAFAYPYSLILLEIQDTLKAPPAENKTMKKASIISIVVTTFFYLCCGCFGYAAFGSDAPGNLLTGFGFYEPYWLIDFANACIILHLLGGYQVYSQPIYQFADRFFAERYPASRFVNDFHTVKLPLLPPCRVNLLRVCFRTVYVASTTAVALAFPYFNEVLALLGALNFWPLAIYFPVEMYFIQRHVPRWSPRWVVLQSFSVLCLLVSAFALVGSIQGLISQKLG

SEQ ID NO: 2554 - protein, 86 aa, Oryza sativa
CLVDTNDDPFDVDAYMYRAKFFDEYKGELGWVHIRQSVHNPNIAINMQSSIPGGCKSMAKDLLDRYLLTSGVNEFVDITEVQKFVK

SEQ ID NO: 2555 - protein, 720 aa, Oryza sativa
MESGGGSHVAEMPRVPKSARGKRSIRKKESQGQVMCAFDLLATVAGKLLDEGEGSLGNASSGTPAVDASPKDVRVKQEQCDEEAKHFKNEVMDQDSCNESALVSHIAFQRPVNHHGRKGEDPEGSHAVIEDPKAKSEALDKESSMISCTKAELGCNFAAIADRWSPESVESGAFTGDAAAIAMPATTSGFHKNAPDMYNLLDPMDVDVKPPPLVSSDSTGEMPLYGNKIRRSTSFPRVPKGGAGFTVDRDEDDDDKSSGCTHPSTATNRGFRPNCTAGHSRVKKLLACKHRKVAPARMHKGDLSYSGEHCEIPFTFSFFEEHCIDGTHIQTCLLYSYLSSLILLDVDRKPSFRNKKMYYTRQRTQRSTFKRRKMFDRHSAQVSEEYAKANTKFAARDSHAVSLEANKGTNSTAFQKSQESSDCHVKLRIKSFKVPELLIEIPETATVGSLKKTVLEAVNAILGGGLRVGVLHHGKKVRDDNKTLMQAGISHDEVLDNLGFSLEPNCAPHPSQLSPPEDNEFMETVDTTEPLARIAPADSSSKHGEVDASQELALAPLSANYQGSDHDFVHSPGGMSSPDKASTNSRAIVPVTPADSNAGAIVPANKAKRSPEQGQRRIRRPFSVAEVEALVLAVEKLGTGRWRDVKLRAFDNAKHRTYVDLKDKWKTLVHTASISPQQRRGEPVPQELLDRVLAAQAYWSQQQAKLQPKTPPLAEALLLT

SEQ ID NO: 2556 - protein, 396 aa, Oryza sativa
  misc_feature (107)..(107): Xaa can be any naturally occurring amino acid
  misc_feature (217)..(217): Xaa can be any naturally occurring amino acid
  unsure (1)..(396): unsure at all Xaa locations
ILEGKHLFSADQLRDKLSYLRHEKALIIKLVDIVDFNGSFLARVRDFAGANPIILLITKVDLLPRDTDLNCIGDWVVEAVVKKKLSELSVHLTSSKSLGGVTGVISXIQQEKKGRDVYILGSANVGKSAFISAMLRTMAYKDPVAAATQKYKPIQSAVPGTTLGPIQIEAFLGGGKLYDTPGVHLHHRQAAVIHADDLPSLAPQSRLRARCFPNIMXVQANDTDVGLSGNSLFWGGLVRIDVVKALPRTRLSFYGPKKLKINMVPTTEADEFYEREVGVTLTPPAGKEKAEGWVGLQGVRELQIKYEESDRPACDIAISGLGWVAVEPLGVPSSNPDESAEEEDNESGELHLRVHVPKPVEIFVRPPLPVGKAASQWYRYQELTEEEEELRPKWHY

SEQ ID NO: 2557 - protein, 433 aa, Oryza sativa
MYSNFKEQAIEYVKQAVQEDNAGNYVKAFPLYMNALEYFKTHLKYEKNPKIKEAITAKFTEYLRRAEEIRAVLDEGGGGGGANGGDAAVATRPKTKGKDGEGGGDDSEQSKLRAGLNSAIITEKPNIKWNDVAGLESAKQALQEAVILPVKFPQFFTGKRRPWRAFLLYGPPGTGKSYLAKAVATEAGSTFFSISSSDLVSKWMGESEKLVANLFQMARENAPSIIFIDEIDSLCGQRGEGNESEASRRIKTELLVQMQGVGHNDDKVLVLAATNTPYALDQAVRRRFDKRIYIPLPDLKARQHMFKVHLGDTPHNLNESDFESLARRTDGFSGSDIAVCVKDVLFEPVRKTQDAMFFFKADGDMWMPCGPKQSGAVQTTMQELASKGLAAKILPPPISRTDFEKVLARQRPTVSKKDLEVHERFTKEFGEEG

SEQ ID NO: 2558 - protein, 638 aa, Oryza sativa
  misc_feature (503)..(503): Xaa can be any naturally occurring amino acid
  misc_feature (617)..(617): Xaa can be any naturally occurring amino acid
  unsure (1)..(638): unsure at all Xaa locations
MSSTPGYAADGYARARGVGACAVTFTVGGLSVLNAIAGAYSENLPVICIVGGPNSNAVIHPPVTSAAGATLGRHLARRLVQIGATDVFAVPGDFNLTLLDYLIAEPGLKLIGCCNELNAGYAADGYARARGVGACAVTFTVGGLSVLNAIAGAYSENLPVICIVGGPNSNDYGTNRILHHTIGLPDFSQELRCFQTITCYQAVINNLDDAHEQIDTAIATALRESKPVYISVGCNLAGLSHPTFSREPVPLFISPRLSNKANLEYAVEAAADFLNKAVKPVMVGGPKIRVAKAKKAFAGIAESSGYPFAVMPSAKGLVPEHHPRFIGTYWGAVSTTFCAEIVESADAYLFAGPIFNDYSSVGYSLLLKREKAVIVQPDRVVVGNGPAFGCILMTEFLDALAKRLDRNTTAYDNYRRIFIPDREPPNGQPDEPLRVNILFKHIKEMLSGDTAVIAETGDSWFNCQKLRLPEGCGLVIPNRYEFQMQYGSIGWSVGATLGYAPGXPKDKRVISCIGDGSFQMTAQDVSTMLRCGQKSIIFLINNGGYTIEVEIHDGPYNVIKNWDYTGLIDAIHNSDGNCWTKKVRTEEELIEAIATATGAKKDCLCFIEIIVHKDDTXKELLEWGSRVSAANSRPPNPQ

SEQ ID NO: 2559 - protein, 303 aa, Oryza sativa
  misc_feature (185)..(185): Xaa can be any naturally occurring amino acid
  unsure (1)..(303): unsure at all Xaa locations
MDSNSIQRVAGQGAIITWGTSGIGKVTAKDFIKNGAKVIIADVQDELGHSAAAKLGPDASYTHCHINDKAHVEGPVGGYPGPQGPYYCAVGSDKSFGRDISDAHYKACLYAGINISGTNGEVMPGQWEYQVGPSVGIEAGDHIWISRYILERITEQAGVVLTLDPKPIQGDWNGAGCHTNYSTHXKSMREDGGFEVIKKAILNLSLRHDLHISAYGEGNERRLTGLHETASIDNFSWGVANRGCSIRVGRDTEAKGKGYLEDRRPASNMDPYVVTALLAETTILWEPTLEAEVLAAKKLALKV

SEQ ID NO: 2560 - protein, 885 aa, Oryza sativa
EFWIGVFYPGFISIDCGIPEKSSYQDPTSSIIYVSDYGFISTGANHNISSAYIKPSLAQRNYNVRFFPDGTRNCYTLRSLQEGNKYFVRAVFYYANYDSLNKLPVFDLYLGANYWHEVKFSNADAVNWMDIIVVAPADYLQVCLVNKGTGTPFISGLDLRPLKSTLYPEANTTQSLVLINSNRFNMGPTDNSITRYPLDPHDRLWSTYDTIPDWTEISATSVVQNYLTDVYDVPSAVMQSAATVNSSRINFTWDPSDPSVNISSKYFFVLYFSELQSVPSNGLRQFDIIVNNNTWNTQPYTPPFLFADSLSGTVQGLASYSVSLVATKNATLPPILNAMEMYLVKPLTEFATDPRDARAMMEVQQNYDVKKNWMGDPCAPKAFAWEGLNCSYPPADSSKITSLNLSSSGLAGSIATYFGDLKSLQYPDLSHNNLSGPIPNFLGQLPLLMFLDLSSNDLSGPIPYNLLQKSQNGSLSLRVGYNAKLCGNDTECGSGQKKIKGSLLSAIIITIVATVALIVVLFLLLRRMLKAKDKRRAAGPTYESALLENREFSYRELKHITNNFSQQVGKGGFGAVFLGYLENGNPVAVKVRSESSSQGGKEFLAEAQHLTRIHHKNLVSLIGYCKDKNHLALVYEYMPEGNLQDHLRATTNKPLTWEQRLHIALDAAQGLEYLHVACKPALIHRDVKSRNILLTTNLGAKIADFGLTKVFSESRTHMTTEPAGTFGYLDPEYYRNYHISEKSDVYSFGVVLLELITGRPPVIPIDESVSIHIGEFVHQSLDHGSIESIVDARMGGGGGYDINSVWKVADLALHCKREVSRERPTMTEVVAQLKESLELESHGDRKHLVTGDDDVSVSNLGEETALEVEEQSGEISRVSPGPAVR

SEQ ID NO: 2561 - protein, 237 aa, Oryza sativa
MVTVREEMRKGPWTEQEDLQLVCTVRLFGDRRWDFVAKVSGLNRTGKSCRLRWVNYLHPGLKHGRMSPKEEHLIIELHARWGNRWSRIARRLPGRTDNEIKNYWRTHMRKKAQERRGDMSPSSSSSSLVYQSCLLDTVPIISMDGGDIHDDRSCMARVLKSTQSVMDGYTMDQIWKEIEAPGAPSLLGIDEGKDKACSNLPCPLLTSTMSDYSCPEVFWKIDNEETRMLATQSGYGK

SEQ ID NO: 2562 - protein, 188 aa, Oryza sativa
MAMSPHDQHEHDPDHAHRSPSNGTAATSTIATNRWGPYSGAGDFASNMAVILAALLAALALALALNAAVRYLLRRHRRARQQPAAAAAAAEDPEKPPVQEADPPPPPPALVYSAAGTKLAGAAECAICLAEFVDGDTVRVMPVCGHGFHARCIERWLAGGRRSSCPTCRAPAATPPGATATEPAAVAP

SEQ ID NO: 2563 - protein, 784 aa, Oryza sativa
MMIPARHMPSMIGRNGAAYGSSSALSLSQPNLLDNHQFQQAFQHQQQQQHLLDQIPATTAESGDNMIRSRASDPLGGDEFESKSGSENVDGVSVDDQDPNQRPRKKRYHRHTQHQIQEMEAFFKECPHPDDKQRKELSRELGLEPLQVKFWFQNKRTQMKNQHERHENSQLRSDNEKLRAENMRYKEALSSASCPNCGGPAALGEMSFDEHHLRIENARLREEIDRISAIAAKYVGKPMVPFPVLSNPMAAAASRAPLDLPVAPYGVPGDMFGGGGAGELLRGVQSEVDKPMIVELAVAAMEELVRMAQLDEPLWSVAPPLDATAAAMETLSEEEYARMFPRGLGPKQYGLRSEASRDSAVVIMTHANLVEILMDANQYAAVFSNIVSRAITLEVLSTGVAGNYNGALQVMSVEFQVPSPLVPTRESYFVRYCKQNADGTWAVVDVSLDSLRPSPVLKCRRRPSGCLIQEMPNGYSKVTWVEHVEVDDRSVHNIYKLLVNSGLAFGARRWVGTLDRQCERLASVMASNIPTSDIGVITSSEGRKSMLKLAERMVVSFCGGVTASVAHQWTTLSGSGAEDVRVMTRKSVDDPGRPPGIVLNAATSFWLPVPPKRVFDFLRDESSRSEWDILSNGGIVQEMAHIANGRDQGNCVSLLRVNSSNSNQSNMLILQESCTDASGSYVIYAPVDVVAMNVVLNGGDPDYVALLPSGFAILPDGPAHDGGDGDGGVGVGSGGSLLTVAFQILVDSVPTAKLSLGSVATVNSLIACTVERIKAAVSGESNPQ

SEQ ID NO: 2564 - protein, 288 aa, Oryza sativa
MDHILKLEPTMHTECGRRARRPAPSRYKVGASSVSATLSSYTRVINMVTVREEIRKGPWTEQEDLQLVCTVRLFGERRWDFIAKVSGLNRTGKSCRLRWVNYLHPGLKRGRMSPHEERLILELHARWGNRWSRIARRLPGRTDNEIKNYWRTHMRKKAQERKSNMSPSSSSSSLTYQSCHPETPSMIIGIEEQELHGGSGCITSIMKSTPVDMDGYPMDQIWMEIEAPNVLPGPCFDEAKDSASNSLSGPLLPYPMWDYYCPETCLRMDDEIKVAPQFGYGKGVGPCY

SEQ ID NO: 2565 - protein, 283 aa, Oryza sativa
LSSSSPQEAAGDTSPQSLLPAATRPYGGCARDPCFSPSSPSYSYSSEGDTIATSADGPMRSAFTFDSTPSEPASRNIDYGGRSVFHPQIVGGGTSPRVPLPSLEIADDGPIYVNPKQYHGILRRRQLRARVEAQNKLVKTRKPYLHESRHRHAMKRARGTGGRFLNTKQLQLQQQSHTTSTKTTTDSQNSSGSVHLRLGGGAIGDQTPFPFKAMDSQANIKRAAASASTFTVTSAAQKDDAFFDRHGHHLSSFSRHFGQASAQGGVGSMHNGSQQRVPAMKMK

SEQ ID NO: 2566 - protein, 389 aa, Oryza sativa
  misc_feature (72)..(72): Xaa can be any naturally occurring amino acid
  misc_feature (99)..(99): Xaa can be any naturally occurring amino acid
  misc_feature (202)..(202): Xaa can be any naturally occurring amino acid
  misc_feature (235)..(235): Xaa can be any naturally occurring amino acid
  misc_feature (259)..(259): Xaa can be any naturally occurring amino acid
  misc_feature (280)..(280): Xaa can be any naturally occurring amino acid
  unsure (1)..(389): unsure at all Xaa locations
MGTGGGEGNKSAALPLEALLALGLDQRTAENALVNSKVTANLAAVIAEAGISGCDKTAGNLLYTGSTYMNEXMIHEKSVDCVYFICVFYKAGLARGCNXVATKYPTNALVHRAVLIDYIVSTKIKNPAQLDAALSFLTNTGPDSLDTGKFEEACGVCVVVSIEEIKSTVNEVLKHNMEAILEQRYHINVGNLCGQVRKMHPXGDAKATKDEIDKKLAEILCPKTDADNVKPVKKXKEKAAKVEEKKTAGVTAAPPSEEXEWNPFSIFPQPKGNFKGHTEXIFFSGGEHMGERLNSKGNILKKTPLRETGGKKGRPRFSPPETPRGIILYYWGTGPRGVLVFFWDFWGTWGGKKKKKKKGGAICWFTLPFRGVLLGVGEQHPPNKKTPSD

SEQ ID NO: 2567 - protein, 270 aa, Oryza sativa
MLRTCGKGVSRVRPGSACARVILHQRYSTLARPILNNGFKSSSFPSQVRFNSTSAAPATNVLTFKHNTLTVSTVKEIYPLEKRVSITPENVQLLLKSGFKQVLVEKGAGIASQISDKDYEAAGATLVDKAAALQADVILKLRPPTLEEVDQIKAGTTLISFINEVDNPKLAEKLASKKLNVFAMDRMPRTISKAQAFDAMSSALGLIGYKAVVEAASNFPRPVASKMTIGRKIPPAQVLVFGAAVAGVEAICTAKNNGAQVFATDTRPRT

SEQ ID NO: 2568 - protein, 140 aa, Oryza sativa
IFTKTVLRELLNFLHFCFLQSAQTHFQLPGLTHSRMPLPLEISEEPVYVNAKQYHGILRRRQSRAKAELEKKVVKSRKPYLHESRHQHAMRRARGTGGRFLNTKKNEDGAPSEKAEPNKGEQNSGYRRIPPDLQLLQKET

SEQ ID NO: 2569 - protein, 174 aa, Oryza sativa
  misc_feature (32)..(32): Xaa can be any naturally occurring amino acid
  unsure (1)..(174): unsure at all Xaa locations
MCGILAVLGAADWSQAKRAHVLSCSRSRTHAXDDHRSRGGPDWSGLYQCEGNFLAQQRLAIVSPLSGDQPLYNADRTGVVVANGEIYNHKKIRKQFASKHTFSTGSDCEVIIPLYEEYGEDFVDMLDGVFAFVLYNTRTKTYMAARDALGVNPLYIGRGSDGALWISSEKKALN

SEQ ID NO: 2570 - protein, 205 aa, Oryza sativa
  misc_feature (143)..(143): Xaa can be any naturally occurring amino acid
  misc_feature (151)..(151): Xaa can be any naturally occurring amino acid
  unsure (1)..(205): unsure at all Xaa locations
MRNTLIFAGNSCPVLTGQICENLGMHPASAELTQFSNGETSVRILTSVREKDVFVVQSGSPSINDSIMELLIMISACKGGSANKVTAVLPYFPYSRQSKEKSHRGAITARMLCKLLGVAGVKHVITVDLHASQMQAFFKCPVXNLHAKPIXAKGNRHNVAKWGRKRPWAPKKRGGNPKGGNSLWGRLSKLKFPDFVSYKTGRAGG

SEQ ID NO: 2571 - protein, 399 aa, Oryza sativa
  misc_feature (43)..(43): Xaa can be any naturally occurring amino acid
  misc_feature (105)..(105): Xaa can be any naturally occurring amino acid
  misc_feature (165)..(165): Xaa can be any naturally occurring amino acid
  unsure (1)..(399): unsure at all Xaa locations
MCGGAIISGFIPPSAAAAAAAAAAAAKKQQGRRVTADVLWPGXLRKGKAAAAEEDFEADFREFERGMSDDEAEGGGGEEEEEEEDDVVVVVPPPATARFVVRAAXKAAPPTADGMLTTKLVQHDGPTARSAKRKRKNQYRGIRQRPWGKWAAEIRAPSKGVRVWXGTYNTAEEAARAYDAEARKIRGKKAKVNFPDEPAVAQKLSLKQNAAKQEKLAPPLKSCGDDAFFQLNSSDNDLFAMLAKVPAKPAEPVDLMPPVKPLASTETFEMNMLSDTSSNSFGSSDFGWEDDTLTPDYTSVFVPNAAMPAYGEPAYLTGGAPKRMRNNYGIAVPQGNGMPNLAQNMPTFDPEMKYLPLPYVESSSDESMDNLLQNDATQDGASNEGIWSLDELLMAAGAY

SEQ ID NO: 2572 - protein, 186 aa, Oryza sativa
  misc_feature (136)..(136): Xaa can be any naturally occurring amino acid
  misc_feature (166)..(166): Xaa can be any naturally occurring amino acid
  unsure (1)..(186): unsure at all Xaa locations
MAALTDLVNLNLSDTTEKIIAEYIWIGGSGMDLRSKARTLSGPVTDPSKLPKWNYDGSSTGQAPGEDSEVILYPQAIFKDPFRKGNNILVMCDCYTPAGEPIPTNKRHNAAKIFSSPEVASEEPWYGIEQEYTLLXQKDINWPPLGWPCWWLSLGPQDPYYCGIGXADKSFGRDIVDSTTGLLYAD

SEQ ID NO: 2573 - protein, 220 aa, Oryza sativa
  misc_feature (144)..(144): Xaa can be any naturally occurring amino acid
  misc_feature (156)..(156): Xaa can be any naturally occurring amino acid
  unsure (1)..(220): unsure at all Xaa locations
VPPRSLLYSSSSLLKRKETAKYLADYLTGDRYPRDADVVINEAIAYAESLKLSGSGKEIWVFDVDETALSTLPYQANHGYGVQPYDQASFIQYVSEGSAPALQGTLRLYQRLLQLGAKRSIPDRRVAEDQRTVTTNNLLSQRQXTLREEVVGGDCXWEKLLFQPVGLQTTTQAFKTDERQKLVDAGYVIVGNIGDQWTDILGSPGLQESARGPNPMYYVA

SEQ ID NO: 2574 - protein, 378 aa, Oryza sativa
MASEMSKNVKVTDDQEVTSQERDQSGGTKVGGEEEIAPLARQSSILSLTLEELQNSLCEPGRNFGSMNMDEFVANIWNAEEFQATTGGCKGAMEEAKVVDSGSGSGDAGGSGLCRQGSFSLPLPLCQKTVEEVWTEINQAPAHTSAPASALQPHAGSGGVAANDRQVTLGEMTLEDFLVKAGVVRGSFTGQAAMGSGMVNGPVNPMQQGQGGPMMFPVGPVNAMYPVMGDGMGYPGGYNGMAIVPPPPPAQGAMVVVSPGSSDGMSAMTHADMMNCIGNGMMIENGTRKRPHREDGCAEKTVERRQRRMIKNRESAARSRARKQAYTVELEAELNYLKQENARLKEAELVEKMMEQSKEKMNANRGGSQLRRSGSCMW

SEQ ID NO: 2575 - protein, 372 aa, Oryza sativa
  misc_feature (297)..(297): Xaa can be any naturally occurring amino acid
  misc_feature (309)..(309): Xaa can be any naturally occurring amino acid
  misc_feature (320)..(320): Xaa can be any naturally occurring amino acid
  unsure (1)..(372): unsure at all Xaa locations
MTTNPLLSNPTATDKQVLRKFLELEQPEDKILATYVWIDGTGENLRSKTMTIDFEPTDINQLSWWNFDGSSTAQAEGSNSDVFLKPVAIFKDPFLLGKNKIVLCETYTYDKRPHRSNKRHSCQKAMEAAKDSQPWFGIEQEYCLLDIDGWPFGWPKPHGYPLPQGPYYCSVGAATSYGRDIVDAHYRACLYAGVKISGANAETMPSQWEFQVGPLEGIEAGDHLWIGRYILHRVAEEFGVAVTFDPKPVSGQWNGGGAGTNFSTKEMRADGGLKHIESAIEKLRVRYAKHIQGYDAXAGKDNKRRLTGXRTASPSITHFXSGGADRCSSCRIPRNCVEDGKGFFEDRRPASNCDPYLVTDMLVRTCVLNETD

SEQ ID NO: 2576 - protein, 459 aa, Oryza sativa
  misc_feature (454)..(454): Xaa can be any naturally occurring amino acid
  unsure (1)..(459): unsure at all Xaa locations
MALSRRLLPLLLRRGSTPSLSPARALSTAAVTADAPAAAAAAAGEEAMTIKGVRISGRPLYMDMQATTPVDPRVLDAMLPFYLSRYGNPHSRTHLYGWESDAAVEEARARVASLVGADPREIFFTSGATECNNIAVKGVMRFYRDRRRHVVTTQTEHKCVLDSCRYLQQEGFEVTYLPVRPDGLVDVAQLADAIRPDTGLVSVMAVNNEIGVVQPLEEIGRICKEKGVPFHTDAAQALGKIPIGVNQMGIGLMSLSAHKIYGPKGVGALYLRRRPRIRVEPQMSGGGQERGIRSGTVPTPLVVGFGAACEIAAKEMDYDHRRASVLQQRLLDGIRGQVDDIVINGSMEHRYPGNLNLSFAYVEGESLLMGLKEVAVSSGSACTSASLEPSYVLRALGVEEDMAHTSIRFGIGRFTTEEEVDRAIELTVHQVKKLRDMSPLYEMAKAGIDLKSIXQWAQH

SEQ ID NO: 2577 - protein, 334 aa, Oryza sativa
MCGGAILAEFIPAPSRAAAATKRVTASHLWPAGSKNAARGKSKSKRQQRSFADVDDFEAAFEQFDDDSDFDDAEEEDEGHFVFASKSRVVAGHDGRAAARAASKKKRGRHFRGIRQRPWGKWAAEIRDPHKGTRVWLGTFNTPEEAARAYDVEARRLRGSKAKVNFPATPAAARPRRGNTRATAVPPPATAPAAAPPRGLKREFSPPAETALPFFTNGFVDLTTAAAPPPAMMMTSSFTDSVATSESGGSPAKKARSDDVDSSEGSVGGGSDTLGFTDELEFDPFMLFQLPYSDGYESIDSLFAAGDANSANTDMNAGVNLWSFDDFPIDGALF

SEQ ID NO: 2578 - protein, 100 aa, Oryza sativa
MSAAGEEDKKPAGGEGGGAHINLKVKGQDGNEVFFRIKRSTQLKKLMNAYCDRQSVDMNAIAFLFDGRRLRGEQTPDELEMEDGDEIDAMLHQTGGCLPA

SEQ ID NO: 2579 - protein, 164 aa, Oryza sativa
TPTARAPPPAWAAARPRGRGGGLRPPPLLPLVRVALEPIDSGAHPGTHPLLGAVEHICFHPLAHASLRHVADLAGAVDADIGDKLQVPMFLNGAAHRDGRTLSYITRQLGYFNPNSSCDQWRGALKRTRSKGVLSTTTTALSSNLPTLPTHPRRRSPSCTYYTQ

SEQ ID NO: 2580 - protein, 216 aa, Oryza sativa
  misc_feature (2)..(2): Xaa can be any naturally occurring amino acid
  misc_feature (175)..(175): Xaa can be any naturally occurring amino acid
  unsure (1)..(216): unsure at all Xaa locations
WXFLGLGIMGKAMAANLLRHGFRVTVWNRTLSKCQELVALGAAVGETPAAVVAKCRYTIAMLSDPSAALSVVFDKDGVLEQIGEGKGYVDMSTVDAATSCKISEAIKQKGGAFVEAPVSGSKKPAEDGQLVILAAGDKVLYDDMVPAFDVLGKKSFFLGEIGNGAKMKLVVNMIXGMMNALSEGLSLADNSGLSPQTLFDVLDLGAIANPMFKLKG

SEQ ID NO: 2581 - protein, 415 aa, Oryza sativa
  misc_feature (304)..(304): Xaa can be any naturally occurring amino acid
  misc_feature (310)..(310): Xaa can be any naturally occurring amino acid
  misc_feature (326)..(326): Xaa can be any naturally occurring amino acid
  unsure (1)..(415): unsure at all Xaa locations
QDKIYLDYNATTPMDKEVVGAIRRSLELNWSNPSSQYPAGKEAKRAINHARASIADMIGTKSSTDIVFVSGGTEANNIVFYSMLRAYEKCRNKQREDVPKLPHIIVSEIEHDSVKLIAENYEQSGLAEVSIVGVNEHGLVEVNQILNLVRPNTILISLMLANNETGVVQPVNELTRRIAEMNLDKEIENGRRVCPLFVHTDAAQAIGKMRVNVNELRVDYLTVVGHKFYGPRIGALFAKNCLGLDKQSRVSPIHHMFYGAGQESGLRPGTENTPMIVGLGKAAEFVSANLDRYAASMRETRDYXEQCLKXKFGEENLHLNGRSEAXEPLPNTCNGSLGSNQNFKGPFGLSNRFFCWGFDPARGLALGGKKGPGLKIFLPQGKYPKKNALSSPFFFIKGGGGRGEKHNKKKKKKNF

SEQ ID NO: 2582 - protein, 194 aa, Oryza sativa
  misc_feature (26)..(26): Xaa can be any naturally occurring amino acid
  misc_feature (118)..(118): Xaa can be any naturally occurring amino acid
  misc_feature (149)..(149): Xaa can be any naturally occurring amino acid
  unsure (1)..(194): unsure at all Xaa locations
MGTGGGEGNKSTALPLEALLALGLDXRRAENALVNSKVSANLAAVIAEAGISGCDKSVGNLLYTVATKYPTNELVHCPVVIDYIVSTKIKNLVQLDGALSFVINTGLDSLDTGKFEEXCGVGVVVSNEEIKSAVNEVLQHNMEAILEQXYYINVGNLCGQVRKMLPWGDAKGTKDDIDKKLAEILGPKADADTI

SEQ ID NO: 2583 - protein, 197 aa, Oryza sativa
MASERVKGTVKWFDATKGFGFITPDDGGEDLFVHQSSLKSDGYRSLNDGDVVEFSVGSGNDGRTKAVDVTAPGGGALTGGSRPSGGGDRGYGGGGGGGRYGGDRGYGGGGGGYGGGDRGYGGGGGYGGGGGGGSRACYKCGEEGHMARDCSQGGGGGGGYGGGGGGYRGGGGGGGGGGCYNCGETGHIARECPSKTY

SEQ ID NO: 2584 - protein, 136 aa, Oryza sativa
MGFSEFGADGGPAAKALRPKYNVFTKNISAHLGVAVPHVELKHIVAATIGLKGLGGLLFILSSSFGAYLLLIYLAFITPVVYDFYNYNMEKSEFVQLFMKFTQNLALFGALLFFLGMKNSIPKRQAKKKAPKSKTN

SEQ ID NO: 2585 - protein, 607 aa, Oryza sativa
  misc_feature (180)..(180): Xaa can be any naturally occurring amino acid
  misc_feature (195)..(195): Xaa can be any naturally occurring amino acid
  misc_feature (219)..(219): Xaa can be any naturally occurring amino acid
  misc_feature (254)..(254): Xaa can be any naturally occurring amino acid
  misc_feature (276)..(276): Xaa can be any naturally occurring amino acid
  unsure (1)..(607): unsure at all Xaa locations
MDKGALMPSPDETCCVGGGGGSSFSSLRAYGRALAQTPRRLAARACAAASPGEEMSRVRARSGADMARALRWPDLVGLGLGGMVGAGVFVTTGRATRLYAGPAVVVSYAIAGLCALLSAFCYTEFAVDMPVAGGAFSYLRVTFGELAAFLTGANLIMEYVFSNAAVARSFTAYLGTAVGXVDAPSKWRIAVPGLXPKGFNEVDLVAVGVILLITVCICXRTKESSSVNMVLKGVHVVVILFVIGKGNFAHGKTXGNLTRPRHNPESPPPGGGSFPXGAAGVFNGAAMVYLSYIGYDAVSTMAEEVERPSRDIPIGVSGSVVLVTLLYCLMAASMSMLLPYDAIDTEAPFSGAFKGSSGWGWVSNVIGAGASLGILTSLMVAMLGQARYLCVIGRSGVMPAWLARVNPRTATPVNASAFLGVFTAALALFTELDILLNLVCIGTLFVFYMVANAVVYRRYVAAAEDDEEGRRRGAVPTLAFLLAFSLVALCFTLVWKLAPRGGARTGLLVACGAAAAAAVAAFRALVPQARRPELWGVPAMPWVPAASVFLNVFLLGSLDRPSYVRFGFFTAAAALVYVLYSVHASYDADEAAAALDGAKVLDEGCKV

SEQ ID NO: 2586 - protein, 319 aa, Oryza sativa
MLERPPILKRYRAPGVGSGGSLEMSSQQQHAGEAPASAAAAARARLRWTGQLHERFVLAVAELGGADRATPKSVLRAMAVPGLTLYHLKSHLQKYRQAVSRGGNGGGGGSGSLNDRSSSSERQPADHDGDSAADEPRTIAYDGDSDGDAKEGLRDSSRSMVQMQREVQRKLQEQIEVKRHLQLRMEAQGRYLQSVLRRAQQVLADHSLASSPEAATAELSELASAVDIECMSSSSPPRHHRQSAATDSCVTTTSSSEAESKAAGSKRLHTSDCTVEQPVQGKRAFNFLQRHNQADQEEEQEEEYAGAEDGSSSEIDLNR

SEQ ID NO: 2587 - protein, 225 aa, Oryza sativa
MTSNPTLHNPSATNKAVLQRFLDLPQPDDKVLATYLWIDGTGENVRSKTMTIDFVPKHADELPWWNFDGFSTGQAEGHNSDVYLKPVAIFNDPFLLGNNKLVMCETYNYDKTPNETNKRFKCVEAMNLAKDSKPWFGIEQEYSLLDIDGWPFGWPKPNGFPAPQGPYYCAVGADRSYGRDIVEAHYKACLFAGVKICGTNGEVMPSQWEFQVGPLEGTDAGDHLW

SEQ ID NO: 2588 - protein, 196 aa, Oryza sativa
MPLTDDKSNKSSNNEKASSSSSSSSGSGSGSAGANENPNSQYECNICLDVARDAVISMCGHLFCWPCLHKWLETRPNAQTCPVCKSAISKDKVIPLYGRNSTDKQDPREKIPPRPQGQRTEAPRQNNMFGFGLEGLQVSFGIGAFPFSIFASTFNLSQDTRFPAPSHGSTQYAEEQFLSRIFLIVAIIFIVWILVA

SEQ ID NO: 2589 - protein, 502 aa, Oryza sativa
MGMERPQEKVATTTTAAFNLAESGYADRPDLDDDGREKRTGTLVTASAHIITAVIGSGVLSLAWAIAQLGWVIGPAVLVAFSVITWFCSSLLADCYRSPDPVHGKRNYTYGQAVRANLGVAKYRLCSVAQYVNLVGVTIGYTITTAISMGYLLSTMTNYSSKFGHAIKRSNWFHRNGHDAACLASDTTNMIIFAGIQILLSQLPNFHKIWWLSIVAAVMSLAYSTIGLGLSIAKIAGGAHPEATLTGVTVGVDVSASEKIWRTFQSLGDIAFAYSYSNVLIEIQDTLRSSPAENEVMKKASFIGVSTTTTFYMLCGVLGYAAFGNRAPGNFLTGFGFYEPFWLVDVGNVCIVVHLVGAYQVFCQPIYQFAEAWARSRWPDSAFVNGERVLRLPLGAGDFPVSALRLVWRTAYVVLTAVAAMAFPFFNDFLGLIGAVSFWPLTVYFPVQMYMSQAKVRRFSPTWTWMNVLSLACLVVSLLAAAGSIQGLIKSVAHYKPFSVSS

SEQ ID NO: 2590 - protein, 304 aa, Oryza sativa
  misc_feature (210)..(210): Xaa can be any naturally occurring amino acid
  misc_feature (264)..(264): Xaa can be any naturally occurring amino acid
  misc_feature (284)..(284): Xaa can be any naturally occurring amino acid
  unsure (1)..(304): unsure at all Xaa locations
MSHTETLWGWYKLDDLCQRGKVIAEYIWIDGTDHTVRSKQRTLPKKVESLADLPEWNYDGSSTWQAVTGNSEVVLKPVAFYPDPFRKGDNVLVLAETFSVDRLKNTITPANTNFRHFSNKIMEEAKDFEPWFGIEQEYTLFEVGKAFFKWPLGWPEGGYPGPQGPYYCSAGATTCFGRPVMDAHYNACLYAGLKIAGTNGEVMPGQWEYXNRPCLGIEIGDHMWLSRYIMLRVTENFNVSISFAPKPIKGDWNGAGCHTNYSTXAMRRMGGIAAITGAIERLRXKHTLHMEDTGEGNNEICWES

SEQ ID NO: 2591 - protein, 293 aa, Oryza sativa
YTKYLTSNNVSNNTNYSTLANSVDSNRKHLIGTRTYQQQAGGGGGGEGTTMPPIEDGKFSPEKYVENLIDANKIVIFSKTTCPWCAKVKELFKSLNETYLSVELDLVENGDEIKKYVIGKTQQTTVPNVFIAGNHVGGFDDTSKAQKQGTLARMLNSGKHKATAGVSSEASSSPRPKPTETIEQYVNKLLETNKVVVFSKSTCPFCAKVKELFSSLKEPIVAIELDEIPEGPEIRDYLFERTGQKTVPNVFVQKTHLGGFEHTQTAQKQGRLEEVLKDAQKAEAQETTNTIYL

SEQ ID NO: 2592 - protein, 268 aa, Oryza sativa
  misc_feature (144)..(144): Xaa can be any naturally occurring amino acid
  misc_feature (158)..(158): Xaa can be any naturally occurring amino acid
  misc_feature (166)..(166): Xaa can be any naturally occurring amino acid
  misc_feature (174)..(174): Xaa can be any naturally occurring amino acid
  unsure (1)..(268): unsure at all Xaa locations
MAHALGCGAATAPAGVGLLHHHEKAGALFSAAGSIVRVQQLSGKGSKSQAIRCAMPSASEHGGISTATASSSDQKKGGLRGKLNKVVLAYSGGLDTSVIVPWLRENYGCEVVCFTADVGQGDIELEGLEKKAKASGASQLVVKXDLKEEFVSEYIYPXCLRAGAVXYERKYLLXGTSRARPGICKAKGLKVCKGKLGANGSCFMDAPEKREMNQGFVFELYIQGFKPRSLKGGGTLGERGGNSPGTGKKWLFGVRAKKNPNGGPISRV

SEQ ID NO: 2593 - protein, 157 aa, Oryza sativa
  misc_feature (97)..(97): Xaa can be any naturally occurring amino acid
  unsure (1)..(157): unsure at all Xaa locations
HASAHASGLVGLEGSVGTLIMDLEEPAESKLMRMNILGEAKYAKQRGTQAVETFRNHIQEGKLNGWVLDDCGDCSVSQGCLVDTNDDPFDVDAYMYXGELGWVHIRQSVHNPNIAINMQSSIPGGCKSMAKDLLDRYLLTSGVNEFVDITEVQKFVK

SEQ ID NO: 2594 - protein, 769 aa, Oryza sativa
MNMIAIHPIYGSSLLVLLAPGEVQDLVVVVLGVKLFVLLSVRSSMRLGSPEENSPVEQVALTVPVGDDPATPVLTFRIWVLGTASCVVLSFLNTFFWYRKEPLTVTAISAQIAVVPLGRLMAAALPERVFFRGRPWEFTLNPGPFNVKEHVLITIFANAGAGSVFAINVITAVRVFYGKRISFFVSLLVVLTSQVLGFGWAGIFRRYLVEPAAMWWPSNLVQVSLFRALHEKERRSKGGMTRTQFFLVAFVCSFAYYIFPGYLFQMLTSLSWICWIFPKSVLAQQLGSGLHGLGIGAIGLDWSSISSYLGSPLASPWFATANIAAGFFIYIYVITPIAYWINLYKAQNFPIFSDGLFTVTGQKYNISTIIDSQFHFDTKAYEKNGPLYISTFFSISYGLGFACLTATVVHVLLFHGSEIWQLSRSAFQDKKMDIHTKLMKRYKQVPEWWFISILIASVAITMFTCEYYIEQLQLPWWGVLLACALAIFFTLPIGIVTATTNQTPGLNIITEYIMGYLYPGRPVANMCFKVYGYIGPQQALAFLQDFKLGHYMKIPPRTMFMAQVVGTLIAAFVYLGTAWWLMDTIPNICNTELLPPGSPWTCPYDHLFYDASVIWGLIGPRRIFGDLGTYSAVNWFFLGGAIAPLLVWFAHKAFPGQKWILLVNMPVLIAGISQMPPATSVNYTAWIFVAFLSGYVVYKYRRDWWERHNYLLSGALDAGLAFMAVLLYLCLGLEKISLNWWGNDLDGCPLASCPIAEGITVQGCPVASA

SEQ ID NO: 2595 - protein, 351 aa, Oryza sativa
  misc_feature (271)..(271): Xaa can be any naturally occurring amino acid
  misc_feature (293)..(293): Xaa can be any naturally occurring amino acid
  unsure (1)..(351): unsure at all Xaa locations
MAAGGALQKAIDIVSRATEEDKNKNYDEALRLYKHSVEYFLHAIKYETHSEKAKQSIREKCAQYLERAEKLQSYINNGSSGGDKKKKPIKDGESPKDNENEDDGDPEKKKMLEKLSGAIVMEKPNVKWSDVAGLENAKESLKEAVILPIKFPHLFTGKRQPWRGILLYGPPGTGKSFLAKAVATEANNSTFFSVSSSDLLSKWLGESEKLVKNLFELARTHKPSIIFIDEVDSLCSSRSDNESESARRVKTEFLVQMQGVGHDNDTVLVLXATNISWCLDAAIKRQFEKPIYXPLPKLKRARLVKVLPGHPPDSLKKTHFKQFSQIVKRLFRGPVLKFFGVFGTRFFFPHF

SEQ ID NO: 2596 - protein, 279 aa, Oryza sativa
FSGSAASAAGFLCLSSSFRRIGLRRLLYLDKLRTKSDRVRLNYTARLSFSFRLLASLVAPCFAAEAAYKVWWYATSGDRVPFFGNDVLSNAVACSVEMAAWMYRSAIYLLTCVLFRLICHLQGLRLEDFAGTLLVEVEEGRAGVERVLREHLDIRKQLKVISHRFRKFIVASLLIATASQFASLLLTTRHDSVDDLLNTSELALCSVVLMSGLIIILSSAAKITHQAQALTGQTTKWHACCTIEPVPDEEAEPGSNHSSMLEVEPVSDSDGESSEGGPG

SEQ ID NO: 2597 - protein, 279 aa, Oryza sativa
  misc_feature (171)..(171): Xaa can be any naturally occurring amino acid
  misc_feature (197)..(197): Xaa can be any naturally occurring amino acid
  misc_feature (228)..(228): Xaa can be any naturally occurring amino acid
  unsure (1)..(279): unsure at all Xaa locations
MQEFHPVPGLAGRLFGGAAAAAAVAAVEEVRCPRCDSSNTKFCYYNNYNLSQPRHFCKACRRYWTKGGLLRNVPVGGGCRKPKRPAPPPSSSFTGGGGGGGGCGHRDSKSARSAGGGGDGSGSTASATATPAAAPASSNTLSAAVSQPSSVDALSPPPAPMFADQATAFAXSLFAPPPPPPWQGFPAFASFPAQPKXEEGVPQAPSLAAPEQKRPPSGGVHSAPKGIXPPFRPTRSTKRPPKAAGDVADQLEKSKGKRGVLGGCISAAPPTGEKRLCGK

SEQ ID NO: 2598 - protein, 250 aa, Oryza sativa
  misc_feature (14)..(14): Xaa can be any naturally occurring amino acid
  unsure (1)..(250): unsure at all Xaa locations
MFNMAGFAFVYMEXDERDADEAIHRLDRIEFGRKGRRLRVEWTKEDRSGGRRGNSKRSPNNTRPTKTLFVINFDPINTRTRDLERHFDQYGKISNVRIRRNFAFVQYELQEDATKALEGTNGSTLMDRVISVEYALRDDDEKRNGYSPERRGRDRSPDRRDYRGRSASPYGRGRERGSPDYGRGRERGSPDYGRGGDRGSPDYHRGASPQGGNKGDERGSPPNNYDRERREASPGYDRPRSRSPARYERE

SEQ ID NO: 2599 - protein, 260 aa, Oryza sativa
  misc_feature (97)..(97): Xaa can be any naturally occurring amino acid
  misc_feature (106)..(106): Xaa can be any naturally occurring amino acid
  misc_feature (126)..(126): Xaa can be any naturally occurring amino acid
  misc_feature (164)..(164): Xaa can be any naturally occurring amino acid
  misc_feature (210)..(210): Xaa can be any naturally occurring amino acid
  misc_feature (222)..(222): Xaa can be any naturally occurring amino acid
  unsure (1)..(260): unsure at all Xaa locations
GYATLVPTDDEDLWHIYNLIQRGDHIRMKTTRKIVDDSNASGLKKIRKRVLTLTLQIIEINYFAKEDRLCISIKGRNAKENDFLKIGQFHTFEIELXNSAYNHKGXWALYEINLLKQISQDEDGVXIAAMVMEEGVAHLCYVKPSITLLKKKVERNISKKSSGXEIYKKSLLKFFQECYNAISSLDFGRIKCLVIASPGSLNDQFLRHIXQKSKRIMIKSKXKWIEKIVLAKSSNGYLNSLNEELEEPTGICKDGKSKSC

SEQ ID NO: 2600 - protein, 241 aa, Oryza sativa
DGIDAIEEVIYHDETYDVTTIRASTPMFLMARKIKALGVKMVLSGEGSDELLGGYLYFHFAPNKEEFHKETCRKVKALHQYDCLRANKATSAWGLEVRVPFLDKEFINVAMSMDPEWKMYNADLGRIEKWVMRKAFDDEEHPYLPKHILYRQKEQFSDGVGYNWIDGLKAFTEQQVSDEMMKNAAKVYPHNTPVNKEAYYYRMIFERLSPCRCTCARETDPSMWRVIDHSSELILETIHRN

SEQ ID NO: 2601 - protein, 424 aa, Oryza sativa
MADTGAKSKVVLAYSGGLDTSIILKWLQDENYDVICFIADVGQEEDLEAARQKAIALGATKVYVEDLKKDFVENFIFPAIKFNAIYESRYLLGTSLARPVIAAKQVEIAVKEGAEYVAHGATGKGNDQVRFELSAYALVPGIKIIAPWRDPKFTSRFKGRTDLLNYGREKGIPLPSGERPPYSMDENLLHISYESGELEDPAHPANEAMFRRTLPIKEWADEPEKIRIHFKNGTPISVENGSHKVEGSVELFTYLNSLGRKHGIGRIDIVENRFVGIKSRGVSETPGSTILRSAHLNIEGVRMDREGDAASRTCSFPQFSPLLYTGFWFSQKRDFFVPPFGQKPRGEEGGGVVFPLAKGRGPFPSLPFFPPPPPHPPLWVSGGGGGLGLQPPQPLWGGFLPPKLTFPLPPPPPKPPRGGRVGAP

SEQ ID NO: 2602 - protein, 321 aa, Oryza sativa
MAPFLVVFAVMAAAFASASGSGELTPDFYSETCPQALTTIKLVVGAAILKEPRMGASLVRMHFHDCFVNGCDGSVLLDDTDDMIGEKLAKPNNMSLRGFDVIDAIKVAVNTACLGNVVSCADILAVAARDSIVALGGSSYEVLLGRRDATTASIDDANDDIPNPFMDLPDLVDNFESHGLSLQDLVVLSGGHTLGYSRCLFFRSRLYNETDTLDPAYAAALEEQCPIVGDDEALASLDDTPTTVDTDYYQGLTQGRALLHTDQQLYQGGGGGDSDELVKYYGENPDKFWEDFGAAMVKMGNISPLTGDDGEIRENCRVVNQ

SEQ ID NO: 2603 - protein, 293 aa, Oryza sativa
MEVGFLGLGIMGKAMAANLLRHGFRVTVWNRTLSKCQELVALGAAVGETPAAVVAKCRYTIAMLSDPSAALSVVFDKDGVLEQIGEGKGYVDMSTVDAATSCKISEAIKQKGGAFVEAPVSGSKKPAEDGQLVILAAGDKVLYDDMVPAFDVLGKKSFFLGEIGNGAKMKLVVNMIMGSMMNALSEGLSLADNSGLSPQTLLDVLDLGAIANPMFKLKGPSMLQGSYNPAFPLKHQQKDMRLALALGDENAVSMPVAAASNEAFKKARSLGLGDLDFSAVYEVLKGAGGSGKA

SEQ ID NO: 2604 - protein, 248 aa, Oryza sativa
ISYCAHHRAPNPDNVLIIQTPAGTISSKKLVQSNGTVAASRLIRKDLPKDSVSEVEISENLSAARCRFYVKKELKRSREGAIAHRVRGSCQHRWDEIDSLNPPREERDPESFSTFKERLHYLQKTEHTRVCFGRSGIHRWGLFARRGIQEGEMVLEYRGEQVRRSVADLREEQYRVQGKDCYLFKISEEVVVDATDKGNVARLINHSCTPNCYARIMSVGHDESRIVLIAKKNVSAGEELTYDYLFAP

SEQ ID NO: 2605 - protein, 344 aa, Oryza sativa
MESGRLIFSTAGSGAGQMLFLDCGAGGGGVGGGAMFHRGARPVLGMEEGGRGVKRPFFTTPDELLEEEYYDEQLPEKKRRLTPEQVHLLERSFEEENKLEPERKTELARKLGLQPRQVAVWFQNRRARWKTKQLERDFDRLKASFDALRADHDALLQDNHRLHSQVMSLTEKLQEKETTTEGSAGAAVDVPGLPAAADVKVAVPDAEEPALEEAAAAFEEQQEQQVKAEDRLSTGSGGSAVCEHGRANWVVGCGRQHLAAVDSSVESYFPGGDEYHDCVMGPMDHAAGGIQSEEDDGAGSDEGCSYYADDAGVLFADHGHHHHHQHADDDEEDGQQISCWWMWN

SEQ ID NO: 2606 - protein, 162 aa, Oryza sativa
MSDSEEHHFESKADAGASKTYPQQAGTIRKNGYIVIKNRPCKVVEVSTSKTGKHGHAKCHFVGIDIFNGKKLEDIVPSSHNCDVPHVDRTDYQLIDISEDGFVSLLTESGNTKDDLRLPTDDTLTNQIKNGFGEEGKDMILTVMSAMGEEQICAVKEIGAKN

SEQ ID NO: 2607 - protein, 92 aa, Oryza sativa
MSDEQEQPKGDSEHLNLKVKSQDGNEVFFKVKKTTQFSKVLQAYCKKVGADAESVRFLFDGQRVQPNQTPADLGMEDEDEIDAMVTQTGGSY

SEQ ID NO: 2608 - protein, 218 aa, Oryza sativa
  misc_feature (98)..(98): Xaa can be any naturally occurring amino acid
  unsure (1)..(218): unsure at all Xaa locations
MYSNFKEQAIEYVKQAVQEDNAGNYVKAFPLYMNALEYFKTHLKYEKNPKIKEAITAKFTEYLRRAEEIRAVLDEGGGGGGANGGDAAVATRPKTKGXRDGEGGGDDSEQSKLRAGLNSAIITEKPNIKWNDVAGLESAKQALQEAVILPVKYPQFFTGKRRPWRAFLLYGSPGTGKSYLAKAVAPTVIYLFSIFLRPVQWWGRLTFWNFPCLKALIF

SEQ ID NO: 2609 - protein, 223 aa, Oryza sativa
  misc_feature (53)..(53): Xaa can be any naturally occurring amino acid
  misc_feature (91)..(91): Xaa can be any naturally occurring amino acid
  unsure (1)..(223): unsure at all Xaa locations
MEVGNGKCGGGGAGCELCGGVAAVHCAADSAFLCLVCDDKVHGANFLASRHRXRRRLGVEVVDEEDDARSTASSSCVSTADSASSTAAAAXAVESEDVRRRGGRGRRAPRAEAVLEGWAKRMGLSSGAARRRAAAAGAALRAVGRGVAASRVPIRVAMAAALWSEVASSSSRRRRRPGAGQAALLLRLEASAHVPARLLLTVASWMARASTPPAAEEGWAECS

SEQ ID NO: 2610 - protein, 228 aa, Oryza sativa
MATRMCGRAGEPAVRKGPWTLEEDLILVSYISQNGEGSWDNLARSAGLNRNGKSCRLRWLNYLRPGVRRGSITPEEDMVIRELHSRWGNRWSKIAKHLPGRTDNEIKNYWRTKIHRKPRGRSQLLQEPCEDAMGMGMSTTTSEAASTSASSGQSQASPGVWDEYMQASSFPHPELVSFAADHHLEMAGVGEVAAAAAAQFVPTEFGFNDGFWNFVDNFWETMPVSDVV

SEQ ID NO: 2611 - protein, 407 aa, Oryza sativa
MDALCDFCREQRSMVYCRSDAASLCLSCDRNVHSANALSRRHTRTLLCDRCVGQPAAVRCLEENTSLCQNCDWNGHGAASSAAGHKRQTINCYSGCPSSAELSRIWSFSMDIPTVAAEPNCEEGINMMSINDNDVNNHCGAPEDGRLLDIASTALMSDLPTGDKFKPLIGSSSGDGMNLLPLNSDQPAEPVSTTPKAPCVTDKDMFNDGSVYGDFCVDDADLTFENYEELFGTSHVQTEQLFDDAGIDSYFEMKDVPADESNEQPKPVQPECSNVASVDSGMSNPAARADSSHCIPGRQAISNISLSFSGLTGESSAGYFQDCGVSSMILMGEPPWHPPGPESSSAGGSRDNALTRYKEKKKRRKFDKKIRYASRKARADVRKRVKGRFVKAGEAYDYDPLSQTRSY

SEQ ID NO: 2612 - protein, 556 aa, Oryza sativa
  misc_feature (329)..(329): Xaa can be any naturally occurring amino acid
  unsure (1)..(556): unsure at all Xaa locations
MSSSQSLLLLAAPLSPPTLPRLVPPPPTSAPRLPRLAANLSRPPPLAISSPGCDGGGGGGGGGGGGGWWRQGGSGPPDPGDGWWRWLQSLHPELLLLFVLLHSGAFAAIPAALAEAIGGSGGREGASVWEVRGGARTLLVPDPTGTSYVVAGDGRRKQAEGEDAEKAGAGRAELAALRRQLELSWRRCATVAVQLLLPDGYPDSVSSDYLQYSLWRGVQGIASQISGVLSTQALLYAVGLGKGAIPTAAAVNWVLKDGLGYLSKILLSKFGRHFDVNPKGWRLFADLLENTAYGLEILTPVFPHLFVPIGAAAGAGRSAAALIQAATRXSCFYAGFAVQRNFAEVIAKGEAQGMVSKFLGIMLGIALANRIGSSVSLALISFAGVTAVHMYCNLKSYQSIQLRTLNPYRASLVFSEYLLSGQVPSVKEVNDEEPLFLNLSIGTSRKLLKGFGLLDPALKAWSAGRDWRWTGGGWRYGRQSAGTGWPTTWEPQGRGGGVWLGAAAVEEGGGWEVMCHRVGVGEGARVPCQGGDWEGELESYLSANRFGAEVPNLSAK

SEQ ID NO: 2613 - protein, 356 aa, Oryza sativa
  misc_feature (87)..(87): Xaa can be any naturally occurring amino acid
  unsure (1)..(356): unsure at all Xaa locations
VGLGKGAIPTAAAVNWVLKDGLGYLSKILLSKFGRHFDVNPKGWRLFADLLENTAYGLEILTPVFPHLFVPIGAAAGAGRHEDSILXAATRSCFYAGFAVQRSFAEVIAKGEAQGMVSKFLGIMLGIALANRIGSSVSLALISFAGVTAVHMYCNLKSYQSIQLRTLNPYRASLVFSEYLLSGQVPSVKEVNDEEPLFLNLSIGTSRKESKILSPQAKDAAEIICRRLQLGSKLSEIIENKEDACALFDLYKNEQYLLTEYKGKFCVILKEGSSPEDMLKSLFHVNYLYWLEKYLGIKPSDVASACRPGGRLEASLDYTQREFSHVKLDGSNGGWVMDGLIARPLPVRIRIGDAPS

SEQ ID NO: 2614 - protein, 469 aa, Oryza sativa
MGGAGEGDGQTEPLLEKLSNSSSSEIDKRTGTAWTATAHIITAVIGSGVLSLAWSVAQLGWVGGPAAMVLFAGVTLVQSSLLADCYIFHDPDNGVVRNRSYVDAVRFYLGEKSQWFCGFFLNINFFGSGVVYTLTSATSMRAIQKANCYHREGHDAPCSVGGDGYYMLMFGLAQVVLSQIPGFHDMAWLSVLSAAMSFTYSLIGFGLGVAKVITNGVIKGGIGGIAMVSATQKVWRVSQAIGDIAFAYPFASVLLEIEDTLRSPPPESETMRTASRASIAVTTFFYLCCGCFGYAAFGDATPGNLLTGFGFYEPYWLIDFANLCVAVHLLGGYQVYSQPVFAAVERRMGGAGAGVVEVAVPAAVAWPSRWRRGCRVNVYRLCFRTAYVAATTALAVWFPYFNQVVGLLGAFTFWPLSIHFPVEMYLVQKKVAPWTPRWLAVRAFSAACLATGAFASVGSAVGVFSSKTS

SEQ ID NO: 2615 - protein, 131 aa, Oryza sativa
MAAARAAVPIAVFLLLVLAEADPAAATRSPSAFVQNAIYSNRITIFSKTYCPYSMRAKRIFRDLKENPYIVELDLREDGREIQSVLLDLVGRHTVPQVFVNGQHVGGSDDTANAHSNGQLQKLLGNSQSQR

SEQ ID NO: 2616 - protein, 407 aa, Oryza sativa
MAPPPHSDSDLLKPRDVCIVGVARTPIGALLGSLSSLPATKLGSVAIQAALRRANVEPALVQEVFMGNVLSANLGQAPARQAALGAGLPDTVPCTTVNKVCSSGMKAVMLAAQTIQLGMHDVVVAGGMESMSNAPKYVAAARRGSRFGHDVLIDGMLKDGLWDVYNDFPMGMCAELCADQHSISREEQDLYAIQSNERAIAARDSGTFSWEIAPVEISSGRGKPPLIVDKDESLAKFNSAKLRKLGPTFKKNGSVTAGNSSSISDGAAAIVLVSGQKAKSLGLQVIARIRGYADAAQAPELFTTTPALAIPKAVSNAGLQTSQIDYYEINEAFSVVALANQKLLGIPSGKLNLSGGGVSLGHPIGCSGARIIVTLLGILRHKNGKIGVAGVCNGGGGASALVVELII

SEQ ID NO: 2617 - protein, 796 aa, Oryza sativa
MATGEAAAAAASPPELASFLAIGLDQRTAENALANRKVTANLTAVIAEAGVSGCDKSVGNLLYTVATKYPANALVHRPVVIQYIVSSKIKTPAQLDAALSFLSTLGPDPLDTAKFEETCGVGVVVSTEEIQSMVTDILKENMEAIVEQRYHINVGSLCGQVRKWHPWGDAKFIKEEIDKRLTEILGPKTEADNVKPVKKKKEKPAKVEEKKTAVAAPAPPSEEELNPYSIFPQPEENLKVHTEIFFSDGNIWRAHNRKDILEKHLKATGGKVMTRFPPEPNGYLHIGHAKAMFIDFGLAKERNGHCYLRFDDTNPEAEKKEYIDHIQEIVRWMGWEPYKVTYTSDYFQELYELAVCLIKKGLAYVDHQTPEEIKEYREKQMNSPWRDRPIEESLKLFEDMRHGLVAEGKATLRMKQDMQNDNKNMADLIAYRIKFTPHPHAGDKWFIYPSYDYAHCLVDSLENITHSLCTLEFDIRRPSYYWLLVSLDQYQPYVWEYSRLNISNNVMSKRKLNKLVTEKWVDGWDDPRLLTLAGLRRRGVSSTAINSFIRGMGITRSDNSLIRLERLEYHIREELNKVAPRAMVVLHPLKVVINNLDYGTIIDLDAKKWPDAPGDDASAYYKVPFSRTVYIEQSDFRVKDSKDYYGLAPGKTVLLRYAFPIKCTEVIYGDNSDNIIEIRAEYDPSKATKPKGVLHWVAEPSPGVNPLKVEIRLFEKLFLSENPVELEDWLGDLNPRSKEVIKGAYAVPSLATAALGDKFQFERLGYFAVDSDSTAEELVFNRTVTLRDSYGKAGPK

SEQ ID NO: 2618 - protein, 151 aa, Oryza sativa
  misc_feature (60)..(60): Xaa can be any naturally occurring amino acid
  unsure (1)..(151): unsure at all Xaa locations
LFGTSHIQTEQLFDDAGIDSYFESKEIPSGNSDEQPKLMQPVTSNAVSADSGMSIPGAKXAGDYQDCGVSPVLLMGEPPWHPPGPEGSFAGATRDDAITRYKEKKKRRKFDKKIRYASRKARADVRKRVKGPVVKAGEAYDYDPLCETRSY

SEQ ID NO: 2619 - protein, 752 aa, Oryza sativa
MAPAVAVVAAAAAFPFRLFSAEARRNTKGSRSKRGSARPLKPSPPPRPSASSSAAGGGGATTFTRLPLRNAPASVEVTLDRFPTANPEPRASTFTRRNGERLGDDEEDEEEEEDEVELGLRGATTFARLPLRDSPDGGELTIGHFDAGVAPQEGLRSRAISRQLVEHLDDVEEEEEEQVVSRLDIFEGAKGREARAFLPDEDDEDDDVVVFDPEYDGYSDDEEFVATAVEQSPRGDAIAVAELEKLKYDNDDDDDDDDEVVVFHPDDDEEVDVFEDYDDDEEEETKEKGVPAVMRCFDTAKIYAKAGDGGNGVVAFRREKYVPLGGPSGGDGGRGGNVFVEVDGDMNSLLPFRKSVHFRAGRGAHGQGRQQAGAKGDDVVVKVPPGTVVRSAAGDVELLELMRPGQRALLLPGGRGGRGNAAFKSGTNKAPRIAEKGEKGPEMWIDLELKLVADVGIVGAPNAGKSTLLTAISAAKPTIANYPFTTLLPNLGVVSLDFDATMVVADLPGLLEGAHRGYGLGHEFLRHSERCSVLVHVVDGSGEQPEYEFEAVRLELELFSPSLVDKPYIVVYNKMDLPEASERWNKFQEKLQAEGIEPYCISAMNRQGAEDVVLAAYKVLQKDRQRMKDDEEWNGPENLNHVADAIKRERRAPMNEFEIFHDKGTNTWNVVGAGIERFVQMTNWQYSESLKRFQHALEACGVNKTLIKRGVKEGDTVVVGEMEMVWTDEPSKTRSSKTMNSKDDSVRWPEFG

SEQ ID NO: 2620 - protein, 730 aa, Oryza sativa
MDFGDEPEGSDSQRRRKRYHRHTPRQIQQLEAYAFSLFFFLLLFFYVLLAFVRHGGGAMDGGMKWMFKECPHPDENQRAQLSRELGLEPRQIKFWFQNRRTQMKAQHERADNCFLRAENDKIRCENIAIREALKNVICPTCGGPPVGEDYFDEQKLRMENARLKEELDRVSNLTSKYLGRPFTQLPPATPPMTVSSLDLSVGGMGGPSLDLDLLSGGSSGIPFQLPAPVSDMERPMMAEMATRAMDELIRLAQAGDHIWFKSPGGGVSGGDARETLNVDTYDSIFSKPGGSYRAPSINVEGSRESGLVLMSAVALADVFMDTNKWMEFFPSIVSKAHTIDVLVNGMGGRSESLILMYEELHIMTPAVPTREVNFVRYCRQIEQGLWAIADVSVDLQRDAHFGAPPPRSRRLPSGCLIADMANGYSKVYAMDNVPHAMVFWFRLADDVAHARVEEKSPINVLYRDLVLSGAAFGAHRWLAALQRACERYASLVALGVPHHIAGVTPEGKRSMMKLSQRMVNSFCSSLGASQMHQWTTLSGSNEVSVRVTMHRSTDPGQPNGVVLSAATSIWLPVPCDHVFAFVRDENTRSQGLNASQNSMLILQESCTDASGSLVVYSPIDIPAANVVMSGEDPSSIPLLPSGFTILPDGRPGSAAGASTSSAGPLAAARGGGGGGAGGGSVVTVAFQILVSSLPSSKLNAESVATVNGLITTTVEQIKAALNCSAHGHHP

SEQ ID NO: 2621 - protein, 287 aa, Oryza sativa
MGMANEESPNYQVKKGGRIPPPRSSLIYPFMSMGPAAGEGCGLCGADGGGCCSRHRHDDDGFPFVFPPSACQGIGAPAPPVHEFQFFGNDGGGDDGESVAWLFDDYPPPSPVAAAAGMHHRQPPYDGVVAPPSLFRRNTGAGGLTFDVSLGERPDLDAGLGLGGGGGRHAEAAASATIMSYCGSTFTDAASSMPKEMVAAMADDGESLNPNTVVGAMVEREAKLMRYKEKRKKRCYEKQIRYASRKAYAEMRPRVRGRFAKEPDQEAVAPPSTYVDPSRLELGQWFR

SEQ ID NO: 2622 - protein, 158 aa, Oryza sativa
MGFLSFAGRVLFAAAFLLSAYQEFSEFGVDGGPAAKALQPKFNTIVANISTRTGLVVPHIELKHIVAAMISLKGLGGLLFILSSSLGAYLLLFHLAFITPVVHDFYNYDIESAEFVQLFTKFAQNCALVGALLFFLAMKNSIPKRQPNRKKAPKPKST

SEQ ID NO: 2623 - protein, 212 aa, Oryza sativa
MAPLPPRAISLVFLFLFFTAASATRRLDDAGGQPTAASSATAFLRSRCATTRYPDVCYDSLLPYASTFQTSHVKLAVAAANVAAAKLRAFSARINDLLAQGGAARVDAALKDCKSTISDAGDLARQSSAELGQLDAGAAAAGVSSRQARWHVSNVQTWLSAAITDEGTCTDGFEEAGEAAAGSPAGKEVAAGVARVKQHTSIALALVNGIPL

SEQ ID NO: 2624 - protein, 469 aa, Oryza sativa
  misc_feature (102)..(102): Xaa can be any naturally occurring amino acid
  misc_feature (144)..(144): Xaa can be any naturally occurring amino acid
  unsure (1)..(469): unsure at all Xaa locations
MGGEEGMAAGRKKRVGRYEVGRTIGQGTFAKVKFAVDADTGAAVAMKVLDKDTILNHRMLHQIKREISIMKIVRHPNIVRLNEVLAGKTKIYIILELITGGXEWFDKITSPGETSWKLNKGSNFRHFFGCLGFLAYEKGFFYKXLKPENLLLDSRGNLKVSDFGLSTLAQKKCSDWDFFFEGFQGVGLLHTTCGTPNYVAPEVLSNNGYDGSAADVWSCGVILYVLMAGYLPFEEDDLPTLYDKITAGQFSCPYWFSPGATSLIHRILDPNPKTRITIEQIREDTWFKKTYVAIKRGEDENVDLDDVQAVFDNIEDKYVSEQVTHNDGGPLVMNAFEMITLSQGLDLSALFDRQQEFVKRQTRFVSRKPAKTIVATIEVVAETMGLKVHSQNYKLRLEGVSSNRMSPFAVVLQVFEVAPSLFMVDVRKVAGDTLEYHRFYKNLCNKMESIIWRPIEVSAKSALLRTATC

SEQ ID NO: 2625 - protein, 657 aa, Oryza sativa
  misc_feature (412)..(412): Xaa can be any naturally occurring amino acid
  unsure (1)..(657): unsure at all Xaa locations
MEFQPFPQGVHPNTSEPAMEPMASESSVPIGTAFADLLLQGPEHPSLWNDLTGMFRKAFRWQGADKRFTLSVYVMSVLQGLFPILDWWKTYNLKFFRSDLMAGLTLASLSIPQSIGYATLAKLDPQYGLYTSVVPPLVYAVTGSSREIAIGPVAIVSLLLSSMIQKIVDPSVDPAFYRKMVFTVTFLTGVFQFAFGLFRLGFLVDFLSHAAIVGFMGGAAIVIGLQQLKGLLGLSHFTNRTDVVSVTKAVWVSVHETWHPENVFIGCSFFMFILAMRFIGRKYKKLFWVSAIAPVLSVALSTLFVYATRADKHGVKIIQKVNSGINASSVEQIDLKGGYAAECAKIALVCAVIALTEAVAVGRSFSAINGYRLDGNKEMVAMGFMNIAGSLSSCYVATGSFSRTAVNFAAGXAKTTVSNIIMAATVMVALELLTKLLYYTPVSILASIILSALPGLINVQEVRFLWKVDKMDFLTCMGSFLGVLFGSVEIGLSVALLVSFAKIIIQSIWPQVEILGRLQGTEIFCNVKQYPVVHETPTVLTVRIETSFLCFVNSSSIKEKIMGWVTDEREAFCSVVLDMSNVVNMDTSGLVALEELHKELACLGIQMAIAKPGWQVIHKMKLARLVDGIGEGWFFLTVGEAVEACLANKAGNALECC

SEQ ID NO: 2626 - protein, 223 aa, Oryza sativa
  misc_feature (28)..(28): Xaa can be any naturally occurring amino acid
  unsure (1)..(223): unsure at all Xaa locations
KNLNQKLKIARGTRRHPPLLLLFLAVAXAAATIAGASQSTRPRPAVSPAAAADFVRRSCRATRYPQVCERSLMPQAPAVGRSPRLLAQAALTVGADRARSCSGYLGGGGSSSSSKRSGGGGRGGAVGDCADTLRDAEERLRQSAAEMSRMGRSGSPRFAWRLSNVQTWASAALTDASTCLDSLATYAAPGIDVDALRKRVGAVSQATSNALALVNNLDPHHHL

SEQ ID NO: 2627 - protein, 532 aa, Oryza sativa
MATCAADLAPLLGPVAANATDYLCNRFADTTSAVDATYLLFSAYLVFAMQLGFAMLCAGSVRAKNTMNIMLTNVLDAAAGALFYYLFGFAFAFGTPSNGFIGKQFFGLKHMPQTGFDYDFFLFQWAFAIAAAGITSGSIAERTQFVAYLIYSAFLTGFVYPVVSHWIWSADGWASASRTSGPLLFGSGVIDFAGSGVVHMVGGVAGLWGALIEGPRIGRFDHAGRSVALKGHSASLVVLGTFLLWFGWYGFNPGSFTTILKTYGPAGGINGQWSGVGRTAVTTTLAGSVAALTTLFGKRLQTGHWNVVDVCNGLLGGFAAITAGCSVVDPWAAIICGFVSAWVLIGLNALAARLKFDDPLEAAQLHGGCGAWGILFTALFARQKYVEEIYGAGRPYGLFMGGGGKLLAAHVIQILVIFGWVSCTMGPLFYGLKKLGLLRISAEDETSGMDLTRHGGFAYVYHDEDEHDKSGVGGFMLRSAQTRVEPAAAGCLQQQQPSVTNPERTTSQRRKKSRVSLPLRSRSSRHKFDPHI

SEQ ID NO: 2628 - protein, 1127 aa, Oryza sativa
MPGDTTHSVNFGTSKNWQCSSASVAALSCEVLGAAALQSMEASETLASDAAIADCLARALRRGSQRVAEAACNAIMDLSASSAGREHLAGSAVLQSILYLFSQVEFISGVIDIRSTECSKSASKANKSFYLMVDTLVFMVNSCQVDTLHNLQQDVVRKVLPLLHKIWKNVDKLGSSTDCINSKNQLQRKEHEISEAIFRLSMNIACPAHLEPDEVRRSIFGQSVSDYENFLLNYWEKSTYLVTRKQKNLHVDSVFTSLLNEFDLKTPDTIIQSLVNGIVSCPAIASDELDISSFLREVQGSLGATVKYRQDIRVVRINDQCDQTSIGYAMEEHFFDDGMTFQDADAFVEKCKDAFKNGFSVALRGMEFRSEKIAAIASAVADLFGQPSVGANIYFSPPRAQGLARHYDDHCVLVWQLLGCKKWMIWPDTKLLLPRLYEPFEPLDDLVDDCGGRMEILLEGDIMYVPRGFVHEAHTDVDVGGFEVNSTVDCSLHLTLAIEVEPPFEWEGFTHIALHCWTEKHWSSPFVKSQEEARTSLFALLLHVAIRLLSKNDATFRKACMVAAKLPPSSSCTTTHSKALRSNQRSFFDEIIKKIDRSCNFKEALMCIGLAVREKNDEPFQWMCWLRHLPQHGGTNDQVDFCNILGALEELLEAVSCNLEQSLTEFTDFKLKFCRLSELAVVPAMQCQVGAVRARPAAAAAAAGGRVWGVRRTGRGTSGFRVMAVSTETTGVVTRMEQLLNMDTTPFTDKIIAEYIWVGGTGIDLRSKSRTISKPVEDPSELPKWNYDGSSTGQAPGEDSEVILYPQAIFKDPFRGGNNILVMCDTYTPAGEPIPTNKRNRAAQVFSDPKVVSQVPWFGIEQEYTLLQRDVNWPLGWPVGGYPGPQGPYYCAVGSDKSFGRDISDAHYKACLYAGINISGTNGEVMPGQWEYQVGPSVGIEAGDHIWISRYILERITEQAGVVLTLDPKPIQADSVICFVIRLRLILQITKSMREDGGFEVIKKAILNLSLRHDLHISAYGEGNERRLTGLHETASIDNFSWGVANRGCSIRVGRDTEAKGKGYLEDRRPASNMDPYVVTALLAETTILWEPTLEAEVLAAKKLALKFLENHATFHSPVNILVEHHT

SEQ ID NO: 2629 - protein, 349 aa, Oryza sativa
  misc_feature (7)..(7): Xaa can be any naturally occurring amino acid
  unsure (1)..(349): unsure at all Xaa locations
MGDSGGXSVVSVDVERISFGGKEHHIQTNHGSVSVAVYGDHDKPALVTYPDIALNHMSCFQGLLFCPEASSLLLHNFCIYHISPPGHELGAAPVSPSSPVASVDELADQVSDVLDFFGLGPVMCLGVTAGAYILTLFATKYRERVLGLILVSPLCRTPSWTEWFHNKVMSNLLYYYGMCNMVKDCLLQRYFSKGVQGCSAVPESDIVQASRSFLDQRQSMNVWRFIHTINERHDLTESLKELQCRTLIFVGQNSQFHAEAVHMTSKLDERYSALVEVQGCGSVVTEEQPHAMLMPLEYFLMGYGLYRPSQISCSPRSPLNPFCISPELLSPESMGVKLKPIKTRANLEV

SEQ ID NO: 2630 - protein, 132 aa, Oryza sativa
  misc_feature (36)..(36): Xaa can be any naturally occurring amino acid
  misc_feature (45)..(45): Xaa can be any naturally occurring amino acid
  misc_feature (57)..(57): Xaa can be any naturally occurring amino acid
  misc_feature (60)..(60): Xaa can be any naturally occurring amino acid
  misc_feature (63)..(64): Xaa can be any naturally occurring amino acid
  misc_feature (100)..(100): Xaa can be any naturally occurring amino acid
  misc_feature (108)..(108): Xaa can be any naturally occurring amino acid
  unsure (1)..(132): unsure at all Xaa locations
PRVRGMESDEEIGRVPELGLERARSSPPRHGRVPGXPSPPPTTTXPSPPTAQASGAXGAXPSXXEHKRLKRLLRNRVSAQSARERKKAYLNDLEVKVKDXEKKNSELXEERFSTLQIEEPDAQDRYLKDYNL

SEQ ID NO: 2631 - protein, 361 aa, Oryza sativa
MATTRASLTDPLLPSPAARAPVKAKKLSWSMLHASSKDERRGQSGEAEAEASGGVHANPSSPARMQEQATSSRPSSSERSSSSGGHHMEIKEGKEAPLRSLLLPFLDFHFTVPLSGMESDEEIGRVPELGLEPGGASTSGRAAGGGGGGAERAQSSTAQASARRRGRSPADKEHKRLKRLLRNRVSAQQARERKKAYLNDLEVKVKDLEKKNSELEERFSTLQNENQMLRQILKNTTVSRRGPVLLKIPKSSGLREAAPTGCGGLREAEGDEQFVLNGFTAANLSFDDMATVTPNGLLMLTNGTNQLKGHAFFPVPLQFHRAPNSTAMQSFSTAFVIGIIGAFEDQGSGNLAAAGGSSRAA

SEQ ID NO: 2632 - protein, 395 aa, Oryza sativa
MGLHKEASSSSSRLDAAPLLPHHGHGGGGAGHHLSSQPKTFANVFIAVVGSGVLGLPYTFSRTGWVAGSVLLLAVAALTFHCMMLLVACRRRLAYDHPKIASFGDLGAAVCGPAGRHVVDAMLVLSQASFCVGYLIFISNTMAHLYPVGDSSPSSPLLTAKAIFIWVMLPFQLGLNSIKTLTLLAPLSIFAGPTEILYGLGVAVYAFEGIGMVLPLEAEAADKRKFGGTLALSMAFIAVMYGLFGAMGYLAFGAATRDIITTNLGTGWLSVTVQLGLCINLFFTMPVMMNPVYEVAERLLCRKRYAWWLRWLLVMVVGLMAMLVPNFADFLSLVGSSVCVLLGFVLPAAFHLKVFGAEVGWPGLAGDVAVIVVGTALAVSGTWTSLAQIFSSSDV

SEQ ID NO: 2633 - protein, 632 aa, Oryza sativa
MGQCYARNVPVDGEGGGGVVTTTTTTTISVSASAAGEEVEVGRGGGGGGGRRSGRPSPAGTPRRRGATPARSSVAGSPWAGSPLPEGIAPSPAPSATTPRRFFRRPFPPPSPAKHIKASLARRLGQRSPATAQAQQAAKPPAEVPIPEHGGGGGAAAGEVERELDKSFGYDRHFAAKYELGKEVGRGHFGHTCLARARKGDMRGQLLAVKVISKAKMTTAISIEDVRREVKILKALSGHSNLVKFYDACEDALNVYIIMELCEGGELLDRILSRGGRYTEEDAKVIVEQILNVVSFCHLQGVVHRDLKPENFLFSTRDDHSPMKIIDFGLSDFIRPDERLNDIVGSAYYVAPEVLHRSYSTEADMWSIGVITYILLCGSRPFWARTESGIFRSVLRADPNFDDAPWSSISPEAKDFVKRLLNKDYRKRMTAAQALSHPWLRDECRPIPLDMLVFKLIKAYLRSTPFKRAALKALSRAITEDELIYIRAQYNLLEPSSTDGRLCIENFRMALLQNSTDAMKESRALDILNALEPLAYRRMDFEEFRAATISPYQLEALSRWEEIAGTAFEYFEQEGNRPITIEELAQEMNLSSAAYSIVRDWIRPADGKLSFLGYTKFLHGLTMRSSNARRHH

SEQ ID NO: 2634 - protein, 301 aa, Oryza sativa
  misc_feature (56)..(56): Xaa can be any naturally occurring amino acid
  unsure (1)..(301): unsure at all Xaa locations
MASVTYIDDSGSEVIDPPKTEVLDVTELAGDPVPHSPKPNVVVSSSVRELLECPVXLSAMYPPIHQCSNGHTLCSGCKPRVHNRCPTCRHELGNIRCLALEKVAASLELPCKYQNFGCVGIYPYYCKLKHESQCQYRPYSCPYAGSECTVAGDIPYLVNHLKDDHKVDMHNGCTFNHRYVKSNPHEVENATWMLTVFSCFGQYFCLHFEAFQLGMAPVYIAFLRFMGDDLEAKNYSYSLEVGGTGRKMIWQGVPRSIRDSHRKVRDSYDGLIIQRNMALFFSGGERKELKLRVTGRIWKEQ

SEQ ID NO: 2635 - protein, 302 aa, Oryza sativa
MASVTYLDDAHSEVIDPPKNEEMLDVTELVDDHTQHSPKPNAMVSGNVRELLECPVCLNAMYPPIHQCSNGHTLCSGCKPRVHNRCPTCRHELGNIRCLALEKVAASLELPCKYQNFGCLGIYPYYCKLKHESQCQYRPYTCPYAGSECTVAGDIQYLVSHLKDDHKVDMHNGSTFNHRYVKSNPHEVENATWMLTVFSCFGQYFCLHFEAFQLGMAPVYIAFLRFMGDDAEAKNYSYSLEVGGSGRKMTWQGVPRSIRDSHRKVRDSYDGLIIQRNMALFFSGGDKKELKLRVTGRIWKEQ

SEQ ID NO: 2636 - protein, 461 aa, Oryza sativa
MPSGSATQFRYTQTPSKVLHLRNMPWECTEEELVELCKPFGRVVNTMCNVGANRNQAFVEFADQNQAISMVSYYASSSEPAQVRGKTVYIQYSNRQEITNNKGTGDSSGNVLLVTFEGVQPNDISIDVIHLVFSAFGFVHKIATFEKAAGFQALIQYTDAPTALEAKNSLDGRSIPRYLLPEHVPTCHLRITFSAHKDLNIKFQSHRSRDYTNPYLPVNPTAIEGIAQPTLGPDGKIKEPESNVLLASIENMQYAVTVDVLHTVFSAFGTVQKIAMFEKNGGMQALIQYPDITTAAVAKQALEGHCIYDGGYCKLHLSYSRHTDLNVKAHDERSRDYTVSSDPSAQMQAAAQAPGPSTPGVAWQNTAPSASFYGSTAAATPVGQVPAWNPNMQAGAFGSASSAYPTQPMMPGSVPHYPGIGSSSGALPVSFQASHQMPQYGVPPAAPHHAPPAGQPMYFPK

SEQ ID NO: 2637 - protein, 583 aa, Oryza sativa
  misc_feature (183)..(183): Xaa can be any naturally occurring amino acid
  misc_feature (228)..(228): Xaa can be any naturally occurring amino acid
  misc_feature (290)..(290): Xaa can be any naturally occurring amino acid
  misc_feature (320)..(320): Xaa can be any naturally occurring amino acid
  misc_feature (343)..(343): Xaa can be any naturally occurring amino acid
  misc_feature (359)..(359): Xaa can be any naturally occurring amino acid
  unsure (1)..(583): unsure at all Xaa locations
PSSPIRTCLHCHTHTWQLAKEPITTWYQASLSERRGGTNIINRSPPVEAVERQRACLLKKIKLVPSTRRRVPRPLVARTEHGDDGDDGAAAAAVPLISDRPKHAAIVRSGERARAPSIRSVPILFLNPLFFLFFLESWSMCLNVRAGTEWTAAAHVITAVIGSGVLSLAWSVAQLGWLAGPGXLLVFAAVTALQSALFADCYRSPDPEVGPHRNRTYANAVERNLGTXRAWVRLLLQQTALFGYGIAYTITASISCRAILRSNCYHTHGHDAPCKYGGSYYMLMFGAEQXFLSFITDLHDMAWLSVLAAVMSFSYSFIGXLGLGLGNTIANGTIKGQIKGAPXRTPVHKVCDVSQDIGXIGLAYPYSLILLEIQDTLKAPPAENKTMKKASIISIVVTTFFYLCCGCFGYAAFGSDAPGNLLTGFGFYEPYWLIDFANACIILHLLGGYQVYSQPIYQFADRFFAERYPASRFVNDFHTVKLPLLPPCRVNLLRVCFRTVYVASTTAVALAFPYFNEVLALLGALNFWPLAIYFPVEMYFIQRHVPRWSPRWVVLQSFSVLCLLVSAFALVGSIQGLISQKLG

SEQ ID NO: 2638 - protein, 665 aa, Oryza sativa
MDRVRGCAFLLGVLLAGSLFAFSVAKEETKKLGTVIGIDLGTTYSCVGVYKNGHVEIIANDQGNRITPSWVAFTDSERLIGEAAKNQAAVNPERTIFDVKRLIGRKFEDKEVQRDMKLVPYKIVNKDGKPYIQVKIKDGENKVFSPEEVSAMILGKMKETAEAYLGKKINDAVVTVPAYFNDAQRQATKDAGVIAGLNVARIINEPTAAAIAYGLDKKGGEKNILVFDLGGGTFDVSILTIDNGVFEVLATNGDTHLGGEDFDQRIMEYFIKLIKKKYSKDISKDNRALGKLRREAERAKRALSNQHQVRVEIESLFDGTDFSEPLTRARFEELNNDLFRKTMGPVKKAMDDAGLEKSQIHEIVLVGGSTRIPKVQQLLRDYFEGKEPNKGVNPDEAVAYGAAVQGSILSGEGGDETKDILLLDVAPLTLGIETVGGVMTKLIPRNTVIPTKKSQVFTTYQDQQTTVSIQVFEGERSMTKDCRLLGKFDLSGIPAAPRGTPQIEVTFEVDANGILNVKAEDKGTGKSEKITITNEKGRLSQEEIDRMVREAEEFAEEDKKVKERIDARNQLETYVYNMKNTVGDKDKLADKLESEEKEKVEEALKEALEWLDENQTAEKEEYEEKLKEVEAVCNPIISAVYQRTGGAPGGGADGEGGVDDEHDEL

SEQ ID NO: 2639 - protein, 370 aa, Oryza sativa
MSSSLLTDLVNLDLSESTDKVIAEYIWVGGTGMDVRSKARTLSGPVDDPSKLPKWNFDGSSTGQATGDDSEVILHPQAIFRDPFRKGKNILVMCDCYAPNGEPIPTNNRYNAARIFSHPDVKAEEPWYGIEQEYTLLQKHINWPLGWPLGGYPGPQGPYYCAAGADKSYGRDIVDAHYKACLFAGINISGINAEVMPGQWEFQIGPVVGVSAGDHVWVARYILERITEIAGVVVSFDPKPIPGDWNGAGAHTNYSTKSMRSNGGYEVIKKAIKKLGMRHREHIAAYGDGNERRLTGRHETADINNFVWGVANRGASVRVGRDTEKDGKGYFEDRRPASNMDPYLVTAMIAETTILWEPSHGHGHGQSNGK

SEQ ID NO: 2640 - protein, 623 aa, Oryza sativa
  misc_feature (130)..(130): Xaa can be any naturally occurring amino acid
  unsure (1)..(623): unsure at all Xaa locations
YRYPNDPFDRYWWHQDTNNPMWENLTTTSINIKLESSFEVPAAILKDAVQQDSQVREFNVYFNSGPPNKYRPHYLAAGFVYSTRWYRAIDGDFNVTLAATPESVLPPMLNAYEIYTLISMTLPPHFNKTXDAIWAIKVEYGIKKNWMGDPCFPSQFKWDGVECRNTSDNIPRIISIDLSNSNLHGVISSNFTLLTALEYLNLSGNQLNGPIPDSLCKLNEGSLVFSYGSNGDVCNKTNLPGSKKRAAILAISIAAPVLVVVSLLIAYLIWRAKGKSNSMCALLTLPQQVSIPGSEKYHWDRLQKNENRHFTYDELKKLTDNFQQFIGEGGFGCVYHGYLEDNTEVAVKIRSEKSSHGFNEFLAELESLTKVRHKNLVSLVGYCSEKAHLALIYEYMPRGNLFDLLRDKTGVGESLNWAMRVRVLLDAAQGLDYLHTGCNRPIIHRDVKTSNILLDQNLHAKIADFGLSKIYLSDTQSGLSTTVAGTMGYIDPEYHITGRVTESSDVYSFGVVLLEVATGQGPILQGNGHIIQHVKEKVASGDISSIADERLNGGYNVSSMWKVVEIALLCTKPLPAQRPSMTTVVVQMKESLALEVAREDRGLQANPTGDAVATSSTFDPSAR

SEQ ID NO: 2641 - protein, 282 aa, Oryza sativa
MAGFSHLPQQMEHGLITNNGFLFCHGSHGGAATTTAPAIPEDASMETSSVVLDTSPQDKKRKPREEDTASLNSAHSKEAKENGRKRGGKKHSRDQMEEEAPQGFIHVRARRGQATDSHSLAERVRRERISERMRMLQALVPGCDKVTGKALILDEIINYVQSLQNQVEFLSMRIASLSPVLYGFGIDSDAFSDHSQKMEGMFHEAVAIPASVLNRGSSPAQSHAIMDTSNTSPTPYTLQVQGGSNNNSLSQDNGSYIMQTVGEPRQELFNQVVLNNYMCSFQ

SEQ ID NO: 2642 - protein, 341 aa, Oryza sativa
MAAMAAASLLCARAAAAAPTLRLRGGGRGARLVFSCSASSSSPSGEGGFSGKVGFLGLGIMGAPMASNLINAGCDVTVWNRTRSKCDPLLSLGAKYEPSPADVASSCDVTFAMLADPESAVEVACGANGAAQGMAPGKGYVDVSTVDAATSKLIGKHITSTGASFLEAPVSGSKKPAEDGLLIFLTAGDESLYNRVASLLDVMGKSRFFLGDVGKGADMKLVVNMVMGSMMVSFSEGLLLSEKVGLDPNTLVEVISQGAISAPMFSLKGPSMVKAAYPTAFPLKHQQKDLRLALALAESVSQSIPTVAAANELYKVAKSLGLADQDFSAVIEALKAKEQSK

SEQ ID NO: 2643 - protein, 453 aa, Oryza sativa
MGGEEGMAAGRKKRVGRYEVGRTIGQGTFAKVKFAVDADTGAAVAMKVLDKDTILNHRMLHQIKREISIMKIVRHPNIVRLNEVLAGKTKIYIILELITGGELFDKIARQGKLRENEARKYFQQLIDAINYCHSKGVYHRDLKPENLLLDSRGNLKVSDFGLSTLAQKGVGLLHTTCGTPNYVAPEVLSNNGYDGSAADVWSCGVILYVLMAGYLPFEEDDLPTLYDKITAGQFSCPYWFSPGATSLIHRILDPNPKTRITIEQIREDTWFKKTYVAIKRGEDENVDLDDVQAVFDNIEDKYVSEQVTHNDGGPLVMNAFEMITLSQGLDLSALFDRQQEFVKRQTRFVSRKPAKTIVATIEVVAETMGLKVHSQNYKLRLEGVSSNRMSPFAVVLQVFEVAPSLFMVDVRKVAGDTLEYHRFYKNLCNKMESIIWRPIEVSAKSALLRTATC

SEQ ID NO: 2644 - protein, 478 aa, Oryza sativa
MGEGRSGVGQAETSASSGDTSMAQGPVERQRRGSGAALGMTTAVVDDAGEGEANPRRAKWWYATFHSVTAMVGAGVLSLPYAMAHLGWGPGTAALVVSWGMTLYTLRLLIELHECVPGVRFDRYRDLGAHALGPRLGPWLVVPQQLIVQLGCDVVYMVIGGKCLMKFAESVSSWSRAPQLHHQSYWICIFGASQFLLSQLPSLDSITAVSLAAAAMSVGYSTISWAACLARGTPAAAEGGGGGVSYAYKDGTAADSVFRVCSALGQVAFAYAGHGVVLEIQATIPSTPTKPSRGAMWKGAVAAYLVTALCYFPVAIAGYWAFGRDVSDNVLVALRRPPWLVAAANMMVVVHVLGSYQVYAMPIFETLETILITRIRLPPGALLRLVARSAYVAFTLFVAVTFPFFGDLLGFFGGFGFTPTSYFLPCILWLKIKKPPRFSASWFANWGCIVVGVLLMIASTIGGLRSIIQDASTFQFYS

SEQ ID NO: 2645 - protein, 537 aa, Oryza sativa
  misc_feature (84)..(84): Xaa can be any naturally occurring amino acid
  misc_feature (95)..(95): Xaa can be any naturally occurring amino acid
  misc_feature (153)..(153): Xaa can be any naturally occurring amino acid
  unsure (1)..(537): unsure at all Xaa locations
MYGVGGGGGGFNAPYTASARRRNHEDDDDEEEEESGEGRVLEAWERAYADDRSWEALQEDESGLLRPIDTKTLVHAQYRRRLLXLRSAASAAARXIHKGLIRHLYLVIDLSRVVNKILFGTAPDLRSMAASEMDYRPSRMAVVAKYAEVFSRXEFFDQNPLSHVGIVTMKDGISHRLTEIGGSPESQIKALMGKLECSGEPSLQNALELVHGYLDQVPSYGHKEVLFLYSALNTCDPGDIMETIAKCKKSKIRCSVIGLAAEIFICKYLCEETGGSYTVALDESHFKELLLEHAPPPPAIAEYAAANLIKMGFPQRGAEDLISICSCHKKIKSGAEGYICPRCKVNIVNLASMFAVQNATNTSALIAIFTSMRACTIAQVARVSVVLHRDAIVVLIFVFLTQEATRCCKLSRTLTLLSGDEQWRSSCIITYTQHIPGSLHSDESVLPVAIMSTLLKRMDDRQRCQCSFSPVARPSCGHDELQAAAPSCAFSTVDHSSPLERNTDGIRLNIYFLKNKTEHVFALNRRSFRVGEPVLVK

SEQ ID NO: 2646 - protein, 210 aa, Oryza sativa
ETFAKCKKSKIRCSVIGLAAEIFICKYLCEETGGSYTVALDESHFKELLLEHAPPPPAIAEYAAANLIFMGFPQRGAEDLISICSCHKKIKSGAEGYICPRCKVNVCELPTECRTCGLTLVSSPHLARSYHHLFPVQPFDEVSSVHPNRLGQKGGQKCYGCQQSFINPDSQSSLHVRCPKCNQHFCLDCDIYIHESLHNCPGCESQRSSS

SEQ ID NO: 2647 - protein, 164 aa, Oryza sativa
MAWFEREGLAKIGMSDSEEHHFESKADAGASKTYPQQAGTIRKNGYIVIKNRPCKGFGKVVEVSTSKTDIFNGKKLEDIVPSSHNCDVPHVNRTEYQLIDISEDGFVSLLTESGNTKDDLRLPTDDSLLGQIKTGFGEGKDLVVTVMSAMGEEQICALKDIGPK

SEQ ID NO: 2648 - protein, 315 aa, Oryza sativa
MASSLSVAVLLCLAAAAAAQLSPTFYDTSCPRALATIKSAVTAAVNNEPRMGASLLRLHFHDCFVQGCDASVLLADTATFTGEQNALPNKNSLRGFNVVDSIKTQLEGICSQTVSCADILAVAARDSVVALGGPSWTVGLGRRDSTTASMDSANNDLPPPFFDLENLIKAFGDKGFSVTDMVALSGAHTIGQAQCTNFRGRIYNETNIDAGYAASLRANCPPTAGTGDSNLAALDTTTPYSFDTAYYSNLLSNKGLLHSDQVLFNGNSTDNTVRNFASNRAAFSSAFSSAMVKMANLGPLIGSQGQIRLSCSKVN

SEQ ID NO: 2649 - protein, 1137 aa, Oryza sativa
MSSSRSNNRATCSRSSSARSKHSARVVAQTPMDAQLHAEFEGSQRHFDYSSSVGAANRSGATTSNVSAYLQNMQRGRFVQPFGCLLAVHPETFALLAYSENAAEMLDLTPHAVPTIDQREALAVGTDVRTLFRSHSFVALQKAATFGDVNLLNPILVHARTSGKPFYAIMHRIDVGLVIDLEPVNPVDLPVTATGAIKSYKLAARAIARLQSLPSGNLSLLCDVLVREVSELTGYDRVMAYKFHEDEHGEVIAECKRSDLEPYLGLHYPATDIPQASRFLFMKNKVRMICDCSATPVKIIQDDSLTQPISICGSTLRAPHGCHAQYMASMGSVASLVMSVTINEDEDDDGDTGSDQQPKGRKLWGLMVCHHTSPRFVPFPLRYACEFLLQVFGIQINKEVELAAQAKERHILRTQTLLCDMLLRDAPVGIFTQSPNVMDLVKCDGAALYYQNQLWVLGSTPSEAEIKNIVAWLQEYHDGSTGLSTDSLVEAGYPGAAALGDVVCGMAAIKISSKDFIFWFRSHTAKEIKWGGAKHEPIDADDNGRKMHPRSSFKAFLEVVKWRSVPWEDVEMDAIHSLQLILRGSLQDEDANKNNNAKSIVTAPSDDMKKIQGLLELRTVTNEMVRLIETATAPILAVDITGSINGWNNKAAELTGLPVMEAIGKPLVDLVIDDSVEVVKQILNSALQGIEEQNLQIKLKTFNHQENNGPVILMVNACCSRDLSEKVVGVCFVAQDMTGQNIIMDKYTRIQGDYVAIVKNPSELIPPIFMINDLGSCLEWNEAMQKITGIKREDAVDKLLIGEVFTHHEYGCRVKDHGTLTKLSILMNTVISGQDPEKLLFGFFNTDGKYIESLMTATKRTDAEGKITGALCFLHVASPELQHALQVQKMSEQAAMNSFKELTYIRQELRNPLNGMQFTRNLLEPSDLTEEQRKLLASNVLCQEQLKKILHDTDLESIEQCYTEMSTVDFNLEEALNTVLMQAMPQSKEKQISIDRDWPAEVSCMHLCGDNLRLQQVLADFLACTLQFTQPAEGPIVLQVIPRMENIGSGMQIAHLEFRLVHPAPGVPEALIQEMFRHSPGASREGLGLYISQKLVKTMSGTVQYLREAESSSFIVLVEFPVAQLSTKRCKASTSKF

SEQ ID NO: 2650 - protein, 1137 aa, Oryza sativa
MSSSRSNNRATCSRSSSARSKHSARVVAQTPMDAQLHAEFEGSQRHFDYSSSVGAANRSGATTSNVSAYLQNMQRGRFVQPFGCLLAVHPETFALLAYSENAAEMLDLTPHAVPTIDQREALAVGTDVRTLFRSHSFVALQKAATFGDVNLLNPILVHARTSGKPFYAIMHRIDVGLVIDLEPVNPVDLPVTATGAIKSYKLAARAIARLQSLPSGNLSLLCDVLVREVSELTGYDRVMAYKFHEDEHGEVIAECKRSDLEPYLGLHYPATDIPQASRFLFMKNKVRMICDCSATPVKIIQDDSLTQPISICGSTLRAPHGCHAQYMASMGSVASLVMSVTINEDEDDDGDTGSDQQPKGRKLWGLMVCHHTSPRFVPFPLRYACEFLLQVFGIQINKEVELAAQAKERHILRTQTLLCDMLLRDAPVGIFTQSPNVMDLVKCDGAALYYQNQLWVLGSTPSEAEIKNIVAWLQEYHDGSTGLSTDSLVEAGYPGAAALGDVVCGMAAIKISSKDFIFWFRSHTAKEIKWGGAKHEPIDADDNGRKMHPRSSFKAFLEVVKWRSVPWEDVEMDAIHSLQLILRGSLQDEDANKNNNAKSIVTAPSDDMKKIQGLLELRTVTNEMVRLIETATAPILAVDITGSINGWNNKAAELTGLPVMEAIGKPLVDLVIDDSVEVVKQILNSALQGIEEQNLQIKLKTFNHQENNGPVILMVNACCSRDLSEKVVGVCFVAQDMTGQNIIMDKYTRIQGDYVAIVKNPSELIPPIFMINDLGSCLEWNEAMQKITGIKREDAVDKLLIGEVFTHHEYGCRVKDHGTLTKLSILMNTVISGQDPEKLLFGFFNTDGKYIESLMTATKRTDAEGKITGALCFLHVASPELQHALQVQKMSEQAAMNSFKELTYIRQELRNPLNGMQFTRNLLEPSDLTEEQRKLLASNVLCQEQLKKILHDTDLESIEQCYTEMSTVDFNLEEALNTVLMQAMPQSKEKQISIDRDWPAEVSCMHLCGDNLRLQQVLADFLACMLQFTQPAEGPIVLQVIPRMENIGSGMQIAHLEFRLVHPAPGVPEALIQEMFRHSPGASREGLGLYISQKLVKTMSGTVQYLRESESSSFIVLVEFPVAQLSTKRCKASTSKF

SEQ ID NO: 2651 - protein, 387 aa, Oryza sativa
MAAKAAALSSSPFVSSRRLSSPAASLRARTPRCVMGSEQVRVVVEEEGKTKKRMGVAEPRSAPPAVWTPRAPAQEARLAALRTDGRDSRLKIFSGTANRPLAQEIASYLGVDLGKVLIKRFADGEIYVQLQESVRGCDVFLVQPTCSPVNENLMELFVMIDACRRASARSITVVIPYFGYARADRKAQGREAITAKLSANLLTEAGSDRVIVCDIHSTQALGYFDIPVDHIHGQPVILDYLASKTISKDLVVVSPDVGGVVRARAFAKKLSDAPLAIVDKRRQGHNMSEVMHLIGDVKGKVAIMVDDMIDTAGTITSAAALLKQEGAEAVYACSTHAVFRFGSWFIVTSMIHVIVLIHWLVAKEPCYGMIRQIGFMFDQYKNDRVEQ

SEQ ID NO: 2652 - protein, 271 aa, Oryza sativa
MAAMATAPCFPATPGLPARGAVAARSRMAAGGSRSQRRRSSSGVFLCRSSTTGSSRMEDYNTAMKRMMRNPYEYHHDLGMNYAIISDSLIVGSQPQKPEDIDHLKDEEKVAFILCLQQDKDIEYWGIDFQTVVNRCKELGIKHIRRPAVDFDPDSLRTQLPKAVSSLEWAISEGKGRVYVHCTAGLGRAPAVAIAYMFWFENMDLRTAYEKLTSKRPCGPNKRAIRAATYDLAKNDPHKESFDSLPEHAFEGIAGSERSLIQERVRALREA

SEQ ID NO: 2653 - protein, 214 aa, Oryza sativa
MARSLSLLLLLVACFLVAGATAARPAPSTSGAAAISSFVRSWCAGTKYPALCDATLAPYSAAVGASPAKLAWAALTVTLSAARNATSAVRSIAARSSSSHLPPVAAEAAGDCASELGDGVDALRRCVDAMARVAVGEESSSTAAAARRKVRFEVDNVRTWASAALTDDNMCMEGFKGEAAGGGGAREAVRGHIMGLLHLTANALGILNAMAKQI

SEQ ID NO: 2654 - protein, 1747 aa, Oryza sativa
MPPAPWPTPRTVRQAAELHAHLTTSGRLLHPPSAHHLLNSLVNCLPPSDPLHLRYALHLFDRMPASTFLFDTALRACFRAGTSSGDPDIPFVLFRRMRRAAVRPDGFTFHFLFKCSSSSRPRALLCTMLHAACLRTMLPSAAPFVANSLIHMYTELGLAGDVRRAFDEIPVKDAVSWTMVISGLAKMGMLSDARLLLAQAPVRDVISWTSLIAAYSRADRAKEAVDCFKNMLSEGIAPDDVTVIGVLSACSQLKDLELGCSLHLLVKEKGMSMSENLVVALIDMYAKCGDFGHAREVFDAVGRGRRPQSWNAIIDGYCKHGHVDVARSLFDQMEVRDIITFNSMITGYIHSGQLREALLLFMNMRRHDLRVDNFTVVSLLSACASLGALPQGRALHACIELRLVETDIYIGTALLDMYMKCGRVNEATIVFQRMGKRDVHAWTAMIAGLAFNGMGKAGLEYFYQMRCDGFQPNPVSYIAVLTACSHSCLLNEGRLYFDEMRILYNIHPQIEHYGCMIDLLGRSGLLDEAMDLVKTMPMQPNSVIWASILSACRVHKRIDLAQCAAEHLLKIEPDEDAVYVQLYNICIDSRKWEDASKIRMLMEERQVKKTAGYSSVTVAGQVHKFVVSDKSHPRILEIIAMLEEISHRLKSAGYSPITSQVTVDVDEEEKEQTLLAHSEKLAIAFGLVSLAPNLPVHIIKNLRPTIFRPLGADDGKQKQPDRRVVFLLPPSRRDAPVLVRPIPSSPAPFSLRSSVTMAVRDVASLNRMITGFIRDGLADRARAVYRWMVASGIRETPHTFSTILGVCSTYEALQLHGRVLALGLCCNPFVGSALVNHYMHVESPHAALSLFRELPLQNTAMCNVVLRGLGNLKLTEELICCFLDMRRQYLELNGLSYCYAMKGCYQNGEWLEQGRQLHGVVLKAGWIPSNIFLSNSLVDLYSAIGDSVDTVKALNDILSEDVISWNSILSMYADRGHMKEAVYYLKQMLWHGKMPSVRSFVSLLALSGKTGDWQLGVQIHGIVHKLGFSCSSVHVQTTLIDMYGKCCCFDHSLAIFNEIPSIALECCNSLITSSLGCNMFDAALEILHCMIVEGVTPDDVTFSATMKAISLSASPSLTSCQMLHSCLVKLGFEMDMAVCSSLITAYACAGQLSSSHLIFEGLLDPNVICFTAIISACARYGDGARAMELFDQMVSSGLKPDNVTFLCAIAGCDQAGMFEEGRLVIELMRASRELDPDERHFACMVNLLSRDGFVKEAMEMMEQSPLRHYTKAWSSLLQSCKAHGENVLGKRAANMLIDVGRKDPATTLQVSNFFNDIGDRETALRIKEMTNVKEVKKSGHSLIEMFVARRLFCCIWWWRLTTVLSTSTKSKTAECRPVDEVSTGVGWGCVKWGKVQEGIRAGGVEKAPATCQERTSTRTLVDSCWVLLLNSLVLGLFAEDTVPLKFDLRAYSDSAILGLQCMQAHKVQNLIHCCLQLYMDKKEVVDALSREAKIEPSVTQHVWQKLEENNREFFKAYYLRLMLKNQITAFNKLLEDQLRIINKEYHPGPSSMPLPNGSNSNLLKQNPCFLSESTPMPAMPDDVMCNGNSSGIVDRTQSSDQLIYAGKDIQGLHSSMDASNLLPVQNANSVLFGVENGTTIKTESGYSSNGNFGFCGNAFLESCQSIGDASGGSFSSSELNGQPLDDSILDIESSSFGFLSQLPRNFFSDLPEDFSQSTEILDNYGKSPFLPSEQNNFSDSTGGEHTG

SEQ ID NO: 2655 - protein, 687 aa, Oryza sativa
MARPRRASTATTMQLGLLLAALLLFTSSLAGSVAAAAPPPPAGAKGGGAKSGGGGGTVIGIDLGTTYSCVGVYRNDRVEIIANDQGNRITPSWVAFTDGGERLIGEAAKNQAAANPERTIYDAKRLIGRQFSDAEVQRDMKLLPFAVVDRNGKPHVRVEVKDGDVRVFSPEEVSAMVLTRMKETAEAYLGEKVTRAVVTVPAYFNDAQRQATKDAGVIAGLTVDRIINEPTAAAIAYGIDKKGAEKNVLVFDLGGGTFDVSILAIDNGVFEVLATNGDTHLGGEDFDQRLMDHFVKVIRRKHGRDIAGDARALGKLRRECERAKRALSNQHQVRVEIESLFDGVDFSEPLSRARFEELNGDLFKKTMVPVRKAMADAGLGKGDIDEIVLVGGSTRIPKVQRLLKDYFGGKEPNRGVNPDEAVAYGAAVQASIISGHVDENTESMILLDVAPLTLGLETAGGVMTKLIPRNTVVPTKKTQVFTTYKDRQTTVTIQVFEGERSMTRDNRLLGKFDLTGIAPAPRGAPQIAVTFEVDANGILSVLAADKATGRSEKITISGDDRKISQEEIDRMEREAEEFADEDRRHREQVDARNSLEAYVYNVKSTLGGKMADAMEGEEKEKVEEAVREAHEWLDGNPDAGKEEYEEKLRELEDVCNPVMSAVYQRSGGGGGAPEDGNVDDEDDHDEL

SEQ ID NO: 2656 - protein, 499 aa, Oryza sativa
  misc_feature (322)..(322): Xaa can be any naturally occurring amino acid
  unsure (1)..(499): unsure at all Xaa locations
MATCLDSLGPLLGGAANSTDAANYICNRFTDTSSAVDATYLLFSAYLVFAMQLGFAMLCAGSVRAKNSMNIMLTNVFDAAAGALFYYLFGFAFAFGTPSKGFIGKQFFGLKHMPQTGYDYDFFLFQWAFAIAAAGITSGSIAERTRFSAYLIYSAFLTGFVYPVVSHWFWSTDGWASAGRLTGPLLFKSGVIDFAGSGVVHLVGGIAGLWGAFIEGPRIGRFDAAGRTVAMKGHSASLVVLGTFLLWFGWFGFNPGSFTTISKIYGESGTIDGQWSAVGRTAVTTSLAGSVAALNHAVRQEMADGALERDRRLQRSPRRVRXAITAGCSVVDPWASVICGFVSAWVLIGCNKLALMLKFDDPLEATQLHGGCGAWGIIFTALFARREYVELIYGVPGRPYGLFMGGGGRLLAAHIVQILVIVGWVSATMGTLFYVLHRFGLLRVSPATEMEGMDPTCHGGFGYVDEDEGERRVRAKSAAETARVEPRKSPEQAAAGQFV

SEQ ID NO: 2657 - protein, 230 aa, Oryza sativa
MVRGKTQMKRIENPTSRQVTFSKRRNGLLKKAFELSVLCDAEVALIVFSPRGKLYEFASASTQKTIERYRTYTKENIGNKTVQQDIEQVKADADGLAKKLEALETYKRKLLGEKLDECSIEELHSLEVKLERSLISIRGRKTKLLEEQVAKLREKEMKLRKDNEELREKCKNQPPLSAPLTVRAEDENPDRNINTTNDNMDVETELFIGLPGRSRSSGGAAEDSQAMPHS

SEQ ID NO: 2658 - protein, 440 aa, Oryza sativa
MSFRSIVRDVRDGFGSLSRRGFEVRILGHRRGKSHGAVHELHDPVPVIQSSCWASLPPELLRDIIERLEESEATWPSRKHVVACAGVCRTWREMCKEIVKNPELCGKITFPISLRQPGPRDGTMQCFIRRDKSTQTYYLYLSLGSAVLVDNGKFLLSAKRNWHATCTEYVISMNANNLSRSTNTNIGKLRSNFLGTKFVIYDTHTPYNATSDSQSGKTSRRFSNKGTAKHPCSTYSIANISYELNVFGTRGPRRMCCLMHSIPASSLEAGGTVPSQPDSILAHSLNESSFRSVSFSKSSVMDHSMHFSSAQFSDISIGDGPRIGGRVLSDDEECKETPLILQNKAPRWHEQLQCWCLNFRGRVTVASVKNFQLIAATQPAAGAPTPSQPVPPPPPEHDKVILQFGKVAKDMFTMDYHYPLSAFQAFAISLSSFDTKLACE

SEQ ID NO: 2659 - protein, 338 aa, Oryza sativa
  misc_feature (46)..(46): Xaa can be any naturally occurring amino acid
  misc_feature (154)..(154): Xaa can be any naturally occurring amino acid
  misc_feature (231)..(231): Xaa can be any naturally occurring amino acid
  unsure (1)..(338): unsure at all Xaa locations
LIKICEITMASRSSWHCCLLAFFLLSSAAGAAYGQQLSTTFYAASXCPTLQVVVRATVLGALLAERRMGASLVRLFFHDCFVQGCDASILLDDVPATSFVGEKTAFPNVNSVRGYDVIDQIKRNVELLCPGVVSCADIVALAARDSTALLGGPXSWAVPLGRRDSTTASLSAANSDLPAPSSDLATLIAGFGNKGLSPRDMTALSGAHTIGFSQCANFRDRVYNDTNIDPXFAGAPAAAGCPAAPGSGDSSLAPLDAQTQNVFDNAYYRNLLAQRGLLHSDQELFNGGSQDALVQQYSSNPALFAADFAAAMIKMGNIKPLTGAAGQIRRSCRAVNSS

SEQ ID NO: 2660 - protein, 802 aa, Oryza sativa
TPSWVAFTDGGERLIGEAAKNQAAANPERTIYDAKRLIGRQFSDAEVQRDMKLLPFAVVDRNGKPHVRVEVKDGDVRVFSPEEVSAMVLTRMKETAEAYLGEKVTRAVVTVPAYFNDAQRQATKDAGVIAGLTVDRIINEPTAAAIAYGIDKKGAEKNVLVFDLGGGTFDVSILAIDNGVFEVLATNGDTHLGGEDFDQRLMDHFVKVIRRKHGRDITGDARALGKLRRECERAKRALSNQHQVRVEVESLFDGVDLSEPLSRARFEELNSDLFKKTMVPVRKAMADARLSKGDIDEIVLVGGSTRIPKVQQLLKDYFGGKEPNRGVNPDEAVAYGAAVQASIISGHVDENTESMILLDVAPLTLGLETAGGVMAKLIPRNTVVPTKKTQVFTTYKDKQTTVTIQVFEGERSMTRDNRLLGRFDLAGIAPAPRGAPQIEVTFEVDANGILSVLAADKATGRSEKITISGDDRKISQEEIDRMVREAEEFAEEDRRHREQVDARNSLEAYVYNIKNTLGGKMADAMEGEEKDKVEEAVREAYEWLDGNPDAGKEEYEEKLRELEDVCNPVMSAVYQRVLKPPQKNESSSTIVPVASARDPESSNKGAWWNGLMQHSDTRQLQVFEVAGDDGDMVEVREDLVVLMVGKLDHPGSPLDGGTDPRLDIPSGVILSFPIVVAHGAGQHSESVHRRGHLPLEQEAVGELGELPGWRTVDSAARDAEVDTGRGGPEVAPAAASTQVRATSHARRNDMTWCSSASGRALRRSSSPPPPPRAASPGLCIPSNRWPALHLPLNFHSIIACQG

SEQ ID NO: 2661 - protein, 458 aa, Oryza sativa
MALSRRLLPLLLRRGSTPSLSPARALSTAAVTADAPAAAAAAAEEEAMTIKGVRISGRPLYMDMQATTPVDPRVLDAMLPFYLSRYGNPHSRTHLYGWESDAAVEEARARVASLVGADPREIFFTSGATECNNIAVKGVMRFYRDRRRHVVTTQTEHKCVLDSCRYLQQEGFEVTYLPVRPDGLVDVAQLADAIRPDTGLVSVMAVNNEIGVVQPLEEIGRICKEKGVPFHTDAAQALGKIPIDVNQMGIGLMSLSAHKIYGPKGVGALYLRRRPRIRVEPQMSGGGQERGIRSGTVPTPLVVGFGAACEIAAKEMDYDHRRASVLQQRLLDGIRGQVDDIVINGSMEHRYPGNLNLSFAYVEGESLLMGLKEVAVSSGSACTSASLEPSYVLRALGVEEDMAHTSIRFGIGRFTTEEEVDRAIELTVHQVKKLRDMSPLYEMAKAGIDLKSIQWAQH

SEQ ID NO: 2662 - protein, 512 aa, Oryza sativa
MPPRSLTLSRLPVAALGLPFSSCSPPPPRLRFPFAARRARSLATRASSSSPDSSFGSRMEDSVKRTLADNPVVIYSKSWCSYSMEVKALFKRIGVQPHVIELDQLGAQGPQLQKVLERLTGQSTVPNVFIGGKHIGGCTGAGAGAGAAIVVVVVAVAAAVVCECEAKPRAFFVFGDSLVDSGNNNYLMTTARADSPPYGVDYPTHRATGRFSNGLNVPDIISEYLGAESVLPYLSPHLDGPKLLHGANFASAGVGILNDTGIQFANIIRIEKQLRYFNQYQDRVRGLIGGAAARRLVEGALVLITLGGNDFINNYYLVPFSARSREFALPDYVRYIIGEYGKVLRQLYHLGARRVLVTGSGPLGCAPAELATRSATGECDLELQRAAALYNLQLVRMTRELNAELGAGDVFVAVNAYRMHMDFISDPAAYGFATSKVACCGQGPYNGVGLCTALSTLCPDRSLYVFWDNFHPTERANRIIVSQFMSASPDYMHPFNLSTILAMDAATAAAAP

SEQ ID NO: 2663 - protein, 598 aa, Oryza sativa
  misc_feature (151)..(151): Xaa can be any naturally occurring amino acid
  misc_feature (325)..(325): Xaa can be any naturally occurring amino acid
  unsure (1)..(598): unsure at all Xaa locations
MDTTIGSVPTASDAAAPAPAANSAPREATLGRHLARRLAEVGARDVFTVPGDFNLTLLDELEAEAGAGHGGVRLVGCCNELNAAYAADGYARARGGGVGACAVTFTVGGLSAINAVAGAFSENLPVVCIVGGPNSNDYGSNRILHHTIGLXPDFTQELRCFQTVTCYQAVVNNLEDAHEQIDAAISTAIKESKPVYISISCNLPSIPHPTFSRHPVPFFLSPRLSNQMNLETAVETAAAFLNKAVKPVLVGGPKMRVAKACKSFVELADACGYPVAVMPSAKGLVPEHHPRFIGTYWGAVSTPFCAEIVESADAYLFAGPIFNDXDPPGCRLLLKKEKAIIVQPDRVVIGHGPAFGCVLMKDFLHALSARLKKNTAAYENYRRIYVPPGEPPLSEPGEPLRVNVLFQHIQKMLSANSAVIAETGDSWFNCQKLKLPEGCGYEFQMQYGSIGWSVGATLGYAKAAKDKRVIACIGDGSFQVTAQEVSTMLRWGQKSIIFLINNGGYTIEVEIHDGPYNVIKNWNYTGVVEAFHNGEGKCYTAKVRTEEELKEAIEEAQGPKKDCLCFIEVIVHKDDTSKELLEWGSRVSAANSRPPNPQ

SEQ ID NO: 2664 - protein, 321 aa, Oryza sativa
  misc_feature (283)..(283): Xaa can be any naturally occurring amino acid
  unsure (1)..(321): unsure at all Xaa locations
MGYSYSSAAVAVSVLVVALAAAASGQLSTTFYASSCPTALSTIRSAVNAAVAREPRMGASLLRLHFHDCFVQGCDASILLADNATFRGEQGAFPNVNSLRGFEVISSIKMQLEASCRQTVSCADILAVAARDSVVALGGPSYPVELGRRDGMTTNQTMANTNLHPPTTDLGNFVTSFAGKGLSPTDLVVLTGAHTVGVAQCTNFRSRLYGESNINAPFAASLRASCPQAGGDTNLAPLDSTPNAFDNAFFTDLIAGRGLLHSDQELYRGDGSGTDALVRVHAXANPARFNADFAAAMVRMGAIRPLTGTQGEIRLNCSRVN

SEQ ID NO: 2665 - protein, 771 aa, Oryza sativa
MASSHHQEVQEQGHGDGEEEEQDNSQITSPLLRSSMRLGSPEENSPVEQVALTVPVGDDPATPVLTFRIWVLGTASCVVLSFLNTFFWYRKEPLTVTAISAQIAVVPLGRLMAAALPERVFFRGRPWEFTLNPGPFNVKEHVLITIFANAGAGSVFAINVITAVRVFYGKRISFFVSLLVVLTSQVLGFGWAGIFRRYLVEPAAMWWPSNLVQVSLFRALHEKERRSKGGMTRTQFFLVAFVCSFAYYIFPGYLFQMLTSLSWICWIFPKSVLAQQLGSGLHGLGIGAIGLDWSSISSYLGSPLASPWFATANIAAGFFIYIYVITPIAYWINLYKAQNFPIFSDGLFTVTGQKYNISTIIDSQFHFDTKAYEKNGPLYISTFFSISYGLGFACLTATVVHVLLFHGRYTDKFVTPVSSEIWQLSRSAFQDKKMDIHTKLMKRYKQVPEWWFISILIASVAITMFTCEYYIEQLQLPWWGVLLACALAIFFTLPIGIVTATTNQTPGLNIITEYIMGYLYPGRPVANMCFKVYGYIGPQQALAFLQDFKLGHYMKIPPRTMFMAQVVGTLIAAFVYLGTAWWLMDTIPNICNTELLPPGSPWTCPYDHLFYDASVIWGLIGPRRIFGDLGTYSAVNWFFLGGAIAPLLVWFAHKAFPGQKWILLVNMPVLIAGISQMPPATSVNYTAWIFVAFLSGYVVYKYRRDWWERHNYLLSGALDAGLAFMAVLLYLCLGLEKISLNWWGNDLDGCPLASCPIAEGITVQGCPVASA

SEQ ID NO: 2666 - protein, 179 aa, Oryza sativa
MAGSGRDRDPLVVGRVVGDVLDAFVRSTNLKVTYGSKTVSNGCELKPSMVTHQPRVEVGGNDMRTFYTLVMVDPDAPSPSDPNLREYLHWLVTDIPGTTAASFGQEVMCYESPRPTMGIHRLVFVLFQQLGRQTVYAPGWRQNFNTKDFAELYNLGSPVAAVYFNCQREAGSGGRRVYN

SEQ ID NO: 2667 - protein, 110 aa, Oryza sativa
  misc_feature (22)..(22): Xaa can be any naturally occurring amino acid
  misc_feature (48)..(48): Xaa can be any naturally occurring amino acid
  unsure (1)..(110): unsure at all Xaa locations
GKHGHPKCPFVALAIFNGKKLXNIVPPPPNCDVPPVTRFDFHLIALFXNGFFTPLPESGGPKDALRLPSYKALLSQIKDGSPQGKDFIVPLMFPLGEEQICPFKDFGPKN

SEQ ID NO: 2668 - protein, 886 aa, Oryza sativa
MPCSPPSYLFIIVTGVLLVLVHSQTSLDEDFISIDCGLPSGFSYVDEKTNITYISDDQYIDTGENHNISSQLQGAEQFRSGLNLRSFPTGGRNCYTLYPAIKGQKYLIRGMFMHGNYDNKGQDLVSSPVTFDIRIGLNFWNRLNIINATMTYTSEAIVVAIVNSVSVCLVDNGEGTPFISSLEMRPMKSSNYPAATPNHPLLLQDRRSMGASRIIRYPDDPYDRVWWLPQITSGLIKISTRSLISRYTDDVYEVPVAVLKTAATTSSTSTALNFLWAAPTGWDATPGYLIGLHFTDFQQGQLREFDPTYNNDLWNYDNKKTKPPYLLANYINGTTPYTSDNYLYNISLVATNASVLPPMLNAIEIYYQVQQDEKMTYSEDVEAMMTVKIDYQVKKNWMGDPCLPEKYTWSGLKCRSQGVTSRIISLDLSSSDLQGAISEQFSMLRSLEYLNLSNNDLTGSLPESLTNLPNIHVLDLSGNQLNGTFPEALCKNRALTLRYDTANGDPCSPRSSKKKHKAVLAVAVVVPVVIVVILISAMLMLLFWKKQAIVKSRGQEQYGDHIHIPENREFTYEELVKITNNFSVFIGEGGFGPVFHGQLKDGTQLAVKMRSPTSMSGKGMPEFLAEVESLTTVHHRYLVLLVGYCTDQDHLGLVYEYMPNGSLYDHLRGKNAIIQRLSWQHRAKIAHEAAQGLDYLHTGCVLPIVHRDVKSHNILLGCDLTAKISDFGLSKSYLNVAQSHITATAAGTLGYIDPEYCLSGRLTISSDVFSFGVVLLEIVTGEPPIIPTNGHIVQRIKEKVNMGNIEAIADPRLHGEFDISSIWKVVDIALLCTKEASSERPTMSMVVAQLKDALALEEARLSYSTSDISQGGANAELSINSMPTAR

SEQ ID NO: 2669 - protein, 157 aa, Oryza sativa
MGFISFVGRVLFASIFLLSAYQEFSEFGTDGGPAAKALKPKFNLFTQQVSKSLGMAVPHIDIKTVIAATMFLKGFGGLLFIISSSFGAFLLLLYLAVITPVVYDFYNYEMESSQFVQLFVKFSQNLALFGALLFFLGMKNSIPRRHSKRRAGKTKTN

SEQ ID NO: 2670 - protein, 318 aa, Oryza sativa
  misc_feature (152)..(152): Xaa can be any naturally occurring amino acid
  unsure (1)..(318): unsure at all Xaa locations
MASPKSFACSVIALLFAAHLVSAQLSANFYDKSCPNALSTIRTAVRSAVAKENRMGASLLRLHFHDCFVNGCDGSVLLDDTPTFTGEKTAAPNNNSLRGFDVIDNIKAQVEGICPQVVSCADILAVAARDSVFALGGPTWVVQLGRRDSTTXASLDTANNDIPAPTLDLGDLTKSFSNKGLSATDMIALSGAHTIGQARCVNFRNRIYSETNIDTSLATSLKSNCPNTTGDNNISPLDASTPYTFDNFYYKNLLNKKGVLHSDQQLFNGGSADSQTTTYSSNMATFFTDFSAAIVKMGNIDPLTGSSGQIRKNCRKVN

SEQ ID NO: 2671 - protein, 466 aa, Oryza sativa
MDVEKVERKEVAVDDDGRVRTGTVWTATTHAITAVIGSGVLALPWSVAQMGWVLGPIALVVCAYITYYTAVLLCDCYRTPDPVHGKRNYTYMDVVRSCLGPRDVVVCGIAQYAILWGAMVGYTITTATSIMSVVRTNCHHYKGPDATCGSSGTMYMVLFGLAEVVLSQCPSLEGVTLISVVAAVMSFTYSFVGLFLSAAKVASHGAAHGTLLGVRVGAGGVTASTKAWHFLQALGNIAFAYTYSMLLIEIQDTVKSPPSENVTMKRASLYGIGVTTVFYVSIGCVGYAAFGNAAPGNVLTGFLEPFWLVDIANVAVVIHLVGAYQVYAQPVFACYEKWLASRWPESAFFHREYAVPLGGGRAVRFTLCKLVLRTAFVAVTTVVSLVLPFFNAVLGLLGAVAFWPLTVYFPVTMYMAQAKVQRGSRKWVALQALNVGALVVSLLAAVGSVADMAQRLRHVTIFQTQL

SEQ ID NO: 2672 - protein, 502 aa, Oryza sativa
  misc_feature (358)..(358): Xaa can be any naturally occurring amino acid
  misc_feature (366)..(366): Xaa can be any naturally occurring amino acid
  unsure (1)..(502): unsure at all Xaa locations
MDVEKVERKEVAVDDDGRVRTAALIWQSLQCTASLLMFMLNQPGVPRDQEGKNVTRTVWTATTHAITAVIGSGVLALPWSVAQMGWVLGPIALVVCAYITYYTAVLLCDCYRTPDPVHGKRNYTYMDVVRSCLGPRDVVVCGIAQYAILWGAMVGYTITTATSIMSVVRTNCHHYKGPDATCGSSGTMYMVLFGLAEVVLSQCPSLEGVTLISVVAAVMSFTYSFVGLFLSAAKVASHGAAHGTLLGVRVGAGGVTASTKAWHFLQALGNIAFAYTYSMLLIEIQDTVKSPPSENVTMKRASLYGIGVTTVFYVSIGCVGYAAFGNAAPGNVLTGFLEPFWLVDIANVAVVIHLVGAXYQVYAQPXVFACYEKWLASRWPESAFFHREYAVPLGGGRAVRFTLCKLVLRTAFVAVTTVVSLVLPFFNAVLGLLGAVAFWPLTVYFPVTMYMAQAKVQRGSRKWVALQALNVGALVVSLLAAVGSVADMAQRLRHVTIFQTQL

SEQ ID NO: 2673 - protein, 355 aa, Oryza sativa
MWAPRAVAQGGAVYRGPGPRGWSTVGPRDRRSGSAGRGGHGRETPRFGRRRGGGEREREWGGFKSNPAHLRARVRAGMAGRAATWGRGVGARRGAEKAAARTVSAAVAVVGLAAGGRGRPDSHAGMYIGYTADAAASSSSSSSSSSSSSSEMLRFDTGWPDETPAPSSVAGRRRSAGGDHRQGRGQTEAAAAFIGVRRRPWGRFAAEIRDSTRNGARVWIGTFDSAEAAAMAYDQAALSARGAAAALNFPVERVRESLHALSLGAAGGSPVLALKRRHSKRKRRKKAELLAAAAATAATANATPQTRRISKSTELTTATTDEQKRFVVELEDLGAEYLEELLWLSEINGGSDPAD

SEQ ID NO: 2674 - protein, 793 aa, Oryza sativa
CATPREYCGGMDVMNEGKETSDNFCVDKLEKEDEVGSCPTRYCNDTSHSLGSASRKEVMPIIAEKQAFCATTVHDERSWAANAWRARLVKAISQKDSVLPKNADNIHSTSAFGSIGNTENMPGKLTSMLGNRNDSSQDQAMQEKHKDGLIVARCESVSAVNPVARCELASGVNPLARHESTSGCNPRKLEKGKEKLIYDMSNCVSNTNEGDDSNESIESCPSTKAPKRKHGQFSAAEMTSGNKRCRREDNESSCSGLFHKNDSSFFNWMSTLTNGVKVFDETTAVPLNQKFSAATGEEFPTNPVPLQNNCGVPLQSVGFNSLFQSLYSQNVMITSRNTCHQSESSYTANRLTLGFKSSKPVSMGRETLNVATETLAAGRIQMDSYGDRGAFQNQMGIFPLRAERNQNGFHGSSSNAASGHKDDFSESLWVSRLLPKTPMKVMDTTRCDEETDFCSANPKGLGDSSSPQDFNVEKELNNSQYFTSKGSDNETTSSKCAAPQDENKPSETMASIFAKRLDALRHANTSAVHVAITCDHGTPKGRNHKTSSFVVSYNSHDEQESGQKTHKSSGGEGRIVLWTGDKGKEQLSPGNDKELGEKVLSKHENQNCEGSSDGKVVPPKCNLETNTYIEEIDRKRLQNKEGAPNSMENQPDNKQMVPYGIVPNDVYDEASVVFGALQRLRLSRSDIIRWMRSPVMHTTLDGFFLRLRFGKWEEALGGTGYHVARINGVLDKNHLSVTIRNSTCQVDSRFVSNHDFHQDELKAWWSAAMKSGWKLPSQEELNTKLRERELLRF

SEQ ID NO: 2675 - protein, 184 aa, Oryza sativa
  misc_feature (176)..(176): Xaa can be any naturally occurring amino acid
  unsure (1)..(184): unsure at all Xaa locations
EITGSPTDERFLHFTERVRAAASHPRESIDDPWPAATRREANNPPVASWSSGLCDCYDDVGGCCLTFFCPCVAFGRIAEIVDQGATSCCARGTLYMLLAMATGFACAYSCCYRSRLHQQYGLQEKPCGDCCVHWCCGPCALCQEYRELKSRGFDMSLGWQGNMERMGKGVATAPPXQMHPGMTR

SEQ ID NO: 2676 - protein, 161 aa, Oryza sativa
  misc_feature (68)..(68): Xaa can be any naturally occurring amino acid
  misc_feature (132)..(132): Xaa can be any naturally occurring amino acid
  misc_feature (138)..(140): Xaa can be any naturally occurring amino acid
  misc_feature (145)..(145): Xaa can be any naturally occurring amino acid
  misc_feature (148)..(148): Xaa can be any naturally occurring amino acid
  misc_feature (153)..(153): Xaa can be any naturally occurring amino acid
  unsure (1)..(161): unsure at all Xaa locations
MSDSEEHHFESKADAGASKTYPQQAGTIRKNGYIVIKNRPCKVVEVSTSKTGKHGHAKCHFVAIDIFXGKKLEDIVPSSHNCDVPHVNRTEYQLIDISEDGFVSLLTESGNTKDDLRLPTDDSLLGQIKTGXFGEGKXXXVTVMXAMXEEQIXCALKDIGP

SEQ ID NO: 2677 - protein, 173 aa, Oryza sativa
MTELFDTAVTSLLHLPEVLDRLGAAAGDRRSAGDHAHHAAHGHGQHRISGIGGGAPVDIMETPGEYAFVLDVPGLSKSDIQVTLEEDRVLVMKSSNGAGNGKRKREEEEGECKYIRLERRASPRAFARKFRLPEDADTGGISARCENGVLTVTVKKRPPPEKKTKSVQVTHPP

SEQ ID NO: 2678 - protein, 317 aa, Oryza sativa
MIMLLQEMENHPVQCMAKTNYDFLARNNYPMKQLVQRNSDGDSSPTKSGESHQEASAVSDSSLNGQHTSPQSVFVPSDINNNDSCGERDHGTKSVLSLGNTEAAFPPSKFDYNQPFACVSYPYGTDPYYGGVLTGYTSHAFVHPQITGAANSRMPLPVDPSVEEPIFVNAKQYNAILRRRQTRAKLEAQNKAVKGRKPYLHESRHHHAMKRARGSGGRFLTKKELLEQQQQQQQQKPPPASAQSPTGRARTSGGAVVLGKNLCPENSTSCSPSTPTGSEISSISFGGGMLAHQEHISFASADRHPTMNQNHRVPVMR

SEQ ID NO: 2679 - protein, 607 aa, Oryza sativa
  misc_feature (42)..(42): Xaa can be any naturally occurring amino acid
  unsure (1)..(607): unsure at all Xaa locations
METHIGSVDGAAAAADNGAVGCPASAVGCPMTSARPAPVSAXGEASLGRHLARRLVQVGVSDVFAVPGDFNLTLLDHLIAEPGLRLVGCCNELNAGYAADGYARARGVGACAVTFTVGGLSVLNAIAGAYSENLPVICIAGGPNSNDYGTNRILHHTIGLPDFSQELRCFQTVTCHQAVVTNLEDAHEQIDTAIATALRESKPVYLSISCNLPGLPHPTFSRDPVPFFLAPRLSNKMGLEAAVEATVEFLNKAVKPVLVGGPKLRVAKAGKAFVDLVDASGYAYAVMPSAKGLVPETHPHFIGTYWGAVSTAFCAEIVESADAYLFAGPIFNDYSSVGYSFLLKKDKAIIVQPERVIVGNGPAFGCVMMKEFLSELAKRVNKNTTAYENYKRIFVPEGQPLESEPNEPLRVNVLFKHVQKMLNSDSAVIAETGDSWFNCQKLKLPEGCGYEFQMQYGSIGWSVGALLGYAQGAKDKRVIACIGDGSFQVTAQDVSTMIRCAQNSIIFLINNGGYTIEVEIHDGPYNVIKNWNYTGLVDAIHNGEGKCWTSKVKCEEELTEAIGMALGEKKDCLCFIEVIAHKDDTSKELLEWGSRVSAANSRPPNPQ

SEQ ID NO: 2680 - protein, 366 aa, Oryza sativa
  misc_feature (172)..(172): Xaa can be any naturally occurring amino acid
  unsure (1)..(366): unsure at all Xaa locations
MCGGAIIHHLKGHPEGSRRATEGLLWPEKKKPRWGGGGRRHFGGFVEEDDEDFEADFEEFEVDSGDSDLELGEEDDDDVVEIKPAAFKRALSRDNLSTITTAGFDGPAAKSAKRKRKNQFRGIRHRPWGKWAAEIRDPRKGVRVWLGTFNSAEEAARAYDAEARRIRGKKAXKVNFPEAPTTAQKRRAGSTTAKAPKSSVEQKPTVKPAFNNLANANAFVYPSANFTSNKPFVQPDNMPFVPAMNSAAPIEDPIINSDQGSNSFGCSDFGWENDTKTPDITSIAPISTIAEVDESAFIKSSTNPMVPPVMENSAVDLPDLEPYMRFLLDDGAGDSIDSLLNLDGSQDVVSNMDLWSFDDMPVSDFY

SEQ ID NO: 2681 - protein, 188 aa, Oryza sativa
MAMSPHDQHEHEPDHAHRSPSNGTAATSTIATNRWGPYSGAGDFASNMAVIFAALLAALALALALNAAVRYLLRRHRRARQQPAAAAAAAEDPEKPPVQEADPPPPPPALVYSAAGTKLAGAAECAICLAEFVDGDTVRVMPVCGHGFHARCIERWLAGGRRSSCPTCRAPAATPPGATATEPAAVAP

SEQ ID NO: 2682 - protein, 141 aa, Oryza sativa
MAKPSAAAWSTGLLDCFDDCGLCCMTCWCPCITFGRVAEMVDRGSTSCGTSGALYALLATVTGCQFVYSCVYRGKMRAQYGLGDDAACADCCVHFWCNKCALCQEYRELVARGYDPKLGWDLNVQRGAAAAAAPAVQHMGR

SEQ ID NO: 2683 - protein, 249 aa, Oryza sativa
MQYTVEGSGGGGVQTVEAAVRKGPWTMEEDLSLVNYIAANGEGAWNTLARAAGLNRTGKSCRLRWLNYLRPDVRRGNITPEEHTLIVELQARWGNRWSKIARYLPGRTDNEVKNFWRTKIQKKHRKSTDGIYATTTSESIMPAATVHQNTVAEDQGSSSVSGRTTTATVAVTQEYATEAPPPSGMSSGSYLDQLQPGYASSIHGGQDGGAAAAAAGDVVVSDEFLAASSDNFWALEDLWPTVQSLHGNC

SEQ ID NO: 2684 - protein, 601 aa, Oryza sativa
MAEAAAGGEVRRRGGCCGGGGGGGGLFPEESFASWGAYGRALMETGPRLVERPTARSAAAVEVNEVRGRSGAEMKRNLTWWDLAWFGVGAVIGAGIFVLTGQEARDAAGPAVVLSYAVSGVSAMLSVLCYTEFAIEIPVAGGSFAYLRVELGDFVAFIAAGNILLEYCIGGAAVARAWTSYFATLLNHRPNDFRIHAASLAADYSRLDPIAVAVIAVVCALSVLSTKASSRFNYALSIAHLAVLVFIVTAGLSRARLSNLTADFAPFGARGVFAASAVLFFAYVGFDAVSTMAEETRDPARDIPAGLVGAMAVTTAAYCALAATLCLMQPYREIDPDAPFSVAFSAAGMGWARYVVAFGALKGMTTVLLVSAVGQARYLTHIARAHMAPPCLARVHPRLGTPVNATVAMLAATAAIALFTDLGVLANLLSISTLFIFMLVAVALLVRRYYATGETARGDRNRLAGCLAVIVASSVATAAYWGLGGDGGGWAAYAVAVPAWLAATLFLQLRVPMARTPEKWGVPLVPWLPSASIFINIFLLGSIDGRSFMRFGVWTAALLAYYFFFGLHASYDTAKALAAEVAAGKVEEGGSKPAVGGAAGN

SEQ ID NO: 2685 - protein, 354 aa, Oryza sativa
  misc_feature (214)..(214): Xaa can be any naturally occurring amino acid
  unsure (1)..(354): unsure at all Xaa locations
MSTIYMSQLPATLPLMEGDQDQGLYPAFHRAKDPPILFPFMIDSAVEHQGQIYGDQGLRRQQVLGESNQQFNDHMMMGGSDVFLTPSPFRPTIQSIGSDMIQRSSYDPYDIESNNKQHANGSTSKWMSTPPMKMRIIRKGAATDPEGGAVRKPRRRAQAHQDESQQQLQQALGVVRVCSDCNTTKTPLWRSGPCGPKSLCNACGIRQRKARRAXMAAAANGGAAVAPAKSVAAAPVNNKPAAKKEKRAADVDRSLPFKKRCKMVDHVAAAVAATKPTAAGEVVAAAPKDQDHVIVVGGENAAATSMPAQNPISKAAATAAAAAASPAFFHGLPRDEITDAAMLLMTLSCGLVHS

SEQ ID NO: 2686 - protein, 610 aa, Oryza sativa
MSGNDGDMKMRVIVVEGDETSNAPKDVCCEYTLDGSVDIKGSPAVKGKSGGWLAGGLILLNQGLATLAFFGVNVNLVLFLTRVLQQSNGDAANNVSKWTGTVYMFSLIGAFLSDSYWGRYKTCAIFQAIFVLGLALLSLSSRLYLIRPVGCGTEHVPCEPHSGAELGIFYIALYMIAFGNGGYQPNVATFGADQFDGEDPAESHSKVSFFSYFYLALNLGSLFSNTFLSFLEDEGNWALGFWVSTAAAATALLLFLGGTLRYRYIRPSGNPVGRIFQVAFAACRNWKAGESPGAVTLYESDEKADSGGRKLLHTEGFRFLDRAAVVGANPKLGTCTQPRDPWKLCTVTQVEEVKSILRLLPIWLCTILYSVVFTQMASLFVVQGAAMRRTTRFPGFSVPPSSMSAFDILTVATTIFLYRRAVCPLVSRLTGRHTGPTELQRMGLGLVLGAMAMATAGTVEHFRKAGATTAMSSDLHIMWQVPQYALIGVSEVMMYVGQLEFFNGEMPDALKSFGSALCMMSMSLGNYFSDVIVSAVTKATAVRGRPGWIPADLNEGHLDKFFFLLAVLAVADFAVYLVCASRYRSGTVDVDRSDGEEEDGVAGRQMAATV

SEQ ID NO: 2687 - protein, 428 aa, Oryza sativa
  misc_feature (377)..(377): Xaa can be any naturally occurring amino acid
  misc_feature (388)..(388): Xaa can be any naturally occurring amino acid
  unsure (1)..(428): unsure at all Xaa locations
MNGGIGDALMQPQHVQVMSSSLPMVASTFVAEPAAAANKPRAAGLPPTPPQVFAAQRAAAAAGGDVCMEESAQGGGGGLPPRKAHRRSSSDVPFGYLAGQHQLLPPKVEAGWGHLGAGAGGAAAADDLFNAYLNLEGLDGLNSSDDRHDEGDSRGSSIKTNGADSSENESEECADDTRGGIRLWSADGGERREGVKRNAAGEPATAPLARHARSLSMDSLIGKFNFTAGTAAAAGNGVALGPNRFSLEFGSGEFTPSEMKKIMADEKLAEMALADPKRVKRVLANRQSAARSKERKMRYIAELEQKVQILQSEATNLSAQLTMMQRDSAGLATQNNELKFRLHAMEQQAQLRDALNEALTTEVQRLKLATAELGDSXGSSSSLAQQIXQLNAQNQMFQLQQQQATQIPFYQLQQSQQNGAAKNNESKE

SEQ ID NO: 2688 - protein, 931 aa, Oryza sativa
MIFKRNQRSEILSLRRCNAGGGAGVGEDDGDGGERRPKRRRGDEFFPVELLGDVPVAGIPYAAFGFRWCEEAEVASPAAASRAAAAAAAASRPPVVRTSRGRAQVLPSRFNDSVLIDPWKKDKPAKPPVPAKAVQLVPKSEVLYRKGAIADRSLTMSELDENGDDDYEEGHNFVASRKYSMSLSTVTSVHGEPYSYYHRKGLMKRQYDDDDDDDDDDDDDDDDEDEEAEEEEEEEEEEEEELSYWRNDFVYGDIVWARLGKRQPVWPGVVVDPAQPAAAQALPPQPRSGAVLCVMLFGWAAEFGDEKKFIWVRQGGIFPFVDYMDRFQGQTELSSCKPGDFQRALEEAFLADQGFFEVPMDGNTTGQPARYKRALQCESCGNCFPNKDPSMMVYVMEQLACRQCAKILRSKEYCGVCLKSWQHKCGGRWKSSKPDKVAVICFGMEGTYLRDLELISCHCGPCKGQKFLFNEWERHAGCRSKNWKSSIKIKDTLMPFGKWIEQHQSSSYSTNPAKRSSQKMKKQKLLDLLSEPYDTVNVKWTTERCAVCRWVEDWDYNKIVICNRCQIAVHQECYGVRGKQDFTSWPQVAFASDELMEPAIGILNITPLLFMKMCVICRQIHGSCTQCYRCSTYYHAICASRAGYRMEIRCLEKNGKQTTNKISYCAHHRAPNPDNVLIIQTPAGTISSKKLVQSNGTVAASRLIRKDLPKDSVSEVEISENLSAARCRFYVKKELKRSREGAIAHRVRGSCQHRWDEIDSLNPPREERDPESFSTFKERLHYLQKTEHTRVCFGRSGIHRWGLFARRGIQEGEMVLEYRGEQVRRSVADLREEQYRVQGKDCYLFKISEEVVVDATDKGNVARLINHSCTPNCYARIMSVGHDESRIVLIAKKNVSAGEELTYDYLFDPDEADDRKVPCLCQTANCRKFMN

SEQ ID NO: 2689 - protein, 329 aa, Oryza sativa
MDMAHERDASSEEEVMGGDLRRGPWTVEEDLLLVNYIAAHGEGRWNSLARSAGLKRTGKSCRLRWLNYLRPDLRRGNITPQEQLLILELHSRWGNRWSKIAQHLPGRTDNEIKNYWRTRVQKHAKQLKCDVNSQQFKDVMRYLWMPRLVERIQAAAAGQQQQQEGGADTPPLSWQHGGSDGLYESPELPAPDASCWPAEYCAAAGGAQSGGTPAPELSSTTAGSSSLSTDSGAGAQPSWPTQADGAEWFTTACDASSATGGVAMRDTELELAQPPCQGGQTWTTSESSLPGLTFPDLAVADFEIGGFDVDSFWTSMEDDQLWCPTQAAV

SEQ ID NO: 2690 - protein, 357 aa, Oryza sativa
MANLTDLVNLNLSDCSDKIIAEYIWVGGSGIDLRSKARTVKGPITDVSQLPKWNYDGSSTGQAPGEDSEVILYPQAIFKDPFRRGDNILVMCDCYTPQGEPIPTNKRHSAAKIFSHPDVVAEVPWYGIEQEYTLLQKDVNWPLGWPVGGFPGPQGPYYCAAGAEKAFGRDIVDAHYKACIYAGINISGINGEVMPGQWEFQVGPSVGIAAADQVWVARYILERVTEVAGVVLSLDPKPIPGDWNGAGAHTNFSTKSMREPGGYEVIKKAIDKLALRHKEHIAAYGEGNERRLTGRHETADINTFKWGVANRGASIRVGRDTEKEGKGYFEDRRPASNMDPYVVTGMIAETTLLWKQN

SEQ ID NO: 2691 - protein, 786 aa, Oryza sativa
  misc_feature (79)..(79): Xaa can be any naturally occurring amino acid
  unsure (1)..(786): unsure at all Xaa locations
MRMAAGGRCCFRRGAPAAVLVLPLLLLIAAAPLPRRPLAATVAADVAAINGLYVALGSPALPKWTANGGDPCGDGWQGXIILNAANLEGQIGSLGNFTSITTINLSNNNIGGTIPEDLPVTLQHFFMSDNQLTGSIPTSLSKLQSLTDMSLNDNHLDGKLPDAFGSLTGLVNFDISSNNFSGSLPPSLGSLSSLTTLHMQDNQLSGTLDVLQDLPLKDLNIENNLFSGPVPPKLLNVPNFKKDGNPFNTSIAPSASPSSTPTGSTPTQTPSSPSSSGTPSPSSSPSNSSGGSTARDSSSPSSRKHKSSTLRIVGYVLLAIVLFIVTVLLVIFCLSKYQERQSRRDYTTSQVGRVHQRVEEPKVKQASVQSRNDAKKGSTEVPERRQVREINLAVPAALEKPPEKRKEHVINLQRSETEIFASTPPPPPPPPPPPPPPPPTPPPPPPRPPPPPPPPPPVEKVIVNPIVKPEKRVSTPPRTGPSTSATSFSVASLQQYTNSFEEGNLIRESRLGKVYLAELPEGRFLEVMKIDNANDRIPVDEFLELVASVSDIRHPNILELVGYCAEYGQRLLVYNHFSRKTLHDVLHEGEELDGALSWNARLQVALGAAKALDYLHESCEPPVVHQNFEPANVLLGNGFSVRVAECGLAELTLSGSVTQLSGRMRALLNYEAPEIHEAGTFTYRSDVYSFGVVMLELLTGRKPYDSSRPRAEQHLVRWADSQFHDIESISKMVDPSIQGECSEKVLSRFADIISRCIRPEPEFRPSMSEIVQDLARIISVTSEESE

SEQ ID NO: 2692 - protein, 222 aa, Oryza sativa
MAPRNAAEAVAVAVAEGGGAGMEPRFRGVRKRPWGRYAAEIRDPARKARVWLGTFDTAEAAARAYDSAALHFRGPKAKTNFPVAFAHAHHHAPPPPLPKAAALAVVSPTSSTVESSSRDTPAAAPVAAAAKAQVPASPSLDLSLGMSAMVAAQPFLFLDPRVAVTVAVAAPVPRRPAVVSVKKEVARLDEQSDTGSSSSVVDASPAVGVGLDLNLPPPIEEA

SEQ ID NO: 2693 - protein, 256 aa, Oryza sativa
MEGEDLGSWLGLGIGGGGYAYGGDDCRRSPSSPSPVQMLFSQHVKEEITRGYDHGRDEEQASGSKIMKGERGARLRVMRSIRNSGGDGSRSRVLSLGDDGGDGGSGGGGGGGTRKKLQLTKEQSTLLEDSFRVHNILSHAQKHELARQLKLKPRQVEVWFQNRRARTKLKQTEVDCEFLKRCCESLTEENKQLKHELMELRRLASPAAAAAGSQLYVQFPRAAAAAMVNVCPSCEKVTVMGGGGGETGKSSSSYSS

SEQ ID NO: 2694 - protein, 289 aa, Oryza sativa
MEGQQFAWGREEGGWRKGPWTAQEDKLLVEYVRQHGEGRWNSVAKITGLKRSGKSCRLRWVNYLRPDLKRGKITPQEESVILELHALWGNRWSTIARSLPGRTDNEIKNYWRTHFKKGKPSKNIERARARFLKQRREMQQQSQLMQTGQQQQLGQDDDATSAVVDDNLAEVAPPAATSLTHDGELQIMQEMAPDMDDLLYYHPGDMSPYSYDDLLGSGGGECGAVAASAGAAASTSEGSSEELDGGAATWGSLWNLDDVVHDMMIDCAAGAGCCWGSFPPLQDKGLAFY

SEQ ID NO: 2695 - protein, 281 aa, Oryza sativa
MAAAEVQSAAGWGRQLQQDGGGWRKGPWTSQEDALLVEHVRQHGEGRWNSVSKLTGLKRSGKSCRLRWVNYLRPDLKRGKITPQEESIIVQLHALWGNRWSTIARSLPGRTDNEIKNYWRTHFKKGKPSKNIERARARFLKQRREMQQSQQLQQPTLMPTPTPQSKDIIVAETGDARTDDDAGGAAAAVAPSSSSSSLSMAGREAEDLIMHQDAMDDLMMCPAMSYHLILHGAAVAGHQLSDGGGSCCASTSEDYGSSEDDGATWGSLWNLDGAAGACTLW

SEQ ID NO: 2696 - protein, 272 aa, Oryza sativa
QTNRKPHGIAFLVYVLNQNTSLQIILYDTPGVIKKEMHKLDTMMMKNVRSAVGSADCVLVVVDACKMPEKIDEILEEGVGNKDTELPVLLVLNKKDLIKPGEIAKKLEWYQKFTNADDVIPISAKFGHGVDDIKEWILSKLPLGPAYYPKDIASEHPERFFVGEIVREKIFLQYRQEIPYACQVNVISYKSRPTAKDFIQVEILVEKESQRSIILGKDGKAIKMLATASRLDIEDFLQKKVYLEIMVKVKENWRQDELLLKRYGYGGEIQAL

SEQ ID NO: 2697 - protein, 251 aa, Oryza sativa
MRRPIMATTTARLLLLLTVAGFCLCHTTCQEAAPPPPPYCGSLRTAVEARNIIGWKTVPPPCAKYVADYITGERYGRDADVVINEAIAYAESLKLSGTGKEIWVFDVDDTALSTVPYQANHGYGVQPFDNQSFLKYVVQGSAPALQSTLRLYRRLLQLGIKPVFLTDRTEDQRTVTTNNLIKQGYCNWEKLVLQPVRLQTSTLAFKTCERQKLVNDGYIIVGNIGDQWNDIRRSPDGCRTFKFPNPMYYVD

SEQ ID NO: 2698 - protein, 784 aa, Oryza sativa
MMIPARHMPSMIGRNGAAYGSSSALSLSQPNLLDNHQFQQAFQHQQQQHHLLDQIPATTAESGDNMIRSRASDPLGGDEFESKSGSENVDGVSVDDQDPNQRPRKKRYHRHTQHQIQEMEAFFKECPHPDDKQRKELSRELGLEPLQVKFWFQNKRTQMKNQHERHENSQLRSDNEKLRAENMRYKEALSSASCPNCGGPAALGEMSFDEHHLRIENARLREEIDRISAIAAKYVGKPMVPFPVLSNPMAAAASRAPLDLPVAPYGVPGDMFGGGGAGELLRGVQSEVDKPMIVELAVAAMEELVRMAQLDEPLWSVAPPLDATAAAMETLSEEEYARMFPRGLGPKQYGLRSEASRDSAVVIMTHANLVEILMDANQYAAVFSNIVSRAITLEVLSTGVAGNYNGALQVMSVEFQVPSPLVPTRESYFVRYCKQNADGTWAVVDVSLDSLRPSPVLKCRRRPSGCLIQEMPNGYSKVTWVEHVEVDDRSVHNIYKLLVNSGLAFGARRWVGTLDRQCERLASVMASNIPTSDIGVITSSEGRKSMLKLAERMVVSFCGGVTASVAHQWTTLSGSGAEDVRVMTRKSVDDPGRPPGIVLNAATSFWLPVPPKRVFDFLRDESSRSEWDILSNGGIVQEMAHIANGRDQGNCVSLLRVNSSNSNQSNMLILQESCTDASGSYVIYAPVDVVAMNVVLNGGDPDYVALLPSGFAILPDGPAHDGGDGDGGVGVGSGGSLLTVAFQILVDSVPTAKLSLGSVATVNSLIACTVERIKAAVSGESNPQ

SEQ ID NO: 2699 - protein, 167 aa, Oryza sativa
  misc_feature (146)..(146): Xaa can be any naturally occurring amino acid
  unsure (1)..(167): unsure at all Xaa locations
MAFASASNGAVRFTEEQEALVLKSWAIMKDDSANIGHRFFLKIFEVAPSARHLFSFLRNSDVPLEKNPNLKKHAMAVFVMTCEAAAQLRKTGRVTVRDTTIKRLGSTHFKNGVSDTHFEVARFALLETIKDGIPASMWSPEMKNAXGEAYEHLVAAIKEGMKPVALL

SEQ ID NO: 2700 - protein, 508 aa, Oryza sativa
MQGSVGVHGILLLAAAAVLTQCLLAAAVNTPVVQCASGTTKCTVTNAFGAFPDGSTCHVAAAAFPATEEELVRVVAGAAASGTKMKVATRLGHNFMKLSCPGGDGLVISTNALNRVVGVNAARMEITVESGVTLSELIDAAAHAGLALPHAPYWLDLTVGGLLSTGAHGSSVSGKGGAVHEYVTGMRVVTPAPASEGYAKVRVVNAGDPDLDAVKVSLGVLGVISQVTLALQPLFNRSVSFRRRGDGDLAERAVAFAGEHEFGDVVWYPARGEAVFRIDDRVATTKTNTISSGDFQNVIQSSRSTEQQQHGDVLPFQAGISVPLSRASAFIRDAQRLLDMNPGALCGGENGGILIRYVKASTAYLGKTEDSVEFDTTSCRHDGDAAMPEEMEQMALRKYGGVPHWGKNRNVAFDGAIAKFPKAGEFMKVKDAYDPDGLFSSEWSDQVLGVAGAGGVNVARNGCGMEGLCVCSEDEHCSPEKGYLCRPGMVYRDARVCRRVAGDAYADA

SEQ ID NO: 2701 - protein, 485 aa, Oryza sativa
MAKALLSSSLLPSLQPRAAAARLPMLTLPSLRRHGGRRASACRVRASLHGLDSIAGLDLHAALERAEAALYTLADAAVVAADAAAGGGGGGGGGGGEAAASVAQKNGGWFGFISEALEVVLKVLKDGLSAVHVPYSYGFAIILLTVIVKAATLPLTKQQVESTLAMQNLQPQIKAIQQRYAGNQERIQLETARLYKQAGVNPLAGCFPTLATIPVWIGLYQALSNVANEGLLTEGFFWIPSLGGPTTIAARQSGAGISWLLPFVDGHPPLGWHDTICYLVLPVLLVASQFVSMEIMKPPQTDDPSQKNTLLVLKFLPFMIGWFSLSVPSGLSIYWFTNNILSTAQQVWLRKLGGAKPVVNQGGSGIITAGRAKRTSAQPAQPGERFKQLKEEESKRKGNKALAAGDSDLSASTSEDEESDDETTEEVNSVGQYGCVVDLGHNFDDQLGRLIFRCRTDTKHSSGTGVLLAHSKMKIVQYTTIGLRG

SEQ ID NO: 2702 - protein, 329 aa, Oryza sativa
MASPSGAGKPPAVLLLRPVDQPFAVALRERYRVLDLLSSGQPLPAFLAAAAAAPDPPRAAVVMGGGSIRADAALFDAVPSLRCVVSTAAGVDHIDLAECARRGVVVANSGTVYSGDVADHAVGMVIDVMRRVSAAERYVRRGLWPVQGDYPLGSKVSGKRVGIIGLGNIGSLIAKRLEAFGCVISYNSRNPKRSLPYTYYADVRALAADSDVLVVSCALNSETRHIVGGEVLDALGEGGVVVNVGRGANVDEAALVRALREGRIAGAGLDVFEGEPKVSPELREMENVVLTPHVAVWTAESRSDLRDHTVANLDAFFSGDPLLTPVMLP

SEQ ID NO: 2703 - protein, 434 aa, Oryza sativa
  misc_feature (130)..(130): Xaa can be any naturally occurring amino acid
  unsure (1)..(434): unsure at all Xaa locations
TPSLLRLVHSAAAAAARSSSFRSGLNLGLGAAMASDNIGSRDVCVVGVARTPMGGFLGALSSLSATKLGSIAIEAALKRANVDPALVQEVFFGNVLSANLGQAPARQAALGAGIPNTVVCSAVNKVCASXGMKATMFAAQSILLGINDIVVAGGMESMSNAPKYIAEARKGSRFGHDTLVDGMLKDGLWDVYGDFAMGNCAELCADNHALTREDQDAYAIQSNERGIAARNSGAFAWEIVPIEVPVGRGKPPVLVDKDEGLDKFDPVKLKKLRPSFKENGGTVTAGNASSISDGAAALVLVSGQKAQELGLQVIARIKGFADAAQAPELFTTSPALAIPKALANAGLESSRVDYYEINEAFSAVALANQKLLGIPSEKINVHGGAVSLGHPLGCSGARILVTLLGVLREKGGKIGVAGVCNGGGGASALVLELA

SEQ ID NO: 2704 - protein, 442 aa, Oryza sativa
MADTASPAAAREAMIEPASTPLLRRRGSYTRSMSHARDELGSFRSCLRWMCVEHSDGSSAVASWLVFTLLAVAVPAAARAALPRRAYDGQVQASLTLSAALAYLTLSRLVRRRGLRRLLYLDRLRHDSQDVRAGYTVELAGSFRLLACFVLPCFLADAAYKVYWYCANRPFPLWWSAAACALEMASWMYRTAMFFMACVLFRIICFLQILRMTGFARDFGQCADVADVLRQHRRIREQLRRISHRYRKFIVSCLLLVTASQFSALLAATRPHAQVNIATSGELALCSLSLVTGLLICLHSAAKITHKTQAITSVAAQWHADATINSQERDHENPRTPIKASSYLHAAGPVVPQPAPNASSSGDESEDETSPSDDGLDGTKIVSFHATHISFQKRQALVTYLENNRAGITVFGFVVDRTWLHALFMIEFSLVMWLLGKTIGIS

SEQ ID NO: 2705 - protein, 314 aa, Oryza sativa
MASASSLGLLLMLAALVSTATAHLSPTFYDTSCPRAMSIIKSTVTAAVNNEPRMGASLLRLHFHDCFVQGCDASILLAGNERNAAPNFSVRGYDVIDSIKTQIEAVCKQTVSCADILTVAARDSVVALGGPSWSVPLGRRDSTGAATAAQVISSLAPSTDSLAQLISAYASKGLSATDLVALSGAHTIGMARCRGFRTRLYNETNIDAAFAAALKANCPATPGSGDGNLAPLDTTTPTAFDNAYYRNLLSNKGLLHSDQELFSNGSTDNTVRSFASSAAAFGAAFATAMVKMGNISPLTGTQGQIRLICSAVNS

SEQ ID NO: 2706 - protein, 562 aa, Oryza sativa
MAADDAARSSRRMDLNLYLGLPRAPRLRRPDLGSDLALGTPMLSSSPSSSAASADAPPLETEPLHPPYSPPPAELVRPPTPLPEPYDPSAPEAHPPYVPPPVPPPEAIPELADDLEFGFSHPPLLLRPSELLGWVDRPSSSTASSSFRPERVDRYRPPVICLNSRQSRCLRPRRFRSDLPPLGSEAPALENDAAAQPPPQEPMQDTVEENKVVADGAIVGASEEEPAERGKSVAMFECNICFEMASEPVVTSCGHLFCWPCLYQWLHVHSTHKECPVCKGEVTEGNITPIYGRGNSTSDAEKKVAEEGNVSGPTIPPRPHGNRLESFRQKFHHLRPISRRLGEAHGILSSWRRILDQQIMNSVSRFEGPPESTVQEMIDHAHHASRLGRITTRMRARRLQREAENSTFVASSAAESGLPANSTSDLPRRSSSPFSSERIDLLQHFVDLASTERLASAVSDLRRMVRPSPYGASTSSNPPNPPNTELLPVDGNHVAVALAADQASNSSTMAVIQEDAAFTESTGEPSNAGSSRSLRRRGRNDALGSLDVDGVGLHRNKRRRLN

SEQ ID NO: 2707 - protein, 208 aa, Oryza sativa
MARPTMLACCKLYISESRNAAALRAIEQAACGGGAVVVNRFTDDAYNRGRTLASIRRQLGYFKPNSSGDQWRGAPETDALPVAPDAGPERSPRSKGVVVVGATGWVDNYNVPVRTGDVEAARRIARAVSERGGGLPSVQAMGLAHGGGVVEVACNLLDPARVGAEQVQGMVERLAAGEGLSVGKGYFTDYSQDKIVELYFKSAANTEG

SEQ ID NO: 2708 - protein, 158 aa, Oryza sativa
ISLDLFVPSGVAPPPPPQRFPHRYGGPIGCFPGLDSEEYFGFTCPAGRGRDFVFSPPAQAGVARTSSTGRRRERSPADKEHRRLKRLLRNRVSAQQARERKKAYMSELEARVKDLERSNSELEERLSTLQNENQMLRQVLKNTTANRRGPDSSAGGDS

SEQ ID NO: 2709 - protein, 766 aa, Oryza sativa
MMLHHEASVQQAREEEEELDHHGDPMITSPLLRPSTSGSSPENGEEENSPVELVALTVPVSDEPETPVLTFRMWVLGTASCAVLSFLNQFFWYRKEPLTITAISAQIAVVPLGRLMAATLPEHAFFRGRPWEFTLNPGPFNVKEHVLITIFANSGAGTVYAIHVITGVRVFYGKTLSFFISLLVVLTTQYHQMLGFGWAGIFRRYLVEPASMWWPSNLVQVSLFSALHEKEARRKGGLTRNQFFLVAFVCSFAYYIFPGYLFQMLTSLSWICWVFPSSVLAQQLGSGLRGLGVGAIGLDWSSISSYLGSPLASPWFATVNVGVGFFIVMYIITPIAYWFNFYKAQNFPIFSDGLFTSTGQKYNVSSIVDSHFHFDTKAYEKNGPLYLSTSLLVTYGVGFATLAATIVHALLFHGSEIWLLSKSAFQEKRMDIHTKLMRRYKQVPEWWFICILIANIGTTIFACEYYNEELQLPWWGVLFACSIAFFFTLPIGIIKATTNQTPGLNVITEYIIGYLYPGRPVANMCFKVYGYISMKQALAFLEDFKLGHYMKIPPRTMFMAQVVGTSIAAFVYIGTAWWLMETIPNICNTELLPSDSPWTCPGDHVFYDASVTWGLISPRRIFGDLGTYSALNWFFLCGAIAPLLVWFAHKTFPGQNWILLIKTPVLIGATFQMPPATAVNYTTWILVGFLSGYVVYRYRRDWWERHNYLLSGALDAGLAFMAVLIYLCLGLEDISLNWWGNDLDGCPLASCPTAKGIVVKGCAVYT

SEQ ID NO: 2710 - protein, 301 aa, Oryza sativa
MTRCAVVAAVAAVLLVAGAAAAGGGEEEEAPSTCARRGPGFVDALASRCPCIRIEPSPPVEVRGEAIAKELNLRHRGVTYSVLFYAAWCPFSSKFRPIFEALSTMFPQIYHFTVEESSAMPSLFSRYGVRGFPAILLVNETTMVRYWGPKDLSSLVDFYKETTGFDPIAYFDVDHQDSTGDFRPVTPGDRSLRKIAKDEPFVLLAVLFIILKVAAHFVPIVVSHLKTFLVVRVQNLNLGIRRGSSQLLERALNVLDVKRLCSKLRLSNKTRDLRKGASNARAWASSFTSVSLGESSSSRQA

SEQ ID NO: 2711 - protein, 261 aa, Oryza sativa
MRPLLARLFAPTYIAMGFSSSASPPSRRLAHLTRHLLLSSGELSSSVGAPAAAARPAYLAAPKGYAAVLVCLFEDPHGGDPRVILTKRAASLSSHSGLYGEVSLPGGKVEEGDADATATALREAKEEIGLDPALVSIVTVLEPFLSKNGLHVTPVIGILSDKALFKPVLNESEVADIFDAPLEMFLKDDNRKTQESNWMGMNIPVQSFEYQSEDKTFVIWGLTAHILTRAAAVVLPREPSFVEFRPRYVNSPSGDTNETKR

SEQ ID NO: 2712 - protein, 174 aa, Oryza sativa
MSRDPLVVGNVVGDILDPFIKSASLRVLYSNRELTNGSELKPSQVANEPRIEIAGRDMRTLYTLVMVDPDSPSPSNPTKREYLHWLVTDIPETTNASFGNEIVSYESPKPTAGIHRFVFVLFRQSVQQTIYAPGWRQNFNTRDFSALYNLGPPVAAVFFNCQRENGCGGRRYIR

SEQ ID NO: 2713 - protein, 282 aa, Oryza sativa
MQEFQSIPGLAGRLFGGAAAADIRRAQAQQGPASRCGGIPSPEAVKCPRCESTNTKFCYYNNYNLSQPRHFCKSCRRYWTKGGVLRNVPVGGGCRKTKRSGSSSAASSAPSTPTAATDNAKNQRRASASSPRSSSGGSGNTSPTAAAATTPTTPATPSSNTIAVINHATTTTTTTNPFPTDVPPPAPIFADQAAALASLFAPPPPPPLPVFSFAAQAKTEDGIASVLLAGQTTAPTAATVADMTPFTSLDAGIFELGDVPPAAYWNAGSCWTDVPDPNVYLP

SEQ ID NO: 2714 - protein, 386 aa, Oryza sativa
MLGALLRLLSACGGVWPTSPAPPARSSSSSSAAAAADQAAAEGRDGLLWWRDLARCHAGELSVAVVQGNHVLEDQCRVESGPPPLAATCIGVFDGHAGPDAARFACDHLLPNLREAASGPEGVTADAIRDAFLATEEGFLAVVSRMWEAQPDMATVGTCCLVGVVHQRTLFVANLGDSRAVLGKKVGRAGQITAEQLSSEHNANEEDVRQELMAQHPDDPQIVALKHGVWRVKGIIQVSRSLGDAYLKHSQYNTEQIKPKFRLPEPFSRPILSANPSIIARCLQPSDCFIIFASDGLWEHLSNQQAVEIVHNHQRAGSARRLIKAALHEAARKREMRYSDLMKIDKKVRRHFHDDITVIVLFINYDQLAKGHSQGQSLSIRCALDH

SEQ ID NO: 2715 - protein, 341 aa, Oryza sativa
ALDAYTPLGFELYSNETLQIFHPHLLVHLLQKAKAKLSMLKSKVICCKLYISESQNAKVVDAITRIGQKDPEVVLLSKFEDDHYNRVRYTLASYIINENSTGEVKFSPMRRVLLEMIEKAFSTINLETHTGTHPRIGVIDDMSFHPLNQATMEDAAQLAKTVASDIGNFLQVPVFLYGAAHPTGKPVTAVRRELGYFQPNYMGIQWMGQVLPDILPVKPDEGPDHVSRERGAIMIGAAPLPLNYNVPVLSKDIPTIRRITRRVTGRGGGLPTVQALALSHGDDCTEIACFLDPDHVSADQVQQQVEQIAAEQGLEVEKGYFTDFSKDAMLEKYFKIVLSVD

SEQ ID NO: 2716 - protein, 895 aa, Oryza sativa
MPGPCCAGATEAAGVPWLAEPPGVQVHTGVVVQPGGGGGRRWGRRAGGREAGDLAVDRGEARRTGHHQALPHPGVDSRMKCLAPDEMLAFLGLESLELGQACCGSIMVDSITPPSSVETERAVLDPAMQGKDMIGRARTGTGKTLAFGIPIMDRILRHNEKNGSGRNPLAIILAPTRELARQVEKEFKESAPLDSLCVYGGVPISHQMRALNYGVDVVVGTPGRIIDLLRRGVLNLSEIQFVVLDEADQMLAVGFDEDVEVIMENLPQNRQSMLFSATMPSWIRKITSKYLKDPIIIDLVGDEDQKLPEGISLYSIASEHYGKPSILGPLIKFAPLTTLFSTLPQEHANGGKCIVFTQTKREADRLAYAMGRSYACQALHGDISQNQRERTLSGFRDGRFNILVATDVAARGLDIPNVDLVIHYELPNTSELFVHRSGRTARAGKKGSAILIYTNDQARAVRIIEQDIGCKFTELPKIEVADEASDMFNVVRDNRSRLAGSPRTGGSSFGRGGYGGFGEGRSRGFGDFDGFGSSPNRGGRSRDAGSRYGSGFGDFRRPSNAFGRSSSKQPDGFGFGDFGEGNFSRNGNRRSRSFDDSGSTRIFKELASGAKIHQQDSSQEEITIHQTNLSQIQDRKMGKKIGDLQQISTMHKIYSIMSLNPVFSIALGLRPCAGKRKVNWAQMPSQRSSDPLGLRPLQKAQPEKRTTATAGVDGDSSVAAPVQVKPRMIIKGMLGRYERWNPVHPTVGTFWGIGLGLGCGVGWGPGFGPEVIGYVGAGCGVGFSVGVTLAGVGVGLPQHGLIRNQYHSGFASNIPFESARFYTFTIIRGLVWDAISYASQVAAVRKESRQRLLNFHENPQISGGVNLPKLGKGVSSSIQSTMECIKAFKDQHWPP

SEQ ID NO: 2717 - protein, 1017 aa, Oryza sativa
MKNLFKSKIKWQHRSNDPASSQGQGQGLPQQTPPSPSPASSPSGGPPALSVSTVSSSSPSAAATPTGAAAAGAGGGGGGTGGEDYMLSEEEFQMQLAMALSASNSECVGDLDGEQIRKAKLISLGRGNRFAAVRDDEQTADALSRRYRDYNFLDYHEKVIDGFYDIFGPSMESSKQGKMPSLADLQTGIGDLGFEVIVINRAIDTTLQEMEQVAQCILLDFPVANIAALVQRIAELVTDHMGGPVKDANDMLTRWLEKSTELRTSLHTSLLPIGCIKIGLSRHRALLFKILADSVGIPCKLVKGSNYTGDDDDAINIIKMNEREFLVDLMAAPGTLIPSDVLSWKGNSLNSNARLTQNPLAGSSSTTDSNLSANALPPGHKGGQLPLFSSGDWILASQSGYEKDGATTSSQASSSGTTSVAAGSAFDSSWTLVSHGQSDDPSTSAGMSAQQKVILPGGEHPWNENINARNENIKLVSDLQGNSESINLFADLNPFGGREPKRTSVPLNGPDNRNNELQRRRENVVPSTRRPQQRLVMKNWSPYNDVSNNKQYNYVEDSFARRNIGDNAASSSQVARPSAKNTNLNVGVRTDTPYMAAHNYDNSMAGSSAMKMTSTAGIGKVPDKVLYGDLDKGLTNSRLGDQPPIERHKWGNSVEGRIPTGTVHNQAKEHKENFDGKQDNKKLHPDPKKSPLDRFMDTSMPSRNPESVSPSFARSHKLDTMFDDVSECEIHWEDLVIGERIGLGSYGEVYRADWNGTEVAVKKFLDQDFYGDALDEFRSEVRIMRRLRHPNIVLFMGAVTRPPNLSIVSEYLPRGSLYKILHRPNCQIDEKRRIKMALDVAKGMNCLHISVPTIVHRDLKSPNLLVDNNWNVKVCDFGLSRLKHSTFLSSKSTAGTPEWMAPEVLRNEQSNEKCDVYSFGVILWELATLRMPWSGMNPMQVVGAVGFQDKRLDIPKEIDPLVARIIWECWQKDPNLRPSFAQLTSALKTVQRLVTPSHQESQSPPVPQEIWVNSSTP

SEQ ID NO: 2718 - protein, 462 aa, Oryza sativa
MAAAAMAPSPPEPALPRELSLGDLRAVSMLGRGAKGVVFHVVPAAAGEEEASMALKAVSREAARHKKNGSGGEDGHRRIWFERDVLMSLRHPLLPSLRGVLATDAVVGFAIDRCGGGDLNSLRRRQTEKMFSDSVIRFYAAELVLALDYLHSLGIVYRDLKPENVLIQDSGHIMLVDFDLSTRLPTPPPPPEEQDATIADSMPEPPPSSPSPNRAKGKRQPGAASCFPFCSVGATKPAASADSPSPTSTSRTASASSSSSSSTATTASSSTAAGVRSPAKSNSFVGTEDYVAPEIIAGSGHDFSVDWWGLGVVLYEMLYGRTPFRGLNRKETFYRVLSKQPELVGEKTPLRDLIARLLEKDPEKRIGARGIKAHPFFNGVDWDRILRVARPPFIPPPPEDEDEAGEVLDVEKVVNEVFAANDGGAAAGVVEKPSPEAGGTLAVGDGEQRRDPSKEGDFSVFF

SEQ ID NO: 2719 - protein, 225 aa, Oryza sativa
MHCCMSLHPHRRHGDGDVDGSASGSGSARLTAGLINFLESRRAGAMSTTNSSSSVSVPAMDAHGQEEEEEPMQVQQQQAFRGVRKRPWGKFAAEIRDSTRNGVRVWLGTFDSAEEAALAYDQAAFAMRGSAAVLNFPMEQVRRSMDMSLLQEGASPVVALKRRHSMRAAAAGRRRKSAAPAPADQEGGGGVMELEDLGPDYLEELLAASQPIDITCCTSPSHHSI

SEQ ID NO: 2720 - protein, 258 aa, Oryza sativa
MESRPGGTNLVEPRGQGALPSGIPIQQPWWTTSAGVGAVSPAVVAPGSGAGISLSGRDGGGDDAAEESSDDSRRSGETKDGSTDQEKHHATSQMTALASDYLTPFSQLELNQPIASAAYQYPDSYYMGMVGPYGPQAMSAQTHFQLPGLTHSRMPLPLEISEEPVYVNAKQYHGILRRRQSRAKAELEKKVVKSRKPYLHESRHQHAMRRARGTGGRFLNTKKNEDGAPSEKAEPNKGEQNSGYRRIPPDLQLLQKET

SEQ ID NO: 2721 - protein, 523 aa, Oryza sativa
ESIMRHVVVQCATSWDTPRTSTTNGSHAEPSAVVKAGTAPLIQALKSTANQDVSCFHFPGHNRGKASPPSLSELIGSRTFLHDLPELPELDDLFSPKGVILDAQKRAAELFGSFKTWFLVNGSTCGIQASVMATCSPGDYLIIPRNCHISVISALVLSGAVPKYIVPEYNSGWDIAGGITPSQVDKVVKELEEDRKKVGAVLVTSPTYHGICSNIQGIVNVCHLQGIPVIVDEAHGAHFRFHRNFPSSATEQGADLVVQSTHKVLCSLTQSSMLHMAGDLVDADKVSQCLQLLQSSSPSYLLLSSLDAARAQLSENAESFDEPVSMALETKHQLRIIPGISVLDLSSFLSDFPAIDPLRITLSASDLQLSGYEADDFLAEEHQIVSELVGTQAVTFAVNLGTRRHDVQRLVHSVKHLSEKYFSENGSSSRKENPASSPLDKFSIKLTPREAFFLKKRRVSIEDSLGEICGELICPYPPGIPVLIPGEIVTQDSLSYLMDVRDNGIAISGAADGELKSIMVCNV

SEQ ID NO: 2722 - protein, 1100 aa, Oryza sativa
MRMRVSLLLLAAAAVAAAAEAAQRSTLAGPTRPVTVPPRDRGHAVDLPDTDPRVQRRVKGWAPEQIAVALSAAPSSAWVSWVTGDFQMGAAVEPLDPTAVASVVRYGLAADSLVRRATGDALVYSQLYPFDGLLNYTSAIIHHVRLQGLEPGTEYFYQCGDPAIPAAMSDIHAFRTMPAVGPRSYPGKIAIVGDLGLTYNTTSTVEHMVSNQPDLVLLLGDVSYANLYLTNGTGTDCYSCSFANSTPIHETYQPRWDYWGRYMEPVTSRIPMMVVEGNHEIEEQIDNKTFASYSSRFSFPSTESGSFSPFYYSFDAGGIHFIMLAAYADYSKSGKQYKWLEKDLAKVDRSVTPWVIAGWHAPWYSTFKAHYREAECMRVAMEELLYSYAVDVVFTGHVHAYERSNRVFNYTLDPCGPVHISVGDGGNREKMATSYADEPGRCPDPLSTPDPFMGGGFCGFNFTSGPAAGSFCWDRQPDYSAYRESSFGHGILEVKNETHALWRWHRNQDLYGSVGDEIYIVREPDNLQPVQLGGGGGGRRRGGGGAGMVSLAAYSPCSTVAGVPKNKGNGAASSTHKESIMRHVVVQCATSWDTPRTSTTNGSHAEPSAVVKAGTAPLIQALKSTANQDVSCFHFPGHNRGKASPPSLSELIGSRTFLHDLPELPELDDLFSPKGVILDAQKRAAELFGSFKTWFLVNGSTCGIQASVMATCSPGDYLIIPRNCHISVISALVLSGAVPKYIVPEYNSGWDIAGGITPSQVDKVVKELEEDRKKVGAVLVTSPTYHGICSNIQGIVNVCHLQGIPVIVDEAHGAHFRFHRNFPSSATEQGADLVVQSTHKVLCSLTQSSMLHMAGDLVDADKVSQCLQLLQSSSPSYLLLSSLDAARAQLSENAESFDEPVSMALETKHQLRIIPGISVLDLSSFLSDFPAIDPLRITLSASDLQLSGYEADDFLAEEHQIVSELVGTQAVTFAVNLGTRRHDVQRLVHSVKHLSEKYFSENGSSSRKENPASSPLDKFSIKLTPREAFFLKKRRVSIEDSLGEICGELICPYPPGIPVLIPGEIVTQDSLSYLMDVRDNGIAISGAADGELKSIMVCNV

SEQ ID NO: 2723 - protein, 199 aa, Oryza sativa
MRRGGAAEEDAEAARFRGVRKRPWGRYAAEIRDPAKKARVWLGTYDSAEDAARAYDAAARALRGAKAKTNFPLSLPHAQPQLHHHHHHHLTYPAAAVVAARPATSSLSSTGESFGTRPRPVLPPRPPPPPPIPDGDCRSDCGSSASVVDDECADAAASPSCRLPFQFDLNLPPGGGGGGGGGFGCAYDDEELRLTALRL

SEQ ID NO: 2724 - protein, 422 aa, Oryza sativa
MGLGNEASSSSSRLLDPAPLLPHHGGDGAGKLSSQPKTFANVFIAVVGAGVLGLPYTFSRTGWAAGSILLLSVAALTFYCMMLLVACRRRLADEHPKIASFGDLGDAVFRGPGRLAVDTMLVLSQASFCVGYLIFISNTMAHLYPVFAPSSNALLSPKALFIWAMLPFQLGLNSIKTLTLLAPLSIFADVVDLGAMGVVLGEDVSVWLAKPPPVFAFGGLSAILYGIGVSVYAFEGIGMVLPLEAEAANKKKFGTTLGLSMGFIAVMYGLFGAMGYIAFGDATRDIITTNLGTGWLSAAVQLGLCINLFFTMPVMMHPVYEVAERLLHGKRYCWWLRWLLVLAVGLSAMYVPNFTDFLALVGSSVCVLLGFVLPASFHLKVFGAEMSWSGVLSDVLLVLLGLSLAVFGTYTSLLQIFHSSSA

SEQ ID NO: 2725 - protein, 379 aa, Oryza sativa
  misc_feature (204)..(204): Xaa can be any naturally occurring amino acid
  unsure (1)..(379): unsure at all Xaa locations
MAMWRAPSAAGQLLGRALASTAAQTSAGSKKVVGVFYKGGEYADKNPNFVGCVDSALGIRGWLESKGHRYIVTDDKEGINCELEKHIEDAHVLITTPFHPAYITAERIKKAKNLELLLTAGVGSDHIDLPAAAAAGLTVAEITGSNTVSVAEDQLMRILLLLRNFLPGHHQIVNGEWNVAGIAHRTYDLEGKTVGTVGAGRIGXRLLLQRLKPFNCNLMYHDRVKIDPELEKEIGAKYEEDLDAMLPKCDVVVINMPLTEKTRGMFNKERIAKMKKGVTIVNNARGAIMDTQAVADACASGHVAGYGGDVWFPQPAPKDHPWRYMPNHAMTPHCSGTTIDGQLRYAAGVKDMLDRYFKGEDFPAQNYIVKAGQLASQYQ

SEQ ID NO: 2726 - protein, 238 aa, Oryza sativa
MMQPPYTYSNSYHHIHSSLPPEMSDRDVDMHILTALMADMADSSSSSSSSSSSSSSDDSDMRASAAAAEPEHRRSPAPPPPPRQQQLIGVRKRPWGKFAAEIRDSTRKGARVWLGTFDSPEAAAMAYDQAAFSVRGASAVLNFPLHRVQESLQALALGAAGGSPVLALKRRHSIRKRRKPTKHMLLMQQQQQEPTVVELEDLGADYLEELLRLSESSSSSSSSSISNFTTTPNRHCQS

SEQ ID NO: 2727 - protein, 492 aa, Oryza sativa
  misc_feature (47)..(47): Xaa can be any naturally occurring amino acid
  unsure (1)..(492): unsure at all Xaa locations
MAAVREVGSKAELEAAAGGARAAAVHFWAAWCEASKQMDEVFAHLAXVDFSHAVFLRVEAEEQPEISEAYGVTAVPYFVFLKEGKTVDTLEGANPASLANKVAKLAGPASVAESAVPASLGVAAGPAVLEKVQEMAQQNGASSTSSAEDALNKRLEQLVNSHPVFLFMKGTPEQPRCGFSRKVVDVLKQEGVEFGSFDILTDNDVREGMKKFSNWPTFPQLYCKGELLGGCDIVIAMHESGELKDVFKEHNIPLQPQGSKNEEAVKAKPDTEKSGAVSEPALLTAAQKERLESLVNFSTVMAFIKGTPEEPKCGFSGKLVHILKQEKIPFSSFDILTDDEVRQGLKLLSNWPSYPQLYINGELVGGSDIVMEMHKSGELKKVLSEKGIVAKESLEDRLKALISSAPVMLFMKGTPDAPRCGFSSKVVNALKQAGVSFGAFDILSDEEVRQGLKTYSNWPTFPQLYYKSELIGGCDIVLELEKSGELKSTLSE

SEQ ID NO: 2728 - protein, 766 aa, Oryza sativa
GARAVKGTRGLGLRLQPLRCVASFLSACPFRSRPRGPPTPQPLIPHADQQRRPARPPLHLRLRLRLRFLFSSSLPPSSERKRELTSRCPAGRGGEHGFAFGWSSRLCTRSTAANSSFLDFFTLSPRTAQMSDGNDFAELLWENGQAVVHGRKKHPQPAFPPFGFFGGTGGGGGGSSSRAQERQPGGIDAFAKVGGGFGALGMAPAVHDFASGFGATTQDNGDDDTVPWIHYPIIDDEDAAAPAALAAADYGSDFFSELQAAAAAAAAAAPPTDLASLPASNHNGATNNRNAPVATTTTREPSKESHGGLSVPTTRAEPQPQPQLAAAKLPRSSGSGGGEGVMNFSLFSRPAVLARATLESAQRTQGTDNKASNVTASNRVESTVVQTASGPRSAPAFADQRAAAWPPQPKEMPFASTAAAPMAPAVNLHHETGIRHEGRTMRVHKTEARKAPEATVATSSVCSGNGAGSDELWRQQKRKCQAQAECSASQDDDLDDEPGVLRKSGTRSTKRSRTAEVHNLSERRRRDRINEKMRALQELIPNCNKIDKASMLDEAIEYLKTLQLQVQMMSMGTGLCIPPMLLPTAMQHLQIPPMAHFPHLGMGLGYGMGVFDMSNTGALQMPPMPGAHFPCPMIPGASPQGLGIPGTSTMPMFGVPGQTIPSSASSVPPFASLAGLPVRPSGVPQVSGAMANMVQDQQQGIANQQQQCLNKEAIQGANPGDSQMQIIMQGDNENFRIPSSAQTKSSQFSDGTGKGTNARERDGAET

SEQ ID NO: 2729 - protein, 895 aa, Oryza sativa
MRTATNCSSAYTCPAPEKCQSLVEVCGTCVTRGGAALFIIEWKQGLAVVLLLLPCCECETVSVVLEPSHHRSASHTARQSCCHARTWSTWAGSPPSKSCFGSSNHRRFCLSRSSLHLHAPQTRTNQTNPRGTAVTRHTVLAIVSLMSCHASALRSALSRRMPELDLAGEYHQVHTSAAAAAAAASAMPTAGHGMEEYPVVFIMMHAAIHRSVCERKRELTSRCPAGRGGEHGFAFGWSSRLCTRSTAANSSFLDFFTLSPRTAQMSDGNDFAELLWENGQAVVHGRKKHPQPAFPPFGFFGGTGGGGGGSSSRAQERQPGGIDAFAKVGGGFGALGMAPAVHDFASGFGATTQDNGDDDTVPWIHYPIIDDEDAAAPAALAAADYGSDFFSELQAAAAAAAAAAPPTDLASLPASNHNGATNNRNAPVATTTTREPSKESHGGLSVPTTRAEPQPQPQLAAAKLPRSSGSGGGEGVMNFSLFSRPAVLARATLESAQRTQGTDNKASNVTASNRVESTVVQTASGPRSAPAFADQRAAAWPPQPKEMPFASTAAAPMAPAVNLHHEMGRDRAGRTMPVHKTEARKAPEATVATSSVCSGNGAGSDELWRQQKRKCQAQAECSASQDDDLDDEPGVLRKSGTRSTKRSRTAEVHNLSERRRRDRINEKMRALQELIPNCNKACYVLQIDKASMLDEAIEYLKTLQLQVQMMSMGTGLCIPPMLLPTAMQHLQIPPMAHFPHLGMGLGYGMGVFDMSNTGALQMPPMPGAHFPCPMIPASSVPPFASLAGLPVRPSGVPQVSGAMANMVQDQQQGIANQQQQCLNKEAIQGANPGDSQMQIIMQRFLVQIMMNYYDTVVYAYKFVSLVRSQDVIFKSVSNYVCPDHLQYGEIVDSDV

SEQ ID NO: 2730 - protein, 1010 aa, Oryza sativa
  misc_feature (105)..(105): Xaa can be any naturally occurring amino acid
  misc_feature (146)..(146): Xaa can be any naturally occurring amino acid
  misc_feature (156)..(156): Xaa can be any naturally occurring amino acid
  misc_feature (176)..(176): Xaa can be any naturally occurring amino acid
  unsure (1)..(1010): unsure at all Xaa locations
MGAITSAELNFLIFRYLQESGFIHAAFTLGYEAGIHKGGIDGNLVPPGALITIVQKGLQYIELEANTDENDEDLAKDFALLEPLEIITKNVEELQQIVQKRKREXTQSDRDKDKGKEKDRMEEHERRPGGERERERHDQDHRVRDXETDRAERDRXQDKEKEKLHTERIDKVKAEXDSLAGGGPTPMDVSTTAHEISSADVTVLEGHSSEVFACAWSPAGSLLASGSGDSTARIWTIPDGPCGSITQSSPPGVHVLKHFKGRTNEKSKDVTTLDWNGEGTLLATGSYDGQARIWNSDGELKQTLFKHKGPIFSLKWNKKGDFLLSGSVDKTAIVWDTKTWECKQQFEFHSAPTLDVDWRNNNSFATCSTDNMIYVCKIGDQRPVKSFSGHQHSSPAFSKKNSEVNAIKWDPTGSLLASCSDDWTAKTVSVMTFYTNPIPSVVQSYFILSLGGVTRTSHKRCGNQSRVEFCLWNGSDFVSSWLLKHFALYLAWYYAFLADSRNKASRINLIYYFPFPRLLPIAFISALGRRSTKLPKRRLPTSHSYPIRSLPGARDNFVSDHGRNLHCQTTASGTLVPSTSCRTMVDVLASISLLASKIDMVDLSRSVAVATSRITALEQFQVASSTSTSNNAPWLPTRQPTPATIELWRTAGLQHGDAGGNVPRFYKLEFPKFDGKDDSLKTIASSSSRAKRPTTVTVSGWQLTISSVRRKTGTSTTSSSRDRRIGTRSRSSVMVNSVLPYAIILSGLRFVMANGDRLVSPGLCRNLALNIDGEAFSVDCFALDLCAVDIILGMQWLQTLGPILWDFKNMRMAIWRSTREHLLAELEDLFAEPQGLLSARAIDYRIHLKPGATSVAVRPYRYRYPSRHTMIWSMKQDKCVYDFKEHTKEIYTIRWSPTGPGTNNPNQQLLLASASFDSTIKLWEVEQGRLLYSLAGHRQPVYSVAFSPGGEYLASGSLDQCLHIWSVKEGRILKTYRGSGGIFEVCWNKEGSKIAACFSNNTVCLMDFRM

SEQ ID NO: 2731 - protein, 402 aa, Oryza sativa
MASASSLGLLLMLAALVSTATAHLSPTFYDTSCPRAMSIIKSTVTAGVNNEPRTGRGKPRPAKKLKKNCSYLGRIKHYAHGASYRSLCMASASSVSLMLLVAAAMASAASAQLSATFYDTSCPNALSTIKSAVTAAVNSEPRMGASLVRLHFHDCFVQGCDASVLLSGQEQNAGPNAGSLRGFNVVDNIKTQVEAICSQTVSCADILAVAARDSVVALGGPSWTVLLGRRDSTTANESQANTDLPAPSSSLAELIGNFSRKGLDVTDMVALSGAHTIGQAQCQNFRDRLYNETNIDSSFATALKANCPRPTGSGDSNLAPLDTTTPNAFDSAYYTNLLSNKGLLHSDQVLFNGGSTDNTVRNFSSNTAAFNSAFTAAMVKMGNISPLTGTQGQIRLNCSKVN

SEQ ID NO: 2732 - protein, 441 aa, Oryza sativa
MASMAVFLLVLLAALVSVDVAAAHSGGGFGFKATLTHVDANAGYTKAQLLSRAVARSRARVAALQSLATAADAITAARILLRFSEGEYLMDVGIGSPPRYFSAMIDTGSDLIWTQCAPCLLCVEQPTPYFEPAKSTSYASLPCSSAMCNALYSPLCFQNACVYQAFYGDSASSAGVLANETFTFGTNSTRVAVPRVSFGCGNMNAGTLFNGSGMVGFGRGALSLVSQLGSPRFSYCLTSFMSPATSRLYFGAYATLNSTNTSSSGPVQSTPFIVNPALPTMYFLNMTGISVAGDLLPIDPSVFAINETDGTGGVIIDSGTTVTFLAQPAYAMVQGAFVAWVGLPRANATPSDTFDTCFKWPPPPRRMVTLPEMVLHFDGADMELPLENYMVMDGGTGNLCLAMLPSDDGSIIGSFQHQNFHMLYDLENSLLSFVPAPCNLS

SEQ ID NO: 2733 - protein, 171 aa, Oryza sativa
MASSSRTALPSAVLALRLLTLALLAASLAVIAADKLTLDFGGGLPPKKITFKDVYAYRYVLAIAVIGCAYTLLQIPFVAVSIAKRKRMIGGSENVALFLIFADVIFALLVATGAGAGFGLTYDAKSAFGGSKLPGEVVRFFNMAYAAAGLMLLAAAAMALIIMLSIYSLVR

SEQ ID NO: 2734 - protein, 572 aa, Oryza sativa
MTAAPGSLPLVNSRPVSLSLAASRSSFSSLLSGGAGSSLNLMTPPSSLPPSSPSSYFGGVSSSGFLDSPILLTPSLFPSPTTTGALFSWITTATATAAIAPESQVQGGVKDEQQQYSDFTFLPTASTAPATTMAGATATTSNSFMQDSMLMAPLGGDPYNGEQQQPWSYQEPTMDADTRPAEFTSSAAAGDVAGNGSYSQVAAPAAAGGFRQQSRRSSDDGYNWRKYGQKQMKGSENPRSYYKCTFPGCPTKKKVEQSPDGQVTEIVYKGAHSHPKPPQNGRGRGGSGYALHGGAASDAYSSADALSGTPVATPENSSASFGDDEAVNGVSSSLRVASSVGGGEDLDDDEPDSKRWRRDGGDGEGVSLVAGNRTVREPRVVVQTMSDIDILDDGYRWRKYGQKVVKGNPNPRSYYKCTTAGCPVRKHVERASNDLRAVITTYEGKHNHDVPAARGSAAAALYRATPPPQASNAGMMPTTAQPSSYLQGGGGVLPAGGYGASYGGAPTTTQPANGGGFAALSGRFDDDATGASYSYTSQQQQQPNDAVYYASRAKDEPRDDGIMSFFEQPLLF

SEQ ID NO: 2735 - protein, 322 aa, Oryza sativa
MAAMSASGRRVFLLGALLLVAVSCHGGFGGVGVAEGLSTRYYAKTCPAVESVVRSVMARAVAADRRMGASVLRLFFHDCFVNGCDGSVLLDDAPPGFTGEKGAGANAGSARGFEVVDAAKARVEAACRATVSCADVLALAARDAVALLGGTTWPVRLGRKDARTASQAAANGNLPGPSARDMTALSGAHTVGRARCATFRGRVNGGDANVNATFAAQLRRLCPAGTGGDGNLAPLDAETPDVFDNGYFRELTKQRGLLHSDQELFAAGGGGRSSSQDALVRKYAGNGAKFARDFAKAMVKMGNLAPAAGTPVEVRLNCRKPN

SEQ ID NO: 2736 - protein, 481 aa, Oryza sativa
MAHALGCGAATAPAGVGLLHHHEKAGALFSAAGSIVRVQQLSGKGSKSQAIRCAMPSASEHGGISTATASSSDQKKGGLRGKLNKVVLAYSGGLDTSVIVPWLRENYGCEVVCFTADVGQGDIELEGLEKKAKASGASQLVVKDLKEEFVSEYIYPCLRAGAVYERKYLLGTSMARPVIAKAMVDVAKEVGADAVAHGCTGKGNDQVRFELTFYALNPELKVVAPWREWDITGREDAIEYAKKHNVPIPVTKKSIYSRDRNLWHLSHEGDILEDPANEPKEDMYMMSVAPENAPSKPEYLEIGIIAGVPVSINGKDLSPASLLAKLNEIGGKHGIGRIDMVENRLVGMKSRGVYETPGGTIMAAAVRELESLTLDRETMQWKDMLALKYAELVYAGRWFDPLRQSIDAFMENITATTTGSVTLKLYKGSVNVASRKSPYSLYREDISSFENGEIYNQADAEGFIRLYGLPTRVRAMLEKGI

SEQ ID NO: 2737 - protein, 380 aa, Oryza sativa
MELAPFAAASSSSSSSTVTNTCKLRLRLSYTHCSIGFAPRVRRWIRAAAEGRGGDQRRSGRLAADGPRVVEVAAPPAAPVVTGGGGGGGGFAARDAELAMWERLGAVVRLSYGIGIYAAMALTGRFICQMAGIDCTGGFHPSLSALVEGLGYAAPPIMALLFILDDEVVKYSPHARAIRDVEDEELRSFFYGMSPWQFILIVTASSIGEELFYRVAVQGALADIFLRGTELMKDARGIASLSGMVPPFVPFAQTFAAAITAALTGSLYYVATAPKDPTYVVTPAMRSNTGRENLKKLFAAWYERRQMRKIYSPLLEGILAFYLGFEWIQTDNILAPMITHGIYSTVVLCHGLWKIHDHRRRLRQRIQEIRQEGTTNSDTL

SEQ ID NO: 2738 - protein, 444 aa, Oryza sativa
  misc_feature (252)..(252): Xaa can be any naturally occurring amino acid
  misc_feature (336)..(336): Xaa can be any naturally occurring amino acid
  unsure (1)..(444): unsure at all Xaa locations
MEVAAAEVPSYFLCPISLEIMRDPVTLATGITYDRSSIERWMFGGGGGDGGKGTCPVTRRQLAPAEREATPNHTLRRLIQAWCAAHAVERFPTPRPPVDSCRVAALVDEGTTTMLGGGGRQRQLAALREIKAIAAESDRNKRCVEATPGAVEFLVSVVVQSHAAASTSASSDDDDLFDSVIDSPMSTSSPEEEALGVLYSLKPSEPTLRRVLGKDNGVGFLDTLASVLRRPSYRSRAYAILLLKAVTSGNPXPDRLMAVSPELVEEVVRVVSDGVSSKAVKAALHVLCRLCPWGRNRVKAVEAGAVAALVELLLDEEGGGGRRRAAELAVVAIDHXLCGCAEGRSELVAHPAGLAVVSKRAMRVSPAATESAVRALHAVARNAATPAVLQEMLAVGVVAKLLLVLQADGGERARARAREMLRANARVWKDSPCLQAHLKASYPS

SEQ ID NO: 2739 - protein, 660 aa, Oryza sativa
  misc_feature (612)..(612): Xaa can be any naturally occurring amino acid
  unsure (1)..(660): unsure at all Xaa locations
MALLSATAPAKTRFSLFSHEEAQHPHPHALSACCGGGASGKRQRARARVAAAMRPADAAASVAQAASPGGGGEGTRRPRVLVAGGGIGGLVLALAARRKGYEVTVFERDMSAVRGEGQYRGPIQIQSNALAALAAIDMSVAEEVMREGCVTGDRINGLVDGISGSWYIKFDTFTPAAERGLPVTRVISRMTLQQILARAVGDDAILNDSHVVDFIDDGNKVTAILEDGRKFEGDLLVGADGIWSKVRKVLFGQSEATYSEYTCYTGIADFVPPDIDTVGYRVFLGHKQYFVSSDVGAGKMQWYAFHKEPAGGTDPENGKNKRLLEIFNGWCDNVVDLINATDEEAILRRDIYDRPPTFNWGKGRVTLLGDSVHAMQPNLGQGGCMAIEDGYQLAVELEKSWQESAKSGTPMDIVSSLRRYEKERILRVSVIHGLARMAAIMATTYRPYLGVGLGPLSFLTKLRIPHPGRVGGRFFIKYGMPLMLSWVLGGNSTKLEGRPLSCRLSDKANDQLRRWFEDDDALEQAMGGEWYLLPTSSGDSQPIRLIRDEKKSLSIGSRSDPSNSTASLALPLPQISENHATITCKNKAFYVTDNGSEHGTWITDNEGRRYRXVPPNFPVRFHPSDAIEFGSDKKAVFRVKVLSTLPYESARGGPQILQAA

SEQ ID NO: 2740 - protein, 276 aa, Oryza sativa
MTGSSCPADSSQLLYPRRGAPTTTTTSRPPLHPLIAHAPYDVVLHRSVVLSISSARDQAELASFWCYIRLGGGASAKRAAGEDDRSRSSLTAARGGGGETMSGRGRGDPLVLGRVVGDVVDPFVRRVALRVAYGAREVANGCELRPSAVDDQPRVAVGGPDMRTFYTLVMVDPDAPSPSDPNLREYLHWLVTDIPATTGVSFGTEVVCYESPRPVLGIHRLVFLLFEQLGRQTVYAPGWRQNFSTRDFAELYNLGLPVAAVYFNCQRESGTGGRRM

SEQ ID NO: 2741 - protein, 311 aa, Oryza sativa
MEMMVHGRRDEQYGGLGLGLGLGLSLGVAGGAADDEQPPPRRGAAPPPQQQLCGWNGGGLFSSSSSDHRGRSAMMACHDVIEMPFLRGIDVNRAPAAETTTTTARGPSCSEEDEEPGASSPNSTLSSLSGKRGAPSAATAAAAAASDDEDSGGGSRKKLRLSKDQAAVLEDTFKEHNTLNPKQKAALARQLNLKPRQVEVWFQNRRARTKLKQTEVDCELLKRCCETLTDENRRLHRELQELRALKLATAAAAPHHLYGARVPPPTTLTMCPSCERVASAATTTRNNSGAAPARPVPTRPWPPAAAQRSSA

SEQ ID NO: 2742 - protein, 204 aa, Oryza sativa
SGGRRCRPAARATSATTCSGGHYRRDSAVVIDEAIAYAESLQLSGNGKEIWVFDIDETSLSNLPYYAKHGFGATLYNDTSFREYVAEGSAPALPETRRLYRRLLQLGVKPVFLTGRTEDQRNITVTNLRRQGYSGWMELLLKPAVHAAGELQGSAVAYKSGERQKLEDAGFTILGNIGDQWSDILGTPEGARTFKLPDPMYYIG

SEQ ID NO: 2743 - protein, 275 aa, Oryza sativa
CRNQNLGMVADTESSGSLGGSSNAASDKAVDGSLDKRSQEKAPKKTHKAEREKLKRDQLNDLFVELSSMLDPERQNSGKATVLGDAARVLRDLVSQVESLRKEQSALLTERQYVGSENNELQEENIMLRAQILELHNEICARMGNNHLNQSNLAMSQPVANNGSNSATQPVPHHIWGNGPNLAMVHPTNTLSPLHNQHHQSAGASQVYASRPQELQLFPGTSVSTERERSRAGSGSTPATSSGLTDSLPGQLRLSLPQSSQEENSSGSKKGRKKG

SEQ ID NO: 2744 - protein, 252 aa, Oryza sativa
MQQMSRPSVIIKLILGLLWFIVHLAISLCSLWFDLIYSIECYLISFGLIPKYRKFQLDRLKHLAVVVDSREAKNVAKINQLLCWLSNVGVKYVCLYDIDGVLKKTFAPAMNGSRYGNSGKYLDVGANTKALTCCHKEMTIECISGSDGKDGIAKAASLLCSTCVNGNRNTCGNGEIVFTEADMSGALKAIGCGGPEPDLLLVYGPARCHLGFPAWRLRYTEIMHMGPLNSMKYGAIVKAFYKFSKKYQNFGK

SEQ ID NO: 2745 - protein, 469 aa, Oryza sativa
MAPQLPLEVASAPKLDDDGHPQRTGNLWTCVAHIITAVIGCGVLALSWSVAQLGWVAGPIAMVCFAFVTYISAFLLSHCYRSPGSEKMQRNYSYMDAVRVHLGRKHTWLCGLLQYLNLYGIGIAYTITTATCMRAIKRANCYHSEGRDAPCDSNGEHFYMLLFGAAQLLLSFIPNFHKMAWLSVVAAIMSFAYSTIGLGLGLAKTIGDGTVKGNIAGVAMATPMQKVWRVAQAIGDIAFAYPYTIVLLEIQDTLRSPPPESETMQKGNVIAVLATTFFYLCVGCFGYSAFGNAAPGNLLTGFGFYEPYWLIDFANACIVLHLLGGYQMFSQQIFTFADRCFAASFPNSAFVNRSYSVKILPWRRGGGGGGAGRYEVNLQRVCFRTVYVASTTGLALVFPYFNEVLGVLGALVFWPLAIYLPVEMYCVQRRISPWTPRWAALQAFSVVCFVVGTFAFVGSVEGVIRKRLG

SEQ ID NO: 2746 - protein, 555 aa, Oryza sativa
MTTSSSGSVETSANSRLGTFSFASASFTDLLGGNAGAGGGGVSRYKAMTPPSLPLSPPPVSPSSFFNSPIGMNQADFLGSPVLLTSSIFPSPTTGAFASQHFDWRPEVAAAQSADQGGKDEQRNSYSDFSFQTAPASEEAVRTTTFQPPVPPAPLGDEAYRSQQQQQPWGYQQQPAGMDAGANAASFGAAPFQATSSEMAPQVQGGGGYSQPQSQRRSSDDGYNWRKYGQKQVKGSENPRSYYKCTFPNCPTKKKVERSLDGQITEIVYKGTHNHAKPQNTRRNSGSSAAQVLQSGGDMSEHSFGGMSGTAATPENSSASFGDDEIRVGSPRAGNGGGDEFDDDEPDSKRWRKDGDGEGISMAGNRTVREPRVVVQTMSDIDILDDGYRWRKYGQKVVKGNPNPRSYYKCTTAGCPVRKHVERASHDLRAVITTYEGKHNHDVPAARGSAALYRPAPPAAAATSSHPYLPNQPPPMSYQPTGPQPYALRPDGFGGQGPFGGVVGGSSFGGFSGFDDARGSYMSQHQQQQRQNDAMHASRAKEEPGDDMFFQNSLY

SEQ ID NO: 2747 - protein, 171 aa, Oryza sativa
MAGGGRADDERRIGVAMDYSASSKRALDWAIANLLRRGDHLVVLHVLHHGGEEAKHALWGKSGSLDSIPPALIPLSEFRDPTAMQQYGVHCDAEVLDMLDTAARQLELTVVAKLYWGDAREKLCDAVEEQKIDTLVMGSRGLGSIQRILLGSVTNYVLSNASCPVTVVKGK

SEQ ID NO: 2748 - protein, 961 aa, Oryza sativa
  misc_feature (515)..(515): Xaa can be any naturally occurring amino acid
  misc_feature (540)..(540): Xaa can be any naturally occurring amino acid
  unsure (1)..(961): unsure at all Xaa locations
MAAARAPWLWWWVVVVVGVAVAEAASGGGGGGDGEGKALMGVKAGFGNAANALVDWDGGADHCAWRGVTCDNASFAVLALSLDISEAILFVMLKRIFVMRVFPCVKNRNLSNLNLGGEISPAIGELKNLQFVDLSGNLLYGDIPFSISKLKQLEELILKNNQLTGPIPSTLSQIPNLKTLDLAQNQLTGDIPRLIYWNEVLQYLGLRGNSLTGTLSPDMCQLTGLWYFDVRGNNLTGTIPESIGNCTSFEILDISYNQISGEIPYNIGFLQVATLSLQGNRLTGKIPDVIGLMQALAVLYLHGNKLTGVIPPELGNMSKLSYLQLNDNELVGTIPAELGKLEELFELNLANNNLQGPIPANISSCTALNKFNVYGNKLNGSIPAGFQKLESLTYLNLSSNNFKGNIPSELGHIINLDTLDLSYNEFSGPVPATIGDLEHLLELNLSKNHLDGPVPAEFGNLRSVQVIDMSNNNLSGSLPEELGQLQNLDSLILNNNNLVGEIPAQLANCFSLNNXEFVIQQFIWTCPDGKELLEIPNGKXFLGNPLLHVYCQDSSCGHSHGQRVNISKTAIACIILGFIILLCVLLLAIYKTNQPQPLVKGSDKPVQGPPKLVVLQMDMAIHTYEDIMRLTENLSEKYIIGYGASSTVYKCELKSGKAIAVKRLYSQYNHSLREFETELETIGSIRHRNLVSLHGFSLSPHGNLLFYDYMENGSLWDLLHGPSKKVKLNWDTRLRIAVGAAQGLAYLHHDCNPRIIHRDVKSSNILLDENFEAHLSDFGIAKCVPSAKSHASTYVLGTIGYIDPEYARTSRLNEKSDVYSFGIVLLELLTGKKAVDNESNLHQLILSKADDNTVMEAVDSEVSVTCTDMGLVRKAFQLALLCTKRHPSDRPTMHEVARVLLSLLPASAMTTPKTVDYSRLLASTTTAADMRGHDVTDIGDNSSSDEQWFVRFGEVISKHTM

SEQ ID NO: 2749 - protein, 999 aa, Oryza sativa
MAAARAPWLWWWVVVVVGVAVAEAASGGGGGGDGEGKALMGVKAGFGNAANALVDWDGGADHCAWRGVTCDNASFAVLALNLSNLNLGGEISPAIGELKNLQFVDLKGNKLTGQIPDEIGDCISLKYLDLSGNLLYGDIPFSISKLKQLEELILKNNQLTGPIPSTLSQIPNLKTLDLAQNQLTGDIPRLIYWNEVLQYLGLRGNSLTGTLSPDMCQLTGLWYFDVRGNNLTGTIPESIGNCTSFEILDISYNQISGEIPYNIGFLQVATLSLQGNRLTGKIPDVIGLMQALAVLDLSENELVGPIPSILGNLSYTGKLYLHGNKLTGVIPPELGNMSKLSYLQLNDNELVGTIPAELGKLEELFELNLANNNLQGPIPANISSCTALNKFNVYGNKLNGSIPAGFQKLESLTYLNLSSNNFKGNIPSELGHIINLDTLDLSYNEFSGPVPATIGDLEHLLELNLSKNHLDGPVPAEFGNLRSVQVIDMSNNNLSGSLPEELGQLQNLDSLILNNNNLVGEIPAQLANCFSLNNLAFQEFVIQQFIWTCPDGKELLEIPNGKHLLISDCNQYINHKCSFLGNPLLHVYCQDSSCGHSHGQRVNISKTAIACIILGFIILLCVLLLAIYKTNQPQPLVKGSDKPVQGPPKLVVLQMDMAIHTYEDIMRLTENLSEKYIIGYGASSTVYKCELKSGKAIAVKRLYSQYNHSLREFETELETIGSIRHRNLVSLHGFSLSPHGNLLFYDYMENGSLWDLLHGPSKKVKLNWDTRLRIAVGAAQGLAYLHHDCNPRIIHRDVKSSNILLDENFEAHLSDFGIAKCVPSAKSHASTYVLGTIGYIDPEYARTSRLNEKSDVYSFGIVLLELLTGKKAVDNESNLHQLILSKADDNTVMEAVDSEVSVTCTDMGLVRKAFQLALLCTKRHPSDRPTMHEVARVLLSLLPASAMTTPKTVDYSRLLASTTTAADMRGHDVTDIGDNSSSDEQWFVRFGEVISKHTM

SEQ ID NO: 2750 - protein, 174 aa, Oryza sativa
MSRDPLVVGHVVGDILDPFNKSASLKVLYNNKELTNGSELKPSQVANEPRIEIAGRDIRNLYTLVMVDPDSPSPSNPTKREYLHWLVTDIPESANASYGNEVVSYESPKPTAGIHRFVFILFRQYVQQTIYAPGWRPNFNTRDFSALYNLGPPVAAVFFNCQRENGCGGRRYIR

SEQ ID NO: 2751 - protein, 211 aa, Oryza sativa
  misc_feature (139)..(139): Xaa can be any naturally occurring amino acid
  misc_feature (169)..(169): Xaa can be any naturally occurring amino acid
  unsure (1)..(211): unsure at all Xaa locations
MRGAALNAGCTACLLPSVDGAGRSSLLLLQGGGSGWPAKRGGERLLGLGGEGKMVSERVKGTVKGFDATNGFGFITPDDDGEDLFIHQSSLKFDDYRSLNDSDVIELSVGSGNDGRNKAVDVTALGGDTHTGGFRPSCXRWSSTPSALHRCSPLLGPQQRALCRHPFAXHRRCIPLAVPLLLSTISRSLSSSPLVLKEDLGKKCWIGCEGA

SEQ ID NO: 2752 - protein, 615 aa, Oryza sativa
  misc_feature (157)..(157): Xaa can be any naturally occurring amino acid
  unsure (1)..(615): unsure at all Xaa locations
IFLPWLPSLAASALLNSPRANNSALVPPPSSAINNHTRRTHGHPHRNSAPPPPPSPAMASSASLQRFLPPSSHVAASRRRPPAVRTRPVQSLTVSAPSSSTPVADDAVSAERLEPREKVKLGKEPISLFMEGGIKELAKMPMEEIEADKLSKEDIDXGRFMMRLKLPNGVTTSEQTRYLASVIEAYGKDGCADVTTRQNWQIRGVTLPDVPAILDGLNAVGLTSLQSGMDNVRNPVGNPLAGIDPDEIVDTRSYTNLLSYITSNFQGNPTITNLPRKWNVCVIGSHDLYEHPHINDLAYMPAVKDGKFGFNLLVGGFISPKRWEEALPLDAWVPGDDIIPVCKAVLEAYCDLGTRGNRQKTRMMWLIDELGMEVFWSEVEKRMPNGVLERAAPEDLIDKKWQRRDYLGVHPQKQEGLSYVGLHVPVGRVQAADMFELARLADEYGSGELRLTVEQNIVIPNVKDEKVEALLAEPLLQKFSPQPSLLLKGLVACTGNQFCGQAIIETKQRALLVTSQVEKLVSVPRAVRMHWTGCPNSCGQVQVADIGFMGCLTKDSAGKIVEAADIFVGGRVGSDSHLAGVYKKSVPCDELAPIVADILVERFGAVRREREENEE

SEQ ID NO: 2753 - protein, 343 aa, Oryza sativa
  misc_feature (26)..(26): Xaa can be any naturally occurring amino acid
  unsure (1)..(343): unsure at all Xaa locations
MCGGSILGDLHLPVRRTVNAGDLWGXDAGKGRDGGDGLKKRKGSSWDFDVDCDDDDDDDFEADFEEFEDDYGDDDDVGFGDDDQESDMNGLKLAGFSTTKLGLGGSRKRKTRYRGIRQRPWGKWAAEIRDPRKGVRVWLGTFGTAEEAAMAYDVEARRIRGKKAKVNFPDAAAAAPKRPRRSSAKHSPQQQKARSSSSSPASLNASDAVSKSNNNRVSSAGSSTDATAAAIAIDDGVKLELLSETDPSPPMAAAAAAWLDAFELNDLDGSRCKDNAFDHQIHKVEAAVADEFAFYDDPSYMQLGYQLDQGNSYENIDALFGGEAVNIGGLWSFDDMPMEFRAY

SEQ ID NO: 2754 - protein, 578 aa, Oryza sativa
MSGNPSFSQLGAVDAAMNGGYFMAASGNGADVPLFHPAMAPPHDHGGSFGYGDAAAAAMDVGAHFAAANNLVLASLATQLFGAAPAAAAHGHGDYLGATTPPEEEMGGGYDVAVGDSSGGAVSLACLGHGQPGDMAAGWCSTSARKPSCNWSSSNAGVHGGSYYLAGVPEAAGFVSAAAAASELSLSLCSKSSSDSMLNAGGDQCSSAASRSGLTQMSRVVVVEPEPPLVPYYPAANFAVVVARSRYAAVAQQVLNDAVGCVLGGVADAAADSASGVDSGSSRPSSCSVAGGAPSSAVSSNNQLIASSGEHTHGGGDASAQRLRSELLTMLQLVSSPFSTRLPRHQFKQISYYHFESNLKPSFDDDTNSNAQMDQKYNQCLDEIQSTTARFNTLTHATARAAGMSSSSICAPFAHRAVSAMYHGLRRRIAGEIMSAAAAAGRPCRGGESSSAVTGGERERSWESAFIQKHWAVQQLRRGEQQCWRPQRGLPEKSVAVLKAWMFENFLRPYPKDSEKEMLAARSGLSRNQVSNWFINARVRLWKPMIEEMCEELKRSSGGGAGNQALAMEHMNSQDVVS

SEQ ID NO: 2755 - protein, 233 aa, Oryza sativa
MVRGRTELKRIENPTSRQVTFSKRRNGLLKKAFELSVLCDAEVALIVFSPRGRLYEFASAPSLQKTIDRYKAYTKDHVNNKTIQQDIQQVKDDTLGLAKKLEALDESRRKILGENLEGCSIEELRGLEMKLEKSLHNIRLKKTELLERQIAKLKEKERTLLKDNENLRGKHRNLEAAALVANHMTTTTAPAAWPRDVPMTSSTAGAADAMDVETDLYIGLPGTERSSNRSETG

SEQ ID NO: 2756 - protein, 618 aa, Oryza sativa
  misc_feature (153)..(153): Xaa can be any naturally occurring amino acid
  unsure (1)..(618): unsure at all Xaa locations
MAAPSQTTATTTHHRVLLPSHHHHRAVPPSLLRLPLRAARRGRLSAAAAAAAPAASTAAPSEPAAGAVPGKPTVLVAEKLGAAGLELLRGFANVDCSYGLSPEELRAKIPLCDALIVRSGTKVGRDVFEASGGRLRVVGRAGVGIDNVDLAAXTEHGCLVVNAPTANTVAAAEHGIALLTAMSRNIAQADASLKAVDRARTKWQRNKYVGVSLVGKTLAILGFGKVGSEVARRAKGLGMHVIAHDPYASADRAHAIGVELVSMEDALTTADFISLHMPLTPATNKMLNDETFAKMKKGVRIINVARGGVIDEDALVRALDSGIVAQAALDVFTKEPPAPDSKLVLHENVTVTPHLGASTVEAQEGVAIEIAEAVIGALKGELAASAVNAPMVPAEVLSELAPYVVLAEKLGRLAVQLVAGGGGIKSVKVTYASARAPDDLDTRLLRAMITKGLIEPISSVFVNLVNADFTAKQRGVRITEERILLDGSPETPIDYIQVHIAHVESKFPSAISESGEITVEGKVKDGIPHLTKVGSFQVDVSLEGSLILCRQVDQPGMIGAVGSVLGEENVNVSFMSVGRIAPRKHAVMAIGVDEEPKKSTLTKIGEIPAIEEFVFLKL

SEQ ID NO: 2757 - protein, 614 aa, Oryza sativa
  misc_feature (543)..(543): Xaa can be any naturally occurring amino acid
  unsure (1)..(614): unsure at all Xaa locations
MAAPSQTTATTTHHRVLLPSHHHHRAVPPSLLRLPLRAARRGRLSAAAAAAAPAASTAAPSEPAAGAVPGKPTVLVAEKLGAAGLELLRGFANVDCSYGLSPEELRAKIPLCDALIVRSGTKVGRDVFEASGGRLRVVGRAGVGIDNVDLAAATEHGCLVVNAPTANTVAAAEHGIALLTAMSRNIAQADASLKAGKWQRNKYVGVSLVGKTIAILGFGKVGSEVARRAKGLGMHVIAHDPYASADRAHAIGVELVSMEDALTTADFISLHMPLTPATNKMLNDETFAKMKKGVRIINVARGGVIDEDALVRALDSGIVAQAALDVFTKEPPAPDSKLVLHENVTVTPHLGASTVEAQEGVAIEIAEAVIGALKGELAASAVNAPMVPAEVLSELAPYVVLAEKLGRLAVQLVAGGGGIKSVKVTYASARAPDDLDTRLLRAMITKGLIEPISSVFVNLVNADFTAKQRGVRITEERILLDGSPETPIDYIQVHIAHVESKFPSAISESGEITVEGKVKDGIPHLTKVGSFQVDVSLEGSLIXLCRQVDQPGMIGAVGSVLGEENVNVSFMSVGRIAPRKHAVMAIGVDEEPKKSTLTKIGEIPAIEEFVFLKL

SEQ ID NO: 2758 - protein, 205 aa, Oryza sativa
  misc_feature (8)..(8): Xaa can be any naturally occurring amino acid
  unsure (1)..(205): unsure at all Xaa locations
MGEESPAXGGGAAAAAAGKPSGTALPRRGKSCKGCLYYSSMLRSRGFNPVCVGIPRSIPQVPSYVVDEPREEAAAQGHDLRQFKYACAGYSMFVVDNKDGRSGEKEGKTLLPYCQGLELLVDSRLVEKKSPNNEPATASYRKEAATSSRQQGQRPGQLTGQDFYARFRKSAGLVASGVAKNLNKTAIYIKENVADILYPDRRPPK

SEQ ID NO: 2759 - protein, 342 aa, Oryza sativa
MERYEVMRDIGSGNFGVAKLVRDVATNHLFAVKFIERGLKIDEHVQREIMNHRSLKHPNIIRFKEVVLTPTHLAIVMEYAAGGELFERICNAGRFSEDEARFFFQQLISGVSYCHSMQVCHRDLKLENTLLDGSVTPRLKICDFGYSKSSVLHSQPKSTVGTPAYIAPEVLSRKEYDGKVADVWSCGVTLYVMLVGAYPFEDPDDPRNFRKTITRILSVQYSIPDYVRVSADCRHLLSRIFVGNPEQRITIPEIKNHPWFLKNLPIEMTDEYQRSMQLADMNTPSQSLEEVMAIIQEARKPGDAMKLAGAGQVACLGSMDLDDIDDIDDIDIENSGDFVCAL

SEQ ID NO: 2760 - protein, 370 aa, Oryza sativa
MAPPPASSLPTAVLAWGSGEDGQLGMGGYEEEDWARGVAALDALAVSAVVAGSRNSLAICADGRLFTWGWNQRGTLGHPPETKTESSPAPVDALAGVSIVQAAIGGWHCLAVDDKGRAYAWGGNEYGQCGEEAERKEDGTRALRRDIPIPQGCAPKLKVRQSFFSKQISTPVRVQGLENVKVIAVGAFHNLALTEDGILWAWGNNEYGQLGTGDTQPRSQPIRVEGLSDLSLVDIAAGGWHSTALTKEGEVYAWGRGEHGRLGFGDDKSSHMVPQKVELLAGEDIIQVSCGGTHSVALTRDGRMFSYGRGDHGRLGYGRKVTTGHPMEVPIDLPPPGTSGGDSGGQWQARYVACGGRHTLAIATWTEADE

SEQ ID NO: 2761 - protein, 546 aa, Oryza sativa
  misc_feature (310)..(310): Xaa can be any naturally occurring amino acid
  unsure (1)..(546): unsure at all Xaa locations
MSTSSNPSYHQLGLDAISCCFVAGGGGAEAAAPFFGFGFGDVDGEFLVASPVAAVGDELACAVPLRRPQGSVSEEEVNAAAVAAAAAGGAESCSTVHSVLGSVEFGCGTSSGVTIAQASRMGRLAGEAPCGDAGGGGWIYGGSGIAPLHGAYYLSGFSSGAGAGFLSPFAASSVAAAAPAASELSLRLGATKCSSPSSMANASSEVSCSGLTHVSSGGGLGYHQAAAAGAGAALFHPTHGDDAAAAAAGELRQAYHSRAPPHFSQVVSRSAVLAHVAQELLNGFVACLLQDVAADAASGVDGGEASQALXSSGFSARITTAPTEDASPGSGGARWAAEAQRLRKLLQLVDEKCNQCVEEMQSTAARFNSMVRSTGGGGGGLTAAFAGRAVAAAYRRVRRRVMGQLVAAATARSSSSAAAAALEEKERSWESSFIQKHWAMQQLRRGDQQSWRPQRGLPEKSVAVLKAWMFENFLRPYPKDSEKDMLAARSGLSRSQVSNWFINARVRLWKPMIEDMYEELKKTSGGSDGAAEIEHLSSKDVLSLES

SEQ ID NO: 2762 - protein, 169 aa, Oryza sativa
MALVEGNNGVSGGAVSFSEEQEALVLKSWAIMKKDSANIGLRFFLKIFEVAPSASQMFSFLRNSDVPLEKNPKLKTHAMSVFVMTCEAAAQLRKAGKVTVRDTTLKRLGATHFKYGVGDAHFEVTRFALLETIKEAVPVDMWSPAMKSAWSEAYNQLVAAIKQEMKPAE

SEQ ID NO: 2763 - protein, 303 aa, Oryza sativa
MARPTTLLACCKLYISESRNDAALRAIEQAARGGGGGAVVVNRFTDDAYNRVGYTLVAPLTPSPAPPPLRHAVLGMVRAALEAIDFGAHAGTHPRLGAVDHICFHPLAHASLRHVADLAGAVAADIGDELQVPTFLYGAAHREGRTLASIRRQLGYFKPNSSGDQWRGAPETDALPVAPDAGPERPPRSKGVVVVGATSWVDNYNVPVHTGDVEAARRIARAVSERGGGLPSVQAMGLAHGGGVVEVACNLLDPARVGAEQVQGMVERLAAGEGLSVGKGYFTDFSQDKIVDLYFRSAANTEG

SEQ ID NO: 2764 - protein, 447 aa, Oryza sativa
MGTQVADNYPPAKDGRSAQEKAIDDWLPITSSRNAKWWYSAFHNVTAMVGAGVLSLPYAMSELGWGPGIAVLILSWIITLYTLWQMVEMHEMVPGKRFDRYHELGQHAFGEKLGLWIVVPQQLVVEVGVNIVYMVTGGKSLKKFHDVLCEGHGCKNIKLTYFIMIFASVHFVLSQLPNFNSISGVSLAAAVMSLSYSTIAWGASVDKGKVADVDYHLRATTSTGKVFGFFSALGDVAFAYAGHNVVLEIQATIPSTPEKPSKKPMWKGVVVAYIIVALCYFPVALVGYWAFGNHVDDNILITLSRPKWLIALANMMVVIHVIGSYQIYAMPVFDMIETVLVKKLRFPPGLTLRLIARTLYVAFTMFIAITFPFFGGLLGFFGGFAFAPTTYFLPCIMWLAIYKPRRFSLSWFTNWICIILGVMLMILSPIGGLRQIIIDAKTYKFYS

SEQ ID NO: 2765 - protein, 293 aa, Oryza sativa
MDAPCGWTTSAAAAVAEEEDVRRGPWTVEEDAVLAGYVAANGEGRWNELARAAGLRRTGKSCRLRWLNYLRPDVRRGDFTPQEQLLILELHFRWGNRWSRIAQHMPGRTDNEIKNYWRTRVQKHAKQLGCDVNSRQFKDVMRHLWMPRLVERIHAAAASSERAAPPPCAAAPASHSGMCHSPDPSTTTSSMAGSSVTHGEQFPSSTNHHLMTMASVTTAAADWSSEQCGSGSATSTSVGISYDMFEGSWSELLARAYDDDGADSSLLPDFQMADTGDNCWWSNLEDIWSQQPY

SEQ ID NO: 2766 - protein, 602 aa, Oryza sativa
MFSLLSRALCAASSSPAAPRGRSLLAALLSPSASPLDPCRGPAAPEPPRRRAFHGSPSPLGFRSTPASWSSPEAGAAVGGDDGLEVARLGISPWIVERLAARGITRLFPIQRAVLDPAMQGKDMIGRARTGTGKTLAFGIPIMDRILRHNEKNGSGRNPLAIILAPTRELARQVEKEFKESAPLDSLCVYGGVPISHQMRALNYGVDVVVGTPGRIIDLLRRGVLNLSEIQFVVLDEADQMLAVGFDEDVEVIMENLPQNRQSMLFSATMPSWIRKITSKYLKDPIIIDLVGDEDQKLPEGISLYSIASEHYGKPSILGPLIKEHANGGKCIVFTQTKREADRLAYAMGRSYACQALHGDISQNQRERTLSGFRDGRFNILVATDVAARGLDIPNVDLVIHYELPNTSELFVHRSGRTARAGKKGSAILIYTNDQARAVRIIEQDIGCKFTELPKIEVADEASDMFNVVRDNRSRLAGSPRTGGSSFGRGGYGGFGEGRSRGFGDFDGFGSSPNRGGRSRDAGSRYGSGFGDFRRPSNAFGRSSSKQPDGFGFGDFGEGNFSRNGNRRSRSFDDSGSTRYSRRPNGFGTSDFGRSGGFDDSN

SEQ ID NO: 2767 - protein, 1131 aa, Oryza sativa
  misc_feature (91)..(91): Xaa can be any naturally occurring amino acid
  unsure (1)..(1131): unsure at all Xaa locations
MVSKSYSNLLEMSCGDGVDFRQPFKSLPRVVTSPGIISDPDWDTRSDGDSVGSASSVERKIIVANFLPLNCTKDEAGQWSFSRDDDALLMXQLKDGFSNETDVIYVGSLKVQVDPSEQDQVAQKLLRDYRCIPTFLPPDLQQQFYHGFCKQQLWPLFHYMLPICLDKGELFDRSLFQAYVRANKLFADKVMEAINTDDDHVWVHDYHLMLLPTFLRKRLHRIKLGFFLHSPFPSSEIYRSLPVRDEILKSLLNADLIGFQTFDYARHFLSCCSRLLGLHYESKRGYIGIDYFGRTVSLKILSVGVHVGRLESILKLPATVKKVQEIEQRYKGKMLMLGVDDMDIFKGISLKLLGLELLLDRNPKLRGKVVLVQIVNPARSTGKDVEEAITESVSVAERINLKYGSVDYKPVVLIDHRIPFYEKIAFYAASDCCIVNALRDGMNLVPYEYTVCRQGNEEIDNARGSDTNCHHTSTLIVSEFVGCSPSLSGAFRVNPWSVDDVADALHHATDLTESEKRLRHEKHYRYVRSHSVAYWAHSFAQDLERACKDHYSRRCWAIGFGLNFRVIALSPGFRKLSLEHFASSYNKATRRAIFLDYDGTLVPQSSINKAPSDELITILNSLCDDPKNDVFIVSGRARSLLDEWFAPCQKLGIAAEHGYFVRWNKAAEWESSYPNHDFEWKHIAEPVMQVYTETTDGSSIEPKESALVWHYLDADHDFGSCQAKELLGHLERVLSNEPVVVKCGHYIVEVKPQGVSKGLVVDKVIHRLMNNGKTPDFVVCIGNDRSDEDMFKSIDSMTSSSAFPAVPEVFACSVGQKPSKAKYYVDDAGEVVRLLKNVAGISSHREAAVQAALQQEIALAAGLLRIFFHDCFPQGCDASLLLTGANSEQQLPPNLTLQPRALQLIEDIRAQVHAACGPTVSCADITALATRDAIVASGGLPYDVPLGRLDSFAPAPSDAVFQLPQPTSDVSTLLSAFQTRNLDNVDLVALSGGHSIGRARCSSFSNRFREDDDFARRLAANCSNDGSRLQELDVTTPDVFDNKYYSNLVAGQGVFTSDQGLTGDWRTSWVVNGFAGNHWWFYGQFGSSMVKLGQLQGPSGNVGEIRRNSCFVPNSQTILAAAGDDGFTASA

SEQ ID NO: 2768 - protein, 232 aa, Oryza sativa
  misc_feature (85)..(85): Xaa can be any naturally occurring amino acid
  misc_feature (104)..(104): Xaa can be any naturally occurring amino acid
  misc_feature (167)..(167): Xaa can be any naturally occurring amino acid
  unsure (1)..(232): unsure at all Xaa locations
MMGATSPSGLELTMAVPGLSSSGSEGAGCNNNNAGGGCNMRDLDINQPASGGEEEEFPMGSVEEDEEERGVGGPHRPKKLRLSKXSSPALLEESFRLNHTLTPXKQKEALAIKLKLRPRQVEVWFQNRRARTKLKQTEMECEYLKRCFGSLTEENRRLQREVEELRXAMRVAPPTVLSPHTRQPLPASALTMCPRCERITAATGPPAVRPPPSSAAAAAPSPFHPRRPSAAF

SEQ ID NO: 2769 - protein, 892 aa, Oryza sativa
MLSLQKPSKTPFVPASSALFNPESIFLPSHERSPSSCYRPMLLIPTLAKMARSMLGWKRVPLFSILLILSITNIATTYAIASQADRFVPRDNYLLSCGAPAAVQLDDGRTFRSDPDSASFLSTPVDIKITAKNSLASGAPSSQLYLTSRVFSDISTYSFFISQPGHHWIRLHFLPIPDDHYNLTTATFSVSTDDMVLLHDFSFIATPPNPVLREYIVATQGDTLKIIFTPKKDSIAFINAIEVVSAPPSLIPNTTTGMAPQGQLDISNNALQVVYRLNMGGPLVTAFNDTLGRIWLPDAPFLKLQAAANAAWVPPRTIKYPDDKTNTPLIAPANIYSTAQQMASTNTSDARFNITWEMVTEPGFSYFVRLHFCDIVSKALNSLYFNVYINGMMGVLNLDLSSLTVGLAVPYYRDFIIDSSSIINSTLIVQIGPGTTDTSNPNAILNGLEIMKISNQENSLDGLFSPKRSSQLGKKTMTGIGLAMAVMAAALAVVMCCRRRHRPGWQKTNSFQSWFLPLNSTQSSFMSTCSRLSSRNRFGSTRTKSGFSSIFASSAYGLGRYFTFVEIQKATKNFEEKAVIGVGGFGKVYLGVLEDGTKLAIKRGNPSSDQGMNEFLTEIQMLSKLRHRHLVSLIGCCDENNEMILVYEFMSNGPLRDHLYGGTDIKPLSWKQRLEISIGAAKGLHYLHTGAAQGIIHRDVKTTNILLDENFVAKVADFGLSKAAPSLEQTHVSTAVKGSFGYLDPEYFRRQQLTEKSDVYSFGVVLFEVLCARPAINPTLPRDQVNLAEWARTWHRKGELNKIIDPHISGQIRPDSLEIFAEAAEKCLADYGVDRPSMGDVLWKLEFALQLQEKGDIVDGTSNQFPMKSLEVTSGDSMEKSGNVVPSYVQGR

SEQ ID NO: 2770 - protein, 247 aa, Oryza sativa
MMERAEDLRLSLSLSSPLIAPRTHHVAMLFHAPPEKRFLEMPLLPAAKRSEVVAAEEERAGLRGGGGSDEEDGGCGIDGSRKKLRLSKDQSAVLEDSFREHPTLNPRQKATLAQQLGLRPRQVEVWFQNRRARTKLKQTEVDCEFLKRCCETLTEENRRLQKEVQELRALKLVSPHLYMNMSPPTTLTMCPSCERVSNTNNNSSAAAAADRRGIRTTTAAGGGSVVDTAADGGILCHRPIAVRPQQS

SEQ ID NO: 2771 - protein, 104 aa, Oryza sativa
  misc_feature (5)..(5): Xaa can be any naturally occurring amino acid
  misc_feature (10)..(10): Xaa can be any naturally occurring amino acid
  misc_feature (28)..(28): Xaa can be any naturally occurring amino acid
  misc_feature (72)..(72): Xaa can be any naturally occurring amino acid
  misc_feature (86)..(86): Xaa can be any naturally occurring amino acid
  unsure (1)..(104): unsure at all Xaa locations
RKPIXLASSXPVFIFSKTYCGFCDRVKXQLFKQPGASYHAIELYKEHDGDAIQAALHEWTGQRTVPNVFIGXKAHGGCDAVTAKHXQGQLVPLLTEAIAINLEI

SEQ ID NO: 2772 - protein, 236 aa, Oryza sativa
MAPRTSDKTMSPAAAATGLALGVGGVAGAAAVGTGQHFRGVRKRPWGRYAAEIRDPAKKSRVWLGTFDTAEEAARAYDAAAREYRGAKAKTNFPYPNGAPAAGVNSGSSNSSTVESFGSDVQAPMKAMPIPPSLELDLFHRAAAAAAAGAGGMRFPFEGYPVSHPYYFFGQAAAAAAASGCRMLKIAPAPVTVAALAQSDSDSSSIVDLAPSPPAALAKKAIAFDLDLNCPPPMEV

SEQ ID NO: 2773 - protein, 514 aa, Oryza sativa
IGDSVRKWSHTSSQKHGNDDVDTGAEAAMDQLAGRSSLSPAREKTRRRPEKSGTVWTATAHIVALLIGSSVLAVAWTFAQLGWVAGPAVVVALSVVTYYSSALLADCYRDDDPLHLGGGAVHGEYIAAVRSYLGPKSVTFCGIIQYGVLWAAMVGYTITSSSSMSAVRRVNRFHRNWLAAGDGDGGGGGGGATGVRYMVVFGAFQLLLSQLPSLENVAWLSVIAVATSFGYSSICLGLCAAKWASHRGGVRGTLAGAAAGSPGEKVFNVLLAVGNIAISYIYSPVLFEIQDTVRTPPSESKTMKRASLYGLAMSAVFYLVLGASGYAAFGDDAPSNILTGAAFHEPFWLVDVANACVVVHFLGAYQVIAQPVFARLEAYVGGRWPESRLVTASYELRLRVPAWTSAPPTAVTLSPARMALRAAVIVATTAVAAMMPFFNAVLGFIAALGFWPLAVYLPVSMHIARVKIRRGEARWWALQGASAALLVVAVGMGVASVRDMVQRLNEAAPFKTTG

SEQ ID NO: 2774 - protein, 157 aa, Oryza sativa
  misc_feature (136)..(136): Xaa can be any naturally occurring amino acid
  unsure (1)..(157): unsure at all Xaa locations
MAKPSAAPVTGVPVGSAAWSTGLCDCFDDCGLCCLTCWCPCITFGRVAEMVDRGSTSCGTGGALYGLLCAFTGCQWIYSCTYRGKMRTQYGLAEAGCADCCVHFCCEPCALCQEYRELVARGYDPKLSPAGKTPRXGWHLNVERGAVHAPAVHHMGR

SEQ ID NO: 2775 - protein, 168 aa, Oryza sativa
MAATAAASVAAISPLPGASLPRPVSARVPLLPRASPPTWRLSVGSARARSTRCLAAAGGGGLAPEMRATLDKVVGSHKVVLFMKGTKDFPQCGFSHTVVQILRSLDVPFETLDVLANEALRQGLKEYSSWPTFPQLYIDGEFFGGCDITVDAYKSGELQETLEKAMLS

SEQ ID NO: 2776 - protein, 337 aa, Oryza sativa
MAYSRQIFVCSAMAALLFSAVVSAQLSTDFYDETCPDALDIIESAVRDAVSKESRMGASLLRLHFHDCFVNANIIQKFRVDADGSVKQVGCDGSVLLDDTAAITGEKNAKPNKNSLRGFEVVDDIKSQLEDACEQVVSCADILAVAARDSVVALGGPTWDVELGRRDGTTASLDAANNDLPPPTSDLADLIKSFSDKGLTASDMIALSGAHTIGQARCTNFRGRLYNETNLDATLATSLKPSCPNPTGGDDNTAPLDPATSYVFDNFYYRNLLRNKGLLHSDQQLFSGGSADAQTTAYATDMAGFFDDFRGAMVKMGGIGVVTGSGGQVRVNCRKVN

SEQ ID NO: 2777 - protein, 163 aa, Oryza sativa
  misc_feature (22)..(22): Xaa can be any naturally occurring amino acid
  misc_feature (48)..(48): Xaa can be any naturally occurring amino acid
  unsure (1)..(163): unsure at all Xaa locations
MYSKPEDVGGGVTTAFAMQGKXVPLAAWSTGLFNCFDDCGNCCVTCLXPCITFGQIAEIIDRGSSSCGTSGALYALVMLLTGCNCVYSCFYRAKMRSQYGLQEKPCADCPVHFFCEPCALSQEYRELKKRGFDMNLGWHANMERQGHKPAMTMPPHMFPGMTR

SEQ ID NO: 2778 - protein, 973 aa, Oryza sativa
  misc_feature (154)..(154): Xaa can be any naturally occurring amino acid
  unsure (1)..(973): unsure at all Xaa locations
MKIPFVNKWSPRSHEPAAPSNPAAQQQPPPPSTVGVSSAAAAAVVEEAEMETGGDDFITQEEEYQIQLAMALSASASVSAPSGGGGSGDTEGEQIRKAKLMSLGRGDLSAAADRGVGDSAEALSRRYRDYNFLDYNEKVIDGFYDIFGLSGESXARQGKMPSLAELQTSIGDLGFEVIVVDHMFDSALQDMMEVAQCCMLGCPDTTVLVLRIAEVVAGLMGGPVIDATEMFPKWLGKSIEQRTSHQTSLLPIGRIDIGLSRHRALLFKILADSVGIPCKLVKGSHYTGVEDDAINIVKMNNEREFLVDVMAAPGTLIPADVFISKGTPFNLTKPLVQNQVVELASNIENDPSAAHSEHVGNRLHMFGNGNSLSENQSGCEKTMIAGSEVSQLWTLAPQMQSDQQSTSAGAHSMQKEDLKLTPDSQENEESKKQISETDSFRGIELGKSSLAFKGLNNRNNEYQRHRENIAPAPGRSQQPLVMKNWSACNDISNKQYNIAERLVRRRNTSDNAASSSQLAWSTAKHYNPNGRERNDRLCAAPGRNYDNRKVGASTTATASATGERLDRPNLAPVHYYDDKPNGISSVNAASTSGIVKVAEKGPHDLEKVPIYSRFDSQIYSSMQGYSPEVKENKENYDRHDNMRLHPDPRRSPLDRFMDTSRQNSESVSPPQAGSSTVDMVLGEVSECEILWEDLLIGERIGLGSYGEVYHADWNGTEVAVKKFLDQEFYGDALAEFRCEVRIMRRLRHPNIVLFMGAVTRPPHLSIVSEYLPRGSLYTIIHRPDCQIDEKCRIKMALDVARGMNCLHTSVPTMVHRDLKSPNLLVDNNWTVKVCDFGLSRLKHGTFLSSKSTAGTPEWMAPEVLRNEQSNEKCDVYSFGVILWELATLQMPWSGMNPMQVVGAVGFQDRRLDIPMEVDPLVASIIQDCWQKDPNLRPSFSQLTSYLNTLQRLVIPCHQETAGSYVPQEISLYR

SEQ ID NO: 2779 - protein, 452 aa, Oryza sativa
MAAESSAAAAAGGGERRGPMDLNLYLGLPPLPPPPGRLDVAADYPSLLLNSAATVANEQRGSVVVAAPPPAAAAYSPSNALSAPEQVLVDPVAAWLVDPGEQQPVPPLETPSYMARASSTLPQIFACAALEMLVQTGGAIPPTGLIRGAEIAAASRPMTPENRLRRLIQVSDQHGVGNGRAGTGPVSRSRRANSPEADNLARAIQRSHNSLEASRRQMLDGDGSDATKKDDGCGCNGSFECNICFESAKDPVVTPCGHLFCWPCIYQWLHGHSEHSDCPVCKGEVLEVNVTPIYGRGGGEENSSRNDIQIPPRPSAQRTESLRQQLQRPDTRGGIANMVRRLMQNQDIVVGQAASSAPRPRGRGRRQARQDAPSAPATQQQVVNADAGSGNQAPLPPPDANGAAPAAAVAPQQSSSVEQASTSSTVGVIAGGPAQGRRSRVSESTPCARCSG

SEQ ID NO: 2780 - protein, 319 aa, Oryza sativa
MAYSRQIFVCSAMAALLFSAVVSAQLSTDFYDETCPDALDIIESAVRDAVSKESRMGASLLRLHFHDCFVNGCDGSVLLDDTAAITGEKNAKPNKNSLRGFEVVDDIKSQLEDACEQVVSCADILAVAARDSVVALGGPTWDVELGRRDGTTASLDAANNDLPPPTSDLADLIKSFSDKGLTASDMIALSGAHTIGQARCTNFRGRLYNETNLDATLATSLKPSCPNPTGGDDNTAPLDPATSYVFDNFYYRNLLRNKGLLHSDQQLFSGGSADAQTTAYATDMAGFFDDFRGAMVKMGGIGVVTGSGGQVRVNCRKVN

SEQ ID NO: 2781 - protein, 378 aa, Oryza sativa
MKLVYRNLARNGPGSVKLVPEEEDDLWHAYNLIVPGDTLQSVTVRKVLREMASGGRDAERVRLKLEIVVESVDYDKEGSVLRVRGKNITENDHVKIGQFHTVELELKRQFTLTKELWDWLALDTIQQACDPTASADLAVILMQEGLAHLFLIGRSITVTRARIETSIPRKHGPAIAGYESALKKFFEHVLQAFLKHIDFEVVQCAVIASPGFTKDQFRDYMHLEAARRDLRLIIENKQRIVLAHAPSGYKHSLKEVLDSPSVMTLIKDTKAAQEVQALKDFFNMLTNDSARACYGPKHVEIANERLAIQTLLITDNLFRNSDIATRQNYVRLVESVKKFGGTVHIFSSMHVSGEQLAQLTGIAAILRFPLPDLEDIEM

SEQ ID NO: 2782 - protein, 557 aa, Oryza sativa
  misc_feature (191)..(191): Xaa can be any naturally occurring amino acid
  unsure (1)..(557): unsure at all Xaa locations
MERQTSFRLGALEKLKSFRGMEKQKSFKMMSTDNFRRHRDSPGKRGDTPLHLAARSGNAAGAQRIIAEFDPEVAAERAAQANHDGETPLYVAAERGHTDVVREILKVSDVQTAGVKANNSFDAFHIAAKQGHLEVLKELLQAFPALAMTTNSVNATALDTAAILGHTEIVNLLLESDANLARIARNNGKTXLHSAARLGHVEIVRSLLSRDPGIGLRTDKKGQTALHMASKGQNAEIVIELLKPDISVIHLEDNKGNRPLHVATRKANIVIVQTLLSVEGIEVNAVNRSGHTALAIAEQLNNEELVNILREAGGVTAKEQVHPPNPAKQLKQTVSDIRHDVQSQIKQTKQTKMQVQKIKKRLEKLHIGGLNNAINSNTVVAVLIATVAFAAIFTVPGNFVEDITQAPPGMSLGQAYVASNPAFLVFLVFDALALFISLAVVVVQTSLIVVEQKAKRRMVFVMNKLMWLACLFISVAFIALTYVVVGRDDWWLAWCTMAIGAVIMLTTLGSMCYCIIAHRMDERKIRKASTSQSRSWSQTVDSDPDLLNSEYKKMYAL

SEQ ID NO: 2783 - protein, 371 aa, Triticum aestivum
  misc_feature (270)..(270): Xaa can be any naturally occurring amino acid
  misc_feature (355)..(355): Xaa can be any naturally occurring amino acid
  unsure (1)..(371): unsure at all Xaa locations
MSANEGDLTMRVIAMGGDAAAERRAAEEKLCEYTLDGSVDIKGRPAVKGKSGGWLAGGLILVNQGLATMAFFGVNVNLVLFLTRVVQQSNGDAANNVSKWTGTVYMFSLIGAFLSDSYWGRYKTCAIFQAMFVLGLGLLSLSSRLYLIRPVGCGTEHTPCASHSGTEMGIFYIALYMIAFGNGGYQPNIATFGADQFDEEDPAEAHSKVSFFSYFYLALNLGSLFSNTSLSYLQDHGKWVIGFWASTAAAATALLLFLSGTPQYRHAQPXGNPMASICQVASAACRNWKSGGVSQDVEILYEGDDKTDAGSRKLLHTKGFRFLDRAALTTELTSSKLATCSKTRDQWKLCTVTQXVEQVKSILRILPIWVC

SEQ ID NO: 2784 - protein, 238 aa, Triticum aestivum
  misc_feature (125)..(125): Xaa can be any naturally occurring amino acid
  unsure (1)..(238): unsure at all Xaa locations
MVTVQDEMRKGPWTEQEDLQLVCTVRLFGDHRWDFVAKVSGLNRTGKSCRLRWVNYLHPGLKHGRMSPQEEHLIIELHARWGNRWSRIARRLPGRTDNEIKNYWRTHMRKKAQERKIDMSPSSSXSSFTYQSCLLETAPIIRMDGGSTHNGTTCFSSVLKSNQSVMDGYSMDEIWKEIEAPAMLPIDDKACSNLPCPLLPSPMGDRYCPPEVVWKMDNGDLKMLAPQFGYGNGERSCY

SEQ ID NO: 2785 - protein, 347 aa, Triticum aestivum
RKGVALLAVVATLKLATMAAAGGKPAVLLLRPVDAPFAAALRDRFRVLDLYAPGQALPALAFVAAAAAVPEPPRATVIWGGVRVDASFLDAAPSLRCVVSTAAGLDHIDLAECARRGVAVANSGEVYSADVADYAVGLLLDVLRRVSASERYVRRGSWPAQGDYPLGSKLGGKRVGIIGLGNIGSRVAKRLEAFGCVIHYNSRKPKDSVSYKYFPNVHDLAAESNVLVVACALNKATLHIVNKDVLEALGKDGVVVNIGRGANTDEAELVIALREGKIAGAGLDVFEHEPKVPAELFTMENVVLSRHVAVLTEESRSDLCLHTIGNLEAFFSGQPLLTPVHADSLAQ

SEQ ID NO: 2786 - protein, 293 aa, Triticum aestivum
STHASAEEIVRAAVEQAVAADPRMAASLLRLHFHDCFVNGAAGSVLLDDKPFFVGEKTAGPNINSLRGFEVIDAIKAELEQECPETVSCADVLAIAARDSVVASGGPSWEVETGRKDSRTASLQAANSNLPAPTSGVATLVQKFTNVGLTAKDMVALSGAHTIGKARCTTFSARLASVGESAKDTGFLQSLQQLCAGSAGSALAHLDLATPATFDNQYYINLLSGDGLLPSDQALAAPSGSGAEDVAALVADYAFDAALFFDDFAASMLRMGRLAPAGGRAAGEVRRDCRVVN

SEQ ID NO: 2787 - protein, 487 aa, Triticum aestivum
MAATVAVDNLNPKVLKCEYAVRGEIVIHAQRLQQQLQTQPGSLPFDEILYCNIGNPQSLGQQPVTFFREVLALCDHPDLLKKEEIKTLFSADSISRAKQILALIPGRATGAYSHSQGIKGLRDAIASGIASRDGFPANADDIFLTDGASPGVHLMMQLLIRNEKDGILKDGILVPIPQYPLYSASIALHGGSLVPYYLNESTGWGLEISDVKKQLEDARSRGIDVRALVVINPGNPTGQVLAEENQYDIVKFCKNEGLVLLADEVYQENIYADNKKFHSFKKIVRSLGYGEEDLPLVSYQSVSKGYYGECGKRGGYMEITGFSAPVREQIYKIASVNLCSNITGQILASLVMNPPKASDESYASYKAEKDGILASLARRAKALEIAFSKLEGITCNKAEGAMYLFPQICLPQKAIEAAKAANKAPDAFYALRLLESTGIVVVPGSGFGQVPGTWHFRCTILPQEEKIPAIISRFTVFHETFMAEYRD

SEQ ID NO: 2788 - protein, 212 aa, Triticum aestivum
MEESQEVEELVDTRLSLVIGAASRPPPTVLALLPAASPENEAAARGKRKGVKGPENGAGGAAAASREHSKRSKTVHDSSDVDDDDRGDAAGGDGTRKKLRLTVEQAALLEESFRAHNVLSHGEKHDLAGQLGLKPRQVEVWFQNRRARTKLKQTELDCELLRRWCERLSDDNARLRRELAETRAVLLVGGSQDSTLTGCPSCNRLAGGRRAA

SEQ ID NO: 2789 - protein, 96 aa, Triticum aestivum
AWSRPRYEDLCPSTHNMDVPNVSRREFQLLDITDDGFLSLMNDNGDTKDDVKVPDGEVGDKINKLFKEEEKDTNVIILTAMGEEAAIDAKEAPKGA

SEQ ID NO: 2790 - protein, 117 aa, Triticum aestivum
  misc_feature (92)..(92): Xaa can be any naturally occurring amino acid
  misc_feature (108)..(108): Xaa can be any naturally occurring amino acid
  unsure (1)..(117): unsure at all Xaa locations
VPFNGPDNRNNELQRRRENVVPSTGRPQQRLVMKNWSPYNDVSNNKQYNYVQDSFARRNVGDNVVSSPQVPRSAANNINLNIGARNDGSHAXSAHNNDSFMAGSSAMXMPSVAEWEC

SEQ ID NO: 2791 - protein, 192 aa, Triticum aestivum
  misc_feature (132)..(132): Xaa can be any naturally occurring amino acid
  misc_feature (139)..(139): Xaa can be any naturally occurring amino acid
  unsure (1)..(192): unsure at all Xaa locations
ELHSFVVGLEGSPDLKAAREVADYLGTIHHEFHFTVQDGIDAIEEVIYHDETYDVTTIRASTPMFLMARKIKSLGVKMVLSGEGSDELLGGYLYFHFAPNKEEFHRETCRKVKALHQYDCLRANKATSAWGXEVRVPFXTRSHNVRWHGPEWKCPQELGRSRMGQRKGPHDSTYCQDISTGEEIMTGKWLPI

SEQ ID NO: 2792 - protein, 117 aa, Triticum aestivum
  misc_feature (19)..(19): Xaa can be any naturally occurring amino acid
  misc_feature (78)..(78): Xaa can be any naturally occurring amino acid
  misc_feature (85)..(85): Xaa can be any naturally occurring amino acid
  misc_feature (92)..(92): Xaa can be any naturally occurring amino acid
  misc_feature (100)..(101): Xaa can be any naturally occurring amino acid
  misc_feature (111)..(111): Xaa can be any naturally occurring amino acid
  misc_feature (115)..(115): Xaa can be any naturally occurring amino acid
  unsure (1)..(117): unsure at all Xaa locations
SDGPFCASAFAVSFYVPAXNQADPPPAEGLRVDRWAGARYADVRRFGGFVADADVGEQAARLEASLQGTRWAAAVNDXRRADPAXPYTVAQXNSPFEFTXXVNEIWMLFDXDDDXSM

SEQ ID NO: 2793 - protein, 64 aa, Triticum aestivum
TDDGYVTLLTESGNLKDALKLPPDNVLFGQIKTGFFYGKDLILFLMSPMGEKQICPFKEIGGGK

SEQ ID NO: 2794 - protein, 366 aa, Triticum aestivum
  misc_feature (326)..(326): Xaa can be any naturally occurring amino acid
  misc_feature (330)..(330): Xaa can be any naturally occurring amino acid
  unsure (1)..(366): unsure at all Xaa locations
MAAATTNVSYTTNLLKYMGLDQKGSAMAEYIWIDAVGGVRSKSKTLTSIPPSGEFTVDDLPEWNFDGSSTGQAPGDNSDVYLRPVAVFPDPFRGAPNILVITECWDPDGTPNKYNHRHEAAKLMEAHKAQKPWFGLEQEYTLLDMHDRPYGWPAGGFPGPQGPYYCGVGSGKVYCRDIVEAHYKACLFAGVKISGTNAEVMPAQWEFQVGPCEGIELGDQLWLARFLLHRIAEEFGAKISFHPKPIPGDWNGAGLHSNFSSEEMRKPGGMKAIEAAMKKLEARHKEHIAVYGEDNTMRLTGRHETGNIDSFTYRWCKTRGTSNSLXPREXSQKGGGGFEDRRPASNADPYQITGIMVETIFGGLDK

SEQ ID NO: 2795 - protein, 166 aa, Triticum aestivum
MVGQMQISWPSTIVELILGLLWHLVHLLVSLFDLWSHLSDNLECYLISSELLPKYRDLHFERLNYVGVVVDSREANDVLKIKQLLRWLSTIGVKYVVLYDIEGVLKEWLKPGIETPRDENSRTNLDLSAHGGMTIECLSGSDGKEGIAKAANLLCSDFCNRNTHGA

SEQ ID NO: 2796 - protein, 162 aa, Triticum aestivum
RDYLFLEVARRDLRVIIENKQRLVLAHATSGYKHSLKEVLDTPGVMALIKDTKAAQEVRALQDFFNMLTNDPARACYGPKHVEIAHEQYAAVQTLLITDTLFRNTDIATRQKYVNLVENVKKSNSTVHIFSSMHVSGEQLAQLTGIAAILRFPLPQLEDIEM

SEQ ID NO: 2797 - protein, 89 aa, Triticum aestivum
TGDRKGSHINLKVTGQDGNEVFFLIKRSTHLMKLMNAYCDRQSVDLNSIAFLFDGRMLRGEQTPDELAMEEGDNMDAMLHQTGWCFPGP

SEQ ID NO: 2798 - protein, 127 aa, Triticum aestivum
FQPIRLIRDEQRSLSVGSQSDPNDTDSSLSLPFPQISERHATITCKNKAFYLTDHGSEHGTWITDNEGRRYRVPPNFPVRFHPSDVIEFGSDKKAMFRVKVLNTLPYESARSGKQQGQQQQQVLQAA

SEQ ID NO: 2799 - protein, 157 aa, Triticum aestivum
  misc_feature (41)..(41): Xaa can be any naturally occurring amino acid
  unsure (1)..(157): unsure at all Xaa locations
PTTLEAKAGSGAFQGLPAIRPAPFRKGGHLVIRGRPCKAFXVSTSNNGKHGHAKCHFVAMTVLDVRNLEDIVLSSHSRGVPHVVRQDYQVIAITHDRYVSVVTQRVIPKDGLQLPTDDLPRGQIKTGFTDGKGPIQYVMHRMGEAQLCAVKEIGGGN

SEQ ID NO: 2800 - protein, 75 aa, Triticum aestivum
VIRRVYQLTGIADERYVTVVAQSGYNKDVLKLSTEDVLPGQIKQGFADGKDVILSGMSSKGEEHICGKMEIAGGK

SEQ ID NO: 2801 - protein, 127 aa, Triticum aestivum
  misc_feature (23)..(23): Xaa can be any naturally occurring amino acid
  misc_feature (66)..(66): Xaa can be any naturally occurring amino acid
  misc_feature (82)..(82): Xaa can be any naturally occurring amino acid
  misc_feature (101)..(101): Xaa can be any naturally occurring amino acid
  unsure (1)..(127): unsure at all Xaa locations
MWATDSDEAFITDYGDGGSSESXVYALMAKLESSGESYGQNGPDMVKGCLQQIPCYGRKEVLCVSXLCNTCDKGDIMEPIEXCKTCKVRCSVMGSAAEIFXIKHVCEEEGGSYTDTLDEWQFKASTG

SEQ ID NO: 2802 - protein, 161 aa, Triticum aestivum
MSDSEEHHFESKADAGASKTYPQQAGTIRKNGHIVIKNRPCKVVEVSTSKTGKHGHAKCHFVAIDIFNGKKLEDIVPSSHNCDVPHVNRTDYQLIDISEDGFVSLLTESGGTNDDLRLPSDEALLTQIKDGFAEGKDLIVTVMSAMGEEQICALKDIGPKN

SEQ ID NO: 2803 - protein, 184 aa, Triticum aestivum
  misc_feature (101)..(101): Xaa can be any naturally occurring amino acid
  misc_feature (125)..(125): Xaa can be any naturally occurring amino acid
  misc_feature (140)..(140): Xaa can be any naturally occurring amino acid
  unsure (1)..(184): unsure at all Xaa locations
MSDSEEHHFESKADAGASKTYPQQAGTVRKNGFIVIKNRPCKVVEVSTSKTGKHGHAKCHFVAIDIFNGKKLEDIVPSSHNCDIPHVNRTEYQLIDISEDXFVSLLTSDGNTKDDLRLPTDETLXGQIKEGFESGRSCCXRQSAMGEDNLPLKDVGPMYPAWIRSKTNQKRISRLHKNHRTGLQ

SEQ ID NO: 2804 - protein, 102 aa, Triticum aestivum
MSTAKAKVEQIINDHAVAVFSKSYCPHCDHTKNLLESMGAKYTAIELDQIDDGSTIQAALKEINGQSTVPNIYINKVHIGGNSDLQSKKSTLPSLLKDAGAL

SEQ ID NO: 2805 - protein, 216 aa, Triticum aestivum
  misc_feature (78)..(78): Xaa can be any naturally occurring amino acid
  misc_feature (110)..(110): Xaa can be any naturally occurring amino acid
  misc_feature (124)..(124): Xaa can be any naturally occurring amino acid
  misc_feature (146)..(146): Xaa can be any naturally occurring amino acid
  misc_feature (155)..(155): Xaa can be any naturally occurring amino acid
  misc_feature (162)..(163): Xaa can be any naturally occurring amino acid
  misc_feature (166)..(166): Xaa can be any naturally occurring amino acid
  misc_feature (177)..(177): Xaa can be any naturally occurring amino acid
  misc_feature (183)..(183): Xaa can be any naturally occurring amino acid
  unsure (1)..(216): unsure at all Xaa locations
MERPEWSLSDFEIGKFIGEGKFGKVYLGREKQSGYVVALKVTYKAKLQKYRFHAHLRREIEIQHGLDHPNVLRLFAWXFHDAERVVLRPPSMPPRGELYKLLRSVGHFSXERTAATYVASLAGXALAYWHKKQVIHRDIKPENLLXLDIQGRLKXANFGWAXXKCXNSQLCGTIDYXAQEMVXKRSRLPLTLDLGICHNFVGELRKIPDYQMARPK

SEQ ID NO: 2806 - protein, 89 aa, Triticum aestivum
  misc_feature (38)..(38): Xaa can be any naturally occurring amino acid
  unsure (1)..(89): unsure at all Xaa locations
TGVGRGAHISLNVKGQDGNEVFFRIKRSTQLKNLMNAXCDGQSVDLNSSAFLFDGRTLRGKQTPDELEMEEGDEIDAMLHETGGCFPGP

SEQ ID NO: 2807 - protein, 212 aa, Triticum aestivum
KNGEWHVVSVDDRLPCGHSGKLFFATCRDPSEFWVPIVEKAYAKLHGSYDAIAYGNIADGLKDLTGEAVEVILLDDKSYNLQPDQLWKTLVYNIKESYLMGCALENSSANTEHELPTGLLVNHAYSVIDCEEVKGVKLMRIRNPWGRGEWNGAWGDGSKEWTPQLMKHFKYTFDNDGTFFMRFEDFLKNFNRIYVLRLMTDSEGEVWHKFNF

SEQ ID NO: 2808 - protein, 127 aa, Triticum aestivum
  misc_feature (79)..(79): Xaa can be any naturally occurring amino acid
  unsure (1)..(127): unsure at all Xaa locations
MPTSEHDESAAPETSENSDHVKHLNIKVTDNNNEVFFKIKSTTPLKKLMDAFCERQGKSPASVRFLHEGSRVQPTRLPXSINIEDGDTLESTSGKSGGASSSDGYELHGYHSRVLDKDGVFKRKWIQ

SEQ ID NO: 2809 - protein, 172 aa, Triticum aestivum
  misc_feature (106)..(106): Xaa can be any naturally occurring amino acid
  misc_feature (117)..(117): Xaa can be any naturally occurring amino acid
  unsure (1)..(172): unsure at all Xaa locations
LQGLRLEDFAGSLLVEVEEGRMGVERVLREHLDIRKQLKVISHRFRRFIVAALLIGTASQFASVLLTTRHDSIDDLLHTGELALCSVVLMSGLIIILSSAAKITHXRRPHGPDNKWXACCTSSRSGRQIDRVNQNHAGKYPRTKHCSTGQESKQFPAALFKHMIKGYVRLAV

SEQ ID NO: 2810 - protein, 220 aa, Triticum aestivum
AEVQATRPFGCFLTPGMNVRLVGEANDYVGKGMAGGELVVVPVDDTGFVPEDAAIVGNTCLYGATGGQVFVRGKTGERFAVRNSLGQAVVEGTGDHCCEYMTGGCVVVLGKVGRNVAAGMTGGLAYMLDEDDTLVPKVNKEIVKMQRVNAPAGQMQLKGLIEAYVEKTGSTKGAKILSEWEAYLPLFWQLVPPSEEDSPEACAEFERVLARQKTAVQSAK

SEQ ID NO: 2811 - protein, 319 aa, Triticum aestivum
MDMAHERDSSSEEEVMAGDLRRGPWTVEEDILLVNYIAAHGEGRWNSLARSAGLKRTGKSCRLRWLNYLRPDLRRGSITPQEQLLILELHSRWGNRWSKIAQHLPGRTDNEIKNYWRTRVQKHAKQLKCDVNSQQFKDVMRYLWMPRLVERIQAAATADAVQAAADTPLSWQHGADDALYESPELPVDACWPTEYAAVAGGQLPNASVAELSSTTTAGSSSPSTTDSGAGAQPSWPAAVDGAEWFTTACDASSAAATICDTDQLIQQQAPSQPAGAWTSEPLPSLGFPELGVADFEMGSFDVDSIWSMDDLWNTQPQFV

SEQ ID NO: 2812 - protein, 181 aa, Triticum aestivum
YKACLYAGINVSGTNGEVMPGQWEFQVGPTVEIAAADQVWVARYILERITELAGVVLSLDPKPIPGDWNGAGAHTNYSTKSMREDGGYEIIKKAIEKLGLRHKEHIAAYGEGNERRLTGRHETADINTFLWGVANRGASIRVGRDTEKDGKGYFEDRRPASNMDPYTVTSMVAETTILWKP

SEQ ID NO: 2813 - protein, 162 aa, Triticum aestivum
  misc_feature (84)..(84): Xaa can be any naturally occurring amino acid
  misc_feature (116)..(116): Xaa can be any naturally occurring amino acid
  misc_feature (127)..(127): Xaa can be any naturally occurring amino acid
  misc_feature (147)..(147): Xaa can be any naturally occurring amino acid
  unsure (1)..(162): unsure at all Xaa locations
GDSGGSVVSVDVERISFGGKEHHIQTNHGPVSVAVYGDHDKPALVTYPDIALNYMSCFQGLLFCPEAASLLLHNFCIYHISPPXGHELGAAPISPNAPIPSVDDWADQVADVLDFXGLSSVKCFGVXASAYILTLFPAKYKERVQAXPCSPPCKAHLDDGYH

SEQ ID NO: 2814 - protein, 156 aa, Triticum aestivum
  misc_feature (115)..(115): Xaa can be any naturally occurring amino acid
  misc_feature (125)..(125): Xaa can be any naturally occurring amino acid
  unsure (1)..(156): unsure at all Xaa locations
MEMKPAAQPVTGVPVGAAPVAWSSGLFDCFDDCGLCCVTYWCPCITFGKVAEIVDRGSTSCGTSGALYALLCSLTGCQWIYSCTYRSKMRAQYALPDGPCCDCCAHFCCEPCALXQQYKELKARXGYDPEIGWHLQHGAPQRRALSTRPACQEMGR

SEQ ID NO: 2815 - protein, 77 aa, Triticum aestivum
PHVGPQDYQLIAITDDGYVRLLTESGPPKDDLKLPPDDVLLGPIQTGFADGQDLILFVMSPLGEEPICPVKEIGGGQ

SEQ ID NO: 2816 - protein, 350 aa, Triticum aestivum
ILQYLGLRGNSLTGTLSPDMCQLTGLWYFDVRGNNLTGTIPQSIGNCTSFARPDISSNKISGEIPYNIGFLQVATLALQGNRLTGKIPEVIGLMQALAVLDLSENELVGAIPPILGNLSYTGKLYLHGNKLTGEVPPELGNMTKLSYLQLNDNELVGTIPAELGKLEELFELNLANNNLEGPIPTNIISCTALNKFNVYGNRLNGSIPAGFQNLESLTNLNLSSNNFKGHIPSELGHIINLDTLDLSYNEFSGPVPATIGDLEHLLQLNLSKNHLSGSVPAEFGNLRSIQVIDLSNNAMSGYLPEELGQLQNLDSLILNNNILVGEIPAQLANCFSLNILNLSHNNFSGH

SEQ ID NO: 2817 - protein, 470 aa, Triticum aestivum
MDTHAAADAAAAAAAEDVETGEHERKGTVWTATAHIVTAVIGSGVLALAWSVAQLGWVAGPLALVGFACVTYYTSTLLANAYRAPDPVTGARNHTYTDAVRSYLSPREVFMCGIAQYGNLWGTMVGYTITATISMVAIRRSDCVHENGQGARCDAPGTVLMLAFTVVQVVLSQFPGLEHITWLSVVAAVMSFAYSFIGLALSVTEWASHGLRPDGRIAGATAASSSKKTWDVLLALGNIAFAYTFAEVLIEIQDTLKSPPSEHKTMKKAAMYGIGATTIFYISVGCAGYAAFGSDAPGNILTAPGLGPFWLVDIANMCLILHLIGAYQVYAQPIFATAERWIVSRWPDTKFISSAYTVSIPLMQRGSVTVAPYKLVLRTVIVIATTVVAMMIPFFNAVLGLLGAFSFWPLTVYFPISMHIAQGKITKGTKWYLLQGLSMVCLMISVAVGIGSVSDIVDSLKVSTPFKTVS

SEQ ID NO: 2818 - protein, 129 aa, Triticum aestivum
  misc_feature (7)..(7): Xaa can be any naturally occurring amino acid
  misc_feature (77)..(77): Xaa can be any naturally occurring amino acid
  misc_feature (89)..(89): Xaa can be any naturally occurring amino acid
  misc_feature (110)..(110): Xaa can be any naturally occurring amino acid
  unsure (1)..(129): unsure at all Xaa locations
MAAAKGXGGEFPVGMKVLVVDDDPTCLVVLKRMLLECRYDVTTCPQATRALTMLRENRRGFDVIISDVHMPDMDGFXLLELVGLEMDLXIIMMSAESKNGYCNERIKHGXLTINKTVRMEELKNIWQHV

SEQ ID NO: 2819 - protein, 388 aa, Triticum aestivum
  misc_feature (19)..(19): Xaa can be any naturally occurring amino acid
  misc_feature (202)..(202): Xaa can be any naturally occurring amino acid
  unsure (1)..(388): unsure at all Xaa locations
RVRFIVAGKRTPIGTFMGXLSKTSATELSAIATKAAIEQIKLSPDQIDDIYLGCVIQAGLGQNPARQAALAAGIPISVPNTTINKVCASGMKTIMIGAQTIALGQNNTVLAGGFESMSNAPFLIKGARGGLGFGNQQLIDSLATDGLTDPYNNCAMGVCGERTADSLKITRELPDAYAIQSYERAIASAKAGKYADEITTVXLPKGNPVSEDEAPKKFNREKMPSLKPVFSKTGTITAANASKLNDGACSVFLMSEEGMKRAGINEPLAEIVAYADAEVNPLDFNIAPEKAARLALQRAGLKPTDIDFWEFNEAFSVTGLANMKLLDLDQKRVNVNGGAVAMGHPIGMSGARITLHLAHILRQNKGKYGLASICNGGGGASAIILKRH

SEQ ID NO: 2820 - protein, 98 aa, Triticum aestivum
RPIQVTILNKFVQKSRLVPAPEFPGYRRPTRPDISIISYVSLLTESGNTKDDLKLPTDDVLLGQIKTGFADGKDLILSVMSAMGEEQICAVKEIGGGK

SEQ ID NO: 2821 - protein, 189 aa, Triticum aestivum
GRDIVDAHYKACIYAGINISGINGEVMPGQWEFQVGPSVGISSGDQVWVARYILERITEIAGVVLTFDPKPIPGDWNGAGAHTNYSTKSMRNEGGYEVIKAAIEKLKLRHKEHIAAYGEGNERRLTGRHETADINTFSWGVANRGASVRVGRETEQNGKGYFEDRRPASNMDPYVVTSMIADTTILWKP

SEQ ID NO: 2822 - protein, 157 aa, Triticum aestivum
MGFVSFVGRVLFASVFLLSAYQEFSEFGTDGGPAAKSLKPKFNLFVKQVSAGIGMAVPHIDIKSVIAFTMFLKAFGGLLFIISSSFGALVLLVYLAFITPVVYDFYNYEMESQQFAKLFTMFSQNLALFGALLFFLGMKNSIPRRHSKRRTAKAKTT

SEQ ID NO: 2823 - protein, 362 aa, Triticum aestivum
MVGAYYSETNKTKGKKVSCKIHKKAPLHSIPHRRERARDWDRAEGMEGKRTDQAKLSTMHSKVICCKLYISESQNAAVVDAISRIGQKDPEVVLLNKFEDEYYNRVRYTLVSYINSESATGEAVFSPIRKVLLAMIEAAFSAINLEVHCGTHPRIGVVDDISFHPLTQAATMEDAAQLAKLVASDIGNGLQVPVFLYAAAHPTGKSVSAVRRELGYFRPNHKGVQWAGPVLPDTLSMKPDVGPVHVPHERGATMVGAQPLVESYNVPIFCKDVPTVRRITRRVTGRSGGLPSVQALALFHGDNCTEIACFLLDPDHVGADRVQWLVEQIAEEQGLEVDKGYFTDLSKHMMLERYSEMVSAAD

SEQ ID NO: 2824 - protein, 313 aa, Triticum aestivum
  misc_feature (161)..(161): Xaa can be any naturally occurring amino acid
  misc_feature (211)..(211): Xaa can be any naturally occurring amino acid
  misc_feature (249)..(249): Xaa can be any naturally occurring amino acid
  misc_feature (254)..(255): Xaa can be any naturally occurring amino acid
  misc_feature (294)..(294): Xaa can be any naturally occurring amino acid
  unsure (1)..(313): unsure at all Xaa locations
MCGGASLADVKVPTVTWKVTKAALCPKKKKPRHGSNGGRCFTGLGGCMGPDVDDNEEDFEAELEVFEVNFGDSDVELGRTRVDEKDDDNEVVEINSFAAAKSSLSQGFDGPSAKRKRKSQFRGIRQRPWGKWAAEIRDPSKGARVWLGTFNSAEEAARAYXDVEARRIRGKKAKVNFPEEPTVPQKRRACPAAPKVSKSSAAQEPTVIPSXNNLANPNAFVYPSADFASKQPLVQAWITCHLFPAINSXAAPVXXPVMNMYSWTKGSNPLGAPDLGLGSMTPRLPDIQPIAPIXTLAGRSKNALSKSNTYNQR

SEQ ID NO: 2825 - protein, 262 aa, Triticum aestivum
MDWDLKMPPGAWDLAELESDAAAAPAAGGQASAGGRANAAGRQECSVDLKLGGLGECGAAPGSRGLGKAPAEAASSASASAPSAAKRPRASSGGGGGSGSGAGQQQCPSCAVDGCKADLSRCRDYHRRHKVCEAHSKTPVVTVAGREMRFCQQCSRFHLLTEFDEAQRSCRKRLDGHNRLRRKPQPDVMNPASFMTSQPGTRVASFPTPRPEQTGPGTFKTDETPFYAHHLPLGSATGAFGSPCLDLTPKREGDALSRRKGK

SEQ ID NO: 2826 - protein, 470 aa, Triticum aestivum
MSVPVAYQGNTSAAVADWLNKGDNAWQLTASTLVGLMSVPGMVVLYGGVVKKKWAVNSAFMALYAFAAVWICWVVWAYNMSFGEELLPFWGKAGPALDQAFLVGRASLPATAHYRADGTLETAMVEPYFPMATVVYFQCVFAAITLILVAGSLLGRMSFLAWMLFVPLWLTFSYTVGAFSVWGGGFLFHWGVIDYCGGYVIHIPAGVAGFTAAYWVGPRTKKDRESFPPNNILFALTGAGLLWMGWAGFNGGGPYAANVDSSMAILNTNICTAASLIVWTCLDAVFFKKPSVVGAVQAVITGLVCITPGAGVVQGWAALVMGVLAGSVPWYTMMVLHKRSKLLQRVDDTLGVIHTHGVAGLLGGVLTGLFAEPNLCNLFLPVTNSRGAFYGGNGGAQLGKQIAGALFVIGWNVVVTSIICVVIRLVVPLRMSEEKLAIGDDAVHGEEAYALWGDGEHYDDTKHGAAVVPV

SEQ ID NO: 2827 - protein, 234 aa, Triticum aestivum
MAANVGESTSGSSSVAGDGGGSFECNICFELPQEPIVTLCGHLFCWPCLYKWLHIHSHSPECPVCKAVVEEDKLVPLYGRGKDRVDPRSKGVPAGAEIPNRPTGQRPATAPQADPNNHFPNANPNPWFMGGGGVPLANARWGNYTFSAAFGGLFPLLSFQVHGFPDATAYGQPAGFPYGYGHGHGHGHAFHGGHAHAAAPRHAPPGQQQQQADVYLKALLILVGFLVIASLITF

SEQ ID NO: 2828 - protein, 159 aa, Triticum aestivum
MPPPCPTLCRLPATNLGLPWCPRSIPFPRLALAARRARAVAARASSSSSSPDSSFGSRMEDSVKKTLADNPVVIYSKSWCSYSMEVKGLFKRIGVDPHVIELDQLGAQGPQLQKVLERLTGQSTVPNVFIGGKQFGGCTDTVKLYRKGELATLLTELGL

SEQ ID NO: 2829 - protein, 152 aa, Triticum aestivum
  misc_feature (57)..(57): Xaa can be any naturally occurring amino acid
  misc_feature (119)..(119): Xaa can be any naturally occurring amino acid
  misc_feature (138)..(138): Xaa can be any naturally occurring amino acid
  unsure (1)..(152): unsure at all Xaa locations
MAHPDRHHFQTKGESGGTNIYPEDGCGILQGELIFIQSRHCQADDDSTSYTGKLGHXRVTFAGLDIFTGKKLEDIVPSSHYCDVPHVDRPDYQLTDILDDGYASLLTDSGNTNDDLKLXNDDALLDQIKSGLADGKDXILSAMSAWLENYLR

SEQ ID NO: 2830 - protein, 108 aa, Triticum aestivum
MATGTALVRELVSSSPVFVFSKSYCPYCTRVKSLFSSLNVTPKVVELDERIDGDTLQAALGELYGARTVPQVFVSGNRIGGCDDTHALHTKGELVPKLQEAGLTPTSS

SEQ ID NO: 2831 - protein, 217 aa, Triticum aestivum
TRNNDDRGDVVEIDTWVASSGKNGMRRDWIIRDRNTKNMIARATSNWVMMNRETRRLSKIPDEVRQEVLPFYLDRSIIAAATGGGRKIEKLTDSTAEHIRSGLAPRWSDMDVNQHVNNVKYIGWILESVPLDVLEDYHLTSITLDYRRECRQSQLLESLTSMTTSSSAPAEPPLTSSLCGSDLYSTHLIRQQDDRAEIVRACAEWRRKEHPRSIEQL

SEQ ID NO: 2832 - protein, 221 aa, Triticum aestivum
  misc_feature (184)..(184): Xaa can be any naturally occurring amino acid
  unsure (1)..(221): unsure at all Xaa locations
MARRSGMLLLLAAAALLAAGAGAAVPPSCERIECPAYDVVDSANGFEIRRYKDAMWVSTAPIEDISLVDATRSGFLQLFKYIQGKNAYNETIEMTAPVLTRVAPSDGPFCVSSFVVSFYVPAKNQADPPPAEGLRVQKWAGARYAAVRRFGGFVADADVGKQAALLDASLQGTRWAAAVSDGRXADPASEYTVAQYNSPFEFSGRVNEIWMLFDTMAASDM

SEQ ID NO: 2833 - protein, 126 aa, Triticum aestivum
  misc_feature (34)..(34): Xaa can be any naturally occurring amino acid
  misc_feature (71)..(71): Xaa can be any naturally occurring amino acid
  misc_feature (79)..(79): Xaa can be any naturally occurring amino acid
  misc_feature (95)..(96): Xaa can be any naturally occurring amino acid
  misc_feature (103)..(103): Xaa can be any naturally occurring amino acid
  misc_feature (117)..(117): Xaa can be any naturally occurring amino acid
  unsure (1)..(126): unsure at all Xaa locations
PARRTFQGSPDLKAAREVADYLGTIHHEFHFTVXDGIDAIEEVIYHDETYDVTTIRANTPMFLMARKDQVXLGVKMVCXGKGSEQLLGRLLYFNXXAPNKEGXHKEDCRKGEGLHNXTPARNKATS

SEQ ID NO: 2834 - protein, 153 aa, Triticum aestivum
  misc_feature (123)..(123): Xaa can be any naturally occurring amino acid
  unsure (1)..(153): unsure at all Xaa locations
RSLNFSIPNREITWKRISDFLPNCVMEENGINPADIQQGNIGDCYFLASISALAENPQRIKNIFLDNFERNGNCIYKVIACVEGVITEVVIDDFVPVYASTNRPVFCKANGREIWVMLLEKAXAKIKGSYGDISSGTPHESLNTFCIAPANYQ

SEQ ID NO: 2835 - protein, 154 aa, Triticum aestivum
PRVRASGASHGTPSFFFCHGTATADSASLETSSGVLDTSPRGTSSDDNKACRKHKEDSGASFSSARSKDSNSKESSERSGGKRDRSTKKVDEEEPKGYIHVRARRGQATDNHSLAERVRRERISERMRVLQALVPGCDKVTGKALILDEIINYV

SEQ ID NO: 2836 - protein, 123 aa, Triticum aestivum
VMEMHKSGELKKVLSEKGVIPKESLEDRLKSLISSAPVMLFMKGTPDAPRCGFSSKVVNALKKEGVSFGSFDILSDEEVRQGLKTYSNWPTFPQLYYKSELIGGCDIILEMEKSGELKSTLSE

SEQ ID NO: 2837 - protein, 108 aa, Triticum aestivum
ERAEGWQGLQGVRELKIKYEERDRPACDIAISGLGWISVEPSGVPSNSSDDNVEEEYDGGELHLVVHVPKPVEVFVRPPLPVGKAASQWYQYQELTEEEEELRPKWHY

SEQ ID NO: 2838 - protein, 525 aa, Triticum aestivum
RLVGCCNELNAAYAADGYARARDGGVGACAVTFTVGGLSAINAVAGAFSENLPVICIVGGPNSNDYGSNRILHHTIGIPDFTQELRCFQNVTCYQAVVNNLEDAHEQIDTAISTALKESKPVYISISCNLPSIPHPTFSRHPVPFFLSPKLSNQMTLEAAVETAAAFLNKSVKPVLVGGPKMRVAKACEAFVELADACGYPVAAMPSAKGLVPEHHSRFIGTYWGAVSSPFCAEIVESADAYLFAGPIFNDYSSVGYSLLLKKEKAIIVQPDRVVIGNGPAFGCVLMKDFLHALGTRLKKNTAAYDNYSRIFVPQGEPLSSAPGEPLRVNVLFKHIQKMLSGDSAVIAETGDSWFNCQKLKLPEGCGYEFQMQYGSIGWAVGATLGYAQAAKGKRVISFIGDGSFQVTAQEVSTMLRWEQNNIIFLINNGGYTIEVEIHDGPYNVIKNWNYTGVVEAFHNGEGKCYTAKVRTEEELKKAIEASLGPNKDSLCFIEVIVHKDDTSKELLEWGSRVSAANSRPPNPQ

SEQ ID NO: 2839 - protein, 160 aa, Triticum aestivum
  misc_feature (107)..(107): Xaa can be any naturally occurring amino acid
  unsure (1)..(160): unsure at all Xaa locations
MERSSEEEMLITKGPWTEQEDSLLFNYITVHGEGHWNSVARYTGLKRTGKSCRLRWLNYLRPNVRRGNITLQEQLLILDLHSRWGNRWSKIAEHLPGRTDNEIKNYXWRTRVVKQGKQLKCDVNKKPIQGTRCVFGWMATYGKKGIRAQGLIIGPKPHQS

SEQ ID NO: 2840 - protein, 211 aa, Triticum aestivum
  misc_feature (193)..(193): Xaa can be any naturally occurring amino acid
  unsure (1)..(211): unsure at all Xaa locations
MDMDKEYYKACMGMEALPMSPAGLSAVTTEVAMAAATASEDEGDLKRGPWTAEEDMLLVDYISKHGEGRWNSLARCAGLRRTGKSCRLRWLNYLRPDVRRGNITPEEQLLILDLHSRWGNRWSKIAQRLPGRTDNEVKNYWRTRVQKHAKQLHCDVNSDRFRDVVRQVWMPRLLERIQAESSSSAAAAARRVXPALTRAMSSPAGASQYHC

SEQ ID NO: 2841 - protein, 286 aa, Triticum aestivum
MPAPATCQGEDHDDLALGLRVTATQRADQDNQRISIETAEGEEDSDEACRELPVRASPFRQASSQTASANSRGFDVNAAVPVDGRASIVRSLSPPSMHMEVPVTQGVDEEASEDEDNGGGRVRKKLRLSKEQSAFLEGSFKEHSTLTLEQKSCLANRLSLRPRQVEVWFQNRRARTKLKQTEADCERLKRCCEALARENRKLQREVAELRASRAPYPLYNLNHHLSGFSTVLPAGSSCDATTRFTVSAVSSPGPSPVSTWFPGRAHFGPFTVHPVLPLCRQPSATL

SEQ ID NO: 2842 - protein, 447 aa, Triticum aestivum
MGTQAAENFEPLAKDVRTDEQKKIDDWLPITSSRNAKWWYSAFHNVTAMVGAGVLSLPYAMSELGWGPGIAVLIISWVITLYTLWQMVEMHEMVPGKRFDRYHELGQHAFGDKLGLWIVVPQQLIVEVGVNIVYMVTGGRSLKKFHDVICDGKCKDIKLTFFIMIFASVHFVLSQLPNFNSISGVSLAAAVMSLSYSTIAWGASVDKGKMVNVDYNLRATTTPGKVFGFFGALGEVAFAYAGHNVVLEIQATIPSTPEKPSKKPMWKGVVVGYIVVALCYFPVALIGYWAFGNSVDDNILITLNKPTWLIAMANMMVVIHVIGSYQIYAMPVFDMIETVLVKKLKFPPGLTLRLIARSLYVAFTMFVAITFPFFGGLLGFFGGFAFAPTTYFLPCVMWLAIYKPKRFSLSWFTNWVCIVLGVCLMILSPIGGLRQIILDSKTYKFYS

SEQ ID NO: 2843 - protein, 146 aa, Triticum aestivum
MSDEEHHFESSDAGASKTYPQQAGNIRKGGHIVIKGRPCKVVEVSTSKTGKHGHAKCHFVAIDIFTAKKLEDIVPSSHNCDVPHVNRVDYQLIDISEDGFVSLLTDSGGTKDDLKLPTDDNLSALMKSGFEEGKDVVVSVMSSMGE

SEQ ID NO: 2844 - protein, 173 aa, Triticum aestivum
MANDSLTRAQIVGDVLDPFVSSVPLTVMYDGRPVFNGMEFRSPAVSLKPSVEIGGDDFRVAYTLVMVDPDAPNPSNPTLREYLHWMVTDVPSSTNDSFGKEIVPYESPSPTMGIHRMVLVLYQQLGRGTVFAPQARQSFNSRSFARRFNLGKPVAAVYFNCQRPTGTGGRRFT

SEQ ID NO: 2845 - protein, 247 aa, Triticum aestivum
  misc_feature (227)..(227): Xaa can be any naturally occurring amino acid
  misc_feature (242)..(242): Xaa can be any naturally occurring amino acid
  unsure (1)..(247): unsure at all Xaa locations
KSFYKKAGWYRSGIPGISSTHASALLQKDINWPLGWPVGGFPGPQGPYYCSIGADKSFGRDIVDAHYKACLFAGVNISGINGEVMPGQWEFQVGPTVGISAGDQVWVARYLLERITEIAGVVVTFDPKPIPGDWNGAGAHTNYSTESMRKDGGFKVIVDAVEKLKLKHQEHIAAYGEGNERRLTGKHETADINTFSWGVANRGASVRVGRETEQNGKGYFEDRRPAXNMDPYVVTSMIAETXILWKP

SEQ ID NO: 2846 - protein, 218 aa, Triticum aestivum
NKVEELSFGDQATEHREEASWTSLAGTSKESDLAELSIHGMLSPVGQGLSPAGAQTSAQGSKGKRRTKTEKTVSLPVLRQYFAGSLKDAARSLGVCPTTLKRICRQHGINRWPSRKIKKVDHSLRKLQQIIDSVHGGETAFQLNTLYKDLTNTSVSSDNNLSGSVTVPPHKQSNLTDFEGHRHHRLSSIVPSTSHSHSSCSQSSDSSPSSCSGGSTKH

SEQ ID NO: 2847 - protein, 277 aa, Triticum aestivum
  misc_feature (112)..(112): Xaa can be any naturally occurring amino acid
  unsure (1)..(277): unsure at all Xaa locations
MAWSSSSTQRSSGATMPCSVVKLDDDLLHHEEETAEEIRRGPWTVEEDLTLVNYIADHGDDRWNSLARAAGLKRTGKSCRLRWLNYLRPDVKRGNFTADEQLLILDLHSRWXNRWSKIAQHLPGRTDNEIKNYWRTRVQKHAKQLNCDANSSKFKDAMKYLWMPRLADHHLQQASTVGDHLVPGLPTSYMESSGMVTSSSDSFASESYDGARCTNASVGEMIQGGDWVQEQNQGFWPESNQTFQLQDSELSGWVQGFSESESLAENFWSLEDIWKMQ

SEQ ID NO: 2848 - protein, 586 aa, Triticum aestivum
MDSTDQFDNSPLLDGDGSSQENTTEYTGDGSVCISGHPASRKHTGNWKASFLIIVCSFCCYLAYSSIGKNLVSYLTKVLHETNLDAARHVATWQGTSYLAPLVGAFVADSYLGKYRTALIACKIFIIGMMMLLLSAALQLISAGPHAWTVWVHLVSSQYTIFLIGLYMVGLGYGAQRPCVTSFGADQFDDTDYVEKTRKSSFFNWHYFAINAGSLIAGTVIVWVQEHEGWLWGFTISTLFVTLGVCIFFLGSIVYRFQKPRGSPLTRLCQVVIAATRNFDKVLPCDSSALYEFMGQGSAIEGRRKLEHTTGLGFFDKAAIVTLPDCESPGQHNKWKICTVTQVEELKILIRMFPIWSAMILFAAVQEQMSSTFVEQGMAMDKHIGSFEIPSASFQCVDTITVIVLVPIYERLIVPVIRKFTGRANGITSPQRIGIGLCFSMFSMVSAALVEGNRLQIAQAEGLVHRKVAVPMSIMWQGPQYFLLGVAEVFSNIGLTEAFYDESPDGMRSLCMAFSLVNMSAGNYLSSLILSLVPVFTARGGSPGWIPDNLNEGHLDRFYLMMAGLSFFNIVVFVFCAMRYKCKKAS

SEQ ID NO: 2849 - protein, 295 aa, Triticum aestivum
  misc_feature (143)..(143): Xaa can be any naturally occurring amino acid
  misc_feature (166)..(166): Xaa can be any naturally occurring amino acid
  misc_feature (219)..(219): Xaa can be any naturally occurring amino acid
  misc_feature (258)..(258): Xaa can be any naturally occurring amino acid
  unsure (1)..(295): unsure at all Xaa locations
MSRRKGAAAAGGGAGPMAMAAMEEEAAELRRGPWTLEEDNLLMSYIACHGEGRWNLLARCSGLKRTGKSCRLRWLNYLKPDIKRGNLTAEEQLVILELHAKWGNRWSRIAQHLPGRTDNEIKNYGRTRVQKQARQLKVDANSXVFRDAVRCYWMPRLLDKMSMAAXSTAAPPPLMEQHGQGVLSSSQSPPIGRDQLWCYGPAAGGFDPSPSASTSGSTXAAGLQPAPVPWFFELNWEDSTATRGRRPSRGAGGMDLNXAGPLGSPGLKGWDLGRKILPPGAQPRNTSIPEGAAKP

SEQ ID NO: 2850 - protein, 178 aa, Triticum aestivum
  misc_feature (84)..(84): Xaa can be any naturally occurring amino acid
  misc_feature (94)..(94): Xaa can be any naturally occurring amino acid
  misc_feature (115)..(115): Xaa can be any naturally occurring amino acid
  misc_feature (124)..(124): Xaa can be any naturally occurring amino acid
  misc_feature (132)..(132): Xaa can be any naturally occurring amino acid
  misc_feature (140)..(140): Xaa can be any naturally occurring amino acid
  misc_feature (143)..(143): Xaa can be any naturally occurring amino acid
  misc_feature (152)..(152): Xaa can be any naturally occurring amino acid
  unsure (1)..(178): unsure at all Xaa locations
DLGRRAGVPCDSWRLAVETYNKRDWTTVPASCERYVGHYMLGGHYRRDSRVVIDEAIAYAEGLKLGGNGKEVWVFDIDETSLSXLPYYATHGFXGTKLYNATSSNEYVLGGGARXAPRRRNGVXRTLSLGIXPVFLTAAXGQXASPSQLRRXGIRWMTCVNPRLKARIPKGTHQDPVT

SEQ ID NO: 2851 - protein, 148 aa, Triticum aestivum
  misc_feature (24)..(24): Xaa can be any naturally occurring amino acid
  misc_feature (26)..(26): Xaa can be any naturally occurring amino acid
  unsure (1)..(148): unsure at all Xaa locations
ARGSIWRSCIVLFASIMSWVYLTXIXLSSCMLFNLVCNLQVIHFDDYGKVLEQDADPLVYLKEHLQLRHNLSKISHRFRMFLLLLFFSVTASQFAILYKTTAYNGPINFTNSGNIAVSSVVQVVGLVLCLHGASKISHRAQNIAAIAS

SEQ ID NO: 2852 - protein, 268 aa, Triticum aestivum
  misc_feature (117)..(117): Xaa can be any naturally occurring amino acid
  unsure (1)..(268): unsure at all Xaa locations
MNKPPPHVFKLMSLPSMIIKLTLGLLWCIIHLAISLLSLCSHLIFNLECSLISSGLLWKYRNLQLGRLKYLAIVVDSREAKNTVKINQLLYWLKTLGVKYVCLYDIDGVLKKLFEPXMNGSRDNNPGDYLDVSANIKALDCCQKQMTIECISGSDGKEGIAKAANLLCSTYLNGDSHTQEDVKSEVNVKNEPVFTETDMASALKSIGCAGPEPDLLLVYGPARCHLGFPTWRLRYTEIMHMGPLKSMKYGAIVKAFHNYSKKHQNYGK

SEQ ID NO: 2853 - protein, 210 aa, Triticum aestivum
HSRTSLYKKAVATGPEFPGYRRPTRPPTRPTNERGGERMQEQGESSRPSSSDRSSSSGNHMGHKEGMESDDEIGTVPELGLGPSGASTSGRREADGPERAQSSTAQGSARRRGRTPADKEHKRLKRLLRNRVSAQQARERKKAYLGDLEVKVKDLEKKNSELEKRHSTLQNENQMLRQILKNTTVSRRGPVRVNSTEVVRGHFPVNQRGP

SEQ ID NO: 2854 - protein, 173 aa, Triticum aestivum
  misc_feature (142)..(142): Xaa can be any naturally occurring amino acid
  unsure (1)..(173): unsure at all Xaa locations
MRWNPRIRRELITYHHQRPFLPPSSSSRVLIHHPAQQVIKVAMSDSEDHHFESKADAGASKTYPMQAGAIRKGGFLVIKNRPCKVVEVSTSKTGKHGHAKCHFVALDIFNGKKLEDIVPSSHNCDVPHVDRTEYQLIDISVXVSLLTDNGSTKDDLKLPTDDAILTQVWLTNL

SEQ ID NO: 2855 - protein, 359 aa, Triticum aestivum
  misc_feature (301)..(301): Xaa can be any naturally occurring amino acid
  misc_feature (336)..(336): Xaa can be any naturally occurring amino acid
  misc_feature (352)..(352): Xaa can be any naturally occurring amino acid
  unsure (1)..(359): unsure at all Xaa locations
SDHTRARAPASTSSAPPFPSREQAEERRREARAGGGMSGGEEGEGRKVSREDIQLVQNLIERCLQLYMNQKEVVETLSFQAKIEPSFTELVWQKLEEENPEFFKAYYVRLMLKNQINVFNKLLAHQCRLMNKDPSGALSITPTAPNGSDSSTLNQNTCFLQDTTSTAIPDSFLHNGNSSGVINGAPATDQFIYGGKVVHGLPSGMDASVSLLSAHNSTGGQFNGDNGTTIKAESSFSSNPEFAFCNENTYLEPCQSIGDASGGSFSSSELNGQPLGDTILDMDTSSYGFLSQIPRNFSFSXDLTEDFSHSTEILENYGSSPFIPSETNNLSESTAXRHTEIGNIPLDLISEXVRYEDLE

SEQ ID NO: 2856 - protein, 200 aa, Triticum aestivum
NKFVQKSRLVPVRNSRDIVDPRVRYKVPFSKTVYIEKTDFRVKDSKDYYGLAPGKSALLRYAFPIKCTEVIYGDNPDDIVEIRAEYDPSKTSKPKGVLHWVAEPAPGVEPLKVEIRLFEKLFLSENPAELKDWLGDINPHSKEVVKGAYAVPSLATAVLGDKFQFERLGYFAVDTDSTPENLVLNRTVTLRDSYGKAGPK

SEQ ID NO: 2857 - protein, 201 aa, Triticum aestivum
  misc_feature (133)..(133): Xaa can be any naturally occurring amino acid
  misc_feature (152)..(152): Xaa can be any naturally occurring amino acid
  unsure (1)..(201): unsure at all Xaa locations
MELAPPCSFSCSSYTNCSIGFTPARVLRAGPWRVRAGAHQGGGDGVEPGRPAGRLAADGPPVVDVPAVVGAADGFGGARDAELAMWDKLGAVVRLSYGIGIYAGMALAGRAICDMAGIDSSGGVHPSLTALVXGLGYTSPPIMALLFILDDXVVKYSPFARAIRYLERRRDSAPFFPCIVPLASSSLVGSPRAPFGEGSSF

SEQ ID NO: 2858 - protein, 461 aa, Triticum aestivum
  misc_feature (139)..(139): Xaa can be any naturally occurring amino acid
  misc_feature (193)..(193): Xaa can be any naturally occurring amino acid
  unsure (1)..(461): unsure at all Xaa locations
MDTHIGSVDGPSPAAVNGAVGCPASAPGCPIMSSHPVVSPGEASLGRHLARRLVQVGVSDVFAVPGDFNLTLLDHLVDEPGLRLVGCCNELNAGYAADGYARARGVGACAVTFTVGGLSVLNAIAGAYSENLPVICIAXGGPNSNDYGTNRILHHTIGIPGLLTGSYGCFQTVTCHQAVVTNLDDAHEQIDTXAIATALRESKPVYLSISCNLPGLPHPTFTRDPVPFFLAPRMSNKMGLEAAVEATVEFLNKAVKPVLVAGPKLRVAKAGKAFVDLVDASGYAYAIMPSAKGFVPETHPHFLGTYWGAVSTAFCAEIVESADAYLFAGPIFNDYSSVGYSFLLKKDKAIIVQPERVIVGNGPAFGCVMMKEYLSALAKRVQKNTTAYENYKRIFVPEGKCWTAKVKCEEELTAAIEMALGEKEDSLCFIEVIAHKDDTSKELLEWGSRVSAANSRPPNPQ

SEQ ID NO: 2859 - protein, 157 aa, Triticum aestivum
MGFVSFAGRVLFASVFLLSAYQEFTEFGTDGGPAAKNLQPKFNSFTKNISVHLGVVVPHVELKHVIAATIGLKGLGGLLFIVSSSFGAYLLALYLAFITPVVYDFYNYDMEKAEFVQIFMKFTQNLALFGALLFFLGMKNSVPKRQAKKKAAKSKTT

SEQ ID NO: 2860 - protein, 276 aa, Triticum aestivum
PTEQVCTKKQAATGPEFPGYRRPTRPQQAFTTCDGNYWNASDGTCESALVKIDSLISELNIYDILEPCYHGRSIKEANPQNSKLPTSFKDLGTTNKPFPVRTRMLGRAWPLRAPVKAGRVPLWQEVASGVPCMSDEVATAWLDNDGVRSAIHAQSVSSIGPWLLCTDKIDFNHDAGSMISYHKNLTSQGYRAIIFSGDHDMCVPYTGSEAWTKSMGYGVVDSWRPWFTNDQVSGYTEGYEHGLTFATIKGAGHTVPEYKPQEALAFYSRWLNGSKL

SEQ ID NO: 2861 - protein, 183 aa, Triticum aestivum
RGRCFPANDTDVGLSGNTLFWGGLVRIDVVKALPRTRLTFYGPKKLSINMVPTTEADEFYKREVGVMLTPPTGQERAEGWCGLQGVRELQIKYEELDRPASDIAISGLGWIAVEPLGVPSSDPDSSVEEEDGDSGELHLRVHVPKPVAVFVRAPLPVGKAASQWYRYQELTEVEEELRPKWHY

SEQ ID NO: 2862 - protein, 63 aa, Triticum aestivum
  misc_feature (37)..(37): Xaa can be any naturally occurring amino acid
  unsure (1)..(63): unsure at all Xaa locations
FEDGFVSLLPDNGNPKNALKLPTDETPLGQIKDGFFXRKDLVVFFLSPLGEEQINALKDLGPK

SEQ ID NO: 2863 - protein, 585 aa, Triticum aestivum
MCGILAVLGCADDTQGKRVRVLELSRRLKHRGPDWSGMHQVGDCYLSHQRLAIIDPASGDQPLYNEDKSIVVTVNGEIYNHEQLRAQLSSHTFRTGSDCEVIAHLYEEHGENFIDMLDGVFSFVLLDTRDNSFIAARDAIGVTPLYIGWGIDGSVWISSEMKGLNDDCEHFEIFPPGHLYSSKQGGFKRWYNPPWFSEVIPSVPYDPLALRKAFEKAVVKRLMTDVPFGVLLSGGLDSSLVAAVTVRHLAGTKAAKRWGTKLHSFCVGLEGSPDLKAAKEVANYLGTMHHEFTFTVQDGIDAIEDVIYHTETYDVTTIRASTPMFLMSRKIKSLGVKMVISGEGSDEIFGGYLYFHKAPNKEELHRETCQKIKALHQYDCLRANKATSAWGLEARVPFLDKEFINEAMSIDPEWKMIRPDLGRIEKWVLRKAFDDEEQPFLPKHILYRQKEQFSDGVGYSWIDGLKAHAESNVTDKMMSNAKFIYPHNTPTTKEAYCYRMIFERFFPQNSAILTVPGGPSVACSTAKAVEWDAQWSGNLDPSGRAALGVHLSAYEQEHLPATIMAGTSKKPRMIEVAAPGVAIES

SEQ ID NO: 2864 - protein, 562 aa, Triticum aestivum
  misc_feature (306)..(306): Xaa can be any naturally occurring amino acid
  misc_feature (450)..(450): Xaa can be any naturally occurring amino acid
  unsure (1)..(562): unsure at all Xaa locations
RLKHRGPDWSGMHQVGDCYLSHQRLAIIDPASGDQPLYNEDKSIVVTVNGEIYNHEQLRAQLSSHTFRTGSDCEVIAHLYEEHGENFIDMLDGVFSFVLLDTRDNSFIAARDAIGVTPLYIGWGIDGSVWISSEMKGLNDDCEHFEIFPPGHLYSSKQGGFKRWYNPPWFSEVIPSVPYDPLALRKAFEKAVIKRLMTDVPFGVLLSGGLDSSLVAAVTVRHLAGTKAAKRWGTKLHSFCVGLEGSPDLKAAKEVANYLGTMHHEFTFTVQDGIDAIEDVIYHTETYDVTTIRASTPMFLMSRTTXQVISGEGSDEIFGGYLYFHKAPNKEELHRETCQKIKALHQYDCLRANKATSAWGLEARVPFLDKEFINEAMSIDPEWKMIRPDLGRIEKWVLRKAFDDEEQPFLPKHILYRQKEQFSDGVGYSWIDGLKAHAESNVKTLLPLMXTDKMMSNAKFIYPHNTPTTKEAYCYRMIFERFFPQNSAILTVPGGPSVACSTAKAIEWDAQWSGNLDPSGRAALGVHLSAYEQEHLPATIMAGTSKKPRMIEVAAPGVAIES

SEQ ID NO: 2865 - protein, 192 aa, Triticum aestivum
MLLLHMLSQHQQHTHKALAAPVKLEAADGEEAGHQVSDGRAFRGVRKRPWGKYAAEIRDSTRNGVRVWLGTFDSPETAALAYDQAAFAIRGGAAVLNFPADHVRRSLEGVADDVCGRAHSVSPVLALKRRHSMRSRKATAAGRKVKAATRGAQPEGMVMELEDLGAEYLEQLLGASEDTATMDSWCWSHHFI

SEQ ID NO: 2866 - protein, 183 aa, Triticum aestivum
  misc_feature (44)..(44): Xaa can be any naturally occurring amino acid
  misc_feature (72)..(72): Xaa can be any naturally occurring amino acid
  unsure (1)..(183): unsure at all Xaa locations
GLQAPVVTVAGREMRFCQQCSRFHLLTEFDEAKRSCRKRLDGHXNRRRRKPQPDVMNSASFMTSQQGTRFSXIPTPRPEQNWPGIIKTEENPYYAHQLPLGISNRQHFGGSASTYAKEGRRFPFLQEGEINFATGVALEPSVCQPLLKTVAPPESSSSSSKMFSDGLTPVLDSDCALSLLSAP

SEQ ID NO: 2867 - protein, 238 aa, Triticum aestivum
MVTVQDEMRKGPWTEQEDLQLVCTVRLFGDRRWDFVAKVSGLNRTGKSCRLRWVNYLHPGLKHGRMSPQEEHLIIELHARWGNRWSRIARRLPGRTDNEIKNYWRTHMRKKAQERKTNMSPSSSSSSFTYQSCLLETAPIIRMDGGSTHNGTTCFSSVLKSNQSVMDGYSMDQIWKEIEAPAMLPIDKKACSNLPCPVLPSPMGDRYCPPEVVWKMDNGDLKMLAPQFGYGNGERSCY

SEQ ID NO: 2868 - protein, 175 aa, Triticum aestivum
GDPRVLLTKRASTLSSHSGEVSLPGGKVDQGDVDVKATALREAEEEIGLDPALVSVVTVLEPFLSKNGLDVTPVIGILSDRALFNPVLNKAEVQDIFDAPLEMFLKDDNRTTRQRDWMGKTIPVQFFDYEAEGKKYVIWGLTAHILTRAASVVLQRQPSFSELPNRPETIPTSKH

SEQ ID NO: 2869 - protein, 213 aa, Triticum aestivum
  misc_feature (201)..(201): Xaa can be any naturally occurring amino acid
  unsure (1)..(213): unsure at all Xaa locations
MAATAAASPSSSLLLSRRHGASSSSSSASRAGASRLRAPRCVLGTAEQLRVVEAGKPAGGADPWAAAWTPKTPAQEARLAALPQEARDSRLKIFSGTANRPLAQEIASYLGVDLGKILIKRFADGEIYVQLQDSVRGCHVFLEQPTCSRVNEKLMEHIIMIDACRRGAARSITVVIPDVGGAPADRKGQGRRAITGKWAAXVLTKVGGGGVII

SEQ ID NO: 2870 - protein, 601 aa, Triticum aestivum
  misc_feature (140)..(140): Xaa can be any naturally occurring amino acid
  misc_feature (193)..(193): Xaa can be any naturally occurring amino acid
  misc_feature (557)..(557): Xaa can be any naturally occurring amino acid
  unsure (1)..(601): unsure at all Xaa locations
MASSASLQSFLPPSAHVATSSSRHRPNRARPFQCAAVSAPSSSAASPSASAVPAERLEPRVEQREGGYWVLKENYRTSLNPQEKVKLGKEPMALFTEGGIKDLAKLPMEQIDADKLTKEDVDVRLKWLGLFHRRKQQYGXRFMMRLKLPNGVTTSEQTRYLASVIEKYGKEGCAHVTTRQNWQNPRRGPRPDXPEILDGLPLRRPSPALQSGMDNVRHPVGSPLAGIDPLEIVDTRPYTNLLSSYITNNSEGNLAITNLPRKWNVCVIGTHDLYEHPHINDLAYMPAEKDGKFGFNLLVGGFISPKRWGEALPLDAWVPGDDIIPVCKAVLEAFRDLGTRGNRQKTRMMWLIDELGMEAFRSEIEKRMPNGVLERAAAEDLIDKKWERRDYLGVHPQKQEGLSFVGLHVPVGRLQAADMFELARLADEYGSGELRLTVEQNIVLPNVKNEKVEALLAEPLLQKFSAHPSLLMKGLVACTGNQFCGQAIIETKARALQVTRDVEARVSVPRAVRMHWTGCPNSCAQVQVADIGFMGCLTKNSSGKIVEAADIFVGGRXSGSDSHLTGVYKKAVPCEDLVPLVADLLVERFGAVPREREEDEE

SEQ ID NO: 2871 - protein, 517 aa, Triticum aestivum
  misc_feature (82)..(82): Xaa can be any naturally occurring amino acid
  misc_feature (260)..(260): Xaa can be any naturally occurring amino acid
  unsure (1)..(517): unsure at all Xaa locations
MELPQLASFLGVVLATVLFLKAVLRRRRQYNLPPGPKPWPIIGNLNLIGTLPHRSIHALSKKYGPLMQLQFGSFPVVVGSSXVEMAKFFLKTHDVVFTDRPKTAAGRYTTYNYSDITWSPYGAYWRQARKMCLTELFSAKRLESYEYIRREEVLALLGDLYRGGAGAGRVVVLKDYLSTVSLNVITRMVMGKKYLEKEVRDEAGAVITTPEEFKWMIDELFLLNGVLNIGDSIPWLDWMDLQGYIKRMKKLSKMFRPAAXEHVVDEHSERRRREGESFVVKDMVDVLLQFASDPGLEVKLNREGVKAFTQDLIAGGTESSAVTVEWALSELLKKPEVLAKATEELDRVVGRGRWVTEKDMPSLPYVDAIVKETMRLHPVAPMLVPRLSREDTSINGYDIPAGTRVLVMVWSIGRDPELWEAPEEFMPERFLGSRLDVKGQDYELLPFGSGRRMCPGYSLGLKVIQVSLANLLHGFTWRLPDGVELSMEEIFGLSTPRKFPLEAVMEPKLPAHLYVEA

SEQ ID NO: 2872 - protein, 114 aa, Triticum aestivum
AAFGSASASKTAFVKSTVKAHDVVIFSKSYCPYCKRAKAVFKELELKKDPYVVELDQREDGGEIQDALSDMVGRRTVPQVFIRGKHLGGSDDTVDAYESGELAKLLNISVKDDL

SEQ ID NO: 2873 - protein, 206 aa, Triticum aestivum
MGEASPESSGAAAGGPSMPGPPRKGKSCKGCLYYSSVLKSRGYNPICVGIPRSIPQVPGFVVEEPREEAAAQGHDLRQFKYACAGYSMFVDDRDAKSGENDAKALLPYCQGLELLVDSRMVERKSQAVEHASARNPKPKEAAAAATQPQEQGQRPQLARQEFMARFRRSAGLVASGVAKNLNKTGTYIKQNVEDIFSPDRRPPPKQ

SEQ ID NO: 2874 - protein, 356 aa, Triticum aestivum
  misc_feature (166)..(166): Xaa can be any naturally occurring amino acid
  misc_feature (179)..(179): Xaa can be any naturally occurring amino acid
  misc_feature (304)..(304): Xaa can be any naturally occurring amino acid
  misc_feature (340)..(340): Xaa can be any naturally occurring amino acid
  unsure (1)..(356): unsure at all Xaa locations
MCGGAILSDIIPPPRRATGGNVWRADKKRRARPDAAAGRPRRAPEEEFQEEEGDAEFEADFEGFVEAEEESDGEAKPFPVRRSGFSGDGLKATAAGDDDCASGSAKRKRKNQFRGIRRRPWGKWAAEIRDPRKGVRVWLGTYNSAEEAARAYDVEARRIRGKKAKXSISQKKLLWLLSXRCATAVKVPEFNTEQKPVLNTMGNADVYSCSAVDYTLNQQFVQPQNMSFVPTVNAVEAPFMNFSSDQGSNSFSCSDFSWENDIKTPDITSVLASIPTSTEVNESAFLQNNGINSTVPPVMGDANXDLADLEPYMKFLMDDGSDESIDSILSCDVPQDVVGXMGLWTFDDMPLSAGFY

SEQ ID NO: 2875 - protein, 649 aa, Triticum aestivum
LERHENALLKQENEKLRTENLTMTEAMRTPMCGGCGSPAMLGEVSLEEQHPRGQNARLKDELNRVCTLATKFLGKPVSLLSPLQLQPHLSMPLPNSSLELAVGGIGGIGSMQPSMHGMMSEYAGGASSSMGTVITPARATGPALASMVDIDRSVFLELAISAMDELVKMAQTDDPLWVTGSPGFPDKESLNFEEYLHSSQHCIGMKPVGFVSEASRESGLVIIDNSVALVETLMDERRWSDMFSCMIAKATILEEVSNGIGGSRNGALLLMKAELQVLSPLVPIREVIFLRFCKQLAEGAWAVVDVSIDGLLSNQNSATTSAGANLKCRRLPSGCVMQDTPNGYCKVTWVEHTEYDEASVHQFYRPLLRSGLAFGASRWLATLQRQCECLAILMSSATVSPNEPTAISQEGKRSMLKLARRMTENFCAGVSASSAREWSKLDGATGSIGEDVRVMARKSVSEPGEPPGVVLSAATSVWVPIAPEKLFDFLRDEQLRAEWDILSNGGPMQEMARIAKGHQNGNSVSLLRASAMSANQSSMLILQETCTDASGSIVVYAPVDIPAMQLVMNGGDSTYVALLPSGFAILPDGPSIGSEHKTGGSLLTVAFQILVNSQPTAKLTVESVETVNNLISCTIKKIKTALQCATPEC

SEQ ID NO: 2876 - protein, 270 aa, Triticum aestivum
MAMARTTTTLLLAAAALLVASCSAWEANIRMPTSLDQAVVAPLIHALRPLLGSGKHSGVACDSWVLGVEAHNVRDWKTVPASCEGYVGHYMLHFRRDSKVVVDQALAYVDSLKLAGNGKEVWVFDIDETTLSNLPYYAKHGFGATPFNATSFDAYVLEGSAPSLPETKRLYNKLLSVGVKPVFLTGRTEDKRAITVTNLLRQGISGWMNLLLKQPGFKGSAATYKSGERQKLQDAGYIIIGNIGDQWSDILGAPEGARTFKLPDPMYYIG

SEQ ID NO: 2877 - protein, 216 aa, Triticum aestivum
CYSSNERGIAARDSGAFAWEIVPVEVPVGRGKPPVLVEKDESLDRFDPAKLRKLRPSFKENAGTVTAGNASSISDGAAALVLVSGQKAQELGLEVLARIKGFADAAQAPELFTTTPALAIPKALSNAGLESSSVDFYEINEAFAAVALANQKILGIPSEKINVHGGAVSLGHPLGCSGARILVTLIGVLREKGGKIGVAGVCNGGGGASALVLELA

SEQ ID NO: 2878 - protein, 182 aa, Triticum aestivum
MARVYVGSLDPAVTARELEDEFRVFGVLRSVWVARKPPGFAFVDFDDRRDAQDAIKDLDGKNGWRVELSRNASSGRGGRDRSGGSEMKCYECGESGHFARECRLRIGSGGLGSGRRRSRSRSRSRSRSPRYRRSPSYSRRSYSRSPRRRSVSPARGRNVSRSPVRGRDESPAYGNGYRRTRS

SEQ ID NO: 2879 - protein, 480 aa, Triticum aestivum
  misc_feature (246)..(246): Xaa can be any naturally occurring amino acid
  unsure (1)..(480): unsure at all Xaa locations
MADKVVATYYYPPMEVAAAELGHTAGSKLDDDGRNKRTGTMWTASSHIITAVIGSGVLSLGWAIAQLGWVAGPAVMLLFSLVTYFTSSLLADCYRSGDQSTGKRNYTYMDAVNANLSGVKVQICGVLQYANIVGVSIGYTIAASISMLAIKRANCFHGNGHADPCKVSSVPYMIIFGVAQVFFSQIPDFDQISWLSMLAAAMSFTYSSIGLGLGIVQVIANGGVKGSLAGISIGTVTPMQKVCRSXQASGDMPFAYSYSLILIEIQDTIRAPPPSESTVMKRATMVSVAVTTVFYMLCGCMGYAAFGDAAPGNLLTGFGFYEPFWLLDVANAAIVVHLVGAYQVYCQPLFAFVEKWAAKRWPESTFVTGEVEVPLFRTYKVNMFRATWRTAFVVATTVVSMMLPFFNDVVGFLGALGFWPLTVYFPVEMYVVQKKVPKWSTQWVCLQMLSLGCLAISLAAAAGSIAGIKSDLKVYHPFKT

SEQ ID NO: 2880 - protein, 396 aa, Triticum aestivum
MGALCDYCGEHRSMVYCRSDAASLCLSCDRNVHSANALSRRHTRTLLCDRCASQPAMVRCLEENTSLCQNCDWNGHSAGSSAAGHKRQNINCYSGCPSSAELSRMWSFILDIPNVAPELNCEQVISMMSISDSAVSNGDNAQGDNSLVDMACATLDEEDKQKSVIGSSSEAALNLLPPANNQTAVSVDSTTAKYTPDKHMFSKDSIYEDFSMDDIDLSYENYEELFGNSHIQTEELFDDAGIDSYFEPKEATAVNSDEQPKPKQPAASNALSADSGMSNPAVKEDDSSLCIPVRQAISYSGFTGESIPEEYQDCGVSPMLLMGEPPWLPPGPDGSFAGIRDSAITRYKEKKKRRKFDHKIRYESRKARADVRKRVKGRFVKAGEAYDYDPLDTRSY

SEQ ID NO: 2881 - protein, 223 aa, Triticum aestivum
  misc_feature (128)..(128): Xaa can be any naturally occurring amino acid
  unsure (1)..(223): unsure at all Xaa locations
MAGDMCEGSIAGCELCGGVTGVHCAEDSGFLCVPCDAKVHGANFLVSRHLRRRLVHSAADEDAGSAGSGSGSESSSSSSCVSTADSCAAASAVTRAVGRSRVGCKHRRVRAEVVVEGWAKRMGLAAGXAVRRAGKAVGALRALGRGVSCSGVPIRVGMARLLWSEDGGSGCVEAFLHRRLEASLYFPGKLDDPGCPLAWGPPGFGAPVPRAQQRQGWPLSLQI

SEQ ID NO: 2882 - protein, 221 aa, Triticum aestivum
MWELIIQDTVKAPPAENKTMRKANLMGVSTTTAFYMLCGCLGYSAFGNDAPGNMLTGFGFYEPYWLIDFANVCIVVHLVGAYQVYCQPIYAAVESWAAGRWPNSEFVVRQYYPFSGKFSLNMFRLVWRTAFVIVSTVLAISLPFFNDILGLLGALGFWPLTVYFPVEMYISQSKMKKYSRKWVALQTLSFACFVVTVAVTVASIQGITQSLKNYVPFKTKL

SEQ ID NO: 2883 - protein, 337 aa, Triticum aestivum
  misc_feature (37)..(37): Xaa can be any naturally occurring amino acid
  misc_feature (328)..(328): Xaa can be any naturally occurring amino acid
  unsure (1)..(337): unsure at all Xaa locations
MEPGRLIFNTSGSGNGQMLFMDCGAGGIAGAAGMFHXRGVRPVLGGMEEGRGVKRPFFTSPDDMLEEEYYDEQLPEKKRRLTPEQVHLLERSFEEENKLEPERKTELARKLGLQPRQVAVWFQNRRARWKTKTLERDFDRLKASFDALRADHDALLQDNHRLRSQVVTLTEKMQDKEAPEGSFGAAADASEPEQAAAEAKASLADAEEQAAAAEAFEVVQQQLHVKDEERLSPGSGGSAVLDARDALLGSGCGLAGVVDSSVDSYWLPGGRGGDEYHECVVGPVAGGIQSEDDDGAGSDKGCSYYPDDAAVFFGAAQGHGHHRTDDDXQQDDGQISY

SEQ ID NO: 2884 - protein, 492 aa, Triticum aestivum
MDVAVERPPPVKEENKPETMEIASALPMVLESFPSTQRNSITTSKDDKLEATKAEMGEVREENERLKTLLSHIVRDYQSLQTHFQDAVKVKHQAPAADKLPAAPAPAPTATTDDLVSLCLGSGGYARPKGAHQRSLSSSSSGTETDPDDQLSLGLSSRRSTDGDDRQAARPSATPLMNLSSDSSADDDAAPGSGLPAAACPPATKARKSPSAGVDGADDEVLQQQAKKARVSVRVKCDTPTMNDGCQWRKYGQKISKGNPCPRAYYRCTVAPSCPVRKQVQRCADDMSILITTYEGTHSHPLPPAAAAMASTTSAAASMLLAGSSSSSSHGHHLPFASAGLLGPTTISTIASCPTVTLDLTAPHSLMQQQYQSPYAAGYESKALPAAWSSGYLAPYAGGLPFYGKSSLPAMGQHFGLGMATTRAEQLYGAAHSSSYLQRTSSGGGVHGAPAAAPAVTDTIAKAITLDPSFQSVLAAAITSYMGRGAGAAAHK

SEQ ID NO: 2885 - protein, 223 aa, Triticum aestivum
  misc_feature (10)..(10): Xaa can be any naturally occurring amino acid
  misc_feature (19)..(19): Xaa can be any naturally occurring amino acid
  misc_feature (39)..(39): Xaa can be any naturally occurring amino acid
  misc_feature (46)..(46): Xaa can be any naturally occurring amino acid
  unsure (1)..(223): unsure at all Xaa locations
FGYARADRKXMGRESIAAXLVADLITEAGAHRVLACDLXSGQSIGXFDIPVDHVYGQPVILDYLASKTICPNDVVVVSPDVGGVARARAFAKKLSDAPLAIVDKRRLGHNQAEVMNLIGDVRGKVAVMVDDMIDTAGTMHKGAELLHREGARAVYACSTHAVLSPPAVERLSGGLFQEVIITNTVPVPPDQRFPQLTVLSVANLLGETIWRVHDECSVSSIFQ

SEQ ID NO: 2886 - protein, 517 aa, Triticum aestivum
  misc_feature (206)..(206): Xaa can be any naturally occurring amino acid
  misc_feature (265)..(265): Xaa can be any naturally occurring amino acid
  unsure (1)..(517): unsure at all Xaa locations
MELPQLASFLGVVLATVLFFKAVLRRRRRQYNLPPGPKPWPIIGNLNLIGTLPHRSIHALSKKYGPLMQLQFGSFPVVVGSSVEMAKFFLKTHDVVFTDRPKTAAGRYTTYNYSDITWSPYGAYWRQARKMCLTELFSAKRLESYEYIRREEVLALLGDLYRGGAGAGRVVVLKDYLSTVSLNVITRMVMGKKYLEKEVKDEAGAXITTPEEFKWMIDELFLLNGVLNIGDSIPWLDWMDLQGYIKRMKKLSKMFDRFLEHVVDXEHSERRGREGESFVVKDMVDVLLQFASDPGLEVKLNREGVKAFTQDLIAGGTESSAVTVEWALSELLKKPEVLAKATEELDRVVGRGRWVTEKDMLNLPYVDAIVKETMRLHPVAPMLVPRLSREDTSINGYDIPAGTRVLVMVWSIGRDPELWKAPEEFMPERFLGSRLDVKGQDYELLPFGSGRRMCPGYSLGLKVIQVSLANLLHGFTWRLPDGVELSMEEIFGLSTPRKYPLEAVVEPKLPAHLYAEA

SEQ ID NO: 2887 - protein, 583 aa, Triticum aestivum
  misc_feature (299)..(299): Xaa can be any naturally occurring amino acid
  unsure (1)..(583): unsure at all Xaa locations
MDTHIGSVDGPSPAAVNGAVGCPASAPGCPIMSSHPVVFAVPGDFNLTLLDHLVDEPGLRLVGCCNELNAGYAADGYARARGVGACAVTFTVGGLSVLNAIAGAYSENLPVICIAGGPNSNDYGTNRILHHTIGIPDFSQELRCFQTVTCHQAVVTNLDDAHEQIDTAIATALRESKPVYLSISCNLPGLPHPTFTRDPVPFFLAPRMSNKMGLEAAVEATVEFLNKAVKPVLVAGPKLRVAKAGKAFVDLVDASGYAYAIMPSAKGFVPETHPHFLGTYWGAVSTAFCAEIVESADAXYLFAGPIFNDYSSVGYSFLLKKDKAIIVQPERVIVGNGPAFGCVMMKEYLSALAKRVQKNNTAYENYKRIFVPEGHPLKGEANEPLRVNVLFKHIQDMLTGDSAVLAETGDSWFNCQKLKLPEGCGYEFQMQYGSIGWSVGALLGYAQGASDKRVIACIGDGSFQVTAQDVSTMLRCEQNSIIFLINNGGYTIEVEIHDGPYNVIKNWNYTALVEAIHNGEGKCWTAKVKCEEELTAAIETALGEKKDSLCFIEVIAHKDDTSKELLEWGSRVSAANSRPPNPQ

SEQ ID NO: 2888 - protein, 665 aa, Triticum aestivum
  misc_feature (247)..(248): Xaa can be any naturally occurring amino acid
  misc_feature (257)..(257): Xaa can be any naturally occurring amino acid
  misc_feature (442)..(442): Xaa can be any naturally occurring amino acid
  misc_feature (582)..(582): Xaa can be any naturally occurring amino acid
  unsure (1)..(665): unsure at all Xaa locations
MESSSSTAAVETAVTVPPPSTFDVSRRPDTAGLVLNSPRPPSLREELVGVVGKAFRPHGSGHGGDRRPPRWAWVLAALQAVFPVLQWGRTYTLKSFRSDVMAGLTLASLGIPQSIGYANLAKLDPQYGLYTSVVPPLIYAVMGTSREIAIGPVAVVSLLLSSMVQKVVDPAADPVTYRTLVFTVTFLAGVFQVSFGLFRLGFLVDFLSHAAIVGFMGGAAIVIGLQQLKGLLGLSRFTNSTDVVAVXXAVFSALHDXPWHPGNFFIGCSFLIFILATRFIGRKYKKLFWLSAISPLLSVILSTAAVYATKADKHGVKIIREVHAGLNPSSVKQIQLNGPYTTECAKIAVICAVIALTEAIAVGRSFATIRGYKLDGNKEMIAMGFSNVAGSLSSCYVATGSFSRTAVNFSAGARSTVSNIVMAATVFIALEFFMKLLYYTPXRCWASIILSALPGLIDIREACNIWRVDKMDFLICLGAFLGVLFGSVEIGLGVALAISFAKIIIQSLRPQVEVLGRLQGTNTFCSVRQYPVACRTPAVQVIRIDTSFLCFINATFIKERIMEWVRAEVDTSNEKVRERVQXSVVLDMSNVVNIDTSGLVGLEEIHKELESLGIQMAIASPGWQAIQKMKLAHLVDRIGEEWIFLTVGEAVEGCLTAHKGSAMEC

SEQ ID NO: 2889 - protein, 363 aa, Triticum aestivum
MAAQLTAALPSYSPAATKAAGGSSASCTASHFLAYPTRRLRNGVRAQVSTTEPTAEPAPAAPAKPAKISKKQDEGVVTNKYRPKEPYVGRCLLNTRLTGDNAPGETWHMVFSTEGEVPYREGQSIGVIADGEDKNGKPHKLRLYSIASSALGDFGDSKTVSLCVKRLVYTNDAGEVVKGVCSNFLCDLKPGSEVKITGPVGKEMLMPKDPNATIIMLATGTGIAPFRSFLWKMFFEEHEDYKFNGLAWLFLGVPTSDTLLYKEEFEKMVEIGGENFRLDFAVSREQTNAAGEKMYIQTRMAEYKEELWELLKKDNTYVYMCGLKGMEKGIDDIMVDLAAKDGIDWIDYKKQLKKAEQWNVEVY

SEQ ID NO: 2890 - protein, 350 aa, Triticum aestivum
  misc_feature (58)..(58): Xaa can be any naturally occurring amino acid
  misc_feature (260)..(260): Xaa can be any naturally occurring amino acid
  unsure (1)..(350): unsure at all Xaa locations
HPLGTIRPIQVTLYNKFVQKSRLVPVRNSRDIVDPRVRGAKQTKAAAADDFEAAFREXNEDSDEEDVVMVVERQEEVAESKPFVFAASPKKKQQQQQEEEEEQAAPARRRKPAQYRGVRRRPWGKWAAEIRDPVKGVRVWLGTFPSADAAALAYDEAARAIRGPRAKLNFPSSSAVAAAAPGARKRGRAGADAPPAAKPAQVITLVDEEEEHASSLFVQHEADASEGSESSGALPDFSWQGVSAFDEAPAYPAPEPETEXSAKRARTTEAQDADEGMSAHQASDCDSDALFDALLFADQFAYFNGGAYESLDSLFSADAVQSGATAADEAALGLWTFDDDCLVDECSLSF

SEQ ID NO: 2891 - protein, 356 aa, Triticum aestivum
  misc_feature (166)..(166): Xaa can be any naturally occurring amino acid
  misc_feature (179)..(179): Xaa can be any naturally occurring amino acid
  unsure (1)..(356): unsure at all Xaa locations
MCGGAILSDIIPPPRRATGGNVWRADKKRRARPDAAAGRPRRVPEEEFQEEEGDAEFEADFEGFVEAEEESDGEAKPFPVRRTGFSGDGLKATAAGDDDCASGSAKRKRKSQFRGIRRRPWGKWAAEIRDPRKGVRVWLGTYNSAEEAARAYDVEARRIRGKKAKXSISQKKLPWLLSXRCATSVKVPEFNTEQKPVLNTMGNADVYSCPAVDYTLNQQFVQPQNMSFVPTVNAVEAPFMNFSSDQGSNSFSCSDFSWENDIKTPDITSVLASIPTSTEVNESAFLQNNGINSTVPPVMGDANVDLADLEPYMKFLMDDGSDESIDSILSCDVPQDVVGNMGLWTFDDMPLSAGFY

SEQ ID NO: 2892 - protein, 445 aa, Triticum aestivum
APSPPHPPQSHLPDRAATKAASSAAFLFCRCGFAISPPLPGHLRPRAAPPPFPPPHMALPSRPVAVLAWGSGEDGQLGMGRCDEKDWARCIGALDAYAVSAVVAGSRNSLAICDDGSLFTWGWNQRGTLGHPPETKTESSPAHVDALIGVKIVQAAIGGWHCLAVDDKGRAYAWGGNEYGQCGEEPERKEDGTRALRRDIPIPQRCALKLKVRQVAAGGTHSVVLTQEGHVWTWGQPWPPGDIKKISTPVRVQGLEQVSMIAVGAFHNLALSVDGILWAWGNNEYGQLGIGDTQPRSQPIRVEGLSNLSLVDIAAGGWHSAALTKEGEVYAWGRGEHGRLGFGDDKSSHMVPLKVQLLAGEDIVQVSCGGTHSVVLTSDGRMFSYGRGDHGRLGDGRKVTTGHPMEVPINLPPPKTSTSSEGLWQANYVACGGRHTLATVTWTDM

SEQ ID NO: 2893 - protein, 340 aa, Triticum aestivum
MGGAAAATGAARWIQRLSAARISTEALERGQSRVIDASLTLIRERAKLKGELLRAMGGVKASATLLGVPLGHNSSFLQGPAFAPPRIREAIWCGSTNSSTEEGKELNDPRVLTDVGDVPIQEIRDCGVEDDRLMHVISESVKTVMDEDPLRPLVLGGDHSISYPVVRAVSEKLGGPVDILHLDAHPDIYDCFEGNTYSHASSFARIMEGGYARRLLQVGLRSITKEGREQGKRFGVEQYEMRTFSRDREKLENLKLGEGVKGVYVSVDVDCLDPAFAPGVSHIEPGGLSFRDVLNILQNLQGDVVAGDVVEFNPQRDTVDGMTAMVAAKLVRELSAKISK

SEQ ID NO: 2894 - protein, 237 aa, Triticum aestivum
MVTVREETRKGPWTEQEDMQLVCTVRLFGERRWDFIAKVSGLNRTGKSCRLRWVNYLHPGLKRGRMTPHEERLILELHARWGNRWSRIARKLPGRTDNEIKNYWRTHMRKKAQERKRSVSPSPSSSSVTYQSIQPQTPSIMGIGEQELHGGSSCITSILKGTPADMDGYLMDQIWMEIEAPSGVNFHDGKDNSYSSPSGPLLPSPMWDYYSPEAGWKMDEIKMAPQVSYSKGIGPSY

SEQ ID NO: 2895 - protein, 307 aa, Triticum aestivum
MHRAAAAGLDLGLGLGLGLASQGSLTSSTTTASSSPASQAHAQHWTAALNSVVGAQESYGLHPYASHQRKEEPGRTSTSPESGVSAGTKRGLERTGSGVSRGAATAGSDEDDDGGDGAGGRKKLRLSKDQAAVLEECFKTHSTLNPKQKTALANRLGLRPRQVEVWFQNRRARTKLKQTEVDCEYMKRWCEQLAEQNKRLEKEVAELRALKTAPAAHAQQAATLTMCPSCRRVAATAAGPAATQHQHQHQQPQQCSPKPNAHPAGNVLPSHCQFFPSTTTAAAPDRSGRQQGAWNGAAQPLVTRELF

SEQ ID NO: 2896 - protein, 271 aa, Triticum aestivum
  misc_feature (107)..(107): Xaa can be any naturally occurring amino acid
  misc_feature (192)..(192): Xaa can be any naturally occurring amino acid
  unsure (1)..(271): unsure at all Xaa locations
MAPKNALPVAVAAAVNGGMDPRFRGVRKRPWGRYAADIRDPVRKGRVWLGTFDTVEAAGRAYDAVVLHYRGPKAKTNFPVGTVAAYTHIPIPTTKALAVSPSSSTVXSSSRDTPAAAPAAPAVAAPAAPPALDLSLAMPAMVAAQSFLFLDPRVAVTVAVAAPEPEPAPCRSACISGMNKVASHEGEQTDPXSSSSVLDASPAVGLGFDLNLPAAAGDGIGDGPIFVRPMTTRPGSKASSPRGRIYGLEDWGGLLKGLSVRLTARDGPPNG

SEQ ID NO: 2897 - protein, 473 aa, Triticum aestivum
MDDSGGADPARQHLSPQGGGGGQPPVPRSPTPLDLAAASAYHHRRLSPSPRPPAHPQVRLPSPYGQIPSGAAAHHARSLSQPLFFSLDSLPPPPYADLAGPPAIPPSPPSSSSDPPSFGLPPRRAGHRRSQSDIPFGFSQLSPPLPPPAPVKREAATGQDGGRLEGDDAALYDLVNAYMDLDGMDALNSSEDRHDDRDIHSRASGTRAASAAESSENEAESQSTSAERKDGAKSRHCRSLSMDSFMGKLNYATGDESPKLPPPSPSGGLSRSGSGSLDGGGAASLFGTEFANGEFTEAEKKKIMANERLAEIALTDPKRVKRILANRQSAARSKERKMRYIQELEHKVQVLQTEATTLSAQLTMMQRDSGGLATQNNELKIRLQAMEQQAQLRDALNEALTGEVQRLKLATGEITDARMSKAGLQQQMNSQLIQMQQLQIQQQQQQQSSQTQQAQQQQQQQQQQQQQQSQQSA

SEQ ID NO: 2898 - protein, 322 aa, Triticum aestivum
MCGGAILAKLIPPTPPSAGRAPKQVAAGGVSPKKGGMNKTHHSSTPDVDDFEAAFEDFDDDFHLQAEEDGDDHVVFASKPAFSPAYDDGRAAQAASRKKSVRRLHGIRQRPWGKWAAEIRDPHKGTRVWLGTFDTADDAARAYDVAAHRLRGSKAKVNFPNGTRAGARLQRASRRTASKRQCPPARTTAYSATAAAHAHVVQAEQDAMMIKPELMEFFDADAFVDLTAAVAALPPVMASSFADTGAKKPMVDEDSSDGSGGDAMLGFDPFMLCQLPCSDTYESIDSLFAGDAVIQDALGVDSGMEGVSLWSFEEFPMDSAIF

SEQ ID NO: 2899 - protein, 347 aa, Triticum aestivum
LAVASTIERVSTLASAVKRVNCFHRSGFSTTGCNSSGSTYMVLFGLMQLLLSQLPSLHNIAWLSVVAVATSFGYSFISLGLCAAKWASHGDVRGTLAGASVDAPRDKAFNVLLALGNIAFSYTFADVLIEIQDTLKSPPAENKTMKRASLYGLSMTTVFYLLLGCTGYAAFGNDAPGNILTGLAFYEPYWLVDVANVCVIVHLAGAYQVFAQPIFARLESYVACRWPDAKIINATYYARVPGRPSSSVPVAPLKLVLRTVIIMFTTLVAMLLPFFNAVLGLIGALGFWPLSVYFPVSMHIARLKIRRGEGRWYWLQAMSFVCLLISLAASIGSVQDIVHNLKTATPF

SEQ ID NO: 2900 - protein, 506 aa, Triticum aestivum
  misc_feature (160)..(160): Xaa can be any naturally occurring amino acid
  unsure (1)..(506): unsure at all Xaa locations
MTSEVQSAPPTPRPVSAPPSQMHSPAPSRSPLRAMASPLASPVKKAVASVRGYLEEVGHITKLADPRDAWLPITASRSGNAYYAAFHNLSSGVGFQALVLPAAFASLGWTWAIVCLTVAFAWQLYTLRLLVNLHEPVAGGTRYSRYMHLATTVFGERWGXKILALLPTMYLSAGTCTALIIVGGGSMKILFSIACGPACVARPPTMVEWYVVFVCVAVVLSQLPNLNSIAGVSLVGATAAVGYCTMIWVISVTKGRVAGVSYDPVKASSDVDRTIAVLNGLGIIAFAFRGHNLVLEIQGTMPSTLKHPSHVPMWKGVKFAYLVVALCLYPVAIGGFWAYGNQIPPNGILSALYKFHSRDVSRLVIGLATLLVIVNCLTTFQIYAMPVFDNMEAGYVHKKNRPCPWWLRAGFRALFGAVNLLIAVALPFLSELAGLLGGISLPVTLAYPCFMWLAIMKPGRGTAMWCVNWALGCLGMGLSFVLIVGNLWGLVATGLHVQFFKPAEFQ

SEQ ID NO: 2901 - protein, 692 aa, Triticum aestivum
MELVDKIAEPEDPLVVTARKVQSLEPPLPIPIKASWKGKTSQQQDEKDLPDDGEESFQSVDSSDEGGRSSFSGASHPLEPIDMDLMKTVYVAIDEEKPEPPVCLVRGLSAKGPFMDDLSLRVTGLKANAVVCAGSGEGLAEERKVSGAAVASLATARSSQATETVSLPPDSEEKDCVWDASLPPSGNVSPHSSIDSMGVVTAMSIASNRSNTYKSEAIASGTMLTVERNFGSVKSSVRGDSLESAKTSMSRASDSSGVSDDSSWSHITGGTSKPHKGNDPRGKAIHAVRIRDGVLGMSHFRLLKRLGCGDIGSVYLSELSGTRCYFAMKVMDKASLASRKKLNRAQTEREILQLLDHPFLPTLYTHFETDRFSCLVMEFCPGGDLHTLRQKQPGKYFSEYAARFYAAEVLLAIEYLHMLGVVYRDLKPENVLVRDDGHIMLSDFDLSLRCAVSPTLIRTSAFDSDPRRAGGSFCVQPTCMEPTSACIQPACFIPKLFGQKSKKKTRKTRSELGQSAINLPELLAEPTSARSMSFVGTHEYLAPEIIKGEGHGSAVDWWTFGIFLHELLYGKTPFKGSGNRATLFNVVGQQLKFPESPSTSYAGRDLIRGLLAKEPQQRLGVKRGATEIKQHPFFEGVNWALIRCSTPPEVPRPVEAELPVKYGVSEAVASTNKRVVGADAKSSGKYLDFEFF

SEQ ID NO: 2902 - protein, 181 aa, Triticum aestivum
  misc_feature (152)..(152): Xaa can be any naturally occurring amino acid
  misc_feature (158)..(158): Xaa can be any naturally occurring amino acid
  unsure (1)..(181): unsure at all Xaa locations
MEGRMFGLETPLMAALQHLLDIPDGEAGGPGNAAGEKQGPTPTRAYVRDARAMAATPADVKELPGAYAFVVDMPGLGSGDIKVQVEDERVLVISGERRREEEEDARYLRMERRMGKLMRKFVLPENADTEKISAVCRDGVLTVSVEKLPPPXSPRKPXKTIQVQSSPELVRGVGASNRSRV

SEQ ID NO: 2903 - protein, 403 aa, Triticum aestivum
  misc_feature (288)..(288): Xaa can be any naturally occurring amino acid
  unsure (1)..(403): unsure at all Xaa locations
MELGLMLRLAAPPASRLPRRHLPPPCVPGRGGVRAGRRGSRRAGAVSTSGGVSYAVVEDEEVEEGEEMARPRLELIEKPDRSLALLDEYESEELGAALCANHRSGYVAVLGKPNVGKSTLINQIVGQKLSIVTDKPQTTRHRILGICSEPEYQIILYDTPGIIKKEMHKLDSMMMKNVQSAIGNADCVIVVADASKLPEKIDDMLEAGVGNKDTKVPVVLVLNKKDMIKPGEISKKLEWYQKFTDVDDVIPISAKFGHGVVDIKEWILSKLPLGPAYYPKDIASEHPXERFFVGEIVREKIFLQYRQEIPYACQVNVTSYKSRPSAKDFIQVEILVERESQRSIILGKDGKAIKTLATASRLDIEDFLQKKVYLEIDVKVKENWRQDERLLKRYGYGGEIQAL

SEQ ID NO: 2904 - protein, 291 aa, Triticum aestivum
MEVGFLGLGIMGKAMAANLLRHGFRVTVWNRTLSKCDELVAMGAAVGDTPASVVAKCKYTIAMLSDPSAALSVVFDKDGVLEQIGEGKGYVDMSTVDAATSCKISEAVKQKGGAFVEAPVSGSKKPAEDGQLVILAAGDKALYDDMVPAFDVLGKKSFFLGEMGNGAKMKLVVNMIMGSMMNAFSEGLCLADKSGLSPQTLLDVLDLGAIANPMFKMKGPSMLQGSYNPAFPLKHQQKDMRLALSLGDENAVSMPVAAAANEAFKKARSLGLGDLDFSAVHEVLKGTGGSG

SEQ ID NO: 2905 - protein, 300 aa, Triticum aestivum
MRRAAVAVTAALLLLLVAGAAAGSPGAEPTCPRGAGPPFLDALGSRCPRGARIVPSPPLEVRGDAVDKELNLRCTGASCSILFYAAWCPFSSKFRPIFEALSTMFPQIHHFAVEESSATPSLFSRYGVRGFPAILLANETTMVRYRGTKDLKSLLQFYQETTGLDPITYIDVDQQESAGSLGSAMPGGRSLRKMAEDEPFVFLGALFIIMKVVAHFIPTVISQLRAFLIVRVQNLNLRIRRGSSQLTERALTVLDVKRLWSKLRLSSKTRDLSKGASNARAWASSFASVSLGEPSSLRHA

SEQ ID NO: 2906 - protein, 162 aa, Triticum aestivum
MAGRDRDPLVVGRVVGDVLDPFIRTTNLRVTFGNRTVSNGCELKPSMVAQQPRVEVGGNEMRTFYTLVMVDPDAPSPSDPNLREYLHWLVTDIPGTTGASFGQEVMCYESPRPTMGIHRFVLVLFLQLGRQTVYAPGWRQNFNTRDFAELYNLGPPVAAVYF

SEQ ID NO: 2907 - protein, 210 aa, Triticum aestivum
MAPKNAAPAAAAADAGMEPRFRGVRKRPWGRYAAEIRDPARKARVWLGTFDTAEAAARAYDAAALHYRGPKAKTNFPVGTVAAFAHVPLPPPKALAVSPSSSTVESSSRDTPAAPPAAPAPPPALDLSLAMPAMVAAQPFLFLDPRVAVTVAVAAPAPAPCRSAAISGMNKAASREEEQSDTGSSSSVVDASPAVGVGFDLNLPPPVEMA

SEQ ID NO: 2908 - protein, 959 aa, Triticum aestivum
MKIPFVTKWSHRSSEPAGPSNSAAAQQQQQQQAPSPPPPVASTEAAGDEFILQEEEYQMQLALALSASASGAEGAGDPDGEQIRKAKLMSLGKGHPVTNSDRGGGDTPESLSRRYRDYNFLDYNEKVIDGFYDVFGLSAGSSGQGKIPSLAELQMSIGDLGYEVIVVDYKFDNALQEMKEVAECCLLGCPDITVLVRRIAEVVADHMGGPVIDANEMITRWLSKSIEQRTSHQTSLLHIGSIEIGLSRHRALLFKILADIVGIPCKLVKGSHYTGVEDDAINIIKMDDKREFLVDVMAAPGTLIPADVFNSKGTPFNFSQTLGQNQVVESASNIEDDPVALQSEHKRNQGHMFANNNRISVNLSSYENTMTAGSSASEPGTLDPRMQLGKTSTLPSAPSKQKKNLQLITDSHETEESRKLFVELDPFNAIESGKSSLAFKGLNNRNNEFQRRRENVVPPSVRSQQPLVMKNWSACNDISNNKQYNVADGSVPRRNATDNASSSQLALSTAKHYNSNVRELNDRVYAAPARNYDNKIVGTSAMAKALTGECPDRSQVPPGLYYDKMLGTSSMNAASTSGIGKVAEKDPHNDPGKGPIYSRFDGELSKNAQGFTPERDEHKENCGSHDHKMLYPDPRKSPLDRFMDRPRQSIECVFPSQVGSNKADMVLDEVSECEILWEDLVIDERIGIGSYGEVYHADWNGTEVAVKKFLDQEFYGDALEEFRCEVRIMRRLRHPNIVLFMGAVTRPPHLSIVSEYLPRGSLYKIIHRPNCQIDEKRRIKMALDVARGMNCLHTSVPTIVHRDLKSPNLLVDDNWTVKVCDFGLSRLKHSTFLSSKSTAGTPEWMAPEVLRNEQSNEKCDIYSFGVILWELATLRKPWHGMNQMQVVGAVGFQDRRLDIPKEVDPIVASIIRDCWQKDPNLRPSFIQLTSYLKTLQRLVIPSHQETASNHVPYEISLYR

SEQ ID NO: 2909 - protein, 793 aa, Triticum aestivum
MVDGEKDPAPLRLETLLALGLDQRTAENALVNSKVTANLAAVVAEAGITGCDKSVGNLLYAVATKYPNNALVHRPALINYIVSTKIKNPAQLDAALSFLTNTGPESLDIGKFEEACGVGVVVSIEEIQSTVAEVLKENMEAILEQRYHINVGGLCGQVRKRHPWGDAKATKEEIEKKLAEILGPKTEADNVKPVKKKKEKPAKVEEKKVAVATAAPPSEEELNPYTIFPQPVENNKVHTEIFFSDGNIWRAHNTKEILEKHLKATGGKVMTRFPPEPNGYLHIGHAKAMFIDFGLAKERNGHCYLRFDDTNPEAEKKEYIDHIQEIVKWMGWEPYKVTYTSDYFQDLYEHAVELIRKGLAYVDHQTAEQIKEYREKKMDSPWRDRPIEESLQLFEDMRRGLIAEGAATLRMKQDMQNDNKNMSDLIAYRIKFTPHPHAGDKWCIYPSYDYAHCMVDSLENITHSLCTLEFDIRRPSYYWLLVALGLYQPYVWEYSRLNISHTMMSKRKLNRLVTEKWVDGWDDPRLLTLAGLRRRGVSATAINSFIRGIGITRSDNSLIRVDRLEYHIREELNKTASRTMVVLHPLKVVITNLEDGKVIDLDGKKWPDAPADEASSYYKVPFSKTVYIEKTDFRVKDSKDYYGLAPGKSALLRYAFPIKCTEVIYGDNPDDIVEIRAEYDPSKTSKPKGVLHWVAEPAPGVEPLKVEIRLFEKLFLSENPAELKDWLGDINPHSKEVVKGAYAVPSLATAVLGDKFQFERLGYFAVDTDSTPENLVLNRTVTLRDSYGKAGPK

SEQ ID NO: 2910 - protein, 317 aa, Triticum aestivum
  misc_feature (117)..(117): Xaa can be any naturally occurring amino acid
  unsure (1)..(317): unsure at all Xaa locations
MEDTTPPADERPLVLLGQPLFPEFATALAGRFRFVLVADADAATLAQGRALLIGLNPVTDDHLAALPALGLVAGISVGVNHVDLAACRRRGIAVTNAGAAFAVDTADYGVGLVVAVXLRRLAAAEAHVRAGRWAADGDYPLTTKVSGKRVGIVGLGNIGSRIARRLAAFGCAVSYNSRSPKPSAPYEFVPAVRDIAAGSDVLVLSCALTEETRHVVNREVMEALGKAGVLVNVGRGGLVDEPELVRCLQEGVIGGAGLDVFESEPDVPPELFSMDNVVLSAHRAVATPESIRGTIELVAANLDAFFAGKPLLSPVEL

SEQ ID NO: 2911 - protein, 221 aa, Triticum aestivum
DQDAFAIQSNERGIAARDSGAFAWEIVPVEVPVGRGKQPVLVEKDESLDRFDPAKLRKLRPSFKEKAGTVTAGNASSISDGSAALVLVSGQKAQELGLQVLARIKGFADAAQAPELFTTTPALAIPKALSNAGLESSSVDFYEINEAFAAVALANQKILGIPSEKINVHGGAVSLGHPLGCSGARILVTLIGVLREKGGKIGVAGVCNGGGGASALVLELA

SEQ ID NO: 2912 - protein, 316 aa, Triticum aestivum
MEDTTPPADERPLVLLGQPLFPEFAAALAARFRFVLVADADAATLAQGRALLIGLNPVTDDHLAALPALGLVAGISVGINHVDLAACRRRGIAVTNAGAAFAVDTADYGVGLVVAVLRRLAAADAHVRAGRWAADGDYPLTTKVSGKRVGVVGLGNIGSRIARRLAAFGCAVSYNSRSPKPSAPYEFVPTVRDLAAGSDVLVLSCALTEETRHVVNREVMEALGKDGVLVNVGRGGLVDEPELVRCLQQGVIGGAGLDVFESEPDVPPELFSMDNVVLSAHRAVATPESIRGTIELVAANLDAFFAGKPLLSPVEL

SEQ ID NO: 2913 - protein, 362 aa, Triticum aestivum
MAVAREQHILDQGLLDAQLELWHHTLGYVKSMALKSALELGIADAIHRQGGAATLSQIAATATLHPSKISCLRRLMRVLTVSGVFGVEHSGDGGVEGEAVYALTPASRLLVVSASANMVHVTKMLLHPIIVSPFSDLGTWFQNELPEPDLFKVKHGKTFWELANEDPAYNAIVNDGMVSDSSFLMDIAIRECGDVFQGIGSLVDVAGGHGGAAQAISKAFPHVKCSVMDLAHVVAEAPSGTDVEFIAGDMFESFPSAHAVFLKWVMHDWGDEDCIKILKNCKKAIAPKDVGGKVIIADMVVGAGSRDQKHKETQVMFNLFIMFVNGIERDEQEWKKIIFKAGFSDYKITPVLGVRSIIEVYL

SEQ ID NO: 2914 - protein, 420 aa, Triticum aestivum
  misc_feature (110)..(110): Xaa can be any naturally occurring amino acid
  unsure (1)..(420): unsure at all Xaa locations
MAPPPSTSAPDGGLDPRDVCVVGVARTPVGALLGSLSSLPATRLGSVAIQGALRRASVDPALVQEVFMGNVLSANLGQAPARQAALGAGLPNTVPCTTINKVCSSGMKAXSVMLAAQSIQLGINDVVVAGGMESMSNAPKYAATARRGSRFGHDVLIDGMLKDGLWDVYNDFHMGMCAELCADQHSITREEQDAYAVQSNEHGIAARDSGAFDWEIVPVEIPSGRGRPPVVVDKDESLAKYDPVKLKKLGPAFKKNGSVTAGNSSSISDGAAAIVLVSGEKAKNLGLQVLARIRGYADAAQAPELFTTTPALAIPKAISNAGLRDSQIDYYEINEAFSVVAVANQRLLGISPGKLNLSGGAVSLGHPIGCSGARIIVTLLGILRQKQGKFGVAGVCNGGGGASAIVVESMQPWSRLRSSL

SEQ ID NO: 2915 - protein, 161 aa, Triticum aestivum
MSDTDEHHFESKADSGASKTYPQQAGAIRKGGHIVIKARPCKVVEVSTSKTGKHGHPKCHFVAIDIFNGKKLEDIVPSSHNCDVPHVDRQDYQLIDITDDGYVSLLTESGNTKDDLKLPTDDVLLGQIKTGFADGKDLILSVMSAMGEEQICAVKEIGGGK

SEQ ID NO: 2916 - protein, 157 aa, Triticum aestivum
MGFVSFAGRVLFASVFLLSAYQEFTEFGTDGGPAAKNLAPKFNSFTKNISVHLGVVVPHVELKHVVAATIGLKGLGGLLFIVSSSFGAYLLALYLAFITPVVYDFYNYDMEKAEFVQIFMKFTQNLALFGALLFFLGMKNSVPKRQAKKKAPKSKTT

SEQ ID NO: 2917 - protein, 266 aa, Triticum aestivum
MSGMGSRPGESNLVEPRGLPSAGMAMQPWWTGTGFGAVSPAVVAPGSGAGISLSSNPFGGGAPQGKKKTVDDDPRAESSDDDSPRSGEPKDGSFDEEKQHATSRMPALASDYLQPYSQLELNQPMASAAYPYPDAYYTGMVGPYGAQAVAHFQLPGLTHPRMPLPLEVSEEPVYVNAKQYHGILRRRQSRAKAELERKAIKARKPYLHESRHQHAMRRARGTGGRFLNTKKDESGGASNGGRTEASKGEQSSEYLRVPPDLHLRQA

SEQ ID NO: 2918 - protein, 334 aa, Triticum aestivum
MASAGGNPLVLPAVLHLRRSDADFTAALSERFRVLDFFSSGEPLPAFLAAAAAAPEPPRAAVVVGGGSVRVDASFLDAVPSLRCVLTTGAGIDHIDLAECARRGVAVANSGEVFSTDVADYAVGLLLDVLRRVSAAERYVRRGSWPVQGDYPLGSKLGGKRVGIIGLGNIGSRIARRLEAFGCIIHYNSRKPKDSISYKYFGNVHDLAAESDVLIVACALNKATRHIVDKDVLEALGKGGVVINIGRGANIDEAELVVALREGKIAGAGLDVFEHEPKVPAELFSMENVVLSRHVAVFTEESRSDLRAHTVGNLEAFFSGQPLLTPVDADSLVQ

SEQ ID NO: 2919 - protein, 283 aa, Triticum aestivum
  misc_feature (202)..(202): Xaa can be any naturally occurring amino acid
  unsure (1)..(283): unsure at all Xaa locations
MAATANASCLPASPRLPASGARVRNRGMLPMAAVGCTAGRGGVHLRSARPLLCTSSSAAAGARGSGKMEDYNTAMKRMMRNPYEYHHDLGMNYAVISDSLIVGSQPQKPDDIDHLKNEENVAYILCLQQDKDIEYWGIDFEAVVTRCKELGIQHMRRPAVDFDPDSLRKQLPKAVSALEWAISQGKGRVYIHCTAGLGRAPXAVAISYMFWFENMDLNTAYDKLTSIRPCGPSKKAIRSATYDLAKSDPNKEAFETLPERAFEGISVSERKLIQDRVRSLHKA

SEQ ID NO: 2920 - protein, 337 aa, Triticum aestivum
IRLGAPGSHTLIGSATAYGVQTQPNPGRQQGTARMLLNPASEALVLDSIRQHLMEDTAAAAAPVAEARRQRPAYCRSASFGSLVADQWSESLPFRADDSDDMVVYGALRDAFSCGWLPDGSFAAVKPEPLLPSPDSAYACDGPSCFGFLEPETPPATSPGEGEEEGAAFMGEAAAAVARGKHYRGVRQRPWGKFAAEIRDPAKNGARVWLGTYDTAEDAAVAYDRAAYRMRGSRALLNFPLRIGAEIAAAGAAAAHAAAAAAGDKRPSPEPATSDSSSSSSSSGSPKRRKRGEAAAASMAMALVPPPSQLSRPAHAWYPAAPVEQVAMAPRAQQLVS

SEQ ID NO: 2921 - protein, 329 aa, Triticum aestivum
  misc_feature (257)..(257): Xaa can be any naturally occurring amino acid
  unsure (1)..(329): unsure at all Xaa locations
YNKFVQKSRLVPVRNSRDIVDPRVRHASEEHQQQQQQQQVVEVSNKSSSGDNNKQVEDGYNWRKYGQKQVKGSENPRSYYKCTYNNCSMKKKVERSLADGRITQIVYKGAHDHPKPPSTRRNSSGCAAVIAEDHTNGSEHSGPTPENSSVTFGDDEADNGAEPETKRRKEHGDNEGSSGGTGACVKPVREPRLVVQTLSDIDILDDGFRWRKYGQKVVKGNPNPRSYYKCTTVGCPVRKHVERASHDNRAVITTYEXRHSHDVPVGRGAGASRALPTSSSSDSSVVVCPAAAGQAPYTLEMLANPAAGHRGYAAKDEPRDDMFVESLLC

SEQ ID NO: 2922 - protein, 194 aa, Triticum aestivum
MRKARPPQPQPQPSQQSPEIRYRGVRKRPSGRYAAEIRDPAKKTPIWLGTFDCAEDAARAYDSAARSLRGPTARTNFPPSSATQPPPRPPPPAAAAAAATSSQSSTVESWSGGGPRAPARARSAARAGTAKEGEEDCRSYCGSSSSVLLEEGADDAAASRSPLPFDLNMPPPQEGALDAEADQMTCRYDTLLRL

SEQ ID NO: 2923 - protein, 197 aa, Triticum aestivum
  misc_feature (132)..(132): Xaa can be any naturally occurring amino acid
  misc_feature (175)..(175): Xaa can be any naturally occurring amino acid
  misc_feature (181)..(181): Xaa can be any naturally occurring amino acid
  unsure (1)..(197): unsure at all Xaa locations
MATSFQGTTTKCNACDKTVYLVDKLTADNRVYHKACFRCHHCKGTLKLANYNSFEGVLYCRPHFDQLFKRTGSLDKSFEGTPKVVKPERNVGNENAIKVSSAFAGTREKCFGCTKTVYPIERVTVNNTMYHXSCFKCCHGGCTISPSIYIAHEGKLFWQHHHTQLIKEKGHFSQXLEDDPXQTSQSGGSVDDEDSEY

SEQ ID NO: 2924 - protein, 102 aa, Triticum aestivum
  misc_feature (70)..(70): Xaa can be any naturally occurring amino acid
  unsure (1)..(102): unsure at all Xaa locations
MSGVTADEDKKPAGDGGGAHINLKVKGQDGNEVFFRIKRSTQLKKLMNAYCDRQSVDLNSIAFLFDGRRXLRGEQTPDELEMEEGDEIDAMLHQTGGCFPGP

SEQ ID NO: 2925 - protein, 187 aa, Triticum aestivum
LANEIIRYVNVLILYAVPVFLYAAAHPTGKSVSAVRRELGYFRPNHKGVQWAGPVLPDTLPMKPDVGPVHVPHERGATMVGAQPLVESYNVPIFCKDVPTVRRITRRVTGRSGGLPSVQALALFHGDNCTEIACFLLDPDHVGADRVQWLVEQIAEEQGLEVDKGYFTDLSKHMMLERYSEMVSAAD

SEQ ID NO: 2926 - protein, 130 aa, Triticum aestivum
  misc_feature (33)..(33): Xaa can be any naturally occurring amino acid
  unsure (1)..(130): unsure at all Xaa locations
MGTAFSSSSSTPESRAMALAKAKEIVASASVVXVFSKSYCPFCVQVKKLLTQLGASFKAVEMDTESDGTEIQSALAEWTGQRTVPNVFINGKHIGGCDDTIALNKGGKLVALLTEAGAISGSSSKTTVTA

SEQ ID NO: 2927 - protein, 152 aa, Triticum aestivum
  misc_feature (139)..(139): Xaa can be any naturally occurring amino acid
  misc_feature (146)..(146): Xaa can be any naturally occurring amino acid
  unsure (1)..(152): unsure at all Xaa locations
HYRTSLYKKAGWYRSGIPGISSTHASVLSLDPKPIPGDWNGAGAHTNYSTKSMREAGGYGVIKTAIEKLGKRHAQHIAAYGEGNERRLTGHHETADINTFKWGVADRGASIRVGRDTEKDGKGYFEDRRPASNMDPYVXVTSMIAXETTLLL

SEQ ID NO: 2928 - protein, 319 aa, Triticum aestivum
  misc_feature (158)..(158): Xaa can be any naturally occurring amino acid
  misc_feature (289)..(289): Xaa can be any naturally occurring amino acid
  unsure (1)..(319): unsure at all Xaa locations
MAMESLGVLLLHPMNAYLEQELDRRFRLFRFWDSPPDGRAEFLRANASAIRAVVGNASYNADAALIDALPSLEIVASFSVGIDRVDLPKCRERGIRVTNTPDVLTDDVADLAVGLAIAALRKIPQADRYVRAGLWKAKGDYTLTTRFSGKRVGIIGLXGRIGLAIATRVEAFDCPVNYYQRTKKDYPSYTYYPSVVELAANSDILVVACPLNEQTRHIVNREVIEVLGPKGVLINIGRGPHVDEPELVSALVEGRLGGAGLDVFEDEPNVPEALFALDNVVLVPHVGSXTHETRQAMADLVLGNLEAHVLKKPLLTPVV

SEQ ID NO: 2929 - protein, 266 aa, Triticum aestivum
  misc_feature (184)..(184): Xaa can be any naturally occurring amino acid
  unsure (1)..(266): unsure at all Xaa locations
MGGCESRCLVEIKFGVNYKAYGRTHYILRPRRMSTTSVEQAQSSVARMLREDILTDITINAVGGRIRAHRAVLAARSPVFMSMFTHDLREKELSTVDIFDMSIEACQAFVGCVYGVAMSEEELLVHRSELVVASDKYGVENLKKVCEESMIVDVSTENLLERLQMAHTYSLPALKRTCVRLLVXFGRMYEIPNDFEEFMKTADQDIVGEIRSTAMLRGRKLEDRQKPSAEKTRRRKSMPSQDSDGGAPGKRVRRLNVRLAGDEWAK

SEQ ID NO: 2930 - protein, 313 aa, Triticum aestivum
MCGGAILAELIPPSAAGRAPKQVAAGQASSKKGGLSMRHHSSIPDVDDFEAAFEDFDDDFDLQAEEDGGDHVVFASKPAFYPAYGGGRRAVQAASMKKRVLHGIRQRPWGKWAAEIRDPHKGTRVWLGTFDTADDAARAYDVPARRLRGSKAKVNFPDAARAGARPRRASRRTAQKPPCPPAATTAYSATAASRAQPEQDTMMATPERLEFPDVDTFVDLTAAVAALPPVTASSFADKMPRVDEDSSEGSGGGAMLGFADELGFEPFMMFQYESMDSLFAGHAVIQDARGVDGGMDGVSLWSFDEFPMDSAIF

SEQ ID NO: 2931 - protein, 237 aa, Triticum aestivum
MAGFSHLPQQMEYGLANAGSFLLCHGNPEDAPAAAAASREGSSVVLDTPLVATASVEKKRKPKEDTTSLNSAHSKETKESTRKRGGKKQGKEMDDDEEEPKGYIHVRARRGQATDSHSLSERVRRERISERMRMLQSLVPGCDKVTGKALILDEIINYVQSLQNQVEFLSMRIASLSPVVYGFGMESEAAFSDQSQKIEGMFHDAAALPTGPPMNRSSSPAPSQAMMDKGTSSSFQP

SEQ ID NO: 2932 - protein, 159 aa, Triticum aestivum
MAGMMFGLDAPMMTALQHLLDIPDGETGAPGGEKQGPTRAYVRDARAMAATPADVKELPGAYAFVVDMPGLGSGDIKVQVEDERVLVISGERRREEKEDAKYLRMERRMGKLMRKFVLPENADMEKISAACRDGVLTVTVEKLPPPEPKKPKTIQVQVA

SEQ ID NO: 2933 - protein, 313 aa, Triticum aestivum
MAHSSLSTVLLLCLAMAASAQLSPTFYQTSCPNALSTIKAAVTAAVNKENRMGASLLRLHFHDCFVQGCDASVLLSGMEQNAFPNVMSLRGFEVIDNIKAKLETMCKQTVSCADILTVAARDSVVALGGPSWTVPLGRRDSTNANEAAANSDLPPPFFDLVNLTQSFGDKGFTVTDMVALSGAHTIGQAQCQNFRDRLYNETNINSGFATSLKANCPQPTGSGDRNLANLDVSTPYSFDNAYYSNLKSQKGLLHSDQVLFTGTGGGTDNTVNNFASNPAAFSSAFASAMVKMGNLSPLTGSQGQVRLSCSKVN

SEQ ID NO: 2934 - protein, 228 aa, Triticum aestivum
MFMAQEEPGLALGLSLGSGAGHHHHQLPQPKEAVPLEPYLSLSLAGAGAVKREEEERALIYCSAASSAADDLVEGYNSSGGGSRKKLRLTKDQTALLEDHFKEQSTLSHKQKASLARQLNLRPRQVEVWFQNRRARTKLKQTEVDCKLLKRCCETLTEENRRLHRELQHLRALHHHQHHHHHPAAAFFIPSAATAASVCPSCTGAPPAHAADRPATKRSFFATKSAAC

SEQ ID NO: 2935 - protein, 385 aa, Triticum aestivum
MLGGLLRFLSACGGSWQTSPAPPHAAPPPASDPSSDASASASEGRDGLLWWRDLARCAAGDVSAALVQANQTLEDQCRLHSAPPLGTLLAVLDGHAGHAAARFACDHLLPTLLEAASGPGGVTADAIRDAFAATEAAFIAQVSSQWDTNPDLATVGSCCLVGVVHERTLFVANLGDSRAVLGKKVGRSGQIVAEQLSTEHNANDEAVRQELMAQHPDDPQIVALKHGVWRVKGIIQVSRSLGDAYLKDAKYNTERIKPKFRVSEPFSRPIMSAEPTIVSRSLEPSDCFVIFASDGLWEHLTNQEAVEIVHNNQRAGSAKRLIKAALQEAARKREMRYSDLMRIDKKVRRHFHDDITVIVLFINHELLAKGNAQVPPLSIRSALDH

SEQ ID NO: 2936 - protein, 218 aa, Triticum aestivum
  misc_feature (179)..(179): Xaa can be any naturally occurring amino acid
  unsure (1)..(218): unsure at all Xaa locations
MAPKNALPVAVAAAADAGMEPRFRGVRKRPWGRYAAEIRDPARKARVWLGTFDTAEAAARAYDAAALHYRGPKAKTNFPVGTVAAFAHVPLPPPKALAVSPSSSTVESSSRDTPAAAPAAPAAAAPAPPPALDLSLAMPAMVAAQPFLFLDPRVAVTVAVAAPAPAPCRSAAISGMNKXASREEEQSDTGSSSSGGGTPPRPGAGGSTLNLPPPGEMA

SEQ ID NO: 2937 - protein, 482 aa, Triticum aestivum
MAATVAVDNLNPKVLKCEYAVRGEIVIHAQRLQQQLQTQPGSLPFDEILYCNIGNPQSLGQQPVTFFREVLALCDHPDLLKKEEIKTLFSADSISRAKQILALIPGRATGAYSHSQGIKGLRDAIASGIASRDGFPANADDIFLTDGASPGVHLMMQLLIRNEKDGILVPIPQYPLYSASIALHGGSLVPYYLNESTGWGLEISDVKKQLEDARSRGIDVRALVVINPGNPTGQVLAEENQYDIVKFCKNEGLVLLADEVYQENIYADNKKFHSFKKIVRSLGYGEEDLPLVSYQSVSKGYYGECGKRGGYMEITGFSAPVREQIYKIASVNLCSNITGQILASLVMNPPKASDESYASYKAEKDGILASLARRAKALEVAFSKLEGITCNKAEGAMYLFPQICLPQKAIEAAKAANKAPDAFYALRLLESTGIVVVPGSGFGQVPGTWHFRCTILPQEEKIPAIISRFTVFHETFMAEYRD

SEQ ID NO: 2938 - protein, 222 aa, Triticum aestivum
  misc_feature (165)..(165): Xaa can be any naturally occurring amino acid
  misc_feature (178)..(178): Xaa can be any naturally occurring amino acid
  misc_feature (215)..(215): Xaa can be any naturally occurring amino acid
  unsure (1)..(222): unsure at all Xaa locations
MCGGAILSDIIPPPRRATGGNVWRADKKKRARADAAAGRPRRAPEEEFEEEGDAEFEADFEGFVEAEEESDGEGKPFPVRRSGFSGDGLKATAAGDDDCASGSAKRKRKNQFRGIRRRPWGKWAAEIRDPRKGVRVWLGTYNSAEEAARAYDVEARKIRGKKAKXSISQKKLLWLLSXRCATSVKVPEFNTEQKPVLNTMGNADVYSCPAVDYTXNQQFVQP

SEQ ID NO: 2939 - protein, 370 aa, Triticum aestivum
  misc_feature (128)..(128): Xaa can be any naturally occurring amino acid
  misc_feature (299)..(299): Xaa can be any naturally occurring amino acid
  unsure (1)..(370): unsure at all Xaa locations
LAWSRPRSGTAVQKSGGWFGFISDAMEVVLKILKDGLSAVHVPYAYGFAIILLTIVVKAATLPLTKQQVESTMAMQNLQPQLKAIQARYAGNQERIQLETARLYKQAGVNPLAGCLPTLATIPVWIGXLYQALSNVANEGLLTEGFFWIPSLGGPTTIAARQSGAGISWLFPFVDGHPPIGWHDTICYLVLPVLLVASQFVSMEIMKPPQSTDPSQKNTQLILKFLPFMIGYFSLSVPSGLSIYWFTNNVLSTAQQIWLRKLGGAKPAMNEGASGIITAGRAKRSGAQSGQGGERFKQXLKEQENRRKAVKALGAGDSNGSTTSEDEESDDDTTEEGGPVEETFATGNDKKLPTYSGKKGKRSKRKRIVQ

SEQ ID NO: 2940 - protein, 238 aa, Triticum aestivum
  misc_feature (67)..(67): Xaa can be any naturally occurring amino acid
  unsure (1)..(238): unsure at all Xaa locations
REAAFSAINLEVHCGTHPRIGVVDDISFHPLNQADTIEDAAQLAKLVASDIGNGLQGVSSDKIFYNXQMMIRYVNVLIMYAVPVFLYAAAHPTSKSVSAVRRELGYFRPNHKGVQWAGPVLPDTLPMKPDVGPVHVPRERGATMVGAQPLVESYNVPIFCKDVPTVRRITRRVTGRSGGLPSVQALALFHGDNCTEIACFLLDPDHVGADRVQWLVEQIAEEQGLEVEKGYFTDLSSI

SEQ ID NO: 2941 - protein, 490 aa, Triticum aestivum
  misc_feature (213)..(213): Xaa can be any naturally occurring amino acid
  misc_feature (231)..(231): Xaa can be any naturally occurring amino acid
  unsure (1)..(490): unsure at all Xaa locations
MARVGGGDVEIGGLPAPAGDPRRRVVAADDSLDDDGKPRRTGTVWTASAHVITAVIGSGVLSLPWSVAQLGWVAGPVTLLLFAIITYYTSVLLGDCYRSEDAVTGKRNYTYMEAVGSLLGKGQVWFCGLCQYVNLIGTAIGYTITASIRAAALYKANCFHSKGHSADCGVYTTMYMVVFGISQIVFSQLPNLHEMAWLSILAAVMSFSYATIXVGLSLAQTITGPTGQDTXSGALKLGFDVASAQKIWLAFQALGDIAFAYSYSMILIEIQDTVRSPPAENKTMKKATLVGVSTTTAFYMLCGCLGYAAFGNGAKGNILTGFGFYEPYWLIDFANVCIVVHLVGAYQVFCQPIFAAVETFAAATWPNAGFITREHRVAAGNGKRLGFNLNLFRLTWRTAFVMVSTLLAILMPFFNDILGFLGAIGFWPLTVYFPVEMYIRQRGIPRYTTRWVALQTLSFLCFLVSLAAAVASIEGVTESLKNYVPFKTKS

SEQ ID NO: 2942 - protein, 168 aa, Triticum aestivum
  misc_feature (110)..(110): Xaa can be any naturally occurring amino acid
  unsure (1)..(168): unsure at all Xaa locations
MRNGSTVCDAAAAVGLGVAPRYRGVRKRPWGRFAAEIRDPAKRARVWLGTYDSAEAAARAYDVAARTLRGPLATTNFPQDLVSFPALPALPRPSRPASPGPACSASSTVXSYSGPRAANAPPAVPRAPAPAAPPGEAPGRRPPDARATGPSSGLRRGRTPGDEAPLGP

SEQ ID NO: 2943 - protein, 167 aa, Triticum aestivum
MAANVGESTSGSSSVAGDGGGSFECNICFELPQEPIVTLCGHLFCWPCLYKWLHIHSHSPECPVCKAVVEEDKLVPLYGPRQGPASTPRSKGRAEAGPYIPNPAHAGRRGCSQPWEGRAGCCRFRPPPAPTHWHPRPRGDLSSRHHAGAGVAHNRVLVTHLWSLLIA

SEQ ID NO: 2944 - protein, 238 aa, Triticum aestivum
MVTVQDEMRKGPWTEQEDLQLVCTVRLFGDRRWDFVAKVSGLNRTGKSCRLRWVNYLHPGLKHGRMSPQEEHLIIELHARWGNRWSRIARRLPGRTDNEIKNYWRTHMRKKAQERKTDMSPSSSSSSFTYQSCLLETAPIIRMDGGSTHNGTTCFSSVLKSNQSVMDGYSMDQIWKEIEAPAMLPIDKKACSNLPCPVLPSPMGDRYCPPEVVWKMDNGDLKMLAPQFGYGNGERSCY

SEQ ID NO: 2945 - protein, 299 aa, Triticum aestivum
MESGRLIFGSAAPCRAAGEGGGQMMLFGGSGSFLGGSPVVAGVEDGRRKRPFLTTVDEELQLEEEMYGYYGLDEHAPERKRRLTAEQVRALERSFEEEKRKLEPERKSELARRLGIAPRQVAVWFQNRRARWKAKQLEQDFDALRAAHDELLAGRDALLADNHRLRSQVTSLTEKLQAKESSEPEGPTAVSGRTDAGVPAVEPKEGYAACDGAAGLLADFAGGANDSPESNSYLADARSPPSSSDDDCAGAVGGELNSCGFFLPEYAMLDVAAAERGSVQQGEEEEEEAQRKYWAWFWS

SEQ ID NO: 2946 - protein, 272 aa, Triticum aestivum
LLEQVCTKKQAGTGPEFPGYRRPTRPPVWIGLYQALSNVANEGLLTEGFFWIPSLGGPTTIAARQSGAGISWLFPFVDGHPPIGWHDTICYLVLPVLLVASQFVSMEIMKPPQSTDPSQKNTQLILKFLPFMIGYFSLSVPSGLSIYWFTNNVLSTAQQIWLRKLGGAKPAVNEGASGIITAGRAKRSGAQSGQGGERFKQLKEEENRRKAVKALGAGDSNGSTTSEDEESDDDTTEEGGSVEETFTTGNDKKLPTYSGKKGKRSKRKRIVQ

SEQ ID NO: 2947 - protein, 126 aa, Triticum aestivum
MSLIRIAFSLVLLLAAAESAAATRSPSAFVQNAIYSNRITIFSKSYCPYCMRAKRIFKDLNEDPYVVELDLREDGREIQGVLLDLVGRNTVPQVFVYGHHVGGSDDTKTALSDGQLQKLLGKSQSQ

SEQ ID NO: 2948 - protein, 195 aa, Triticum aestivum
VPIEVPVSRGKPAVLVDKDESLDKFDAAKLKKLRPAFKESAGTVTAGNASSISDGAAALVLVSGKKAQELGLQVLARIKGFADAAQAPELFTTTPALAIPKALNNAGLESSRVDFYEINEAFSAVALANQKLLGIPSEKINVHGGAVSLGHPLGCSGARILVTLLGVLREKSGKIGVAGVCNGGGGASALVMELA

SEQ ID NO: 2949 - protein, 108 aa, Triticum aestivum
  misc_feature (91)..(91): Xaa can be any naturally occurring amino acid
  misc_feature (97)..(97): Xaa can be any naturally occurring amino acid
  unsure (1)..(108): unsure at all Xaa locations
MRTDVRRGAAAAGRDQFPVGMRVLAVDDDPVCLKVLETLLRRCQYHVTATNQAVIALRMLRENRDMFDLGINDVHMPDMDGFKLLELVGLXMDLPVXKLSVNGETKTV

SEQ ID NO: 2950 - protein, 170 aa, Triticum aestivum
MSSLTTISGGAMEELQEVEELVDTRLSLVIGAASRPPTVLALLPATSPENEAAARRKRKGQENGAGGVAATSRQHNKRAKTVHDSSDVDDDGGDAARDGTRKKLKLTVEQAALLEESFRAHNVLSHGEKHDLARQLGLKPRQVEVWFQNRRARTKLKQTELDCELLRPWV

SEQ ID NO: 2951 - protein, 209 aa, Triticum aestivum
ILIEIQDTLRSPPGENETMRNATLMGISTTTAFYMLCGCLGYSAFGNDANGNILTGFGFYEPYWLVDFANVCIVLHLVGGFQVFCQPLFAAVEGGVARRYPGLGREHAAVFRLVWRTAFVGMITLLAMLMPFFNSILGFLGSIAFWPLTVFFPVEMYIRQRQIPRFGTKWVALQSLSFVCFLVTVAACAASIQGVRDSLKTYTPFTTKS

SEQ ID NO: 2952 - protein, 351 aa, Triticum aestivum
  misc_feature (100)..(101): Xaa can be any naturally occurring amino acid
  misc_feature (190)..(190): Xaa can be any naturally occurring amino acid
  unsure (1)..(351): unsure at all Xaa locations
MSFLRSFARNKDISKVGRRGIHCMQKLCAEKISPDSLEKAQNRVIDAALTLVRENTRLKKELVHSLGGAVATSTLLGVPLGHNSSFLEGPAFAPPFIREXXIWCGSANSTTEEGKDLKDLRIMVDVGDIPIQEMRDCGIGDERLMKVVSDSVKLVMEEDPLRPLILGGDHSISYPVVRAISEKLGGPVDXLHFDAHPDLYDEFEGNYYSHASSFARIMEGGYARRLLQVGIRSINKEGREQAKKFGVEQFEMRHFSKDRPFLENLNLGEGAKGVYISIDVDCLDPGYAVGVSHYESGGLSFRDVMNMLQNLKGDIVGGDVVEYNPQRDTPDRMTAMVAAKFVRELAAKMSK

SEQ ID NO: 2953 - protein, 442 aa, Triticum aestivum
MKRVNLALMDKVLDVDVKKKTVTVQAGIRVAELVDALREHGLTLQNFASIREQQVGGIIHVGAHGTGARLPPIDEQVISMKLVTPAKGTIELSTEKDPDLFYLARCGLGGLGVVAEVTLQCVERHQLVEHTFVSNADEIKKNHQKWLSENKHIKYLWIPYTDTVVVVQCNPPSRWKTPKLASKYGKDEALQYVRDLYRESLKKYRTEADSKDPAIDQLSFTELRDQLIALDPLDKDHVIRINKAEAEYWKKSEGYRMGWSDEILGFDCGGQQWVSETCFPTGTLAKPNMKDLYYMEELLQLIEKEDIPAPAPIEQRWTARSRSPMSPASSSEEDDIFSWVGIIMYLPTSDPRQRKDITEEFFNYRSLTQTSLWDDYSAYEHWAKIEVPKDKDELAQLQARLRKRFPVDAYNKARMELDPNKVLSSAKLEKFFPGMQTVQHAK

SEQ ID NO: 2954 - protein, 389 aa, Triticum aestivum
EAEALPRVRLAAVDVEWAHVLAEGWASPLRGFMREHEYLQCLHFNSLRLPSGGLANMSLPIVLAVDDAAKDRVGAAPDVALAGPDGELLAVLRSVEIYPHNKEERIARTWGTTAPGLPYVDEAITPAGNWLIGGDLEVLQPIKYNDGLDHYRLSPQQLRDEFDKRGADAVFAFQLRNPVHNGHALLMNDTRRRLLEMGFKNPILLLHPLGGFTKADDVPLPVRMEQHSKVLEDGVLDPETTIVSIFPSPMHYAGPAEVQWHAKARINAGANFYIVGRDPAGMGHPTEKRDLYNPDHGKKVLSMAPGLEKLNILPFKVAAYDTVAKKMAFFEPSRSQDFLFISGTKMRTFAKTGENPPDGFMCPGGWKVLVDYYNSLQTEGATAPAAATV

SEQ ID NO: 2955 - protein, 99 aa, Triticum aestivum
  misc_feature (34)..(34): Xaa can be any naturally occurring amino acid
  misc_feature (38)..(38): Xaa can be any naturally occurring amino acid
  misc_feature (41)..(41): Xaa can be any naturally occurring amino acid
  misc_feature (46)..(46): Xaa can be any naturally occurring amino acid
  misc_feature (50)..(50): Xaa can be any naturally occurring amino acid
  misc_feature (54)..(54): Xaa can be any naturally occurring amino acid
  misc_feature (62)..(62): Xaa can be any naturally occurring amino acid
  misc_feature (68)..(68): Xaa can be any naturally occurring amino acid
  misc_feature (74)..(74): Xaa can be any naturally occurring amino acid
  unsure (1)..(99): unsure at all Xaa locations
EPPRLGPGGRSFRGEPGPGADRSGVRGSPRRALXLAWXGLXGISFXGLAXPASXFLPTDWDXFLVKYXYPSFTXTVLLFLGGTTGYGVFKYFEGEKSKD

SEQ ID NO: 2956 - protein, 584 aa, Triticum aestivum
  misc_feature (341)..(341): Xaa can be any naturally occurring amino acid
  unsure (1)..(584): unsure at all Xaa locations
MSSKPASQSMPEQAAKPKEMGEDDRQRSAAEEVSGEPDQQQESPAPVLDKDAPDLSPDSGVLDVPLAPEAESDESKETKNSDSNENQEKKSSQKSSISDSFISAKVSDGTNSLGKTSGSAKTSGRDFTESGKSSMCRVSASSDLSDESSCSSMSSATTKPHKGNDSRWEAIQVVKSREGVLGLNQFRLLKKLGSGDIGSVYLSELSGTKSHFAMKVMDKTSLASRKKLLRAQTEREILQSLDHPFLPTLYTHFETDKFSCLVMEFCPGGDLHTLRQRQPGKHFSEQAAKFYVAEVLLALEYLHMLGIIYRDLKPENVLVREDGHIMLTDFGLTEQRRERSXRCSVSPTVIRGANPGLDALQRNNAAYCVQPACIQPSCVVPTTCFGPRFFSKSKSKSKSKKEKPKPDIVNQVNLFPEMIAEPTDARSMSFVGTHEYLAPEIVKGEGHGSAVDWWTFGIFLYELLFGKTPFKGSGNRATLFNVVGQPLRFPESPLVSFSARDMIRGLLVKDPQHRLGHKRGATEIKQHPFFEGVNWALIRCASPPDIPKPVELDCRPKQAPAANGKVAPASNQKGSDNYLEFEFF

SEQ ID NO: 2957 - protein, 431 aa, Triticum aestivum
  misc_feature (23)..(23): Xaa can be any naturally occurring amino acid
  unsure (1)..(431): unsure at all Xaa locations
VSSGDGAGGGAGDAVPGGRAGQXAVPARQPAGRVWGVRRTARATSGFEVLALGPETTGVIQRMQQLLDMDTTPFTDKIIAEYIWVGGSGIDLRSKSRTISKPVEDPSELPKWNYDGSSTGQPPGEDSEVILYPQAIFKDPFRGGNNILVICDTYTPQGEPVPTNKRHMAAQIFSDPKVTAQVPWFGIEQEYTLMQRDVNWPLGWPVGGYPGPQGPYYCAVGSDKSFGRDISDAHYKACLYAGIEISGTNGEVMPGQWEYQVGPSVGIDAGDHIWASGYILERITEQAGVVLTLDPKPIQGDWNGAGCHTNYSTLSMREDGGFDVIKKAILNLSLRHDLHIAAYGEGNERRLTGLHETASISDFSWCVANRGCSIRVGRETEAKGKGYLEDRRPPSNMDPYTVTALLAETTILWEPTLEAEALAAKKLALKV

SEQ ID NO: 2958 - protein, 219 aa, Triticum aestivum
  misc_feature (201)..(201): Xaa can be any naturally occurring amino acid
  unsure (1)..(219): unsure at all Xaa locations
VTILNKFVQKSRLVPVRNSRDIVDPRVRIVDAHYKACLYAGINISGINGEVMPGQWEFQVGPSVGIAASDQLWVARYILERITEVAGVVLSLDPKPIPGDWNGAGAHTNYSTKSMREAGGYGVIKTAIEKLGKRHAQHIAAYGEGNERRLTGHHETADINTFKWGVADRGASIRVGRDTEKDGKGYFEDRRPASNMDPYVXVTSMIAETTLLLWSQAAR

SEQ ID NO: 2959 - protein, 360 aa, Triticum aestivum
  misc_feature (25)..(25): Xaa can be any naturally occurring amino acid
  unsure (1)..(360): unsure at all Xaa locations
MALLTDLLNLDLTDSTEKIIAEYIXIYCRIGGSGMDLRSKARTLPGPVTDPSKLPKWNYDGSSTGQAPGEDSEVILYPQAIFKDPFRKGNNILVMCDCYTPAGVPIPTNKRYNAAKIFSNPDVAKEEPWYGIEQEYTLLQKDINWPLGWPVGGFPGPQGPYYCSIGADKSFGRDIVDSHYKACLFAGVNISGINGEVMPGQWEFQVGPTVGISAGDQVWVARYLLERITEIAGVVVTFDPKPIPGDWNGAGAHTNYSTESMRKDGGFKVIVDAVEKLKLKHKEHIAAYGEGNERRLTGKHETADINTFSWGVANRGASVRVGRETEQNGKGYFEDRRPASNMDPYVVTSMIAETTILWKP

SEQ ID NO: 2960 - protein, 522 aa, Triticum aestivum
  misc_feature (468)..(468): Xaa can be any naturally occurring amino acid
  misc_feature (490)..(490): Xaa can be any naturally occurring amino acid
  unsure (1)..(522): unsure at all Xaa locations
MAAATSPAVAFSGATAAAMPKPARHPLPRHQPVSRRALPARVVRCCAASPAATSAAPPATALRPWGPSEPRKGADILVEALERCGIVDVFAYPGGASMEIHQALTRSPVITNHLFRHEQGEAFAASGYARASGRVGVCVATSGPGATNLVSALADALLDSIPMVAITGQVPRRMIGTDAFQETPIVEVTRSITKHNYLVLDVEDIPRVIQEAFFLASSGRPGPVLVDIPKDIQQQMAVPVWDTPMSLPGYIARLPKPPSTESLEQVLRLVGESRRPILYVGGGCAASGEELRRFVELTGIPVTTTLMGLGNFPSDDPLSLRMLGMHGTVYANYAVDKADLLLAFGVRFDDRVTGKIEAFASRSKIVHIDIDPAEIGKNKQPHVSICADVKLALQGLNDLLNGSKAQQGLDFGPWHKELDQQKREFPLGFKTFGEAIPPQYAIQVLDELTKGEAIIGTGGGQHQNVGRXYYPYPTGHRKGWLSLGWGAMGXGLPAAAGAAVAKPGVTEVAIGGDGSCLIHILD

SEQ ID NO: 2961 - protein, 376 aa, Triticum aestivum
AYLGDTIEQVCTKKQAGTGPEFPGYRRPTRPGSGIDLRSKSRTISKPVEDPSELPKWNYDGSSTGQAPGEDSEVILYPQAIFKDPFRGGNNILVICDTYTPQGEPIPTNKRHMAAQIFSDPKVTAQVPWFGIEQEYTLMQRDVNWPLGWPVGGYPGPQGPYYCAVGSDKSFGRDISDAHYKACLYAGIEISGTNGEVMPGQWEYQVGPSVGIDAGDHIWASRYILERITEQAGVVLTLDPKPIQGDWNGAGCHTNYSTLSMREDGGFDVIKKAILNLSLRHDLHIAAYGEGNERRLTGLHETASISDFSWGVANRGCSIRVGRETEAKGKGYLEDRRPASNMDPYTVTALLAETTILWEPTLEAEALAAKKLALKV

SEQ ID NO: 2962 - protein, 198 aa, Triticum aestivum
LYRTSLYKKAGWYRSGIPGISSTHASDSSKLEGRPLSCRLSDKASNQLGRWFQDDDALEQAMGGEWYLFPMSSGDDSALQPIRLIRDEQRTLSIGSKPDPSNSDSSLSFPLPQVSEIHATITCKNKGFYLTDLGSEHGTWFNDNEGRRSRLPPNFPVRFHPSDAIEFGSDKKAMFRVKVLSTLPYDSARGGEEVLQAA

SEQ ID NO: 2963 - protein, 391 aa, Triticum aestivum
MASEMSKDVKFSEEEVTSHPRVLEGEEQTVVAPARQSSIFALTLDELQYSVCEAGRNFGSMNMDEFMSNIWNAEEFQAATGGGLVGMEVAPVVGAGAGGGGADAGGSNLARQESFSLPPPLCRKTVEEVWAEINREPRQVHAQPQGARASQQPPVQPPVAANDRQGTLGEMTLEQFLVKAGVVRGSGAGGQAPVPVGMVHAQMNPVQQGQQPGPMMYPMAPANGMFQVMGDGMGFVPNGYAGMAVVPPPPPPQGGMGIVSPGSSDGRSAMTQADMMNCMGDGAMMENGGARKRGAPEDQSCERSIERRHRRMIKNRESAARSRARKQAYTVELEAELNHLKEENARLKAEEKTILLTKKQMLVEKMIEQSKENVNVKKGGTLSRRCGSCIW

SEQ ID NO: 2964 - protein, 235 aa, Triticum aestivum
PPHCSGQVPPRARGPVPRRRTPRLGGMDERVVTPRCRVPPVRNVAALPPPLARDIGDGLRVPTYLYGAAHREGRRLAAIRRQLGYFKPQSSAEWHGPLPVAADATALPVAPDAGPDAASASKGVLVLGATAWVDNYNVPVRTADVEAVRRVARRVSERGGGLRSVQAMGLAHGDGGAEVACNLLDPGSARPPEVQGMVERLAGEEGLAVGEGYFTDFSQEKIVELYMEKSAQAEA

SEQ ID NO: 2965 - protein, 356 aa, Triticum aestivum
MALLTDLLNLDLTDSTEKIIAEYIWIGGSGMDLRSKARTLPGPVTDPSKLPKWNYDGSSTGQAPGEDSEVILYPQAIFKDPFRKGNNILVMCDCYTPAGVPIPTNKRYNAVKIFSNPDVAKEEPWYGIEQEYTLLQKDINWPLGWPVGGFPGPQGPYYCSIGADKSFGRDIVDSHYKACLFAGVNISGINGEVMPGQWEFQVGPTVGISAGDQVWVARYLLERITEIAGVVVTFDPKPIPGDWNGAGAHTNYSTESMRKDGGFKVIVDAVEKLKLKHKEHIAAYGEGNERRLTGKHETADINTFSWGVANRGASVRVGRETEQNGKGYFEDRRPASNMDPYVVTSMIAETTILWKP

SEQ ID NO: 2966 - protein, 329 aa, Triticum aestivum
  misc_feature (43)..(43): Xaa can be any naturally occurring amino acid
  misc_feature (118)..(118): Xaa can be any naturally occurring amino acid
  unsure (1)..(329): unsure at all Xaa locations
HYRTSLYKKAGWYRSGIPGISSTHASAVHHELHFTVQEGIDAXEEVIYHIETYDVTTIRASTPMFLMSRKIKSLGVKMVLSGEGSDEIFGGYLYFHKAPNKKELHEETCRKIKALHLXDCLRANKATSAWGLEARVPFLDKSFINVAMDLDPECKMIRRDLGRIEKWVLRNAFDDEEKPYLPKHILYRQKEQFSDGVGYSWIDGLKDHAKAHVSDSMMTNASFVYPDNTPTTKEAYYYRTVFEKFYPKNAARLTVPGGPSIACSTAKAVEWDAAWSELLDPSGRAALGVHDAAYEEKAPASVDPVVDNVSRSPAHDVKRLKTAISAAAV

SEQ ID NO: 2967 - protein, 260 aa, Triticum aestivum
VTSKTSLYKKAGCNQSGIPGISSTHASAKWMAQSEKLVANLFQMARENAPSIIFIDEIDSLCGTRGEGNESEASRRIKTELLVQMQGVGHNDDKVLVLAATNTPYALDQAVRRRFDKRIYIPLPDAKARQHMFKVHLGDTPHSLSESDFEVLGRRTEGFSGSDVAVCVKDVLFEPVRKTQDAMYFFKTDGDMWMPCGSKQPGAVQTTMQELASKGLASQILPPPISKNDFEKVLARQRPTVGKKDLEVHEKFTKEFGEEG

SEQ ID NO: 2968 - protein, 420 aa, Triticum aestivum
  misc_feature (365)..(365): Xaa can be any naturally occurring amino acid
  unsure (1)..(420): unsure at all Xaa locations
NLAALRRQLERSWRRCTDVALQLLLPDGYPHSVSSDYLHYSLWRGVQGVASQISGVLSTQALLYAVGLGKGAIPTAAAVNWVLKDGLGYLSKILLSKFGRHFDVNPKGWRLFADLLENTAYGLEILTPVFPHLFVPIGAAAGAGRSAAALIQAATRSCFFAGFAVQRNFAEVIAKGEAQGMVSKFVGIMLGIALANQIGSSVPLALISFAGVTVVHMYCNLKSYQSIQLRTLNPYRASLVFSEYLLSGQVPSVKEVNDKEPLFPNLSMGAQVKQSEILSAEAKDAADTIYRRLQLGSKLSEIIENKEDAYALFDLYKNEQYLLTDYKGKFCVVLKEGSSPEDMLKSLFHVNYLYWLEKYMGFKPXNVASECRPGGRLEASLDYVQREFTHVKHDGSNGGWVMDGLIARPLPVRIRVGDVP

SEQ ID NO: 2969 - protein, 204 aa, Triticum aestivum
VTFQNKFVQKSRLVPVRNSRDIVDPRVRFEIRRYKDAMWVSTAPIEDISLVDATRSGFLQLFKYIQGKNAYNETIEMTAPVLTRVAPSDGPFCVSSFVVSFYVPAKNQADPPPAEGLRVQRWAGARYAAVRRFGGFVADADVGKQAALLEASLQGTRWAAPVSDGRKADPASEYTVAQYNSPFEFSGRVNEIWMLFDTMAASDM

SEQ ID NO: 2970 - protein, 213 aa, Triticum aestivum
MTVEGRVSGGGDGGGKDKFPVGMRVLAVDDDPTCLKVLENLLRRCDYHVTTTGQAATALRMLRENKDQFDLVISDVHMPDMDGFKLLELVGLEMDLPVIMLSANGETQTVMKGITHGACDYLLKPVRLEQLKTIWQHVIRRNTKNRGSDNDDAGQKGPNAEGENGGANRNKRQSRRDRDENGDDGDDSDENSNDNGDSSSQKKPRVVWSVELH

SEQ ID NO: 2971 - protein, 365 aa, Triticum aestivum
MKLVHRNLTRNGPGSAKLLPEEEDDLWHAYNLIAVGDSLQAVTVRKVLRDSASGGRDAERVKLKLEIVVESVDYDKEGNVLRVRGKNITENDHVKIGQFHTLELELKRPFVLRKEYWDWLALDTIQQACDPTASADLAVILMQEGLAHLFLIGRSITATRSRIETSIPRKHGPAIAGYESALKKFFEHVLQALLKHIDFEVVQCVVIASPGFTKDQFRDYMHLEAARRDLRVIIENKSRIILAHAPSGYKHSLKEVLDTPGVMSLIKDTKAAQEDSARACYGPKHVEVAHERLAIQTLLMTDTLFRNTDIASRRKYVNLVESVKKYGGTVHIFSSMHVSGDQLAQLTGIAAILRFPLPDLEDIEM

SEQ ID NO: 2972 - protein, 418 aa, Triticum aestivum
MAMDESPQLFLCPISMELMEDPVTVSTGVTYDRRSIERWFFKYGKTTCPATMQRVASLDLTPNHTLKRVIASWQDRASTSSSPSSPAGAFKPMARERLPSVLAGIEGTPFKVTALKGLRLCMAGDQAARDDFVACDGIQVLGRVMAQALAESGAGGDFSAFRTCEEAAAVLATLPLSDEESVDLVLRPECMRPMVALVQRGSADARLHAMSILAKVSEASGARNWTEDVDVDDMVKSLLDLLSDGASSKLSSRALDVLIDVTARSRSRGGARRGKGVVEVGAVRVLVELLPEADRHVTERALLLLKRLCKCPEGRLAFAEHGLAVAAVVRTVLRVSGLATRLAVNVLWLVSCAARPTERVLDDMVASGGVAKLLALLQADSSPSTKEKVARMLRVHGAFWRQYPCIPADLKDYLKFLK

SEQ ID NO: 2973 - protein, 286 aa, Triticum aestivum
  misc_feature (213)..(213): Xaa can be any naturally occurring amino acid
  misc_feature (236)..(236): Xaa can be any naturally occurring amino acid
  misc_feature (241)..(241): Xaa can be any naturally occurring amino acid
  misc_feature (244)..(244): Xaa can be any naturally occurring amino acid
  misc_feature (258)..(258): Xaa can be any naturally occurring amino acid
  misc_feature (262)..(262): Xaa can be any naturally occurring amino acid
  unsure (1)..(286): unsure at all Xaa locations
SNLIGAETFSHDLPELPELDDLFYPKGVILDAQNRAAELFGSSKTWFLINGSTCGIQAAVMATCSPGDYIIIPRNCHISVISALVLSGAVPKYIVPEYNSAWDIAGGVTPSQVDKALKELEKDGKKVGAVLVTSPTYHGICSDVQGIVDVCRSLHIPVIVDAAHGAHFRFHHSFPSTAIEQGADLAVQSTHKVLNSLTQSSMLHMAGGLVDAXKVSQCLQLLQSSSPSYLLLSSLXAARAXLSXNAKSFDEPVAMALXTRDXLMVIPGLSVLDLSCFASDFPAIDP

SEQ ID NO: 2974 - protein, 249 aa, Triticum aestivum
VTYRTSLYKKAVWYRSGIPGISSTHASGSFTGRFVIEIEFLDLKVADSAGGDPASSRASHQIKQSSDNTALSSLARMLQEGILCDITINADDGSIRAHRAILAARSPVFRSMFSHDLREKELSTVDISDMSLDACRGFLNYIYGDLHSEEFLAHRLALLGAADKYDIADLKEACLESLLEDIDARNVIERLQTGHLYRLQRLKDSCIRFLVDFRKVYEMQEEFSAFLQTADRDLVAEVFQGVLAAWSGR

SEQ ID NO: 2975 - protein, 259 aa, Triticum aestivum
  misc_feature (20)..(20): Xaa can be any naturally occurring amino acid
  misc_feature (236)..(236): Xaa can be any naturally occurring amino acid
  unsure (1)..(259): unsure at all Xaa locations
MVEEVWAEINREPCPVHAQXEAAQPSQQPPVQPSVAANNRQGTLGEMTLEQFLVKAGVVRGSGAGGQAPVPVDMVHGQMNPAQQGQQPDTMMYPMAPANGMFPVMGDGMGFIPNVYAGIVVVPPPPPSQGGVGIVSPGSSDGRSAMTQADMMNCMGDGAMMESGGTRKRGASEDQSCERSIECRHRRMIKNGESAARSRARKQAFTVELEAELNHLKEENARLKAEEKIILLTKKXMVCTFYYHHLAILLHSQPPTNCL

SEQ ID NO: 2976 - protein, 398 aa, Triticum aestivum
MCGGAILKDLKVPAPARKVTAAVLWPEKNKPKRADGGARRLAGLGRRGGLGLDDGEVDFEADFEEFEADSGDSDVELGRAGVAGKDGDDEVVEIKPFAAVKRSLSQDDLSTMTTAGFDGPAQRSAKRKRKNEFRGIRQRPWGKWAAEIRDPSKGVRVWLGTFNSAEEAARAYDVEARRIRGKKAKVNFPEEPTVPQKRRACPAAPKVPKSSAAQEPTVIPAVNNLANPNAFVYPPADFASKQPLVQPDNVPYVPAINSAAPVEAPVMNMYSDQGSNSFGCSDLGWEYDTKTPDISSIAPISTIAEGTESALLQSNTYNPAVIAEGAESAPVQSNTYNSVVPPVMENNAVDFEPWMRFLLDDGVDEPIDSLLNFDVPQDVVGNMDLWSFDDMPICGKIF

SEQ ID NO: 2977 - protein, 276 aa, Triticum aestivum
MAKARTTTTTLLLVAAALLVASCSAWEVNIRMPTSAADVEEAVVAPLIHALRPLLGSGKHAGVACDSWVLGVEAHNVRDWKTVPASCESYVGHYMLGSHFRRDSKIVIDQALAYVDSLKLAGNGKEVWVFDIDETTLSNLPYYAKHGFGATPFNATSFNAYVREGSAPALPETKRLYNKLRSVGIKPVFLTGRTEDQRAITVTNLRRQGISGWMNLLLKQPGFKGSAVTYKSGERQKLQDAGYVIVGNIGDQWSDILGAPEGARTFKLPDPMYYIG

SEQ ID NO: 2978 - protein, 207 aa, Triticum aestivum
MRRGGGAATAVAAAAEAERDAGARFRGVRKRPWGRYAAEIRDPAKKARVWLGTFDSAEDAARAYDAAARMLRGPKAKTNFPLSLPHHHQLQASYSPYPVAAAAAVPTSVAAAAARPACSSLSSTVESFGGPRARPVLPPRPPPPPILDGDCHSDCGSSASVVDDDCADAAASPSCGLLLPFDLNLPPEFGGVACNDDDELKLTALRL

SEQ ID NO: 2979 - protein, 157 aa, Triticum aestivum
MAGMVFGLDAPMMAALQHLLDIPDGEAEPPPEKQGPTRAYVRDARAMAATPADVKELPGAYAFVVDMPGLGSGDIKVQVEDERVLVISGERRREEKEDAKYLRMERRMGKLMRKFVLPENADMEKISPCRDGVLTVTVDKLPPPEPKKPKTIQVQVA

SEQ ID NO: 2980 - protein, 312 aa, Triticum aestivum
  misc_feature (2)..(2): Xaa can be any naturally occurring amino acid
  misc_feature (52)..(52): Xaa can be any naturally occurring amino acid
  misc_feature (228)..(228): Xaa can be any naturally occurring amino acid
  misc_feature (282)..(282): Xaa can be any naturally occurring amino acid
  misc_feature (305)..(305): Xaa can be any naturally occurring amino acid
  unsure (1)..(312): unsure at all Xaa locations
LXEQAIEYVKQAVQEDNAGNYVKAFPLYMNALEYFKTHLKYEKNPKIKEATXAGGDDSDQSKLRAGLNSAIITEKPNIKWNDVAGLESAKQALQEAVILPVKFPQFFTGKRRPWRAFLLYGPPGTGKSYLAKAVATEADSTFFSISSSDLVSKWMGESEKLVANLFQMARENAPSIIFIDEIDSLCGPRGEGNESEASRRIKTELLVQMQGVGHNDDKVLVLAATNTXPYALDQAVRRRFDKRIYIPLPDMKARQHMFKVHLGDTPHSLTESDFESLARRTXGFSGSDVAVCVKDVLFEPVRKTXTHVLLAT

SEQ ID NO: 2981 - protein, 504 aa, Triticum aestivum
  misc_feature (204)..(204): Xaa can be any naturally occurring amino acid
  misc_feature (219)..(219): Xaa can be any naturally occurring amino acid
  unsure (1)..(504): unsure at all Xaa locations
MSTCAASLAPLLGTAAANATDYLCNQFADTTTAIDSTYLLFSAYLVFAMQLGFAMLCAGSVRAKNTMNIMLTNVLDAAAGALFYYLFGFAFAFGTPSNGFIGKHFFGLRDVPQVGFDYSFFLFQWAFAIAAAGITSGSIAERTQFVAYLIYSAFLTGFVYPVVSHWIWSADGWASASRTSGPLLFNSGVIDFAGSGVVHMVGGXGRALGRAHRGPPHWXRFDHAGRAVALRGHSASLVVLGTFLLWFGWYGFNPGSFLTILKSYGPPGSIHGQWSAVGRAAVTTTLAGSTAALTTLFGKRLQTGHWNVLDVCNGLLGGFAAVTAGCSVVDPWAAIICGFVSAWVLIGLNKLAARFKFDDPLEAAQLHGGCGAWGVIFTALFARREYVEQIYGAPGRPYGLFMGGGGRLLGAHVVLILVIAAWVSCTMGPLFLALNKLGLLRISAEDQMAGMDQTRHGGFAYAYTDEDSSSRPGRGAGGSVGGFMLKSAQTSQVAADATSPSSSV

SEQ ID NO: 2982 - protein, 348 aa, Triticum aestivum
MGDSGGSVVSVDVERISLGGKEHHIQTNHGSVSVAVYGDHDKPALVTCPDVALNYMSCFEGLLFCPEAASLLLHNFCIYHISPPGHELGAAPISPKTPVPSVDDLADQVADVLDFFGLGSVMCLGATAGAYILTLFAAKCRERVLGLVLVSPLCKAPTWTEWFYSKVESNLLYYYGMCGLVKESLLQRFFSKEVRGCSESPESDIVQGCRSLLDQRQSMNVWRFVEAMNGRYDLTEGLKQLQCRTLIFVGKNSQFHVEAVHMTAKLDRRYCALDEVQACGSLVTEEQPHAMLIPMEYFFMGYGLYKPSELDCSPRSPLSPFCISPELLSPESMGVKLKPIKTRARLQV

SEQ ID NO: 2983 - protein, 331 aa, Triticum aestivum
  misc_feature (207)..(207): Xaa can be any naturally occurring amino acid
  misc_feature (216)..(216): Xaa can be any naturally occurring amino acid
  misc_feature (220)..(220): Xaa can be any naturally occurring amino acid
  misc_feature (227)..(227): Xaa can be any naturally occurring amino acid
  misc_feature (252)..(252): Xaa can be any naturally occurring amino acid
  misc_feature (267)..(267): Xaa can be any naturally occurring amino acid
  misc_feature (284)..(284): Xaa can be any naturally occurring amino acid
  unsure (1)..(331): unsure at all Xaa locations
MEMTVNGRDTEHHLGLGLGLGLSLGMSGTTSPVEPAAPQHAVTAAAPSTLGRQQQLSWNGAGLFFPASSGEQRSHADDRRLAALACHEMPFLRGIDVNRAPATGGARGSCAASEDEEPGASSPDSTLSSLSGKRGAPTRSGGGEQERAGAGSDDEDDSGAGGAGSRKKLRLSKDQSAVLEDSFKEHSTPHPKQKAALARQLGLRPRXQVEVWFQNXRRAXTKLKQTXEVDCESLKRCCETLTEENRRLQREXQELRAAQAARPAGAXNLYMRAPPPTTLTMCPXSCERVAPFGKPAFDESRAAMVTRAVPTGPWGPVPVMPVFLGRPAQRS

SEQ ID NO: 2984 - protein, 311 aa, Triticum aestivum
RRYWDYNCLDYHEKVVDGFYDIFDPSMESSRQGKMPSLEDLQTGIGDLGFEVIVINRAVDTALQEMEQVAQCILLDFPVANITLLVQRIADLVTDNLGGPVKDANAMLARWSETSTQLRTSLHTSLLPIGCIKLGLSRHRALLFKILADSVGIPCKLVKGSNYTGDEDDAVNIIKVDKEREFLVDLMAAPGALIPADVLSWKGSSSNSNHKLGQKPGLNQMAGSSSTIYPTLGANALPLEHKGNQLPLLNSGDWISASQSGYEKEAAITHSQTSSSGTPSVTAADVFDGSWTLVPHAQSDEPSTSAGTSSQ

SEQ ID NO: 2985 - protein, 159 aa, Triticum aestivum
MAGMVFGLENPMMTALQHLLDIPDGETGAPGGEKQGPTRAYVRDARAMAATPADVKELPGAYAFVVDMPGLGSGDIQVQVEDERVLVISGERRREEKEDTKYLRMERRMGKLMRKFVLPENADMEKISAACRDGVLTVTVEKLPPPEPKKPKTIQVQVA

SEQ ID NO: 2986 - protein, 322 aa, Triticum aestivum
MASSSSCRAWHCLLALFLLSSSAYSQLSPSFYAKSCPTLQLIVRATMIKALLAERRMGASLLRLHFHDCFVQGCDGSILLDDVGSFVGEKTAFPNVDSVRGYEVIDEIKKNVELLCPGIVSCADIAALAARDGTFLLGGPSWSVPLGRRDSTTASLTEANSDLPAPSLSLNLLIKAFDKKQLSPQDLTALSGAHTIGFSQCLNFRDHIYNGTNIDPAFATLRKRTCPAQAPNGDKNLAPFNVQTQLLFDNAYYRNLVAKRGLLNSDQVLFNGGSQDALVRQYVANPALFASDFVTAMIKMGNINPLTGTAGQIRRNCRVVNS

SEQ ID NO: 2987 - protein, 550 aa, Triticum aestivum
  misc_feature (192)..(192): Xaa can be any naturally occurring amino acid
  unsure (1)..(550): unsure at all Xaa locations
MSSNPSYQQQLGLDAMTTCFFGGSGMIGSSEAPFFYPGMPHDAGFGSGGAEVAAHFMASSAVMVTSPANQLVWSAAPSRDSHQASMSTDEMNDDAYAVAGESCSTVHSMLPSASGSADFFQYGPAEVTIAQPSKMAKLITGEPHCGWPYDGPSAASTHQPYYLTAFSGGGDLPDAVAGAASGLSLRLGAQSXRSPWRGMPEQSSEVSCSGLTHVNSEGFGYQQPQAVRAHAGAGQFHLPPYGEVGAGDYELRHVYPQMYSRAPHFSQVLPRSGYAHIAQELLNGFAGCLLKDVAEMTDDSVSDIGSEASLLLSSSCSARTPSSVSSNQLMLPSDEHSADGGRWMEAQRVRNDLLKLLQLMDQRCNRCFDDIQTTASKFSSMVAHPGGGGGAIAPPPFAQRALSAVYRRLRKRITGLIVAVAQRSGGHGEPSSLADKERSWESSFIQKHWALQQLRRGDQQSWRPQRGLPEKSVAVLKAWMFENFLRPYPKDHEKDMLAARSGLSRSQVSNWFINARVRLWKPMIEEMYEELKRSSGRGDAEHQSSKDVVG

SEQ ID NO: 2988 - protein, 253 aa, Triticum aestivum
PVKMVLSGEGSDELFGGCLYFRKAPNKKEFHEETCRKIKALHLYDCLRANKATSAWGLEARVPFLDKNFINVAMDLDPESKMIRRDLGRIEKWVLRNAFDDDEKPYLPKHILYRQKEQFSDGVGYSWIDGLKDHANAHVSDSMITNASFVYPENTPTTKEAYYYRTVFEKFYPKNAARLTVPGGPSVACSTAKAVEWDAAWSKLLDPSGRAALGVHDAAYEEEKAPALADHVFRPPAHGESILVETGVPAAAV

SEQ ID NO: 2989 - protein, 306 aa, Triticum aestivum
TRPPSLSLSSRFPPVALPLAPSSDLHLPPLSFRLLVFFLPSFSAVSRFVFVFPERRRRRWWSGGAAGDSGRSSSICLCSWSSRARGAEMAAQEQEQQAKTSTTSSLPSSSDRSSSSGPNNLKEGGAESDEEIRRVPEMGGGSASSGAGDGKQLQLAAAGGGQAPAGKKRGRAAGDKEQNRLKRLLRNRVSAQQARERKKAYMTELEVKAKDLELRNAELEQKVSTLQNENNTLRQILKNTTAHAGKKPSGGKGGDGGKKHHHTSARASSKSELLCSAATMVVARNHRTSAHLTIVRTLLLLFAAAV

SEQ ID NO: 2990 - protein, 482 aa, Triticum aestivum
  misc_feature (226)..(226): Xaa can be any naturally occurring amino acid
  misc_feature (242)..(242): Xaa can be any naturally occurring amino acid
  misc_feature (263)..(263): Xaa can be any naturally occurring amino acid
  misc_feature (267)..(267): Xaa can be any naturally occurring amino acid
  misc_feature (312)..(312): Xaa can be any naturally occurring amino acid
  misc_feature (321)..(321): Xaa can be any naturally occurring amino acid
  misc_feature (334)..(334): Xaa can be any naturally occurring amino acid
  misc_feature (342)..(342): Xaa can be any naturally occurring amino acid
  misc_feature (357)..(357): Xaa can be any naturally occurring amino acid
  unsure (1)..(482): unsure at all Xaa locations
MPYDIDISLFRSLSLHILLSHISLSLLSIAQGKAGRQNMGTQAAENFEPPAKDVRTDEQKKIDDWLPITSSRNAKWWYSAFHNVTAMVGAGVLSLPYAMSELGWGPGIAVLIISWVITLYTLWQMVEMHEMVPGKRFDRYHELGQHAFGDKLGLWIVVPQQLIVEVGVNIVYMVTGGRSLKKFHDVICDGKCKDIKLTFFIMIFASVHFVLSQLPNLNSISGVSLXAAAVMSLSYSTIAWGXASVDKGKMVDVDYNLRATTTXGRVXGFFGALGEVAFAYAGHNVVLEIPGHIPSTPEKASKKAHVEGVVVXYIVVALCYXPVALIGYWASGTXVDDNISSXSQAHWLIARQMMVSXVIGQIYAMPVFDMIETVLVKKLKFPPGLTLRLIARTLYVAFTMFVAITFPFFGGLLGFFGGFAFAPTTYFLPCIMWLAIYKPKRFSLSWFTNWVCIVLGVCLMILSPIGGLRQIILDSKTYKFYS

SEQ ID NO: 2991 - protein, 141 aa, Triticum aestivum
AYLGDSIEQVCTKKQAGTGPEFPGYRRPTRPQRTLSIGSKPDPSNSDSSLSFPLPQVSEIHATITCKNKGFYLTDLGSEHGTWFNDNEGRRYRLPPNFPVRFHPSDAIEFGSDKKAMFRVKVLSTLPYDSARGGEEVLQAA

SEQ ID NO: 2992 - protein, 142 aa, Triticum aestivum
MRMNMPQGLTPAPASMTIPMSHSSRPTLGFPLGTALLLLVIFSLSGIFSCCYHWDRLRSLLWSRHPGMLQDGPHTVISVGPTPSKASSEHKSEKAGKECGLPVIMPGDNIAKFYARPCPHEACLSAAAEKGEVEVQVRCSVS

SEQ ID NO: 2993 - protein, 448 aa, Triticum aestivum
  misc_feature (384)..(384): Xaa can be any naturally occurring amino acid
  misc_feature (394)..(394): Xaa can be any naturally occurring amino acid
  unsure (1)..(448): unsure at all Xaa locations
MGTQASPDNYTPPKDERTAREKAIDDWLPITSSRKAKWWYSAFHNVTAMVGAGVLSLPYAMSELGWGPGIAVMTLSWIITVYTLWQMVEMHEIVPGKRFDRYHELGQHAFGDKLGLWIVVPQQLVVEVSLNIVYMVTGGNSLKKFHDVICDGKCKDIKLTYFIMIFASVHFVLSQLPNFNSISGISLAAAVMSLSYSTIAWGASLDKGKAENVDYSLRASTTPGQVFGFLGGLGDVAFSYSGHNVVLEIQATIPSTPGNPSKKPMWKGVVVAYIIIAACYMPVAFIGYWAFGNSVDDNILITLNKPKWLIAMANMMVVVHLIGSYQIYAMPVFDMMETFLVRKLEFAPGITLRLITRTIYVAFTMFVGMTFPFFGGLIGFFGGXAFAPTTYFLXPCIMWLIICKPRRFSLSWFTNWICIVLGVILMIIAPIGGLRQIIISAKTYKFYS

SEQ ID NO: 2994 - protein, 384 aa, Triticum aestivum
MMMMSEGVSVPPWGSHLPVSGVDAGGGGGGDETPFLFAALRQYLPCNDLVGAGAGAEDEDEAAAMAAAVDAYACDEFRMYDFKVRRCARGRSHDWTECPFAHPGEKARRRDPRKYHYSGTACPDFRKGGCKRGDACEYAHGVFECWLHPARYRTQPCKDGTACRRRVCFFAHTPDQLRAMPSQHSSPRSTPLSPLAESYDGSPLRRQAFESYLSKSIMSSSPTSTLLSSPPKSPPSESPPLSPDGAASYRRGSWPGVGSPVNDVLASLRQLRLAKAQASPSGGWSGYPTSPAAYGSPKAAGLYSLPTTPMGTQTSASSFMANLEPLNLRFIDDEEPVQRVESGRALREKVFERLSRDGAAPRSCEVVGAGAGGPDVGWVSDLIN

SEQ ID NO: 2995 - protein, 207 aa, Triticum aestivum
  misc_feature (47)..(47): Xaa can be any naturally occurring amino acid
  unsure (1)..(207): unsure at all Xaa locations
MGEASPESSGAAAGGPSMPGPPRKGKSCKGCLYYSSVLKSRGYNPIXAWGIPRSIPQVPGFVVEEPREEAAAQGHDLRQFKYACAGYSMFVDDRDAKSGENDAKALLPYCQGLELLVDSRMVERKSQAVEHASARNPKPKEAAAAATQPQEQGQRPQLARQEFMARFRRSAGLVASGVAKNLNKTGTYIKQNVEDIFSPDRRPPPKQ

SEQ ID NO: 2996 - protein, 605 aa, Triticum aestivum
  misc_feature (594)..(594): Xaa can be any naturally occurring amino acid
  unsure (1)..(605): unsure at all Xaa locations
MAAPSPTTAAATHHRALLPAPARRAALSLARASRGRICVSAPAAPAASTASPPATAAVAVEGKPTVLVAEKLGAAGLALLREFANVDCSYGLSPEELRASAPRCDALIVRSGTKVGRDVFEASGGRLRVVGRAGVGIDNVDLAAATEHGCLVVNAPTANTVAAAEHGIALLCAMARNVAQADASLKAGKWARTKYVGVSLVGKTLAILGFGKVGSEVARRAKGLGMHVIAHDPYASADRARAIGVDLVSMEEAMTTADFISLHMPLTPSTNKMLNDEAFAKMKKGVRIINVARGGVIDEDALVRALDAGIVAQAALDVFTKEPPAADSKLVLHENVTVTPHLGASTVEAQEGVAIEIAEAVTGALKGELAASAVNAPMVPAEVLSELAPYVVLAEKLGRLAVQLVAGGGGIKSVKVTYASARAPDDLDTRLLRAMITKGVIEPISDVFVNLVNADFTAKQRGIRVSEEKIVMDGSPETPLEYIQVQIANVDSKFPSAICDSGLVTVEGRVKDGIPHLTKVGAFEVDVSMEGSLILCRQVDQPGMIGSVGSVLGEENVNVSFMSVGRIAPRKTAIMAIGVDEEPSKATLTKIGEXPCDRRFVLLKL

SEQ ID NO: 2997 - protein, 477 aa, Triticum aestivum
  misc_feature (107)..(107): Xaa can be any naturally occurring amino acid
  misc_feature (324)..(324): Xaa can be any naturally occurring amino acid
  misc_feature (347)..(347): Xaa can be any naturally occurring amino acid
  misc_feature (355)..(355): Xaa can be any naturally occurring amino acid
  misc_feature (364)..(364): Xaa can be any naturally occurring amino acid
  unsure (1)..(477): unsure at all Xaa locations
MPLPMRRLAAAPSLPAVHPHDSPAPPSVRLRRQHGRVSMERSSTTTARGVSCVMASGKEHAATTSGDEKKGGLRGKLKKVVLAYSGGLDTSVIVPWLRENYGCEVVXFTADVGQGDIELEGLEKKAKASGASQLVVKDLTEEFVGEYIYPCLRAGAVYERKYLLGTSMARPVIAKAMVDVAKEVGADAVAHGCTGKGNDQVRFELTFYALNPELKVVAPWREWDITGREDAIEYAKKHNVPIPVSKKSIYSRDRNLWHLSHEGDILEDPANEPKEDMYMMSVSPENAPSKPEYLEIGIVAGVPTSINGKDLSPATLLAKLNEIXGKHRIGRIDMVENRLVGMKSRGXVYETPGGXTIMAAAVRXLQSLTLDRETMQWKDMLALKYAELVYAGRWFDPLRLSMDAFMETITATTTGSVTLKLYKGSVTVASRKSPYSLYREDISSFENGEIYDQADAEGFIRLYGLPTRVRAMLEKGI

SEQ ID NO: 2998 - protein, 249 aa, Triticum aestivum
SKTDLVSLKASMEKAPGTSIEAIIRRLRLHQAPPSPYSGDPSTAATPAAANLFQPRRAAVLVCLFHDAAGELRVLLTKRASSLSTHSGEVALPGGKAEEGDADDAATALREAKEEIGLDPALVTVVSSLEHFLSKHLLVVVPVVGILSDIQAFKPVLNVDEVDDIFDVPLEMFLKDERRRSEEREWMGQAFTLHHFDYEKGDKTYVIWGLTAGILIHAASVVYQRPPDFAERRVQFNLPKYSQESSPMP

SEQ ID NO: 2999 - protein, 355 aa, Triticum aestivum
  misc_feature (151)..(151): Xaa can be any naturally occurring amino acid
  unsure (1)..(355): unsure at all Xaa locations
MASLADLVNLDLSDCTDKIIVEYLWVGGSGIDIRSKARTVNGPITDASQLPKWNYDGSSTGQAPGEDSEVILYPQAIFKDPFRRGDNLLVMCDCYTPQGVPIPTNKRHNAAKIFNTPKVAAEETWYGIEQEYTLLQKDVNWPLGWPIGGYXPGPQGPYYCAAGADKAFGRDIVDAHYKACLYAGINISGINGEVMPGQWEFQVGPSVGIAASDQLWVARYILERITEVAGVVLSLDPKPIPGDWNGAGAHTNYSTKSMREAGGYEVIKTAIEKLGKRHAQHIAAYGEGNERRLTGHHETADINTFKWGVADRGASVRVGRDTEKDGKGYFEDRRPASNMDPYVVTSMIAETTLLL

SEQ ID NO: 3000 - protein, 285 aa, Triticum aestivum
MEPGRLIFNTSGSGNGQMLFMDCGAGGIAGPVLERSFEEENKLEPERKTELARKLGLQPRQVAVWFQNRRARWKTKTLERDFDRLKASFDALRADHDALLQDNHRLRSQVVTLTEKMQDKEAPEGSFGAAADASEPEQAAAEAKASLADAEEQAAAAEAFEVVQQQLHVKDEERLSPGSGGSAVLDARDALLGSGCGLAGVVDSSVDSYCFPGGAGGDEYHECVVGPVAGGIQSEEDDGAGSDEGCSYYPDDAAVFFAAAQGHGHHRTDDDDQQDDGQISYWMWN

SEQ ID NO: 3001 - protein, 199 aa, Triticum aestivum
  misc_feature (137)..(137): Xaa can be any naturally occurring amino acid
  unsure (1)..(199): unsure at all Xaa locations
MCGGAILAELIPGAPARRATSGHGHVWPGKGAKQTKAAAADDFEAAFREFNEDSDVEDDVVMVMERREEVAESKPFVFAASPKKQQQEEEEAAPVRRRKPAQYRGVRRRPWGKWAAEIRDPVKGVRVWLGTFPSAEXAAALAYDEAARAIRGPRAKLNFSSSSAVAAAAPGARKRGRSRVSLEGPKLTRTQLSCTKWPL

SEQ ID NO: 3002 - protein, 313 aa, Triticum aestivum
MCGGAILAELIPPSAAGRAPKQVAAGQASSKKGGMSKRHHSSIPDVDDFEAAFEDFDDDFDLQAEEDGGDHVVFASKPAFYPAYGGGRRAVQAASMKKRVLHGIRQRPWGKWAAEIRDPHKGTRVWLGTFDTADDAARAYDVAARRLRGSKAKVNFPDAARAGARPRRASRRTAQKPPCPPAGTTAYSATAASRAQPEQDTMMAKPERMEFSDVDTFVDLTAAVAALPPVTASSFADKMPRVDEDSSEGSGGGAMLGFADELGFEPFMMFQYESMDSLFAGHAVIQDARGVDGGMDGVSLWSFDEFPMDSAIF

SEQ ID NO: 3003 - protein, 366 aa, Triticum aestivum
  misc_feature (240)..(240): Xaa can be any naturally occurring amino acid
  misc_feature (253)..(253): Xaa can be any naturally occurring amino acid
  misc_feature (305)..(305): Xaa can be any naturally occurring amino acid
  unsure (1)..(366): unsure at all Xaa locations
HYRTSLYKKAGWYRSGIPGISSTHASVIAEYIWIGGSGMDLRSKARTLPGPVTDPSKLPKWNYDGSSTGQAPGEDSEVILYPQAIFKDPFRKGNNILVMCDCYTPAGVPIPTNKRYNAAKIFSNPDVAKEEPWYGIEQEYTLLQKDINWPLGWPVGGFPGPQGPYYCSIGADKSFGRDIVDAHYKACLFAGVNISGINGEVMPGQWEFQVGPTVGISAGDQVWVARYLLERITEIAGVVXVTFDPKPIPGDWXNGAGAHTNYSTESMRKDGGFKVIVDAVEKLKLKHKEHIAAYGEGNERRLTGXHETADINTFSWGVANRGASVRVGRETEQNGKGYFEDRRPASNMDPYVVTSMIAETTILWKP

SEQ ID NO: 3004 - protein, 161 aa, Triticum aestivum
  misc_feature (106)..(106): Xaa can be any naturally occurring amino acid
  unsure (1)..(161): unsure at all Xaa locations
MGTAFSSSSSTPESRAMALAKAKEIVASAPVVVFSKSYCPFCVQVKKLFTQLGASFKAIELDTESDGPEIQSALAEWTGQRTVPNVFINGKHIGGCDDTVALNKGXGKLIALLTEGWERISGSSSKTTVTPLALVCEVVVVDMLVCYMIYIVPRVMKYEVF

SEQ ID NO: 3005 - protein, 332 aa, Triticum aestivum
MAANVGESAAVGGSSSDAAGGSFECNICFELPQEPIVTLCGHLFCWPRLYRMKGRRGNTTRPSLWIRLAGRQVSARRAARRPAGRRSPEVSTVKKLKMSANVGESAAVGGSSSDAAGGSFECNICFELPQEPIVTLCGHLFCWPCLYRWLHMHANTPECPVCKAIVEEDKLVPLYGRGKDRVDPRSKNTPGADIPQRPAGQRPATAQQADPNNNFGNAHANPWFMGMGGAGAGVPLANGRWGNYAFSAAFGGLFPMLSFQMHGFPDPAAYAQPAGFHYGFGHGHGFHGGHMGHAHGVPRQGPLGQQQQQADVYLKALLIMVGVLVIASLLAA

SEQ ID NO: 3006 - protein, 381 aa, Triticum aestivum
  misc_feature (49)..(49): Xaa can be any naturally occurring amino acid
  unsure (1)..(381): unsure at all Xaa locations
MCGGAILAGFIPPSAAAAAAKAAAAKKKQQQRSVTADSLWPGPAEKGGXEEDFEADFRDFERDSSDDDAVVEEVPPPPASAGFAFAAAAEVAPPAPARLDAVQHDGPAAKQVKRVRKNQYRGIRQRPWGKWAAEIRDPSKGVRVWLGTYDTAEEAARAYDAEARKIRGKKAKVNFPEDAPTVQKSTLKPTAAKSAKLAPPPKACEDEPFNHLSRGDNDLFAMFAFNDKKVPAKPAESVDSLLPVKPLVPTETFGMNMLSDQSSNSFGSTDFGWDDEVMTPDYTSVFVPNAAAMPAYGEPAYLQGGAPKRMRNNFGVAVLPQGNVAQDIPAFDHEMKYSLPYVESSSDGSMDSLLLNGAMQDGASSGDLWSLDELFMAAGGY

SEQ ID NO: 3007 - protein, 391 aa, Triticum aestivum
  misc_feature (234)..(234): Xaa can be any naturally occurring amino acid
  misc_feature (270)..(270): Xaa can be any naturally occurring amino acid
  unsure (1)..(391): unsure at all Xaa locations
MRGSRWCCCCFGRGGGGGAGRSGSVGDDGLVWDVGLKAHASGEYSVAVAQANEALEDQAQVLVSPAATLVGVYDGHGGPDAARFVNARLFSLIQEFASQSGGISAQVIKRAFGATEEEFMGMVERSWPSQPRLLSVGSCCLVGAIEGGTLHVANLGDSRAVLGRLASAGGKKRRAVVAERLSRDHNVADEEVRREVAEAHPDDPHIVMSSHGVWRIKGIIQVSRSIGDAYLKRXRLCSPAVMQSLCPFPLRRPVMSAVPSVTSRRLRPGXDQFIIFASDGLWEQLSDQAAVGIVSRSPRKGVAMRLVPAPQLEAARKKGLKSESIAAIEKGRRRRFHDDITVVVLFLDSRCEGTPQPTAGAGGIDGTRAPVDVFSLGPDDHGDDPTRPVLR

SEQ ID NO: 3008 - protein, 244 aa, Triticum aestivum
MRRKQNMHENGTIMIQFGQQVPNCESSASDSPQEVSGMSEGSFNEQNDQSGNRDGYTKSDEGKMMSALSLGNSETAYTPPKPDRTHPFAISYPYADPYYGGAVAAYGTHAIMHPQMVGMVPSSRVPLPIEPAAAEEPIYVNAKQYHAILRRRQLRAKLEAENKLVKSRKPYLHESRHQHAMKRARGTGGRFLNAKEKSEAASGGGNASARSGHAGVPTDGGGMFSKHDHTLPSGDFHYRARGGA

SEQ ID NO: 3009 - protein, 363 aa, Triticum aestivum
MAAQLTAALPSYSPATTKAAAGGSSPSSHFLAYPSRPRNVRNGVRAQVSTTEPTAEPAPAAPAKPVKISKKQDEGVVTNKYRPKEPYVGRCLLNTRLTGDNAPGETWHMVFSTEGEVPYREGQSIGVIADGEDKNGKPHKLRLYSIASSALGDFGDSKTVSLCVKRLVYTNDAGEVVKGVCSNFLCDLKPGSEVKITGPVGKEMLMPKDPNATIIMLATGTGIAPFRSFLWKMFFEEHEDYKFNGLAWLFLGVPTSDTLLYKEEFEKMVEIGGENFRLDFAVSREQTNAAGEKMYIQTRMAEYKEELWEMLKKDNTYVYMCGLKGMEKGIDDIMVDLAAKDGIDWIDYKKQLKKAEQWNVEVY

SEQ ID NO: 3010 - protein, 834 aa, Triticum aestivum
  misc_feature (492)..(492): Xaa can be any naturally occurring amino acid
  unsure (1)..(834): unsure at all Xaa locations
QVCTKKQAGTGPEFPGISSTHASADGAWEFSWDQDSLLRQLKEALRAHQGRAHMDFVYIGGLRDDIPAEEQDKVALELYDRFRCVPAFLPDDLRSRFYHGFCKQQLWPLFHYMLPLSPELGGRFDRDLWKAYLSVNKIFSDKILEVINPEEDFVWVHDYHLMVLPTFLRKKFNRVRLGFFLHSPFPSSEIYKTLPVREEVLRALLNADLIGFHTFDYARHFLSCCSRMLGMKYESQRGYIGLEYYGRTVTVKILPVGIHLTQLQAVLNLPETGLKVAELMKEFPDRHRIMMLGVDDMDIFKGISLKLLAFEELLTQHPEYRGKVVLVQIANPARGKGKDVKEVQDESYAMVKRINEAFGQPDYQPVILIDRPLHFYERMAYYVVADCCLVTAVRDGMNLIPYEYIIARQGNEKIDRILGLSPFTRKKSMLVVSEFIGCSPSLSGAIRVNPWNIESVAEAMDKALHTGEGEQALRHEKHHKFVSTHDVGYWAXNSFLQDLARTCQDHNKRRCWGIGFGLRFRVVALDTSFKKLAAEHLVSAYRKATTRAILLDYDGTLMPESSFGKMPSSKTINMLNSLCRDEKNLVLIASTKTRATLSEWFSACEDLGLAAEHGYFIRLERDAEWETCGLSTDFSWKQIAEPVMKTYTETTDGSIIEDKETAIVWCYKDADRDFGSCQAKELHDHLESVLSNEPVSVKADLHYVEVKPQGVSKGLVAKRMLSTMQELGLQPDFILCVGDDRSDEDMFEVITTAVDGPYLSPSATVFACTIGQKPSKAKYYLDEPADIKRMIRALASVSDQELALEEGEELEEGEDPPYPFLAGDGTSSDDTWLD

SEQ ID NO: 3011 - protein, 204 aa, Triticum aestivum
MPRSGALPLLAALVLALAAAAAASASNSKGAPAATDFIRKSCRETQYPSVCMQSLSSYGKPPPRSPQELARAALSVSADRARSASAYVGRICGPGLRSGSGAKAKSSPARDCLENMADSVGHLRDAAKELDGSLGRAGSPAFRWHLSNVQTWCSAALTDENTCLDGLSRGVDAGTRAAIRSKVVEVAQVTSNALALVNKVGSGH

SEQ ID NO: 3012 - protein, 362 aa, Triticum aestivum
MAAQLTAALPSYSPATTKAGGGSSPSSHFLAYPSRPRNVRNGVRAQVSTTEPTAEPAPAAPAKPVKISKKQDEGVVTNKYRPKEPYVGRCLLNTRLTGDNAPGETWHMVFSTEGEVPYREGQSIGVIADGEDKNGKPHKLRLYSIASSAIGDFGDSKTVSLCVKRLVYTNDAGEVVKGVCSNFLCDLKPGSEVKITGPVGKEMLMPKDPNATIIMLATGTGIAPFRSFLWKMFFEEHEDYKFNGLAWLFLGVPTSDTLLYKEEFEKMVEIGGENFRLDFAVSREQANAAGEKMYIQTRMAEYKEELWEMLKKDNTYVYMCGLKGMEKGIDDIMVDLAAKDGIDWIDYKKQLKKAEQWNVEVY

SEQ ID NO: 3013 - protein, 237 aa, Triticum aestivum
MVTVREETRKGPWTEQEDMQLVCTVRLFGERRWDFIAKVSGLNRTGKSCRLRWVNYLHPGLKRGRMTPHEERLILELHARWGNRWSRIARKLPGRTDNEIKNYWRTHMRKKAQERKRNMSPSSSSSSVTYQSIQPQTPSIMGIGEQELHGGSSCITSILKGTPADMDGYLMDQIWMEIEAPSGVNFHDGKDNSYSSPSGPLLPSPMWDYYSPEAGWKMDEIKMAPQVSYSKGIGPSY

SEQ ID NO: 3014 - protein, 189 aa, Triticum aestivum
MGAITSAELNFLVFRYLQESGFVHAAFTLGYEAGIHKGGIDGNVVPPGALITIVQKGLQYIELEANTDENDQEVEKDFALLEPLEIITKDVEELQQIVKKRKRERLQIDCDKDKGKAKECIEEHEHRLGGERERERHDKEKDQEMEKDRTERDKVQEKEKEREKQHTEHIDKVKHEEDPLASGGPKPMD

SEQ ID NO: 3015 - protein, 369 aa, Triticum aestivum
  misc_feature (354)..(354): Xaa can be any naturally occurring amino acid
  unsure (1)..(369): unsure at all Xaa locations
WIPPAPHSSPPPFSVSVSCSLSPISTPLGVVLVHSAAARSRSELGFGAAMGSDLRDVCVVGVARTPMGSFLGGLSSLPATKLGSIAIEAALKRANVDPSLVQEVFFGNVLSANLGQAPARQAALGAGIPNTVVCTTVNKVCASGMKATMFAAQSIQLGINDIVVAGGMESMSNAPKYIAEARKGSRFGHDSLVDGMLKDGLWDVYGDCAMGVCAELCADNHALTREDQDAYAIQSNERGIAARDSGAFAWEIVPIEVPVGRGKPAVLVDKDESLDKFDAAKLKKLRPTFKENAGTVTAGNASTISDGAAALVLVSGKKAQELGLQVLARIKGFADAAQAPELFTTTPALAIPKXSQMLARSSRIDFMKQ

SEQ ID NO: 3016 - protein, 504 aa, Triticum aestivum
MGWLTKFFRGSTHNISEGREQSKPAEETRWNEPSTSTVVIDPLSEFDNEDIDRAIALSLLEEEHRKPKETGKDLHLDEDEQLARAIQESLNVESPPRPHENTSPPRARENSAHPRARENGSANGGNSYQQLPFMFSSGFRTCAGCHNEIGHGRFLSCMGAVWHPECFCCHACNQPIYDYEFSMSGNHPYHKTCYKERFHPKCDVCKQFIPTNMNGLIEYRAHPFWLQKYCPSHEVDGTPRCCSCERMEPRESRYVLLDDGRKLCLECLDSAVMDTNECQPLYLEIQEFYEGLNMKVEQQVPLLLVERQALNEAMEGEKTGHHHLPETRGLCLSEEQTVSTILRRPRMTGNKIMEMITEPYRLTRRCEVTAILILYGLPRLLTGSILAHEMMHAWLRLKGYRTLTPDIEEGICQVLAHLWIESEIMAGSGSNAASTSSSSSSSTSSKKGGRSQFERKLGDFFKHQIESDTSVAYGDGFRAGNRVVQQYGLKRTLEHIRLTGTLPF

SEQ ID NO: 3017 - protein, 201 aa, Triticum aestivum
MHPTRWELSYMVDLQAAGLVISVVAAEVKTSAAIAGPSSFVPGDAAADQSYAARGAEEMSTPGGEEDKKPASAGGEGGGAHINLKVKGQDGNEVFFRIKRSTQLKKLMNAYCDRQSVDMKAIAFLFDGRRLRAEQTPDELEMEDGDEIDAMLQQTGRLPSPSKRLKEAFEILLRCPSTRGSSLETHERMKSKKNCEWPMHN

SEQ ID NO: 3018 - protein, 247 aa, Triticum aestivum
  misc_feature (180)..(180): Xaa can be any naturally occurring amino acid
  misc_feature (201)..(201): Xaa can be any naturally occurring amino acid
  unsure (1)..(247): unsure at all Xaa locations
GDLSGPRDWGVYDGDFAYADEDAHAASVEHQLLPPQARRHDRLLVLLLIRAPPPRSSCIYTSFSFDFAPRSIDNQRNFFTSPDDMLEEEYYDEQLPEKKRRLTPEQVHLLERSFEEENKLEPERKTELARKLGLQPRQVAVWFQNRRARWKTKTLERDFDRLKASFDALRADHDALLQDXHRLLSQVVTLTEKDADKEAPXGSFGAAVDASEPEQAAAEAEAKTSWPTPRNKARHGGVRVCSTTQFM

SEQ ID NO: 3019 - protein, 162 aa, Triticum aestivum
MEGRMFGLETPLMTALQHLLDVPDGEAGGPGNAAGEKQGPTRAYVRDARAMAATPADVKELPGAYAFVVDMPGLGSGDIKVQVEDERVLVISGERRREEKEDAKYLRMERRMGKMMRKFVLPENADMEKISAVCRDGVLTVSLEKLPPPETKKPKTIQVQVA

SEQ ID NO: 3020 - protein, 342 aa, Triticum aestivum
MAASFTTSWRCAFLALLALFVSGAYGQLSPTFYASTCPNLTTIVRDAMVTALNPAVGGERRMGASLLRLHFHDCFVEGCDGSVLLDNVPANGSTPAFFGEKNAFGNINSVRGFEVIDTIKAAVEQACPGVVSCADILTLAARDGTFLLGGPTWAVPLGRRDSTTASMDLANRDLPPPFANLVTNPPDGSDLIARFQRKGLSATEMTVLSGAHTIGSAQCQNYRLRLYNENRIDFQFAQGLKANCPQNGPAGDTFLAPLDSTGSTFDNKYYTDLTGLRGLLHSDQVLYPQNNQTQAKIVLKYKGDNTAFFADFAAAMIKMGNLSPLTGTAGQIRTNCRLVNPA

SEQ ID NO: 3021 - protein, 357 aa, Triticum aestivum
  misc_feature (192)..(192): Xaa can be any naturally occurring amino acid
  misc_feature (206)..(206): Xaa can be any naturally occurring amino acid
  misc_feature (231)..(231): Xaa can be any naturally occurring amino acid
  unsure (1)..(357): unsure at all Xaa locations
MASLADLVNLDLSDCTDKIIVEYLWVGGSGIDIRSKARTVNGPITDASQLPKWNYDGSSTGQAPGEDSEVILYPQAIFKDPFRRGDNLLVMCDCYTPQGVPIPTNKRHNAAKIFNTPNVAAEETWYGIEQEYTLLQKDVNWPLGWPIGGYPGPQGPYYCAAGADKAFGRDIVDAHYKACLYAGINISGINGXEVMPGQWEFQVGAXPVGIAASDQLWVARYILERITEVAXGVVLSLDPKPIPGDWNGAGAHTNYSTKSMREAGGYGVIKTAIEKLGKRHAQHIAAYGEGNERRLTGHHETADINTFKWGVADRGASIRVGRDTEKDGKGYFEDRRPASNMDPYVVTSMIAETTLLL

SEQ ID NO: 3022 - protein, 364 aa, Triticum aestivum
  misc_feature (200)..(200): Xaa can be any naturally occurring amino acid
  unsure (1)..(364): unsure at all Xaa locations
MAAQLTAALPSYSPAATKAGGGSSASCTANHFLAYPTRRLRNGVRAQVSTTEPTAEPAPAAPAKPVKISKKQDEGVVTNKYRPKEPYVGRCLLNTRLTGDNAPGETWHMVFSTEGEVPYREGQSIGVIADGEDKNGKPHKLRLYSIASSALGDFGDSKTVSLCVKRLVYTNDAGEVVKGVCSNFLCDLKPGSEVKITGPXVGKEMLMPKDPNATIIMLATGTGIAPFRSFLWKMFFEEHEDYKFNGLAWLFLGVPTSDTLLYKEEFEKMVEIGGENFRLDFAVSREQTNAAGEKMYIQTRMAEYKEELWELLKKDNTYVYMCGLKGMEKGIDDIMVDLAAKDGIDWIDYKKQLKKAEQWNVEVY

SEQ ID NO: 3023 - protein, 233 aa, Triticum aestivum
WYGIEQEYTLLQKDVSWPLGWPVGGYPGPQGPYYCAAGADKAFGRDVVDAHYKACLYAGINISGINGEVMPGQWEFQVGPSVGISAGDEIWVARYILERITEIAGIVLSLDPKPIQGDWNGAGAHTNYSTKSMREAGGYEVIKKAIEKLGKRHTEHIAAYGEGNERRLTGRHETADINTFKWGVANRGASIRVGRDTEREGKGYFEDRRPASNMDPYVVTGMIAETTILWNGN

SEQ ID NO: 3024 - protein, 317 aa, Triticum aestivum
  misc_feature (69)..(69): Xaa can be any naturally occurring amino acid
  unsure (1)..(317): unsure at all Xaa locations
MASASRLGLVVLVAMASAASAQLSSTFYDTSCPNALATIKAGVTTAVQNEARMGASLVRLHFHDCFVDXGCDGSVLLADTGSFIGEQGAAPNNNSIRGMNVIDNIKTQVEAVCKQTVSCADILAVAARDSVVALGGPTWTVLLGRRDSTTASKTNAENDLPPPTFDLQNLTTLFGNKQLSMTDMVALSGAHTIGQSQCRFFRDRIYNETNINTTFATSLRANCPQSGGDSSLAPLDTQTPNGFDNAYYTNLMSQKGLLHSDQVLFNGGGADNTVRSFSSSAATFNSAFTTAMINMGNIAPKTGTQGQIRLVCSKVNS

SEQ ID NO: 3025 - protein, 328 aa, Triticum aestivum
  misc_feature (201)..(201): Xaa can be any naturally occurring amino acid
  unsure (1)..(328): unsure at all Xaa locations
MASRSSCMAWHCLLALFLLSSTAYGQLSPSFYDKSCPTLQRTVRATVAKALGAERRMGASLLRLHFHDCFVQGCDGSILLDDVAGSFVGEKTAFPNVNSVRGYEVIDQIKKDVELVCPGVVSCADIAALAARDGTSLLGGPSWAVLLGRQDSTTANMMEANSDLPAPSLNLDGLIAAFAKKQLSPPRPHGRSPGAHTIGFXSQCQNFPRATFYNDPNIRPGGSATLSPSAPAPPRPPNGDTSLAPFDVQTPLVFDNAYYRNLVARRGLLHSDQELFNGASQDALVSQYAANRALFASDFATAMIKMGNLAPPTGAVTQIRRNCRVVNS

SEQ ID NO: 3026 - protein, 473 aa, Triticum aestivum
MARADDAADRRRVIGHGSVDDDGKPKRTGTVWTASAHIITGVIGSGVLSLPWSMAQLGWVAGSVTLFLFAVVTYYTSALLADCYRCDDAVTGKRNYTYMEAVESYLGSRQVWFCGLCQYVNLVGTAIGYTITASISAAALYKADCFHKNGHSADCGVYTTMYMAVFGISQVVFSQLPNLHEIAWLSILAAVMSFSYSAIGVGLALAQTISGPTGKTTMGGTEIGVDVTNSAQKIWLTLQALGNIAFAYSYSMVLIEIQDTVKAPPAENKTMRRANLLGVSTTTAFYMLCGCLGYAAFGNAAPGNMLTGFGFYEPFWLIDFANICIVVHLIGAYQLYCQPIYAAVEKWAAARWPGSDFVVRQYHPFAGGNFSFSMFKLVWRTAFVAVSTVLAILMPFFNAILGLLGALAFWPLTVYFPVEMYKRQSKVERFSKKWVVLQSLSFTCFAVTVAVTVASVQGITQSLNNYVPFKTKL

SEQ ID NO: 3027 - protein, 179 aa, Triticum aestivum
PRVRKDNEYSLVFQEKTELYQRDERLIISSCISCFTSFYMMRWKEYFPGKELVQSPHFQVEVFCYPEPRIVCDYLSWRQSECHNRNQYTTCFWMLVKSGEGENKAKEILKDTLPKDKNELLFQRFQMNYNNEPAMFRKGSCAYRQKVEASEDERWDVAVAHVDMGPHFWAKHSYVFDRR

SEQ ID NO: 3028 - protein, 482 aa, Triticum aestivum
MAATVAVDNLNPKVLKCEYAVRGEIVIHAQRLQQQLQTQPGSLPFDEILYCNIGNPQSLGQQPVTFFREVLALCDHPDLLKKEEIKTLFSADSISRAKQILALIPGRATGAYSHSQGIKGLRDAIASGIASRDGFPANADDIFLTDGASPGVHLMMQLLIRNEKDGILVPIPQYPLYSASIALHGGSLVPYYLNESTGWGLEISDVKKQLEDARSRGIDVRALVVINPGNPTGQVLAEENQYDIVKFCKNEGLVLLADEVYQENIYADNKKFHSFKKIVRSLGYGEDDLPLVSYQSVSKGYYGECGKRGGYMEITGFSAPVREQIYKIASVNLCSNITGQILASLVMNPPKASDESYASYKAEKDGILASLARRAKALEIAFSKLEGITCNKAEGAMYLFPQICLPQKAIEAAKAANKAPDAFYALRLLESTGIVVVPGSGFGQVPGTWHFRCTILPQEEKIPAIISRFTVFHETFMAEYRD

SEQ ID NO: 3029 - protein, 278 aa, Triticum aestivum
HTLEKKEKAMATTTTLLLAAAALLVASCSAWEANIRMPTSLDEAVVAPLIHALRPLLGSGKHAGVACDSWVLGVEAHNVRDWKTVPASCEGYVGHYMLGSHYRRDSKVVVDQAIAYVDSLKLAGNGKEAWVFDIDETTLSNLPYYAKHGFGATPFNATSFDAYVREGSAPSLPETKRLYNKLLSVGVKPVFLTGRTEDKRAITVTNLRRQGISGWMNLLLKQPGFKGSAVTYKSGERQKLRDAGYVIIGNIGDQWSDILGAPEGARTFKLPDPMYYIG

SEQ ID NO: 3030 - protein, 162 aa, Triticum aestivum
MAGMVFGLDAPMMTALQHLLDIPDGEAGGHGNAGGEKQGPTRAYVRDARAMAATPADVKELPGAYAFVVDMPGLGSGDIQVQVEDERVLVISGERRREEKEDAKYLRMERRMGKLMRKFVLPDNADMEKVSAVCRDGVLTVTVEKLPPPEPKKPKTIQVQVA

SEQ ID NO: 3031 - protein, 462 aa, Triticum aestivum
  misc_feature (86)..(86): Xaa can be any naturally occurring amino acid
  misc_feature (103)..(103): Xaa can be any naturally occurring amino acid
  misc_feature (188)..(188): Xaa can be any naturally occurring amino acid
  unsure (1)..(462): unsure at all Xaa locations
MAFSSLATPSSSSPSSSFTLPTKPSPGAGSLSFSRASTGKFRMAAVRAEAVDTSISPRVSALRPSKTMAITDMASALRQAGVPVIXGLAAGEPDFDTPAVIAXEAGINAIRDGSTRYTPNAGTMELRKAICNKLQEENGLTYSPDQVLVSNGAKQCITQAVLAVCSPGDEVLIPAPFWVSYPEMARLXAGATPVILPTSISDNFLLKPESLASVITEKSRLLILCSPSNPTGSVYPKELLEEIAAIVKKYPRLLVLSDEIYEHIIYHPAKHTSFAALPGMYDRTLTVNGFSKAFAMTGWRLGYLAAPKHFVSACGKIQSQYTSGASSISQKAGLAALNLGYAGGEAVSTMVKAFQERRDYLVRSFRELPGVKISEPQGAFYLFLDFSSYYGSEVEGFGTIKDSETLCMFLLEKAQVALVPGDAFGDDKGVRISYAAALSTLQSAMEKIKDAMSLLKAPAAVQ

SEQ ID NO: 3032 - protein, 275 aa, Triticum aestivum
  misc_feature (184)..(184): Xaa can be any naturally occurring amino acid
  unsure (1)..(275): unsure at all Xaa locations
GMVADAQSSPPVPAGPGSAAEKHVDRCLDKRAQEKAPKKNHKAEREKLKRDQLNDLFVELSSMLDHDRQNRGKATVLGDAARVLRDLTTQVESLRKEQSTLLTERQYVGSEKTELQDENTTLRAQVIELQNELRARIGNSSLNLSSLVVSHPIGSSCTTNLATHPTPHDTWSNVSNLSTMSMVXPTNTPSPLQNQQHHSVASGQVASRPQELQLFPGTSASSDRECSRHRSNPATSSLADSLPGQLRLSLPPTSQEESSGGGGGAPGNRKERKTS

SEQ ID NO: 3033 - protein, 177 aa, Triticum aestivum
MAGRDRDPLVVGRVVGDVLDPFVRTTNLRVTFGNRTVSNGCELKPSMVAQQPRVEVGGNEMRTFYTLVMVDPDAPSPSDPNLREYLHWLVTDIPGTTGASFGQEVMCYESPRPTMGIHRFVLVLFQQLGRQTVYAPGWRQNFNTRDFAELYNLGPPVAAVYFNCQREAGSGGRRMYN

SEQ ID NO: 3034 - protein, 351 aa, Triticum aestivum
MYNKFVQKSRLVPVRNSRDIVDPRVRLSSFGDLGDAVFGAPGRLAVDTMLVLSQASFCVGYLIFISNTMAHLYPVFAPSSNVFLSPKALFIYAMLPFQLGLNSIKTLTLLAPLSIFADVVDLGAMGVVVGQDVSTWLAAHPPVAAFGAPAALLYGAGVSVYAFEGVCMVLPLEAEAADKKKFGATLGLSMAFIAVMYGLFGVMGYVAFGDATRDIITTNLGSGWLSAAVQLGLCINLFFTMPVMMNPVYEVAERLFHGKRYCWWMRWVLVVAVGLAAMLVPNFTDFLSLVGSSVCVLLGFVLPATFHIKVFGAEMGWVGVLSDVLLVVLGLVLAVFGTYSSLVQIFHSSSA

SEQ ID NO: 3035 - protein, 136 aa, Triticum aestivum
  misc_feature (35)..(35): Xaa can be any naturally occurring amino acid
  unsure (1)..(136): unsure at all Xaa locations
MASTTFRRFGVAAAAAAFIALAAFGSASASKTAFXVKSTVKAHDVVIFSKSYCPYCKRAKAVFKELELKKDPYVVELDQREDGGEIQDALSDMVGRRTVPQVFIRGKHLGGSDDTVDAYESGELAKLLNISVKDDL

SEQ ID NO: 3036 - protein, 180 aa, Triticum aestivum
  misc_feature (94)..(94): Xaa can be any naturally occurring amino acid
  misc_feature (111)..(111): Xaa can be any naturally occurring amino acid
  misc_feature (126)..(127): Xaa can be any naturally occurring amino acid
  misc_feature (135)..(135): Xaa can be any naturally occurring amino acid
  misc_feature (137)..(137): Xaa can be any naturally occurring amino acid
  misc_feature (142)..(142): Xaa can be any naturally occurring amino acid
  misc_feature (155)..(155): Xaa can be any naturally occurring amino acid
  unsure (1)..(180): unsure at all Xaa locations
MSDTDEHHFESKADSGASKTYPQQAGAIRKGGHIVIKARPCKVVEVSTSKTGKHGHAKCHFVAIDIFNGKRSFEDIVPSSQNCDVPQCLTGQRXYKLIDINWMMVCQLLTXESGNTKDDLNFQLNXXLLGQIKTXFXDGKDXILSVMSAMGEDNXPVKDPGQTLSWLLPANWNNARVRII

SEQ ID NO: 3037 - protein, 163 aa, Triticum aestivum
  misc_feature (71)..(71): Xaa can be any naturally occurring amino acid
  misc_feature (83)..(83): Xaa can be any naturally occurring amino acid
  misc_feature (92)..(92): Xaa can be any naturally occurring amino acid
  misc_feature (114)..(114): Xaa can be any naturally occurring amino acid
  misc_feature (117)..(117): Xaa can be any naturally occurring amino acid
  unsure (1)..(163): unsure at all Xaa locations
MAGMVFGLDAPMMAALQHLLDIPDGEAGAAAGEKQGPTRAYVRDARAMAATPADVKELPGAYAFVVDMPGXLGSGDIKVQVEXDERVLVISXGERRREEKEDAKYLRMERRMGXLMXRKFVLPENADMEKISAACRDGVLTVSVEKLPPPEPKKPKTIQVQVA

SEQ ID NO: 3038 - protein, 222 aa, Triticum aestivum
MVRGKTQMKRIENPTSRQVTFSKRRGGLLKKAFELSVLCDAEVALVVFSPRGRLYEFASSSMKNTIERYKTVTKDNLGRQTVQQDIEKVKADAEGLSKKLDALEACKSKLLGQNLEECSIEELQSLEVKIERSLLGIRAMKTRRFEEQLSTLRQKEMKLRQDNEELYSQCQKEQHSALEAAAPPAPATLAALPAPVTLAEQGQQVVDVETDLFLGLPGTGRS

SEQ ID NO: 3039 - protein, 397 aa, Triticum aestivum
  misc_feature (292)..(292): Xaa can be any naturally occurring amino acid
  misc_feature (313)..(313): Xaa can be any naturally occurring amino acid
  misc_feature (326)..(326): Xaa can be any naturally occurring amino acid
  misc_feature (331)..(332): Xaa can be any naturally occurring amino acid
  misc_feature (354)..(354): Xaa can be any naturally occurring amino acid
  misc_feature (364)..(364): Xaa can be any naturally occurring amino acid
  misc_feature (372)..(372): Xaa can be any naturally occurring amino acid
  unsure (1)..(397): unsure at all Xaa locations
MQAPPAPSKSNQRGSSRRSRVPGASPPSRGVDVNSALYIRAHAAPKHINHHGPAGDSSLATTATLPTVRRSLVRAMAGGRRSGFAAAALLPLLALVFLSAGCGAAPQGAEVTGLPGYDGALPSKHYAGYVTVDEQHGRNLFYYAVESERDPAKDPVVLWLNGGPGCSSFDGFVYEHGPFNFESGRSVKSLPKLHLNPYSWSKVSTMIYLDSPAGVGLSYSNNVSDYETGDLKTAADSHTFLLKWFQLYPEFLSNPFYIAGESYAGVYVPTLSHEVVKGIQGGAKPTINFKGXHGMGLISEEIYQQAFTTCDGXYWNASEGKCESAXVKIDXXISELNIYDILEPCYHGRSIKEXNPQNSKLPKXFKDSGTTXQPFPVRTRCFGVLGSESPVKAGGVH

SEQ ID NO: 3040 - protein, 279 aa, Triticum aestivum
MMHRADGLDLGLGLGLGLASQGSITSSTTTAASSSPASASHSQHWTAALSSVIGLRKEEPGVQASTSPESGGTKRGLERTGSGLAAGSDEDDDGGDGTGGRKKLRLSKDQAAVLEECFKTHSTLNPKQKTALANRLGLRPRQVEVWFQNRRARTKLKQTEVDCEYMKRCCEQLAEQNRRLEKEVAELRALKAAPPAHSAAAAAGPLTTLTMCLSCKRVASTSSASACDVPNFSTNAGMGMPMPSPVALPDHRQFFCGYRDTGATYGGFSGLAKVVKPAR

SEQ ID NO: 3041 - protein, 187 aa, Triticum aestivum
MFIKRTSSTRRHTPPHLPPDSGGSSEMSDTDEHHFESKADSGASKTYPQQAGAIRKGGHIVIKARPCKVVEVSTPKTGKHGHAKCHFVAIDILMGKKLEDIVPSSHNCDVPHVDRQDYQLIDITDDGYVSLLTESGNTKDDLKLPTDDVLLGQIKTGFADGKDLILSVMSAMGEEQICAVKEIGGGK

SEQ ID NO: 3042 - protein, 377 aa, Triticum aestivum
MCGGAILAGFIPPSAAAKAAAAKKKQQQRSVTADSLWPGLQKKAADEEDFEADFREFERDSSDDDAAVEEVPPPPAAAGFAFAAAAEVAPPAPARLDAVQRDGPAAKQVKRVRKNQYRGIRQRPWGKWAAEIRDPSKGVRVWLGTYDTAEEAARAYDAEARKIRGKKAKVNFPEDAPTVQKSTLKPTAAKSAKLAPPPKACEDEPFNHVSRGDNDLFAMFAFNDKKVPAKPAESVDSLLPVKLKPPTETFGMNMLSDQSSNSFGSTDFGWDDEAMTPDYTSVFVPNAAMPAYVEPAYLQGGAPKRLRNNFGVAVLPQGNGAQDIPAFDHEMKYSLPYVESSSDGSMDSLLLNGAMQNGASSGDLWSLDELFMAAGGY

SEQ ID NO: 3043 - protein, 539 aa, Triticum aestivum
NKFVQKSRLVPVRNSRDIVDPRVRGYLHIGHAKAMFIDFGLAKERNGHCYLRFDDTNPEAEKKEYIDHIQEIVKWMGWEPYKVTYTSDYFQDLYEHAVELIRKGLAYVDHQTAEQIKEYREKKMDSPWRDRPIEESLQLFEDMRRGLIAEGAATLRMKQDMQNDNKNMSDLIAYRIKFTPHPHAGDKWCIYPSYDYAHCMVDSLENITHSLCTLEFDIRRPSYYWLLVALGLYQPYVWEYSRLNISHTMMSKRKLNRLVTEKWVDGWDDPRLLTLAGLRRRGVSATAINSFIRGIGITRSDNSLIRVDRLEYHIREELNKTASRTMVVLHPLKVVITNLEDGKVIDLDGKKWPDAPADEASSYYKVPFSKTVYIEKTDFRVKDSKDYYGLAPGKSALLRYAFPIKCTEVIYGDNPDDIVEIRAEYDPSKTSKPKGVLHWVAQPAPGVEPLKVEIRLFEKLFLSENPAELEDWLGDLNPHSKEVVKDAYAVPSLATAVLGDKFQFERLGYFAVDTDSTPEKLVFNRTVTLRDSYGKAGPK

SEQ ID NO: 3044 - protein, 328 aa, Triticum aestivum
MAAQLTAALPSYSPAATKAAEPAPAAPAKPAKISKKQDEGVVTNKYRPKEPYVGRCLLNTRLTGDNAPGETWHMVFSTEGEVPYREGQSIGVIADGEDKNGKPHKLRLYSIASSALGDFGDSKTVSLCVKRLVYTNDAGEVVKGVCSNFLCDLKPGSEVKITGPVGKEMLMPKDPNATIIMLATGTGIAPFRSFLWKMFFEEHEDYKFSGLAWLFLGVPTSDSLLYKEELEKMKEMAPDNFRLDFAVSREQTNAAGEKMYIQTRMAEYREELWELLKKDNTYVYMCGLKGMEKGIDDIMLNLAAKDGIDWMQYKKQLKKGEQWNVEVY

SEQ ID NO: 3045 - protein, 224 aa, Triticum aestivum
  misc_feature (200)..(200): Xaa can be any naturally occurring amino acid
  misc_feature (212)..(212): Xaa can be any naturally occurring amino acid
  misc_feature (218)..(218): Xaa can be any naturally occurring amino acid
  unsure (1)..(224): unsure at all Xaa locations
MADKVVATYYYPPMEVAAAELGHTAGSKLDDDGRNKRTGTMWTASSHIITAVIGSGVLSLGWAIAQLGWVAGPAVMLLFSLVTYFTSSLLADCYRSGDQSTGKRNYTYMDAVNANLSGIKVQICGVLQYANIVGVAIGYTIAASTSMLAIKRANCFHGNGHADPCKLSSVPYMIIFGVAQVFFSQIPDFDQISWLSMLAXAMSFTYSFIGLXLGIVQXIAKRRP

SEQ ID NO: 3046 - protein, 579 aa, Triticum aestivum
  misc_feature (357)..(357): Xaa can be any naturally occurring amino acid
  misc_feature (377)..(377): Xaa can be any naturally occurring amino acid
  unsure (1)..(579): unsure at all Xaa locations
MTSKTMPQTIPTIPNTEEKKQCSQNDSSLDLTSSSKPSTALPRKLPESAIPSSPNKEVQSSDQKPSHKLHESVDVTSSKVPADDEKDTVENGNTDGTVKSDSTVDKDHGAASASGSARLTGRSETGERGISSRCRPSTGSDVSEESACSSFSSTSKPHKANDSRWEAIQMIRSRDGILGLSHFKLLKKLGCGDIGSVYLSELTGTKSYFAMKVMDKASLTGRKKLLRAQTEKEILQCLDHPFLPTLYTHFETDKFSCLVMEFCPEGDLHTLRQKQRGKYFPEQAVKFYVAEILLAMEYLHMLGIIYRDLKPENILVRDDGHIMLSDFDLSLRCTVSPTLIRSSNPETEALRKSSQAXYCAQPACAEPSCMIQPSCTXPTTCFGPRFFSKSKKDRKPKPEVVNQVRPWPELMAEPSDARSMSFVGTHQYLAPEIIKGEGHGSAVDWWTFGIFLYELLFGKTPFKGSGNRATLFNVIGQPLRFPEYPVVSFSARDLIRGLLVKEPQQRLGCKRGATEIKQHPFFEGVNWALIRCASPPEVPKPVEIERQTTKLPVSTSEASAAPTGASQKGSDNYLEFDFF

SEQ ID NO: 3047 - protein, 162 aa, Triticum aestivum
MEGRMFGLETPLMTALQHLLDVPDGEAGGPGNAGGEKQGPTRAYVRDARAMAATPADVKELPGAYAFVVDMPGLGSGDIQVQVEDERVLVISGERRREEKEDAKYLRMERRMGKLMRKFVLPENADMEKISAVCRDGVLTVSVEKLPPPEPKKPKTIQVQVA

SEQ ID NO: 3048 - protein, 391 aa, Triticum aestivum
MYGVTTHASVQLMRAELQVLSPLVPIREVTFLRFCKQHADGLWAIVDVSVDGVLRPDSGTGAGPAGYMGCRLLPSGCIVEDMQNGYAKVTWVVHAEYDEAAVHELYRPLLRSGQALGARRWLASLQRQCEYHAILCSNPHPNHGDRHEAISPAGRRCMLRLAQRMADNFCAGVCATAAQKWRRLDEWRVEGAGGRDPAGGEDKVRMMARQSVGAPGEPPGVVLSATTSVRLPGTLPQRVFDYLRDEQRRGEWDILANGEAMQEMDHIAQGQHHGNAVSLLRPNATSGNQKHMLILQETCTDASGSLVVYAPVDVQSMHVVMGGGDSAYVSLLPSGFASSRRAHKPATGMPSSQGRPHGHAGGEQNPGRSYRGFKSRKTARGNYRGWRTPNR

SEQ ID NO: 3049 - protein, 251 aa, Triticum aestivum
  misc_feature (159)..(159): Xaa can be any naturally occurring amino acid
  unsure (1)..(251): unsure at all Xaa locations
MNGSRQMELHYINTGYPYTITESFMDFFEGLTYAQADFALADAFQDQANPYWTMMQTNSYKYGYSGAGNYYSYGHVYDMNDYMHRADSGRRIWDNPMPVNNTDSPNIVLQGAEAPHASASSTTEERIQQPVHQNSSSPQVVWQDSIDPDNMTYEELLDXLGEAVGTQSRGLSQESISALPITKFKCGLFSRKKKRRERCVICQMEYRRGDLQMALPCKHVYHASCVTKWLTINKVCPVCFAEVPGEEPKRQ

SEQ ID NO: 3050 - protein, 326 aa, Triticum aestivum
MSDPSSTASSYPAGPRLTTGVINFLGAPRPWPRRPPPGQEDSLHSPGLLQRAPPTVRHGTTTPRPRPPPLLPLDARDADEMLLLDMLSQHQQEAMHTASAPIPTTTAATAVKREASEEEEVKVAVGGSGRAFRGVRKRPWGKFAAEIRDSTRDGVRVWLGTFDSPEEAALAYDQAAFAMRGGAAVLNFPADHVRRSLEGAGDDVCGRADGLSPVLALKRRHSMHRRASTTRKTCRAVRTGRPEGVMELEGLGAEYLEGAARRLRRHDDLGLQSMVLESPLHLILKSASRKMGMARRRWIDPGWGFSFLPGGGGRPGPFVPEFSWTR

SEQ ID NO: 3051 - protein, 257 aa, Triticum aestivum
MATRRCLLRLLTRGLAPHAPQPLAPASIAARTLTSLPRSLAPRAAAASLRLSPPRCHFATRSSDDEGDDEEHYEDEEDGSGDEWGEGDEETPAAKPPSGKTEEEKLAEANEIGYKVVGPLGADEKPFKPYEPVFAVVQIGSHQFKVSNGDSIFTERLKFCDVNDKLVLNRVLMLGSQAQTIIGRPILTDATVHAVVEEHALDAKVIIFKKKRRKNYRRTRGHRQELTKLRITNIEGIDKSFIQQEGTDKPESAAVAA

SEQ ID NO: 3052 - protein, 359 aa, Triticum aestivum
MSPLADLLSLDLSGCTGKIIAEVGGTGMDVRSKARTLPGPVEDPSKLPKWNFDGSSTGQATGDDSEVILCPQAIFKDPFRRGNNILVICDCYAPNGEPIPSNKRYNAARIFGHPDVKAEEPWYGIEQEYTLLQKDTNWPIGWPLGGYPGPQGPYYCAAGAEKSYGRDIVDAHYKACLYAGINIGGINAEVMPGQWEFQVGPSVGISAGDELWAARYILERITEIAGVVVSFDPKPIPGEWNGAGAHTNYSTKSMRSEGGYEVIKKAIQKLEARHMEHIAAYGEGNERRLTGRHETADINTFVWGVANRGASVRVGRDTEKEGKGYFEDRRPASNMDPYVVTSMIAETTILSKAGLSNGK

SEQ ID NO: 3053 - protein, 196 aa, Triticum aestivum
MATSFQGTTTKCNACDKTVYLVDKLTADNRVYHKACFRCHHCKGTLKLANYNSFEGVLYCRPHFDQLFKRTGSLDKSFEGTPKVVKPERNVGNENATKVSSAFAGTREKCFGCTKTVYPIERVTVNNTMYHKSCFKCCHGGCTISPSNYIAHEGKLFCKHHHTQLIKEKGNFSQLENDHDKTSQSAGSVDDEDSEY

SEQ ID NO: 3054 - protein, 292 aa, Triticum aestivum
MQDFQSIPGLAGRLFGGAAAADIRRVQGPASRCGVFSQAASAQPEAAVKCPRCESTNTKFCYYNNYNLSQPRHFCKSCRRYWTKGGVLRNVPVGGGCRKAKRSSSSASAPSTPAGHGTPRAKRAPPSSSSSSRSNSGSGSASPTANGEDTPTTTTDPPPATPSSNSNANAVSFASRMTNYPFAADVPPPAPIFADQAAALASLFAPPPPPPLPVFSFSAEPKMEEAIGSLLLPGQEPAQEPEEPTCTSTVADMAPFMSLDAGIFELGDASPADYWNGGSCWTDVQDPSVYLP

SEQ ID NO: 3055 - protein, 106 aa, Triticum aestivum
MSGVWVFKNGVVRLVENPGSDQTSTVRRKALLHTPSGEVVSSYEVLESKLTVLGWERYYEDPALLQFHKRGSLNLISLPRDFSHFSSVHMYDVVIKNRESFRVVDA

SEQ ID NO: 3056 - protein, 250 aa, Triticum aestivum
RATSPEAERLAQAIQRSHSSLDASRRQKLDGDGKMTGIGAVKKDGNCGCNSSFECNICLEAAKEPVVTPCGHLFCWPCLYQWLHGHSAHSECPVCKGEVLEVNVTPIYGRGGGERDACSNDVPPRPRANRSESLRQQLQMPDPRGIASMVRRLIENQDIVRGQAAPPAGGVEVTVLPAARSRARVRRQQRHSLVSPSPIMLRASNAAPESGNQASTSSTLAVIVGQAAQSRRSRPSESTTTRRTRRRQQQ

SEQ ID NO: 3057 - protein, 323 aa, Triticum aestivum
  misc_feature (90)..(90): Xaa can be any naturally occurring amino acid
  unsure (1)..(323): unsure at all Xaa locations
MASSSSCRTWHCLLALFVLSSAAYGQLSPSFYAKSCPSLELIVRATMIKALLAERRMGASLLRLHFHDCFVQGCDGSILLDDVGSFVGEXKTAFPNVNSVRGYEVIDEIKRNVELACPGIVSCADITALAARDGVFLLGGPSWAVPLGHRDSTTASLTQANSDLPGPSLNLDQLIAAFAKKQLSPRDLTALSGTHTIGFSQCLNFRDHIYNGTNIDPAFAALRKGACPAQAPNGDGNLAPLDVQTPLLFDNAYYRNLVAKRGLLNSDQVLFNGGSQDALVRQYAANPALFASDLVTAMTKMASLTPPSGIPTQIRRNCRVVNS

SEQ ID NO: 3058 - protein, 166 aa, Triticum aestivum
  misc_feature (98)..(98): Xaa can be any naturally occurring amino acid
  misc_feature (125)..(125): Xaa can be any naturally occurring amino acid
  misc_feature (133)..(133): Xaa can be any naturally occurring amino acid
  unsure (1)..(166): unsure at all Xaa locations
IQTEELFDDAGIDSYFEVKEATAVNSDEQPKPKQPAASNALSADSGMSNPAVKEDDSSLCIPVRQAISYSGFTGESIPEEYQDCGVSPMLLMGEPPWXPPGPDGSFAGIRDSAITRYKEKKKRRXFDHKIRYXTRKAKAVLRKRSKGRFVKAGEAYDYDPLDTRSY

SEQ ID NO: 3059 - protein, 556 aa, Triticum aestivum
  misc_feature (414)..(414): Xaa can be any naturally occurring amino acid
  misc_feature (486)..(486): Xaa can be any naturally occurring amino acid
  unsure (1)..(556): unsure at all Xaa locations
WQHVVRKKVGGSKEHEHSGSLDDTDRNRLTNNDNEYASSANDGAEDSWKSQKKKRDKEEDDSELESGDPSNNSKKPRVVWSVELHQQFVNAVNHLGIDKAVPKKILELMNVPGLTRENVASHLQKFRLYLKRIAQHHAGMTNPYGVPASSAQVASLGGLDFQALAASGQIPPQALAALQDELLGRPTNSLVLPGRDQSSLRLAAVKGNKPHGEQIAFGQPIYKVQNNSYAALPQNSSAVGRMPSFSAWPNNKLGMSDSMSALGNVNNSQNSNMVLHELQQQPDTMLSGTLHTLDVKPSGIVMPSQSLNTFPASEGLSPNQNSLIIPSQSSGFLTGIPPSMKPELVLPTSQSSNSLLGGIDLINQASTSQPFISSHGGNLPGLMNRNSNVMSSQGISSFQTGNTPYLVNQNPMGXGSKPPGVLKTESTDSLNQNYAYANHMDSGLLSSQSKNAQFGFLQSPNDVTGGWSSLQNMDGYRNTVGPSQPXPSSSSFQSSNAALGKLPDQGRGKNLGFVGKGTCIPNRFAVDEIESPTNSLSHSIGSSGDIPDMFGFSGQM

SEQ ID NO: 3060 - protein, 302 aa, Triticum aestivum
  misc_feature (213)..(213): Xaa can be any naturally occurring amino acid
  unsure (1)..(302): unsure at all Xaa locations
MASAAYLDDIDAEVIDPPKIEMLDVTELVGDLIEHSPKPNVIVSSNVRELLECPVCLVAMYPPIHQCSNGHTICSGCKPRVHNRCPTCRSELGNIRCLALEKVAASLEVPCKFQNFGCVGIYPYYCKLKHESQCQYRPYTCPYAGSECTVTGDIPYLVNHLKDDHKVDMHSGSTFNHRYVKSNPHEVENATWMLTVFSCFGQYFCLHFEAFQXLGMAPVYIAFLRFMGDDAEAKNYTYSLEVGGINRKMTWQGIPRSIRDSHRKVRDSYDGLIIQRNMALCFSGGDRKELKLRVTGRIWKEQ

SEQ ID NO: 3061 - protein, 721 aa, Triticum aestivum
  misc_feature (11)..(11): Xaa can be any naturally occurring amino acid
  unsure (1)..(721): unsure at all Xaa locations
VRYPDDPFDRXWESDSLRRANYLVDVAPGTERITTTKPVFVGTELEPPEKVMQTAVVGQNGSLNYRLDLEGFPGNAWAVSYFAEIEDLAPDETRKFKLVVPGMPLFSKPTVDVEENAQGKYRLYQPGYTNVTLPFVFSFEFKKTNDSSKGPILNAMEIYKHVQITMGSPDANTMSSLASRYPQAGWAQEGGDPCLPVSWTWVQCSSEAAPRVLSITLSEKNITGSIPEELTKLSALVELRLDGNSFSGGIPDFSGCRNLQYIHLENNQLNGALPSSLGDLPNLKELYIQNNRLSGHIPRALSKKSIIFNSSGNNLQGPSDSISHGTIIIIVCAVVGAILLLAVAIGCCLCTHKRKKKPSRETVVLAAPAKKLGSYFSEVATETAHRFALSEIEDATDKFERRIGSGGFGIVYYGKLADGREIAVKLLTNDSYQGIREFLNEVALLSRIHHRNLVTFLGYSQQDGKNILVYEFMHNGTLKEHLRGGPNDVKITSWVKRLEIAEDAAKGIEYLHTGCSPTIIHRDVKSSNILLDKNMRAKVADFGLSKPAVDGSHVSSIVRGTVGYLDPEYYISQQLTEKSDIYSFGVILLELISGHEPISSDNFGLNCRNIVAWARSHIESGNIDAIIDASLDTGYDLQPVWKIAEVGIMCVKPKGAQRPTISEVLKEIQDAIAIEVQREAPQVQQLMSKRSMGSVSINTDNSVDLEQNASFDEMLMRPGLR

SEQ ID NO: 3062 - protein, 329 aa, Triticum aestivum
MEMTVNGRDTEQHHHLGLGLGLGLSLGMSGTTSPVEPAAPQRALTAAAPSTLGRQQQQSWNGAGLFYPASSGEQPRSHADDRRLAALACHEMPSLRGIDVNRAPATGGARGSCGASEDEEPGASSPDSTLSSLSGKRGAPTRSGGGEQERAGAGSDDEDDSGTGGAGSRKKLRLSKDQSAVLEDSFKEHSTLNPKQKAALARQLGLRPRQVEVWFQNRRARTKLKQTEVDCESLKRCCETLTEENRRLQREVQELRALKLLAPPAPHLYMRAPPPTTLTMCPSCERVAPSGKPAVDESRAAMVTRAVPTGPWGPVPVMPVFLGRPAQRS

SEQ ID NO: 3063 - protein, 918 aa, Triticum aestivum
MNPDNFTHKTNEALVAAHEAASEAGHAQITPLHLAAALAADKSGILRQAVAGASGGNASAGDSFERVLAGALRKLPSQSPPPDSVPASTALIKAIRRAQSAQKKRGDSHLAVDQLLMGLLEDAQIADCLKEAGVSASRVRAELDKLRGGDNSRKVESAFGDTTFQALKTYGRDLVEVAGKLDPVIGRDEEIRRVVRILSRRTKNNPVLIGEPGVGKTAVVEGLAQRVVRGDVPSNLLDVRLVALDMGALVAGAKYRGEFEERLKAVLKEVEEADGKVILFIDEIHLVLGAGRTEGSMDAANLFKPMLARGQLRCIGATTLEEYRKYVEKDAAFERRFQQVYVAEPSVADTISILRGLKEKYEGHHGVRIQDRAIVVAAQLSARYIMGRHLPDKAIDLVDEACANVRVQLDSQPEEIDNLERKRIQLEVELHALEKEKDKASKARLVEVRKELDDLRDKLQPLTMKYRKEKERIDEIRKLKQRREELQFTLQEAERRMDLARVADLKYGALQEIDAAIAKLEGETGENLMLTETVGPEQIAEVVSRWTGIPVTRLGQNDKERLVGMADRLHTRVVGQTEAVNAVAEAVLRSRAGLGRPQQPTGSFLFLGPTGVGKTELAKALAEQLFDDENLLVRIDMSEYMEQHSVARLIGAPPGYVGHEEGGQLTEQVRRRPYSVILFDEVEKAHVAVFNTLLQVLDDGRLTDGQGRTVDFRNTVIIMTSNLGAEHLLAGMVGKNSMKVARDLVMQEVRRHFRPELLNRLDEMVIFDPLSHEQLRKVARLQMKDVAVRLAERGVALAVTDAALDVILSLAYDPVYGARPIRRWIEKRVVTQLSKMLIQEEIDENCTVYIDAADKDELAYRVDRSGGLVNAETGQRSDILIQVPNGALGGGGGGEAAKAVKKMRVMEDGDEDGMDEDV

SEQ ID NO: 3064 - protein, 336 aa, Triticum aestivum
MRRARPPPGPGLEGEEVRYRGVRRRPSGRYAAEIRDPAKKTPIWLGTFDSAEAAARAYDAAARNLRGAAARTNFPASPAAAPPRAAPPAPVAAPAAMAAAATSSHSSTIESWSGGNVPPTSVLFRAAAGPAIGAPAVEEDCRSYCGSSSSAVCEDGASGGVSAFPSALWGLSPPSGLCVRRPWLPRPFPGLLRRSAPAGWGARCRGVSSGAAVVSFPRSVRCGSRSPLSLLGGRGSPRPLGVRAGARGAPCCRCRAPLRFWRPVGSAFWPLRAPAASGLRGVLLRSGPRGRRPARGGALPPSPGCPPGGPGRPRRPASAPAALRRRFASLRSPPRG

SEQ ID NO: 3065 - protein, 162 aa, Triticum aestivum
MEGRMFGLETPLMTALQHLLDVPDGEYGGAGSAGGEKQGPTRAYVRDARAMAATPADVKELPDAYAFVVDMPGLGSGDIKVQVEDERVLVISGERRREEKEDAKYLRMERRMGKLMRKFVLPENADMEKISAVCRDGVLTVSVEKLPPPEPKKPKTIQVQVA

SEQ ID NO: 3066 - protein, 110 aa, Triticum aestivum
  misc_feature (103)..(104): Xaa can be any naturally occurring amino acid
  unsure (1)..(110): unsure at all Xaa locations
AWSRPRLRHEKALIVKLVDIVDFNGSFLARIRDFAGANPIVLVITKVALLPRDTDLNCIGDWVVESVVRKKLNVLSVHLTSSKSLVGITGVISEIQQEKKARXXYLPGRP

SEQ ID NO: 3067 - protein, 140 aa, Triticum aestivum
MASLNNASWSSGLCGCYDDVGGCCLTFFCPCVVFGRIAEIVDMGATSCCASGTVYAALASVTGMGCLYSCGYRSRLREQYRLKETPCGDCCVHWFCEACALCQEYRELKTRGFDMALGWQANMEKMGKTTAPQTHAGMTR

SEQ ID NO: 3068 - protein, 170 aa, Triticum aestivum
  misc_feature (160)..(160): Xaa can be any naturally occurring amino acid
  unsure (1)..(170): unsure at all Xaa locations
NKFVQKSRLVPVRNSRDIVDPRVRIPFPRLALAARRARAVAARASSSSSSPDSSFGSRMEDSVKKTLADNPVVIYSKSWCSYSMEVKGLFKRIGVDPHVIELDQLGAQGPQLQKVLERLTGQSTVPNVFIGGKHIGGCTDTVKLYRKGELATMLTELDIXVNHHDKIEHD

SEQ ID NO: 3069 - protein, 316 aa, Triticum aestivum
MCGGAILAELIPPSAGRASKQVAAGRASPKKAGKSKGHRYGSVADVDDFEAAFENFDDDLDLQAEEDGDEHVVFASKPAFSPGLAYDDGRAAQAASKKKSVRPLHGIRQRPWGKWAAEIRDPHKGTRVWLGTFDTADDAARAYDVAARRLRGSKAKVNFPDAARAGARPRRASRRTAQKPQRPPARTTAYSATAAPRARPEQDAMMVKPERMEFSDVDAFVDLTAAVAVLPPVTASSFADKMPRVDEDSSEGSGGGSMLGFADDLGFDPFMMLQYESMDSLFAGDAVIQDARGVDGGMDGVSLWSFEEFPMDSAIF

SEQ ID NO: 3070 - protein, 610 aa, Triticum aestivum
  misc_feature (348)..(348): Xaa can be any naturally occurring amino acid
  misc_feature (373)..(373): Xaa can be any naturally occurring amino acid
  misc_feature (405)..(405): Xaa can be any naturally occurring amino acid
  unsure (1)..(610): unsure at all Xaa locations
WGGAKHEPGDADDNGRRMHPRSSFRAFLEVVKWRSVPWEDVEMDAIHSLQLILRGSLQDEDATDNNARSIVEAPSDDIKKIQGLLELRIVTNEMVRLIETATAPILAVDIVGNINGWNNKVAEITGLPTTEAIGMLLVDLVEGDSVEVVKQMLNSALQGTEEQNLEIKLKTFHQQESKGPVVLMVNACCSRDLSDKVVGVCFVAQDLTGHKMVMDKYTRIQGDYVAIVKNPNELIPPIFMINDLGSCLEWNEAMQKITGIKREDAIDKLLIGEVFTLHDYGCRVKDQATLTKLSILMNTVISGQEPEKLAFGFFNTDGKYMESLLTANKRTDAEGKITGALCFLHVAXSPELQHALQVQKMSEQAATHSFKEXTYIRQELKNPLNGMQFTRKLLEPSDLTEEQRXLFASNVLCQEQLKKILHDNDLEGIEQCYMEMNTVEFNLEEALNTVLMQGMSLSKEKQISLDRDWPVEVSSMYLYGDNLRLQQVLADYLACTLQFTRPAEGPIVLQVIPKKEHIGSGMQIAHLEFRLVHPAPGVPEALIQEMFRHGPGVSREGLGLHISQKLVKTMSGTVQYLREAESSSFIVLVEFPVAQLNSKRSRPSTSKSNF

SEQ ID NO: 3071 - protein, 162 aa, Triticum aestivum
MAGMVFGLENPMMTALQHLLDIPDGEAGGAGAGRGEKQGPTRAYVRDARAMAATPADVKELPGAYAFVVDMPGLGSGDIKVQVEDERVLVISGERSREEEEDAKYLRMERRMGKLMRKFVLPENADMEKISAACRDGVLTVTVEKLPPPEPKKPKTIQVQVA

SEQ ID NO: 3072 - protein, 260 aa, Triticum aestivum
MAPSSPAAAAVASEGDEQQQQQIVAAAAAAKKGGGKRGRREMRRIEDATSRQVTFSKRRSGLLKKAFELGVLCDAEVALIVFSPRGRLYEYASAPDLQKTIDRYLNHTKGTSANEKTVEQPAAGVQMCRSEATALKHKIDAIEAYQRKLSGEGLGSCSAHELQELELQLEKSLSCIRQKKQQKMLDKILELKEKERKLLTENVVLREEYKALPLLELATAAAAERSPDGAGAEEAEEDERRLHYMEVETELVIGRPGSSS

SEQ ID NO: 3073 - protein, 130 aa, Triticum aestivum
  misc_feature (56)..(56): Xaa can be any naturally occurring amino acid
  misc_feature (78)..(78): Xaa can be any naturally occurring amino acid
  misc_feature (82)..(82): Xaa can be any naturally occurring amino acid
  misc_feature (104)..(104): Xaa can be any naturally occurring amino acid
  unsure (1)..(130): unsure at all Xaa locations
MGTAFSSSSSSSTPESRAMALAKAKEIVASAPVVVFSKSYCPFCVQVKKLFTQLGXASFKAIELDTESDGTEISQALXAEWXTGARRTVPNVFIKWENTLGGCXDDTIALTREGSLVLPAGRSWAFPVLP

SEQ ID NO: 3074 - protein, 223 aa, Triticum aestivum
AFAYPYSLILLEIQDTLKSPPAENKTMKKASIISILVTTFFYRCCGCFGYAAFGNDAPGNLLTGFGFYEPYWLIDFANACIILHLLGGYQVYSQPIYQFADRHFAERYPGSGFVNDFHTVKVPLLPPYRVNLLRVCFRTAYVASTTAVAIFFPYFNEILALLGALNFWPLAIYFPVEMYFIQRKVPRWSTRWLVLQGFSTVCLLVSAFALVGSIQGVISQKLG

SEQ ID NO: 3075 - protein, 113 aa, Triticum aestivum
MALAKAKEIVASAPVVVFSKSYCPFCVQVKKLFTQLGASFKAIELDTESDGPEIQSALAEWTGQRTVPNVFINGKHIGGCDDTVALNKGGKLIALLTEAGAISGSSSKTTVTP

SEQ ID NO: 3076 - protein, 200 aa, Triticum aestivum
NKFVQKSRLVPVRNSRDIVDPRVRGGINAEVMPGQWEFQVGPSVGISAGDELWAARYILERITEIAGVVVSFDPKPIPGEWNGAGAHTNYSTKSMRSEGGYEVIKKAIQKLEARHMEHIAAYGEGNERRLTGRHETADINTFVWGVANRGASVRVGRDTEKEGKGYFEDRRPASNMDPYVVTSMIAETTILSKAGLSNGK

SEQ ID NO: 3077 - protein, 409 aa, Triticum aestivum
  misc_feature (24)..(24): Xaa can be any naturally occurring amino acid
  unsure (1)..(409): unsure at all Xaa locations
IKGVRISGRPLYLDMQATTPVDPXPFSPIRPSYLSRYGNPHSRTHLYGWESDAAVEEARARVARLIGADPREIFFTSGATECNNIAVKGVMHFYRDRRRHVITTQTEHKCVLDSCRYLQQEGFEVTYLPVRPDGLIDVAQLADAIRPDTGLVSVMAVNNEIGVVQPLEEIGRICREKGVPFHTDAAQALGKIPIDVNQMGIGLMSLSAHKIYGPKGVGALYLRRRPRIRVEPQMSGGGQERGIRSGTVPTPIVVGFGAACEIAAKEMDYDERRVSALQQRLLDGIRSKVDDVVINGSMEHRYAGNLNLSFAYVEGESLLMGLKEVAVSSGSACTSASLEPSYVLRALGVDEDMAHTSIRFGIGRFTTEEEVDRATELTVHQVLKLREMSPLYEMAKAGIDIKSIQWSQH

SEQ ID NO: 3078 - protein, 282 aa, Triticum aestivum
  misc_feature (47)..(47): Xaa can be any naturally occurring amino acid
  unsure (1)..(282): unsure at all Xaa locations
SADAWATDQQTVSPDVIRRYYAATEEGFLNLVRKQWLIKPQIASVGXCCLVGIINEGVLYIANTGDSRAVLGRVERGVKDIKAVQLSSEHNASFQEVRDELRQMHPDDPRIVVLKHNVWRVKGIIQVSRTIGDAYLKSSEFNREPLLARFRIPGPFHKPILCPEPSIEEHRLCAEDQFVIFASDGLWEHLSNQEAVDIVHCSPRNGIARRLIKAALREAAKKREMRYSDLKKIDRGVRRHFHDDITVVVLFMDPALVSRRLYGGPLLSLRGGGSTPTFAQKC

SEQ ID NO: 3079 - protein, 378 aa, Triticum aestivum
MKLVHRNLARNGPGSAKLLPEEEDDLWHAYNLIAVGDSLQAVTVRKVLRDSASGGRDAERVKLKLEIVVESVDYDKEGNVLRVRGKNITENDHVKIGQFHTLELELKRPFVLRKEYWDWLALDTIQQACDPTASADLAVILMQEGLAHLFLIGRSITATRSRIETSIPRKHGPAIAGYESALKKFFEHVLQALLKHIDFEVVQCVVIASPGFTKDQFRDYMHLEAARRDLRVIIENKSRIILAHAPSGYKHSLKEVLDTPGVMSLIKDTKAAQEVQALKEFFAMLTNDSARACYGPKHVEVAHERLAIQTLLMTDTLFRNTDIASRRKYVNLVESVKKYGGTVHIFSSMHVSGDQLAQLTGIAAILRFPLPDLEDIEM

SEQ ID NO: 3080 - protein, 468 aa, Triticum aestivum
MDRLRGSALLLGVLLAGSLFALCAAKEEAKKLGTVIGIDLGTTYSCVGVYKNGHVEIIANDQGNRITPSWVGFTDGERLIGEAAKNQAAVNPERTVFDVKRLIGRKFEDKEVQRDMKLVPYKIVNKEGKPYIQVKIKDGETKVFSPEEISAMILGKMKETAEAYLGKKINDAVVTVPAYFNDAQRQATKDAGVIAGLNVARIINEPTAAAIAYGLDKRGGEKNILVFDLGGGTFDVSILTIDNGVFEVLATNGDTHLGGEDFDHRIMDYFIKLIKKKHGKDISKDNRALGKLRREAERAKRALSNQHQVRVEIESLFDGTDFSEPLTRARFEELNNDLFRKTMGPVKKAMDDAGLEKTQIHEIVLVGGSTRIPKVQQLLRDYFDGKEPNKGVNPDEAVAFGAAVQGSILSGEGGDETKDILLLDVAPLTLGIETVGGVMTKLIPRNTVIPTKKSQVVETAVISLLSEL

SEQ ID NO: 3081 - protein, 165 aa, Triticum aestivum
MSDSEDHHFESKADAGGADAGASKTYPMQAGAIRKGGFLVIKNRPCKVVEVSTSKTGKHGHAKCHFVALDIFNGKKLEDIVPSSHNCDVPHVDRTEYQLIDISEDGFVSLLTDNGSTKDDLKLPTDDAILTQLKDGFAEGKDLALTVMSAMGEEQICAVKDVGPR

SEQ ID NO: 3082 - protein, 538 aa, Triticum aestivum
  misc_feature (156)..(156): Xaa can be any naturally occurring amino acid
  unsure (1)..(538): unsure at all Xaa locations
SDLGSDLALSTPMPSSPSSSAASVDAPPPPEPPHAPYSPSRAGLSPPPPEVYSSYHPEDAHLPYAPPLPPVIHELPDDIGFGFHPPPSLVRASEFLWEDRPSSSTASSSFLPDAATRYRQLLEQTGSRWLRSRPTGRFRSDLPPLSSEAQPLGASXAAVPVPHHETTIDVVGDDKVTGNGVEVGASKESEERGKSVPTFECNICFEMAGEPVVTSCGHLFCWPCLYQWLNVYSNHKECPVCKGEVTEANITPIYGRGNSCSDAEKAADEGKQPGLTIPPRPHGNRLESFRQQFQHLRPMSRRLGDAHGILSSWRRLLDQQIMSSVSRFEGPSEPAVHETGDIAPHTGRLSRLTTRMRARRLLSEVDNSPDAGFVAPDSGLPGNSAPDAPRDASGPVLPEGFDLLQRLTLIGIANTERLATAMSDLRRIATPGQHGASASYLRRLATPGQYGGSASSSNPLNPEATVDGTHVGAAPSTDQASNSSTIAVIQGDAGVSETAGEPSNAGSSRTLRRRGRSSALASLDVDGAPPQRNKRRRM

SEQ ID NO: 3083 - protein, 88 aa, Triticum aestivum
MSSGSSSRSNSPSSDSEWSKKENKMFEEALAYYGVGAPNLCEKVASAMGGTKSTEEVRRHFQFLVDDVNNIEHGRIPFPKYKTQGFWT

SEQ ID NO: 3084 - protein, 341 aa, Triticum aestivum
IAASISMLAIKRANCFHGNGHADPCKVSSVPYMIIFGVAQVFFSQIPDFDQISWLSMLAAAMSFTYSSIGLGLGIVQVIANGGIKGSLTGISIGTVTPMQKVWRSTQAFGDIAFAYSYSLILIEIQDTIRAPPPSESTVMKRATMVSVAVTTVFYMLCGCMGYAAFGDAAPGNILTGFGFYEPYWLIDFANVCIVVHLVGAYQVYCQPIYAAVESWAAGRWPNSEFVVRQYHPFSGKFSLNMFRLVWRTAFVIVSTVLAISLPFFNDILGLLGALGFWPLTVYFPVEMYIRQRGIPRYTTRWVALQTLSFLCFLVSLAAAVASIEGVTESLKNYVPFKTKS

SEQ ID NO: 3085 - protein, 214 aa, Triticum aestivum
  misc_feature (87)..(87): Xaa can be any naturally occurring amino acid
  misc_feature (94)..(94): Xaa can be any naturally occurring amino acid
  misc_feature (134)..(134): Xaa can be any naturally occurring amino acid
  unsure (1)..(214): unsure at all Xaa locations
MASTSTSLSLAFCPLFRPTPQPQSQPRHLDPKFPKPLRLSLAPALSCAAPLAAVPDGVAIDDIIEKDWSFLNASGSHLPRALAAGAXLSPASRXVLAVTPTASFVSALLSESPCELLVAAHESLYVLGGIKEDXRQVKCFHLEGGGKGARGGRRGKPGRRRGPTGGGGYPPRGRGGPGRRRPGQSHHQQKGGCQRRKKAHTTSLHTKLRNKPCA

SEQ ID NO: 3086 - protein, 153 aa, Triticum aestivum
PWRAVALVATVASWMYRTGLLVCVLFRLTCELQILRFEGIYHMFDAEACAAADEIFVEHRRIRTQLLATSHRYRVFIICCLVTITVSQLGALLVALSSQDGKSFANSGNLLVGSPVQLSGFFMCLLRHVGFMGLLRHVGFMGRRLIYGSCTGL

SEQ ID NO: 3087 - protein, 273 aa, Triticum aestivum
LIIRLPIGTLCTRKLGTRKLGPLEGYSRAAAAVDDAVAPLIHALCPLLGSSGELGSRGGVPCDSWRLGVEAYNVRDWKTVPANCEGYVGHYMLGSHFRRDSKVVIDQAIAYVDSLKLAGNGKEVWVFDIDETTLSNLPYYATHGFGARPYNATSFDAYVLEGTAPVLPETKRLYYKLLKVGIKPVFITGRTEDKRAITVGNLRSQGISGWMNLTLKQPGFHGSAISYKSAERKKLQDAGYVIVGNIGDQWSDLLGAPEGARTFKLPDPLYYIS

SEQ ID NO: 3088 - protein, 220 aa, Triticum aestivum
  misc_feature (195)..(195): Xaa can be any naturally occurring amino acid
  unsure (1)..(220): unsure at all Xaa locations
HSITSLYKKAGWYRSGIPGISSTHASDKSFGRDIVDAHYKACLFAGVNISGINGEVMPGQWEFQVGPTVGISAGDQVWVARYLLERITEIAGVVVTFDPKPIPGDWNGAGAHTNYSTESMRKDGGFKVIVDAVEKLKLKHKEHIAAYGEGNERRLTGKHETADINTFSWGVANRGASVRVGRETEQNGKGYFEDXRRPASNMDPYVVTSMIAETTILWKP

SEQ ID NO: 3089 - protein, 325 aa, Triticum aestivum
  misc_feature (226)..(226): Xaa can be any naturally occurring amino acid
  unsure (1)..(325): unsure at all Xaa locations
MHHAAAAGLDLGLGLGLGLASQGSLTSSTTTSSSSPASHWTAALSSVVGPQESYGLHQYAGHNQPRKEEPGMRTSTSPESGVSAGTKRGLERTGSGVSRAAGSDEDDDGGDGAGGRKKLRLSKDQAAVLEECFKTHSTLNPKQKTALANRLGLRPRQVEVWFQNRRARTKLKQTEVDCEYMKRWCEQLAEQNKRLEKEVAELRALKAAPAVHAQQGRPAGKLTMCXSCRRVGRHHRRNGRQPQQHHDPQRATPRPPGQSGGKVLTRHCKFFRSTKTGTCRNGRKGGGPLEGRGLSLSRGVRVGYETPRERRAGEAPAPLGGVGRR

SEQ ID NO: 3090 - protein, 258 aa, Triticum aestivum
  misc_feature (214)..(214): Xaa can be any naturally occurring amino acid
  misc_feature (242)..(242): Xaa can be any naturally occurring amino acid
  unsure (1)..(258): unsure at all Xaa locations
LNKFVQKSRLVPVRNSRDIVDPRVRNGPITDASQLPKWNYDGSSTGQAPGEDSEVILYPQAIFKDPFRRGDNLLVMCDCYTPQGVPIPTNKRHNAAKIFNTPKVAAEETWYGIEQEYTLLQKDVNWPLGWPIGGYPGPQGPYYCAAGADKAFGRDIVDAHYKACLYAGINISGINGEVMPGQWEFQVGPSVGIAASDQLWVARYILERITEVAXGVVLSLDPKPIPGDWNGAGAHTNYSTKXMREGGGYGVIKTAIER

SEQ ID NO: 3091 - protein, 160 aa, Triticum aestivum
MSDSEEHQFESKADAGASKTYPQQAGTIRKNGYIVIKNRPCKVVEVSTSKTGKHGHAKCHFVAIDIFTGKKLEDIVPSSHNCDVPHVNRTEYQLIDISEDGFVSLLTDNGNTKDDLKLPTDETLLGQIKDGFAEGKDLVVSVMSAMGEEQINALKDIGPK

SEQ ID NO: 3092 - protein, 616 aa, Triticum aestivum
  misc_feature (107)..(107): Xaa can be any naturally occurring amino acid
  misc_feature (515)..(515): Xaa can be any naturally occurring amino acid
  unsure (1)..(616): unsure at all Xaa locations
MAAMNVSRAIGAALRSPASSPVAEAAAAAKAKDAEKLRFIDEMTCNVDSVQERVLAEILARNVDTEYLKNCGLDGAADRDAFRAKVPVVSYDALQPYIQRIVNGDRXSPILSTHPVSEFLTSSGTSAGERKLMPTIRDELDRRQLLYSLLMPVLNLYLSGLDKGKGLYFLFVKSETKTPSGLTARPVLTSYYKSEQFKNRPYDPYHNYTSPTAAILCADAFQSMYAQMVCGLCQRHEVLRVGAVFASGLLRAIRFLQLNWKELAADIEAGALSPRVTDASVREAVAGILRPDPELAQFVRDECCNDDWAGIVRRIWPNTRYLDVIVTGAMAQYIGTLKYYSGDLPMACTMYASSECYFGLNLRPLCDPSEVSYTIMPNMGYFEFLPVDSATGAASCVDAGNLVDLARVEAGREYELVITTYAGLNRYRVGDVLRVTGFHNAAPQFQFVRRKNVLLSIESDKTDEAELQRAVERASALLRPHGASVAEYTSQACTKSIPGHYVIYWELLTTGAGAXTAVDKATLDACCLEMEEALNTVYRQSRVADGSIGPLEIRVVRAGTFEELMDYAISRGASINQYKAPRCVTFPPIIELLDSRVVSSHFSPALPHWTPARRSD

SEQ ID NO: 3093 - protein, 280 aa, Triticum aestivum
  misc_feature (31)..(31): Xaa can be any naturally occurring amino acid
  misc_feature (62)..(62): Xaa can be any naturally occurring amino acid
  misc_feature (86)..(86): Xaa can be any naturally occurring amino acid
  misc_feature (175)..(175): Xaa can be any naturally occurring amino acid
  misc_feature (195)..(195): Xaa can be any naturally occurring amino acid
  misc_feature (221)..(221): Xaa can be any naturally occurring amino acid
  unsure (1)..(280): unsure at all Xaa locations
KWAMARTPTLLLIVAAALLAASCSAWEANIXMPTSAADVDEAVVAPLIHALRPLLGSGKHAXGVECDSWVLGVEAHNVRDWKTVPXASCEGYVGHYMLGKHFRRDSKIVIDQAVAYVDSLKLAGNGKEVWVFDVDETTVSNLPYYAKHGFGATPFNATSFNAYVLEGSAPALPEXTKRLYNKLRSVGIKPVFLTXGRTEDQRAITITNLRRQGISGWMNLXLKQPGFKGSAVTYKSGERQKLQDAGYIIVGNIGDQWSDILGAPEGARTFKLPDPMYYIG

SEQ ID NO: 3094 - protein, 88 aa, Triticum aestivum
MSSGSSSRSTSPSSDSEWSKKENKMFEEALAYYGVSAPNLWEKVASAMGGTKSAEEVRRHFQILVDDVNSIEHGRIPFPKYKTQGFWT

SEQ ID NO: 3095 - protein, 162 aa, Triticum aestivum
MAGMVFGLENPMMTALQHLLDIPDGEAGGAGAAGGEKQGPTRAYVRDARAMAATPADVKELPGAYAFVVDMPGLGSGDIKVQVEDERVLVISGERRREEKEDAKYLRMERRMGKLMRKYVLPENADMEKISAVCRDGVLTVTVEKLPPPEPKKPKTIQVQVA

SEQ ID NO: 3096 - protein, 88 aa, Triticum aestivum
MSSGSSSRSTSPSSDSEWSKKENKMFEEALAYYGEGAPNLWEKVASAMGGTKSAEEVRRHFQILIDDVNSIEHGRIPFPKYKTQGFWT

SEQ ID NO: 3097 - protein, 391 aa, Triticum aestivum
MASEMSKDVKFSEEEVTSHPRVLEGEEQAVAPARQSSIFALTLDELQYSVCEAGRNFGSMNMDEFMSNIWNADEFQAATGGGLVGMEVAPVVGAGGGGGGLDAGGSNLARQESFSLPPPLCRKTVDEVWAEINREPRPVHAQPQAARPSQQPPVQPSVPANDRQGTLGELTLEQFLVKAGVVRGSGAGGQAPVPVGMVHGQMNPAQQGQQPGPMMYPIAPANGMFPAMGDGMGFIPNGYAGMVVVPPPPPPQGGVVGIVSPGSSDGRSAMTQADMMNCMGEGAMMENGGTRKRGAPEDQSCERSIERRHRRMIKNRESAARSRARKQAYTVELEAELNHLKEENARLKAEEKTILLTKKQMLVEKMIEQSKENVNAKKGAPLSRHCGSCIW

SEQ ID NO: 3098 - protein, 193 aa, Triticum aestivum
MRNGSTVCDAAAAVGLGVAPRYRGVRKRPWGRFAAEIRDPAKRARVWLGTYDSAEAAARAYDVAARTLRGPLATTNFPHDLVSFPTLPALPRPSPPASPGPACSASSTVESYSGPRAANAPRAVPRAPGPTPLLAKLPGGDAGCQSDCASSASVVDDAGDEAASAVVRARAPFVFNLNLPPPSDELCTELRLF

SEQ ID NO: 3099 - protein, 74 aa, Triticum aestivum
  misc_feature (27)..(27): Xaa can be any naturally occurring amino acid
  misc_feature (29)..(30): Xaa can be any naturally occurring amino acid
  unsure (1)..(74): unsure at all Xaa locations
QRRQMRKIGAPLLEGILAFYLGFEWIXTXXILAPMITHGIYSAVVLGHGLWKIQDHRRRLRQRVQEIRRSSDEL

SEQ ID NO: 3100 - protein, 173 aa, Triticum aestivum
MHPTRWELSHMVDLQAAALVISVVAAEVTSCRIRHEEKTSAAIAGPSSFVPADAAADQSHAARGAEEMSTPGGEDDKKPASAGGDGGGAHINLKVKGQDGNEVFFRIKRSTQLKKLMNAYCDRQSVDMKAIAFLFDGRRLRAEQTPDELEMEDGDEIDAMLHQTGGCRLPPRA

SEQ ID NO: 3101 - protein, 586 aa, Triticum aestivum
MDSTDRFDKSPLLDGGSSSQENSTEYTGDGSVCTSGHPASRKHTGNWKVSSLTIVCSFCCYLAYSSIGKNLVSYLTKVLDETNLDAARHVATWQGTSYLAPLVGAFVADSYLGKYRTALISCTIFIMGMMMLLLSAALPLISAGPHAWTLWADPISSRYIIFLVGLYMVGLGYGAQCPCVTSFGADQFDDTNEMEKTRKSSFFNWHYFSINAGSLIAGTVIVWVQEHEGWLWGFTISTLFVTLGISVFFLGSIVYRFQKPGGSPLARIWQVVVAASRNFDKVLPCDSSALYEFSGQGSAIEGSRKSEHTSGLEFFDKAAILTLPDCESPGQLNKWKICTVTQVEELKILIRMFPIWSAMVLFAAVQEQMFSTFVEQGMTMEKHVGSFEIPTASFQSIDTLTVIMLVPIYERVLVPVIRKFTGRANGISSPQRIGIGLCFSMLSMVLAALVESNRLQIAQSEGLVHSKVTVPMSILWQGPQYFLLGVAEVFSNIGLTEFFCDESPDAMRSLGMAFSLLNISAGNYLSSFILSLVPVFTARGGSPGWIPDNLNEGHLDRFYLMMAGLSLLNIFVFVFYARRYKCKKAS

SEQ ID NO: 3102 - protein, 162 aa, Triticum aestivum
MEGRMFGLETPLMTALQHLLDVPDGESGGAGNAAGEKQGPTRAYVRDARAMAATPADVKELPSAYAFVVDMPGLGSGDIKVQVKDERVLVISGERRREEKEDAKYLRMERRMGKMMRKFVLPENADMEKISAACRDGVLTVTVEKLPPPEPKKPKTIQVQVA

SEQ ID NO: 3103 - protein, 322 aa, Triticum aestivum
  misc_feature (284)..(284): Xaa can be any naturally occurring amino acid
  unsure (1)..(322): unsure at all Xaa locations
MAMAMASTLSVLLLLCLAAAASASPQLSPQFYAKSCPRALATIKRAVTAAVRSEPRMGASLLRLHFHDCFVQGCDASVLLSDTATFTGEQGAAPNARSIRGMNVIDNIKAQVEAVCRQTVSCADILAVAARDSVVALGGPSWTVPLGRRDSTTASLSLANSDLPPPSFDVANLTANFAAKGLSVTDMVALSGAHTIGQSQCRFFRSRLYNETNIDAAFATSLKANCPRPTGSGDSSLAPLDTTTPNAFDNTYYRNLMSQKGLLHSDQVLINDGRTAGLVRTYSXSGSARFNRDFTAAMVRMGNISPLTGTQGQVRLSCSRVN

SEQ ID NO: 3104 - protein, 241 aa, Triticum aestivum
  misc_feature (195)..(195): Xaa can be any naturally occurring amino acid
  unsure (1)..(241): unsure at all Xaa locations
MDGEEPAKEIEALIQRLRLHQPPPSPYAGDPSTAATPNAGELLKPRRAAVLICLFRGSAGELRVILTKRSSSLSTHSGEVALPGGKADEGDADDAATALREAKEEIGMDPCLVTVVTSLEHFLSKHLLVVVPIVGILSDIEGFKPVLNIDEVDDIFDVPLEMFLKDENRRSEERERMGQVFTIQYFDYEKENRKXVIWGLTARILIHAASIVYQRPPDFVERRLQFNLPKYSISSSGSATS

SEQ ID NO: 3105 - protein, 342 aa, Triticum aestivum
MCGGAILAELIPGAPARRAASGHGHVWPGKGAKQTKAAAADDFEAAFREFNEDSDEEDVVMVVERQEEVAESKPFVFAASPKKKQQQQQEEEEEQAAPARRRKPAQYRGVRRRPWGKWAAEIRDPVKGVRVWLGTFPSADAAALAYDEAARAIRGPRAKLNFPSSSAVAAAAPGARKRGRAGADAAPAAKPAQVITLVDEEEEHASSLFVKHEADASEGSESSGALPDFSWQGVSAFDEAPAYPAPEPETEQLAKRARTTEAEDADEGMSAHQASDCDSDALFDALLFADQFAYFNGGAYESLDSLFSADAVQSGATAADEAALGLWTFDDDCLVDECSLSF

SEQ ID NO: 3106 - protein, 384 aa, Triticum aestivum
  misc_feature (57)..(57): Xaa can be any naturally occurring amino acid
  misc_feature (83)..(83): Xaa can be any naturally occurring amino acid
  misc_feature (89)..(89): Xaa can be any naturally occurring amino acid
  misc_feature (95)..(95): Xaa can be any naturally occurring amino acid
  unsure (1)..(384): unsure at all Xaa locations
MADRANHPSVMQKFGGQFHLASSFSEGVRARNICPSVPSYERRFTTSCYMTQNLGIXSVPIMSSSPMFANAPPEKKGVKNFAXIDFLNXEGVSSXQVSKTAAAPIERVKLLIQNQDEMIKAGRLSEPYKGIGDCFGRTIKDEGFGSLWRGNTANVIRYFPTQALNFAFKDYFKRMFNFKKDKDGYWKWFGGNLASGGAAGASSLFFVYSLDYARTRLANDAKASKGGGERQFNGLVDVYRKTLKSDGIAGLYRGFNISCVGIIVYRGLYFGLYDSLKPVLLTGTLQDNFFASFALGWLITNGAGLASYPIDTVRRRMMMTSGEAVKYKSSLDAFQQILKKEGAKSLFKGAGANILRAIAGAGVLSGYDQLQILFFGKKYGSGGA

SEQ ID NO: 3107 - protein, 331 aa, Triticum aestivum
MSAAGSRVEAAPRLAQWRVDALPCYTYRKSDSFRVGLWNWYLSVERNNKQTCVKLFAELSNSAKNTAPAPIASFVTKLLISFPPNQKIIEHPGILDKHLKHEGLVWTIDSSFTGRFVIEIEFLDLKVADSSGGEPASIWASRQIKQSSDNTALSSLARMLQEGILCDITINADDGSIRAHRAILAARSPVFRSMFSHDLREKELSTVDISDMSLDACRGFLNYIYGDLRSEEFLAHRLALLGAADKYDIADLKEACVESLLEDIDARNVIERLQTGHLYRLQRLKDSCLRFLVDFRKVYEMQEEFSAFLQTADRDLVAEVFQGVLAAWSGR

SEQ ID NO: 3108 - protein, 279 aa, Triticum aestivum
YNKFVQKSRLVPVRNSRDIVDPRVRPRVRTGREDAIEYAKKHNVPIPVSKKSIYSRDRNLWHLSHEGDILEDPANEPKEDMYMMSVSPENAPSKPEYLEIGIVAGVPTSINGKDLSPATLLAKLNEIGGKHGIGRIDMVENRLVGMKSRGVYETPGGTIMAAAVRELESLTLDRETMQWKDMLALKYAELVYAGRWFDPLRLSMDAFMETITATTTGSVTLKLYKGSVTVASRKSPYSLYREDISSFENGEIYDQADAEGFIRLYGLPTRVRAMLEKGI

SEQ ID NO: 3109 - protein, 371 aa, Triticum aestivum
  misc_feature (180)..(180): Xaa can be any naturally occurring amino acid
  misc_feature (282)..(282): Xaa can be any naturally occurring amino acid
  misc_feature (289)..(289): Xaa can be any naturally occurring amino acid
  misc_feature (347)..(347): Xaa can be any naturally occurring amino acid
  unsure (1)..(371): unsure at all Xaa locations
MTKDVEMAARNGGNGAVAGEAYYPSPPAQGGDADVDDDGKQRRTGTVWTASAHIITAVIGSGVLSLAWATAQLGWVVGPITLMLFAAITYYTSGLLADCYRTGDPLTGKRNYTYMDAVASYLSRWQVWACGVFQYVNLVGTAIGYTITASISAAAINKANCFHKNGRAADCGVYDSMYMXVFGVVQIFFSQVPNFHDLWWLSILAAVMSFTYASIAVGLSLAQTISGPTGKATLTGTEVGVDVDSAQKIWLAFQGLGDIAFGYSYSMILIEIQDTVRSPPAXENKTMKXKATLVGVSTTTAFYMLGGFLGYPGFGKGAKGNIFTGSGFKTPTGSSNSPKVLFVGPLXGPYQGFGKPIFAAVENLAPGPTGP

SEQ ID NO: 3110 - protein, 161 aa, Triticum aestivum
  misc_feature (83)..(83): Xaa can be any naturally occurring amino acid
  unsure (1)..(161): unsure at all Xaa locations
MSDSEDHHFESKADAGASKTYPMQAGAIRKGGFLVIKNRPCKVVEVSTSKTGKHGHAKCHFVALDIFNGKKLEDIVPSSHNCXVPHVDRQDYQLIDITDDGYVSLLTESGNTKDDLKLPTDDVLLGQIKTGFADGKDLILSVMSAMGEEQICAVKEIGGGK

SEQ ID NO: 3111 - protein, 386 aa, Triticum aestivum
MCGGAILAGFIPPSAAAAAAKAAAAKKQQQQQQQQQRSVTADSLWPGLRKKPAEEEDFEADFRDFERDSNDDDDAVEEVPPPPATAGFAFAAAAEVALPAPTRLDAIQHDGPAAKSVKRVRKNQYRGIRQRPWGKWAAEIRDPSKGVRVWLGTYDTAEEAARAYDAEARKIRGKKAKVNFPEEAPTVQKSTLKPTAVKSAKLAPPPKTCEDEPFNHLSRGDNDLFAMFAFNDKKVSAKPAESVDSLLPVKPLVPTETFGMNMLSDQSSNSFGSTDFGWDDEAMTPDYTSVFVPNAAAMPAYGEPAYLQGGAPKRMRNNFGVAVLPQGNGAQDIPAFDHEMKYSLPYVESSSDGSMDSLLLNGAMQDGASSGDLWSLDELFMAAGGY

SEQ ID NO: 3112 - protein, 399 aa, Triticum aestivum
MAATAAASPSSLLLSRRHGASLSSSSASRAGASRLRAPRCVLGTAEQLRVVEAWKRTGGADPWAAAWTPKTPAQEARLAALPQEARDSRLKIFSGTANRPLAQEIASYLGVDLGKILIKRFADGEIYVQLQESVRGCDVFLVQPTCSPVNENLMELFIMIDACRRASARSITVVIPYFGYARADRKAQGREAITAKLAANLLTEAGSDRVIVCDMHSAQALGYFDIPVDHIYGQPVILDYLASKTISKDLVVVSPDVGGVVRARAFAKKLSDAPLAIVDKRRQGHNLSEVMHLIGDVKGKVAIMVDDMIDTAGTITSGAALLKQEGAEAVYACCTHAVLSPPAIERLSGGIFEEVIVTNSILLPEDKCFPQLTVLSMANLVAETIWHVHRDGSVSSIFQ

SEQ ID NO: 3113 - protein, 552 aa, Triticum aestivum
  misc_feature (36)..(36): Xaa can be any naturally occurring amino acid
  misc_feature (60)..(60): Xaa can be any naturally occurring amino acid
  unsure (1)..(552): unsure at all Xaa locations
MCGILAVLGCADDTQGKRVRVLELSRRLKHRGPDWXSGMHQVGDCYLSHQRLAIIDPASXGDQPLYNEDKSIVVTVNGEIYNHEQLRAQLSSHTFRTGSDCEVIAHLYEEHGENFIDMLDGVFSFVLLDTRDNSFIAARDAIGVTPLYIGWGIDGSVWISSEMKGLNDDCEHFEIFPPGHLYSSKQGGFKRWYNPPWFSEVIPSVPYDPLALRKAFEKAVIKRLMTDVPFGVLLSGGLDSSLVAAVTVRHLAGTKAAKRWGTKLHSFCVGLEGSPDLKAAKEVANYLGTMHHEFTFTVQDGIDAIEDVIYHTETYDVTTIRASTPMFLMSSKIKSLGVKMVISGEGSDEIFGGYLYFHKAPNKEELHRETCQKIKALHQYDCLRANKATSAWGLEARVPFLDKEFINEAMSIDPEWKMIRPDLGRIEKWVLRKAFDDEEQPFLPKHILYRQKEQFSDGVGYSWIDGLKAHAESNVTDKMMSNAKFIYPHNTPSTKEAYCYRMIFERFFPQNSAILTVPGGPSVACSTAKAVEWDAQWSGNLDPSGRADHEIV

SEQ ID NO: 3114 - protein, 472 aa, Triticum aestivum
GGSGKTLDKTFGFVENHRAKYELGEEVGRGHFGYVCSAVVKEGEYKGQTVAVKIISKAKMTTAISIEDVRREVKILKALSGHNNLVKFYDACEDALNVYIVMELCEGGELLDRILARGGRYTEEDAKAIVVQILSVVAFCHLQGVVHRDLKPENFLFTTRDENAPMKLIDFGLSDFIRPDERLNDIVGSAYYVAPEVLHRSYSMEADIWSIGVITYILLCGSRPFWARTESGIFRSVLRADPNLDDSPWPSVSAEAKDFVKRFLNKDYRKRMTAVQALTHPWLRDDQRQIPLDILVYRLIKQYLRATPLKRLALKALSKALKDDELLYLRLQFDLLEPRDGVVSLDNFRTALTRYLTDAMKESRILEFLHALEPLAYRSMDFEEFCAAAISPYQLEALDRWEEIAGTAFQHFEQEGNRVISVEELAQELNLAPTHYSIVQDWIRKTDGKLNFLGFTKFLHGVTIRGANTRRH

SEQ ID NO: 3115 - protein, 211 aa, Triticum aestivum
DEVVKYSPHARAIRDVEDEELRTFFAGMSPWQFILVVAASSVGEELFYRAAVQGALADIFLRGTELMKDARGIVSLSGMVPPFVPFAQTFAAAITAALTGSLYYIATAPKDPTYVVTPVMRSHAGRQNMKKLFSAWYERRQMRKIYSPLLEGILAFYLGFEWIQTGNILAPMITHGIYSAVVLGHGLWKIQDHRRRLRQRVQEIRRGSDGL

SEQ ID NO: 3116 - protein, 565 aa, Triticum aestivum
MASACPRPIFLSFPKSPSPPLAVPGKHHPSATATASLSLSTRARAAPSSAPSPSPPPSPPADGVGPAAPTRGDVYLGRQLAAAATAGARARAPEEDAERRRRRKEKRKALAKKTPSGVACCYGCGAPLHTGEEGSPGHVEPATYDLKKRHNQLKTVLCGRCKLLSHGHMVTAVGGHGGYPGGKQFVSAEELREKLSYLRHEKALIVKLVDIVDFNGSFLARIRDFAGANPIVLVITKVDLLPRDTDLNCIGDWVVESVVRKKLNVLSVHLTSSKSLVGITGVIQQEKKARDVYILGSANVGKSAFISAMLKTMAYKDPVAAAAQKYKPIQSAVPGTTLGPIQIEAFLGGGKLYDTPGVHLHHRQAAVIHADDLPSLAPQSRLKGRCFPANDTDVGLSGNTLFWGGLVRIDVVKALPRTRLTFYGPKKLSINMVPTTEADEFYKREVGVTLTPPTGQERAEGWCGLQGVRELQIKYEELDRPASDIAISGLGWIAVEPLGVPSSDPDSCVEEEGGGSGELHLRVHVPKPVEVFVRAPLPVGKAASQWYRYQELTEVEEELRPKWHY

SEQ ID NO: 3117 - protein, 263 aa, Triticum aestivum
MAPSSPPAAAVASEGDEQQQQIVVAAAAAAAAKKGGGKRGRREMRRIEDATSRQVTFSKRRSGLLKKALELGVLCDAEVALIVFSPRGRLYEYASAPDLQKTIDRYLNHTKGTSTNEKTVEQPAAGVQMCRSEATALKHKIDAIEAYQRKLSGEGLGSCPAHELQELELQLEKSLSCIRQKKQQKMLDKILELKEKERKLLTENSVLREEYKALPLLELATAAAAAERSPDGAGAEEAEEDERRRHYMEVETELVIGRPGSSS

SEQ ID NO: 3118 - protein, 466 aa, Triticum aestivum
  misc_feature (420)..(420): Xaa can be any naturally occurring amino acid
  unsure (1)..(466): unsure at all Xaa locations
LRNIWQHVYRKKMHEVKEIEGHDSCDDLQILRYGFEGFDEKGLFMTVDSDATRKRKDVDHGDQDSSDGATAKKARVVWSVDLHQKFVNAVNQIGFDKVGPKKILDLMNVPGLTRENVASHLQKYRLYLGRLQKQNEERLLGSARQDFSTKGPSSENLNLRSSFQEQPSNTSSGYPHASQKIQGQSSVSDSQLEETKRTVPLPAPDRSMNSVSSAAEPQNVAGVSPIGGVLSFKGLPVNQDRKPSETMILECQAWTGGVPAKQFMQYPKHNHARCDLLGDYACLPKPDLEHPTAPGHLFTPPPLISMSCSTEMDARNFSDVKPALLDCIKSFSPALTCTADSVSVQISDSVVTATNAADRKFSSVEGLPSTKDCYFGQTSNQGSWLRSQEEPNIICGADFASLPEDLPGYPLQGGLSFENXGLSSIDLFHYNDAMILSGLQSNWYDDQDHFSSETTDYPLMDGCLFA

SEQ ID NO: 3119 - protein, 295 aa, Triticum aestivum
  misc_feature (234)..(234): Xaa can be any naturally occurring amino acid
  unsure (1)..(295): unsure at all Xaa locations
LSRTSLYKKAGWYRSGIPGISSTHASEQQEQQQEEVVQVSNKSSSSSGNNKQVEDGYNWRKYGQKQVKGSENPRSYYKCTYNNCSMKKKVERSLADGRITQIVYKGAHDHPKPLSTRRNSSGCAAVVAEDHTNGSEHSGPTPENSSVTFGDDEADKPETKRRKEHGDNEGSSGGTGGCGKPVREPRLVVQTLSDIDILDDGFRWRKYGQKVVKGNPNPRSYYKCTTVGCPVRKXVERASHDNRAVITTYEGKHSHDVRWPGRALPGHFSQQSAVSGLPRVKPTSNRPGARQPGVS

SEQ ID NO: 3120 - protein, 236 aa, Triticum aestivum
  misc_feature (227)..(227): Xaa can be any naturally occurring amino acid
  unsure (1)..(236): unsure at all Xaa locations
MSDPSSTASSYSTSPRLTTGVVNFLARRAMTTQNHHRAAASLHSPGSSTGSADTAPWHHRAPATPPPLLPFHASDADEMLLLDMLSQHQEDMHTDTATAPVPTATAATAVKREVSEEEEAKVAAGGSRRAFRGVRKRPWGKFAAEIRDSTRDGVRVWLGTFDSPEAAALAYDQAAFAIRGGAAVLNFPARQVRRSLEGAKDDVCGRAHGLSPVLALKRRPSMHREAXDKQKVRTVR

SEQ ID NO: 3121 - protein, 102 aa, Triticum aestivum
MSGVTADEDKKPAGDGGGAHINLKVKGQDGNEVFFRIKRSTQLKKLDERLLATVRSVDLNSIAFLFDGRRLRGEQTPDELEMEEGDEIDAMLHQTGGGFPRP

SEQ ID NO: 3122 - protein, 214 aa, Triticum aestivum
TSIPRKHGPAIAGYESALKKFFEHVLPALLKHIDFEVVQCVVIASPGFTKDQFRDYMHLEAARRDLRVIIENKSRIILAHAPSGYKHSLKEVLDTPGVMSLIKDTKAAQEVQALKEFFAMLTNDSARACYGPKHVEVAHERLAIQTLLMTDTLFRNTDIASRRKYVNLVESVKKYGGTVHIFSSMHVSGDQLAQLTGIAAILRFPLPDLEDIEM

SEQ ID NO: 3123 - protein, 420 aa, Triticum aestivum
MEGSSVEVPPYFLCPISLEIMRDPVTLATGITYDRCSIERWLSDGHATCPVTQQKLAEADREATPNHTLRRLTQAWCALHAVERFPTPRLPLDAGRVAAIVEEGHGAGRQKELAALREIKSIIAESDRNRRCVEATPGAVEFLVSVFRNHATASKSAEDLLELSLDSPTSTSSPEEDALSVICSLKPSKKSLVRILEENGDFLDTLVYMLRRPSYRSRCYGILLLKAMVSVMEPARLMAVRTEVVQEVVRVVSDRVSAKAVKAALNVLCRLCPWGRNRVKAVEAGAMTVLVELLLDEGGRHPTELAVVAIDHLCGCAEGRSDLVAHPAGLAVVAKKAMRVSLTTTESAVRALHAVATHSPTPAVLQEMLAVGVVAKLLLVLQVDAGERARAKAKELLKMHARVWKDSPCLQVHLKAHYPC

SEQ ID NO: 3124 - protein, 170 aa, Triticum aestivum
MPPPCPTLCRLPATNLGLPWCPRSIPFPRLALAARRARAVAARASSSSSSPDSSFGSRMEDSVKKTLADNPVVIYSKSWCSYSMEVKGLFKRIGVDPHVIELDQLGAQGPQLQKVLERLTGQSTVPNVFIGGKHIGGCTDTVKLYRKGELATMLTELDIKVNHHDKIEHD

SEQ ID NO: 3125 - protein, 217 aa, Triticum aestivum
  misc_feature (62)..(62): Xaa can be any naturally occurring amino acid
  unsure (1)..(217): unsure at all Xaa locations
MSGRHLGLLPCLLLLLAAAGSVASASSPPKVSPAEATGFVRRCCRATSYPRACERSLVPRAXPAVGLSPRRLAQAALAAAADAARNCSAYIGSPSSSYASSKGKGKGGGAMGDCAEMVRDAADLLRQSAAELGGRVGRASSPRFAWCLSNVQTWASAALTDAETCLDSLATYAGAGAPREDVRRRVVAVEQAAGIALALVNRLQPARRTATASASHQ

SEQ ID NO: 3126 - protein, 90 aa, Triticum aestivum
  misc_feature (7)..(7): Xaa can be any naturally occurring amino acid
  misc_feature (11)..(11): Xaa can be any naturally occurring amino acid
  misc_feature (64)..(64): Xaa can be any naturally occurring amino acid
  unsure (1)..(90): unsure at all Xaa locations
MATHHCXKLEXIVPSSHNCDVPHVNRTEYQLIDISEDGFVSLLTDNGNTKDDLKLPTDENLLGXIKGWGLLKGKDPGWWSHRWGGAKFNA

SEQ ID NO: 3127 - protein, 383 aa, Triticum aestivum
  misc_feature (87)..(87): Xaa can be any naturally occurring amino acid
  misc_feature (94)..(94): Xaa can be any naturally occurring amino acid
  misc_feature (98)..(99): Xaa can be any naturally occurring amino acid
  misc_feature (106)..(106): Xaa can be any naturally occurring amino acid
  misc_feature (123)..(123): Xaa can be any naturally occurring amino acid
  misc_feature (219)..(219): Xaa can be any naturally occurring amino acid
  unsure (1)..(383): unsure at all Xaa locations
MASEMSKDVKFSEEEVTSHPRVLEGEEQAVAPARQSSIFALTLDELQYSVCEAGRNFGSMNMDEFMSNIWNADEFQAATGGGLVGMXEVAPVVXAGGXXEGGLDAXGKHLARQESFSLPPPLXKEVEEVWAEINRETRPVHSQPQSARPSPLIPVEPPAGNGGGVAANEQWGTLGEMTLEQFLVKVGVVWGSGTGGQEPVPVGMVHGQMNPTPANGMFXVMGDGMVFIPNGYIGMVVVPPPLPPQGGVGIVSPGSSYGRSTMTEVDMMNCMGDRAMMENSGARKRGAPEDQSCEGSIERRHHHMIKNRESAAQSRGWKQAYTKELEAELNHLKEENARLKAEEKTILLTKKQMLVEKVMEQPKENVNTKKGGALSRRCASCIW

SEQ ID NO: 3128 - protein, 127 aa, Triticum aestivum
  misc_feature (104)..(104): Xaa can be any naturally occurring amino acid
  unsure (1)..(127): unsure at all Xaa locations
MSLIRIAFSLVLLLAAAESAAATRSPSAFVQNAIYSNRITIFSKSYCPYCMRAKRIFKDLNEDPYVVELDLREDGREIQGVLLDLVGRNTVPQVFVYGHHVGGXSDDTKTALSDGQLQKLLGKSQSQ

SEQ ID NO: 3129 - protein, 267 aa, Triticum aestivum
  misc_feature (132)..(132): Xaa can be any naturally occurring amino acid
  unsure (1)..(267): unsure at all Xaa locations
MAPQSLDLGLSLGLGLVSRPSQPSFWYSGGNVAADQEVGPTPTAAAVEERRCSPGSPASSGSGSGLKRGAERSAGSGDEDQDDDGGNARKKLRLSKDQAAVLEECFKTHHTLTPKQKLALANSLGLRPRQVXEVWFQNRRARTKLKQTEVDCEYMKRWCEQLAEQNRRLEKEVAELRALKAAPPAHNGAAAGPLTTLTMCLSCKRVASTSSASACTVPSFSANAGIGMPMPSPVAQPEHRQFFCGFRDTGAAYGGPAGLTKVVKAAR

SEQ ID NO: 3130 - protein, 606 aa, Triticum aestivum
  misc_feature (401)..(401): Xaa can be any naturally occurring amino acid
  unsure (1)..(606): unsure at all Xaa locations
MDTHIGSVDGPSPAAVNGAVGCPASAPGCPIMSSHPVVSAGEASLGRHLARRLVQVGVSDVFAVPGDFNLTLLDHLVDEPGLRLVGCCNELNAGYAADGYARARGVGACAVTFTVGGLSVLNAIAGAYSENLPVICIAGGPNSNDYGTNRILHHTIGIPDFSQELRCFQTVTCHQAVVTNLDDAHEQIDTAIATALRESKPVYLSISCNLPGLPHPTFTRDPVPFFLAPRMSNKMGLEAAVEATVEFLNKAVKPVLVAGPKLRVAKAGKAFCDLVDASGYAYAIMPSAKGFVPETHPHFLGTYWGAVSTAFCAEIVESADAYLFAGPIFNDYSSVGYSFLLKKDKAIIVQPERVIVGNGPAFGCVMMKEYLSALAKRVQKNTTAYENYKRIFVPEGHPLKXRPNEPLRVNVLFKHIQDMLTGDSAVLAETGDSWFNCQKLKLPEGCGYEFQMQYGSIGWSVGALLGYAQGASDKRVIACIGDGSFQVTAQDVSTMLRCEQNSIIFLINNGGYTIEVEIHDGPYNVIKNWELHRPWWRPSHNGEGKCWTAKVKCEEELTAAIEMALGEKEDSLCFIEVIAHKDDTSKELLEWGSRVSAANSRPPNPQ

SEQ ID NO: 3131 - protein, 482 aa, Triticum aestivum
  misc_feature (72)..(72): Xaa can be any naturally occurring amino acid
  misc_feature (89)..(89): Xaa can be any naturally occurring amino acid
  misc_feature (108)..(108): Xaa can be any naturally occurring amino acid
  unsure (1)..(482): unsure at all Xaa locations
MGMEKGKADPAAFSIAEAGFGDRTDIDDDGRERRTGTLVTASAHIITAVIGSGVLSLAWAIAQLGWVIGPAXVLVAFSVITWFCSSLLXADCYRSPDPVHGKRNYTYXGQAVRANLGVSKYRLCSLAQYVNLVGVTIGYTITTAISMGAIGRSNCFHRNGHNAACEASNTTNMIIFAAIQILLSQLPNFHKIWWLSIVAAVMSLAYSSIGLGLSIAKIAGGVHAKTTLTGAAVGVDVTAAEKVWKTFQSLGDIAFAYTYSNVLIEIQDTLRSSPPENVVMKKASFIGVSTTTAFYMLCGVLGYAAFGSDAPGNFLTGFGFYDPFWLIDVGNVCIAVHLVGAYQVFCQPIYQFVEAWARGRWPDCAFLHAELAVAGSSSFTASPFRLVWRTAYVVLTALVATVFPFFNDFLGLIGAVSFWPLTVYFPIQMYMAQAKTRRFSPAWTWMNVLSYACLFVSLLAAAGSVQGLVKDLKGYKPLFKVS

SEQ ID NO: 3132 - protein, 322 aa, Triticum aestivum
MAAFATRSAAFLGLAVVLCFLAGAASAQQLSPNFYSRSCPNLASIVRSGMTAALQTERRMGASILRLFFHDCFVNGCDGSILLDDTSTFTGEKNAGPNANSARGFEVIDAIKTRVEAACRATVSCADILALAARDGVNLLGGPTWSVPLGRKDSRTASQSAANANLPGPGSSLATLIAMFGNKNLSPRDMTALSGAHTIGRSQCQFFRNRIYNERNINASFAALRQRTCPRSGGDGNLAPFDVQTADGFDNAYYQNLVGQRGLLHSDQELFNGGSQDALVRQYSSSPSQFSADFVTAMLKMGGLLPSSGTQTEVRLNCRRPN

SEQ ID NO: 3133 - protein, 542 aa, Triticum aestivum
  misc_feature (414)..(414): Xaa can be any naturally occurring amino acid
  unsure (1)..(542): unsure at all Xaa locations
TRYCDCRPIPGDYIEQVCTKKQAGTGPEFPGYRRPTRPDLFSHLVNQEIAFFDVTRTGELLSRLSEDTQIIKNAATTNLSEALRNLTTTAIGLGFMFSTSWKLTLLALVIVPVISVAVRKFGRFLRELSHQTQAAAAVASSIAEESFGAIRTVRAFAQEPHEISRYGGKVNETLKLGLKQAKVVGLFSGGLNAASTLSVVVVVIYGANLTINGYMTTGSLTSFILYSLTVGSSVSALSGLYTTVMKASGASRRVFQLLDRVSSMTNTGDKCPKIENEGEVELDDVWFAYPSRPSHMILKGITLKLAPGSKVALVGPSGGGKTTIANLIERFYDPLKGRILLNGVPLVEISHQYLHQKVSIVSQEPTLFNCSIEENIAYGLEGKASSADVENAAKMANAHDFICSFPDQYKTVVXGERGIRLSGGQKQRVAIARALLMNPRVLLLDEATSALDAESEYLVQDAMDSLMKGRTVLVIAHRLSTVKSADTVAVISEGQIVERGTHDELLECDGIYTALVKRQLQLPKFEGTANGTAEVEPSSNGQ

SEQ ID NO: 3134 - protein, 195 aa, Triticum aestivum
  misc_feature (7)..(7): Xaa can be any naturally occurring amino acid
  unsure (1)..(195): unsure at all Xaa locations
GRPPVVXDKDESLAKYDPVKLKKLGPAFKKNGSVTAGNSSSISDGAAAIVLVSGEKAKNLGLQVLARIRGYADAAQAPELFTTTPALAIPKAISNSGLRDSQIDYYEINEAFSVVAVANQRLLGISPGKLNISGGAVSLGHPIGCSGARIIVTLLGILRQKQGKFGVAGVCNGGGGASAIVVESMQASSRLRSSL

SEQ ID NO: 3135 - protein, 253 aa, Triticum aestivum
  misc_feature (159)..(159): Xaa can be any naturally occurring amino acid
  misc_feature (209)..(209): Xaa can be any naturally occurring amino acid
  misc_feature (228)..(228): Xaa can be any naturally occurring amino acid
  misc_feature (246)..(247): Xaa can be any naturally occurring amino acid
  unsure (1)..(253): unsure at all Xaa locations
QRYAGNQERIQLETARLYRQAGVNPLAGCFPTLATIPVWIGLYQALSNVANEGLLTEGFFWIPSLGGPTTIAARQSGAGISWLFPFVDGHPPLGWYDTICYLVLPVLLVASQYVSMEIMNPPQSDDPSQKNTLLVLKFLPFMIGYFSLSVPSGLSIYWXFTNNVLSTAQQVWVRKMGGAKPVVSEGDRRIITAGRAKRSNAQPAGRKVXKLKEEESMRKSTNIAAGDXNASSSTYDMEDEDPVTDXXKEGPGT

SEQ ID NO: 3136 - protein, 291 aa, Triticum aestivum
MAISTDSRSEEKPSQHSQVEKRWVLSDFDVGKALGRGKFGHVYLAREKRSSQIVALKVLFKSQLKQSQVEHQLRREVEIQSHLRHPNILRLYGYFYDQTRVYLILEHAAKGELYKELQRCKHFSERRSATYIASLARALIYLHGKHVIHRDIKPENLLVGVQGELKIADFGWSVHTFNRRRTMCGTLDYLPPEMVEKTEHDYHVDIWSLGILCYEFLYGLPPFEAKEHSETYRRIVKVDLKFPLKPFVSPAAKDLISQMLVKNSAHRLPLHKVLEHPWIVQNADPSGVYRG

SEQ ID NO: 3137 - protein, 321 aa, Triticum aestivum
  misc_feature (131)..(131): Xaa can be any naturally occurring amino acid
  misc_feature (144)..(144): Xaa can be any naturally occurring amino acid
  unsure (1)..(321): unsure at all Xaa locations
MCGGAILSDIIPPPRRATGGNVWRADKKRRARPDAAAGRPRRAPEEEFQEEEGDAEFEADFEGFVEAEEESDGEKEPVQGIRRRPWGKWAAEIRDPRKGVRVWLGTYNSAEEAARAYDVEARRIRGKKAKXSISQKKLLWLLSXRCATAVKVAEFNTEQKRLLNPMGNADVYSCSAVDYTLNQQFVQPQNMSFVPTVNAVEAPFMNFSSDQGSNSFSCSDFSWENDIKTPDITSVLASIPTSTEVNESAFLQNNGINSTVPPVMGDANVDLADLEPYMKFLMDDGSDESIDSILSCDVPQDVVGNMGLWTFDDMPLSAGFY

SEQ ID NO: 3138 - protein, 262 aa, Triticum aestivum
  misc_feature (148)..(148): Xaa can be any naturally occurring amino acid
  misc_feature (157)..(157): Xaa can be any naturally occurring amino acid
  misc_feature (164)..(164): Xaa can be any naturally occurring amino acid
  unsure (1)..(262): unsure at all Xaa locations
MAPQSLDLGLSLGLGLVSQPTLPSFWYSGGNVAADQEVGPTPTAAAVEERRCSPGSPASSGSGSGLKRGAERSAGSGDEDQDDDGGNARKKLRLSKDQAAVLEECFKTHHTLTPKQKLALANSLGLRPRQVEVWFHNRRARTKLKQTXVDCEYMKRXCEQLTEXNKRLEKEVAELRALKAAPQAHNGASEGPLTTLTMSLSRKRVASTSSASACTVPRFSANAGTGMPMPSLKEWQFFCAFRDTGAMYGGSSRLAKVVKPAR

SEQ ID NO: 3139 - protein, 499 aa, Triticum aestivum
NKFVQKSRLLPVRNSRDIVDPRVRLDGMFSFVLLDTRDKSFIAARDAIGICPLYMGWGLDGSVWFSSEMKALSDDCERFISFPPGHLYSSKTGGLRRWYNPPWFSESIPSAPYDPLLIRESFEKAVIKRLMTDVPFGVLLSGGLDSSLVASVVSRHLAETKVARQWGNKLHTFCIGLKGSPDLKAAKEVADYLGTVHHELHFTVQEGIDALEEVIYHIETYDVTTIRASTPMFLMSRKIKSLGVKMVLSGEGSDEIFGGYLYFHKAPNKKELHEETCRKIKALHLYDCLRANKATSAWGLEARVPFLDKNFINVAMDLDPECKMIRRDLGRIEKWVLRNAFDDEKKPYLPKHILYRQKEQFSDGVGYSWIDGLKDHANAHVSDSMMTNASFVYPENTPTTKEAYYYRTVFEKFYPKNAARLTVPGGPSVACSTAKAVEWDAAWSKLLDPSGRAALGVHDAAYEEEKAPASVDPVLENAFHPPAHGESTLVKSAVPAAAV

SEQ ID NO: 3140 - protein, 213 aa, Triticum aestivum
MELAAPCSFSCSSYTHCSIGITPARALRAGAGAWRLRAGAHHGGGDGVEPGRPAGRLAADGPPVVDVPAVVGAADGFGGARDAELAMWEKLGAVVRLSYGIGIYAGMALAGRAICDMADIDSSGGFHPSLKALVEGLGYASPPIMGAALPSWTTRGSSYCPRPAPFCPCRNATSPTSFPGMLPLDRFPPAPIPPNSRLVMEDPSPRARLGSAG

SEQ ID NO: 3141 - protein, 290 aa, Triticum aestivum
HSFRPAPRCVRLIFRWAHGNACGWALPPGEPSPLGKPSFRGTGGFPPPFKEDWPPDPKRALDLPIPGGGRFNAIMGKNGSGKSTLTKVLVGHPHYEVTGGTILFKGENLIDMEPEERSLAGLFMSFQAPIEIPGVSNYDFLLMAINARREKDGLPALGPLEFYSVVSQKVEALKMEPKILDRNVNEGFSGGERKRNEILQLSVLGADLALLDEIDSGLDVDALEDVAHAVNGLLTPQNSVLMITHYQRLLDLIKPSYVHIMESGKIVKTGDSSLASHINEGGYKSIASFV

SEQ ID NO: 3142 - protein, 465 aa, Triticum aestivum
  misc_feature (301)..(301): Xaa can be any naturally occurring amino acid
  misc_feature (316)..(316): Xaa can be any naturally occurring amino acid
  misc_feature (405)..(405): Xaa can be any naturally occurring amino acid
  unsure (1)..(465): unsure at all Xaa locations
MSSSTGSLDHAGFTFTPPHFITSFTELLSGSGAGDAERSPRGFNRGGRAGAPKFKSAQPPSLPISSPFSCFSIPAGLSPAELLDSPVLLNYSHILASPTTGAIPARRYDWQASADLNTFQQDEPCRGDSGLFGFSFHAVKSNATVNAQANCLPLFKEQQQQQQQQVVEVSNKSSSGGGNNKQVEDGYNWRKYGQKQVKGSENPRSYYKCTYNNCSMKKKVERSLADGRITQIVYKGAHDHPKPLSTRRNSSGCAAVVAEDHANGSEHSGPTPENSSVTFGDDEADNGLQLSDGAEPVTKRXKEHADNEGSSGGTGXSGKPVREPRLVVQTLSDIDILDDGFRWRKYGQKVVKGNPNPRSYYKCTTVGCPVRKHVERASHDNRAVITTYEGKHSHDVPVRRGPRAXPATSSSDSSGVIWPAAVPAPYTLEMLTNPAAGHRGYAAGGAFQRTKDEPRDDMFVESLLC

SEQ ID NO: 3143 - protein, 291 aa, Triticum aestivum
MEVGFLGLGIMGKAMAANLLRHGFRVTVWNRTLSKCDELVAMGAAVGDTPASVVAKCKYTIAMLSDPSAALSVVFDKDGVLEQIGEGKGYVDMSTVDAATSCKISEAVKQKGGAFVEAPVSGSKKPAEDGQLVILAAGDKALYDDMVPAFDVLGKKSFFLGEMGNGAKMKLVVNMIMGSMMNAFSEGLCLADKSGLSPQTLLDVLDLGAIANPMFKMKGPSMLQGSYNPAFPLKHQQKDMRLALSLGDENAVSMPVAAASNEAFKKARSLGLGDLDFSAVHEVLKGTGGSG

SEQ ID NO: 3144 - protein, 185 aa, Triticum aestivum
  misc_feature (61)..(61): Xaa can be any naturally occurring amino acid
  misc_feature (81)..(81): Xaa can be any naturally occurring amino acid
  unsure (1)..(185): unsure at all Xaa locations
PHDNLEANTSAEYVDRRGVQIKEVGSNSMESLPHNKQIVPYNIITSDIDQSSVVFGALQRXRLSRSDIIRWLASPIMHTTXLDGFFLRLRFGKWEEALGGTGYHVARINGALDRNRLSVTIRNSTCQVDSRFVSNHGFHEDELKAWWSAAMKGGWKLPSKEELSKKLRERELLHFGNGTGQPDNT

SEQ ID NO: 3145 - protein, 126 aa, Triticum aestivum
AYLGDYIEQVCTKKQAGTGPEFPGYRRPTRPFNGKELERHCSLHPTACDVPHVDRTEYQLIDISEDGFVSLLTDNGSTKDDLKLPTDDAILTQLKDGFAEGKDLALTVMSAMGEEQICAVKDVGPR

SEQ ID NO: 3146 - protein, 585 aa, Triticum aestivum
MCGILAVLGCADDTQGKRVRVLELSRRLKHRGPDWSGMHQVGDCYLSHQRLAIIDPASGDQPLYNEDKSIVVTVNGEIYNHEQLRAQLSSHTFRTGSDCEVIAHLYEEHGENFIDMLDGVFSFVLLDTRDNSFIAARDAIGVTPLYIGWGIDGSVWISSEVKGLNDDCEHFEIFPPGHLYSSKQGGFKRWYNPPWFSEVIPSVPYDPLALRKAFEKAVIKRLMTDVPFGVLLSGGLDSSLVAAVTVRHLAGTKAAKRWGTKLHSFCVGLEGSPDLKAAKEVANYLGTMHHEFTFTVQDGIDAIEDVIYHTETYDVTTIRASTPMFLMSRKIKSLGVKMVISGEGSDEIFGGYLYFHKAPNKEELHRETCQKIKALHQYDCLRANKATSAWGLEARVPFLDKEFINEAMSIDPEWKMIRPDLGRIEKWMLRKAFDDEEQPFLPKHILYRQKEQFSDGVGYSWIDGLKAHAESNVTDKMMSNAKFIYPHNTPTTKEAYCYRMIFERFFPQNSAILTVPGGPSVACSTAKAVEWDAQWSGNLDPSGRAALGVHLSAYEQEHLPATIMAGTSKKPRMIEVAAPGVAIES

SEQ ID NO: 3147 - protein, 604 aa, Triticum aestivum
  misc_feature (144)..(144): Xaa can be any naturally occurring amino acid
  misc_feature (209)..(209): Xaa can be any naturally occurring amino acid
  misc_feature (399)..(399): Xaa can be any naturally occurring amino acid
  unsure (1)..(604): unsure at all Xaa locations
MYAMIRRADPLRRRAASAILAALLQHPAGPSAAGASASVLPPRSPLPPPAMWFHSRPAPLGFRETGAARAGAHAQFAADEGWNYDDKRKPAGGVAGAGAGAKEEGLEIAKLGISSEIVDKLSAKGITKLFPIQRAVLEPAMQGXKDMVGRAKTGTGKTLAFGIPIMDAIIRHNAANKPGIHPLAICLAPTRELAKQVEKEFVDSSRLEXTLCVYGGIPIQQQMRVLSQGVDVVVGTPGRVIDLLNRRALNLSSVQFVVLDEADQMLSVGFDEAVGPVLQNVPAKRQTLMFSATMPPWIRKLMQKYLKDPVIVDLVGEDDQKLAEGISLLSIATENHAKPAVLGQLIQDHAKGGKCIVFTQTKRDADRLSYTMGRSVQCQALHGDITQQQRESPPRGFRXGPRVRTLIATDVAARGLDIPNVDLVIQYELPNNSEIFVHRSGRTGRAGKKGTAIVMYSYNQSRAVRGIENDVGGKFTELPKINVEGSDLTMASGYDSFGGGGGGGRSRGGGFGGRGGGFVNSSSRGGGFGDSGFGRSGGGFGRSGGGGGGGFGDSGFGRSGGGGGFGSSGGFGDSGSGRSGGFGSGSGSSGSSWGGFGSFGGKSS

SEQ ID NO: 3148 - protein, 191 aa, Triticum aestivum
  misc_feature (74)..(74): Xaa can be any naturally occurring amino acid
  unsure (1)..(191): unsure at all Xaa locations
MRNGSTVCDAAAAVGLGVAPRYRGVRKRPWGRFAAEIRDPAKRARVWLGTYDSAEAAARAYDVAARTLRGPLAXTNFPQDPVSLPHASPAPASVSTGLPPGPACSRQLPPSSPTGGPKAGKAPSGPAPPGGTRPGTLLVGRRRFRGATHGMPEPTCALLRASPSGKEVRSDKGALLAAAEPLRRPSWGAIP

SEQ ID NO: 3149 - protein, 217 aa, Triticum aestivum
MAPKNALPVAVAAAADAGMEPRFRGVRKRPWGRYAAEIRDPARKARVWLGTFDTAEAAARAYDAAALHYRGPKAKTNFPVGTVAAFAHVPLPPPKALAVSPSSSTVESSSRDTPAAAPAAPAAAAPAPPPALDLSLAMPAMVAAQPFLFLDPRVAVTVAVAAPAPAPCRSAAISGMNKVASREEEQSDTGSSSSVVDASPAVGVGFDLNLPPPVEMA

SEQ ID NO: 3150 - protein, 310 aa, Triticum aestivum
  misc_feature (96)..(96): Xaa can be any naturally occurring amino acid
  misc_feature (192)..(192): Xaa can be any naturally occurring amino acid
  misc_feature (212)..(212): Xaa can be any naturally occurring amino acid
  unsure (1)..(310): unsure at all Xaa locations
MAAFATRSAAFLGLAAVLCVLVGEASAQQLSPSFYSRSCPNLASIVRSGMTSALQTERRMGASILRLFFHDCFVNGCDGSILLDDTSTFTGEKNAXPNANSARGFEVIDALKTQVEAACRATVSCADILALAARDGVNLLGGPTWSVPLGRKDSRTASQSAANANLPGPGSSLATLITMFGNKNLSPRDMTXALSGAHTIGRSQCQFFRNRXIYNERNINASFAALRQRTCPRSGGNGNLAPFDVQTADGFDNAYYQNLVGQRGLLHSDQELFNGGSQDALVRQYSNSPSQFSADFVTAMLKMGGLLCMY

SEQ ID NO: 3151 - protein, 379 aa, Triticum aestivum
HYRTSLYKKAGWYRSGIPGISSTHASAPPSPTTTKAAGGSSPSSHFLPYPSRPRNVRNGVRAQVSTTEPTAVPPPAAPAKPVKISKKQDEGVVTNKYRPKEPYVGRCLLNTRLTGDNAPGETWHMVFSTEGEVPYREGQSIGVIADGEDKNGKPHKLRLYSIASSALGDFGDSKTVSLCVKRLVYTNDAGEVVKGVCSNFLCDLKPGSEVKITGPVGKEMLMPKDPNATIIMLATGTGIAPFRSFLWKMFFEQHEDYKFNGLAWLFLGVPTSDTLLYKEEFEKMVEIGGENFRLDFAVSREQTNAAGEKMYIQTRMAEYKEELWELLKKDNTYVYMCGLKGMEKGIDDIMVDLAAKDGIDWIDYKKQLKKAEQWNVEVY

SEQ ID NO: 3152 - protein, 221 aa, Triticum aestivum
MARRSGMLLLLAAAALLALGAGAAVPPSCERIECPAYDVVDSANGFEIRRYKDAMWVSTAPIEDISLVDATRSGFLQLFKYIQGKNAYNETIEMTAPVLTRVAPSDGPFCVSSFVVSFYVPAKNQADPPPAEGLHVQRWAGARYAAVRRFGGFVADADVGKQAALLDASLQGTRWAAAVSDGRKADPASEYTVAQYNSPFEFSGRVNEIWMLFDTMAASDM

SEQ ID NO: 3153 - protein, 105 aa, Triticum aestivum
MSTPGGEEDKKPASAGGEGGGAHINLKVKGQDGNEVFFRIKRSTQLKKLMNAYCDRQSVDMKAIAFLFDGRRLRAEQTPDELEMEDGDEIDAMLHQTGGRLPPSA

SEQ ID NO: 3154 - protein, 323 aa, Triticum aestivum
APPQPFFGQDPKRVCTQKQICICKKAPFWAQHSLGSKSLWPGGMESMSNPPKYIAEARKGSRFGHDSLVDGMLKDGLWDVYGDCAMGVCAELCADNHALTREDQDAYAIQSNERGIAARDSGAFAWEIVPIEVPVGRGKPAVLVDKDESLDKFDAAKLKKLRPAFKENAGTVTAGNASSISDGAAALVLVSGKKAQELGLQVLARIKGFADAAQAPELFTTTPALAIPKALTNAGLESSRIDFYEINEAFSAVALANQKLLGIPSEKINVHGGAVSLGHPLGCSGARILVTLLGVLREKSGKIGVAGVCNGGGGASALVMELA

SEQ ID NO: 3155 - protein, 292 aa, Triticum aestivum
  misc_feature (72)..(72): Xaa can be any naturally occurring amino acid
  unsure (1)..(292): unsure at all Xaa locations
MEVGFLGLGIMGKAMAANLLRHGFRVTVWNRTLSKCDELVAMGAAVGDTPASVVAKCKYTIAMLSDPSAALXSVVFDKDGVLEQIGEGKGYVDMSTVDAATSCKISEAVKQKGGAFVEAPVSGSKKPAEDGQLVILAAGDKALYDDMVPAFDVLGKKSFFLGEMGNGAKMKLVVNMIMGSMMNAFSEGLCLADKSGLSPQTLLDVLDLGAIANPMFKMKGPSMLQGSYNPAFPLKHQQKDMRLALSLGDENAVSMPVAAASNEAFKKARSLGLGDLDFSVVHEVLKGTGGSG

SEQ ID NO: 3156 - protein, 101 aa, Triticum aestivum
  misc_feature (34)..(34): Xaa can be any naturally occurring amino acid
  unsure (1)..(101): unsure at all Xaa locations
AWAPSREYFRNGRRGIVSRKNEFRQRQANQKRLXLLPWLGLGGIILFQGLALAASGFLPTEWDSFLVKYLYPSFTPTVLLFLGGTTGCGVFKYFEGEKSKD

SEQ ID NO: 3157 - protein, 321 aa, Triticum aestivum
  misc_feature (294)..(294): Xaa can be any naturally occurring amino acid
  unsure (1)..(321): unsure at all Xaa locations
MAATAVRCLLMAAAVLAPLFAGSEGAYLTPKFYDRRCPGLPGIVRAAMTQAVAAEPRMGASILRLFFHDCFVNGCDASILLDDTANFTGEKNAGPNANSVRGYDVIDTIKAQVEAACKATVSCADIVALAARDSVNLLGGPTWTVQLGRRDARNASQSAANSNLPSPASSLAGLITTFGNKGLTPRDMTALSGAHSLGQARCATFRDRIYNDTNIDPKFAALRKLTCPQTGGDAALAPIDVSTPTWFDTTYYDNLVNKQGLFHSDQELYNGGSQDIMVKVYMRNPDTFAMDFAXKAMVKMGSLMPSADTPTEIRLDCKKIN

SEQ ID NO: 3158 - protein, 228 aa, Triticum aestivum
MFNVEGFAFVYMEDERDAEDAIHRLDRTDFGRKARRLRVEWTKEDRSGGRKGNGKRSPSSVKPTKTLFVINFDPINTRTRDLEKHFDLYGKIANIRIRRNFAFVQYETQEDATKALDGTNGSTVMDRVISVEYALRDDDEKRNGYSPDRRGGRDRSPDRRDNRGRSASPYGRGRERGSPDYGRGRERGSPDYGKGGARDSPDYVRGGSPYGSKGDDRASPKYDRERRE

SEQ ID NO: 3159 - protein, 160 aa, Triticum aestivum
MAGMVFGLENPMMTALQHLLDIPDGEAGNTAGGEKQGPTRAYVRDARAMAATPADVKELPGAYAFVVDMPGLGSGDIKVQVEDERVLVISGERRREEKEEAKYMRMERRMGKLMRKFVLPENADMEKISAACRDGVLTVTVEKLPPPEPKKPKTIQVQVA

SEQ ID NO: 3160 - protein, 116 aa, Triticum aestivum
FRAAARAGSGINAEPAGAIDIFNGKKLEDIVPSSHNCDVPHVDRQDYQLIDITDDGYVSLLTESGNTKDDLKLLTDDVLLGQIKTGFADGKDLILSVMSAMGEEQICAVKEIGGGK

SEQ ID NO: 3161 - protein, 212 aa, Triticum aestivum
  misc_feature (156)..(156): Xaa can be any naturally occurring amino acid
  misc_feature (163)..(163): Xaa can be any naturally occurring amino acid
  misc_feature (166)..(166): Xaa can be any naturally occurring amino acid
  misc_feature (204)..(204): Xaa can be any naturally occurring amino acid
  unsure (1)..(212): unsure at all Xaa locations
QTNMEGGGQLGGAFMGSTGSGGDGDSLGRAREDENDSRSGSDNLDGASADELDPDNSNPRKKKKRYHRHTPQQIQELEAVFKECPHPDEKQRMELSRRLNLESRQVKFWFQNRRTQMKTQIERHENALLRQENDKLRTENMTIREAMRSPTCGNCXGAACFGXECXLEEQHLRIENSRPQDELDRVCALAGKFLGRPVSASPSXEACRRPSA

SEQ ID NO: 3162 - protein, 362 aa, Triticum aestivum
  misc_feature (98)..(98): Xaa can be any naturally occurring amino acid
  misc_feature (117)..(117): Xaa can be any naturally occurring amino acid
  unsure (1)..(362): unsure at all Xaa locations
MDFPGGSGRPPPPPQQHQHQLLPPMTPLPLTRQGSSVYSLTFDEFQSAIGGPGKDFGSMNMDELLRNIWTAEESQAIGAGPNAAASSSAAAGAGPRAXIQRQGSLTLPRTLSQKTVXKVWRDMMFFGGPSASASAAAEAPPPAQRQQTLGEVTLEEFLVRAGVVREDMPGPPPPVSPAPVAQAPPPQPQMLFPQSNMFAPMVNPLSLANGLMTGAYGQGGGGGGGAPAMVSPSPTGRPVMSNGYGKMEGLNLSSLSPPPMPYVFSGGLRGRKPPAMEKVVERRQRRMIKNRESAARSRQRKQSYMMELETEVAKLKERNEELQRKQAEILERQKNEVFEKVSRQAGPTSKRICLRRTLTGPW

SEQ ID NO: 3163 - protein, 244 aa, Triticum aestivum
GDEQQQQQIAAAAAKKGGGKRGRREMRRIEDATSRQVTFSKRRSGLLKKAFELGVLCDAEVALIVFSPRGRLYEYASAPDLQKTIDRYLNHTKGTSANEKTVEQPAAGVQMCRSEATALKHKIDAIEAYQRKLSGEGLGSCSAHELQELELQLEKSLSCIRQKKQQKMVAKISELKEKERKLLTENSVLREEYKALPLLELATAAAAERSPDGAGVEEAEEDEWRRHYMEVETELVIGRPGSSS

SEQ ID NO: 3164 - protein, 583 aa, Triticum aestivum
NKFVQKSRLVPVRNSRDIVDPRVRNEVPKAKSEAVDKEPSMISCTKADLGSNFGAIADRWSPESVESGAFTGDAAANVMALSAAAFNKSAPDMYNLLDPMDVDVKPPPLVSSDSTGEMPLYGCKIHKSVSFPRGPKGGAEYSVDRENGDDDDKSSGCTHSSTATNRGFRPNCTADQSRVKKFLACKYRKVAPARMHKGDLSYSDADRKPSFRNKKMYYTRQRTQRSTFKRRKMLDRHSTLVSEEFAKSNAKRTTKVNAREPHAASLEANKGSNSMPFHGSCKSNDCHVKLKIKSFKVPELLIEIPETASVGSLKKTVLEAVNAMLGGGLRVGVLHHGKKIRDDSKTLMQAGIGHDDILDNIGFSLEPNCTRHSSQLAAPEDIEFLETVETTEPLARIAPADSSSKHGEVDASQELALTPLTANYQGNDHDSVHSPGGISSPEKASANSRAIVPVTPVDSSAGAIVPANKAKRSAEQGQRRIRRPFSVAEVEALVLAVEKLGTGRWRDVKLRAFDNAKHRTYVDLKDKWKTLVHTASISPQQRRGEPVPQDLLDRVLAAQSYWSQQQAKLQPKTPPLAEARLLT

SEQ ID NO: 3165 - protein, 370 aa, Triticum aestivum
MVDLQAAALVITVVAAEGFPNFDGPDFVKEAAIEAIKAGKNQYARGYGVPELNSAVAERFLKDSGLQIDPDKEVTVTSGCTEAIAATILGLINPGDEVILFAPFYDSYEATLSMAGANVKAITLRPPDFAVPLEELKAAVSKNTRAIMINTPHNPTGKMFTREELEFIADLCKENDVLLFADEVYDKLAFEADHISMASIPGMYERTVTMNSLGKTFSLTGWKIGWAIAPPHLTWGVRQAHSFLTFATSTPMQSAAAAALRAPDSYFEELKRDYGAKKALLVDGLKAAGFIVYPSSGTYFVMVDHTPFGFDNDIEFCEYLIREVGVVAIPPSVFYLNPEDGKNLVRFTFCKDDDTLRAAVDRMKAKLRKK

SEQ ID NO: 3166 - protein, 364 aa, Triticum aestivum
NKFVQKSRLVPVRNSRDIVDPRVRSAAMAAASFLLSPRVTLPLRRGSRLLVSCSATSSSSSSDAAGGVGFQGRVGFLGLGIMGAPMASNLIKAGCDITVWNRTKSKCDPLLSLGAKFESSPARVASSCDVTFAMLADPESAFEVACGANGAAEGMAAGKGYVDVSTVDDATSKLIGKRITSTGASFLEAPVSGSKKPAEDGLLIFLTAGDESLYKRVAPLLDVMGKSRFYLGDVGNGAAMKLVVNMVMGSMMVSFAEGLLLSEKVGLDSNTVVEVISQGAINAPMFSLKGPSMVKAAYPTAFPLKHQQKDLRLALALAESVSQPIPTAAAANELYKVAKSLGLADHDFSAVIEALKAKVQSSQH

SEQ ID NO: 3167 - protein, 472 aa, Triticum aestivum
HSITSLYKKAGWYRSGIPGISSTHASAHASAENFEPPAKDVRTDEQKKIDDWLPITSSRNAKWWYSAFHNVTAMVGAGVLSLPYAMSELGWGPGIAVLVISWVITLYTLWQMVEMHEMVPGKRFDRYHELGQHAFGDKLGLWIVVPQQLIVEVGVNIVYMVTGGRSLKKFHDVICDGKCKDIKLTFFIMIFASVHFVLSQLPNLNSISGVSLAAAVMSLSYSTIAWGASVDKGKMVDVDYNLRATTTPGKVFGFFGALGEVAFAYAGHNVVLEIQATIPSTPEKPSKKPMWKGVVVAYIVVALCYFPVALIGYWAFGNSVDDNILITLNKPTWLIATANMMVVIHVIGSYQIYAMPVFDMIETVLVKKLKFPPGLTLRLIARTLYVAFTMFVAITFPFFGGLLGFFGGFAFAPTTYFLPCIMWLAIYKPKRFSLSWFTNWVCIVLGVCLMILSPIGGLRQIILDSKTYKFYS

SEQ ID NO: 3168 - protein, 272 aa, Triticum aestivum
  misc_feature (215)..(215): Xaa can be any naturally occurring amino acid
  misc_feature (228)..(228): Xaa can be any naturally occurring amino acid
  unsure (1)..(272): unsure at all Xaa locations
NKFVQKSRLVPVRNSRDIVDPRVRPCLRAGAVYERKYLLGTSMARPVIAKAMVDVAKEVGADAVAHGCTGKGNDQVRFELTFYALNPELKVVAPWREWDITGRDDAIEYAKKHNVPIPVSKKSIYSRDRNLWHLSHEGDILEDPANEPKEDMYMMSVSPENAPSKPEYLEIGIVAGVPTSINGKDLSPATLLAKLNEIGGKHGIGRIDMVENRLXGMKSGGVYETPRXTIMAAALEYPSRGPSLRVPSFLVQVVPIVSRIIARHWPRFTSRD

SEQ ID NO: 3169 - protein, 334 aa, Triticum aestivum
TRPFPRTGRQKIRLDALGSHTLISSATAYRVQTQPNSGRQQSTARMLLNPASEALVLDSIRQHLMEDTAAPAPEARRQRPAYCRSASFGSLVADQWSESLPFRADDSDDMVVYGALRDAFSCGWLPDGSFAAVKPEPLLPSPDSCYVGFLEPETPPATSPGGSEEEAAAAFMGEAAAAVARGKHYRGVRQRPWGKFAAEIRDPAKNGARVWLGTYDTAEDAAVAYDRAAYRMRGSRALLNFPLRIGSEIAAAHAAAAAAGDKRPSPEPATSDSSSSSSSSGSPKRRKRGEAAAASMAMALVPPSSQLSRPAHAWYPAVPAEQVAMAPCVQQLVS

SEQ ID NO: 3170 - protein, 321 aa, Triticum aestivum
MESKHTDQANVKAKLSTMHSKVICCKLYISESQNAAVVDAISRIGQKDPEVVLLNKFEDEYYNRVRYTLVSYITNESSTGGAVFSPIRKVLLAMIEAAFSAINLEVHCGTHPRIGVVDDISFHPLNQADTIEDAAQLAKLVASDIGNGLQVPVFLYAAAHPTSKSVSAVRRELGYFRPNHKGVQWAGPVLPDTLPMKPDVGPVHVPRERGATMVGAQPLVESYNVPIFCKDVPTVRRITRRVTGRSGGLPSVQALALFHGDNCTEIACFLLDPDHVGADRVQWLVEQIAEEQGLEVEKGYFTDLSKHMMLERYSEMVSAAD

SEQ ID NO: 3171 - protein, 404 aa, Triticum aestivum
MPLPSSSSSAAAVAAGPAASPLAARSRDRLLRARSGHAAVRCQRVDPVRLRAVNGSPPCVPLSDRSPWTPATMPIFGDANIRKDDTRLRIFSGTANPSLAQEIASYMGLELGKINIKRFADGEIYVQLQESVRGCDVFLVQPSCPPANENLMELLIMIDACRRTSAKNITAVIPYFGYARPVWQSQGRESIAAKLVANMITEAGANRVLVCDLHSSQAMGYFDIPVDHVYGQPVILDYLASKTISSNDLVVVSPDVGGVARARAFAKKLSDAPLAIVDKRRHGHNVAEVMNLIGDVRGKVAVMMDDMIDTAGTIAKGAELLHQEGAREVYACCTHAVFSPPAIERLSSGLFQEVIITNTIPLKEEKNFPQLTILSVANLLGETIWRVHDDCSVGHAPYSTLDID

SEQ ID NO: 3172 - protein, 113 aa, Triticum aestivum
MALAKAKEIVASASVVVFSKSYCPFCVQVKKLLTQLGASFKAVEMDTESDGTEIQSALAEWTGQRTVPNVFINGKHIGGCDDTIALNKGGKLVALLTEAGAISGSSSKTTVTA

SEQ ID NO: 3173 - protein, 210 aa, Triticum aestivum
  misc_feature (174)..(174): Xaa can be any naturally occurring amino acid
  unsure (1)..(210): unsure at all Xaa locations
MGEASPESSGAVAGGPSVPGPPRKGKSCKGCLYYSSVLKSRGYNPICVGIPRSIPQVPGFVVEEPREEAAAQGHDLRQFKYACAGYSMFVDDRDAKSGENDAKALLPYCQGLELLVDSRMVERKSPAVEHASTRNPKPKEAAAAAAAATQPLEQGQRPQLARQEFMARFRRSAXGLVASGVAKNLNKTGSYIKQNVEDIFSPDRRPPPKQ

SEQ ID NO: 3174 - protein, 376 aa, Triticum aestivum
CLSVSKQEIHAVLSSNVPPKLVILHMNMALHVYDDIMRMTENLSEKYIIGYGASSTVYKCVLKNCKPVAIKKLYAHYPQSVKEFETELETIGSIKHRNLVSLQAYSLSPAGNLLFYEYMESGSLWDVLHAPSSKKTKLDWEARLQIALGTAQGLAYLHHDCSPRIIHRDVKSKNILLDKDYVAHLADFGIAKSVCISKTHTSTYVMGTIGYIDPEYARTSRLNEKSDVYSYGIVLLELLTGKKPVDNECNLHHLILSKAADNTVMEMVDPDITATCKDLGEVKRMFQLALLCSKRQPSDRPTMHDVVHVLSCLVCPEAPPKPAQPPASPQSSTAPSYVNEYVSLRSGSALSCANSSSASDAELFLKFGKAISQNTE

SEQ ID NO: 3175 - protein, 689 aa, Triticum aestivum
  misc_feature (42)..(42): Xaa can be any naturally occurring amino acid
  misc_feature (566)..(566): Xaa can be any naturally occurring amino acid
  unsure (1)..(689): unsure at all Xaa locations
NTLANFTSIITLELSNNNIGGTIPDNLPVTLQRFFLSGNQLXGSLPSTLSTLTLLTDMSLSSNRLSGDIPDVFSALTGLINLDFSSNNLTGPLPPSMGNLKALTTLHIQDNQISGTLDVLQDLPLKDLNIQNNLFSGPVPPKLFNVPNFQRDGNPFNTSIAPSPLPAAPAPSPSLSPSTGHVPSKEPTKSPDVTNGNPPASGKHTIWTVKFVGYILVGVVSAVVIVLMVMFCVSKHKERTSEKEFRKSKKDVYPKNKIGREPQRLGEPKIKEVPEIKEHLVKPTNTVGKASNVVSNSSEELKVNASMKAPNVAYNAKEREATLYSPMRAIPGVITKKQKEHVIDMEKSDDFVEEPLRLPQSVAPRTEKATVSPSVRTKKGRVPSLGKIDLRTTVKSFSVASLQQYTNSFSEENLIRDSRFGKVYLAELPDGEILEVLKIDIDNSRVPVDVFLELVVNISELSHPNILALVGYCAEFEQRLLVYEHCSKMTLHDELHYVDEPSNALSWNARLQVAVEAAKALQYLHDGRQPPLVHQNFEPSVVLLNSTLAVQISECGLASLSQLSGXLHALFHYEAPEVHESRSFSDRSDVYSFGVVMLELLTGREPYDSSRPRAEQHLVRWASTQLYDIDAITKMVDPLIRGQCSEKALSRFADVIGSCIQPEPEFRPPMSEVVQALTRMVSDATKASM

SEQ ID NO: 3176 - protein, 427 aa, Triticum aestivum
  misc_feature (148)..(148): Xaa can be any naturally occurring amino acid
  misc_feature (388)..(388): Xaa can be any naturally occurring amino acid
  unsure (1)..(427): unsure at all Xaa locations
MGEVAAELYTQDGTIDIKGNPALKKDTGNWRACPYILANECCERLAYYGMSTNLVNFMKDRMGMANAAAANNVTNWGGTCYITPLIGAFLADAYLGRFWTIASFMIIYIFGLGLLTMATSVHGLVPACASKGVCDPTPGQSAAVFIAXLYLIALGTGGIKPCVSSFGADQFDEHDDVERKSKSSFFNWFYFSINIGALVASSVLVYVQTHVGWSWGFGIPAVVMAIAVGSFFVGTPLYRHQRPGGSPLTRIAQVLVAATRKLGVPVDGSALYETADRESGIEGSRKLEHTEQFRFLDKAAVETQADKTATGPSPWRLCTVTQVEELKSVVRLLPIWASGIVFATVYGQMSTMFVLQGNTLDASMGPKFKIPSASLSYRYRRSVIGWVXPVYDRILVPGGGSGYGRARGFTSFQAMGIGLFVSSVASS

SEQ ID NO: 3177 - protein, 130 aa, Triticum aestivum
PDVTVRRAPAGSASVFEQQRTKAGFNPGGRGNRFTEDEVRQRQATESAFLFAWLGLGGIILFQGLALAASGFLPTEWDSFLVKYLYPSFTPTVLLFLGGTTGYGVFKYFEDEKKQRLDSFQSKASRSRVC

SEQ ID NO: 3178 - protein, 315 aa, Triticum aestivum
  misc_feature (288)..(288): Xaa can be any naturally occurring amino acid
  unsure (1)..(315): unsure at all Xaa locations
MAPPFAVAAVSSSSPLFSSSSSPLFSSSSSRPILRGHPSLGYISVRPRHRSAVASAAATESAGKLLLEVHGLTASVKETGQQILKGVDLTIREGEVHAIMGKNGSGKSTLTKVLVGHPHYEVTGGTILFKGENLIDMEPEERSLAGLFMSFQAPIEIPGVSNYDFLLMAINARREKDGLPALGPLEFYSVVSQKVEALKMEPKILDRNVNEGFSGGERKRNEILQLSVLGADLALLDEIDSGLDVDALEDVAHAVNGLLTPQNSVLMITHYQRLLDLIKPSYVHIMEXGKIVKTVTVSGRHIKRVATIIALWLPE

SEQ ID NO: 3179 - protein, 319 aa, Triticum aestivum
MAMAMASSLSVLLLLCLAASSSAQLSPRFYATSCPRALAIIRRGVAAAVRSERRMGASLLRLHFHDCFVQGCDASVLLSDTASFTGEQGAAPNAGSIRGMNVIDNIKAQVEAVCTQTVSCATLRAVAARDSVVALGGPSWTVPLGRRDSTTASLSLANSDLPAPSFDVANLTANFAAKGLSVTDMVALSGGHTIGQSQCRFFRSRLYNETNIDAAFATSLKANCPRTTSSGNSSLAPLDTTTPNGFDNAYYSNLMSQKGLLHSDQVLINDGRTAGLVRTYSSASAQFNRDFAAAMVRMGNISPLTGAQGQIRLSCSRVN

SEQ ID NO: 3180 - protein, 522 aa, Triticum aestivum
  misc_feature (6)..(6): Xaa can be any naturally occurring amino acid
  misc_feature (86)..(86): Xaa can be any naturally occurring amino acid
  misc_feature (128)..(128): Xaa can be any naturally occurring amino acid
  misc_feature (329)..(329): Xaa can be any naturally occurring amino acid
  unsure (1)..(522): unsure at all Xaa locations
VWQHVXVRRKFSNREPNNNLDLCKEISKPPSADSYHRLGQATCDSHRSCDQSNRAGKKRKEPHSEEEDEGEDNDDAAGSKKPRVVXSVELHRKFVAAVNQLGIDKAVPKRVPRPVDVGRRSRENVASXLQKYRLYLRRLSAVASQQASIAAAFGGRDPFLHMGAFEGLHSYHQPFAPPAALPSLNPHGLLSGAGAAAFGLQDLASPKANQCSSSNGAVSHCAGDTEKFHIVSLQDNQQADLSQGLTSSLGQPQLHQKWIHQETSDLCSVFSGGALANTMSGTLQRVTSSSLPPEDLLECTAHIKVGAHPSIGIPTGSSGLLERSVGVSXDLRDSCISQQCALPISEGFSVNKLPLHIPFDGTGVTKLDASFVAGEQEMDQKGIFSERMAVTVCPSESLIVASNAKCGASSCGSTMLLPPHDTEKHSKYLQFVVASNSRHRMDGGMRQDQRLNSGGFSYDGGAIVPEQTDMYDLGVPKLQGGFNSSSCNFDGLLNSMIKVESDEVPFTENDLGCELFPLGACI

SEQ ID NO: 3181 - protein, 319 aa, Triticum aestivum
MAMAMASSLSVLLLLCLAAPSSAQLSPRFYARSCPRAQAIIRRGVAAAVRSERRMGASLLRLHFHDCFVQGCDASILLSDTATFTGEQGAGPNAGSIRGMNVIDNIKAQVEAVCTQTVSCADILAVAARDSVVALGGPSWTVPLGRRDSTTASLSLANSDLPPPSFDVANLTANFAAKGLSVTDMVALSGAHTIGQAQCQNFRDRLYNETNIDTAFATSLRANCPRPTGSGDSSLAPLDTTTPNAFDNAYYRNLMSQKGLLHSDQVLINDGRTAGLVRTYSSASAQFNRDFRAAMVSMGNISPLTGTQGQVRLSCSRVN

SEQ ID NO: 3182 - protein, 135 aa, Triticum aestivum
MASTTFRRFSVAAAAAAFIALAAFGSASASKTAFVKSTVKAHDVVIFSKSYCPYCKRAKAVFKELELKKDPYVVELDQREDGGEIQDALSDMVGRRTVPQVFIRGKHLGGSDDTVDAYENGELAKLLNISVKDDL

SEQ ID NO: 3183 - protein, 471 aa, Triticum aestivum
MSSPTGSLDHAGFTFTPPPFITSLTELLSGSGAGDVEGSPRGFNRGGRAGVPKFKSAQPPSLPISSPASPFSCFSIPAGLSPAELLHSPVLLNYSHILASPTTGAIPARRYDWQASADLNTFQQDEVGRGDSGLFGFSFHAVKPNATVNAQTNYLPLFKEHQQQQQQQQVVEVSNKSSSGDNNKQVEDGYNWRKYGQKQVKGSENPRSYYKCTYNNCSMKKKVERSLADGRITQIVYKGAHDHPKPPSTRRNSSGCAAVIAEDHTNGSEHSGPTPENSSVTFGDDETDNGAEPETKRRKEHGDNEGSSGGTGACVKPVREPRLVVQTLSDIDILDDGFRWRKYGQKVVKGNPNPRSYYKCTTVGCPVRKHVERASHDNRAVITTYEGRHSHDVPVGRGAGASRALPTSSSSDSSVVVCPAAAGQAPYTLEMLANPAAGHRGYAAKDEPRGGAFQRTKDEPRDDMFVESLLC

SEQ ID NO: 3184 - protein, 915 aa, Triticum aestivum
  misc_feature (137)..(137): Xaa can be any naturally occurring amino acid
  unsure (1)..(915): unsure at all Xaa locations
MNPDKFTHKTNEALAAAHEMASEAGHAQLTPLHLAAALAADRSGILRQAIAHASGGNDAAAESFERVASAALKRLPSQSPPPDTVPASTSLVKAVRRAQSAQKSRGDSHLAVDQLLMGLLEDPQISDALKEAGISAXARVKAEVEKLRGGDNRRVESASGDTNFQALKTYGRDLVEVAGKLDPVIGRDEEIRRVVRILSRRTKNNPVLIGEPGVGKTAVVEGLAQRVVRGDVPSNLLDVRLVALDMGALVAGAKYRGEFEERLKAVLKEVEEAEGKVILFIDEIHLVLGAGRTEGSMDAANLFKPMLARGQLRCIGATTLEEYRKYVEKDAAFERRFQQVFVAEPSVPDTVSILRGLKEKYEGHHGVRIQDRALVIAAQLSSRYIMGRHLPDKAIDLVDEACANVRVQLDSQPEEIDNLERKRIQLEVELHALEKEKDKASKARLVDVRKELDDLRDKLQPLQMKYRKEKERIDEIRSLKQRREELQFTLQEAERRMDLARVADLRYGALQEVDAAIAKLEGETGENLMLTETVGPDQIAEVVSRWTGIPVTRLGQNEKARLIGLADRLHQRVVGQYEAVNAVGEAVLRSRAGLGRPQQPTGSFLFLGPTGVGKTELAKALAEQLFDDENLLVRIDMSEYMEQHSVARLIGAPPGYVGHEEGGQLTEQVRRRPYSVILFDEVEKAHVAVFNTLLQVLDDGRLTDGQGRTVDFRNTVIIMTSNLGAEHLLAGMVGKNSMKVARDLVMQEVRRHFRPELLNRLDEIVIFDPLSHEQLRKVARLQMKDVAVRLAERGVALAVTDAALDVILSLSYDPVYGARPIRRWIEKRIVTELSKMLIREEIDENSTVYIDAAPSKDELTYGVDKHGGLVNARTGHKSDILIQVPSGAVGGDAAHAVKKMKIMQDSGEVDDMEEE

SEQ ID NO: 3185 - protein, 507 aa, Triticum aestivum
  misc_feature (29)..(29): Xaa can be any naturally occurring amino acid
  misc_feature (132)..(132): Xaa can be any naturally occurring amino acid
  misc_feature (145)..(145): Xaa can be any naturally occurring amino acid
  misc_feature (290)..(290): Xaa can be any naturally occurring amino acid
  unsure (1)..(507): unsure at all Xaa locations
MAAMAEGAGEPELVSIPVTPRGLSTPEGXSTPPVRRGGAATSGAGTPVRRVVEGLRGYLEEVGHLTRLNPQDAWLPITESRSGNASYAAFHSLNAGLGFQALLLPLAFPALGWSWGIISLTGAYFWQLYTLXILVKLHEAVPGRXRYNRYVELAQAAFGEKLGVWLALSPTIYLSAGTATALILVGGETMKLFYQIVCGPLCTPSPISTVEWYLVFTSLAVILSQLPNLNSIAGLSLIGGATAIMYCTMSWVLSVSQQRPAAVSYEQVRSTSFGSSLFSTLNALGIIAFXAFRGHNLSLEIQATMPSTFKHPAHVPMWRGAKAAYLLIAMCIFPVAIGGYWAYGNMMPPGGILTALYIFHGHDISRGLLAATFLLVVFNCLSSFQIYSMPVFDSFEAFYTGRTNRPCSVWVRSGFRIFYGFISLFIGIALPFLSSLAGLLGGLTLPVTFAYPCFMWICIKKPERFSYSWYVNWGLALLGTAFSLASSVGGVWSIINTGMKLKFFKPN

SEQ ID NO: 3186 - protein, 248 aa, Triticum aestivum
  misc_feature (110)..(110): Xaa can be any naturally occurring amino acid
  unsure (1)..(248): unsure at all Xaa locations
MAPRAAEKAPVSPPTGLGLGLGGGVGVVAGGAHYRGVRKRPWGRYAAEIRDPAKKSRVWLGTYDTAEEAARAYDTAAREFRGAKAKTNFPFPSSSSSSPVAGAGGGGSPXSSDSTLDSSGGGSGGCAQAPMQAIPLPPALDLDLFHRAAAVTAVAGGGMRFPFNGYPVAPRQPMHPYFFYEQAAAAAAAAASGYRALKVAQPVTVAAVARSDSDSSSVVDLSPSPPAVTAHKAVAFDLDLNRPPPSED

SEQ ID NO: 3187 - protein, 197 aa, Triticum aestivum
LELFSPALVDKPYIVVYNKMDLPEASDRWNSFREKLQAQGFEPYCTSALNRQGTQDVVYAAYKILQKERQRVKEVEEWNNTQNLNHVADAIKRERSSAMNDFEIVHDKGANTWTVVGAGIERFVQMTNWDYTESLKRFQHVLEACGVNKTLVKLGVKEGDTVVIGEMGMFWNEEPKRVAARTMISRDDDAVRWPKFS

SEQ ID NO: 3188 - protein, 324 aa, Triticum aestivum
STRRPRFTHTDQLSYSLQSTDPTQLRETTEQSTARMLLNPASEALVLDSIRQHLMEDTAAPAPEARRQRPAYCRSASFGSLVADQWSESLPFRADDSDDMVVYGALRDAFSCGWLPDGSFAAVKPEPLLPSPDSCYVGFLEPETPPATSPGESEEEAAAAFMGEAAAAAARGKHYRGVRQRPWGKFAAEIRDPAKNGARVWLGTYDTAEDAAVAYDRAAYRMRGSRALLNFPLRIGSEIAAAHAAAAAAGDKRPSPEPATSDSSSSSSSSGSPKRRKRGEAAAASMAMALVPPPSQLSRPAQAWYPAAPVEQVAMAPRAQQLVS

SEQ ID NO: 3189 - protein, 289 aa, Triticum aestivum
MEVGFLGLGIMGKAMAANLLRHGFRVTVWNRTLSKCDELVAMGAAVGDTRRGGRGQWPCTRVPGPPDSWWSKRDGVLVPKGRGQGGPGKAPRAALSVLEEKGRRVKQRRGAFLGGPSFGEAGTPAEDGQLVILAAGDKALYDDMVPAFDVLGKKSFFLGEMGNGAKMKLVVNMIMGSMMNAFSEGLCLADKSGLSPQTLLDVLDLGAIANPMFKMKGPSMLQGSYNPAFPLKHQQKDMRLALSLGDENAVSMPVAAASNEAFKKARSLGLGDLDFSVVHEVLKGTGGSG

SEQ ID NO: 3190 - protein, 159 aa, Triticum aestivum
MAGMVFGLENPMMTALQHLLDIPDGEAGVAAGEKQGPTRAYVRDARAMAATPADVKELPGAYAFVVDMPGLGSGDIQVQVEDERVLVISGERRREEKEDAKYLPMERRMGKLMRKFMLPGNADMEKISAACRDGVLTVTVEKLPPPEPKKPKTIQVQVA

SEQ ID NO: 3191 - protein, 230 aa, Triticum aestivum
DWSRTVREGSAAAAAAPAPSIPRPRPPTPSASHARRRPPRPCCLHPVRNLSPLGFEGNMARLVSSSLVRGLVRSCRAPSTATVSRPAFQQFMTYSSGISGDSNVNGGTSATRVTADTDTHQDFQPTSKGSDMSLQDIVAQDIKENPVIIFMKGYPEAPRCGFSALAVKVLQQYGVSITARDILSNMKLKESVKAYSNWPTFPQIFINGEFVGGSDIILSMHQKGELKDLL

SEQ ID NO: 3192 - protein, 242 aa, Triticum aestivum
MRRKQNMHENGTIMIQFGQQVPNCESSASDSPQEVSGMSEGSFNEQNDQSGNRDGYTKSDEGKMMSALSLGNSETAYTPPKPDRTHPFAISYPYADPYYGGAVAAYGAHAIMHPQMVGMVPSSRVPLPIEPAAAEEPIYVNAKQYHAILRRRQLRAKLEAENKLVKSRKPYLHESRHQHAMKRARGTGGRFLNAKEKSEASGGGNASARPGYAGVPADGGMFSKHDHTLPSGDFHYRARGGA

SEQ ID NO: 3193 - protein, 180 aa, Triticum aestivum
MAELLFAPAVAGLVHLPEVLERLAAADADHRDHAHHHAAHGHGHGHGHPRAQIGGVGGGAPVDIVETPGEYAFLLDVPGLSKSDIQVTLEEDNVLVMKSASNGGGGANGKRKREEEEADCRYIRLERRASPRSFVRKFRLPEDADAGAVAARCENGVLTVTVKKQPPPEKKTKSVQVAIA

SEQ ID NO: 3194 - protein, 349 aa, Triticum aestivum
  misc_feature (111)..(111): Xaa can be any naturally occurring amino acid
  unsure (1)..(349): unsure at all Xaa locations
MGDSGGSVVSIDVERISFGGKEHHIETKHGPVSVAVYGDHDKHALITYPDVALNHMSCFQGLLFCPEAASLLLHNFCIYHISPPGHELGATPILPNSPVASVDELADQVAXRPLDFFGLGSVMCLGVSAGAYILTLFATKYRERVLGLILVSPLCRTPSWTEWFYNKVMSNLLYYYGMCDVVKDCLLQRYFGKRVRGGSPVPESDIMQACRSFLDQRQSMNIWRFIQTINQRHDLTESLKQLQCRTLIFVGENSQFHTEAVHMTAKLDKRYSALVEVQACGSVVTEEQPHAMLIPMEYFLMGYGLFRPSHVSSSPRSPLNPFCISPELLSPESMGVKLKPIKTRANLRV

SEQ ID NO: 3195 - protein, 222 aa, Triticum aestivum
MVRGKTQMKRIENPTSRQVTFSKRRGGLLKKAFELSVLCDAEVALVVFSPRGRLYEFASSSMKNTIERYKTVTKDNMSRQTVQQDMEKIKADAEGLSKKLDALEACKSKLLGQNLEECSIEELQSLEVKIEKNLLGIRAMKTRRFEEQLSTLRQKEMTLRQDNEELYSQCQKEQHLASEAAAPPAPATLAALPAPVTLEEQGQQMVDVETDLFLGLPGTGRS

SEQ ID NO: 3196 - protein, 216 aa, Triticum aestivum
  misc_feature (113)..(113): Xaa can be any naturally occurring amino acid
  misc_feature (170)..(170): Xaa can be any naturally occurring amino acid
  unsure (1)..(216): unsure at all Xaa locations
MGSLPVLSPAECAPPPTEGTRATVAASDLAALFDAQRRHLDHFFDRLDMPQAAAFAQALLDAPGAVFFTGVGKSGIVARKLAQTLASLGFARAGFLSPVDALHGDIGSVFPGXDVLVLLSKSGASDELLALAPCARAKGAKLISLTSAASGADCPLAAACDLNVHLPLQXKVCPFGLGPVTSTALQNGLRRTPSVAALHGRRAPLPRGNQYAVKTT

SEQ ID NO: 3197 - protein, 432 aa, Triticum aestivum
MDMDMEEPPHLFLCPISMELMQEPVTVSTGVTYDRRSIERWLFSYGRATCPATMQPLANLDLTPNHTLARVISSWLDRGSPSSSSSSSSSPSTSSLSSPVHELGTPLTRMLEEERLRSALGDLEETPFKVTALKSMRSCMAGDVAMQIIFVASGGVEAVGRVMAQALAESGAGGDFSAFTVCEEAAAVLAALPLSDKASVGLVLAPECLRPVMALLQRGSAEARLHAMDILTKISSAGAGDHWTAGIDVDDVLKSLLELLSDEVSARLSSRALDVLLDVVERSPSGRAKAVEVGAVHVLVELLVVDADDRHVAERILLLLKRLCKCPEGRLAFAEHDLSVAAVARTMLRVSDLATQLAVKVLWLVSMVAQSEKVLEDMVLTGAVAKLLGLLHVESAPSTKQKTVRMVRIHGVFWRQYPCFPTDLKDYLRLLD

SEQ ID NO: 3198 - protein, 160 aa, Triticum aestivum
MAGMVFGLENPMMTALQHLLDIPDGEAGNTAGGEKQGPTRAYVRDARAMAATPADVKELPGAYAFVVDMPGLGSGDIKVQVEDERVLVISGERRREEKEDAKYLRMERRMGKLMRKFVLPENADMEKISAVCRDGVLTVTVDKLPPPEPKKPKTIQVQVA

SEQ ID NO: 3199 - protein, 917 aa, Triticum aestivum
  misc_feature (450)..(450): Xaa can be any naturally occurring amino acid
  misc_feature (627)..(627): Xaa can be any naturally occurring amino acid
  unsure (1)..(917): unsure at all Xaa locations
RGRGRGTNTSPRWPLAQPMRLLGHNGEINTIQGNLNWMRSREATIQSPVWRGRENELRPFGDPKASDSANLDSAAELLLRSGRSPAEAMMMLVPEAYKNHPTLSVKYPEVIDFYEYYKGQMEAWDGPALLLFSDGRTVGACLDRNGLRPARYWKTSDGFVYVASEVGAIPMDESKVVMKGRLGPGMMITVDLETGQVLETTEVKKNVASAKPYGTWLQESTRSIKPVNFQSSPVMDNETILRHQQAFGYSSEDVQMVIETMASQGKEPTFCMGDDIPLAVLSQKPHMLFDYFKQRFAQVTNPAIDPLREGLVMSLEVNIGKRGNILEVGPENADQVTLSSPVLNEGELESLLKDPKLKPKVLSTYFNIRKGLDGSLENAIKALCEEADAAVRSGSQLLVLSDRSEALEPTRPAVPILLAVGAIHQHLIQNGLRMSASIVADTARCRRAHXFACWGGYGASAICPYLALETCRQWRLSNKTVNLMRNGKMPTVTIEQAQRNFIKAVKSGLLKILSKMGISLLSSYCGAQIFEIYGLGQEVVDLAFCGSVSKIGGLTLNELGRETLSFWVRAFSEDTAKRLENFGFIQSRPGGEFHANNPEMSKLAAQSQFREKKGIMAITIYQQHLAXRPVNVLRDLVELKSERTPIPIGKVEPATSIVERFCTGGMSLGAISRETHEAIAIAMNRIGGKSNSGEGGEDPIRWSPLTDVVDGYSATLPHLKGLQNGDTATSAIKQVASGRFGVTPTFLVNAEQIEIKIAQGAKPGEGGQLPGKKVSAYIARLRNSKPGVPLISPPPHHDIYSIEDLAQLIFDLHQINPKAKVSVKLVAEAGIGTVASGVSKANADVIQISGHDGGTGASPISSIKHAGGPWELGLTETHQTLIQNGLRERVVLRVDGGFRSGLDVLLAAAPGGDRSEP

SEQ ID NO: 3200 - protein, 550 aa, Triticum aestivum
MERQTSFRLGALEKLKSFRGMDNFRRSKDSPGKRGDTPLHLAARAGNVSNVQRILAESGQEMAGELAARPNQDGETALYVAADKGHTEVVREILKVSDMQTAGIKASNSFDAFHIAAKQGHLDVLKELLQAFPALAMTTNSVNATALETAAIQGHIDIVNLLLKTDASLAKIARNNGKTVLHSAARMGHVEVVRSLLNKDPGIGLRTDKKGQTALHMASKGTNAEIVVELLKPDFSVSHLEDNKGNRPLHVATRKGNIVIVQTLLSVEGIDVNAVNRSGETALAIAEKMNNQELVNILRDAGGVVTAKEPVHPANPAKQLKQTVSDIRHDVQSQIKQTRQTKMQVQKIKSRLEKLHIGGLNNAINSNTVVAVLIATVAFAAIFTVPGNFVEDMSQAPPGMSLGQAYVASEPAFIMFLVFDSLALFISLAVVVVQTSLIVVEQKAKRRMVFVMNKLMWLACLFISAAFIALTYVVVGRGDWWLAWCTMVIGAVIMLTTLGSMCYCIVAHRMEEKSMRKIRKASASQSRSWSMPVDSDPELINTEYKKMYAL

SEQ ID NO: 3201 - protein, 333 aa, Triticum aestivum
MATSMSCLLVLCLVCPLLAGVVRANPWYGLFPQFYDHSCPKAKEIVQSIVAQAVAQETRMAASLVRLHFHDCFVKGCDASVLLDNSSSIVSEKGSNPNLNSLRGFEVVDQIKVALETACPGTVSCADILALAARDSTVLVGGPYWDVPLGRRDSLGASIQGSNNDIPAPNNTLPTIITKFNRLGLNIVDVVALSGGHTIGLSRCTSFRQRLYNQSDNGLADSTLDMSYAAQLRQGCPRSGGDNNLFPLDVVSSTKFDNFYFKNILAGRGLLSSDEVLLTKSAETAALVKAYANDVHLFFQHFAQSMVNMGNIMPLTGSQGEIRKDCRRLNNYH

SEQ ID NO: 3202 - protein, 652 aa, Triticum aestivum
MPCSTCTRVSPTAISATSSSSRTVLRILPFRSPRGPYGRGLCLPGSIRCTAEVVDAAMHAPKPPEPKPRVLVAGGGIGGLTFALAARRKGFQVLVLEKDMSAVRGEGKYRGPIQLQSNALAVLEAVDMPAADQIMDAGCITGDRVNGIVDGISGSWYIKFDTFTPAADRGLPVTRVISRMTLQQILARAVGDDAIMNDCHVVDFTDNGNKVTAILEDGRKFEGDLLVGADGIWSKVRKSLFGETDASYSEYTCYTGIADFVPPDIDTVGYRVFLGHKQYFVSSDVGGGKMQWYAFHKEPAGGTDPENGKKKRLLEIFSGWCDNVIDLLNATEEEAILRRDIYDRPPTINWGKGRVTLLGDSVHAMQPNLGQGGCMAIEDGYQLAVELEKAWEESVKSRTPVDVISSLRSYEKERKLRVAIIHGLARMAAIMATTYRPYLGVGLGPLSFLTKLRIPHPGRVGGRFFIKVGMPLMLSWILGGNSSKLEGRPLSCRLSDKASNQLGRWFQDDDALEQAMGGEWYLFPMSSGGDSALQPIRLIRDEQRTLSIGSKPDPSNSDSSLSFPLPQVSEIHATITCKNKGFYLTDLGSEHGTWFNDNEGRRYRLPPNFPVRFHPSDAIEFGSDKKAMFRVKVLSTLPYDSARGGGEVLQAA

SEQ ID NO: 3203 - protein, 259 aa, Triticum aestivum
TTVGDGGCSDDERAGGGAAAESSAFWAEQLSHLHEVLGKTSSAESRIRADAEEAVRHARSGTATAAAGVCSSCATRATAGGGCRGCTLRSVAARLRDAGYDSAVCRSRWARSAEFPAGEHSYVDVVVPTRSGRAVRVVVEPSFRAEFAMARGGAGYGALVAALPEAFVGRAEKLRAVVEAMCAAAKRCARESSLHMAPWRKRRYMEAKWLGTPDRLSATTGAGAGAPVAAGSPESEKQRRFRASMLTLDFGGRTAVEVA

SEQ ID NO: 3204 - protein, 167 aa, Triticum aestivum
  misc_feature (70)..(70): Xaa can be any naturally occurring amino acid
  misc_feature (92)..(92): Xaa can be any naturally occurring amino acid
  unsure (1)..(167): unsure at all Xaa locations
EDSWGCKSRDEHHFEFKVDLAASKACRHQHGAIRKGVHIVIRGRPYKLAEVCTSKTGNHVHSKCHYVAIXIFNGKKLEDIVLSSHNCEVPPXCRPRCVRVIDITDDGYVSVVAESVNQKDDLKLLIDDVLSVQIKTGFVDGKGPIEYVMYRVGEEQIWAVKEIGGGK

SEQ ID NO: 3205 - protein, 238 aa, Triticum aestivum
  misc_feature (110)..(110): Xaa can be any naturally occurring amino acid
  misc_feature (133)..(133): Xaa can be any naturally occurring amino acid
  unsure (1)..(238): unsure at all Xaa locations
MAPRTSDKTATPPAAGAAATGLALGVGGGNGGGVGPHYRGVRKRPWGRYAAEIRDPAKKSRVWLGTYDTAEEAARAYDAAAREYRGNKAKTNFPFAPASAPPAAAAALTXGTAAGSSNSSTVESFGGDVQGPXWQAMPLPPSLDLDLFHRAATSTAGAGMRFPFSGYPVSHPYYFFGQAAAAAAAGCHMYSQAPKVTVASVSPSDSDSSSVVDLAPSPPTRKPVPFDLDLNCPPPAEL

SEQ ID NO: 3206 - protein, 280 aa, Triticum aestivum
  misc_feature (160)..(160): Xaa can be any naturally occurring amino acid
  misc_feature (166)..(166): Xaa can be any naturally occurring amino acid
  unsure (1)..(280): unsure at all Xaa locations
MVVEEAMDSDMSLSNMVLSFLEEGETERWPENDDNDDEEEEGSSGGGSAESKAFWRAQHSQLHEALGKTSTAESRIRAVTEKAVEKMRAPAAAGAVCSCARRAAAGDCRSCMLRHVVERLRDAGYNGAVCRSKWPRSLDIPSGEHSYVDVVLQTRSGKAXRVVVDXAIRAEFEVARAGAGYRALVAALPEAFVGRADRLRAVVKAMCAAAKQCMKENNMHLGPWRKHKYMQSKWLGTSEREAPPALDAVAAGSLSSPEKQPKYRASMLSFDFGRAPVVVA

SEQ ID NO: 3207 - protein, 358 aa, Triticum aestivum
  misc_feature (50)..(50): Xaa can be any naturally occurring amino acid
  unsure (1)..(358): unsure at all Xaa locations
MAAVTAAAVSLRAATAASTPSSAHPVSAPQHSHCSFPCAARTAVSGAGRXTDAAAAPVKEKKVSKKQEEGVVTNKFRPKEPYVGKCLLNTKITADDAPGETWHMVFSTDGEVPYKKGQSIGVVADGQDKNGKPHKLRLYSIASSALGDFGDAKTVSLCVKRLVYTNDAGEVVKGVCSNFLCDLKPGADVNITGPVGKEMLMPKDPNATIIMLATGTGIAPFRSFLWKMFFEKYEDYKFNGLAWLFLGVPTSSSLLYPEEFGKMKAKAPDNFRVDYAISREETNAAGEKMYIQTRMAEYKDELWELLKKDNTYVYMCGLKGMEKGIDEIMIPLASKEGIDWIDYRKQLKKSEQWNVEVY

SEQ ID NO: 3208 - protein, 630 aa, Triticum aestivum
MGQCYAKNIHADGRDGGEGGGGTTTISVSASAAAAVQEEPAGERATGGRRSGRPSPAGTPRSRAGVTPARTSAAAAGSPWAASPLPDGIAPSPATSASTPRRFFRRPFPPPSPAKHIKASLARRLGHRSPAATSAQAPPAKPPQEAPIPEQGAGGGGGEEELDKSFGYDRHFAVKYELGKEVGRGHFGHTCLARARKGDMRGQVLAVKVISKAKMTTAISIEDVRTEVKILKALSGHSNLVKFYDACEDALNVYIIMELCEGGELLDRILSRGGRYTEDDAKVIIKQILSVVAFCHLQGVVHRDLKPENFLFSTRDEHSPMKLIDFGLPDFIRPDERLNDIVGSAYYVAPEVLHRSYSTEADMWSVGVITYILLCGSRPFWARTESGIFRSVLRADPNFDDSPWASISPEAKDFVKRLLNKDYRKRMTAAQALSHPWLRDECCPVPLDMLVFKLVKAHLRSTPFKRAALKALSRAITEDELIYARAQYNLLQPSSQDGRICIENFRMALLQNSTDAMKESRTLDILSALEPLAYRRMDFEEFRAATISPYQLEASSMWDEIASTAFECFEQEGNRVITIEELAQEMNLSSAAYSIVRDWIRPSDGKLSFIGYTKFLHGLTMRSSNARRHH

SEQ ID NO: 3209 - protein, 336 aa, Triticum aestivum
  misc_feature (170)..(170): Xaa can be any naturally occurring amino acid
  unsure (1)..(336): unsure at all Xaa locations
MCGGAILAELIPGAPARRATSGHGHVWPGKGAKQTKAAAADDFEAAFREFNEDSDVEDDVVMVMERREEVAESKPFVFAASPKKQQQEEEEAAPVRRRKPAQYRGVRRRPWGKWAAEIRDPVKGVRVWLGTFPSAEAAALAYDEAARAIRGPRAKLNFSSSSAVAAAAPXARKRGRAAPPAAKPAPVITLVDDEEEHASSFVKHEAEASEGSESSGALPDFSWQGISAFDEAPAYPAPEPETEQLTKRARTTEAEDTDEGMSAHPASDSDSDALFDALLFADQFAFFNGGAYESLDSLFSADAVQSSATATAVNEAALGLWTFDDDCLVDECSLSF

SEQ ID NO: 3210 - protein, 441 aa, Triticum aestivum
  misc_feature (117)..(117): Xaa can be any naturally occurring amino acid
  misc_feature (148)..(148): Xaa can be any naturally occurring amino acid
  unsure (1)..(441): unsure at all Xaa locations
MYSNFKEQAIEYVKQAVQEDNAGNYVKAFPLYMNALEYFKTHLKYEKNPKIKEAITAKFTEYLRRAEEIRAVLDEGGGGPPGAPNGGDAAVATRPKTEGRDGGGDGAGGDDSEQSKXLRAGLNSAIITEKPNIKWNDVAGLESAKQAXLRRPVILPVKFPQFFTGKRRPWRAFLLYGPPGTGKSYLAKAVATEADSTFFSISSSDLVSKWMGESEKLVANLFQMARENAPSNYLHLMELIPCAVQLGEGNESEASRRIKTELLVQMQGVGHNDDKVLVLAATNTPYALDQAVRRRFDKRIYIPLPDAKARQHMFKVHLGDTPHSLSESDFEVLGRRTEGFSGSDVAVCVKDVLFEPVRKTQDAMYFFKIDGDMWMPCGPKQPGAVQTTMQDLASKGLASQILPPPISKNDFEKVLARQRPTVGKKDLEVHEKFTKEFGEEG

SEQ ID NO: 3211 - protein, 192 aa, Triticum aestivum
GTAAPCATRRRLWGWGVAPRYRGVRKRPWGRFAAEIRDPAKRARVWLGTYDSAEAAARAYDVAARTLRGPLATTNFPQDPVSFPTLPTLPHPSRPASPGPACSASSTVESYSGPRAANAPRAVPRVSAPAPLLAERSGGDAGCQSDCASSASVVDDGGDEAASAAVRPRAPFVFDLNLPPPSDELCTELRLF

SEQ ID NO: 3212 - protein, 198 aa, Triticum aestivum
  misc_feature (80)..(80): Xaa can be any naturally occurring amino acid
  unsure (1)..(198): unsure at all Xaa locations
SKKATDNQHAPAAQRPHAVAMATAASASLSAASFLSPAPSRPRTLFRALAASGSGGGKKKPGKSQDQQQQGQGQGQGAGXPPPDVAVPRAPAGSASVFDQQRRKAGFNPGGRGNRFTEDEVRQRQATESAFLFAWLGLGGIILFQGLALAASGFLPTEWDSFLVKYLYPSFTPTVLLFLGGTTGYGVFKYFEGEKSKG

SEQ ID NO: 3213 - protein, 491 aa, Triticum aestivum
MGSLPVPAFPSKHCLDESSHIDEATLSALFKSQQSHLNFFFDHIDHSQTLAFTRALLNAAGTVFFTGVGKSGFVAHKISQTLVSLGVRSAFLSPVDALHGDIGILTNRDVLILLSKSGATEELLRLVPCARAKGALLIALTSVEGNALAAACDMSVHLPLQRELCPFNLAPVTSTAIQMVFGDTVAIALMEARNLTKEEYAANHPAGKIGKSLIFKVKDVMKKQDELPICRESDLIMDQLVELTTKGCGCLLVIGDGYRLIGTFTDGDLRRTLRARGEAIFKLTVGQMCNRNPRNLIGPEAMAVDAMKKMEAPPSPGSVFCLVINDEKFLLGGCESLDPLLGFLAGLAGFGGGPAGRFFFFGNFLAPFFPLGGFFPPHLALWGPPPPIFPQGGGFPPGFLGGAPFLGAPPPPPKGDCGGFFQKTFFFFFFFPPPQKKKKKKKKKKKFFFFFFPGENTPPPGGGGGAPPPKTPPKFFPPPFYWGGGAFFCGP

SEQ ID NO: 3214 - protein, 281 aa, Triticum aestivum
  misc_feature (152)..(152): Xaa can be any naturally occurring amino acid
  unsure (1)..(281): unsure at all Xaa locations
MAMARVPILIAVALVAAAASCSAWEPTIRMPTAEAAAAAVDDAVAPLIHALRPLLGSSGELGSRGGVPCDSWRLGVEAYNVRDWKTVPANCEGYVGHYMLGSHFRRDSKVVIDQAIAYVDSLKLAGNGKEVWVFDIDETTLSNLPYYATHGXFGARPYNATSFDAYVLEGTAPVLPETKRLYYKLLKVGIKPVFITGRTEDKRAITVGNLRSQGISGWMNLTLKQPGFHGSAISYKSAERKKLQDAGYVIVGNIGDQWSDLLGAPEGARTFKLPDPLYYIS

SEQ ID NO: 3215 - protein, 507 aa, Triticum aestivum
MLLRRSEPGNELEELLWDNGPALRRAASPFPPFSCSAAGTMKAQELAKHPASATAMAQGHDDDAVPWLQHYPIIGVDDDGSGGDTAPLPQDYFSTLFPGFSELPAAVASRDAGAPSTSHAAVVVPPLPGATCAPQAAAGRRLDPPGKGVMNFSFFSRPLQRSLPQASTRTSAAGSKSVESTLLQTNRLRSTPLFSEQRTAWLQPPKELPAAVSASRPPAPPVPVRHAAEPAAALPQRLQPEARAAALPPRLQPEVRAAALPQRLQSEARASEMPPPPATATTSSVCSDNGERSQLKRSSHQTLEWSVSQDDEDLDDEAGGLRRSAARSTKRGRTAEVHNMSERRRRDRINEKMRALQELIPNCNKIDKASMLEEAIEYLKTLQLQVQMMSTMGTAGLCMPPMMAMQHMQMPPMAHFHHHHLGAMGFGMGPFDPRLVAAAGAAQFPYPMMPGAPIFGGHAMPPPPPFHQAAVAGAHMAPGPVTNDAATAAQAEHEQTPGDHPQVPRTM

SEQ ID NO: 3216 - protein, 163 aa, Triticum aestivum
  misc_feature (58)..(58): Xaa can be any naturally occurring amino acid
  unsure (1)..(163): unsure at all Xaa locations
MAAAPSATALAGAALPLPLSARPQPARFSVALPRTAPPPPALRLRSVRRLAAAEGGAXAGMKDTLDKVVSAHKVVLFMKGTKDFPQCGFSHTVVQILRSLDVPFETLDVLANDALRQGLKDYSSWPTFPQLYIDGEFFGGCDITLEAYKSGELQETLEKAMCS

SEQ ID NO: 3217 - protein, 201 aa, Triticum aestivum
  misc_feature (100)..(100): Xaa can be any naturally occurring amino acid
  misc_feature (133)..(133): Xaa can be any naturally occurring amino acid
  unsure (1)..(201): unsure at all Xaa locations
HFRTSGYEKAGCHRSGIPGISTTHASGDCYSPAGVPIPTNKRYNAAKIFSNPDVAKEEPWYRIEQEYTLLLKDINWPLGWPVGGFPGPQGPYYCSIGADXSIRRDIADSHYKACLFAGVNISGINGEVMPGQXEFQFGPTVGISAGDPLWVARYLLEKITEIARVVVSFDTEPIPGDWNGAGAHTNYRTESMRKDGGLKVI

SEQ ID NO: 3218 - protein, 159 aa, Triticum aestivum
MAGMVFGLENPMMTALQHLLDIPDGEAGAAGGEKQGPTRAYVRDARAMAATPADVKELPGAYAFVVDMPGLGSGDIKVQVEDERVLVISGERSREEKEDAKYLRMERRMGKLMRKFVLPENADMEKISAACRDGVLTVTVEKLPPPEPKKPKTIQVQVA

SEQ ID NO: 3219 - protein, 440 aa, Triticum aestivum
MSSSTGSLDHAGFTFTPPPFITSFTELLSGSGAGDAERSPRGFNRGGRAGAPKFKSAQPPSLPISSPFSCFSVPAGLSPAELLDSPVLLNYSHILASPTTGAIPAQRCDWQASADLNTFQQDELGLSGFSFHAVKSNATVNAQANCLPLFKEQQEQQQEEVVQVSNKSSSSSGNNKQVEDGYNWRKYGQKQVKGSENPRSYYKCTYNNCSMKKKVERSLADGRITQIVYKGAHDHPKPLSTRRNSSGCAAVVAEDHTNGSEHSGPTPENSSVTFGDDEADKPETKRRKEHGDNEGSSGGTGGCGKPVREPRLVVQTLSDIDILDDGFRWRKYGQKVVKGNPNPRSYYKCTTVGCPVRKHVERASHDNRAVITTYEGKHSHDVPIGRGRALPASSSSDSSAVIWPAAAVQAPCTLEMLAGHPGYAAKDEPRDDMFVESLLC

SEQ ID NO: 3220 - protein, 291 aa, Triticum aestivum
MGTKAMEAFVVNETPVFMLAPTRPLRIVMSLPSMIIKLTLGLLWCIIHLAISLLSLCSHLIFNLECSLISSGLLWKYRNLQLGRLKYLAIVVDSREAKNTVKINQLLYWLKTLGVKYVCLYDIDGVLKKLFAPGMNGSRDNNPGDYLDASANIKALDCCQKQMTIECISGSDGKEGIAKAANLLCSSYLNGDSYTQEYVKSEENVKSEENVENEPVFTETDMASALKSIGCAGPEPDLLLVYGPARCHLGFPTWRLRYTEIMHMGPLKSMKYGAIVKAFHNYSKKHQNYGK

SEQ ID NO: 3221 - protein, 367 aa, Triticum aestivum
  misc_feature (246)..(246): Xaa can be any naturally occurring amino acid
  misc_feature (287)..(287): Xaa can be any naturally occurring amino acid
  unsure (1)..(367): unsure at all Xaa locations
MAIVREEPPPSEEPMDLLSSAWCSSAIQVLQTGPKEEDRSLALVEHPVMGLDDDRRDLSQLQRNDRSLVVDDSGFGGAAQPQWKYEDLKSWIWLQKAIHPELDYENKKKWLPRKMAAPWSGISLKKWVKERKQKRKEEARLHKAEVHAAVSVAGVADVLWAIAAENSAPAVRGSVSASMRETAVTSAAALVAAQCAKVAEGPVAMRDQVVVAVNAAVVATDASSVITLTGGDGHSMGGAGALEVMXGATGGHWQGKKADHGCPGPVHGQLGLEFNLPRSRATLAKGXKVFVLCPDGKWEAATGFGLGGRNGRVAPGTKKINLASGLSPHAKKRGESARQSPGKGDRGRDQNTGAGGRAWTGGARADI

SEQ ID NO: 3222 - protein, 219 aa, Triticum aestivum
MAGDRCKGAIAGCELCGGVAAVHCAADSAFLCVPCDAKVHGANFLASRHLRRRLVHAAADEDAGSAGSGSGSESSSSSSCVSTADSCAAASAATRAAGRRRAGCKHRRARAEVVLEGWAKRMGLAAGTARRRAARAAGALRALGRGVSASRVPLRVAMAAALWSEVAGSGCAEAALLRRLEASSHVPARLVVTVASWMARTAVRAPAPAPAEEGWAECS

SEQ ID NO: 3223 - protein, 237 aa, Triticum aestivum
  misc_feature (150)..(150): Xaa can be any naturally occurring amino acid
  misc_feature (160)..(160): Xaa can be any naturally occurring amino acid
  unsure (1)..(237): unsure at all Xaa locations
MAVGNGGAKKVVAPMEVSVEAGNAGDAAWMDDDGRPRRSGTFWTASAHIITAVIGSGVLSLAWAIAQLGWVAGPAVMLLFAAVIYYTSTLLAECYRTGDPATGEANYTYMDAVRSNLGGPKVIFCGVIQYANLVGVAIGYTIASSISMRXAIRRADWFPXTGHADPCQSSSNPYMILFGLVQIVFSQIPDFDQIWWLSIVAAVMSFTYSGIGLSLGITQTICMSSELQTYYSLRSLL

SEQ ID NO: 3224 - protein, 295 aa, Triticum aestivum
MDVVLQSRSSNSMAAEPEEEAEPEEEAELRRGPWTVDEDLTLINYIADHGEGRWNALARAAGLRRTGKSCRLRWLNYLRPDVKRGNFTADEQLLILDLHSRWGNRWSKIAQHLPGRTDNEIKNYWRTRVQKHAKQLNCDVGSATFKDAMRYLWMPRLVERIHAAAGDPTIGDTSCASGVRSMATTAATATTYPENNSAAIAVTTSRSASSGSFTSELCGEEKNLHVHGSGEKTTSGGDWMQEADQEFWAMHMQIQPEDGGLFHVDHELSGWVQGFSDVGVSADNLWSLEDIWKMQ

SEQ ID NO: 3225 - protein, 599 aa, Triticum aestivum
  misc_feature (256)..(256): Xaa can be any naturally occurring amino acid
  unsure (1)..(599): unsure at all Xaa locations
MDKGALMTPDSDQGGPDGGSFSSLRSYGRALSQTPRRLARRACAATAPGEEMSRVRARSGAPMARALRWPDLVGLGLGGMVGAGVFVTTGRATRLHAGPGVVVSYAIAGLCALLSAFCYTEFAVDMPVAGGAFSYLRVTFGEFAAFLTGANLIMEYVFSNAAVARSFTAYMGTAVGVDAPSKWRIAVPGLPNGFNQVDLVAVGVILLISVCICYSTKESSKVNMVLTAVHVAFILFIIVMGFWRGDARNLTHPADXPNPGGFFPNGVGGVFSGAAMVYLSYIGYDAVSTMAEELERPARDIPIGVSGSVIIVTVLYCLMAASMSMLLPYDAIDTEAPFSGAFRGSDGWGWVSNVIGAGASLGILTSLMVAMLGQARYLCVIGRSGVMPAWLAKVHPKTATPVNASAFLGLLTAALALFTELDILLNLVCIGTLFVFYMVSNAVVYRRYVVGPTGSGTESGDRQPSAWPTLAFLLAFSLIALSFTLVWKLAPEGGRTRVGLLSACGAAAVAMVGAFQALVPQAHTPELWGVPGMPWVPAASVFLNVFLLGSLDRPSYVRFGFFSAAAVLVYVLYSVHASYDAEESATLDGAKVQDEACRV

SEQ ID NO: 3226 - protein, 490 aa, Triticum aestivum
  misc_feature (102)..(102): Xaa can be any naturally occurring amino acid
  unsure (1)..(490): unsure at all Xaa locations
MASGGGAVREVGSRAELDAAVGGARAAAVHFWAAWCEASKQMDEVFAHLAVDFPHALFLRVEAEEQPEISEAYGVTAVPYFVLCKEGKPVDTLEGANPASLXANKVAKLAGPANVAQPAAPASLGVAAGPAVLEKVQEMARQNGSSAAESTLKKRLEQLVNSHPVILFMKGNPEEPRCGFSRRVVDILKQEGVEFGSFDILTDNEVREGLKKFSNWPTFPQLYCKGELLGGCDIVIAMHESGELKDVLKEHNIPLRQQGSKIEEPVMSESANEQSPEAIGLTEAQKARLESLTNSNPVMIFIKGSPEEPKCGFSGKVVHILKQEKIPFSSFDILSDDEVRQGLKVLSNWPSYPQVYIKGELVGGSDIVMEMHKSGELKKVLTEKGIIRKESLEDRLEALISSSPVMLFMKGNPDNPRCGFSSKVVNALKGAGISFGSFDILSDEEVRQGLKTYSNWPTFPQLYYKSELMGGCDIVLELEKSGELKATLSE

SEQ ID NO: 3227 - protein, 390 aa, Triticum aestivum
MGALCDFCGEQRPTIYCRSDAASLCLSCDRNVHSANTLSQRHMRTLLCDRCASQPAAVRCLEENTSLCQNCDWNGHAATSMAAVHLRQTINCYSGCPSSEELARIWSFDFDAPSAAAEPNCEEGISMMSINDSGVSNHCGVQQDCSLLDIANTSLMSDPPTVEKLKSEDEMNLRPLPTHQPAQSVSMAPKVPSVTDDDMFNDGRVYENFCVDDNDLTFENYEELFGTPHVQTEQLFDDAGIDSFFELKEMPAADCDQQLNPMRPKCSNAVSADSSLCVPARQAISTISLSFSGLTGESNAGDHQDCEVSPLLLMGEQPWLPPGSEGSSAGGSRGSALSRYMEKKKRRKFDKKIRYASRKARADVRKRVKGRFVKAGEAYDYDPLSDTRSY

SEQ ID NO: 3228 - protein, 230 aa, Triticum aestivum
MVRGKTQMKRIENATSRQVTFSKRRNGLLKKAFELSVLCDAEVALVVFSPRGRLYEFASATSLQKSIDRYKAYTKDTVNNKTVQPDIQQVKADALSLAKKLEALEDSKRKILGENLGGCSTEELHFLEGKIEKSLRVIRGKKTQLLEQQIAKLKEKERTLLKDNEDLRGKQRNLEARLLLPAPNSVAPLQPRGEPAPEQEPVQRDEDVETELYIGLPGVRCSSRRSGQAK

SEQ ID NO: 3229 - protein, 215 aa, Triticum aestivum
  misc_feature (108)..(108): Xaa can be any naturally occurring amino acid
  misc_feature (126)..(126): Xaa can be any naturally occurring amino acid
  misc_feature (173)..(173): Xaa can be any naturally occurring amino acid
  misc_feature (182)..(182): Xaa can be any naturally occurring amino acid
  misc_feature (208)..(208): Xaa can be any naturally occurring amino acid
  misc_feature (212)..(212): Xaa can be any naturally occurring amino acid
  misc_feature (214)..(214): Xaa can be any naturally occurring amino acid
  unsure (1)..(215): unsure at all Xaa locations
MLRPMLACCKLYVSEGRSAAALRAVEQAARRHHPAVVLVNTFADDAYNRVGYTLVSRLPDPVAPAAPLRRAVFGMVEAALGAIDLGAHAGAHPRLGAVDHVCFHPLGXAALRDVAALAAAVAADIXGDGLRVPTYLYGAAHREGRKLAAIRRQLGYFKPQSSAEWHGPLPVAXDTTALPVAXDAGPDAASASKGVLVLGATAWVDNYXVPVXTXD

SEQ ID NO: 3230 - protein, 162 aa, Triticum aestivum
MEGRMFGLETPLMTALQHLLDVPDGEAGGAGNAGGEKQGPTRAYVRDARAMAATPADVKELPGAYAFVVDVPGLGSGDIKVQVEDERVLVISGERRREEKEDAKYLRMERRMGKLMRKFVLPENADMEKISAVCRDGVLTVSLEKLPPPETKKPKTIQVQVA

SEQ ID NO: 3231 - protein, 328 aa, Triticum aestivum
MAKPISIEVWNPSGKYRVVSTKSMPGTRWIKLLTDNDCRLEICTEKKTILSVDDILALIGDHCHGVIGQLTEDWGEVLFSALKRAGGTAFSNMAVGYNNVDVDAANRNGIAIGNTPGVLTETTAELAASLSVAAARRIVEADQFMRAGLYDGWLPHLFVGNLLKGQTVGVIGAGRIGSAYARMMIEGFKMNLIYFDLYQSTRLEKFVTAYGQFLKANGEQPVTWKRASSMEEVLREADVISLHPVLDKTTYHLINPERLAMMKKEAVLVNASRGPVIDEVALVEHLRANPMFRVGLDAFEDEPYMKPGLAEMRMASSSLKSIRIQCDL

SEQ ID NO: 3232 - protein, 381 aa, Triticum aestivum
  misc_feature (220)..(220): Xaa can be any naturally occurring amino acid
  misc_feature (249)..(249): Xaa can be any naturally occurring amino acid
  unsure (1)..(381): unsure at all Xaa locations
MADRANHPSVMQKFGGQFHLASSFSEGVRARNICPSVPSYERRFTTSSYMTQNLGISVPMMSSSPLFANAPPEKKGVKNFAIDFLMGGVSAAVSKTAAAPIERVKLLIQNQDEMIKAGRLSEPYKGIGDCFGRTIKDEGFGSLWRGNTANVIRYFPTQALNFAFKDYFKRMFNFKKDKDGYWKWFGGNLASGGAAGASSLFFVYSLDYARTRLANDAKAXKGGGERQFNGLVDVYRKTLKSDGIAGLYXRGFNISCVGIIVYRGLYFGLYDSLKPVLLTGTLQDNFFASFALGWLITNGAGLASYPIDTVRRRMMMTSGEAVKYKSSLDAFQQILAKEGAKSLFKGAGANILRAIAGAGVLSGYDQLQILFFGKKYGSGGA

SEQ ID NO: 3233 - protein, 431 aa, Triticum aestivum
  misc_feature (23)..(23): Xaa can be any naturally occurring amino acid
  unsure (1)..(431): unsure at all Xaa locations
VSSGDGAGGGAGDAVPGGRAGQXAVPARQPAGRVWGVRRTARATSGFKVLALGPETTGVIQRMQQLLDMDTTPFTDKIIAEYIWVGGSGIDLRSKSRTISKPVEDPSELPKWNYDGSSTGQAPGEDSEVILYPQAIFKDPFRGGNNILVICDTYTPQGEPIPTNKRHMAAQIFSDPKVTSQVPWFGIEQEYTLMQRDVNWPLGWPVGGYPGPQGPYYCAVGSDKSFGRGISDAHYKACLYAGIEISGTNGEVMPGQWEYQVGPSVGIDAGDHIWASRYILERITEQAGVVLTLDPKPIQGDWNGAGCHTNYSTLSMREDGGFDVIKKAILNLSLRHDLHIAAYGEGNERRLTGLHETASISDFSWGVANRGCSIRVGRETEAKGKGYLEDRRPASNMDPYTVTALLAETTILWEPTLEAEALAAKKLALKV

SEQ ID NO: 3234 - protein, 344 aa, Triticum aestivum
MASTVGAAARGPATGGKPSVLYLRRADDGLAAALRARYRVHSLYDSGAPLLAFLAASAAAPGAGEPPRAAVVVGGGAIQVDAAFLDAAPCLRCVVTTAAGLDHVDLAECARRGVAVAGAGETFSTDVADHAVGLLVDVLRRVSAADRFVRRGLWPARGDYPLGSKLSGKRVGIIGLGSIGTLIARRLQAFGCTISYHSRRAKDSATISYKYFPTVINLALESDVLVVACALNDQTRHIVNKEVLEALGKDGVIVNIARGGNVDEAALIRALKAGGIAGAGLDVFEKEPEVPAELLSMENVVLTAHEAVFTVESASDLSDLMIGNLEAFFQGKPLLTPVLPEQML

SEQ ID NO: 3235 - protein, 291 aa, Triticum aestivum
MQDFQSIPGLAGRLFGGAAAADIRRVQGPASRCGVFSQAASAQPEAAVKCPRCESTNTKFCYYNNYNLSQPRHFCKSCRRYWTKGGVLRNVPVGGGCRKAKRSSSSASAPSTPAATDAKSQRRASASSSSRSNSGSGSASPTAAAEETTTTETEPPPPPTPSSNSNSNAVSFANRMTNYPFAADVPPLAPIFADQAAALASLFAPPPPPPLPVFSFSAEPKMEEAIGSLLLPGQEPAQEPEEPTCTSTVADMAPFMSLDAGIFELGDASPADYWNGGSCWTDVQDPSVYLP

SEQ ID NO: 3236 - protein, 392 aa, Triticum aestivum
MASEGEHAAAAAAAGEQTPLKKAGEAEQGEELQAPSGWTKKLNPTRGGKFEVVFVAPTGEEVKTKRALTTYLKAHPGGPALSEFVWATGNTPRRSSRLSAKPKATESPEDEKPSRRSGKPSSSKKGKKGKQEDAEDAEAESGDHADAEEAKGTEVEMKDAEEAKVTDLDLEMKEADNAQEEKKEEEAGEEMKDAPVADAPEKTEEVEGEAAESEVAPVETEMPDPVTENKENEKPAEFEEVPVEFEMSDLISENKENEKPAESEEVPVEFEMSAPVLEEHKEDEKPAEYEVAPVEGEKTENGLAVESTVSPPATSEEKKVEADSTINPATPPPAEVKADAPAAEAAKAAENPADNTAHKDDQGNAGTTGEQSTGNVDNNGQIHPGVSTVRCI

SEQ ID NO: 3237 - protein, 106 aa, Triticum aestivum
MSGVWVFKNGVVRLVENPGSERTSTVRRKALLHTPSGQVVSSYATLEAKLTALGWERYYEDPALYQFHKRGCLDLISLPRDFNHFSSVHMYDVVIKNRESFRVVDA

SEQ ID NO: 3238 - protein, 204 aa, Triticum aestivum
  misc_feature (121)..(121): Xaa can be any naturally occurring amino acid
  unsure (1)..(204): unsure at all Xaa locations
MVDLQAAGLVISVARPRSDTRGGRGARGGGTAAAAAAARKGRAGPAEMGFVSFVGRVLFASVFLLSAYQEFSEFGPDGGPAAKSLKPKFNLFVKQVSAGIGMAVPHIDIKSVIAFTMFLKXLGGLLFIISSSFGALVLLVYLAFITPVVYDFYNYEMESQQFVKLFTMFSQNLALFGALLFFLGMKNSIPRRHSKRRAAKAKTT

SEQ ID NO: 3239 - protein, 237 aa, Triticum aestivum
MAANVGESAAVGGSSSDAAGGSFECNICFELPQEPIVTLCGHLFCWPCLYRWLHMHANTPECPVCKAIVEEDKLVPLYGRGKDRVDPRSKNTPGGDIPQRPAGQRPATAQQADPNNNFGNAHANPWFMGMGGAGAGAGVPLANGRWGNYAFSAAFGGLFPMLSFQMHGFPDPAAYAQPAGFHYGFGHGHGFHGGHMGHAHGVPRQGPLGQQQQQADVYLKALLIMVGVLVIASLLAA

SEQ ID NO: 3240 - protein, 249 aa, Triticum aestivum
MRLYLHANSNTLFVSDNDNDHGKPDQHMVKPLLSLGNPETVAPPPMLDCSQSFAYIPYTADAYAGIFPGYASHAIVHPQLNAATNSRVPLPVEPAAEEPMFVNAKQYHAILRRRQIRAKLEAQNKLVKARKPYLHESRHRHAMKRARGTGGRFLNTKQLEEQKQKQASGGASCTKVLGKNTLLQSSPAFAPSASAPSNMSSFSTTGMLANQERTCFPSVGFRPTVSFSALNGNGKLAPNGMHQRASMMR

SEQ ID NO: 3241 - protein, 306 aa, Triticum aestivum
MSTSLVIGRCEVPIFGHHRRRRLQSPNPTHSALPPAPRYHRPAGVMRPLLSRLFAPSYIAMAAPSASPSRRLAHLTRHLLASSSSSSSGELSSVGAPAPAASSPARAAASKAFAAVLVCIFEDTRGDPRVLLTKRASTLSSHSGEVSLPGGKVDQGDVDVKATALREAEEEIGLDPALVSVVTVLEPFLSKNGLDVTPVIGILSDRALFNPVLNKAEVQDIFDAPLEMFLKDDNRTTRQRDWMGKTIPVQFFDYEAEGKKYVIWGLTAHILTRAASVVLQREYVIVAIFTPHLLVQEAIRSLKLNR

SEQ ID NO: 3242 - protein, 354 aa, Triticum aestivum
MCGGAILAGFIPPSAAPVPPPAPARPAAVQHDGPAAKQVKRVRKNQYRGIRQRPWGKWAAEIRDPSKGVRVWLGTYDTAEEAARAYDAEARKIRGKKAKVNFPEDAPTVQKSTLKPTAAKSAKLAPPPKACEDEPFNHLSRGDNDLFAMFAFNDKKVPAKPAESVDSLLPVKPLVPTETFGMNMLSDQSSNSFGSTDFGWDDEVMTPDYTSVFVPNAAAMPAYGEPAYLQGGAPKRMRNNFGVAVLPQGNVAQDIPAFDHEMKYSLPYVESSSDGSMDSLLLNGAMQNGASSGDLWSLDELFMAAGGLLRVLCQCGLRIAQMSLACGQDEELVVHVAEMKGLVASAMFRSRIRP

SEQ ID NO: 3243 - protein, 772 aa, Triticum aestivum
  misc_feature (670)..(670): Xaa can be any naturally occurring amino acid
  misc_feature (753)..(753): Xaa can be any naturally occurring amino acid
  unsure (1)..(772): unsure at all Xaa locations
ARRAEQTSIPGAVCVLDDEPRSTGRHCGEIDLCLCQSQRVSFSIAVMVQPVSGPLCLFRTEFEKKVCWEILVAGSQQGMEAGHVGLTLLTNAERMTTVAKEWNIGASSIADGRWHIVTVTIDADLGEATSFIDGVYDGYQNGLPLPRNNGVWEPGADIWVGARPPTDLDAFGRSDSEGTDSKMQIMDAFLWGRCLTEDEIAALYTTMSPAEYGFFDLAAEDAWHGSYSARVDDWESEEANYELYDQEDVEWDGQYSSGRKRPVRDAVAIDIDSFARRPRKPRFETREEVNQRMLSVERAVREALSAKGERAFTDQEFPPDDRSLYVDPGNPPLKLQVVSEWTRPSDIAKEISISSQPCLFSGSVNSSDVCQGRLGDCWFLSAVAVLTEMSRISEVIITPAYNEEGIYTIRFCIQGEWVAVVVDDWIPCESPGKPAVASGRPQNELWVSILEKAYAKLHGSYEALEGGLVQDALVDLTGGAGEEIDMRSPQAQIDLASGRLWSQLLHFNQEGFLLGAGSPSGSDAHISSSGIVQGHAYSILQIREVDGHKLVQIRNPWANEVEWNGPWSDSSQEWTERIKHKLKHVPQSKNGVFWMSWQDFQIHFRSIYVCRVYPPEMRYSVHGQWRGYSAGGCQDYDSWHQNPQYRLRVTGRDALYPVHVFITLTRGLVXGFGTRSRKTNGFRNYQSSHDSSMFYIGMRILKTRGCRAAYNIYMHESVGGTDYVNSREISCELVLEPYPKGYTIVPTTIHPGXEAPFVLSVFTKAPIKLEAV

SEQ ID NO: 3244 - protein, 395 aa, Triticum aestivum
REKQHTEHIDKVKHEEDPLASGGPKPMDVSTTPHEIFSADVTVLEGHSSEVFACAWSPAGSLLASGSGDSTARIWTIPDGPCGSIQSSPASAHVLKHFKGRTNEKSKDVTTLDWNGEGTLLATGSYDGQARIWSRDGELKQTLFKHKGPIFSLKWNRKGDFLLSGSVDKTAIVWDTKTWECKQQFEFHSAPTLDVDWRNNNSFATCSTDNMIYVCKIGDPRPVKTFSGHQSEVNAIKWDPTGSLLASCSDDWTAKIWSVKQDKCVYDFKEHTKEIYTIRWSPTGPGTNNPNQQLLLASASFDSSIKLWEVEKGHLLYSLAGHRQPVYSVAFSPDGEYLASGSLDQSLHIWSVKEGRILKTFRGSGGIFEVCWNKEGSKIAACFSNNTVCVMDFRM

SEQ ID NO: 3245 - protein, 158 aa, Triticum aestivum
  misc_feature (146)..(146): Xaa can be any naturally occurring amino acid
  unsure (1)..(158): unsure at all Xaa locations
MGFVSFAGRVLFASVFLLSAYQEFTEFGTDGGPAAKNLQPKFNSFTKNISVHLGVVVPHVELKHVIAATIGLKGLGGLLFIVSSSFGAYLLALYLAFITPVVYDFYNYDMEKAEFVQIFMKFTQNLALFGALLFFLGMKNSVPKRXQAKKKAAKSKTT

SEQ ID NO: 3246 - protein, 144 aa, Triticum aestivum
  misc_feature (44)..(44): Xaa can be any naturally occurring amino acid
  misc_feature (136)..(136): Xaa can be any naturally occurring amino acid
  unsure (1)..(144): unsure at all Xaa locations
MMHHAAGLDLDLGPGLGLASQGSLTSSTTTTSSSPASMSRERHXAGTKRGLEHTSSGVFPAASSDEDDGGGDGAGGRKNLRMSKDQSAVLEECFKTHSALNPKQNKALANRLGLRPQQVEVWFHNRRARTKLKQTXVDCEYMKR

SEQ ID NO: 3247 - protein, 399 aa, Triticum aestivum
  misc_feature (314)..(314): Xaa can be any naturally occurring amino acid
  unsure (1)..(399): unsure at all Xaa locations
TSSLLSDCYRYGDETTGKRNYTYMDAVNANLSGIKVQLCGFLQYANIVGVAIGYTIAASISMLAIKRANCFHVKGHVNPCHISSTPYMVIFGVAQIFFSQIPDFDQISWLSILAAIMSFTYSTIGLGLGIVQVVANKGVKGSLTGISIGAVTPIDKVWRSLQAFGDIAFAYSYSLILIEIQDTIRAPPPSEAKVMRRATLVSVATTTLFYMLCGCMGYAAFGDDAPGNLLTGFGFYEPFWLLDIANAAIVVHLVGAYQVYCQPLFAFVEKWAQQRWPKSGFITGEIQVPLVSSGFKLNLFRLTWRSAFVVATTXVVSMLLPFFNDVVGFLGAIGFWPLTVYFPVEMYIVQKKIPRWSSQWVCLQLLSLACLIITIAAAAGSIAGIMSDLKVYKPFSTTD

SEQ ID NO: 3248 - protein, 341 aa, Triticum aestivum
  misc_feature (83)..(83): Xaa can be any naturally occurring amino acid
  unsure (1)..(341): unsure at all Xaa locations
MEPGRLIFNTSGSGNGQMLFMDCGAGGIAGAAGMFHRGVRPVLGGMEEGRGVKRPFFTSPDDMLEEEYYDEQLPEKKRRLTPXEQVHLLERSFEEENKLEPERKTELARKLGLQPRQVAVWFQNRRARWKTKTLERDFDRLKASFDALRADHDALLQDNHRLRSQVVTLTEKMQDKEAPEGSFGAAVDALEPEQAAAEAKASLANAEEHAAAAEAFEVVQQQLHVKDEERLSPGSGGSAVLDARDALLGSGCGLAGVVDSSVDSYCFPGGAGGDEYHECVMGPVAGGIQSEEDDGAGSDEGCSYYPDDAAVFFAAAQGHGHHHTDDDDQQDDGQISYWMWN

SEQ ID NO: 3249 - protein, 220 aa, Triticum aestivum
  misc_feature (181)..(181): Xaa can be any naturally occurring amino acid
  misc_feature (198)..(198): Xaa can be any naturally occurring amino acid
  unsure (1)..(220): unsure at all Xaa locations
MAPKNALPVAVAAAADGGMEPRFRGVRKRPWGRYAAEIRDPARKARVWLGTFDTAEAAARAYDAAALHYRGPKAKTNFPVGTVAAYTHIPLPPPKALAVSPSSSTVESSSRDTPAAAPAAPAAAAPAAPPALDLSLAMPAMVAAQPFLFLDPRVAVTVAVAAPAPAPAPCRSAAISGMNKXASREGEQSDTGSSSSVXVTPSPPVGVGFDPDPPPPVEMA

SEQ ID NO: 3250 - protein, 279 aa, Triticum aestivum
  misc_feature (146)..(146): Xaa can be any naturally occurring amino acid
  misc_feature (172)..(172): Xaa can be any naturally occurring amino acid
  unsure (1)..(279): unsure at all Xaa locations
HYRTSLYKKAGWYRSGIPGISSSQSLPSQTHGRRSRDGRRRCHPRAAGRGGAVSGGVVLRRHLGDPRRGGLLPRGSQLGPRGRRSLLLRQHGGRRRWPRSGTPAPASRFASVLLTTRHDSIDDLLQTGELALCSVGLMSRLIIILXSSAAKITHQAHALTGQTTKWHACCTXIEPVPDDEINPGSNQNSMLEEYPEDESDCESSEETGYEDMLENTKFLQPHTHVISFQKRQALVTYLENNKAGITVFGFTLDRSYLHTIFMLEWTLFLWLLGKTVGFS

SEQ ID NO: 3251 - protein, 284 aa, Triticum aestivum
  misc_feature (219)..(219): Xaa can be any naturally occurring amino acid
  misc_feature (266)..(266): Xaa can be any naturally occurring amino acid
  misc_feature (273)..(273): Xaa can be any naturally occurring amino acid
  misc_feature (278)..(278): Xaa can be any naturally occurring amino acid
  unsure (1)..(284): unsure at all Xaa locations
MAPPFAVAVAAVSSSSPLFSSSSSRPILRRHPLLRSISVRPRHRSAVASAAATESAGKLLLEVHGLTASVKENGQQILKGVDLTIREGEVHAIMGKNGSGKSTLTKVLVGHPHYEVTGGTILFKGENLIDMEPEERSLAGLFMSFQAPIEIPGVSNYDFLLMAINARREKDGLPALGPLEFYSVVSQKVEALKMEPKILDRNVNEGFSGGERKRNEILXLSVLGADLALLDEIDSGLDVDALEDVAHAVNGLLTPQNSVLMITHYXRFLDLIXPSYVXIMESGK

SEQ ID NO: 3252 - protein, 363 aa, Triticum aestivum
MAAVTAAAVSLRAATTSTSTPSSAPQHSHCSFPCAARTAAVSRRGVLTVRAQAVSTDAAAAPVKEKKVSKKQEEGVVTNKFRPKEPYVGKCLLNTKITADDAPGETWHMVFSTDGEVPYKEGQSIGVVADGQDKNGKPHKLRLYSIASSALGDFGDAKTVSLCVKRLVYTNDAGEVVKGVCSNFLCDLKPGADVNITGPVGKEMLMPKDPNATIIMLATGTGIAPFRSFLWKMFFEKYEDYKFNGLAWLFLGVPTSSSLLYPEEFGKMKAKAPDNFRVDYAISREETNAAGEKMYIQTRMAEYKDELWELLKKDNTYVYMCGLKGMEKGIDEIMIPLASKEGIDWIDYRKQLKKSEQWNVEVY

SEQ ID NO: 3253 - protein, 196 aa, Triticum aestivum
MYPKPEDGPATGFPMSGGTARTGGGPGAYYQAAPATAAFAMQAAPATAAFAMQAAQAPLAAWSTGLCDCFDDCGNCCITCLCPCITFGQVAEIIDRGSTSCGASGALYALIMLLTGCQCVYSCFYRAKMRAHYGLQESPCADCCIHWCCEPCALCQEYRELKKRGFDMNLGWHANMERQGRTPATMPPLMHPGMTR

SEQ ID NO: 3254 - protein, 431 aa, Triticum aestivum
  misc_feature (23)..(23): Xaa can be any naturally occurring amino acid
  unsure (1)..(431): unsure at all Xaa locations
VSSGDGAGGGAGDAVPGGRAGQXAVPARQPAGRVWGVRRTARATSGFKVLALGPETTGVIQRMQQLLDMDTTPFTDKIIAEYIWVGGSGIDLRSKSRTISKPVEDPSELPKWNYDGSSTGQAPGEDSEVILYPQAIFKDPFRGGNNILVICDTYTPQGEPIPTNKRHMAAQIFSDPKVTAQVPWFGIEQEYTLMQRDVNWPLGWPVGGYPGPQGPYYCAVGSDKSFGRDISDAHYKACLYAGIEISGTNGEVMPGQWEYQVGPSVGIDAGDHIWASRYILERITEQAGVVLTLDPKPIQGDWNGAGCHTNYSTLSMREDGGFDVIKKAILNLSLRHDLHIAAYGEGNERRLTGLHETASISDFSWGVANRGCSIRVGRETEAKGKGYLEDRRPASNMDPYTVTALLAETTILWEPTLEAEALAAKKLALKV

SEQ ID NO: 3255 - protein, 480 aa, Triticum aestivum
  misc_feature (118)..(118): Xaa can be any naturally occurring amino acid
  unsure (1)..(480): unsure at all Xaa locations
MAVGNGGAKKVVAPMEVSVEAGNTGDAAWMDDDGRPRRSGTFWTASAHIITAVIGSGVLSLAWAIAQLGWVAGPAVMLLFAAVIYYTSTLLAECYRTGDPATGKRNYTYMDAVRSNLXGGPKVIFCGVIQYANLVGVAIGYTIASSISMRAIRRADCFHANGHADPCKSSSNPYMILFGLVQIVFSQIPDFDQIWWLSIVAAVMSFTYSGIGLSLGITQTISNGGIKGSLTGISIGVGITATQKVWRSLQAFGDIAFAYSFSNILIEIQDTIRAPPPSEAKVMKQATRLSVATTTVFYMLCGCMGYAAFGDAAPDNLLTGFGFYEPFWLLDIANVAIVVHLVGAYQVFCQPIFAFVERWAASTWPDSVFISREFRVGPFALSVFRLTWRSAFVCLTTVFAMLLPFFGNVVGLLGAVSFWPLTVYFPVEMYIRQRGVPGRSMQGICLRMLSVGCLIVSIAAAAGSIANVIEALKVYKPFSG

SEQ ID NO: 3256 - protein, 499 aa, Triticum aestivum
  misc_feature (38)..(38): Xaa can be any naturally occurring amino acid
  unsure (1)..(499): unsure at all Xaa locations
AADGAGAAAGFTVVMKFGGSSLASAARMRDVADLVLSXFPEETPVVVLSAMGKTTNNLLLAGEKAVSCGAPKASEIYELAVIKELHLRTIDELGLDSSIVSGFLDELEQLLKGVAMMKELTLRTRDYLVSFGECMSTRIFSAYLNKLGKKARQYDAFDLGFITTDDFTNADILEATYPAVAKRLHGDWIDDPAIPIVTGFLGKGWKSCAVTTLGRGGSDLTATTIGKALGLREIQVWKDVDGVLTCDPNIYANAVPVPYLTFDEAAELAYFGAQVLHPQSMRPAREGGIPVRVKNSYNRHAPGTVITKTRDMRKSILTSIVLKSNITMLDIVSTRMLGQYGFLAKVFSIFEDLGISVDSVATSEVSISLTLDPSKLWSRELIQQELDHVVEELEKIAVVHLLQHRSIISLIGNVQRSSLILEKAFNVLRRNGVNVQMISQGASKVNISLVVNDSEAKQCVQALHSAFFENGFLSEVEEADLAQKRAPVLVSSNGAINGN

SEQ ID NO: 3257 - protein, 187 aa, Triticum aestivum
MVSSTAVGAEEDDDGSTRKKLRLTKEQSALLEDRFKEHSTLNPKQKVALAKQLNLRPRQVEVWFQNRRARTKLKQTEVDCEFLKRCCETLTEENRRLQRELQELRAIKFAPPPPPPNNASQHPGTPSSAAAPPAPFYMQLPAATLTICPSCERLGGTAAAATGKVDPDRPKAATHHFFNPFTHSAAC

SEQ ID NO: 3258 - protein, 206 aa, Triticum aestivum
  misc_feature (26)..(26): Xaa can be any naturally occurring amino acid
  misc_feature (57)..(57): Xaa can be any naturally occurring amino acid
  unsure (1)..(206): unsure at all Xaa locations
AWRRTTCATGRPCPLAARATSATTCXGSHFRRDSKIVIDQAVAYVDSLKLAGNGKEXWVFDIDETTLSNLPYYAKHGFGATPFNATSFNAYVREGSAPALPETKRLYNKLRSVGIKPVFLTGRTEDQRAITVTNLRRQGISGWMNLLLKQPGFKGSAVTYKSGERQKLQDAGYVIVRNIGDQWSDILGAPEGARTFKLPDPMYYIG

SEQ ID NO: 3259 - protein, 363 aa, Triticum aestivum
  misc_feature (148)..(148): Xaa can be any naturally occurring amino acid
  unsure (1)..(363): unsure at all Xaa locations
MSPLADLLSLDLSGCTGKIIAEYIWVGGTGMDVRSKARTLPGPVDDPSKLPKWNFDGSSTGQATGDDSEVILCPQAIFRDPFRKGNNILVICDCYAPNGEPIPSNKRYNAARIFGHPEVKAEEPWYGIEQEYTLLQKDTNWPIGWPLXGGYPGPQGPYYCAVGAEKSYGRDIVDAHYKACLYAGINIGGINAEVMPGQWEFQVGPSVGISAGDELWAARYILERITEIAGVVVSFDPKPIPGEWNGAGAHTNYSTKSMRSEGGYEVIKKAIKKLEARHMEHIAAYGEGNERRLTGRHETADINTFVWGVANRGASVRVGRDTEKEGKGYFEDRRPGSNMDPYVVTSLIAETTILCKAGLSNGK

SEQ ID NO: 3260 - protein, 239 aa, Triticum aestivum
  misc_feature (190)..(190): Xaa can be any naturally occurring amino acid
  misc_feature (206)..(206): Xaa can be any naturally occurring amino acid
  unsure (1)..(239): unsure at all Xaa locations
TTPNRQRSEEPNITAKAGQSSTPVHLRSLFQCLVPSPRSRLLLVHSAATRSRSQLDFGAAMSSDARDVCVVGVARTPMGSFLGGLSSLPATKLGSIAIEAALRRANVDPSLVQEVFFGNVLSANLGQAPARQAALGAGIPNTVVCTTVNKVCASGMKATMFAAQSIQLGINDIVVAGGMESMSNAPKYIXAEARKGSRFGHDSLVXDACLKDGLWDDRDFGFCLQGNFWEGFGNVGEPV

SEQ ID NO: 3261 - protein, 153 aa, Triticum aestivum
  misc_feature (2)..(2): Xaa can be any naturally occurring amino acid
  misc_feature (7)..(7): Xaa can be any naturally occurring amino acid
  misc_feature (10)..(10): Xaa can be any naturally occurring amino acid
  misc_feature (20)..(20): Xaa can be any naturally occurring amino acid
  misc_feature (33)..(33): Xaa can be any naturally occurring amino acid
  misc_feature (39)..(39): Xaa can be any naturally occurring amino acid
  misc_feature (48)..(48): Xaa can be any naturally occurring amino acid
  misc_feature (55)..(55): Xaa can be any naturally occurring amino acid
  unsure (1)..(153): unsure at all Xaa locations
VXAGNAXSIXSDGAAPLVLXSGKKAQELGLHVXARIKGXADAAQALEXFTITPAXAIPKALTNAGLESSRVDFYEINEAFSAVALANQKLLGIPSEKINAHEGAVSLGHPLGCSGARILFTLLGVLREKSGKIGVAGVCNGGGGESALVMELA

SEQ ID NO: 3262 - protein, 212 aa, Triticum aestivum
  misc_feature (149)..(149): Xaa can be any naturally occurring amino acid
  misc_feature (160)..(160): Xaa can be any naturally occurring amino acid
  unsure (1)..(212): unsure at all Xaa locations
AVIALRMLLENMDMFDLVISDVHMPDMDGFKLLELVGLEMDLPVIMLSVNGETKTVMKGITHGACDYLLKPVRIEELRNIWQHVVRRKFSTRDSVNLDTYEECNKPPSADSDYVYGQVTCGSPDQSGRPSKKRKEYHSEEEDEDEDSSXKDNDDPPAPKXPRVVWPVELHRNFVAAPNHLGIDKAVPKDTRARPRSESPYMILRASRASFKL

SEQ ID NO: 3263 - protein, 605 aa, Triticum aestivum
  misc_feature (71)..(71): Xaa can be any naturally occurring amino acid
  misc_feature (302)..(302): Xaa can be any naturally occurring amino acid
  misc_feature (328)..(328): Xaa can be any naturally occurring amino acid
  misc_feature (532)..(532): Xaa can be any naturally occurring amino acid
  misc_feature (539)..(539): Xaa can be any naturally occurring amino acid
  misc_feature (569)..(569): Xaa can be any naturally occurring amino acid
  unsure (1)..(605): unsure at all Xaa locations
MMCGILAVLGCADWSQAKRARVLSCSRRLKHRGPDWSGLFQCEGNFLAQQRLSVVSPLSGDQPLYNEDRTXVVVANGEIYNHKKIRKQFAAKHTFTTGSDCEVIIPLYEEYGENFVNMLDGVFSFVLYDTRNKTYMAARDAVGVNPLYFGRGSDGSVWIASEMKALHEDCPKFELFPPGNLYSSAAGGFRRWYNPQWFAEHVPATAYQPLVLREAFEKAVIKRLMTDVPFGVLLSGGLDSSLVASVTKRHLIETEAAKKFGTELHSFVVGLEGSPDLKAAREVADYLGTIHHEFHFTVQDGXIDAIEEVIYHNETYDVTTIRASTPMXLMARKIKALGVKMVLSGEGSDELLGGYLYFHFAPNKEEFHKETCRKVKALHQYDCLRANKATSAWGLEVRVPFLDKEFIDVAMSMDPEWKLYDADLGRIEKWVLRKAFDDEKEPYLPRHILYRQKEQFSDGVGYNWIDGLKAFTEQQVTDEMMKNAAEEYPYNTPINKEAYYYRMIFERLYPQESARETVSWGPSIACSTPAAXIEWGGRXWKASNDPSGRHIASHNDAAPAHAHANGNGXWPNGKANGNGTGERERQRQRDSGPRASRRPLALAGS

SEQ ID NO: 3264 - protein, 157 aa, Triticum aestivum
MGFVSFAGRVLFASVFLLSAYQEFTEFGTDGGPAAKNLEPKFNSFTKNISVHLGVVVPHVELKHVIAATIGLKGLGGLLFILSSSFGAYLLALYLAFITPVVYDFYNYDMEKAEFVQIFMKFTQNLALFGALLFFLGMKNSVPKRQAKKKAPKSKTT

SEQ ID NO: 3265 - protein, 166 aa, Triticum aestivum
MAGGADADGERRIGVAMDYSASSKRALEWAVRNLLRRGDTVVVLHVQRHGGEEAKHAVWAKSGSPLIPLSEYREPEVMKNYGVTCDAEVLDMLDTAARQLELKVVAKVYWGDAREKLCDAVEEQKIDTIVMGSRGLGTIQRILLGSVTNYVLSNASCPVTVVKGDR

SEQ ID NO: 3266 - protein, 449 aa, Triticum aestivum
  misc_feature (201)..(201): Xaa can be any naturally occurring amino acid
  misc_feature (258)..(258): Xaa can be any naturally occurring amino acid
  unsure (1)..(449): unsure at all Xaa locations
MGTQAAENFEPPAKDVRTDEQKKIDDWLPITSSRNAKWWYSAFHNVTAMVGAGVLSLPYAMSELGWGPGIAVLVISWVITLYTLWQMVEMHEMVPGKRFDRYHELGQHAFGDKLGLWIVVPQQLIVEVGVNIVYMVTGGRSLKKFHDVICDGKCKDIKLTFFIMIFASVHFVLSQLPNLNSISGVSLAAAVMSLSYSTIAXWGASVDKGKMVDVDYNLRATTTPGKVFGFFGALGEVAFAYAGHNVVLEIQATIPSTXPEKPSKKPMWKGVVVAYIVVALCYFPVALIGYWAFGNSVDDNILITLNKPTWLISTANMMVVIHVIGSYQIYAMPVFDMIETVLVKKLKFPPGLTLRLIARTLYVAFTMFVAITFPFFGGLLGFFGGFAFAPTTYFLPCIMWLAIYKPKRFSLSWFTNWVCIVLGVCLMILSPIGGLRQIILDSKTYKFYS

SEQ ID NO: 3267 - protein, 488 aa, Triticum aestivum
  misc_feature (466)..(466): Xaa can be any naturally occurring amino acid
  misc_feature (478)..(480): Xaa can be any naturally occurring amino acid
  misc_feature (486)..(486): Xaa can be any naturally occurring amino acid
  unsure (1)..(488): unsure at all Xaa locations
MAGGRRSGFAAAALLPLLALVFLSAGCGAAPEGAEVTGLPGYDGALPSKHYAGYVTVDEQHGRNLFYYAVESERDPAKDPVVLWLNGGPGCSSFDGFVYEHGPFNFESGRSVKSLPKLHLNPYSWSKVSTMIYLDSPAGVGLSYSNNVSDYETGDLKTAADSHTFLLKWFQLYPEFLSNPFYIAGESYAGVYVPTLSHEVVKGIQGGAKPTINFKGYMVGNGVCDTVFDGNALVPFAHGMGLISEEIYQQAFTTCDGNYWNASEGKCESALVKIDSLISELNIYDILEPCYHGRSIKEANPQNSKLPKSFKDLGTTNKPFPVRTRMLGRAWPLRAPVKAGRVPLWQEVASGVPCMSDEVATAWLDNDGVRSAIHAQSVSSIGPWLLCTDKIDFNHDAGSMISYHKNLTSQGYRAIIFSGDHDMCVPYTGSEAWTKSMGYGVVDSWRPWFTNEQISGAPFATIKGAXHRLNTTQEALAXXXRWLNGXKL

SEQ ID NO: 3268 - protein, 207 aa, Triticum aestivum
  misc_feature (115)..(115): Xaa can be any naturally occurring amino acid
  misc_feature (172)..(172): Xaa can be any naturally occurring amino acid
  unsure (1)..(207): unsure at all Xaa locations
MATSFQGTTTKCNACDKTVYLVDKLTADNRVYHKACFRCHHCKGTLKLANYNSFEGVLYCRPHFDQLFKRTGSLDKSFEGTPKVVKPERNVGNENATKVSSAFAGTREKCFGCSXKTVYPIERVTVNNTMYHKSCFKCCHGGCTISPSNYIAHEGKLFCKHHHTQLIKEKGXSASSRTTTTRHHRVPGQWMMKTRSISQSLRISRDE

SEQ ID NO: 3269 - protein, 302 aa, Triticum aestivum
SRERARHEKGGAKPTINFKGYMVGNGVCDTVFDGNALVPFAHGMGLISEEIYQQAATMCHGNYWNASEGKCESALGKIDSLISELNIYDILEPCYHGRSIKEANPQNSKLPKSFKDLGTTNKPFPVRTRMLGRAWPLRAPVKAGRVPLWQEVASGVPCMSDEVATAWLDNDGVRSAIHAQSVSSIGPWLLCTDKIDFNHDAGSMISYHKNLTSQGYRAIIFSGDHDMCVPYTGSEAWTKSMGYGVVDSWRPWFTNDQVSGYTEGYEHGLTFATIKGAGHTVPEYKPQEALAFYSRWLNGSKL

SEQ ID NO: 3270 - protein, 273 aa, Triticum aestivum
  misc_feature (35)..(35): Xaa can be any naturally occurring amino acid
  misc_feature (200)..(200): Xaa can be any naturally occurring amino acid
  misc_feature (223)..(223): Xaa can be any naturally occurring amino acid
  unsure (1)..(273): unsure at all Xaa locations
QKLPYRSGIPGSSSTPASARLVHSASASAAARSDXTPGRNRGAAMGSQNIGPRDVCIVGVARTPMGGFLGALSSLPATKLGSVAIEAALKRANVDPSLVQEVFFGNVLMRLTWGQGSSRRQGCLKAQGITRNNRLFCTPCQTKVCALPGMKATMFAAQSIQLGSNDIVVAGGMESMSNAPKYIAEARKGSRFGHDRLAGXGCFKVGFWDGYGDCAMEVWAELXCADNHALTREDQDAFAIQSNERGFAGSRRGRFAWKEPPGEIPVGKRTPPG

SEQ ID NO: 3271 - protein, 157 aa, Triticum aestivum
MGFVSFVGRVLFASVFLLSAYQEFSEFGTDGGPAAKSLKPKFNLFVKQVSAGIGMAVPHIDIKSVIAFTMFLKAFGGLLFIISSSFGALVLLVYLAFITPVVYDFYNYEMESQQFAKLFTMFSQNLALFGALLFFLGMKNSIPRRHSKRRAAKAKTT

SEQ ID NO: 3272 - protein, 182 aa, Triticum aestivum
EEPREEAAAQGHDLRQFKYACAGYSMFVDDRDAKSGENDAKALLPYCQGLELLVDSRMVERKSPAVEHASTRNPKPKEAAAAAAAATQPLEQGQRPQLARQEFMARFRRSAGLVASGVAKNLNKTGSYIKQNVEDIFSPDRRPPPGMQRTLSCGVVLSEFLLLYTCLIFAIYIETTGVWLCT

SEQ ID NO: 3273 - protein, 161 aa, Triticum aestivum
  misc_feature (8)..(8): Xaa can be any naturally occurring amino acid
  unsure (1)..(161): unsure at all Xaa locations
ELLLEHAXPPPAIAEYAAANLIKMGFPQRGAEDLISICSCHKKIKSGAEGYICPRCKVNVCELPTECRTCGLTLVSSPHLARSYHHLFPVTPFDEVTFKLGQKGGQNCFGCQQSLINTGGQSNIHVRCPKCNHHFCFDCDIYIHESLHNCPGCESQRSSSR

SEQ ID NO: 3274 - protein, 339 aa, Triticum aestivum
  misc_feature (138)..(138): Xaa can be any naturally occurring amino acid
  misc_feature (222)..(222): Xaa can be any naturally occurring amino acid
  unsure (1)..(339): unsure at all Xaa locations
ITTATCLGAIKKANCYHDHGRGAARCTSDDREQHLFMLLFGVAQLVLSFIPNFHSMAWLSVVAAVMSFTYSTIGLGLGLSKTIGDGVVRGSVAGVPMHTPMQKVWRVSQAIGDIAFAYPYSIVLLEIQDTLRSSPPEXETLRKGNVIAMLATTFFYLCVGCFGYAAFGDAAPGNLLTGFGFYEPYWLVDFANACIVLHILGGYQFFSQQIFTVWDRWLAGEXPDSAFVCRTYAVRLVPGLPRYGLNLQRVCFRTAYVASTSARARLVPYFNEVLGLLGALIFWPLIIYLPVEMYCVQRRVRAWTPTWVALQAFSVACFAVGTFAFVGCVQGVVQKRLGS

SEQ ID NO: 3275 - protein, 261 aa, Triticum aestivum
  misc_feature (29)..(29): Xaa can be any naturally occurring amino acid
  misc_feature (65)..(65): Xaa can be any naturally occurring amino acid
  misc_feature (93)..(93): Xaa can be any naturally occurring amino acid
  unsure (1)..(261): unsure at all Xaa locations
GGGLFPVWGPQRGGGAKKKQQQRSVTADXFWPGLQKKAADEEDFEADFREFERDSRNENPPGQEXPPPPAAAGFAFAAAAEFAPPAPCPPRCXQRDGPAAKQVKRGRKDQYRGIRQRPWGKWAAEIRDPSKGVRVWLGTYDTAEEAARAYDAEARKIRGKKAKVNFPEDAPTVQKSTLKPTAAKSAKLAPPPKACEDEPFNHVSRGDNDLFAMFAFNDKKVPAKPAESVDSLLLLNGAMQNGASSGDLWSLDELFMAAGGY

SEQ ID NO: 3276 - protein, 257 aa, Triticum aestivum
  misc_feature (205)..(205): Xaa can be any naturally occurring amino acid
  misc_feature (245)..(245): Xaa can be any naturally occurring amino acid
  unsure (1)..(257): unsure at all Xaa locations
TSLYKKAGWYRSGIPGISSTHASVNTPKVAAEETWYGIEQEYTLLQKDVNWPLGWPIGGYPGPQGPYYCAAGADKAFGRDIVDAHYKACLYAGINISGINGEVMPGQWEFQVGPSVGIAASDQLWVARYILERITEVAGVVLSLDPKPIPGDWNGAGAHTNYSTKSMREAGGYEVIKTAIEKLGKRHAQHIAAYGEGNERRLTGXPRDADINTFKWGVADRGASVRVGRDTEKDGKGYFEDRRAXSNMDPYVVTSMI

SEQ ID NO: 3277 - protein, 417 aa, Triticum aestivum
  misc_feature (240)..(240): Xaa can be any naturally occurring amino acid
  misc_feature (326)..(326): Xaa can be any naturally occurring amino acid
  misc_feature (359)..(359): Xaa can be any naturally occurring amino acid
  misc_feature (367)..(367): Xaa can be any naturally occurring amino acid
  unsure (1)..(417): unsure at all Xaa locations
HYRTSLYKKAGWYRSGIPGISSTHASISPVPTSLAAGNPSGKYRVVSTKSMPGTRWIKLLTDNDCRLEICTEKKTILSVDDILALIGDHCHGVIGQLTEDWGEVLFSALKRAGGTAFSNMAVGYNNVDVDAANRNGIAIGNTPGVLTETTAELAASLSVAAARRIVEADQFMRAGLYDGWLPHLFVGNLLKGQTVGVIGAARIGSAYARMMIEGGQMNLIYFDLYQATPARRISSPAYGXQFLKSQWLSSPLTWKEGFPAWEEVPQGGADVISLHPVLDKTTYHPDNPERLAMMKKEAVLVNASRGPVIDEVALVEHLRANPMSVXGLDVFEDEPYMKAGLPEMKNAGFVPHIASASKXNREGIATXAALTWLVEKGVPVVGNRKPGTLPRRKGGPPRLARLVKQEVGWLSSLCEAK

SEQ ID NO: 3278 - protein, 315 aa, Triticum aestivum
MCGGAILAELIPPSAGRASKQVAAGRASPKKAGKSKGQKYGSVADVDDFEAAFENFDDDLDLQAEEDGDDHVVFASRPAFSPAYDGGRRAVPAASKKKSVRPLHGIRQRPWGKWAAEIRDPHKGTRAWLGTFDTADDAARAYDVAARRLRGSKAKVNFPDAARAGARPRRASRRTAQKPPCPPARMTAYSATAAARAQPEQDSMMVKPELMESLDMDALVDLTTAVTALPTVMASSFADKMPRVDEDSSEGSGGGAMLGFADELGFDPFMMFPYESMDSLFAGDAVIQDARGVDGGMDGVSLWSFDEFPMDSAIF

SEQ ID NO: 3279 - protein, 202 aa, Triticum aestivum
  misc_feature (70)..(70): Xaa can be any naturally occurring amino acid
  misc_feature (87)..(87): Xaa can be any naturally occurring amino acid
  misc_feature (96)..(96): Xaa can be any naturally occurring amino acid
  misc_feature (169)..(169): Xaa can be any naturally occurring amino acid
  unsure (1)..(202): unsure at all Xaa locations
MTTQQNHHRAAAEEFPLHSPASSTGSADSAPWHHRAPATPSPVLPFHTNDADEMLLLHMLSQHHEVQHDXAAPTIAPVKREASQEEXEDKAAVDVXRAFHGVRKRPWGKYAAEIRDSTRNGVRVWLDTFDSPEVAALGYDQAAFTIRGGAAVLNFPADHVRRSLEGAAXDVCGRAHGVSPVLALKRRHSMRSRKATTAGRKV

SEQ ID NO: 3280 - protein, 313 aa, Triticum aestivum
MAHSSLSTVLLLCLAMAASAQLSPTFYQTSCPNALSTIKAAVTAAVNKENRMGASLLRLHFHDCFVQGCDASVLLSGMEQNAFPNVMSLRGFEVIDNIKAKLETMCKQTVSCADILTVAARDSVVALGGPSWTVPLGRRDSPNANEAGGNSDLPPPFFDLVNLTQSFGAKGFTVTDMVALSGAHTIGQAQCQNFRDRLYNETNINSGFATSLKANCPQPTGSGDRNLANLDVSTPYSFDNAYYSNLKSQKGLLHSDQVLFTGTGGGTDNIVNNFASNPAAFSSAFASAMVKMGNLSPLTGSQGQVRLSCSKVN

SEQ ID NO: 3281 - protein, 258 aa, Triticum aestivum
  misc_feature (242)..(242): Xaa can be any naturally occurring amino acid
  unsure (1)..(258): unsure at all Xaa locations
MSATCAADLAPLLGAAAMNATDYLCNRFADTTSAVDSTYLLFSAYLVFAMQLGFAMLCAGSVRAKNTMNIMLTNVLDAAAGALFYYLFGFAFAFGTPSNGFIGKHFFGLKDMPQTGFDYSFFLFQWAFAIAAAGITSGSIAERTQFVAYLIYSAFLTGFVYPVVSHWIWSVDGWASAARTSGPLLFKSGVIDFAGSGVVHMVGGIAGFWGALIEGPRIGRFDHAGRSVALKGHSASLVVLGXFLLWFGWYGSTGVLRH

SEQ ID NO: 3282 - protein, 237 aa, Triticum aestivum
MKPAAQPVTGVPVGGAPAPAAWSSGLFDCFDDCGLCCLTCWCPCITFGKVAEIVDRGSTSCGTSGALYALLGSLTGCHWIYSCTYRSKMRAQYALPDEPCCDCCVHFCCETCGLIQQYKELKARGYDPDIGWHLNVERGNGGAGWLAASTRPACRRWAARSSNSAARVGGGSLEQVFQVLGKLLHSIVRTCSFVKFCTWRSVVYGGVMSGCQEWEEEQGETSMPQCILFIVVYICIL

SEQ ID NO: 3283 - protein, 282 aa, Triticum aestivum
  misc_feature (226)..(226): Xaa can be any naturally occurring amino acid
  unsure (1)..(282): unsure at all Xaa locations
MAMVRMPILVAVALVAAVASCSAREPNICTPMAEVAATAVDDAVAPLIHALRPLLGSGGQLGSHGGVPCDSWRLGVEAYNVRDWTTVPANCEGYVGHYMLGSHYRRDSKVVIDQAIAYLDSLRLARQWQRRCGVFDIDETMLSNLPYYATHGFGARPYNATSYNAYVLEGSAPALPETKRLYYKLLAVGIKPVFLTGRTEHRRAITVANLCRQGISGWMNLLLKQXHGFKGSAVTYKSGERQKLQDAGYVVVGNIGDQWSDILGAPEGARTFKLPDPMYYIG

SEQ ID NO: 3284 - protein, 271 aa, Triticum aestivum
  misc_feature (143)..(143): Xaa can be any naturally occurring amino acid
  unsure (1)..(271): unsure at all Xaa locations
MEMARTTTLLLAAAALLVASCGAWEANIRMPTSLDEAVVAPLIHALRPLLGSGKHAGVACDSWVLGVEAHNVRGWKTVPASCEGYVGHYMLGSHFRRDSKVVVDQALAYVDSLKLSGNGKEVWVFDIDETTLSNLPYYAKHGXGATPFNATSFDAYVLEGSAPSLPETKRLYNKLLSVGVKPVFLTGRTEDKRAITVTNLRRQGISGWMNLLLKQPGFKGSAVTYKSGERQKLQDAGYIIIGNIGDQWSDILGAPEGARTFKLPDPMYYIG

SEQ ID NO: 3285 - protein, 388 aa, Triticum aestivum
  misc_feature (198)..(198): Xaa can be any naturally occurring amino acid
  unsure (1)..(388): unsure at all Xaa locations
MCGGAILAGFIPPSAAAAAAKAAAAKKQQQQQQQQQRSVTADSLWPGLRKKPAEEEDFEADFRDFERDSNDDDDAVEEVPPPPATAGFAFAAAAEVALPAPTRLDAIQHDGPAAKSVKRVRKNQYRGIRQRPWGKWAAEIRDPSKGVRVWLGTYDTAEEAARAYDAEARKIRGKKAKVNFPEEAPTVQKSTLKPTAAXKSAKLAPPPKACEDEPFNHVSRGDNDLFAMFAFNDKKVPAKPAESVDSLLPVKLKPLVPTETFGMNMLSDQSSNSFGSTDFGWDDEAMTPDYTSVFVPNAAMPAYVEPAYLQGGAPKRLRNNFGVAVLPQGNGAQDIPAFDHEMKYSLPYVESSSDGSMDSLLLNGAMQNGASSGDLWSLDELFMAAGGY

SEQ ID NO: 3286 - protein, 106 aa, Triticum aestivum
  misc_feature (96)..(96): Xaa can be any naturally occurring amino acid
  unsure (1)..(106): unsure at all Xaa locations
MSTPGGEDDKKPASAGGDGGGAHINLKVKGQDGNEVFFRIKRSTQLKKLMNAYCDRQSVDMKAIAFLFDGRRLRAEQTPDELEMEDGDEIDAMLHXQTGGRLPPRA

SEQ ID NO: 3287 - protein, 178 aa, Triticum aestivum
MKVKPGTEPATGVPVGGAPGSPTAWSSTGVPVGGAPGAPTAWSSGLFDCFDDCGLCCLTCCCPCITFGKVAEIVDRGATSCGTSGALYVLLASLTGCHWIYSCTYRSKMRAQYALPDAPCCDCCVHYCCEPCALVQEYKELKARGYDPEIGWHLNVERRNGGAGAGGVNPPGMQEMGR

SEQ ID NO: 3288 - protein, 280 aa, Triticum aestivum
MAMARVPILIAVALVAAAASCSAWEPTIRMPTAEAAAAAVDDAVAPLIHALRPLLGSSGELGSRGGVPCDSWRLGVEAYNVRDWKTVPANCEGYVGHYMLGSHFRRDSKVVIDQAIAYVDSLKLAGNGKEVWVFDIDETTLSNLPYYATHGFGARPYNATSFDAYVLEGTAPALPESKRLYYKLLKVGIKPVFITGRTEDKRAITVANLRSQGISGWMNLTLKQPGFHGSAISYKSAERKKLQDAGYVIVGNIGDQWSDLLGAPEGARTFKLPDPLYYIG

SEQ ID NO: 3289 - protein, 143 aa, Triticum aestivum
  misc_feature (120)..(120): Xaa can be any naturally occurring amino acid
  unsure (1)..(143): unsure at all Xaa locations
APPEEAGGGDQFPVGMKVLVVDDDQTCLAVLKRMLVQCRYDATTCSQATRALAMLRENRGAFDVIISDVHMPDMNGFRLLELVGLEMDLPVIMMSADSRTDLVMKGIKHGACDYLIKPVXMEELKNIWQHVVRKKFGGNKEHE

SEQ ID NO: 3290 - protein, 185 aa, Triticum aestivum
MYPKPEDGPATGFPMSGGTARTGGGPGAYYQAAPATAAFAMQAAQAPLAAWSTGLCDCFDDCGNCCITCLCPCITFGQVAEIIDRGSTSCGASGALYALIMLLTGCQCVYSCFYRAKMRAHYGLQESPCADCCIHWCCEPCALCQEYRELKKRGFDMNLGWHANMERQGRTPATMPPLMHPGMTR

SEQ ID NO: 3291 - protein, 447 aa, Triticum aestivum
  misc_feature (222)..(222): Xaa can be any naturally occurring amino acid
  misc_feature (319)..(319): Xaa can be any naturally occurring amino acid
  misc_feature (340)..(340): Xaa can be any naturally occurring amino acid
  misc_feature (346)..(346): Xaa can be any naturally occurring amino acid
  misc_feature (362)..(362): Xaa can be any naturally occurring amino acid
  unsure (1)..(447): unsure at all Xaa locations
QREELRARFPGVPGDLVNYFLFVAEEVRATLAQLGYEKLDDIIGRTDLLKPKHISLVKTQHIDLAYLLMNAGLPKWSSSQIRSQDVHSNGPVLDETILADPEVSDAIENEKEVSKTYPIYNVDRAVCGRVAGAIAKKYGDTGFAGQLNITFTGSAGQSFGCFLTPGMNVRLVGEANDYVGKGMAGGELVVVPVDDTGFVPEDAAIVGNTCLYGATGGQVFVXRGKTGERFAVRNSLGQAVVEGTGDHCCEYMTGGCVVVLGKVGRNVAAGMTGGLAYMLDEDDTLVPKVNKEIVKMQRVNAPAGQMQLKGLIEAYVEKXTGSTKGAKILSEWEAYLPLFXQLVPPXSEEDPPEACADLERYXPGKKRNSILLMILKANRQDAKRRKLAILEMISQTRPSEHYSPRNLLEPVKGTRKHSSGLRTPAPSTTPVIVPVAAPLASEDPLPE

SEQ ID NO: 3292 - protein, 169 aa, Triticum aestivum
  misc_feature (18)..(18): Xaa can be any naturally occurring amino acid
  misc_feature (25)..(25): Xaa can be any naturally occurring amino acid
  misc_feature (33)..(33): Xaa can be any naturally occurring amino acid
  misc_feature (80)..(80): Xaa can be any naturally occurring amino acid
  misc_feature (109)..(109): Xaa can be any naturally occurring amino acid
  misc_feature (122)..(122): Xaa can be any naturally occurring amino acid
  misc_feature (160)..(160): Xaa can be any naturally occurring amino acid
  unsure (1)..(169): unsure at all Xaa locations
CVSLVLVRRYAICLAQAXRRRFDKXIYIPLPDXKARQHMFKVHLGDTPHSLSESDFEVLGRRTEGFSGSDVAVCVKDVLXFEPVRKTQDAMYFFKIDGDMWMPCGPKQXGAVQTTMQDLASXKGLASQILPPPISKNDFEKVLARQRPTVGKKDLEVHEXFTKEFGEEG

SEQ ID NO: 3293 - protein, 276 aa, Triticum aestivum
  misc_feature (62)..(62): Xaa can be any naturally occurring amino acid
  misc_feature (122)..(122): Xaa can be any naturally occurring amino acid
  misc_feature (143)..(143): Xaa can be any naturally occurring amino acid
  misc_feature (164)..(164): Xaa can be any naturally occurring amino acid
  misc_feature (211)..(211): Xaa can be any naturally occurring amino acid
  unsure (1)..(276): unsure at all Xaa locations
MAMARTTTLLLLVATALLVASCGAWEANIRMPTSMDEAVVAPLIHALRPLLGSGKHAGVACXSWVLGVEAHNVRDWKTVPASCEGYVGHYMLGSHFRRDSKVVVDQALAYVDSLKAQPGNGXKEVWVFDIDETTLSNLPYYAXHGFGATPFNATSFNAYVREGXSAPALPETKRLYNKLRSVGIKPVFLTGRTEDQRAITVTNLRRQGISXGWMNLLLKQPGFKGSAVTYKSGERQKLQDAGYVIVGNIGDQWSDILGAPEGARTFKLPDPMYYIG

SEQ ID NO: 3294 - protein, 263 aa, Triticum aestivum
  misc_feature (25)..(25): Xaa can be any naturally occurring amino acid
  unsure (1)..(263): unsure at all Xaa locations
ALELKIYGQWLSGGKRRLCKVANPXSSHLSVVGNFVGAILAARVGWEEAGKFLWAIGVSHYIVVFVTLYQRLPTNEALPMELHPVYSMFIATPSAASLAWAAIYGSFDAVARTFFFMALFLYMSLVVRINFFRGFRFSIAWWSYTFPMTTASLATVKYAEAVPCFTSRALALSLSLMSTTMVSLLLVSTLLHAFYWRSLFPNDLAIAITKDRQSGAGRPHGKGRKAGKRVNDIKRWAKQVPLSVVSSITKSNSADKEEEEKTD

SEQ ID NO: 3295 - protein, 280 aa, Triticum aestivum
  misc_feature (121)..(121): Xaa can be any naturally occurring amino acid
  unsure (1)..(280): unsure at all Xaa locations
MAMARVPILIAVALVAAAASCSAWEPTIRMPTAEAAAAAVDDAVAPLIHALRPLLGSSGELGSRGGVPCDSWRLGVEAYNVRDWKTVPANCEGYVGHYMLGSHFRRDSQVVIDQAIAYVDXLKLASNGKEVWVFDIDETTLSNLPYYATHGFGARPYNATSFDAYVLEGTAPALPESKRLYYKLLKVGIKPVFITGRTEDKRAITVANLRSQGISGWMNLTLKQPGFHGSAISYKSAQRKKLQDAGYVIVGNIGDQWSDLLGAPEGARTFKLPDPLYYIG

SEQ ID NO: 3296 - protein, 361 aa, Triticum aestivum
  misc_feature (253)..(253): Xaa can be any naturally occurring amino acid
  misc_feature (302)..(303): Xaa can be any naturally occurring amino acid
  misc_feature (310)..(310): Xaa can be any naturally occurring amino acid
  misc_feature (313)..(313): Xaa can be any naturally occurring amino acid
  unsure (1)..(361): unsure at all Xaa locations
AYLGDTIEQVCTKKQAGTGPEFPGYRRPTRPLLSGGLDSSLVASVVSRYLAETKVARQWGNKLHTFCIGLKGSPDLKAAKEVADYLGTVHHELHFTVQQGIDALEEVIYHIETYDVTTIRASTPMFLMSRKIKSLGVKMVLSGEGSDEIFGGYLYFHKAPNKKELHEETCRKIKALHLYDCLRANKATSAWGLEARVPFLDKNFINVAMDLDPECKMIRRDLGRIEKWVLRNAFDDEKKPYLPKHILYRQKEXFSEWGWVQLEWMDGLKDHANAHVPESMMTNAYFVYLKTHHNKRTYYYRXXLRILPKXLLXNGPGGHVACTRKTVEWDPPGQASPSAVALVYTRLRERPDRYPLEASSQ

SEQ ID NO: 3297 - protein, 158 aa, Triticum aestivum
KENAGTVTAGNASSISDGAAALVLVSGQKAQELGLEVLARIKGFADAAQAPELFTTTPALAIPKALSNAGLESSSVDFYEINEAFAAVALANQKILGIPSEKINVHGGAVSLGHPLGCSGARILVTLIGVLREKGGKIGVAGVCNGGGGASALVLELA

SEQ ID NO: 3298 - protein, 178 aa, Triticum aestivum
  misc_feature (77)..(77): Xaa can be any naturally occurring amino acid
  misc_feature (148)..(148): Xaa can be any naturally occurring amino acid
  misc_feature (170)..(170): Xaa can be any naturally occurring amino acid
  unsure (1)..(178): unsure at all Xaa locations
LDDGAYMVVKIIIEMVRMRLAGLEGGVGGLIRDLEEPAESVLLRMDIVGEPKSAKQRGIEAVEAFKTYIEEGKLSGXWVLDDCGDCSVDEGCLVDNNDHPIDVDAYMYRAKFYDESQRPLGWVHIRQSVHNPNIALNLQSCVPGGCKXSMAVDLFERFLLTSGVNEFVDXSEVQKFVK

SEQ ID NO: 3299 - protein, 419 aa, Triticum aestivum
IFSTPGVSAILFDALAKANINVRAIAQGCREYNTTVVLKHEDCVRALRAAHSRFFLSKTTLAIGVIGPGLIGATLLNQLRDQVAVLKENMNIDVRVIGITGASTMLLSDTGVDLTRWKEEMQKEAKPADLANFVRHLSEDHVFPNKVLVDCTADTNVASHYYDWLKKGIHVITPNKKANSGPLDRYLKLRTLQRASYTHYFYEATVGAGLPIISTLRGLLETGDKILRIEGIFSGTLSYIFNNFEGTRSFSDVVAEAKEAGYTEPDPRDDLSGTDVARKVIILARESGLRLELSDIPVGSLVPEALKSCSSPNEFMQKLPSFDQDWARQRHEAEAAGEVLPDGGAVDVLNGKGRVELQRYKRDHPFAQLSGSDNIIAFTTSRYKEQPLIVRGPGAGAEVTAGGVFCDILRLASYLGAPS

SEQ ID NO: 3300 - protein, 277 aa, Triticum aestivum
  misc_feature (241)..(241): Xaa can be any naturally occurring amino acid
  misc_feature (265)..(265): Xaa can be any naturally occurring amino acid
  unsure (1)..(277): unsure at all Xaa locations
NKFVQKSRLVPVRNSRDIVDPRVRIDAIEDVIYHTETYDVTTIRASTPMFLMSRKIKSLGVKMVISGEGSDEIFGGYLYFHKAPNKEELHRETCQKIKALHQYDCLRANKATSAWGLEARVPFLDKEFINEAMSIDPEWKMIRPDLGRIEKWMLRKAFDDEEQPFLPKHILYRQKEQFSDGVGYSWIDGLKAHAESNVTDKMMSNAKFIYPHNTPTTKEAYCYKMIFERFFPPKSAILTVXPGGPSVACTTAKGVKWGCPGSGEXLNPSGRAALGKS

SEQ ID NO: 3301 - protein, 174 aa, Triticum aestivum
MSREALAIGHVVGDILDPFVKAASLKVIYNGKELTNGSELKPSQVATEPRIDIAGRDMRNLYTLVMVDPDSPSPSNPTKREYLHWLVTDIPESTNASYGNEVVSYESPKPTAGIHRFAFVLFRQSVRQTIYAPGWRPNFNTRDFSALYALGPPVAAVFFNCQRENGCGGRRYIR

SEQ ID NO: 3302 - protein, 216 aa, Triticum aestivum
  misc_feature (175)..(176): Xaa can be any naturally occurring amino acid
  misc_feature (183)..(183): Xaa can be any naturally occurring amino acid
  misc_feature (206)..(206): Xaa can be any naturally occurring amino acid
  misc_feature (208)..(208): Xaa can be any naturally occurring amino acid
  misc_feature (210)..(210): Xaa can be any naturally occurring amino acid
  unsure (1)..(216): unsure at all Xaa locations
IQDTVKAPPAENKTMRKANLMGVSTTTAFYMLCGCLGYSAFGNDAPGNMLTGFGFYEPYWLIDFANVCIVVHLVGAYQVYCQPIYAAVESWAAGRWPNSEFVVRQYYPFSGKFSLNMFRLVWRTAFVIVSTVLAISLPFFNDILGLLGALGFWPLTVYFPVEMYIVQKKIPRWSXXWVCLQLXSLACLIITIAAAAGSIAGIMSDXKXYXPFSTTD

SEQ ID NO: 3303 - protein, 367 aa, Triticum aestivum
MSSLPPVYIVSAARTPTGMFLGSLSSLSAIQLGSHAIKAAVERAGLKPEDVEEVFVGNVLSAGLGQNPARQCAIGAGLPESTVSTTINKVCASSIKSLILGAQTIITGNADIVVAAGTESMSNTPHYLPNLRTGAKFGDQPLVDGVLKDGLTDAYKKEHMGLQGEECADDHGFNREQQDEYCIRSYKKAIAATEAGWFTSEIAPIEVPQGRGKPSITVDKDDEPKNFNEAKTRTVRSAFKTNGTVTPANASPLSDGAAAIVLASEAAVKAHNLKPIGKFLVGVMLSKPIQVTTAPACYAQGSQARKVELSAVDAFDHELSACRLQHEILKSEDKSTSTVVRSLVTAWARQDQFFRVKERQSMLNLPR

SEQ ID NO: 3304 - protein, 339 aa, Triticum aestivum
RKIRLGAPGSHTLIGSATAYGVQTQPNPGRQQGTARMLLNPASEALVLDSIRQHLMEDTAAAAAPVAEARRQRPAYCRSASFGSLVADQWSESLPFRADDSDDMVVYGALRDAFSCGWLPDGSFAAVKPEPLLPSPDSAYACDGPSCFGFLEPETPPATSPGEGEEEGAAFMGEAAAAVARGKHYRGVRQRPWGKFAAEIRDPAKNGARVWLGTYDTAEGAAVAYDRAAYRMRGSRALLDFPLRIGSEIAAAHAAAAHAAAAAAGDKRPSPEPATSDSSSSSSSSGSPKRRKRGEAAAASMAMALVPPPSQLSRPAHAWYPAAPVEQVAMAPRAQQLVS

SEQ ID NO: 3305 - protein, 467 aa, Triticum aestivum
  misc_feature (272)..(272): Xaa can be any naturally occurring amino acid
  misc_feature (303)..(303): Xaa can be any naturally occurring amino acid
  misc_feature (340)..(340): Xaa can be any naturally occurring amino acid
  misc_feature (395)..(395): Xaa can be any naturally occurring amino acid
  misc_feature (403)..(403): Xaa can be any naturally occurring amino acid
  misc_feature (418)..(418): Xaa can be any naturally occurring amino acid
  misc_feature (429)..(429): Xaa can be any naturally occurring amino acid
  misc_feature (434)..(434): Xaa can be any naturally occurring amino acid
  misc_feature (437)..(437): Xaa can be any naturally occurring amino acid
  misc_feature (442)..(443): Xaa can be any naturally occurring amino acid
  misc_feature (461)..(463): Xaa can be any naturally occurring amino acid
  misc_feature (465)..(465): Xaa can be any naturally occurring amino acid
  unsure (1)..(467): unsure at all Xaa locations
MCGILAVLGVGDVSLAKRSRIIELSRRLRHRGPDWSGIHSFEDCYLAHQRLAIVDPTSGDQPLYNEDKTVVVTVNGEIYNHEELKAKLKSHQFQTGSDCEVIAHLYEEYGEEFVDMLDGMFSFVLLDTRDKSFIAARDAIGICPLYMGWGLDGSVWFSSEMKALSDDCERFISFPPGHLYSSKAGGLRRWYNPPWFSESIPSAPYDPLLIRESFEKAVIKRLMTDVPFGVLLSGGLDSSLVASVVSRYLAETKVARQWGNKLHTFCIGLKGXPDLKAAKEVADYLCTVHHEIHFTVQEGIDAXLEEVLYHIQTYDVTTIRASPPIVSNVSGKINSWGVKXMVFSGEGSDEIFGGYLYFHKAPNKKEFHEETCRKIKALHLYDCLRANKATSAWGXEARVPFLXDKNFIKCTMDLGSGXKMIRRDLGRIXKWVCXKAXDDDEXXYLPKHIFTGKKTFNHGVXXXWXDG

SEQ ID NO: 3306 - protein, 213 aa, Triticum aestivum
MAPRPLPLLSPLSPSPRAAQSSSRPRTRHQTRAGSSRRRHSSGGGGGESGQGQRAAMGFVSFVGRVLFASVFLLSAYQEFSEFGTDGGPAAKSLKPKFNLFVKQVSAGIGMAVPHIDIKSVIAFTMFLKAFGGLLFIISSSFGALVLLVYLAFITPVVYDFYNYDMESQQFAKLFTMFSQNLALFGALLFFLGMKNSIPRRHSKRRAAKAKTT

SEQ ID NO: 3307 - protein, 166 aa, Triticum aestivum
AYLGDTLEQVCTKKQAGTGPEFPGYRRPTRPERITEIAGVVVTFDPKPIPGDWNGAGAHTNYSTESMRKDGGFKVIVDAVEKLKLKHKEHIAAYGEGNERRLTGKHETADINTFSWGVANRGASVRVGRETEQNGKGYFKDRRPASNMDPYVVTSMIAETTILWKP

SEQ ID NO: 3308 - protein, 280 aa, Triticum aestivum
MAMATKMLLLLAAVALLVASSGAWETNIHMPTSVATVTAMDEAVAPLIHALRPLLGSGGQLGSHAGVACDSWRLGVEAHNVRDWKTVPASCEGYVGHYMLGGHYRRDSKVVIDQAISYVESLKLAGNGKEVWVFDVDETTLSNLPYYATHGFGATPYNWTSFQEYARQASAPALPETKRLYNKLLSVGIKPVILTGRREAQRTATVTNLRQQGFSGSMAVLLKPAEFKGSSVTFKSGERQKLLDAGYVIVGNIGDQWSDILGTPEGARTFKLPDPMYYIG

SEQ ID NO: 3309 - protein, 322 aa, Triticum aestivum
MASSSSCRTWHCLLALFLLSSAAYGQLSPSFYSKSCPSLELVVRATMIKALLAERRMGASLLRLHFHDCFVQGCDGSILLDDVGSFVGEKTAFPNVNSVRGYEVIDEIKRNVELACPGVVSCADITALAARDGVFLLGGPSWAVPLGHRDSTTASLTQANSDLPGPSLNLDQLIAAFAKKQLSPRDLTALSGTHTIGFSQCLNFRDHIYNSTNIDPAFAALRKGACPAQAPNGDTNLAPLDVQTPLLFDNAYYRNLVAKRGLLNSDQVLFNGGSQDALVRQYAANPALFASDLVTAMIKMASLTPPSGTPTQIRRNCRVVNS

SEQ ID NO: 3310 - protein, 275 aa, Triticum aestivum
  misc_feature (227)..(227): Xaa can be any naturally occurring amino acid
  misc_feature (232)..(232): Xaa can be any naturally occurring amino acid
  misc_feature (234)..(234): Xaa can be any naturally occurring amino acid
  unsure (1)..(275): unsure at all Xaa locations
HSRTSLYKKAGWYRSGIPGISSTHASGYNWRKYGQKQVKGSENPRSYYKCTYNNCSMKKKVERSLADGRITQIVYKGAHDHPKPLSTRRNSSGCAAVVAEDHANGSEHSGPTPENSSVTFGDDEADNGLQLSDGAEPVTKRRKEHADNEGSSGGTGGCGKPVREPRLVVQTLSDIDILDDGFRWRKYGQKVVKGNPNPRSYYKCTTVGCPVRKHVERASHDNRAVIXTYEGXHXHNVPVGRGRALPATSSCDSSGVIWPAAVPAPYTLEMLTNPG

SEQ ID NO: 3311 - protein, 167 aa, Triticum aestivum
MARVYVGSLDPAVTARELEDEFRVFGVLRSVWVARKPPGFAFVDFDDRRDAQDAIKDLDGKNGWRVELSRNASSGRGGRDRSGGSEMKCYECGESGHFARECRLRIGSGGLGSGRRRSRSRSRSRSRSPRYRRSPSYSRRSYSRSPRRRSVSPARGRSVSRSPVRGT

SEQ ID NO: 3312 - protein, 355 aa, Triticum aestivum
  misc_feature (106)..(106): Xaa can be any naturally occurring amino acid
  misc_feature (165)..(165): Xaa can be any naturally occurring amino acid
  misc_feature (178)..(178): Xaa can be any naturally occurring amino acid
  unsure (1)..(355): unsure at all Xaa locations
MCGGAILSDIIPPPRRATGGNVWRADKKRRARPDAAAGRPRRAPEEEFQEEEGDAEFEADFEGFVEAEEESDGEAKPFPVRRSGFSGDGLKATAAGDDDCASGSAXRKRKNQFRGIRRRPWGKWAAEIRDPRKGVRVWLGTYNSAEEAARAYDVEARRIRGKKAXSISQKKLLWLLSXRCATAVKVPEFNTEQKPVLNTMGNADVYSCSAVDYTLNQQFVQPQNMSFVPTVNAVEAPFMNFSSDQGSNSFSCSDFSWENDIKTPDITSVLASIPTSTEVNESAFLQNNGINSTVPPVMGDANVDLADLEPYMKFLMDDGSDESIDSILSCDVPQDVVGNMGLWTFDDMPLSAGFY

SEQ ID NO: 3313 - protein, 314 aa, Triticum aestivum
  misc_feature (182)..(182): Xaa can be any naturally occurring amino acid
  unsure (1)..(314): unsure at all Xaa locations
MAHSSLSTVLLLCLAMAASAQLSPTFYQTSCPNALSTIKAAVTAAVNKENRMGASLLRLHFHDCFVQGCDASVLLSGMEQNAFPNVMSLRGFEVIDNIKAKLETMCKQTVSCADILTVAARDSVVALGGPSWTVPLGRRDSTNANEAAANNELPPPFFDLVNLTQSFGDKGFTVTDMVRPLXGAHTIGQAQCQNFRDRLYNETNINSGFATSLKANCPQPTGSGDRNLANLDVSTPYSFDNAYYSNLKSQKGLLHSDQVLFTGTGGGTDNIVNNFASNPAAFSSAFASAMVKMGNLSPLTGSQGQVRISCSKVN

SEQ ID NO: 3314 - protein, 384 aa, Triticum aestivum
  misc_feature (220)..(220): Xaa can be any naturally occurring amino acid
  misc_feature (246)..(246): Xaa can be any naturally occurring amino acid
  misc_feature (291)..(291): Xaa can be any naturally occurring amino acid
  misc_feature (330)..(330): Xaa can be any naturally occurring amino acid
  misc_feature (375)..(375): Xaa can be any naturally occurring amino acid
  unsure (1)..(384): unsure at all Xaa locations
MADRANHPSVMQKFGGQFHLASSFSEGVRARNICPSVPSYERRFTTSSYMTQNLGISVPIMSSSPMFANAPPEKKGVKNFAIDFLMGGVSAAVSKTAAAPIERVKLLIQNQDEMIKAGRLSEPYKGIGDCFGRTIKDEGFGSLWRGNTANVIRYFPTQALNFAFKDYFKRMFNFKKDKDGYWKWFGGNLASGGAAGASSLFFVYSLDYARTRLANDAKAXRGGGERQFNGLVDVYRKTLKSDGIAXGLYRGFNISCVGIIVYRGLYFGLYDSLKPVLLTGTLQDNFFASFXALGWLITNGAGLASYPIDTVRRRMMMTSGEAVKYKSSLXDAFQQILGEGGCQSLFKGAGANILRAIAGCWVLLSGYDSVQILLXGKNYGQSGA

SEQ ID NO: 3315 - protein, 157 aa, Triticum aestivum
  misc_feature (93)..(93): Xaa can be any naturally occurring amino acid
  unsure (1)..(157): unsure at all Xaa locations
MGFVSFVGRVLFASVFLLSAYQEFSEFGTDGGPAAKSLKPKFNLFVKQVSAGIGMAVPHIDIKSVIAFTMFLKAFGGLLFIISSSFGALVLLXYLAFITPVVYDFYNYDMESQQFAKLFTMFSQNLALFGALLFFLGMKNSIPRRHSKRRAAKAKTT

SEQ ID NO: 3316 - protein, 210 aa, Triticum aestivum
  misc_feature (125)..(125): Xaa can be any naturally occurring amino acid
  misc_feature (138)..(138): Xaa can be any naturally occurring amino acid
  misc_feature (160)..(160): Xaa can be any naturally occurring amino acid
  misc_feature (180)..(180): Xaa can be any naturally occurring amino acid
  misc_feature (199)..(199): Xaa can be any naturally occurring amino acid
  unsure (1)..(210): unsure at all Xaa locations
MCGGAILKDLKVPAPTRKVTAAVLWPEKNKPKRADGVARRLAGLGRRGGLGLDDGDVDFEADFEEFEADSGDSDVELGRAGVAGKDGHDVVVEIKPFAAVKRSLSQDDLSTMTTAGFDGPAQRSXAKRKRKNEFRGIXRQRPWGKWAAEIRDPSKGVRVXWLGTFNSAERSLQELIDVEXARRIPWQRRQVNFQEEPTXPQKRRACPAAP

SEQ ID NO: 3317 - protein, 361 aa, Triticum aestivum
MPAQLTAALPSYSPAAKAAGGSSASCTASHFLSYPTRRLRNGVRAQVSTTETAEPAPAAPAKPVKISKKQDEGVVTNKYRPKEPYVGRCLLNTRLTGDNAPGETWHMVFSTEGEVPYREGQSIGVIADGEDKNGKPHKLRLYSIASSALGDFGDSKTVSLCVKRLVYTNDAGEVVKGVCSNFLCDLKPGSEVKITGPVGKEMLMPKDPNATIIMLATGTGIAPFRSFLWKMFFEEHEDYKFNGLAWLFLGVPTSDTLLYKEEFEKMVEIGGENFRLDFAVSREQTNAAGEKMYIQTRMAEYKEELWELLKKDNTYVYMCGLKGMEKGIDDIMVDLAAKDGIDWIDYKKQLKKAEQWNVEVY

SEQ ID NO: 3318 - protein, 357 aa, Triticum aestivum
  misc_feature (167)..(167): Xaa can be any naturally occurring amino acid
  misc_feature (180)..(180): Xaa can be any naturally occurring amino acid
  unsure (1)..(357): unsure at all Xaa locations
AYLGDTIEQVCTKKQAGTGPEFPGYRRPTRPARPDAAAGRPCRAPEEEFQEEEGDAEFEADFEGFVEAEEESDGEAKPFPVRRSGFSGDGLKATAAGDDDCASGSAKRKRKNQFRGVRRRPWGKWAAEIRDPRKGVRVWLGTYNSAEEAARAYGVEARRIRGKKAKXSISQKKLLWLLSXRCATAVKVPEFNTEQKPVLNTMGNADVYSCSAVDYTLNQQFVQPQNMSFVPTVNAVEAPFMNFSSDQGSNSFSCSDLSWENDIKTPDITSVLASIPTSTEVNESAFLQNNGINSTVPPVMGDANVDLADLEPYMKFLMDDGSDESIDSILSCDVPQDVVGNMGLWTFDDMPLSAGFY

SEQ ID NO: 3319 - protein, 157 aa, Triticum aestivum
MGFVSFVGRVLFASVFLLSAYQEFSEFGTDGGPAAKSLKPKFNLFVKQVSAGIGMAVPHIDIKSVIAFTMFLKAFGGLLFIISSSFGALVLLVYLAFITPVVYDFYNYEMESQQFAKLFTMFSQNLALFGALLFFLGMKNSIPRRHSKRRPAKAKTT

SEQ ID NO: 3320 - protein, 186 aa, Triticum aestivum
  misc_feature (55)..(55): Xaa can be any naturally occurring amino acid
  unsure (1)..(186): unsure at all Xaa locations
MYPKPEDGPATGFPMSAGTARTGGGPGAYYQAAPPTAAFAMQAGQAPLAAWSTGXLCDCFDDCGNCCITCLCPCITFGQVAEIIDRGSTSCGASGALYALIMLLTGCQCVYSCFYRAKMRAHYGLQESPCADCCIHWCCEPCALCQEYRELKKRGFDMNLGWHANMERQGRTPATMPPLMHPGMTR

SEQ ID NO: 3321 - protein, 555 aa, Triticum aestivum
  misc_feature (324)..(324): Xaa can be any naturally occurring amino acid
  misc_feature (445)..(445): Xaa can be any naturally occurring amino acid
  unsure (1)..(555): unsure at all Xaa locations
FSGNPVVKEKTGRWKACPFILGNECCERLAYYGISTNLVTYLTKKLHDGNSSAARNVTTWQGTCYLTPLIGAILADAYWGRYWTIATFSTIYFIGMSVLTLSASVPMLMPPSCEGAICPEASPLQYTVFFLGLYLIALGTGGIKPCVSSFGADQFDDTDPAERIQKGSFFNWFYFSINIGALISSSFLVWVQDNLGWGLGFGIPTVFMGLAIISFFAGTSLYRFQKPGGSPITRVCQVVAATLRKWNAHVPEDSSLLYELPDGVSAIEGSRQLEHTDELRCLDKAATITDLDVKEDSFNNPWRVCTVTQVEELKILVRMFPVWXATTIVFSAVYAQMSTMFVEQGMVLDPTIGSFKIPPASLSTFDVVSVIIWVPIYDSILVPIARRFTGKERGFSELQRMGIGLVISILAMSAAAVLEIKRLAIAREAHLVDQNVPVPLSILWXQIPQYFLVGASEVFTFIGALEFFYDQSPDAMRSLCSALQLITTALGNYLSAFILTMVAYFTTRGGRPGWIPDNLNEGRLDYFFWLLAGLSFLNFLVYVLCANRFKSKKAA

SEQ ID NO: 3322 - protein, 61 aa, Triticum aestivum
GYVSLFTESGNTKDDLKVPTEDVLLGQIKNGFADGKDLILFVMSAMGEKQICAVKEIGGGK

SEQ ID NO: 3323 - protein, 133 aa, Triticum aestivum
  misc_feature (74)..(74): Xaa can be any naturally occurring amino acid
  unsure (1)..(133): unsure at all Xaa locations
KNPLAKKGFFLEKGGEFPFFLGLQKGKDFLFFFFSPPTKKPGVIPGGIPGRANRKKCKEFQKLDFSVMGLVAEXIFICKHLCEETGGSYTVALDESHFKELLLEHAPTRPAIAEYAAANLIKMGFPQRGAEEF

SEQ ID NO: 3324 - protein, 149 aa, Triticum aestivum
  misc_feature (106)..(106): Xaa can be any naturally occurring amino acid
  misc_feature (130)..(130): Xaa can be any naturally occurring amino acid
  unsure (1)..(149): unsure at all Xaa locations
MSDSEEHHFESKADAGASKTYPQQAGTVRKNGFIVIKNRPCKLWRFLPPRLGKHGHAKCHFVAIDIFNGKKLEDIVPSSHNCDIPHVNRTEYQLIDISEDGFVTLXTSNGNTKDDLRPQLMRSCGQIKEXFETGRSVVTSICMGEDNSP

SEQ ID NO: 3325 - protein, 190 aa, Triticum aestivum
  misc_feature (43)..(43): Xaa can be any naturally occurring amino acid
  misc_feature (57)..(57): Xaa can be any naturally occurring amino acid
  misc_feature (138)..(138): Xaa can be any naturally occurring amino acid
  unsure (1)..(190): unsure at all Xaa locations
EFQVGPTVGISAGDQVWVARYLLERITEIAGVVVTFDPKPIPXDWNGAGAHTNYSTXSMRKDGGFKVIVDAVEKLKLKHKEHIAAYGEGNERRLTGKHETADINTFSWVRRAPRLLVLDHLNLSTSRYSDSGSESSEXLQGVANRGASVRVGRETEQNGKGYFEDRRPASNMDPYVVTSMIAETNILWKP

SEQ ID NO: 3326 - protein, 249 aa, Triticum aestivum
MAANVGESAAVGGSSSDAAGGSFECNICFELPQEPIVTLCGHLFCWPCLYRWLHMHANTPECPVCKAIVEEDKLVPLYGRGKDRVDPRSKNTPGVDIPQRPAGQRPATAQQADPNNNFGNAHANPWFMGMGGAGAGAGVPLANGRWGNYAFSAAFGGLFPMLSFQMHGFPDPAAYAQPAGFHYGFGHGHGFHGGQHAHGVPRQGPLGQQQQQADVYPQALLIMVGGLVIRSLLAALIGYRYHQNCGGVW

SEQ ID NO: 3327 - protein, 180 aa, Triticum aestivum
MVGSGMHAQRGDPLVVGRVIGDVVDPFVRRVALRVGYASRDVANGCELRPSAIADPPRVEVGGPDMRTFYTLVMVDPDAPSPSDPSLREYLHWLVTDIPATTGVSFGTEVVCYEGPRPVLGIHRLVFLLFQQLGRQTVYAPGWRQNFSTRDFAELYNLGLPVAAVYFNCQRETGTGGRRM

SEQ ID NO: 3328 - protein, 169 aa, Triticum aestivum
VVKDCLLQRYFGKRVRGGSAIPESDIMQACRSFLDQRQSMNIWRFIQTINQRHDLTESLKHLQCRTLIFVGENSQFHTEAVHMTAKLDKRYSALVEVQACGSVVTEEQPHAMLIPMEYFLMGYGLFRPSHVSSSPRSPLNPFCISPELLSPESMGVKLKPIKTRANLRV

SEQ ID NO: 3329 - protein, 153 aa, Triticum aestivum
SDGAAAIVLVSGEKAKNLGLQVIARIRGYADAAQAPELFTTTPALAIPKAISNSGLRDSQIDYYEINEAFSVVAVANQRLLGISPGKLNISGGAVSLGHPIGCSGARIIVTLLGILRQKQGKFGVAGVCNGGGGASAIVVESMQSSSRLRSSL

SEQ ID NO: 3330 - protein, 162 aa, Triticum aestivum
  misc_feature (90)..(90): Xaa can be any naturally occurring amino acid
  unsure (1)..(162): unsure at all Xaa locations
MSDTDEHHFESKADFGASKTYPQQAGAIRMGGHIVIKARPCKAVEVYTSKTGKHGHAKCHFVAIDIFNGKKLEDIVPSSHNCDVPHVDRXQDYQLIDITDDGYVSLLTESANTKDDLKLPTDDALLGQSKIGFADGKDLILSGMAAMGEEQICAEKEIADGT

SEQ ID NO: 3331 - protein, 93 aa, Triticum aestivum
  misc_feature (92)..(92): Xaa can be any naturally occurring amino acid
  unsure (1)..(93): unsure at all Xaa locations
MGTKAMEAFVVNETPVFMNKPPPHVFKLMSLPSMIIKLTLGLLWCIIHLAISLLSLCSHLIFNLECSLISSGLLWKYRNLQLGRLKYLAIVXD

SEQ ID NO: 3332 - protein, 306 aa, Triticum aestivum
  misc_feature (106)..(106): Xaa can be any naturally occurring amino acid
  misc_feature (116)..(116): Xaa can be any naturally occurring amino acid
  misc_feature (131)..(131): Xaa can be any naturally occurring amino acid
  misc_feature (142)..(142): Xaa can be any naturally occurring amino acid
  misc_feature (167)..(167): Xaa can be any naturally occurring amino acid
  misc_feature (227)..(227): Xaa can be any naturally occurring amino acid
  unsure (1)..(306): unsure at all Xaa locations
AYLGDSIEQVCTKKQAGTGPEFPGYRRPTRPPRHRSAVASAAATESAGKLLLEVHGLTASVKENGQQILKGVDLTIREGEVHAIMGKNGSRQEHPSPKVLVGHPPXTEVTGGPILXFKGENLIDLEPRGEXLLAGLFMSFQXAPIEIPGVSNYDFLLMAINARREKXGLPALGPPEFYSVVSQKVEALKMEPKILDRNVNEGFSGGERKRNEILQLSVLGADLALLXDGIDSGLDVDALEDVAHAVNGLLTPQNSVLMITHYQRLLDLIKPSYVHIMESGKIVKTGDSSLASHINEGGYKSIASFV

SEQ ID NO: 3333 - protein, 443 aa, Triticum aestivum
  misc_feature (23)..(23): Xaa can be any naturally occurring amino acid
  misc_feature (270)..(270): Xaa can be any naturally occurring amino acid
  misc_feature (288)..(288): Xaa can be any naturally occurring amino acid
  unsure (1)..(443): unsure at all Xaa locations
ASSGDGAGGGAGDAVPGGRAGQXAVPARQPAGRVWGVRRTARAASGFKVLALGPETTGVIQRMQQLLDMDTTPFTDKIIAEYIWVGGSGIDLRSKSRTISKPVEDPSELPKWNYDGSSTGQAPGEDSEVILYPQAIFKDPFRGGNNILVICDTYTPQGEPIPTNKRHMAAQIFSDPKVTSQVPWFGIEQEYTLMQRDVNWPLGWPVGGYPGPQGPYYCAVGSDKSFGRDISDAHYKACLYAGIEISGTNGEVMPGQWEYQVGPSVGIDAXDHIWASIDPLVRPRVRAXRRALARITEQAGVVLTLDSKPIQGDWNGAGCHTNYSTLSMREDGGFDVIKKAILNLSLRHDLHIAAYGEGNERRLTGLHETASISDFSWGVANRGCSIRVGRETEAKGKGYLEDRRPASNMDPYTVTALLAETTILWEPTLEAEALAAKKLALKV

SEQ ID NO: 3334 - protein, 233 aa, Triticum aestivum
  misc_feature (210)..(210): Xaa can be any naturally occurring amino acid
  misc_feature (221)..(221): Xaa can be any naturally occurring amino acid
  misc_feature (224)..(225): Xaa can be any naturally occurring amino acid
  unsure (1)..(233): unsure at all Xaa locations
MAMEGPSVEVPPYFLCPISLEIMRDPVTLATGITYDRCSIERWLSDGHATCPITQQKLAEADREATPNHTLRRLTQAWCALHAVERFPTPRPPLDACRVAEIVEEGRGAGRQKELAALREIKDIVAESDRNRRCVEATPGAVEFLVSVVRNHATTSKSAEDLSELSLDSPTSTSSPEEEALSVICSLKPSKKSLVRILEENLDFLDTTGXMLRRPSYRSRXYGXXLLKAMVSV

SEQ ID NO: 3335 - protein, 200 aa, Triticum aestivum
  misc_feature (82)..(84): Xaa can be any naturally occurring amino acid
  misc_feature (135)..(135): Xaa can be any naturally occurring amino acid
  misc_feature (150)..(150): Xaa can be any naturally occurring amino acid
  misc_feature (168)..(168): Xaa can be any naturally occurring amino acid
  misc_feature (194)..(194): Xaa can be any naturally occurring amino acid
  unsure (1)..(200): unsure at all Xaa locations
WKTVPASCESYVGHYMLGSHFRRDSKIVIDQALAYVDSLKLAGNGKEVWVFDIDETTLSNLPYYAKHGFGATPFNATSFNAXXXRGSAPALPETKRLYNKLRSVGIKPVFLTGRTEDQRAITVTNLRRQGISGWXLNLLLKQPGFKGSAXTYKSGERQKLQDAGYVIXVGNIGDQWSDTSGAPEGRPQLSSCQXPMFYIR

SEQ ID NO: 3336 - protein, 208 aa, Triticum aestivum
VKYSPHARAIRDVEDEELRTFFAGMSPWQFILVVAASSVGEELFYRAAVQGALADIFLRGTELMKDARGIVSLSGMVPPFVPFAQTFAAAITAALTGSLYYIATAPKDPTRPVTPVMRSHAGRQNMKKLFSAWYERRQMRKIYSPLLEGILAFYLGFEWIQTGNILAPMITHGIYSAVVLGHGLWKIQDHRRRLRQRVQEIRRGSDRL

SEQ ID NO: 3337 - protein, 305 aa, Triticum aestivum
  misc_feature (68)..(68): Xaa can be any naturally occurring amino acid
  misc_feature (181)..(181): Xaa can be any naturally occurring amino acid
  unsure (1)..(305): unsure at all Xaa locations
MMMMSEGVSVPPWGNHLPVSGVDAGGGGGGDETPFLFAALRQYLPCNDVLGGAGAGAEDEDEAAAVAXAAVDAYACDEFRMYDFKVRRCARGRSHDWTECPFAHPGEKARRRDPRKYHYSGTACPDFRKGGCKRGDACEYAHGVFECWLHPARYRTQPCKDGTACRRRVGFFAHTRDQLRXRPSQHSSPRSPPLSPARGIPTRGPPVRCRGVRELPQPEEYCPSSPHRNPGLPRRQKGPPCGVRRPWSPGRGPASFRRGLLGGFWPRALGPAVKERSLPSLGRVGAPPKGRGRSRPRVGWPGIPH

SEQ ID NO: 3338 - protein, 157 aa, Triticum aestivum
MKPGTEPATGVPVGGAPGAPTAWSSGLFDCFDDCGLCCLTCWCPCITFGKVAEIVDRGATSCGTSGALYVLLASLTGCHWIYSCTYRSKMRAQYALPDAPCCDCCVHYCCEPCALVQEYKELKARGYDPEIGWHLNQERRNGGAGGVNPPGMQEMGR

SEQ ID NO: 3339 - protein, 447 aa, Triticum aestivum
  misc_feature (104)..(104): Xaa can be any naturally occurring amino acid
  misc_feature (249)..(249): Xaa can be any naturally occurring amino acid
  misc_feature (262)..(262): Xaa can be any naturally occurring amino acid
  unsure (1)..(447): unsure at all Xaa locations
MGTQASPDNYTPPKDERTAREKAIDDWLPITSSRKAKWWYSAFHNVTAMVGAGVLSLPYAMSELGWGPGIAVMTLSWIITVYTLWQMVEMHEIVPGKRFDRYHXLGQHAFGDKLGLWIVVPQQLVVEISLNIVYMVTGGNSLKKFHDVICDGKCKDIKLTYFIMIFASVHFVLSQLPNFNSISGISLAAAVMSLSYSTIAWGASLDKGRAENVDYSLRASTTAGQVFGFLGGLGDVAFSYSGPHVVLEXQATHPSTPGHPSXKPMWKGVVVAYIIIAACYMPVAFIGYWAFGNSVDDNILITLNKPKWLIAMANMMVVVHLIGSYQIYAMPVFDMMETFLVRKLEFAPGIMLRLITRTIYVAFTMFVGMTFPFFGGLIGFFGGLAFAPTTYFLPCIMWLIICKPRRFSLSWFTNWICIVLGVILMIIAPIGGLRQIIISAKTYKFYS

SEQ ID NO: 3340 - protein, 501 aa, Triticum aestivum
  misc_feature (179)..(179): Xaa can be any naturally occurring amino acid
  misc_feature (192)..(192): Xaa can be any naturally occurring amino acid
  misc_feature (210)..(210): Xaa can be any naturally occurring amino acid
  misc_feature (461)..(461): Xaa can be any naturally occurring amino acid
  unsure (1)..(501): unsure at all Xaa locations
MAGGRRSGFAAAALLPLLALVFLSAGCGAAPEGAEVTGLPGYDGALPSKHYAGYVTVDEQHGRNLFYYAVESERDPAKDPVVLWLNGGPGCSSFDGFVYEHGPFNFESGRSVKSLPKLHLNPYSWSKVSTMIYLDSPAGVGLSYSNNVSDYETGDLKTAADSHTFLLKWFQLYPEFLSXPFYIAGESYAGVXYAPPLSRDVVKGSPGGAXAPLLNFRGHLGGDGFSTTFFKWKASGPIQHGMGLISEEINPQVFTTFVGNYWNASDGTCESALVKIDSLISELNIYDILEPCYHGRSIKEANPQNSKLPKSFKDLGTTNKPFPVRTRMLGRAWPLRAPVKAGRVPLWQEVASGVPCMSDEVATAWLDNDGVRSAIHAQSVSSIGPWLLCTDKIDFNHDAGSMISYHKNLTSQGYRAIIFSGDHDMCVPYTGSEAWTKSMGYGVVDSWRPWFTNDQVSGYTXEGYEHGLTFATIKGAGHTVPEYKPQEALAFYSRWLNGSKL

SEQ ID NO: 3341 - protein, 322 aa, Triticum aestivum
MALSSSCRTWHCLLALFLLSSAAYGQLSPSFYAKSCPTLELIVRATMIKALLAERRMGASLLRLHFHDCFVQGCDGSILLDDVGSFVGEKTAFPNVNSVRGYEVIDEIKRNVELVCPGVVSCADITALAARDGVFLLGGPSWAVPLGHRDSTTASLTQANSDLPGPSLNLDQLIAAFAKKQLSPRDLTALSGTHTIGFSQCLNFRDHIYNGTNIDPAFAALRKGACPALAPNGDTNLAPLDVQTPLFFDNAYYRNLVAKRGLLNSDQVLFNGGSQDALVRQYAANPTLFASDLVTAMIKMASLTPPSGTPTQIRRNCRVVNS

SEQ ID NO: 3342 - protein, 220 aa, Triticum aestivum
  misc_feature (67)..(67): Xaa can be any naturally occurring amino acid
  misc_feature (75)..(75): Xaa can be any naturally occurring amino acid
  misc_feature (156)..(156): Xaa can be any naturally occurring amino acid
  unsure (1)..(220): unsure at all Xaa locations
PAPPRRTRHGPWITPDGKISSPPRTGQGRPSRTRRRGAGPHRPGQATTRTTTGTGGAGSRQKVPLAXDQSPVLEXAFKEPTTLNPHQKAALRRQLGLRPRQVEVWFQNRRARTKLKQTEVGCESLKRCCETLTEENRRLQREVQELRALKLLAPPXRTFNMRAPPPTTLTMCPSCERVAPSGKPVVDESRAAMVTRAVPTGPWGPVPVLPVFLGRPAQRS

SEQ ID NO: 3343 - protein, 166 aa, Triticum aestivum
MAGGADADGERRIGVAMDYSASSKRALEWAVRNLLRRGDTVVVLHVQRHGGADAKHAVWAKSGSPLIPLSEYREPEVMKNYGVTCDAEVLDMLDTAARQLELKVVAKVYWGDAREKLCDAVEEQKIDTIVMGSRGLGTIQRILLGSVTNYVLSNASCPVTVVKGDR

SEQ ID NO: 3344 - protein, 347 aa, Triticum aestivum
MGDSSGSVSIDVERIYFGGKEHPVRTRYGSVSVSVYGDEDKPALITYPDVALNYMSCFQGLFFCPEAASLLLHNFCIYHITPQGHELGAAPIPSDVPELSVDNLADQVADVLDFFGLGSVMCMGVTAGAYVLTLFAAKYRERVLGLMLVSPLCKAPSWSEWLYNKVLLNLLYYCGTSGLVNECFLQRYFSTEVRGSGPEPESEIVQACRSLLDPTRPVNVCRYLKAINERHDLTEALKKLRCRTLIFVGENSQFHADAVHMTTKLDRRYCALVEVQACGSLVTEEQPHAMLIPMEYFLMGYGMYRPSQLESSPRSTLNPFCISPELLSPESMGVKLKPIKTRTSLIV

SEQ ID NO: 3345 - protein, 155 aa, Triticum aestivum
MEMKPAAQPVTGVPVGAAPAAWSSGLFDCFDDCGLCCVTYWCPCITFGKVAEIVDRGSTSCGTSGALYALLCSLTGCQWIYSCTYRSKMRAQYALPDAPCCDCCVHFCCEPCALVQQYKELKARGYDPEIGWHLNMERRAGAGAVNPPGVQEMGR

SEQ ID NO: 3346 - protein, 218 aa, Triticum aestivum
PYLSVERNNKQTCVKLFAELSNSAKNTAPAPIASFVTKLLISFPPDQKIIEHPGILDKPLKHEGFVWTIDSSFTGRFVIEIEFLDLKVADSSGGEPASIWASRQIKQSSDNTALSSLARMLQEGILCDITINADDGSIRAHRAILAARSPVFRSMFSHDLREKELSTVDISDMSLDACRGFLNYIYGNLRSEEFLAHRLALLGAADKYDIATFQGGVR

SEQ ID NO: 3347 - protein, 277 aa, Triticum aestivum
  misc_feature (151)..(151): Xaa can be any naturally occurring amino acid
  misc_feature (199)..(199): Xaa can be any naturally occurring amino acid
  misc_feature (201)..(201): Xaa can be any naturally occurring amino acid
  misc_feature (206)..(206): Xaa can be any naturally occurring amino acid
  misc_feature (217)..(217): Xaa can be any naturally occurring amino acid
  misc_feature (228)..(228): Xaa can be any naturally occurring amino acid
  misc_feature (239)..(239): Xaa can be any naturally occurring amino acid
  misc_feature (250)..(250): Xaa can be any naturally occurring amino acid
  unsure (1)..(277): unsure at all Xaa locations
HYRTSLYKKAGWYRSGIPGISSTHASGTISKPVEDPSELPKWNYDGSSTGQAPGEDSEVILYPQAIFKDPFRGGNNILVICDTYTPQGEPIPTNKRHMAAQIFSDPKVTAQVPWFGIEQEYTLMQRDVNWPLGWPVGGYPGPQGPYYCAVXSDKSFGRDISDAHYKACLYAGIEISGTNGEVMPGQWEYQVGPSVGIDXGXHIWAXRYILERITEQXGVVLTLDPKPXQVDGDGAGCHXNYSTLSMREDXSFDVIKKAILNLSLRHDLHIGAYGERK

SEQ ID NO: 3348 - protein, 352 aa, Triticum aestivum
  misc_feature (219)..(219): Xaa can be any naturally occurring amino acid
  misc_feature (226)..(226): Xaa can be any naturally occurring amino acid
  misc_feature (256)..(256): Xaa can be any naturally occurring amino acid
  misc_feature (263)..(263): Xaa can be any naturally occurring amino acid
  misc_feature (272)..(272): Xaa can be any naturally occurring amino acid
  misc_feature (346)..(346): Xaa can be any naturally occurring amino acid
  misc_feature (350)..(350): Xaa can be any naturally occurring amino acid
  unsure (1)..(352): unsure at all Xaa locations
NKFVQKSRLVPVRNSRDIVDPRVRPSELPKWNYDGSSTGQAPGEDSEVILYPQAIFKDPFRGGNNILVICDTYTPQGEPIPTNKRHMAAQIFSDPKVTAQVPWFGIEQEYTLMQRDVNWPLGWPVGGYPGPQGPYYCAVGSDKSFGRDISDAHYKACLYAGIEISGTNGEVMPGQWEYQVGPSVGIDAGDHIWASRYILERITEQAGVVLTLDPKPIQXGDWEWSXGCHTNYSTLSMREDGGFDVIKKAILDLSLXRHDLHIXAAYGEGNEXRRLTGLPETASISDFSWGVANRGCSIRVGRETEAKGKGYLEDRRPASNMDPYTVTALLAETTILWEPTLEAEAXAAKXWR

SEQ ID NO: 3349 - protein, 292 aa, Triticum aestivum
  misc_feature (221)..(221): Xaa can be any naturally occurring amino acid
  misc_feature (251)..(251): Xaa can be any naturally occurring amino acid
  unsure (1)..(292): unsure at all Xaa locations
MELGLSLGEAMADAGRELVLGLGVGVGVGPGAAREGEGRRDHDVAAAARGGLALGCGSSPEPAMRLALLPMVPSLGFPWPSESRHLEASTRGFDVNQAPSSGGSAWGACAAAEEEQEDTAAAARAAVSSSPNDSGGSFPMDFSARGASDAAPGAGGSRGSDEDDGRSARKKLRLSKEQAAFLEESFKEHSTLNPRQKVALAKQLNLRPRQVEVWFQNRRAXTKLKQTEVDCEYLKRCCETLTEENRRLQKXLAELRALKTVHPFYMHLPATTLSMCPSCERVASNSAPASAA

SEQ ID NO: 3350 - protein, 404 aa, Triticum aestivum
  misc_feature (333)..(333): Xaa can be any naturally occurring amino acid
  misc_feature (349)..(349): Xaa can be any naturally occurring amino acid
  misc_feature (387)..(387): Xaa can be any naturally occurring amino acid
  unsure (1)..(404): unsure at all Xaa locations
MIGGGGGGALRRVGKYEVGRTIGEGTFAKVKFAQNTETGESVAMKVLDRSSILKHKMVDQIKREISIMKLVRHPNVVRLHEVLASRKKIFIILEFITGGELFDKIIRHGRLSEADARKYFQQLIDGVDFCHSKGVYHRDLKPENLLLDSQGNLKISDFGLSAWPAQGAALLRTTCGTPNYVAPEVLSHKGYDGALADTWSCGVILYVLLAGYLPFDEVDLTTLYGKIETAEYSFPAVFPSGAKSLIRRILDPSPDTRIRIEEIRKDEWFKKDYEPVREVENEEVNLDDVNAAFDDPEEDNEHTFDDEAGPLTLNAFDLIILSQGLNLSALFDXRQDYGQLHNRFLSRKXPANVILVSMEVVGQSMGVKTHNRHYKMRVGGSNANKNXASHIMPQIFEVAHPPLW

SEQ ID NO: 3351 - protein, 918 aa, Triticum aestivum
MNPDNFTHKTNEALVAAHEAASEAGHAQITPLHLAAALAADKSGILRQAVAGASGGNASAGDSFERVLSGALKKLPSQSPPPDSVPASTALIKAIRRAQSAQKKRGDSHLAVDQLLMGLLEDAQIADCLKEAGVSASRVRAELEKLRGGDNSRKVESASGDTNFQALKTYGRDLVEVAGKLDPVIGRDEEIRRVVRILSRRTKNNPVLIGEPGVGKTAVVEGLAQRVVRGDVPSNLLDVRLVALDMGALVAGAKYRGEFEERLKAVLKEVEEAEGKVILFIDEIHLVLGAGRTEGSMDAANLFKPMLARGQLRCIGATTLEEYRKYVEKDAAFERRFQQVYVAEPSVADTISILRGLKEKYEGHHGVRIQDRAIVVAAQLSARYIMGRHLPDKAIDLVDEACANVRVQLDSQPEEIDNLERKRIQLEVELHALEKEKDKASKARLVEVRKELDDLRDKLQPLTMKYRKEKERIDEIRKLKQRREELQFTLQEAERRMDLARVADLKYGALQEIDAAIAKLEGETGENLMLTETVGPEQIAEVVSRWTGIPVTRLGQNDKERLVGMADRLHTRVVGQTEAVNAVAEAVLRSRAGLGRPQQPTGSFLFLGPTGVGKTELAKALAEQLFDDENLLVRIDMSEYMEQHSVARLIGAPPGYVGHEEGGQLTEQVRRRPYSVILFDEVEKAHVAVFNTLLQVLDDGRLTDGQGRTVDFRNTVIIMTSNLGAEHLLAGMVGKNSMKVARDLVMQEVRRHFRPELLNRLDEIVVFDPLSHEQLRKVARLQMKDVAVRLAERGVALAVTDAALDVILSLAYDPVYGARPIRRWIEKRVVTQLSKMLIQEEIDENCTVYIDAANKDELAYRVDRSGGLVNAETGQRSDILIQVPNGALGGGKGGEAAKAVKKMRVMEDGDEDGMDEDV

SEQ ID NO: 3352 - protein, 278 aa, Triticum aestivum
MSDSSSTASSSPSPSSTSPRLTTGDVNFLARRAVTTQQNHHQAAAEAFPLHSPGSSTGSADSAPWHHRAPATPPPVLPFDTSDADEMLLLDMVSQHHEVQHAAASPTTAPAVKQEADEEDKVVLGVARAFRGVRKRPWGKFAAEIRDSTRNGVRVWLGTFDSPEAAALAYDQAALAIRGGAAVLNFPADQVRRSLEGAADDLCGCTNGVSPVLALKQRHCIRSRKATTMSRKAKAARGQPEGMVMELEDLGAEYLEQLLGTSQEMASMDSWCWSHHSI

SEQ ID NO: 3353 - protein, 494 aa, Triticum aestivum
MSATCAADLGPLLGAAAANATDYLCNRFADTTSAVDSTYLLFSAYLVFAMQLGFAMLCAGSVRAKNTMNIMLTNVLDAAAGALFYYLFGFAFAFGTPSNGFIGKHFFGLKDMPQTGFDYSFFLFQWAFAIAAAGITSGSIAERTQFVAYLIYSAFLTGFVYPVVSHWIWSVDGWASAARTSGPLLFKSGVIDFAGSGVVHMVGGIAGFWGALIEGPRIGRFDHAGRSVALKGHSASLVVLGTFLLWFGWYGFNPGSFVTILKSYGPPGSINGQWSGVGRTAVTTTLAGSVAALTTLFGKRLQTGHWNVVDVCNGLLGGFAAITAGCSVVDPWAAVICGFVSAWVLIGLNALAGRLKYDDPLEAAQLHGGCGAWGIIFTALFAKKQYVEEIYGAGRPYGLFLGGGGRLLAAHIVQILVIAGFVSCTMGPLFLALKKLGLLRISAEDEMAGMDLTRHGGFAYVYHDDDEHDKSVGGFMLRSAQTRVEPAAAANSQV

SEQ ID NO: 3354 - protein, 114 aa, Triticum aestivum
  misc_feature (48)..(48): Xaa can be any naturally occurring amino acid
  misc_feature (55)..(55): Xaa can be any naturally occurring amino acid
  misc_feature (86)..(86): Xaa can be any naturally occurring amino acid
  unsure (1)..(114): unsure at all Xaa locations
MSMPSTREDTIKMKCRVLQENVGFAHRYGKRGHSKSHFGDIDIFDGKXLVDMVPXYKKGDRPHGDRLTYQLIEITEDGYVRLITRXGNTEDDLKLCKEDVLLGQIKTGFDDGKD

SEQ ID NO: 3355 - protein, 232 aa, Triticum aestivum
  misc_feature (49)..(49): Xaa can be any naturally occurring amino acid
  misc_feature (123)..(123): Xaa can be any naturally occurring amino acid
  misc_feature (140)..(140): Xaa can be any naturally occurring amino acid
  misc_feature (142)..(142): Xaa can be any naturally occurring amino acid
  misc_feature (171)..(171): Xaa can be any naturally occurring amino acid
  unsure (1)..(232): unsure at all Xaa locations
MANSEYEYVKREFEFDHHLPASNWIIVCLDGCHFHRFVFREGTEFYQRXSTNNCSKILSLCVSYFTPVYVMKLKDFFPNKELREAPYFDGRVVCYPNMKTIHDYLAWRQLDRHNRIQYKTCFXWMLVKSGKGENEAYDIXEXLSSSTSKDKNELLEQPFEMNYNNEPAMYXKASCAYREKSGWLQVDDAASAVAHVDMKARVLENASLVVALHRQQHQAAAGHRPRAPPPRS

SEQ ID NO: 3356 - protein, 169 aa, Triticum aestivum
  misc_feature (39)..(39): Xaa can be any naturally occurring amino acid
  misc_feature (126)..(126): Xaa can be any naturally occurring amino acid
  unsure (1)..(169): unsure at all Xaa locations
WPLGGYPGPQGPYYCAAGAEKSYGRDIVDAHYKACLYAXGINIGGINAEVMPGQWEFQVGPSVGISAGDELWAARYILERITEIAGVVVSFDPKPIPGEWNGAGAHTNYSTKSMRSEGGYEVIKKXDTEKEGKGYFEDRRPASNMDPYVVTSMIAETTILSKAGLSNGK

SEQ ID NO: 3357 - protein, 151 aa, Triticum aestivum
MAPRTSDKTATPPAAGAAATGLALGVGGGNGGGVGTHYRGVRKRPWGRYAAEIRDPAKKSRVWLGTYDTAEEAARAYDAAAREYRGNKAKTNFPFASASAPPAAAAALTGDGSRSSNSSTVESFGGDVQAPMQAMPLPPSLELDLFHRAEL

SEQ ID NO: 3358 - protein, 96 aa, Triticum aestivum
  misc_feature (11)..(11): Xaa can be any naturally occurring amino acid
  unsure (1)..(96): unsure at all Xaa locations
VLACFLAPCSXDAAYKVYWYWAAAPFRSPWWNAAACALEAASWVYRTAVFFMICVLFRVICYLQVLRMVGFAREFGRFADVAVVLEHHRRIRDQLR

SEQ ID NO: 3359 - protein, 233 aa, Triticum aestivum
CNNFLLGGLGAILVVAVVVGVVATVTSSGNNKAGDNFNVPGEANLATSGKSVKSLCAPTLYKESCEKTLTSASNGTENPKEVFATVAKSALESIKSAVERSKSIGEAKSSDPLTEGARQDCKELLEDSVDDLKGMVEMAGGDIKVLLGRTDDLEHWITGVMTFIDTCADGFADEKLKADMQGILRNATELSSNALAITNSLGAIFKKLDLDVFKTDSRRRLLSADESRYPAWM

SEQ ID NO: 3360 - protein, 185 aa, Triticum aestivum
  misc_feature (123)..(123): Xaa can be any naturally occurring amino acid
  misc_feature (165)..(165): Xaa can be any naturally occurring amino acid
  unsure (1)..(185): unsure at all Xaa locations
MAGRYARSLFVDSLMGRLNFACPGGAVNGAGGMFSLEFGSGEISPDEMNKIMVDEKLAEMVLADPKRVKRVLANRQSAARSNERKMLYIEELEQKVQILQTEDTTLAEQIKLLQRDSSAVATXNNELRFQLQAMEHHAHLRDALNDALTGEVHRLKIAAVELGIXDSCSFNAMGQQHNLMFKHQQ

SEQ ID NO: 3361 - protein, 255 aa, Triticum aestivum
SARVMYEELHVMSPVVPTREFCFLRYCRQIEQGLWAIADVSVDLQRDARYGAPPARSRRLPSGCLIADMSNGYSKVTWVEHMETEDKTPINQLYRDLVLIGAAFGAHRWLAALQRACERHACLVTPPHRDIAGVTLEGKRSMMRLSQRMVGSFCASLSASQQHRWTTLSGPGAGVDDAAGVRVMVHRSTDPRQPSGVVLSAATSIGLPVSCDRVFAFVRDENTRSQWDVLSHGNPVQEVSRIPNGSHPGNSISLL

SEQ ID NO: 3362 - protein, 198 aa, Triticum aestivum
MARISNWSLVFLLISTLLHIEPSLSSPSPSPSPSPFIKSSCSSTQYPALCVSSLSVYASSIQQDPHQLVQTALSLSLNRTQATKTFVANCNKFRGLKPREHAALKDCAEEISDSVDRLSRSLKELKLCKVKGEDFTWHISNVETWVSSALTDESTCGDGFSGKALNGKIKDSIRARMLNVAQVTSNALSLINHYAAQH

SEQ ID NO: 3363 - protein, 160 aa, Triticum aestivum
MSDSEEHHFESKADAGASKTYPQQAGTVRKNGFLVIKGRPCKVVEVSTSKTGKHGHAKCHFVAIDIFNGKKLEDIVPSSHNCDIPHVNRTEYQLIDISEDGFVSLLTSDGNTKDDLRLPTDETLVAQIKEGFESGKDLVVTVQSAMGEEQICALKDIGPK

SEQ ID NO: 3364 - protein, 155 aa, Triticum aestivum
MRLLVAEVAAASPLSSASSECNSNSCRWKPYSNSTDFQANASVLLILIFSALICALSLCAAIRCFLRPTTPETDDNDHKPDPEADGSFTIPTPTLVYSSDLELAGAEAECAICLSEFEQGESIQVLEKCHHGFHVKCIHKWLSSRSSCPTWPDFY

SEQ ID NO: 3365 - protein, 202 aa, Triticum aestivum
SRGDTEPEFVFVRLTNFAGRNRGAAMGSQNIGPRDVCIVGVARTPMGGFLGALSSLPATKLGSVAIEAALKRANVDPSLVQEVFFGNVLSANLGQAPARQAALGAGIPNTVVCTTVNKVCASGMKATMFAAQSILLGSNDIVVAGGMESMSNAPKYIAEARKGSRFGHDSLVDGMLKDGLWDVYGDCAMGVCAELCADNHAL

SEQ ID NO: 3366 - protein, 296 aa, Triticum aestivum
  misc_feature (192)..(192): Xaa can be any naturally occurring amino acid
  misc_feature (204)..(204): Xaa can be any naturally occurring amino acid
  unsure (1)..(296): unsure at all Xaa locations
MCGGAILAELIPGGAPARRAASGHVWPGKGAKQPKAADDFEAAFRDFNEEEDVVVVVEEEVAESKPFVFAASPKKPQQQREEEEQAAPARRRKPAQYRGVRRRPWGKWAAEIRDPVKGVRVWLGTFPSAEAAALAYDGAARAIRGPRAKLNFPPSSAVAAAAPGSRKRVRAEALAAPAAKPAPVVTLVDDEXRITRRSCSVKHXPDPSEGSESTGALPDFSWPGHVGPRGAPPPAPPGAQNQTSDKVGEQPGRAGLHRRLVAPTRDGIHSYGPPAAGSTSNGWGNRGAPQDTRGTP

SEQ ID NO: 3367 - protein, 178 aa, Triticum aestivum
MVGSGMQRGAPLVVGRVIGDVVDPFVRRVALRVGYASRDVANGCELRPSAIAEPPRVEVGGPDMRTFYTLVMVDPDAPSPSDPSLREYLHWLVTDIPGTTGVSFGTEVVCYEGPRPVLGIHRLVFLLFQQLGRQTVYAPGWRQNFSTRDFAELYNLGLPVAAVYFNCQRETGTGGRRM

SEQ ID NO: 3368 - protein, 270 aa, Triticum aestivum
PLLTAKALFIWVMLPFQLGLNSIKTLTLLAPLSIFADVVDLGAMGVVLGQDVSTWLSEKPPVFAFGGPAELLYGLGVAVYAFEGIGMVLPLEAEAADKRKFGGTLGLSMVFIAVMYGLFGAMGYLAFGASTRDIITTNLGAGWLSVAVQLGLCINLFFTMPVMMNPVYEVAERLLYGKRYAWWLRWILVVFVGLMAMLVPNFADFLSLVGSSVCVLLGFVLPAAFHMKVLGADIGWPALIADVAVIVVGLALSASGTWTSLAHMFGASNA

SEQ ID NO: 3369 - protein, 330 aa, Triticum aestivum
MEQHFVHFGATTTPPPPQPKPKASPPLCYHTSSPILADDYHTSSPMSSAFDMGDTDDMHLLNTLLLHIQTGSASSHVEPAHYSLDLELDMEPSSSSTSSSSSYSSSEQQQKHHGMPTTAGQSPSNRRASQQQQPHPAPAATKGLIGVRKRPWGKFAAEIRDSTRKGARVWLGTFNTPEAAAMAYDQAAFSVRGAAAVLNYPVDRVQESLRTLALRPDVPGGSPVLALKRRHSIRKRSPNKAKKTALEPTKMMEQSGAAMPAQQQLLPVQSAGVVELEDLGADYLEELLRVSDEPSASSTMLMGAFDHHHHHHVDDQSALASTAPMLFPHC

SEQ ID NO: 3370 - protein, 227 aa, Triticum aestivum
ANSARGLANRVGESSSSSSSASGAGKDSGSFECNICLELAQDPVVTLCGHLFCWPCLYEWLHVHAHFPECPVCKANVEEDRLVPIYGRGKTSAEPRPSSSEGPQIPSRPSGQRRATAPPPDHRDHYPHPNQNPWFPGAGAMAGGRWGNYTFSAAIGGLFPLLNFQVHGFPPAYGPAAGIPYGYGHDFHGWHGHGFPPQAPQGQQVDVYLKMLLVLVGVLVIASLIAF

SEQ ID NO: 3371 - protein, 125 aa, Triticum aestivum
MSFFRSFFTRATSPGTMSQASTKVQQLIDNNSVVVFSKSYCPYCKQTKKTLDDLNTEYELLELDEVSDGSAPQDALEKISGQRTVPNVYIKQQHIGGNSDLHSLNSGGKLKNLLKEANALKASKL

SEQ ID NO: 3372 - protein, 106 aa, Triticum aestivum
MSQASTKVQQLIDNNSVVVFSKSYCPYCKQTKKTLDDLNTEYELLELDEVSDGSALQDALEKISGQRTVPNVYIKQQHIGGNSDLQSLNSGGKLKNLLKEANALKA

SEQ ID NO: 3373 - protein, 106 aa, Triticum aestivum
MALAKAKEIVASASVVAFRKSNCPFWVKGKKLLTQFGKSLKAVEMDTESKGTEIHSALAERTGKRTVPNVFNKGKKIGGWDETIELNKVGKLVALLKKDGKISGTS

SEQ ID NO: 3374 - protein, 288 aa, Triticum aestivum
  misc_feature (155)..(155): Xaa can be any naturally occurring amino acid
  unsure (1)..(288): unsure at all Xaa locations
MAKDNDNNAPPATSSDSMSSGKGSKGSKASSRLVLGGAIDKGKGVPKVEEEEEGCRSKGKIMTAPVVAARSDGRSGGRRGDRELHIITERERRRRMSEMFTKLHGLLPTLPDKVDKSSIVMEAIHYIKSLEGTVSELEKAKAREGFSQQEASSPXAANDGVSSSVAAAMPMGMATPAPSMALGAVTVAPAPVPLQTWSGPNVVLSLSGNYAYIHMSVARRPGVLTMVTAVLEKHGIDVVTTGISSDRSQCMYTIQARINGMSNQFGDTVACDDIYKLAVSEIMVWLSD

SEQ ID NO: 3375 - protein, 136 aa, Triticum aestivum
  misc_feature (70)..(70): Xaa can be any naturally occurring amino acid
  unsure (1)..(136): unsure at all Xaa locations
FPVQEAPDLLHNLNQQALGGQHSSRSPSPPKQNADAGMRIKATFGSEKVRFRLKPECSFQELKQEMARRXLSIVDTSFLIVKYLDDDLEWVLMTCDADLQECLHVYKLANLQTVKISVHLAPIPEARVTIGHTGLS

SEQ ID NO: 3376 - protein, 431 aa, Triticum aestivum
  misc_feature (210)..(210): Xaa can be any naturally occurring amino acid
  unsure (1)..(431): unsure at all Xaa locations
MYGVGVGGGGGGFNAPSTASGRRKNQEDDDDEEEEETGDGRVLEAWERAYADDRSWEALQEDESGLLRPIDTKNLVHSQYRRRLLLRSAAAAARIQKGLIRYLYIVIDLSKAASEMDYRPSRMAVVAKCAEAFIREFFDQNPLSHVGLVTIKDGISHRLTEIGGSPESQINALMGKLECSGDSSLQNALELVNGYLNQIPSYGHKEVLFXLYSALNTCDPGDIMETIEKCKKSKVRCSVIGLAAEIFICKHLCEETGGSYTVALDESHFKELLLEHAPPPPAIAEYAAANLIKMGFPQRGAEDLISICSCHKKIKSGAEGYICPRCKVNVCELPTECRTCGLTLVSSPHLARSYHHLFPVAPFDEVTFKLGQKGGQNCFGCQQSLINTGGQSNIHVCCPKCKHHFCFDCDIYIHESLHNCPGCESQCSSSR

SEQ ID NO: 3377 - protein, 121 aa, Triticum aestivum
MEEDLVLANYVAANGEGAWNSLARAAGLNRTGKSCRLRWLNYLRPDVRRGNITPEEHLLIVELQARWGNRWSKIARHLPGRTDNEIKNFWRTKIQKKRSGGATASDSTGCQLPSSTAVTES

SEQ ID NO: 3378 - protein, 264 aa, Triticum aestivum
MAGWTDSGGSRGRGGGGGGGFANRGGGNANNMNTRWRERRPPQQPQPQPQPQPPPQQHQQQQHQHHHQQQHHDHQQQHRYRPVNHNDHSSQHPRHPPAGELDRHQGQGGSSTSTRRPRPTRPPQPRPTFTDHKPSPTSTPNANEPDDKARRNAANFECNVCFDMADDPVVTKCGHLFCWDCLYQWLHVHSNHRECPVCKGQVADDAIIPIYGRGGSAASVHAAPPRPTGTRVESSRQQQLQQFAASNLNMMMDEDDEDDDPFLE

SEQ ID NO: 3379 - protein, 334 aa, Triticum aestivum
MSQRAALLIGKLSHAQKEWQQCSEVASKLHEYPDGNREDFLSKCKSGEFDGIYALYRSNDSNPITGDFNAELLDALPKSLKYVCHNGAGYNNIDVAACTKRGISVSSTPIAVNDATADVAIWLMLGALRNIKQSYMAVNNGKWRGNFSLGHDPKNKTLGILGMGGIGSAVAHRAKAFGMKIQYHNRHQLPASEENGAKYVTFDELLKTSDVLSLNLALNPSTTHIIGKEQFNTMKDGVIIVNTARGALIDEAALVDALKSGKVWTCGLDVFEEEPKIHPGLLECENAVLLPHVGTATYETQRDMEILVLDNLKSAIKSDKLLTQVPEQKGKANL

SEQ ID NO: 3380 - protein, 488 aa, Triticum aestivum
  misc_feature (244)..(244): Xaa can be any naturally occurring amino acid
  misc_feature (285)..(285): Xaa can be any naturally occurring amino acid
  unsure (1)..(488): unsure at all Xaa locations
WRRSRRPTGRARPGWRPWRYRWRPGTARESDWLDDDGRPRRSGTVWTASAHIITAVIGSGVLSLAWAIAQLGWVAGPAIMLLFALVIYYTSTLLAECYRSGDPETGKRNYTYMDAVRSYLPGTKVKLCGVIQYANLVGVAIGYTIAASISMRAIGRADCFHYHDVRGRSGKDECKSSSNPYMIVFGVVQILFSQIPDFDQIWWLSIVAAVMSFTYSTIGLGLGIAQTVANGGIQGSLTGLSVGXGVTSMQKVWRSLQAFGNIAFAYSYSIILIEIQDTVKAPPPXSEAKVMQKATGISVATTTVFYMLCGCMGYAAFGDAAPDNLLTGFGFYEPFWLLDVANAAIVLHLVGAYQVFCQPLFAFVEKWAAARWPDSAFIARELRVGPFAISVFRLTWRTAFVCLTTVVSMLLPFFGDVVGLLGAVAFWPLTVYFPVEMYIVQRGVRRGSTRWVCLKMLSAACLVVSVAAAAGSIADVIGELKEYRPFSG

SEQ ID NO: 3381 - protein, 548 aa, Triticum aestivum
MPHRSLLARAHSEDDADAAMGDAVAGAVDYRGRPASRAATGGWKSSVFVMAMEIAERFAYKGVAANLITYLTGPLGQPMARAAASIDAWKGVSQMLPLPVACVADAWLGRYRAIVLASILFVVSMGTLSLSSAFHIFRSGGHVAVFYVALYLVALGEGAHKPCAQAFAADQFDEKDPKENVARSSFFNWWYFGMCAGTAVTTMVSSYVQDNVGWGLGFGIPCIVILVSLAVFLIGTPSYRYYTTKEPSPVARVGKALLVLIKSWRSKHRTNPASGKVEAHKNSDEDLVEEVSSVFRLLPIWASCIIYAIIFSQTSTFFTKQAATLDRRIGPNFKVPPAALQTFISVSIVAFIPVYDRLFVPLARRYTGRPTGITMLQRVGAGLSLSLVAVVLSALVEMKRLAVARDAGLLDAPKASHLPMTLWWMVPQYVLIGVSDVFAMIGLQEFFYDQVPDAVRSLGLALFLSIFGVGHLLSSFLISVIDRATARRGASWFSNNLNRAHLDYFYWLLAGLCVVELVAFFFFSRAYVYKKKSDDGDYRGGDADATLV

SEQ ID NO: 3382 - protein, 258 aa, Triticum aestivum
  misc_feature (129)..(129): Xaa can be any naturally occurring amino acid
  unsure (1)..(258): unsure at all Xaa locations
NILIEKICLCLGLGLLLSSSSSPFPCSCFRIGLSPVMGATSPSGLELTMAVPGLSSSSGSEGFVCNNNISNNGGGNMRGLDMNQPASGGEEEDFLMGGVEEDEEERGAGGPHRPKKLRLSKEQSRLLEXSFRLNHTLSPKQKEALAIKLKLRPRQVEVWFQNRRARTKLKHTEMECEYLKRCFGSLTEENRRLQREVEELRAMRMAPPTVLSPHTRQPLPASALTMCPRCERVTAATGPRITRPPASPFHPRRPSAAF

SEQ ID NO: 3383 - protein, 390 aa, Triticum aestivum
MGTTNELMHRHVQAAAVPPLPASFAATSARGMGSQPGQGGRQRAGLPPTPPSGAGSHSLHVADACMPMQDDSAPRKAHRRSRSDVPFGYFPPPSPKTESGWGLPCAGGGGGGGGDELFNAFMSMEGMDGLNSSDGDSRGSSMPPANGADSSENESEDYSGVESQVFLWGEAGRKRNAAGEPAAAATRHARSLSMDSLMGKLSFSANGGEPSKFSLEFGSGEFTPAEMKRIMADEKLAEMALADPKRVKRVLANRQSAARSKERRIRYIAELEHKVQILQTEATTLSAQLTHLQRDSSGLATHNNELKFRLQAMEQQAQLRDALNEALTGEVQRLKQSATSERGGDAGSSSNLAQQMQLRCQNQMLEMHKQQQQQTPFYQLEQPEQNGESN

SEQ ID NO: 3384 - protein, 252 aa, Triticum aestivum
  misc_feature (223)..(223): Xaa can be any naturally occurring amino acid
  misc_feature (229)..(229): Xaa can be any naturally occurring amino acid
  misc_feature (240)..(240): Xaa can be any naturally occurring amino acid
  unsure (1)..(252): unsure at all Xaa locations
MAAPITSRTETLQKYLKLDQKGMIMAEYVWVDAEGGTRSKSRTLPEKDYKPEDLPVWNFDGSSTKQAPGENSDVYLRPCAVYPDPFRGSPNIIVLAECYDSDGTPNKYNFRHDCVKVMKTYADEEPWFGLEQEYTLLGSDDRPYGWPAGGFPAPQGEYYCGVGTGKVVQRDIVEAHYKACLYAGIQISGTNAEVMPAQWEYQVGPCTGIEMGDQLWVSRFFLXRVAEEXGAKVSLHPRPXAGDWDGAGLHST

SEQ ID NO: 3385 - protein, 127 aa, Triticum aestivum
MMERAEDLGLSLSLSSSLTPRTHHVAMQLHAPERRFLEMPLLPAKRVCEVSADEERSSQRGGSDDEDGGCGMDGSRKKLRLSKDQSAVLEDSFREHPTLNPRQKAALAQQLGLRSRQVEVWFQNRRA

SEQ ID NO: 3386 - protein, 98 aa, Triticum aestivum
MSDENANGTPGEQAPANSEHLNIKVTDNNNEVFFKIKRTTKLEKLMGAFCERQGKATSSVRFLFDGTRVQPTDTPDALEMQDGDTLEVHQEQVGGSSL

SEQ ID NO: 3387 - protein, 514 aa, Triticum aestivum
MDVTAWAWASFLAVVLVVLTILRRGRGSQPQGNRLPPGPKPWPVIGNLNLIGALPHRSIHELSKQYGPLMQLRFGSFPVVVGSSAEMARFFLKTHDTVFADRPRTAAGKHTTYNYSDVLWAPYNAHFRRARRLFATELFSAARLESYKHIRHEEVSALLRDLAAAAHGASGRAVPLRGHLFAATNGIISRVVLGKKYAEKEAGGSAAMALEDLSGLIEEFFLLNGVINVGDFIPWFDWLDLQGYVRRMKKYSKKMDRFLEHVLEEHEERRRVKGEQFVARDMVDVLLQLADNPNRLDRDTVKALTQELIVGGSDTSSVTMEWAMSEVLRNPEVLGKATKELDRVVGRDRMVMEKDIPDLPYIEAIVKEAMRMHPVSPMLAPHLAREDASVDGHDIPAGTLVLVNVWAIGRDPTYWDAPEEFRPERFMGSKIDVKGQDMELLPFGAGRRMCPGYSLGLKVVQLIVANLLHGFTWGLPDGTTMEQLNMEEIYGLTTARKFPLEAVVEPKLQEHVFS

SEQ ID NO: 3388 - protein, 140 aa, Triticum aestivum
  misc_feature (138)..(138): Xaa can be any naturally occurring amino acid
  unsure (1)..(140): unsure at all Xaa locations
MACDQRGMRGEAAAAGEEEMLRRGPWTVEEDVLLANYIAANGEGRWNALARRAGLKRTGKSCRLRWLNYLRPDLRRGGMTAEEQLLVLELHARWGNRWSKIAQHLPGRTDNEIKNYWRTRVQRHAKQLRCDVGSQRFXGP

SEQ ID NO: 3389 - protein, 47 aa, Triticum aestivum
  misc_feature (4)..(4): Xaa can be any naturally occurring amino acid
  misc_feature (15)..(15): Xaa can be any naturally occurring amino acid
  misc_feature (19)..(19): Xaa can be any naturally occurring amino acid
  misc_feature (29)..(29): Xaa can be any naturally occurring amino acid
  misc_feature (34)..(34): Xaa can be any naturally occurring amino acid
  unsure (1)..(47): unsure at all Xaa locations
QALXNYLENNRAGIXVYGXVVDRTWLHAXFMIEXSLVMWLLGKTVGI

SEQ ID NO: 3390 - protein, 166 aa, Triticum aestivum
MAAAAAAADGERRIGVAMDYSESAKKALDWAIDNLLHHGDTLVVLHVLHHSGEETKHALWAKSGSPLIPLSEFREPEVMQGYGVRTDAEVLDMIDTAARQKQLKVVAKLYWGDAREKLCDAVGDLKIDSLVMGSRGLGPIQRILLGSVTNYVLSNASCPVTVVKGK

SEQ ID NO: 3391 - protein, 102 aa, Triticum aestivum
MDKVMRMSSEKGVVIFTKDSCCLCYAVQILFRDLRVQPTIHEIDNDPDCREIEKALVRLGCTNAVPAVFVSGKLVGSTNEVMSLHLSGSLVPLIKPYQSFHN

SEQ ID NO: 3392 - protein, 140 aa, Triticum aestivum
  misc_feature (11)..(12): Xaa can be any naturally occurring amino acid
  misc_feature (46)..(46): Xaa can be any naturally occurring amino acid
  misc_feature (72)..(72): Xaa can be any naturally occurring amino acid
  misc_feature (102)..(102): Xaa can be any naturally occurring amino acid
  unsure (1)..(140): unsure at all Xaa locations
GDELWAARYIXXRITEIAGVVVSFDPKPIPGEWNGAGAHTNYSTKXMRSEGGYEVIKKAIQKLEARHMEHIXRHETADINTFVWGVANRGASVRVGRDTEKXGKGYFEDRRPASNMDPYVVTSMIAETTILSKAGLSNGK

SEQ ID NO: 3393 - protein, 193 aa, Triticum aestivum
  misc_feature (37)..(37): Xaa can be any naturally occurring amino acid
  misc_feature (76)..(76): Xaa can be any naturally occurring amino acid
  misc_feature (81)..(81): Xaa can be any naturally occurring amino acid
  unsure (1)..(193): unsure at all Xaa locations
CTRAVVCRDIVEAHYKACLYSGIKISGTNAEVMPAQXEFQVGPCTGIEMGDHLWMARFLLYRVAEEFGAKVSVHPXPIPGXWNGAGLHSNFSTKEMRVEGGMKHIEAAIKKLEGRHKEHILVYGEGNEARLTGRHETGSIDQFSYGVANRGASIRIPRETAAQGFGYFEDRRPASNAYPYQITGIIMETCFGA

SEQ ID NO: 3394 - protein, 467 aa, Triticum aestivum
MAPAAFDAEAGGPAIVAAAGNDAHKPAPGADADAGAAFVLESKGTWWHAGFHLTTAIVGPTVLTLPYALRGMGWALGITTLSLIAAVTFYEYSLMSRVLDHCEARGRRHIRFRELATDVLGSGWMFYFVVIVQTAINTGVSIGSILLAADCIEIMYSSLAPNGPLKLYHFIIIVAVVLAFLSQLPSFHSLRHINLVSLLLSLGYTILVSAACIRAGLSKNAPAKDYSLSSSKSEQTFNAFLSISILASVFGNGILPEIQATLAPPAAGKMMKALVMCYSVIGFTFYLPSITGYWAFGSQVQSNVLKSLMPDSGPALAPTWLLGLAVLFVLLQLLAIGLVYSQVAYEIMEKNSADVTQGKFSRRNLVPRLLLRTLYLAFCALMAAMLPFFGDIVGVVGAVGFIPLDFVLPVIMYNIALAPPRRSTLYIANTVIMVVFTGVGAIGAFASIRKLVLDAGQFKLFSNNVVD

SEQ ID NO: 3395 - protein, 148 aa, Triticum aestivum
MSFLRSAIKTSTFLRPTVNWYTPSFARWISTEMKTRLDKDVKSNDVVLFMKGTPDEPMCGFSRAAVQIMQVQGVDFNKVNAYNVLEDPELRESIKEYSEWPTIPQIYIKGEFVGGCDILLNMHQSGDLEDLLVKEQIVPPVIEEEETK

SEQ ID NO: 3396 - protein, 152 aa, Triticum aestivum
MALRSIKTPSVTPTAAVSSSITNKPQSFRFVSKPSASLAVHNLHQPISITRSNLLPKLKPASPPAKFRCSASAALTPQLRDTLEKLVNSEKVVLFMKGTRDFPMCGFSNTVVQILKNLNVPFEDVNILENEMLRQGLKEYSNWPTFPQLYIG

SEQ ID NO: 3397 - protein, 177 aa, Triticum aestivum
  misc_feature (145)..(145): Xaa can be any naturally occurring amino acid
  misc_feature (158)..(158): Xaa can be any naturally occurring amino acid
  unsure (1)..(177): unsure at all Xaa locations
MSWCYCAKPMTLQLPLQPRASSSFHSHVGGVTVTSSTLSLRLSSTLVFTHNLHFQPKLKRASTTVRCSSALTPQLKSTLDQVIASNKVVVFMKGTKDFPQCGFSNTVVQILKSLNVPFETINVLENDLLRQGLKEYSSWPTFPQXYIEGEFFGGCDIXVDAYQKGELQELLEKAMLS

SEQ ID NO: 3398 - protein, 280 aa, Triticum aestivum
  misc_feature (38)..(38): Xaa can be any naturally occurring amino acid
  misc_feature (44)..(44): Xaa can be any naturally occurring amino acid
  misc_feature (77)..(77): Xaa can be any naturally occurring amino acid
  misc_feature (214)..(214): Xaa can be any naturally occurring amino acid
  unsure (1)..(280): unsure at all Xaa locations
MRASAAEIFDRPLTTCLPYEMFKNMTQQSVAVAHLIMXPRHHSXDLIEALNTYMPDQNDDRPLATFKERLQYLQRTXNTRASCGRSGVHGWGLFAVTKIQEGQMVIEYRGDQVRRSVADLREARYHKENKDCYLFKISEDVVIDATERGNIARIINHSCMPNCYARIVSVGDNKSQIILIARRDVSAGEELTYDYKFDPDESEDRKVPCLCKAXLTCRGYMNLKCSQGLTNPNYSGEAPHSQIHPDSFIILCMAVSMQPVCYFFSHRILLDSRGRASQAR

SEQ ID NO: 3399 - protein, 427 aa, Triticum aestivum
MEEVEVPSYFVCPITLDVMRDPVTLPTSITYDRHAIHRWLRLAASCPLTKLPVLPDCEPTPNHTLSRLIRSWCALHRPDDAVDRTMNSAPADRARLAALVSRLADAKNKGPAREALAALRELRDVAAEGERGRELIAAVPGSADALLEVFVASATCAPDYAAAALDVISSLRLPERCLARAVDRDGAALVGALVSTLQGHSGSDADAASRARAAVLLADVTACMAPSRAASLPEQVFVEAVRLLRGDDGMGASTAMATKAALRVLAGATAHGRNRVKAAEAGAVAALVDLLLLVNGERRRAWCELALCALNRLCGCAEGRAALVAHGAGVAAVGAWVAGASMAASAKAVRVLRSIARHAATVAVVQEMAATGAVGKLCLVAASAPEEGRQWCDERTRKRARETLRLHARAWRSSPCLHPTLQALYPC

SEQ ID NO: 3400 - protein, 339 aa, Zea mays
  misc_feature (39)..(39): Xaa can be any naturally occurring amino acid
  unsure (1)..(339): unsure at all Xaa locations
MASLTDLVNLDLSDCTDRIIAEYIWVGGSGIDLRSKARXPQAIFKDPFRKGNNILVMCDCYTPQGEPIPSNKRYKAATVFSHPDVAAEVPWYGIEQEYTLLQKDVSWPLGWPVGGYPGPQARDRSFPSSTFIDCMRGPYYCAAGADKAFGRDVVDAHYKACLYAGINISGINGEVMPGQWEFQVGPSVGISAGDEIWVARYILERITEMAGIVLSLDPKPIKGDWNGAGAHTNYSTKSMREAGGYEVIKEAIEKLGKRHREHIAAYGEGNERRLTGRHETADINTFKWGVANRGASIRVGRDTEKEGKGYFEDRRPASNMDPYVVTGMIADTTILWKGN

SEQ ID NO: 3401 - protein, 318 aa, Zea mays
EASGTETRLLPRLPPMAPPLAAVSSSSPLFSPSSSRPIRRCHAPPPSISFQTRGRSPTAAAAAESSVSTLLEVRGLTASVKETGQQILAGVDLTIREGEIHAIMGKNGSGKSTLTKVLVGHPHYEVTGGTILFKGEDLVDMEPEDRSLAGLFMSFQAPIEIPGVSNFDFLLMAVNARRERSGLPALGPLEFYSVVSPKVDALKMDPKFLDRNVNEGFSGGERKRNEILQLSVIGADLALLDEIDSGLDVDALEDVANAVNGLLTPQNSVLMITHYQRLLDLIKPSYVHIMENGKIIKTGDSSIATQINEGGFKSIALV

SEQ ID NO: 3402 - protein, 602 aa, Zea mays
MAVGGDANGGGGGVRQRQRGCSCTKADFFPEESFSSWSAYGRALRSTGPRLADRLTSRSLESTELHEVRARSGADMKRDLTWWDLVWFGVGAVIGAGIFVLTGQEAREDVGPAVVVSYVVSGVSAMLSVFCYTEFAVEIPVAGGSFAYLRVELGDFMAFVAAGNILLEYCIGGAAVARAWTSYFATLLNHQPSDFRIHASSLSADYSELDPIAVVVIALVCIFAVASTKGTSRFNYVLSIVHIAVIVFIIVAGLTKADAANMRDFMPFGVRGIFSASAVLFFAYIGFDAVSTMAEETKNPARDIPIGLVGAMTLTTALYCVLAVTLCLMQPYASIDKDAPFSVAFSARGMDWAKYIVAFGALKGMTTVLLVSAVGQARYLTHIARTHMMPPWLAQVHPRTGTPVNATVVMLVATAIIAFFTDLGILSNLLSISTLFIFMLVAVALLVRRYYVAGETTVANRNKLAACIIAILATSSATATCWGVNVNGWVPYAVTVPAWFASTVCLWAFVPQARAPKLWGVPLVPWLPSASIAINVFLLGSIDYKSFMRFGFWTAGLLVYYLFVGLHASYDTAKALAADSAMAKVEDGDGKPARGAVHNGEY

SEQ ID NO: 3403 - protein, 349 aa, Zea mays
MELGLSLGDAAVPDAGRAAPELGLGLGVGIGSNAAGTGRGSKAAGTTGTTGWWAAPATPESAVRLSLVSSLGLQWPPPDGGRDEAPARGFDVNRAPSVAGSALALEDDEEEPGAAALSSSPNDSAGSFPLDLGGPRAHAEGAAARAGGERSSSRASDEDEGASARKKLRLSKEQSAFLEESFKEHSTLNPKQKAALAKQLNLRPRQVEVWFQNRRARTKLKQTEVDCEYLKRCCETLTEENRRLHKELAELRALKTAPPFFMRLPATTLSMCPSCERVASGPSPASTSAPASSTPPATAATTAISYAAAAAAPVRADHRPSSFAALFAATRSFPLASQPRPPAPASNCL

SEQ ID NO: 3404 - protein, 259 aa, Zea mays
MLLLLSNLCLSLLAPLLPPHLPPFLVPVPVHWLAMGSTSPSGLELTMAVPGLSSSSGSEGFGCNNNNGSGNGNNMRDLDMNQPASGGEEEEFPMGSVEEEEDERGGAGGPHRAKKLRLSKEQSRLLEESFRLNHTLTPKQKEALAVKLKLRPRQVEVWFQNRRARTKLKQTELECEYLKRCFGSLTEENRRLQREVEELRAMRVAPPTVLSPHTRQPLPASALTMCPRCERITAATAARTPRPPPAASPFHPRRPSAAF

SEQ ID NO: 3405 - protein, 86 aa, Zea mays
GSGVARAAAVTQRRTVKWFNDTKVFGFICPEDGSKHLFVHQSYIKSDGFHSLADGDDVEFSIYHGDYGRTKAVDLTIPDGSFLRGC

SEQ ID NO: 3406 - protein, 356 aa, Zea mays
  misc_feature (76)..(76): Xaa can be any naturally occurring amino acid
  unsure (1)..(356): unsure at all Xaa locations
MMRCAAAALAVALIAAVAAATAAGSPAAGTCARRGAPPFLDAVGSRCPFVRIDPSPPLEINEPSLLLAAAGHILIXKVPCLYRLIKWNFCWCLECGWVILRIWKVVVSYIPCLLLKVRGETVDTELNLRRRGASYSILFYAAWCPFSSKLRPIFGTLSTMYPQIHHFTVEESSATPSLFSRYGVRGFPAILLVNETTMVRYRGSKDLNSLVDFYKETTGLDPIAYIDVVEQESTGSLSSVMPWDRSIREMAKDEMYLLVAVLFIIVKVVAHFIPVVMSHLRAFLVVRVQNLNLGIRRGSNQLLERALNVLDVRRLWSKLRLSNKATDLRKGASNARAWASSFPSVSLGEPSSSRQA

SEQ ID NO: 3407 - protein, 366 aa, Zea mays
  misc_feature (80)..(80): Xaa can be any naturally occurring amino acid
  unsure (1)..(366): unsure at all Xaa locations
MCGGAILSDIIPPPPPRRVTAGHLWPESKKPRRAAAGRRRAPVEQEQEEDFEADFEEFEVESGESELESEDEPKPKPFAXAPSSALARGGLNTGAAGVDGPAANSVKRKRKNQFRGIRRRPWGKWAAEIRDPRKGVRVWLGTFNSPEEAARAYDAEARRIRGKKAKVNFPDEVPTAVSQKRRAAGLASLKAPKMDVEEEKPIIKLAVNNMTNSNAYHYPAVVGHHNIIPEPFMQTQNMPFAPLVNYAALVNLSSDQGSNSFGCSDFSLENDSRTPDITSVPAPVATLAAVGESAFVQNTAGHAVAPPATGNTGVDLAELEPYMDFLMDGGSDDSISTLLSCDGSQDVVSNMDLWSFDDMPMSAGFY

SEQ ID NO: 3408 - protein, 331 aa, Zea mays
MELELSLGDSRAPAKSASTPAALTPIHAGAGGEGHELALELGVGAAKRAEQDNQKTPVQPEHVQEEEEEEETCPYSESPAELSLIGCPLLPAASAEIGSVNSSEVCVRRGFGVDAVLVDGGDAAQGRPALSTSFLPSEFLVRRQADDQEAAAEDEEMSGVGGGARKKLRLSKEQSAFLEDSFKAHSTLTPKQKSDLAKRLKLRPRQVEVLFQNRRARSKLKQTEVDCEYLKRWCEKLAQENRRLQREVADLRRLCSAAYPFYGAAAGFGVATARVCPSSCDNDVSEAAISGAPSAAAPPPSTLFASWPPHFGPFTVVVPPLLRRQPSATTS

SEQ ID NO: 3409 - protein, 174 aa, Zea mays
MELGKPLSAHRCSYTATYTHCSIGFSPRVVRTSWIRAAAEGGDGGADRRRRGASFAADGPRVVEVAAAPVATSGGAAGAAGSAGFGARDAELAMWDKLGAVVRLSYGIGIYGAMALAGRFICQMAGIDCTGGFHPSLTALVEGLGYAAPPIMALLFILDDEVVKYSPHARAIRD

SEQ ID NO: 3410 - protein, 95 aa, Zea mays
  misc_feature (9)..(9): Xaa can be any naturally occurring amino acid
  misc_feature (19)..(19): Xaa can be any naturally occurring amino acid
  misc_feature (28)..(28): Xaa can be any naturally occurring amino acid
  misc_feature (34)..(34): Xaa can be any naturally occurring amino acid
  misc_feature (39)..(39): Xaa can be any naturally occurring amino acid
  misc_feature (44)..(44): Xaa can be any naturally occurring amino acid
  misc_feature (50)..(50): Xaa can be any naturally occurring amino acid
  misc_feature (52)..(52): Xaa can be any naturally occurring amino acid
  misc_feature (56)..(57): Xaa can be any naturally occurring amino acid
  misc_feature (60)..(60): Xaa can be any naturally occurring amino acid
  misc_feature (62)..(62): Xaa can be any naturally occurring amino acid
  misc_feature (68)..(68): Xaa can be any naturally occurring amino acid
  misc_feature (74)..(75): Xaa can be any naturally occurring amino acid
  misc_feature (78)..(78): Xaa can be any naturally occurring amino acid
  misc_feature (85)..(85): Xaa can be any naturally occurring amino acid
  misc_feature (87)..(87): Xaa can be any naturally occurring amino acid
  unsure (1)..(95): unsure at all Xaa locations
IFKGGKVEXIVPSSHNCDXPDVNRTECXLIGISXGGGGXLLTSXGNTKDXLXLPTXXTLXAXIKGGVXRGKELXXTVXSAMGEEXIXAVEEGGPK

SEQ ID NO: 3411 - protein, 443 aa, Zea mays
  misc_feature (117)..(117): Xaa can be any naturally occurring amino acid
  unsure (1)..(443): unsure at all Xaa locations
MADTPSPSPTAAAGAEPGSASTPLLRRRGSYTRTVSHARDELSSFRSGLRWMCVDHSDASSPAVSWLVFAALGVAVPAAAHAAAAPRRAYDTQVQVSLTLSAALAYTTLYSLVRRRXGLRRLLYLDRLRHDSQDVRAGYIVQLAGSFRLLACFVLPCFLADAAYKAFWYCANRPFPLWWSAAACALEMASWMYRTAMFCMACVLFRTICYLQILRMTGFARDFGQCADVAAVLRQHRRIRVQLQRISHRYRSFILYSLILVTASQFTALLAATRPHARVNFATAGELALCSMSLVTGLLVCLHSAAKITHKTQSITSVAAAWHADATINSLDRDQENPRTPSKACLQQQTPTSPFPMAGASSGEESDDDEWRSEDGVDTSRFTPFHATNVSFQKRQALVTYLENNRAGITVFGFVVDRTWLHALFMIEFSLVMWLLGKTIGIS

SEQ ID NO: 3412 - protein, 164 aa, Zea mays
MDAVMFGLETPLMAALQHLLDVPDGDAGAGGDNKTGSGGSATRTYVRDARAMAATPADVKELPGAYAFVVDMPGLGTGDIRVQVEDERVLVVSGERRREEREDDAKYLRMERRMGKFMRKFVLPDNADVDKVAAVCRDGVLTVTVEKLPPPEPKKPKTIEVKVA

SEQ ID NO: 3413 - protein, 542 aa, Zea mays
MASDSGPASSDPLLHGRRAPSTGGWKSALFIIWVEVAERFAYYGISSNLISYLTGPLGQTTAAAAAAVNAWSGAASMLPLLGAAVADSWLGRYRTIVASSVLYITGLGMLTLSSVFSSPQQCRDSADDGEGICPPSSLQTAFFYASLYLVAIAQSRHKPCVQAFGADQFDATDPDEAVSRASFFNWWYMGLCTSATVTIALMSYVQDNVGWALGFGVPSMAMLLALAIFLLGTRTYRFYGSRGGAGASASASASASSLFRNAFVAWRKRSREVELGHGELAQDDAVLAEEVKGLARLFPIWATCLLYGAVFAQPPTLFTKQAATLDRRIGRSFQVPPAALQCFLGASIVTCIVLYDRVLVPVTRRVSGAASGITMLQRIGTGIALSLVTLVVAVLVEMKRLRAARDAGGGGLVDGSGTGTAAVPMSLWWIVPQYVLLGAADVFTMVGMQEFFYDQVPGALKSLGLALYLSVLGVGSFISSFLITVIDAVTTRNGGTSWFADDLNRGHLDYFYQLLAALTALELLAFAYFSTSYVYKTKAGNL

SEQ ID NO: 3414 - protein, 174 aa, Zea mays
MTELFDTAVTSLLHLPEVLDRLAAADGDRRSAGHHAAHGHGHGHGHGRVHGLGGGGAPVDIVESPREYAFVLDVPGLSKSDIQVTLEEDRVLVMKGGSGKRKRDEEEDMNGEGCRYIRLERGAAPRSFVRKFRLPEDADTGGVAARCENGVLTVTVKKLPPPEKKAKTVQVTIA

SEQ ID NO: 3415 - protein, 215 aa, Zea mays
MAHPRSVAAAAPLLLLLAAAAAAAAGLVSAASPAASDFVRKSCRTTQYPSVCEQSLASYGGSPPPRSPRELARAALSVSADRARAASAYVGRLCGASNGKGAKKGSGSASASASAGPVRDCLDNLADSVGHLRDAAQEMGGAGMGRAGTPAFRWHLSNVQTWCSAALTDEDTCLDGLSSRAVDAGTRAAIRGKVVEVAQVTSNALALVNKVGPGY

SEQ ID NO: 3416 - protein, 453 aa, Zea mays
PVPVIPGSTPRPYDPVNVKWTTDRCAVCRWVEDWDYNKIVICNRFQIAVHQECYGVRGKQDFTSWVCRACEKPEQKRECCLCPVKGGALKPTNVDNLWVHVTCAWFQSQVAFASDELMEPAIGILNIQPLLFMKMCVICKQIHGSCTQCYRCSTYYHAICASRAGYRMELHCLEKNGRQTTKKISYCAQHRSPNPDNVLIIQTPAGTFSSKKLVHSNGKVAASRLIRKDIPLDLPSEVKISENLSAARCRVYVRKDLKRSREGNIVHHVRGPCQHRWEEIDNLNPPREERDPESFCTFKERLCYLQKTEHGRVCFGRSGIHRWGLFARRDIQEGEMVLEYRGEQVRRSVADLREEKYRVQGKDCYLFKISEEVVVDATDKGNVARLINHSCTPNCYARIMSVGHDESRIVLIAKKKVCAGDELTYDYLFDPDEADERKVPCLCQTANCRKFMN

SEQ ID NO: 3417 - protein, 309 aa, Zea mays
  misc_feature (203)..(203): Xaa can be any naturally occurring amino acid
  misc_feature (237)..(237): Xaa can be any naturally occurring amino acid
  unsure (1)..(309): unsure at all Xaa locations
LAAFAGGGGAEFQGKVGFLGLGIMGAPMASNLIKAGCYVTVWNRTKSKCDPLLSLGAKYEPTPAQVASSCDVTFAMLADPQSAAEVACGSSGAAEGLAPGKGYVDVSTVDGATSKLIGERITSTGASFLEAPVSGSKKPAEDGLLIFLTAGDESLYKRVAPLLDVMGKSRFYLGDVGNGAAMKLVVNMVMGSMMVSFSEGLLXLSEKVGLDPNTLVEVISQGAISAPMFSLKGPSMXVKAAYPPAFPLKHQQKDLRLALALAESVSQSIPTVAAANELYKAAKSLGLSDHDFSAVIEALKAKVQSQSSQ

SEQ ID NO: 3418 - protein, 547 aa, Zea mays
  misc_feature (341)..(341): Xaa can be any naturally occurring amino acid
  unsure (1)..(547): unsure at all Xaa locations
AWAPRGILSERPPSSPSLTALRFHRVDAKLSPPLLAASHSPPGGFRGYCDSGGSDGGSGGDGGRGMDSPGPGDGWWWERWLQALHPEFFLLFLLLQSGAASALAEALSTSGDDAGDVWEVRGGKRTRLMPDPTWTSYLIAGDDGTKREDGDEKVGSISKDLAALRRQLGRSWRRYAEVAVHLLLPDGYPHSVSSDYLNYSLWRGVQGVASQISGVLSTQALLYAVGLGKGAIPTAAAVNWVLKDGLGYLSKIMLSKFGRHFDVNPKGWRLFADFLENMAYGLEILTPVFPHLFFPIGAAAGAGRSAASLIQSATRSCFYAGFAVQRNFAEVIAKGEAQGMXHMYCNLKSYQSIQLRTLNPYRASLVFSEYLLSGQVPSVKEVNDEEPLFFNLSLGASRKQSKILSAEAKDAADRICRRLQMGSKLSEIIESKEDACALFDLYKNEQYLLMDYKEKFCIVLKEGSSPEDMLKSLFHVNYLYWLERYMGFKPSNVASECRPGGRLEVSLDYAQREFSHVKHDGSDGGWVMDGLIARPLPVRIRIGDGTS

SEQ ID NO: 3419 - protein, 259 aa, Zea mays
MEHYDSYLCSGSMHSYGGVGGATDAALDAGGDDMQRLLNALMDDMAAESDSFSDDMEAASSESSSSACSANSQQEATRRPQQQPDGGHSNGSNKSSKKQHQQQSPAPYIGVRKRPWGKFAAEIRDSTRKGARVWLGTFDSPEAAAMAYDQAAFSVRGAAAVLNFPVERVQESLRALALSSASSAAGSPVLALKCRHSIRKRSPNKNKNKNKKQERQQQVAVAAAGPQQPPCPTSVVELEDLGADYLDELLRVSSEFHWQ

SEQ ID NO: 3420 - protein, 609 aa, Zea mays
MDTSGIVGSVDGHRPAASGAVACPASGVSGFITSTGGGGEPPPRDATLGRHLARRLVQVGVSDVFAVPGDFNLTLLDHLIAEPGLRVVGCCNELNAGYAADGYARARGVGACVVTFTVGGLSVLNAIAGAYSENLPVVCVVGGPNSNDYGTNRVLHHTIGLPDFSQELRCFQPVTCHQAVVNNLEDAHEQIDGAISTALRESKPVYMSVSCNLPGLPHPTFATDPVPYLLAPRPSNLTGLAAAVEATVSFLDKAVKPVVVAGPKIRVAKAAAAFVELAEASGYAVAAMPSAKGLVPETLPRFLGTYWGAVSTAFCAEIVESADAYLLAGPIFNDYSSVGYSILLRKDKAVVVQPDRVTVGNGPTFGCAMMRDFLSVLAKRVRPNTTAYDNYRRIFVPGGQPPECEAGEPLRVNVLFKHIQRMLSGGSSVIAETGDSWFNYQKLRLPDGCGYEFQMQYGSMGWSVGALLGYAQGAPDKRVIACIGDGSFQVTAQDVSTMLRCEQRSIIFLINNGGYTIEVEIHDGPYNVIKNWDYTGLVDAIHNGQGRCWTARVATEEELTAAIATATGDDRKDCLCFIEVVVHKDDTSKELLEWGSRVSAANSRPPNPQ

SEQ ID NO: 3421 - protein, 61 aa, Zea mays
  misc_feature (23)..(23): Xaa can be any naturally occurring amino acid
  unsure (1)..(61): unsure at all Xaa locations
DGFVSLLSSDGPPKDDFRLPPDXTLVAPIKEGFENGKDLVVTVPFSMGEEQICPFKDVGPQ

SEQ ID NO: 3422 - protein, 87 aa, Zea mays
  misc_feature (43)..(43): Xaa can be any naturally occurring amino acid
  misc_feature (60)..(60): Xaa can be any naturally occurring amino acid
  unsure (1)..(87): unsure at all Xaa locations
MSAGSGSGDEDDDEGDLKNLGLSKDHAAVLEECFKTHHTFTSXQNAGLASRLGLRARKVXVWLQNRRARTKLKQTVVDCEYLRRWCE

SEQ ID NO: 3423 - protein, 212 aa, Zea mays
MYPFSYLQDLDDEPGATRRSAARSAKRCRTAEVHNLSERRRRDRINEKMRALQELIPNCNKVDKSSMLEEAIEYLKTLQLQVQMMSMGTGLCMPPAAMLLPAMQQQLLHHHPMAHFPHLGMGLGFGMGAAAGFDMLPFPCVAAGAHFPCPPGAMFGVPGQAMPSLPAAFAHMYGAGSGAGPAGQTEAADAAAPARPGEAEQGDQQVQHAKQT

SEQ ID NO: 3424 - protein, 146 aa, Zea mays
MQMTRLEDLTPAPSMEHSSRPTLGFPLGTALLLLVIFALSGMFSCCYHWDKLRALLRSRHPDMFLEAEEHTAVSVASSSPPRKAVSGHKLERSGEERGCARYYYAWRQGPQVLGDGEAQPSRPRSSSREDHRMSGSSGTLRQYLYT

SEQ ID NO: 3425 - protein, 75 aa, Zea mays
  misc_feature (35)..(35): Xaa can be any naturally occurring amino acid
  misc_feature (56)..(56): Xaa can be any naturally occurring amino acid
  unsure (1)..(75): unsure at all Xaa locations
SPNPPPQSPTLAPPQASARNPRAHPRVRDDLRLPXDETLVAQIKEGFESGKDLVVXVQSAMGEEQICALKDIGPK

SEQ ID NO: 3426 - protein, 322 aa, Zea mays
MSSEAETQQPPAAPAAALSAADTKPGSTGSGAGSGGPGGLTSAAPAGGDKKVIATKVLGTVKWFNVRNGYGFINRNDTKEDVFVHQTAIKKNNPRKYLRSVGDGETVEFDVVEGEKGAEAANVTGPGGVPVQGSKYAADRNHYRRYPRRRGPPRNYQQNYQNSESGEKNEGSESAPEGQAQQRRPYRRRRFPPYYMRRPYARRPQYSNPPVQGEVMEGADNQGAGEQGRPVRQNMYRGYRPRFRRGPPRQRQPREDGNEEDKENQGDETQGQQPPQRQDRRNFNYRRRRPENPKPQDGKETKAADPPAENSSAPEAEQGGAE

SEQ ID NO: 3427 - protein, 103 aa, Zea mays
  misc_feature (32)..(32): Xaa can be any naturally occurring amino acid
  misc_feature (67)..(67): Xaa can be any naturally occurring amino acid
  unsure (1)..(103): unsure at all Xaa locations
TVVEANTSYTGNHFHAKCHFGAVDIFNRKKLXYIVPSSHNCDIPHVNRTDYQLIDISPNGFASLLTXDGTTKDDLTLPTDETFVAHIKEGFESGNDLLVTVHP

SEQ ID NO: 3428 - protein, 78 aa, Zea mays
  misc_feature (26)..(26): Xaa can be any naturally occurring amino acid
  unsure (1)..(78): unsure at all Xaa locations
MAAAARHRGTVKWLNDTKGFGFIYPXDGSEDLFVHQSLIKSEGLRSLAEGEEVQFSNFDGDYGPSKGGPTNHRSGCIQ

SEQ ID NO: 3429 - protein, 80 aa, Zea mays
NGTIKEDLKLQTDETLGAQIKEGFKGGKDFVGTVQSAMGEEQICPFKDFVPNKLLFFCKLNLTFSKLKSKIKCISKGLFT

SEQ ID NO: 3430 - protein, 310 aa, Zea mays
MCGGAILANLREPAPRRLTERDIWQQKKKLKRGGGGGRRSFAAEDDEDFEADFEVFEADSSDSDLELREGTDDDVVEIKPFPAKRTFSSPRVRTMTSAVARSAKRKRKNLYRGIRQRPWGKWAAEIRDPQKGVRVWLGTFNSPEEAARAYDAEARRIRGKKAKVNFPDAPAVGQKHRSGSASAKASKSSFGQKPIVKGSNSFGCSDLGWENDTKTPDITSIAPISTIAEGDESAFVDSNSNSSFVLPALENSAVDLTDGLTDLESYMRFLLDGGPSDSVDSLLNLDGSQDVGSDMDLWSFDDMPIVGDFF

SEQ ID NO: 3431 - protein, 618 aa, Zea mays
MAMATTSPATVQPSSYKHTSRGAARCCPPPLLSWKTRSFGQQVTTRATAASSRGQPAGVALAGGEEGDSIRRLQNGSDVRGVALEGEKGRAVDLTPLAVEAIAESFGEWLREEELRLRGQEPEQLRVSVGRDPRLSGPRLSAALFAGLARAGCSVFDMGLATTPACFMSTILPRFNYDGSIMMTASHLPYTRNGLKFFTKRGGLTSGDVENICDRAAHKYVARKTGVGGGGRGTPPVVMRVDLMSAYAQHLRDIIKQRVAHPTHYDTPLRGFKVVVNAGNGCGGFFTWDVLEKLGADTTGSLHLEPDGRFPNHIPNPEDATAMSLTRGAVLAQGADLGVVFDTDVDRSGVVDAGGAAINGDRLIALMSAIVLGEHPGTMVVTDARASDGLTRFVESRGGRHCLYRVGYRNVIDKGVQLNADGVETHLMMETTGHGALKENYFLDDGAYMVVKIIIEMVRMKLAGVEGGVGSLIRDLQEPAESVLLRMDVMGEPKDAKERATHAVEAFKNYIQEDKLFGWVLDDCGDCSVAEGCLMDTNNDPIDVDAHMYRAKLYDENQRAVGMVHIRQSVHNPNIALNMQSYAPGGCKSMAKDLLERFLLASGLNEFVDISQVEKFVQ

SEQ ID NO: 3432 - protein, 77 aa, Zea mays
  misc_feature (5)..(6): Xaa can be any naturally occurring amino acid
  misc_feature (8)..(10): Xaa can be any naturally occurring amino acid
  unsure (1)..(77): unsure at all Xaa locations
GCWRXXRXXXTVKWFNDTKGFGFISPEDFSEDLFIHQSSIKSEGFRSLAEGEEVEFSVSDGDDVLTKAHYMTSPYKS

SEQ ID NO: 3433 - protein, 217 aa, Zea mays
MMERVEDLGLSLSLSSSLASPRTHHVATMLLRAPEKRFLEMPLLLPAKRTTEVTGEDGLRGGSDEEDGGCGIDGSRKKLRLSKDQSAVLEDSFREHPTLNPRQKAALAQQLGLRPRQVEVWFQNRRARTKLRQTEVDCEYLKRCCETLTEENRRLQKEVQELRALKLVSPHLYMHMSPPTTLTMCPSCERVSSSNGNSAAATAAALEYPSRGPSLRV

SEQ ID NO: 3434 - protein, 471 aa, Zea mays
  misc_feature (265)..(265): Xaa can be any naturally occurring amino acid
  unsure (1)..(471): unsure at all Xaa locations
YLTILVGTWNQLLEDPAGKKESPCARWLRRQQATWARRRWRYPWRWRTATTTRRRGTMWTASAHIITAVIGAGVLSLAWAMAQLGWAAGTAMMLLFAGISYYTSTLLAECYRCGEPGTGKRNYTYTEAVRAILGGAKFKLCGVIQYANLVGIAVGYTIAASISMLAIKRADCFHDRGHRNPCRSSSNPYMILFGAVEIVFSQIPDFDQIWWLSIVAAAMSFTYATIGLALGIAQTVANGGFKGSLTGVNVGDGITPMQKDTIKAXPPPSEVTVMKKATMVSVATTTVFYMLCGCMGYAAFGDDAPDNLLTGFGFYEPFWLLDVANAAIVVHLVGAYQVFCQPLFAFVEKRAAARWPDSRFMTRELRLGPFVLGVFRLTWRTAFVCLTTVVAMMLPFFGDVVGLLGAVSFWPLSVYFPVEMYKAQRRVRRWSTRWLCLQTLSAVCLLVSIAGAVGSTAGVINAVNLHRPFSG

SEQ ID NO: 3435 - protein, 276 aa, Zea mays
MCGGAILANLREPAPRRLTERDIWQQKKKLKRGGGGGRRSFAAEDDEDFEADFEVFEADSSDSDLELREGTDDDVVEIKPFTAKRTFSSDGLSTMTSAVARSAKRKRKNLYRGIRQRPWGKWAAEIRDPQKGVRVWLGTFNSPEEAARAYDAEARRIRGKKAKGSNSFGCSDLGWENDTKTPDITSIAPISTIAEGDESAFVDSNSNSSFVLPALENSAVDLTDGLTDLESYMRFLLDGGPSDSVDSLLNLDGSQDVGSDMDLWSFDDMPIVGDFF

SEQ ID NO: 3436 - protein, 448 aa, Zea mays; identical to SEQ ID NO: 486

SEQ ID NO: 3437 - protein, 302 aa, Zea mays
  misc_feature (211)..(211): Xaa can be any naturally occurring amino acid
  unsure (1)..(302): unsure at all Xaa locations
MCLLREMEDHSVHPKSKSNHGSLSGNGYEMKNPGHEVCDRDSSSESDRSHPEASAVSESSLDEHTSTQSDNDEDHGKDNQDTLKPVLSLGKEGSAFLAPKIDYNPSFAYIPYTADAYYGGVGVLTGYAPHTIVHPQQNDTTNSPVMLPAEPAEEEPIYVNAKQYHAILRRRQTRAKLEAQNKMVKGRKPYLHESRHRHAMKRARGSGGRFXLNTKQQPQEQNQQYQASSGSMCSKTIGNSVISQSGPICTPSFDAAGASAASQDRGCLPSVGFRPTANFSEQGGGGSKLVVNGMQQRVSTIR

SEQ ID NO: 3438 - protein, 523 aa, Zea mays
  misc_feature (496)..(496): Xaa can be any naturally occurring amino acid
  unsure (1)..(523): unsure at all Xaa locations
MDPEVRERVLQGNTNLLINTFQEMKLFALNVMSIFGEKEMRYIEELKQCYMSLEKGFHSMTPVPARAAVRVRPPVPGLHPGQRKTLTDAQISDNVIDVMFVAREATATVLTWMFKFLDDHTAFLKAIIEGVKAFERDLIAKANSFVHDNGVSELYHLAPIVCASVNGKPCMWVCTMTSMVDELVVSEEVDEVLNALPNRQPWPPPMHSNCVASIADIHTEEISPERKLVAEGLGHDQRTSEVDLLPGGLKAQTISILVGDELGDYARARGFEIFDKFPRALDMAAANVGESTSGGSSSSGADAGGGFECNICFELPQEPIVTLCGHLFCWPCLYKWLRIHSHSPECPVCKAVVEEEKLVPLYGRGKDRVDPRSKNVPGAADIPSRPAGQRPATAPQADPNNAHFPNAANPANPWFMGGGGGGIPLANARWGNYTFSAAFGGLFPLLSFQVHGFPDATAYGQPAGFPYGYGHGHAFHGGHAGAHAHAAAAAPRARAXQQQQADVYLKALLILVGVLVIASLVTF

SEQ ID NO: 3439 - protein, 914 aa, Zea mays
MAAAFSAAILFHLLLLLFSPSAAQPGFISLDCGGARDHTDAIGIQWTSDASFVSGGQAAQLLVQNGLQQTQQQLTTVRYFPADNRKHCYTMNVRNRTRYLVRATFLYGNFDNSNVYPKFDISLGASPWSTIVVDDATTPVVEEAIILAAAPTLSVCLSNASTGQPFISTLELRQFNGSLYYTTDETRFFLGLSARINFGAGSNDSVRYPDDPFDRIWESDSVRRANYLVDVAPGTERISTTKPIFVGTNEEPPEKVMQTAVVGQDGSLNYRLDLEGFPANAWGVSYFAEIEDLAPNETRKFKLEVPGMPALSKPTVDVEENAQGKYRLYEPGYTNLSLPFVFSFGFRKTNDSSKGPILNALEIYKYVQITMGSQDANIMASMVSRYPQESWAQEGGDPCLPASWSWVQCSSETSPRIFSITLSGKNITGSIPVELTKLSGLVELRLDGNSFSGQIPDFRECGNLQYIHLENNQLTGELPSSLGDLPNLKELYVQNNKLSGQVPKALFKRSIILNFSGNSGLHIVSNGISHTIIIICVVIGAVVLLGVAIGCYFITCRRKNKSHEDTVVIAAAPAKKLGSYFSEVATESAHRFSLSEIENATDKFERRIGSGGFGIVYYGKLADGREIAVKLLTNDSYQGIREFLNEVTLLSRIHHRHLVTFLGYSQQDGKNILVYEFMHNGTLKEHLRGADNEKITSWLKRLEIAEDSAKGIEYLHTGCSPTIIHRDLKSSNILLDKNMRAKVADFGLSKPAVDGSHVSSIVRGTVGYLDPEYYISQQLTEKSDIYSFGVILLELISGHEPISNDNFGLNCRNIVAWARSHIESGNIHAIIDESLDRGCYDLQSVWKIAEVAIMCVKPKGAQRPPISEVLKEIQDAIAMERVLVSNCSNRMGSGSVEQNGGASFDELLMQPGLR

SEQ ID NO: 3440 - protein, 122 aa, Zea mays
  misc_feature (44)..(44): Xaa can be any naturally occurring amino acid
  misc_feature (78)..(78): Xaa can be any naturally occurring amino acid
  unsure (1)..(122): unsure at all Xaa locations
LGPPGVMALIKDSKAAPGVRALQDFFKMLTKKSARACYGPKHVXFALQQFAIQTFLKTETLFWNAAIFSRQRYVKLVXNVKKKSGPVPIFSSMHVSGEQLGQLTGKTGKLRFPLPEIKDMEL

SEQ ID NO: 3441 - protein, 409 aa, Zea mays
MAMEEPPQLFLCPISMELMEDPVTVSTGVTYDRRSIERWFFKYGKTTCPATMQRLNSFGLTPNHTLKRVISTWLDRASSSSSSTPLRNNLAREKLPSLLASIEATPFKVTALKNLRCCMDGDVAAQEDFVAYGGIQMLGRVMTQALAESCAGGDFSAFRTCEEAGAVLATLPLSDDASVELVLKPECMKPVVAVVQRGSAESRLHAMAILAKISSASGADRDWTPGVDVEDLVKSLLELLSDGASAKLSSRALDVLLDVMARSRGARRAKAVEVGAVCVLVELLPDASRRVAERALLLLKRMCKCPEGRLAFADHALAVSAVARTMLRVSGLASRLAVSVLWLVACAVTPAERVLDDMLMSGGVAKLLALLQVENSASTKEKAAKLLRMHGAFWRQYPCFPTGATPRGC

SEQ ID NO: 3442 - protein, 413 aa, Zea mays
MEEPPQLFLCPISMELMEDPVTVLTGVTYDRSSIERWFFKYGKATCPATMQRLNSFDLTPNHTLKRVISTWLDHASSPSSSSSSTPLCNKLEREKLPSVFASIEATPFKVTALKNLRRCMDGDVAAQKDFVAYGGIQVLGRVMTQALAESCAGGDFSSFRTCEEAGAVLATLPLSDDASVELVLKPECMKPVVAVLQRGSAESRLHAMAILAKISRAIGADRDGTPGVDVDDLVKSLLELLSDGASAKLSYRALDVLLDVTARSRGARRAKAVEVGAVCVLVELLPDAERRIAERALLLLKRLCKCPEGRLAFVEHALAVSAVAQTLLRVSRLASGLAVSVLWLVACAVTPAERVLDDMLMSGGVAKLLALLQVENSASTKEKAAKLLSVHGAFWRQYPCFPTDLRDYLKFLN

SEQ ID NO: 3443 - protein, 571 aa, Zea mays
MTSTTPGTFGTLANSGPVALSFPTTTSFASFLGGGSSPSRIMDSGGGVGLSKFKAMTPPSLPLSSSCPPPPQSYLHAFSGLLDSPILLTPSLFPSPTTGAIPSEPFNWMGTPENDLSGSGGVEAEQRQQYTDFAFQTAAAETSTIITGAAHTASFPQSSVLMPPSLGDSYSGEMLQQQPPWTYQEPTAQFEAPAAQAGNMFGTGGGYGAAPGFREQRQSHRPSSDDGYNWRKYGQKQMKGSENPRSYYKCSFPGCPTKKKVEQSPDGQVTEIVYKGTHNHPKPQSTRRGASSAPASSASYVVQSASDAVMPEHSWGALSGTPVVTPENSSGSFGGDGDEVNGMSSRLGGSFGADDLDDDEPDSKRWRKDGGDGDAAGCSVSVASNNRTVREPRVVVQTMSDIDVLDDGYRWRKYGQKVVKGNPNPRSYYKCTGAGCLVRKHVERACHDTRAVVTTYEGKHNHDVPPARGSASLYRAALAAQMPHQQAASYQGGLVRTDGLGVGASSQGGPMPAAERGSFALSGFGDPVGTAYSYYTNHHQEQEQQQPNQAMRYAKDEPQDCMSFFEQQLLF

SEQ ID NO: 3444 - protein, 243 aa, Zea mays
MAAQQPRALTVHHHTRRHLVLIVLTVAATAAARAASAHHTAAPAPRAAESPSPAVASFVRARCAATLYPALCYDCLLPYASEVQENPARLARVAADVAAARLHALCARVKDILRHGAPEPNEGGGGGRPSEAAALRDCASTISGAADLARQSSAELTKLEMDLDAAASSAAGGGTSDRRKARWEVSNAKTWLSAAVTNEGTCADGLAEAGAADSPAGKEVAAGVAAVQQCTSNALALVNGIPL

SEQ ID NO: 3445 - protein, 375 aa, Zea mays
MELGKPLSAHRCSYTATYTHCSIGFSPRVVRTSWIRAAAEGGDGGADRRRRGASFAADGPRVVEVAAAPVATSGGAAGAAGSAGFGARDAELAMWDKLGAVVRLSYGIGIYGAMALAGRFICQMAGIDCTGGFHPSLTALVEGLGYAAPPIMALLFILDDEVVKYSPHARAIRDVEDEELRSFFCGMSPWQFILIVAASSIGEELFYRAAIQGALADIFLRSTELMKDARGIASLSGIVPPLVPFAQTFAAVITAALTGTLYYVATTPKDPTYVVTPAMRSRTGRENLKKLFAAWYERRQMRKIYSPLLEGILAFYLGFEWIQTDNILAPMITHGIYSTVVLGHGLWKIHDHRRRLRQRIQKVRSEGSSSADDTL

SEQ ID NO: 3446 - protein, 360 aa, Zea mays
MDMDMAMMGFDEDLDQVLAAMGPADSSATSSAPNAAAPAPPLAVVPAGSSDDEEAAAADSADDLRRGPWTVDEDILLVNYIAAHGEGRWNSLARSAGLKRTGKSCRLRWLNYLRPNVRRGNITAEEQLLILDLHSRWGNRWSKIAQQLPGRTDNEIKNYWRTRVQKHARHLRCDVNSAHFRHIVRHVWMPRLRERAQAGGVQAPATTTASAPPACYNYCGSQHLVQQQGAHRGVTAASEAHHHHQYYSEPAGPTSAATALSPDDASSALRSSSLRADDASHYTAAYTYTSAATATPTTNDQGCEQTTTDDDVFAGSTTSELLVTATGGPDDEYSSMIGLQLQDFGFEDFEYGLWSLDDLC

SEQ ID NO: 3447 - protein, 542 aa, Zea mays
MSQTPSPLAPDPSSLSPAPVTGGGWTRAAARRRRRQQQQTTSSGGGATTSKTSTSGEVCSRPVPVHPCTLVPTFRRSVEPLSGPLLVVPLPGTVWTATAHIVTAVIGSGVLALAWSVAQLGWVAGPLALAGFACVTYYTSTLLAGAYRAPHPVTGHRNRTYMDAVRSYLSPREVFMCGVAQYVNLWGTMVGYTITATISMAAIRQADCLRRDGAGAGARCDAPGTVLMLAFSVVQVVLSQFPGLEHITWLSVVAAAMSFAYSFAGLGLSVGHWVSRGGGGLGGRVAGAAAASSTRKLWNVLLALGNIAFAYTFAEVLIEIQDTLKSPPPENRTMKKAAMYGIGATTIFYISVGCAGYAAFGSNAPGNILAAGGLGPLWLVDIANMCLILHLIGAYQVYAQPVFASVERWAASRWPEAKFMSSAYTVSVSIPLLQRGSVTVAPHKLVLRTAIVGATTAVALAIPFFNAVLGLLGAFSFWPLTVYFPISMHIAQGKIARGTKWWCLLQALSMVCLVISVAVGVGSVTDIVDSLKASSSPFKIVG

SEQ ID NO: 3448 - protein, 281 aa, Zea mays
MSSWRLPRPVVGLGAKRIRRGSSVRLELEAQKTSRTQQNSSLTSLPLPLPLPLCGPNNLSLSLSLSLFFLSALQTISPSPSLLSKTNETKQETEKSPSPVAVAVAVAARIMSAAAAAEVGKEKGAATPGPGPGPGGACELCGAAARVYCGADEATLCWGCDAQVHGANFLVARHARSLLCRGCARPTPWRAAGPRLGPTVSLCVRCVRRGPAGAVGGGGDEEMGGAGDGDAEDDDDEDDDSEEEEEEEEEEGEGENQVVPRTEDAEATPAPVGSSTSSNSR

SEQ ID NO: 3449 - protein, 398 aa, Zea mays
MVVAVASCQSSSTPLSPYPSSPSLRSFIRDAPPYSTQTPPQVQTAGVGGGGGNGKISPAVLFIIVILAVIFFISGLLHLLVRILMRKQHGRGATMGESAPSPPRTGARAAAMDRQLQELFHLHDSGLDQAFIDALPVFAYREVIGGNKEPFDCAVCLCEFDGEDRLRLLPVCGHAFHLQCIDTWLLSNSTCPLCRGTLFVPGMTVDDLLFDDFDERLEEPLPEECEDGHQVSRQKPMDEEQPMAEKRVFPVRLGKFKSVANQGAIGGVVVNGNEAGIVSKEAGESSSSSLDARRCFSMGTYQYVLGVSELRVALQTGHGRNGASSRFKGRVAGLSSVNADIMEGKRICARSKGESFSVSKIWQWSSLNGKLPAPPDTCSDTGSLAWMKRNAAGDKSNM

SEQ ID NO: 3450 - protein, 406 aa, Zea mays
  misc_feature (238)..(238): Xaa can be any naturally occurring amino acid
  unsure (1)..(406): unsure at all Xaa locations
MDMDMDMAMAMVGFDEDMDQVLAAMSPAGSSATSSAPTAAAAPPAVVAAGSSDDDEAGAADLRRGPWTAEEDILLVNYIAAHGEGRWNSLALSAGLKRTGKSCRLRWLNYLRPNVRRGNITAEEQLLILDLHSRWGNRWSKIAQHLPGRTDNEIKNYWRTRVQKHAKQLRCDVNSAHFRHIVRHVWMPRLLERAQADARCGGVQAPATHTASAPPAGYNYYDDGRPTLAAATGKRPPXVPAASEAHHHHQYYSEPAGPTAATATALSPDDASSALRPSSSLTADDASHYAAAYAYTSAATATPTTDDQQGVLHHCGADARTGPTPSDAAGDDDVFAGTTWSELLATTATGGPHEDCSSMSMIGLQLQDFGIGYFEGGLWSLDDLSLEQPCTLSSPADAYHHHHACS

SEQ ID NO: 3451 - protein, 338 aa, Zea mays
  misc_feature (43)..(43): Xaa can be any naturally occurring amino acid
  misc_feature (63)..(63): Xaa can be any naturally occurring amino acid
  misc_feature (253)..(253): Xaa can be any naturally occurring amino acid
  unsure (1)..(338): unsure at all Xaa locations
RRARAAIRSGRFARDSVFQVRWFWHFGPAAMASGGIGPRDGCXVCGVARTPMGGFLGALAPLXRTKLGSIGIQAALERANGDPALGQEGYFGNGLRANLGQAPARQAALGAGIPNSGGCTTGNKGCASGMKATMVAAQSIQLGINDIGVAGGMESMSNAPKYIAEARKGSRFGHDTLVDAMLKDGLWDVYNDCAMGMCAELCADNHALTREDQDAFAIQSNERGIAAREEIIPVQVPVGRGKPPTLIERDESXISDGAAALVLVSGQKAQELGPQVLARIKGYADAAQAPELFTTTPALAIPKAIANAGLESSRVDFYEINEAFSAVALANQKLLGIP

SEQ ID NO: 3452 - protein, 494 aa, Zea mays
MAENNVVATYYYPTAAPAAMEVCGAELGQGKPDKCFDDDGRPKRNGTMWTASAHIITAVIGSGVLSLGWAIAQLGWVAGPVVMLLFSLVTYYTSSLLADCYRSGDPSTGKRNYTYMDAVNANLSGIKVQICGFLQYANIVGVAIGYTIAASISMLAIRRANCFHQKGHGNPCKISSTPYMIIFGVAEIFFSQIPDFDQISWLSILAAVMSFTYSSIGLGLGVVQVIANRGVQGSLTGITIGVVTPMDKVWRSLQAFGDVAFAYSYSLILIEIQDTIRAPPPSESTVMKRATVVSVAVTTLFYMLCGCMGYAAFGDGAPGNLLTGFGFYEPFWLLDVANAAIVVHLVGAYQVYCQPLFAFVEKWAAQRWPDSAYITGEVEVPLPLPASRRRCCKVNLFRATWRTAFVVATTVVSMLLPFFNDVVGFLGALGFWPLTVYFPVEMYVVQKKVPRWSSRWVCLQMLSLGCLVISIAAAAGSIAGIASDLKVYRPFKSY

SEQ ID NO: 3453 - protein, 384 aa, Zea mays
MMMMGEGVSVPPWSHHVPVSGVDAGVGGDEMTPYLLAALRQYLPCNDAGAAEADDEEAAAMAAGVDGYGCDEFRMYEFKVRRCARARSHDWTECPFAHPGEKARRRDPRRYHYSGAACPDFRKGGCRRGDACDFAHGVFECWLHPARYRTQPCKDGTACRRRVCFFAHTPDQLRVLPPTPQQSSASPRGAGALPESYDGSPLRRQAFESYLTKSIVSSSPTSTLLSPPKTPPSESPPLSPDGAAAAFRRGSWPGAGSPVNDVLASLRQLRLGTASSSPTGGWGGYPASAAAYGSPTAGGLYSLPSTPRATPTALATATASGYMPNLEPLDVSFGGDEEPVERVESGRALRAKVFERLSREGAVSCYPAAGTGGPDVGWVSDLIN

SEQ ID NO: 3454 - protein, 370 aa, Zea mays
MMMMGEGVSMPPWSHHVPVSGVDEGDEMTPYLLAALRQYLPCNDAGAEAEEDEAAAAAAAMAAGVDGYGCDEFRMYEFKVRRCARARSHDWTECPFAHPGEKARRRDPRKYHYSGAACPDFRKGGCKRGDGCDMAHGVFECWLHPARYRTQPCKDGTACRRRVCFFAHTADQLRVLPPTPQQQSSPRGAACSSPLAESYDGSPLRRQAFESYLTKSIMCSSPTSTLLSPPKSPPSESPPLSPDFRRGCWPGAGSPVNDVLASLRQLRLSRANSSPSGGWCGYPASAVAYGSPTGGALYGLSSTPRATAASCYMANLDPLDVSFGGDDEPVERVESGRALRAKVFERLSREGAVSGDAGGPDVGWVSDLIN

SEQ ID NO: 3455 - protein, 385 aa, Zea mays
  misc_feature (50)..(50): Xaa can be any naturally occurring amino acid
  unsure (1)..(385): unsure at all Xaa locations
MMMMGEGVSVPPWSHHVPVSGVDVGVGGDEMTPYLLAALRQYLPCNDAGXAEADDEEAAAMAAGVDGYGCDEFRMYEFKVRRCARARSHDWTECPFAHPGEKARRRDPRRYHYSGAACPDFRKGGCRRGDACDFAHGVFECWLHPARYRTQPCKDGTACRRRVCFFAHTPDQLRVLPATPQQSSASPRGAGALPESYDGSPLRRQAFESYLTKSIVSSSPTSTLLSPPKTPPSESPPLSPDGATAAFRRGSWPGAGSPVNDVLASLRQLRLGTASSSPSGGWGGYPASAAAYGSPTAGGLYSLPSTPRATPTALATATASGYMPNLEPLDVSFGGGDEEPVERVESGRALRAKVFERLSREGAVSCYPAAGTGGPDVGWVSDLIN

SEQ ID NO: 3456 - protein, 660 aa, Zea mays
MAEGSWTPTAELPLRQDPAVNDDLPQVVVQEKQHDGGPAARTAMPTATATRDGSVGWNGNPCRRDRSGGWFAGFLMLVLDFFFRCVIVWHGDDGRRAANQALVTFAVNCVGTNLVTFMSVVMRLDNADAANKANNWAGTTYVFSIVGALVSDSYWGRYKACTIFQLIFLAGLVELAVACHVFLDKSCHFGGGGGGRQEHCRPPTTAQSLVFYVSIYQIALGNGAYQPAVTTFGADQFDETDARERRSKAAFFGYFFVANNLGGVLAVTALAYMEDEGQWVLAFWIATAAALLGFLLFAVGTIRYRHFLPSGNAVVSVCQVVVAAVRNRRVRATVRAQDMYDPDTDGDRGKKGVRKMVHTPEYRCLDKAAVIKDPASAFRAPAGQPQGHSSSKPNPWRLCTLTQVEELKCILRLVPIWLCSILYSTSYSQMSSVFIEQAQTMDDSLSKLTIPPAGMDVFEILGVTAFVFIYRFCIVRVMAKISHEPTELQRMGTGLVISAAAMVASGVVEQQRLARATAGVDASSSLSILWQIPQYLLIGASEVFMYVTMTEFFNDQLPEGLRSLGSAMSVASMSAGSFASSLLVTLVMAITCRGGRPGWIPQDLNKGHVDWFFYLIAALNAVDLLAFVVFAKRYRPAPVIIHGEDETGGVEKAQDAEECI

SEQ ID NO: 3457 - protein, 441 aa, Zea mays
MPDVSPLLPPGKPPATTARFARCASSANDELRSFRACLAWLCVDHSSSPRVAAVGSWAVFLLLAVAAPAAVRLLGTAPPRPFDGQVQVSLTLAASLAYVCLRALLHRAGGLRRLLHLDSLRRDSEDVQAGYAAQLARSFRVLACFVLPCALAEAAYKAYWYRAAAAAYGSPWWWAAAACAVEVASWVYRVALFFMVCVLFRVICYLQILRMVGFAREFGRFADVATVLQHHRRIREQLRKISHRYRKFIVCSLVLVSASQFAALLATTRPHAIVNLATAGELALCSVSLVAGLLMCLYSAAKITHKTQAMTSVAAAWHADATVHAFDNDQENPDPDLPPTAGYLAPANAYRVAAGDESGSGGDDDDDSRSECSSLDDPKYVPFQANNISFQKRQALVTYLENNRAGITVYGFVVDRAWLHALFMIEFSLVMWLLGKTVGIS

SEQ ID NO: 3458 - protein, 599 aa, Zea mays
  misc_feature (202)..(202): Xaa can be any naturally occurring amino acid
  unsure (1)..(599): unsure at all Xaa locations
MLRETNLSPPSHRAVLALAAAPLPRLPPAPAALSPAPPAMGLLTSAELNYLVFRYLQESGFIHAAFTLGYEAGIHKCGIDGNAVPPGALITIVQKGLQYIELEASSDENYDEVERDFALLEPLEIITKDVEELQQIVKRRKIERSQTELEKDKGKEKERNEEHERRPCGEREREQHEKEKEQVRDKDKSEKDRDHDKEKEKXERERQHAERIDKVKHEDDSLAGGGRTPMDVSTTAQEISNTDVTVLEGHSSEVFACAWSPTSSLLASGSGDSTARIWTIPYGPCGSDMQPYSPGVHVLKHFKGRTNEKSKDVTTLDWNGEGTLLATGSYDGQARIWSRDGDLKQTLFKHKGPIFSLKWNKKGDFLLSGSVDKTAIVWDTKTWECKQQFEFHSAPTLDVDWRNNNSFATCSTDNMIYVCKIGEQRPVKAFSGHQSEVNAIKWDPTGSLLASCSDDWTAKIWSMKQDKCVFDFKEHTKEIYTIRWSPTGPGTNNPNQQLLLASASFDSTIKLWEVEQGCLLYSLSGHRQPVYSVAFSPDGEYLASGSLDQCLHIWSVKEGRILKTYRGTGGIFEVCWNKEGSKIAACFSNNTVCVMDFRM

SEQ ID NO: 3459 - protein, 496 aa, Zea mays
MASSTGSLEHGGFTFTPPPFITSFTELLSGAGDMLGAGADQERSSPRGLFHRGARGVPKFKSAQPPSLPISPPPMSPSSYFAIPPGLSPAELLDSPVLLHSSSNILASPTTGAIPAQRFDWKKAADLIASQSQQDGDSRAAAAGFDDFSFHTATSNAVRAHTTTTSLPSFEEQQQQVEKAAVPSSNRASGGGNGNTKLEDGYNWRKYGQKQVKGSENPRSYYKCTYHSCSMKKKVERALADGRITQIVYKGAHNHPKPLSTRRNSSGGGAAAEELQAGNSSLSAAAAAGCTGPEHSGATAENSSVTFGDDEAENGSQRSDGDEPDAKRWKQEDGENEGSSAGAGGKPVREPRLVVQTLSDIDILDDGFRWRKYGQKVVKGNPNPRSYYKCTTAGCPVRKHVERASHDKRAVITTYEGKHNHDVPVGRGAASRAAAAAAAGSGALMATGGGQLGYQQHQRQQPYTLEMLSSGSYGGGGYAAAKDEPRDDLFVDSLLC

SEQ ID NO: 3460 - protein, 156 aa, Zea mays
RQCVIVSPDAGGAKRVTSIADRLNVDFALIHKERKKANEVASMVLVGDVKDRTAILVDDMADTCGTIVHAVTKLKESGASKVYAILTHGIFSGPAIPRVNSACFEALVVTNTIPQESNMLQCPKIQCIDVSMILAEAIRRTHNGESVSYLFSHVPM

SEQ ID NO: 3461 - protein, 444 aa, Zea mays
  misc_feature (268)..(268): Xaa can be any naturally occurring amino acid
  unsure (1)..(444): unsure at all Xaa locations
MDLASQYQRLFAPSVFLPPMAPPPPRLASSSCFSAFSNYQSLPTLAPAVGAGSHLARSVPKPPLFSVDSLAPLPYSTGPAARAAAGAAVPRSPPSPGSSELQGPSASGLPPRGAGHRRSRSDFLVGFSGANQLPLPMTPAAGAYRPRDASALEELFRSYRDPNLGSPGDNNNERNDHLSRQLTGQRAWSPGDSSDNEAESWAVSGSADTSASHPRHCRSLSVDSIMANLNFGGLDQVSLRVPPLSPVAGASASLSRTGTGASGGAVAXASSELTNGEFSEAEMKKIMANDRLAEIALSDPKRVKRILANRISAAKSKERKVKYMGELERKVRVLQTETNTLSSKAALSQRECEALRTLNNEMKIRLQAMEQQAQLKDALNEALTAEVQRLKQMAGEASDLHVPNGSHHHMNRQILEQLQQVQKRPSEAQQAQQQPQEPEQFKAQ

SEQ ID NO: 3462 - protein, 181 aa, Zea mays
  misc_feature (25)..(25): Xaa can be any naturally occurring amino acid
  misc_feature (54)..(54): Xaa can be any naturally occurring amino acid
  misc_feature (63)..(63): Xaa can be any naturally occurring amino acid
  unsure (1)..(181): unsure at all Xaa locations
PTRPPTRPAPHGTPGAESDEEIRRXVPEMGGASASASSGAGADERPKGEDGKQXAGGGGGAAXAGGKKRGRTAGDKEQNRLKRLLRNHVSAQQARERKKAYLTELEAKAKGLELRNAELEQRVSTLQNENNTLRQVIDVSGKEFKFTWASGRGELCDIYEERQSGEDGNGLLLECGSTWRK

SEQ ID NO: 3463 - protein, 248 aa, Zea mays
MSCFQGLFFCPEAASLLLHNFCVYHITPQGHELGAAPISADVHVPSVDDLADQVADVLDFFSLGSVMCLGVTAGAYVLTLFATKYRERVLGLMLVSPVCKAPSWSEWLYNKLLDDRQGTNVWRFLQAINRRHDLTESLEKLQCQTLIFVGENSQFHADAVHMTTKLDRRYCALVEVQACGSLVTEEQPHAMVIPMEYFLMGYGLYRPSQQESSPRSTLSPFCISPELLSPESMGVKLKPIKTRISRNV

SEQ ID NO: 3464 - protein, 695 aa, Zea mays
  misc_feature (166)..(166): Xaa can be any naturally occurring amino acid
  unsure (1)..(695): unsure at all Xaa locations
GDEPEGSDSQRQRKRYHRHTPRQIQQLEAMFKECPHPDENQRAALSRELGLEPRQIKFWFQNRRTQMKAQHERADNCFLRAENDKIRCENITMREALKNVICPSCGGPPVAEDFFDEQKLRMENARLKEEVNHELTTTRCLRRRRLVAGLSVSLSVYCCIFYVSEXCASFSRVTGAQLDRVSSITSKYLGRPFTQMPPVPTMSVSSLDLSVGGMPGQGLGGPSLDLDLLSGCSSGLPYHMPAPVTEMERPMMVDMATRAMDELIRLAQAGEQIWVQGMPGDAREVLDVATYDSLYAKPGGAFRPPEINVEGSRDSGLVFLSAVALVDVFMDTNKWMEFFPGIVSKAQTVDVLVNGLCGRSESLIMMYEELHIMTPVVPTRELSFLRYCKQIEQGLWAVADVSLDGQRDAHYGVPSRSRRMPSGCLIADMSNGYSKVTWVEHLEIEHMLPINVLYRNLVLSGAAFGAHRWLAALQRACERFASLATLGVPHHDVAGVTPEGKRSMMRLSQRMVSSFCASLSSSPLQRWTLLSGTTDWDVLSHGNQVQEVSRIPNGSNPGNCISLLRGLNANQNSMLILQESCADASGALVVYSPIDIPAANVVMSGEDPSGIPLLPSGFAILPDGRPGSSGAGASSSAVPLAAAPPPPGCVVTVAFQILVSNLPSSRLNAESVATVNSLIGTTVQQIKAALNCAGP

SEQ ID NO: 3465 - protein, 785 aa, Zea mays
LVVRESPAPDRAMGAAPVLVLLLLVAAAALPRRASAATDAGDVSAINGLYVALGSPKLPGWSASGGDPCGESWQGVTCTGSSITSIIFNAANLGGQLGSLGNFTSITEINLSNNNIGGSIPEDLPVTLQNIFLSDNQLTGSIPMSLSELHSLTAMSLNDNHLDGKLPDAFDSLTGLVNLDISSNNFSGPLPPSLGSLTSLTTLHMQDNQLSGTLNVLQDLPLKDLNVENNMFSGPVPPKLLNIPNFKNDGNPFNTSIAPSTSPSSTPTGSRPTQTPSSSSSPSGSPPPSSAASNSSSGSTARNSNSPSSKKNKSSPLRTVGYVLLAIVLFIVLVLLVIFCLSKYQERQSRRDYSTSQLGRVHQRVEEPKSKQASVQSKHEAKKGSSEVPERKKPREINLAVPVAIEKPPEKRKERVINLERTESEIFAAAPPPPPPPPPLPPTPPPLPPRLPSPPPVEKVTVNPIVLPEKRVSTPPRTGPSTSATSFSVASLQQYTNSFQEQNLIRESRLGKVYLAELPEGKLLEVMKIDNANGRIPVDDFLELVARISDIRHPNILELVGYCAEYEQRLLVYNYFSRKTLHDVLHEGEDLDDPLSWNARLHIALHAAKALEYLHDTCEPPVVHQNFEPANVLLDNRCSVRVAECGLAQLMASGSVTQLSGRMRALLNYEAPEIHESEPFTRQSDVYSLGVVMLELLTGRKPYDSSRPRDEQHLVRWANSQLHDMESLSKMVDPSIRGECSVILLSRFADIISQCIQPGPEFRPAMSQIVQDLARIVGASGAVSE

SEQ ID NO: 3466 - protein, 135 aa, Zea mays
SVNAIAVLIDGSRKKLRLSKDQSAVLEDSFREHPTLNPRQKAALAQQLGLRPRQVEVWFQNRRARTKLKQTEVDCEYLKRCCETLTEENRRLQKEVQELRALKLVSPHLYMHMSPPTTLTMCPSCERVSSSNGNW

SEQ ID NO: 3467 - protein, 399 aa, Zea mays
MELASSYSAAEIPHYFLCPISLEVMRDPVTLATGITYDRASIERWLFTDGHATCPVTRRALAPAEMDATPNHTLRRLIQAWCAAHQVERFPTPRQPLDSCRVAALLDQGRHGGAAAALREIKAVIAESERNRRCVEATPGAVDFLASLVAKDSSADRSPSKRASSQQDADDGDSLGEEVLDSPTFMSSPAEDALGVLYSLKPSERSLAQIMEREGNFLDTLASVLRRPSYRTRAYGILLLKAMTEVMTPAQFMMVVLVVSDRVSSKAVRAALHVLCRLCPWGRNRVKAVQAGAVAALVELLLDEGGSRVTELAVVAIDHLCGCAEGRSDLVAHPAGLAVLSKKVMRVSAAATESAVRALHAVARHSPTPSVRQEMLAVGVVAKLLLVLQTNAGERAGLR

SEQ ID NO: 3468 - protein, 412 aa, Zea mays
  misc_feature (278)..(278): Xaa can be any naturally occurring amino acid
  misc_feature (310)..(310): Xaa can be any naturally occurring amino acid
  unsure (1)..(412): unsure at all Xaa locations
MASEMSKNVKALDEQEVTSQHSRAQTSDAAEEQQQQQQAVDPLARQSSIMSLTLEELQNSLCEPGRNFGSMNMDEFMANIWNAEEFQAATAGCNKEGAEREPVPVATTTGTGENGGGGGSGRGLVRQGSFALPPPLSRKTVEEVWAEISQGPADFQASAAPQPVAQPQAASGGGVAASGRQATLGEMTLEDFLVKAGVVRGAFAGHGHGVGMVPAGPMGMQHNAAPPMMYQVAAAAAPPPGAVYPVMGDGMGYHGGGYPGGVAVVPPPPPSQCVAAAXSPGSSDGMSAMTQAEMMNCIGNGGVVRNGGGXARKRDFPEDGCTEKTVERRQRRMIKNRESAARSRARKQAYTVELEAELNHLKEENERLRAEERTILLSKKKMLVEKMMEQARENVSAKKVGPGLRRWGSAMW

SEQ ID NO: 3469 - protein, 222 aa, Zea mays
MEEEGVGKSWLALGIGGGDLMKRNNRPPVQFDLLFPPQSVKEEGAASKKAEKGGGRKRLKVVTADEDGRQSPHGGPGPSDGSGAGARKKLRLTNEQSTLLEDTFRAHNILSNAQKQELARQVDLSARQVEVWFQNRRARTKLKQTEVDCEILKRCCESLTGENQRLRLELAQLQRSAAAAAEAGLYVQSSFPPLATATATASVCPSCDKIEQSRFIFCLVKE

SEQ ID NO: 3470 - protein, 193 aa, Zea mays
MGTMKRLVSTALAARGLLRSHGLPTTTSVMYQPAFQQFMNYSSPHGGDPNANTNSTTTRIAADPDTHQDFEPKSRISDMTLHDAIAQDIKENPVLIYMKGFPESPMCGFSALAVKVFQQYGVPVCGRDILGDLKLKECVKAHTNWPTFPQIFIKGEFVGGSDIILSLHQKGELKDLLGDIAQRDEQKVHAHDS

SEQ ID NO: 3471 - protein, 799 aa, Zea mays
MRIALPPSSLSRLLVVATSSSAPPSRGRSWSPSSSSCVRRWSRRWRMPAMGRSSRACSLLGSTHLLLLLLLSVGSAVAQNGSTWKTLSGKAPAVVAKGGFSGLFPDSSDYAYQFVGISSSPDTTVWCDVRLTKDGAGICLPSINMDNCTIIASVFPQGKKTYKVNGVSTAGWFSVDYTSTVLLQNVSLKQSVLSRTPAYDGLFQINPVENIFTLYKAPAVWLNVQHDSFYSQFKLSMRSYILSLSKQFIVDYISSPEVNFLTSISGRVSKKTKLVFRFLDERSIEPSTNQTYGSMLKNLTFVKTFASGILVPKSYIWPVTPDNYLLPYTSVVDDAHKAGLEIYAADFANDLTISYNYSFDPLAEYLFFIDNGAFSVDGVLTDFPITPSEAVGCFSNLNTSKIDHAKPLVISHNGASGDYPDCTDQAYEKAVADGADVIDCPVQVTKDGILICMSSVDLMDVTTVAKSQFASQVTTINSLKAGSGVFTFNLTWDDISKNLKPMISNPMSTYNLYRNPRNKNAGNFMRLSDFLTFANGKDLSGIMITVEHAAFMAEELGFGVVDAVIKALDDSGYSKQTAQNVMIQSTNSSVLVKFKQETKYNLVYMIEESVRDAAPSSLADIKKFADAVSVGTTSVFPETHYYLTNQTNKLVPTLKSAGLQVYVYVLMNEFASQPNDFFADATSQINAYVQSAKVDGVITDFPGTAHRYKLNSCTSMGKNMPLFMQPPQPGGLLSTILPDAQPPAAAPMPLLTDADVAEPALPPVSNTTTAASPSHAALRMRTHVLSIATLLMLCASLLI

SEQ ID NO: 3472 - protein, 492 aa, Zea mays
MVLSRSTPSSRRTPTGPLGGPSVASPALRVLTTVESAPKSRSAATSWTPTTRPRLYAGINISGINGEVMPGQWEFQVGPSVGISSGDQVWVARYILERITEIAGVVVTFDPKPIPGDWNGAGAHTNYSTESMRKEGGYEVIKAAIEKLKLRHREHIAEYIWIGGSGMDLRSKARTLSGPVTDPSKLPKWNYDGSSTGQAPGEDSEVILYPQAIFEDPFRRGNNILVMCDCYTPAGEPIPTNKRYNAAKIFSSPEVAAEEPWYGIEQEYTLLQKDTNWPLGWPIGGFPGPQGPYYCGIGAEKSFGRDIVDAHYKACLYAGINISGINGEVMPGQWEFQVGPSVGISSGDQVWVARYILERITEIAGVVVTFDPKPIPGDWNGAGAHTNYSTESMRKEGGYEVIKAAIEKLKLRHREHIAAYGEGNDGRLTGRHETADINTFSWGVANRGASVRVGRETEQNGKGYFEDRRPASNMDPYVVTSMIAETTIIWKP

SEQ ID NO: 3473 - protein, 388 aa, Zea mays
MQTAIEHACSVVECAATARAAMDMSHYIPDWSSSMGDTFAPLGGEDDDGLIELMWRNGHVVMQAQAPRKPPRPDDDEAAAAQAQAWFQYPVEERADLFSELFGEAQAAVGGARGEAARQSIRMMPPPPPPPRPAQAPREEKACPGDGGTATATDGAGSSVLTVVSSLCGSNGNHVQATAPGDVARARDVLMVTSSSTTRSRSCTTKSEQPGPGPGAARRSGKRKHNDATDAEDVGLECEPAQRTTTAKRRRAAQVHNLSERRRRDRINEKMKALQELIPHCNKADKASMLDEAIEYLKSLQLQLQVVWMGGGIAAAGVHQRTMVAAPGRPPHVASLPASAPDLYTRYLAVDHLPPPPLVPPPRTVELSKPLNIDEFYLYIIYAGILGC

SEQ ID NO: 3474 - protein, 271 aa, Zea mays
MEQGDPTPAASACNCDPAAAPPAWIPLHDHDDTLLQQLDAILLGMDDDDVATADDRCCSGWLSSSPSPSPSSSSEATTTASPPPSTREQHRRHPAKDDTALAGGGDEKRAVTTAAFIGVRKRPWGKFAAEIRDSTRKGARVWLGTFDTPEAAALAYDQAALAARGAAAVLNFPVERVVESLGALALAGAGSPVLALKRRHSKRTRRRKPSAVATTDGDGKDTMMKQPRRRQPAAAPRQCSGLPGAVPSYTTVAAVPPPPQQHATARGQSHT

SEQ ID NO: 3475 - protein, 194 aa, Zea mays
TDQTFSRGTMARSLSTALMRGLMRSSRASTSAAVSRPAIQQFMNYSSGLSGTPNANGDSVTTRVAADHDTHQDFQPTSKSSDMSFSDIVAQDVKEHPVVIYMKGYPDAPRCGFSALAVKVLQQYGVPISARDILSDLKLKESVKAYSNWPTFPQIFIKGEFVGGSDIILTMHQKGELKELLGDIAQKAEQSGSS

SEQ ID NO: 3476 - protein, 506 aa, Zea mays
MATCATDLAPLLGPAAANATGYLCSQFADTASAVDATYLLFSAYLVFAMQLGFAMLCAGSVRAKNTMNIMLTNVLDAAAGALFYYLFGFAFAFGTPSNGFIGRHFFGLQRLPRTGFDYDFFLYQWAFAIAAAGITSGSIAERTQFVAYLIYSAFLTGFVYPVASHWFWSADGWAAAGRTSGPLLFGSGAIDFAGSGVVHMVGGIAGFWGALVEGPRIGRFDHAGRSVALRGHSASLVVLGTFLLWFGWYGFNPGSFTTILKSYGPAGTVHGQWSAVGRTAVTTTLAGSVAALTTLFGKRLQAGHWNVVDVCNGLLGGFAAITAGCSVVEPWAAVVCGFVSAWVLIGANALAARLRFDDPLEAAQLHGGCGAWGVLFTGLFARQEYVEEIYGAGRPYGLLMGGGGKLLAAQIVQIVVIAGWVSCTMGPLFYALKRLDLLRISADDEMSGMDLTRHGGFAYEDPGDNAGVGEFTLKSAQNRVEPPAEQQPGVKFRNEFKNRDEVTCLP

SEQ ID NO: 3477 - protein, 805 aa, Zea mays
MAWAFVLVTSHEQRNHQLLSNPPVNLKQPKRRAEMVFQKRSSSELEASGGGQVAEMPRVPKSARGKRSVRKKEAQNPPQMSAFDLLATVAGKLLDEGVGSLGNMSAGAPALTACAKDVRVKKEQCDEEMKQFKHEVTDQDSCNESAILPHIVFQRAVNNARNEDPKAKSEAQDKESSMISCTKAELGCNFGVIADRWSPESVESGAFTGDAVASLMPPAPAGFHKNAPEMYNLLDSMDVDVKPPPLVSSDSTGEMPLYGDKVHRSTSLPRVSKGVGFFAVDRDDDDDKSSGCTHPSTTTNKDFRSNCTAEYSRVRKLLTSKYRKVAPARVYKSDLSYSDVDRKPSFRNKKMHYTRQRTQRSTFKRRKLFDRHSVLASEFGTAHGKGNTKKVTGRDSHAVSLEANKGTSSTPFQKSRGSNDCHVKLKIKSFKVPELLVEIPESATVGSLKKTVLEAVTAILGGGLRVGVLHHGKKVRDDNKTLIQAGIGQEDMLDNLGFSLEPNCTQNPQVQAPEDISFLETIDTAEPLARIAPADSSSKHGEVDLSQEFALTPLAMNYQGSDHDSVHSPGGVSSPDKVSTNSRALVPVPAADPNAGAIVPANKSKRSPEQGQRRIRRPFSVAEVEALVLAVEKLGTGRWRDVKLRAFDNAKHRTYVDLKLVLFPRISFVVWLGHVSFSTRMLHLETKETHSCTSTNPIRTLEKKQVQLRDQITFPLLDWKLLGCFALYIAAFSGNGLTVSKLWCEQDKWKTLVHTASISPQQRRGEPVPQELLDRVLAAQAYWSQQQAKLQPKTPPLLAEARLLT

SEQ ID NO: 3478 - protein, 329 aa, Zea mays
MASSSEPSALPTLLVFRVRELRFLAALRERYRVLDFFTSGSPLAAFLAAAAGGADPPRALVTVWGDSVRVDAALLDAVPSLRFVHSTGAGLDHIDLGECARRGVGVASSGTVYSTDVADHAVGLLVDVLRRVSAADRFVRRGLWPLHGDYPLGSKLGGKRVGIIGLGNIGTLIAKRLAAFGCVICYSSRKPKESVSYRYFPSVHDLASESDVLVVACALTRETRHIVNKDVLAALGKDGVVVNIGRGPNIDEAELVAALKEGRIAGAGLDVFDKEPKVPAELFSMDNVVLTHHVAVFTTESRSDLRDVTISNLEAFFAGRPLLNPVLHS

SEQ ID NO: 3479 - protein, 231 aa, Zea mays
MAPQSLDLGLSLGLGVAAFQPSFCHPAGNAAAEREASPTAADERERRCSPAGSPTSSGSGSGSGKRVAAERSAGSGDEDDDGGARKKLRLSKDQAAVLEECFKTHHTLTPKQKAALASRLGLRARQVEVWFQNRSARTKLKQTEVDCEFLKRCCETLTEENRRLQREVAELRALKLVAPHHYARMPPPTTLTMCPSCERLASASASADQAGRAGPCWGPLPVFVDGPARRP

SEQ ID NO: 3480 - protein, 75 aa, Zea mays
  misc_feature (37)..(37): Xaa can be any naturally occurring amino acid
  misc_feature (48)..(48): Xaa can be any naturally occurring amino acid
  unsure (1)..(75): unsure at all Xaa locations
HVNRPEDQLINISEDGFVSLFTSDGDAKDGLRLPTYXTLVAQNKERFXNGKDLVVTVQFAKGEEQIWALKDFGPK

SEQ ID NO: 3481 - protein, 363 aa, Zea mays
  misc_feature (44)..(44): Xaa can be any naturally occurring amino acid
  unsure (1)..(363): unsure at all Xaa locations
MCGGAILSDIIPPPPPRRVTAGHLWPESKKPRRAASGRRGAPRXQHEQEEDFEADFEEFEVESGESELESEDEPKPFAAPRSALARGGLNTGAAGVDGPAANSVKRKRKNQFRGIRRRPWGKWAAEIRDPRKGVRVWLGTFNSPEEAARAYDAEARRIRGKKAKVNFPDEVPTAVSQKRRAAGPASLKAPKMDVEEEKPIIKLAVNNMTNSNAYHYPAVVGHNIIPEPFMQTQNMPFAPLVNYAALVNLSSDQGSNSFGCSDFSLENDSRTPDITSVPAPVATLAAVGESVFVQNTAGHAVASPATGNTGVDLAELEPYMNFLMDGGSDDSISTLLSCDGSQDVVSNMDLWSFEDMPMSAGFY

SEQ ID NO: 3482 - protein, 160 aa, Zea mays; identical to SEQ ID NO: 545

SEQ ID NO: 3483 - protein, 393 aa, Zea mays
MAPEDHLVRTRCGSVTVAVYGDEDKPALITYPDVALNYLSCFQAFFFCPEVASLLLHNFCVYHINPQGHEVSDAGSIPVTRVLQMGAAPMSSDVPVPSVDDLADQVADVLDFFSHTSFSLGSVMCLGVTAGAYVLTLFAVLLNLLYYYGNQGLVKECLLQRYFSKLLDDKQGENIWRFLHSINEYVAIRLFFFIFFNERIHLWNLDAHTGFLSTRRHDLTDSLKKLQCRTLIFVGESSQFHEDAIHMATKLDRRYCALVEVQDCGSLVTEEQPHAMVMPMEYFLMGYGLYRPYQLSSSPRSPLSPCCISPELLSPESMGVKLKPIKTRVVIVGPVLIDKLTKCRVLIFHQNRWRAVLDHLACRYGRNLLHQLGDTPERLYFVSECVSTLNQDG

SEQ ID NO: 3484 - protein, 303 aa, Zea mays
MDALWNGSSCDWPAPTVIISDDDAAAAELRRGPWTVDEDALLAAHVAAHGEGRWNELARDAGLRRTGKSCRLRWLNYLRPGVRRGGFTPREQLLILDLHSRWGNRWSKIAAHLPGRTDNEVKNYWRTRVQKHAKQLHCDVGSRRFHDAMRNLWMPRLIERIHADDSAAVAANATGDVSHFYSASPSHELSSSSQPAPAYRNAAPNGSCARAPSPDASCVTGPSSWSREASPASQFQSSGSTIAGPSTSTELCQNGCSSATSVDMFDESWSELLARANHDDTDFGLGETGDNWWGLEDIWEQPL

SEQ ID NO: 3485 - protein, 345 aa, Zea mays
MAAAACVAVALALLATTSSAQLDPHFYDKACPAALPTIKRLVEEAVAAEPRMGASLLRLHFHDCFVNGCDGSILLDDTPFFTGETMAAPNANSVRGFDVIDRIKGAVNAACRGNVVSCADVVAIAARDSVVALGGPSYDVPLGRRDARTASQAAANSSIPAPTFGIDRLASNFASHGLSLQDLVALSGAHTLGFSRCTNFRDRLYNETATLDGSLAASLRAACPRAAGTGDDSLAPLDPTPARFDAAYFASLLRNRGVLHSDQQLFAGGPGVADALVRLYAADTDAFRRDFADAMVRMGSLSPLTGSNGEIRYNCRKEGLEPCQRAVESTAVLALVSNKHSVLVI

SEQ ID NO: 3486 - protein, 236 aa, Zea mays
MSANVGESTSGVSSSDAAGGSFECNICFELPQEPIVTLCGHLFCWPCLYRWLHIHAHSPECPVCKALVEEDKLVPLYGRGKDRVDPRSKNMPEGEIPHRPTGQRPATAPRADANSNFANANANANPWFPGTGVPLANARWGNYAFSAAFGGLFPMLSFQVHGFPDAAAYAQPAGFHYGYGHGHGHGFHHGGHMGQAQAHGVHRQAPLGQQQQQADIYLKALLFMIVILVLASLLAF

SEQ ID NO: 3487 - protein, 593 aa, Zea mays
MTTSSSGSIEAPANSRPGSFAFASTSTSTSTSFTDMLGGSTDAAGGASRYKAMTPPSLPLSPSSFFSNNPGGLNPADFLDSPALFSSSCSGARCRAAHVPGNANALCTFQIFTSPTTNAFASQQFSWLATSGAEQSGKDERRPSSYPDFSFQTAPTTEEAVRTTTTFQPPIPAASLGEEAYRSQQQQPWAYQQQQPGMDAGSSQQAAPYGEPFQAASSDAATMAPHVPASGGYSHQAQQSQRQSSDDGYNWRKYGQKQMKGSENPRSYYKCTFPGCPTKKKVERSLDGQITEIVYRGTHNHAKPQNTRRNSSAAAQLLQSGGGDASEHSFGGMLGTPVATPENSSASFGDEEAGVGSPRAGGNAGGDEDEPDSKRWRKDGDGVGEGISMAANRTVREPRVVVQTMSDIDILDDGYRWRKYGQKVVKGNPNPRSYYKCTTPGCPVRKHVERACHDLRAVITTYEGKHNHDVPAARGSAALYRPAPPPGDNAGHYLGGAAGAAQTGMAYQLAGQQYGFGGQLGSFGLSGGAPAQSSGPSGSLALSSGFDNPMPMGSLYMSQSQQQGQHDAMHAPRAKEEPREEDMFFQQSMVYTD

SEQ ID NO: 3488 - protein, 272 aa, Zea mays
MAPQSLDLGLSLGLGVAAFQPSSFCHPGNAVVVPAAAEREASPAAAEERERRCSPAGSPVSSGSGSGNKRAAAERSAGAGAGSGDEDDDGAARKKLRLSKDQAAVLEECFKTHHTLTPKQKVALASSLGLRPRQVEVWFQNRRARTKLKQTEVDCEYLKRWCEQLAEENRRLGKEVAELRALSAAPAAPLTTLTMCLSCRRVASSSPSSSSSPRPSIPGAAAASGGSMASPAAAATLPAHRQFFCGFRDAGAAAAAYGTASAGLAKPVRAAR

SEQ ID NO: 3489 - protein, 566 aa, Zea mays
  misc_feature (413)..(413): Xaa can be any naturally occurring amino acid
  misc_feature (422)..(422): Xaa can be any naturally occurring amino acid
  unsure (1)..(566): unsure at all Xaa locations
MGEVATMSLEVMKLAAVPKANVDMFVAHRSKRRVVSSAGDSIEKATKLKAARNLDSSFAEVRRGRRDSIRGREGGSSLSQLAMAPAPHNGLNNNHPVAPMDVSVEAGNAGAAEWLDDDGRPRRSGTFWTASAHIITAVIGSGVLSLAWAIAQLGWVAGPAAMLLFAFVTYYTAALLAECYRTGHPETGKRNYTYMDAVRSNLGGVKVVFCGVIQYANLVGVAIGYTIASAISMKAVRRAGCFHAHGHADPCKSSSTPYMVLFGGVQILFSQIPDFDQIWWLSIVAAVMSFTYSSIGLSLGIAQTVSNGGFKGSLTGISIGAGVTSTQKIWHTLQAFGDIAFAYSFSNILIEIQDTIKAPPPSESKVMQKATRLSVATTTVFYMLCGCMGYAAFGDNAPDNLLTGFGFYEPFWXLLDVANVAXIVVHLVGAYQVFCQPIFAFVERRAAAAWPDSAFVSRELRVGPFSLSVFRLTWRSAFVCVTTVVAMLLPFFGDVVGLLGAVSFWPLTVYFPVEMYIKQLRVPRGSTKWICLQTLSVSCLLVSVAAAAGSIADVIAALKVYKPFSG

SEQ ID NO: 3490 - protein, 443 aa, Zea mays
MVASKAAPFDEVSSVEAGAYGGRDDDGRPRRTGTVWTASAHIITAVIGSGVLSLAWAIAQLGWAAGPAVMLLFAVVIYYTSTLLAECYRSGDPVAGKRNYTYMDAVRASLGGAKCFLYISVSISDELTLMLHDRRRSSAIKRADCFHAKGHKHACRSSSNPYMILFGVAEVVFSQIPDFDQIWWLSIVAAVMSFTYATIGLVLGIMQTVANGGFQGSLTGISIGAGVTPTEKDTVKAPPPSEAKVMKRATMVSVATTTVFYMLCGCMGYAAFGDAAPDNLLTGFGFYEPFWLLDIANVAIVVHLVGAYQVFCQPLFAFVEKWAAATWPDSAFIAREFRVGPFALSLFRLTWRTAFVCLTTVAAMLLPFFGDVVGLLGAVSFWPLTVYFPIEMYVVQRAVRRWSTHWICLQMLSAACLLVSVAAAAGSIADVIGALKVYRPFSG

SEQ ID NO: 3491 - protein, 207 aa, Zea mays
  misc_feature (50)..(50): Xaa can be any naturally occurring amino acid
  misc_feature (79)..(79): Xaa can be any naturally occurring amino acid
  misc_feature (91)..(91): Xaa can be any naturally occurring amino acid
  unsure (1)..(207): unsure at all Xaa locations
RGDEEQEKQQAKTSTTSSLPSSSERSSSSACNNLTEGGRWAESDEEIRRXVPEMGGASASASSGAGADERPKGEDGKQXAGGGGGAASSGXGEKRGRTAGDKEQNRLKRLLRNHVSAQQARERKKAYLTELEAKAKGLELRNAELEQRVSTLQNENNTLRQVIDVSGKEFKFTWASGRGELCDIYEERQSGEDGNGLLLECGSTWRK

SEQ ID NO: 3492 - protein, 458 aa, Zea mays
MAVHHALEVLDGRCDDDGHPRRTGTAWTCAAHIITAVIGSGVLSLAWSVAQLGWVVGPACMFCFALVTYVSAALLADCYRRGDPGNGPRNRSYMDAVRVYLGKKHTWACGSLQYVSMYGCGVAYTITTATSIRAILKANCYHEHGHGAHCEYGGSYYMLIFGGAQLLLSFIPEFHDMAWLSIVAAVMSFSYSFIGIGLGLATTIANGTIKGSITGVRMRTPMQKVWRVSQAVGDIAFSYPYSLILLEIQDTLKSPPAENKTMKRASIGSILVTTFFYLCCGCFGYAAFGSDSPGNLLTGFGFYEPYWLIDFANACIILHLLGGYQVYSQPIFQFADRFFAERFPDSRFVNDFHTVRVACLPACRVNLLRVCFRALYVASTTAVAVAFPYFNEVLALLGALNFWPLAIYFPVEMYFVQRNVPRWSTRWVVLQTFSVVCLLVSTFALVGSIEGLITQKLG

SEQ ID NO: 3493 - protein, 626 aa, Zea mays
  misc_feature (83)..(83): Xaa can be any naturally occurring amino acid
  unsure (1)..(626): unsure at all Xaa locations
MAASRALLPSPQVSPASARVRLAAAVPSSLTLAARGGAGAGARLRVRCAILSSPAPVAPTESRPVRRISPVRARTARLRPKPXAVLVAEKLSEAGLAVLRQFADVECAYGMSPAELLAKAAQFDALIVRSGTKVTREVLEAGQGRLRVVGRAGVGIDNVDLQAATEVGCLVVNAPTANTIAAAEHGIALLASMARNVSQADAALKAGKWQRNKYVGVSLVGKTLAVMGFGKVGSEVARRAKGLGMHVIAHDPYAPADRARALGVELVSFDEAIARADFISLHMPLIPTTSKIFNDESFAKMKTGVRIINVARGGVIDEDALVRALDSGKVAQAALDVFTVEPPPKDSKLVLHENVTVTPHLGASTVEAQEGVAIEIAEAVVGALRGELAATAVNAPMVPAEILSELAPYVSLAEKLGRLAVQLVAGESGIKGVKVVYTTARGPDDLDTRLLRAMVTKGLVEPVSSTFVNLVNADYTAKQRGLRLTEERVAHDSPAAEAPLESVQVRLSHVQSKFAGAISDGGDDIVLEGRVKYGVPHLTLVGPYEVDVSLEGNLILCRQIDQPGMIGKVGNILGDTNVNINFMSVGRTFRGKQAIMAIGVDEEPDKDTLEKIGAIPAIEEFVFLEL

SEQ ID NO: 3494 - protein, 375 aa, Zea mays
MDELQDVQLTEIKPLLNDKTGTRNFQDFDCQEHDIETTHGVVHVTIRGLPKGNRPVILTYHDIGLNHKSCFNAFFNFEDMQEITQHFAVCHVDAPGQQEGAPSFPTGYQYPTMDELAEMLPPVLTHLSLKSIIGIGVGAGAYILSRFALNHPELVEGLVLINVDPCAKGWIDWAASKLSGLTTNVVDIILAHHFGQEELQANLDLIQTYRLHIAQDINQENLQLFLGSYNGRRDLEIERPLLGQNDNKSKTLKCSTLLVVGDSSPAVEAVVECNSRLNPINTTLLKMADCGGLPQVVQPGKLTEAFKYFLQGMGYIPSASMTRLARSRTHSTSSSIGSGESAFSRSVTSNQSDGTQESSESPDVVDRHQTMEVSC

SEQ ID NO: 3495 - protein, 665 aa, Zea mays
MTPRLRPRPFQVRGSPAAYLPALFNSPRANNQRGAAPLAPIINNRNARHPWLPYHHHSTGTAAVPPPPPTPTMASTASLQRFLPASPHASSRRRAGRARAAVSIPSSSPPATRDNEVPAERLEPRVEAREGGYWSLKERYRTGLNPHEKVKLEKEPMALFMDGGVRDLAKIPMDVIDAAKLTKDDVDVRLKWLGLFHRRKHQYGRFMMRLKLPNGVTTSEQTRYLASVIEAYGADGCADVTTRQNWQIRGVTLPDVPAILDGLRAVGLTSLQSGMDNVRNPVGNPLAGVDPHEIVDTRPYTNLLSSYITSNSQGNPAITNLPRKWNVCVIGSHDLYEHPHINDLAYMPAVKDGKFGFNLLVGGFISPKRWAEALPLDAWVAGDDVVPACKAILEAYRDLGFRGNRQKTRMMWLIDELGMEVFRSEVEKRMPNGVLERAAAEDLVDKKWERRDYLGVHPQKQEGLSYVGLHVPVGRLQAADMFELARLADEYGTGELRLTVEQNVVLPNVSNRRLDALLAEPLLQRQRLSPQPSLLLRGLVACTGNQFCGQAIIETKARALQVAREVEKRVAVPRPVRMHWTGCPNSCAQVQVADIGFMGCLTKDRDGKVVEAADIFVGGRVGSDSHLADVYRKSVPCKDLVPIVADLLVERFGAVPREREEEDEE

SEQ ID NO: 3496 - protein, 162 aa, Zea mays
  misc_feature (30)..(30): Xaa can be any naturally occurring amino acid
  misc_feature (51)..(51): Xaa can be any naturally occurring amino acid
  misc_feature (84)..(84): Xaa can be any naturally occurring amino acid
  misc_feature (100)..(100): Xaa can be any naturally occurring amino acid
  misc_feature (110)..(110): Xaa can be any naturally occurring amino acid
  misc_feature (154)..(154): Xaa can be any naturally occurring amino acid
  unsure (1)..(162): unsure at all Xaa locations
MAMQDSEEHHFKSKAAAGYSKTYPKTGWLXRKNGFIDYKNRPCTVGEVLTXKTANNAHAKCHFVAIDIFNGQKARRYVTLRKQXDIPYGNRTENQVIVIXEDGFVTLFTXDGDTKDDLRLPTDETLVAQIKEGSETRKDLAGTDQHAMGEEQIXALKDVDPQ

SEQ ID NO: 3497 - protein, 424 aa, Zea mays
  misc_feature (82)..(82): Xaa can be any naturally occurring amino acid
  unsure (1)..(424): unsure at all Xaa locations
MEEDPQPQVEVPCYFLCPISLAIMRDPVTLPTGITYDRDGIERWLLTATTCPLTKQPVPADCDPTPNHTLRRLIQSWCALHXPTGADRVHTPKPRVDRTAVTALVSRVHSAATGSAPPQRPQLLAALRELRDVAAESDRNRKLVAAVPGAVDVLAAVFAASANKSSEGTGTADAVRDDALEVIALLPVPEQCLRRLEETNEALVSALVSALQWSSAPSRARAALLLERVTAALPPSRLASLPEQVFREAVELLRDRPVSRPATKAALQVLVRTAAWGRNRVKAVDAGAVPVLVDMLFDDGAERRACELVLAALDRLCGCADGRAELVAHAAGVAAVGRKALRVSEVATDKAVRVLRSVARHAGTSAVVQEMAQAGVAAMLCVVAQSEQYGKRTRERARETLRLHARAWRTSPCLNHHLQAVYPC

SEQ ID NO: 3498 - protein, 297 aa, Zea mays
  misc_feature (146)..(146): Xaa can be any naturally occurring amino acid
  unsure (1)..(297): unsure at all Xaa locations
MAQEDVHLDDAGLALGLSLGGGGGGGASAAARHGTSRSRLSTEAPRTLEPPSLTLSMPDEATATATGGSGGSGGAARSVSSRSVEGVKRERVDDAEGERASSTAAAARAGAGAEDDDDGSTRKKLRLTKEQSKLLEDRFKDHSTLXNPKQKIALAKQLKLRPRQVEVWFQNRRARTKLNQTEVDCELLKRCCESLNEENRRLQRELQELRALKQLAGPHPHQAPSSSPAAATQGVPVPVPVPPPLYVQMQMQLPMPAATLSLCPSCERLRGGPKAEPDRPQAATHRFFNPFTHSAAC

SEQ ID NO: 3499 - protein, 298 aa, Zea mays
  misc_feature (254)..(254): Xaa can be any naturally occurring amino acid
  unsure (1)..(298): unsure at all Xaa locations
MAQEDVHLEDAGLALGLSLGSGSGGASGAARHGGITRRLSREVRLPSPHPLEPSLTLSLPDKATATGSGGGGPAHSVSSLSVAGVKRERVDDPEGERASSTAALPRACPGPEDDHHHGSTRKKLRLTKEHSALLEDPAGVLFVFEQKQKIALAKQLKLRPRQVEVWFQNRRARTKLKQTEVDCELLKRCCESLSEENRRLQRELQELRALKLAGPHPQAPSSSPAAATQGVPVPVPPPLYVQMQMQLSSCRCCXAATLSLCPSCERLRGGPAAPKAEPDRPQAANHRFFNPFTHSAAC

SEQ ID NO: 3500 - protein, 795 aa, Zea mays
VWARSGKKSPMWPALVIDPLQHAPEVVLNSCVPGALCVMFFGYSANGHGRDYGWVKQGMIFPFVDYLDRFQGQPLYKLRPTKFRAAIEEAFLAERGFFDLDMDGACSPRKSVDKQSDPNGFQEEAASNNEQECQSESQVVGKSALCCDSCGNRLPSKVSKKRKQGGEQVLCRHCEKLLQSKQYCGICKKIWHHTDGGNWVCCDECQIWVHVECDLTCNNVEDLENADYFCPDCKSKSKTVPATENLNTSTSECASTSKGKLTAMIAVCCNGEDALYVPEKHMILCQCKSCKERMMSLNEWEKHTGSRKKNWKMSIRQKSTGELLINLLDDIPCGTSKYSNPGIKKEELLQLQANPYSPVCAKWTTERCAVCRWVEDWDYNKIIICNRCQIAVHQECYGACAVQDLTTWLCRACESPQQKRECCLCPVKGGALKPTDIDGLWVHVTCAWFQPKVSFPVDETMEPAMGIMSIPVEYFKKTCVICKQMHGACTQCYKCSTYYHAICASRAGYCMELQCSERSGRHITKMVSYCDFHSTPDPDNVLIVKTPEGVFSTKFFLQNGEKQTAARLVRKENHQEKVLPPIISDCLVAKCLTYEMSKYKKQPGEAIAHRIMGPRHHSQDFIDGLNACMDRKDDQSFSTFKERLRYLQKTENLRVSCGRSGIHGWGLFAARNIQEGQMVIEYRGEQVRRCVADLREAQYHREKKDCYLFKISEDVVIDATDKGNIARLINHSCMPNCYARIMTVSDDRSEIILIAKRDVSAGEELTYDYLFDPDESEDCRVPCLCKAPNCRGYMN

SEQ ID NO: 3501 - protein, 479 aa, Zea mays
MDEDWSTDPAHRRRRLLLPTSCQTQTQNPPQTQPPLPMDLASQYNRRFAPSLFLPPMAPRLASSSGFSVFSNYQSPPTLVPTAAGAGSHLARSLPKLPLFSMDSLGLLPYSTNPAAGAAVPRSLSSPGGSEQQVPSASGLPPRGAGHRRSRSDFLVGFSRPNQLSLPMTPAAGEYRSREASVLEELFRSYRDPNLSSSGDNNSERNDHLGRQLTGQGAWSPGDSSDNDAESWAASGSAAAGTSASHSHTRHCRSLSVDSIMGNLNFGGLGQVSLRLPPPSPVAGAGGSLSRAGSGASHEAVATASSQPANGEFSESEMKKIMANDRLAELALVDPRRVKRILANRISAAKSKERKVKYMGELERKVRVLQMETSTLSSKAASSQRECEALRILNNEMKIRLQAMEQQAQLKDALNEALTAEVQRLKQIAGEASDPHVPNMSRKIVEQQLQKQPSEAQLAEQQQPQESEEFKAQQKQWNH

SEQ ID NO: 3502 - protein, 487 aa, Zea mays
MDEDRSADPARSGRLLSPTSGQPQTQTQSQPPLPMDLASQYQRLFAPSVFLPPMAPPPPRLASSSCFSAFSNYQSLPTLAPARRGQRQGQGRRSRVPRPSPGSSELQGPSASGLPPRGAGHRRSRSDFLVGFSGANQLHLPMTPAAGAYRPRDASALEELFRSYRDPNLGSSGDNNNERNDHLSRQLTGQRAWSPGDNSDNEAESWAVSGSADTSASHPRHCRSLSVDSIMANLNFGGLDQVSLRVPPLSPVADASVSLSRTGTGASGGAAAAASSELTNGEFSEAEMKKIMANDRLAEIALSDPKRVKRFKFSRLHIQPPWWFGFLKSGVFSGNICRILANRISAAKSKERKVKYMGELERKVRVLQTETNTLSSKAALSQRECEALRTLNNEMKIRLQAMEQQAQLKDALNEALTAEVQRLKQMAGEASDLHVPNGSHHHMNRQILEQQLQQVQKQPSEAQQAQQQQQQPQEPEQFKAQQKQWNH

SEQ ID NO: 3503 - protein, 177 aa, Zea mays
TAGSVLNHRPGSFLVKQWEFQVGPSVGISAGDEIWVARYILERITEMAGIVLSLDPKPIKGDWNGAGAHTNYSTKSMREAGGYEVIKEAIEKLGRRHREHIAAYGEGNERRLTGRHETADINTFKWGVANRGASIRVGRDTEKEGKGYFEDRRPASNMDPYVVTGMIADTTILWKGN

SEQ ID NO: 3504 - protein, 184 aa, Zea mays
MANDSLVTARVIGDVLDPFYSSIDLMVLFNGLPIVSGVELRPPAVSERPRVEIGGDDYRVACTLVMVDPDAPNPSNPTLREYLHWMVTDIPASTDDTHGREVMCYEAPNPTTGIHRMVLVLFRQLGRETVYAPSRRHNFSTRAFARRYNLGAPVAAMYFNCQRQNGSGGRRFTGPYTGGRRGGA

SEQ ID NO: 3505 - protein, 216 aa, Zea mays
MEEEGVGKSWLGLGIGGGGDLMKRNNRPPVQLDDLLSFPPQSVAAASKKQAEKGGGGRKRHKIVVTADEDGRQSPHGGARKKLRLTKAQSTLLEDTFRAHNILSHAQKQELARQVNLSARQVEVWFQNRRARTKLKQTEADCEVLKRYCERLTGENQRLRLELAQLQRSPAAEEAGFYVQSSFPFPPLATAMASVCPSCDKVVAVTSGKSSTSYSS

SEQ ID NO: 3506 - protein, 387 aa, Zea mays
MHREVVRVAITPQSESEERTTVRGEGMVGRMTGEMGGLRSRILRTLQSFPTAAPAQSPNLLLAPLPPGAGPSPQPPAAPCVRLQEPAPQEPPLGDEARAAPGGGGDDDKENVSPGATPRKAKKMKLSSYHHDRSPGLGEEQRADGATRYRRPDLASATLFDPDLLAAFRRAVDAYAQALDAARRRDVDVDVDDGDGVPGGGGGGGGGGPGVTDPLDAFERRCPPGGERAVVLYTTSIRGVRRTFEDCARVRRLLGGLRVAFLERDVSMHAPYREELRALLRCGRGEGDGGAFPVPPRLFVDGRYLGGADEVVALHERSQLRPVLRRAARRGAAEGPCAVCGGAWFVVCGACGGSHWLHDASAGAAAPGRVPCSACNENGLVPCPLCS

SEQ ID NO: 3507 - protein, 386 aa, Zea mays
MTLRWPLWVGTHQTREVLAADLSPKADKPHAASTDGLGTLAKWIGKQEKIKLQDTQRVSCKHSQREIREERGGEERRKKKQQQQLQLQGSRHGASSRKQVERASKSDPQVVVVSQFGDHHYNRFRYTLVSYIVVVDGGGSSAAGEATVVHSPIRKVLLAMIEAAFSSIDLESQSGAHPRIGVVDDLSFHPVGQATIEDAASLARQVASDIACIAAVPVFLYAAAHPAGKSVGAVRRELGYYRPNYRGNQWSGSVLPNVLPVKPDVGPAHVVSHKRGATTVGVTPWIENYNVPVLCKDVATVRRITRGVTGRSGGLPTVQALALFHGDDCTEIACLLDPDHASAYQVQTVVEQIAGDQGLEVEQGYYTDITKDEALDKYLKIACADD

SEQ ID NO: 3508 - protein, 593 aa, Zea mays
MDTAIGSVPAASDAARHPAPSASAPRDATLGRHLARRLAEVGARDVFTVPGDFNLTLLDELEAEPGGVRLVGCCNELNAAYAADGYARARAGGVGACAVTFTVGGLSAINGVAGAFSENLPVVCIVGGPNSNDYGSNRILHHTIGLPDFTQELRCFQNVTCYQAVVNNLEDAHEQIDTAISTAIKESKPVYISISCNLPSIPHPTFSRHPVPFFLSPRLSNQMNLEAAVEAAAAFLNKAVKPVLVGGPKMRVSKAWEALAELADACGYPVAVMPSAKGLVPVHHSRFIGTYWGAVSTPFCAEIVESADAYLFAGPVFNDYSSVGYSLLLKKEKAIIVQPERVVVGHGPAFGCVLMKDFLHALATRLKKNTVAYENYRRIYVPPGEPLSSEPGEPLRVNVLFKHIQAMLSGDMAVIAETGDSWFNCQKLKLPEGCGYEFQMQYGSIGWSVGATLGYAQAAKDKRVIACIGDGSFQVTAQEVSTMLRWGQNSIIFLINNGGYTIEVEIHDGPYNVIKNWNYTGLVEAFHNGEGACYTAKVRTEEELTEALEAALGPKKDCLCFIEVIVHKDDTSKALLEWGSRVSAANSRPPNPQ

SEQ ID NO: 3509 - protein, 413 aa, Zea mays
TRPNRCQIAVHQECYGACAVQDLTTWLCRACESPQQKRECCLCPVKGGALKPTDIDGLWVHVTCAWFQPKVSFPVDETMEPAMGIMSIPVEYFKKTCVICKQMHGACTQCYKCSTYYHAICASRAGYCMELQCSERSGRHITKMVSYCDFHSTPDPDNVLIVKTPEGVFSTKFFLQNGEKQTAARLVRKENHQEKVLPPIISDCLVAKCLTYEMSKYKKQPGEAIAHRIMGPRHHSQDFIDGLNACMDRKDDQSFSTFKERLRYLQKTENLRVSCGRSGIHGWGLFAARNIQEGQMVIEYRGEQVRRCVADLREAQYHREKKDCYLFKISEDVVIDATDKGNIARLINHSCMPNCYARIMTVSDDRSEIILIAKRDVSAGEELTYDYLFDPDESEDCRVPCLCKAPNCRGYMN

SEQ ID NO: 3510 - protein, 273 aa, Zea mays
  misc_feature (141)..(141): Xaa can be any naturally occurring amino acid
  misc_feature (159)..(159): Xaa can be any naturally occurring amino acid
  unsure (1)..(273): unsure at all Xaa locations
MDPSAVSFDSGGARRGGGAQMLLFGGGGSANSNGFFRGVPMAVLGMDDATRVGKRPFFTTHEELLEEEYYDEQAPEKKRRLTAEQVQLLERSFEEENKLEPERKTELARRLGMAPRQVAVWFQNRRARWKTKQLETDYDRXLKAAYDALAADHQGLLAXNDNLRAQVISLTEKLQGKETYPSATTAAQEVDQPDEHTAVSGTEELLAQQLKDNLHSSGDCTGHGTLSSEEDDGGVVSDEGCSFALPDAMFAAGFTHHGAEEVQLANWTSMFWN

SEQ ID NO: 3511 - protein, 346 aa, Zea mays
MPMTPLECDMAPAASRNKHLSRSWPLPRCGLLVLVLALAATAAVGSAQLSSEDYYDASCPAALLTIRTAVSTAVLLEPRMGASLLRLHFHDCFVQGCDASVLLDDTASFTGEKGAGPNAGSLRGFDVIDNIKMLLELLCPQTVSCADILAIAARDSVAQLGGPSWAVPLGRRDATTASASLANSDLPGPTSSLNGLLNAFSNKGLSSTDMVALSGAHTVGRAQCKNCRARIYNDTDIDASFAASLRASCPAQAGAGDGALEPLDGSTPDAFDNAYFGDLLSQRGLLHSDQALFGGGGGATDGLVSAYASNAGQWGADFAAAMVKMGSISPLTGTDGEIRVNCRRVN

SEQ ID NO: 3512 - protein, 104 aa, Zea mays
MANVKEVQRIINGNNVVVFSKTWCPYCKAAKAALNESKANYEVVELDNRNDGDDLQDALLEISGQRSVPNIFFAQQHVGGNSDLQELVKNGTLKSRLEEAGAFA

SEQ ID NO: 3513 - protein, 253 aa, Zea mays
MQEFQSIPGLAGRLFGGAAAAGLRRAQGQCGGGGASAAAAVKCPRCESTNTKFCYYNNYNLSQPRHFCKGCRRYWTKGGVLRNVPVGGGCRKAKRSSAPSTPTPTPTSAVGDAKSPRRASASSPRGSISSGSGSASPTPNGFAFSSTADVVAPPPAPIFADQAAALASLFAPPPPLPAFSFVAAQAKEETSSTPAGFAAPYSSVSEDMAPFASLDAAGMFEIGEDASAAAAYWNAGSCWTDVPDPSMMMYLLP

SEQ ID NO: 3514 - protein, 206 aa, Zea mays
  misc_feature (56)..(56): Xaa can be any naturally occurring amino acid
  misc_feature (110)..(110): Xaa can be any naturally occurring amino acid
  misc_feature (148)..(148): Xaa can be any naturally occurring amino acid
  unsure (1)..(206): unsure at all Xaa locations
VVEVSTSKTGKHGHAKCHFVGIDVFTGKKLEDIVPSSHNCDVSYHCHSLWLLVQLXVHVTFLSCPCIVQVPHVDRTEYQLIDITEDGFVRLLPLQQPGISVILFRFSLVXFIMIDESILQVSLLTDSGNTKDDLRLPTDEALEGQVSXRRQIPLHRFCSRSLRLRHFALRLQIKSGYDDGKDLLLTVMSSMGEEQICAVKEIGGKN

SEQ ID NO: 3515 - protein, 480 aa, Zea mays
MAVSHNVGSKHGVAPLEVSVEAGNGGAAEWLDDDGRPRRTGTFWTASAHIVTAVIGSGVLSLAWAIAQLGWVAGPAAMLLFAFVTYYTATLLAECYRTGDPETGKRNYTYMDAVRSNLGGAKVAFCGVIQYANLVGVAIGYTIAASISMKAVRRAGCFHAHGHADPCNSSSTPYMILFGVVQILFSQIPDFDQIWWLSIVAAVMSFTYSSIGLSLGIAQTISNGGFMGSLTGISIGAGVTSTQKIWHTLQAFGDIAFAYSFSNILIEIQDTIKAPPPSESKVMQKATRLSVATTTIFYMLCGCMGYAAFGDKAPDNLLTGFGFFEPFWLIDIANVAIVVHLVGAYQVFCQPIFAFVERRAAAAWPDSAFVSQELRVGPFAVSVFRLTWRSSFVCVTTVVAMLLPFFGNVVGFLGAVSFWPLTVYFPVEMYIKQRRVPRGSTKWICLQTLSVSCLLVSVAAAAGSIADVIDALKVYRPFSG

SEQ ID NO: 3516 - protein, 451 aa, Zea mays
MALSRRLLPLFLRRGAPIPARALSTAVAPAAVASEEDEAAVTVKGVRISGRPLYMDMQATTPVDPRVLDAMLPFYLSRYGNPHSRTHLYGWESDAAVEDARARVASLVGADPREIFFTSGATECNNIAVKGVMRFYRERRRHVITTQTEHKCVLDSCRYLQQEGFEVTYLPVRKDGLVDLAQLEDAIRPDTGLVSVMAVNNEIGVVQPLEEIGRICKEKGVPFHTDAAQALGKIPIDVNRMGIGLMSLSGHKIYGPKGVGALYLRRRPRIRVEPQMNGGGQERGIRSGTVPTPLVVGFGAACEIAAQEMDYDHRRVSALQQRLLDGIRAQVDDVVINGSMEHRYPGNLNLSFAYVEGESLLMGLKEVAVSSGSACTSASLEPSYVLRALGVEEDMAHTSIRFGMGRFTTDEEVDRAIELTVHQVKKLRDMSPLYEMAKAGIDLKSIEWSQH

SEQ ID NO: 3517 - protein, 442 aa, Zea mays
RTGTFWTASAHIITAVIGSGVLSLAWAIAQLGWVAGPAAMLLFAFVTYYTATLLAECYRTGDPDTGKRNYTYMDAVRSNLGGAKVAFCGAIQYANLVGVAIGYTIASSISMQAVSRAGCFHKRGHAVPCKSSSNPYMILFGAVQILFSQIPDFDQIWWLSIVAAVMSFTYSAIGLSLGIAQTVANGGFKGSLTGISIGADVTSTQKVWHSLQAFGDIAFAYSFSNILIEIQDTIKAPPPSESKVMQKATRLSVATTTIFYMLCGCMGYAAFGDKAPDNLLTGFGFFEPFWLIDVANVAIVVHLVGAYQVFCQPIFAFVERRAAAAWPDSAFVARELRVGPLALSVFRLTWRSAFVCATTVVAMLLPFFGNVVGFLGAVSFWPLTVYFPVEMYIKQRRVPRGSTKWVCLQTLSVACLVVSIAAAAGSIADVIEALKVYHPFSS

SEQ ID NO: 3518 - protein, 495 aa, Zea mays
MSTALLKEWSTGHGASPTAATTSTKRETARHEAPQIPHFYGHQQATPHSQSPQQLVPCSARLIQRLNPQAMGFDKEASSSSSRLDAAPLLPQHGGGGAGGHLSSQPKTFANVFIAVVGSGVLGLPYTFSRTGWAAGTLLLLAVAALTFHCMMLLVAARRRIADAHPKIASFGDLGHAIYGAPGRHAVDAMLVLSQASFCVGYLIFISNTMAHLYPIAIGAQSPASPLLTAKALFIWAMLPFQLGLNSIRTLTLLAPLSIFADVVDLGAMGVVLGQDASVWLADRPPVFAFAGPAQLLYGLGVAVYAFEGIGMVLPLEAEAADKRRFGATLALSMAFIAVMYGLFGAMGYLAFGAATRDIITTNLGTGWLSVLVQLGLCINLFFTMPVMMNPVYEVAERLLCGKRYAWWLRWILVVLVGLLAMLVPNFADFLSLVGSSVCVVLGFVLPAVFHLKVFGTEIGWAGLVADVAIIVTGIALAVSGTWTSLVQIFSSSDL

SEQ ID NO: 3519 - protein, 477 aa, Zea mays
MVVSILTHPFMAAAACVAVALALLATTSSAQLDPHFYDKACPAALPTIKRLVEEAVAAEPRMGASLLRLHFHDCFVNGCDGSILLDDTPFFTGETMAAPNANSVRGFDVIDRIKGAVNAACRGNVVSCADVVAIAARDSVVALGGPSYDVPLGRRDARTASQAAANSSIPAPTFGIDRLASNFASHGLSLQDLVALSGAHTLGFSRCTNFRDRLYNETATLDGSLAASLRAACPRAAGTGDDSLAPLDPTPARFDAAYFASLLRNRGVLHSDQQLFAGGPGVADALVRLYAADTDAFRRDFADAMVRMGSLSPLTGSNGEIRYNCRKFVRFARRRRHTPETPKPHTNHGRRRRASIGTVGRCCRSRREPRDARVVRELLRSMGLGEGEYEPRVVHQFLDLAYRYVGDVLGDAQVYADHAGKAQIDADDVRLAIQAKVNFSFSQPPPREKDSAAYATPTAVPFDRVRLTGSQAPPEAP

SEQ ID NO: 3520 - protein, 155 aa, Zea mays
MADDEFESVGSGASTCFPMQCSAIKKNGYAVLKNRPCKVVETSTSKTGKHGHAKVHMVGIDIFTGKKYEEICPSTHNMMVPNVDRRDFQVINIEEGFVSLLKDDGSTKDDLKVPEGELGDKLKEAFDDGKDVVATVLAAMDEECIISWKEASNKS

SEQ ID NO: 3521 - protein, 492 aa, Zea mays
MTGPGEELAELLWDRGPALRRAPPPFQPFTCSAAGSSRSQELKRHASDTTKASAFVTAVSVPLGTHDAGSGLGLAGLPVHDDDDAVPWLHCPVADDGDGDTAPLPPEFCAGLLSEYSEVAAPAPAFHAAATPPAEAAANKLAPPSAAGGGEGVLNFTFFSRPLQRPQAAAAPAAAAASNPVESTVVQAAANRLRSTPLFSEQRMAWLQPPKAPRTTAAAAAPPPPPLAPLLPDSRHGETVGTVAQPQPRSQPEARPPDAAAVTTSSVCSGNGGRSQLKRSRHLAADCSDLDDEPGATRRSAARSAKRCRTAEVHNLSERRRRDRINEKMRALQELIPNCNKVDKSSMLEEAIEYLKTLQLQVQMMSMGTGLCMPPAAMLLPAMQQQLLHHHPMAHFPHLGMGLGFGMGAAAGFDMLPFPCVAAGAHFPCPPGAMFGVPGQAMPSLPAAFAHMYGAGSGAGPAGQTEAADAAAPARPGEAEQGDQQVQHAKQT

SEQ ID NO: 3522 - protein, 176 aa, Zea mays
  misc_feature (117)..(117): Xaa can be any naturally occurring amino acid
  unsure (1)..(176): unsure at all Xaa locations
MCDAAAVAAPRYRGVRKRPWGRFAAEIRDPAKRARVWLGTFDSAEAAARAYDVAARALRGPLARTNFPALTSRPPANLPAPAPTCSSSSTVESSSGPRAGVPRAGRRAAGKPRAPRXRPRPPTADCRSDCASSASVVDDGDDASTVRSRPALDLNLPAPLDVDDGHDLELCTDLRL

SEQ ID NO: 3523 - protein, 333 aa, Zea mays
MELGLSLGETMADAGSDLVLGLGMGVGVRREEEAQRGRRDREARRELEFETGRCARPSPEPAVRLTLLPGLVPSLGLPWPLSSETNREVPTRGFDDVNRALSVACAGAEEDEAAVAAATAAASSSPNNSSGSFAMDFSAHGQGQGQDQAAPGADRACSRASDEDDGGSARKKLRLSKEQSAFLEESFKERATPNPKQKLALARQLNLRARQVEVWFQNRRARTKLKQTEVDCEHLKRCCETLTGENRRLHKELAELRALKAVRPLLHMHLPATTLSMCPSCERVASTSSAAPAAPAPASPSPAAGAGIAASAPDPDQSRPPFSCERKFRPPPP

SEQ ID NO: 3524 - protein, 507 aa, Zea mays
  misc_feature (304)..(304): Xaa can be any naturally occurring amino acid
  unsure (1)..(507): unsure at all Xaa locations
MACSLSAPLARAVTAILLLASIICCCRSAPPGALVTRLPGFDGAKLPSKHYAGYVTVDEHVGSKLFYYLVESERDPARDPVVLWLNGGPGCSSMDGFVYEHGPFNFESGGSSGNLPKLHLNPYSWSKVSSVIYLDSPSGVGLSYSKNVSDYETGDLKTAADSHTFLLKWFQLYPEFQKNPFYIAGESYAGVYIPTLANQVVQGIHKGDNPVINFKGYMVGNGVCDVTFDGNALVPFAHGMGLISDDIYEQTNTACQGNYWNYSYSEKCADAVSNVDTVISGINIYNISEPCYHGTNTKEVISRXPINNRMPQSFKDLGVTSRPLPVRTRMFGRAWPLRAPVRDGRVPSWQELAAANNFPSVMCMNDEVATAWLNHDSVRSAIHAEPVSAIGPWILCTDQLLFHHDAGSMIIYHKNLTSQGYRAIIYSGDHDMCVPYTGSLAWTTSLRYGVIDSWRPWFVNGQVSGYTQGYENGLTFATIKGSGHAVPEYKPQEALAFYSRWLAGSKL

SEQ ID NO: 3525 - protein, 104 aa, Zea mays
  misc_feature (69)..(69): Xaa can be any naturally occurring amino acid
  unsure (1)..(104): unsure at all Xaa locations
VAIAIFDGTKLEDIVPSSPSCVISHVIRTKSQMTDICQEGLVSVLASHGTTKDNPILPVNHAAVVHIKXGFESGKALSEAVQSAMEEQQICALKNVGPKYPPRR

SEQ ID NO: 3526 - protein, 291 aa, Zea mays
MSFTYSSIGLSLGIVQTVYARACSESIERIVAANGGFKGSLTSIGFGAGVNSTQKVWHTLQAFGDIAFAYSFSNILIEIQDTIKAPPPSESKVMQKATRLSVATTTVFYMLCGCMGYAAFGDDAPDNLLTGFGFYEPFWLLDVANVAIVVHLVGAYQVFCQPIFAFVERRAAAAWPDSAFVSRELRAGPFALSPFRLAWRSAFVCVTTVVAMLLPFFGDVAGLLGAVSFWPLTVYFPVEMYIKQRRVPRGSARWISLQTLSVTCLLVSIAAAAGSIADVVDALKVYRPFSG

SEQ ID NO: 3527 - protein, 588 aa, Zea mays
MCGILAVLGCSDWSQAKRARILACSRRLKHRGPDWSGLYQHEGNFLAQQRLAVVSPLSGDQPLFNEDRTVVVVANGEIYNHKNVRKQFTGTHNFSTGSDCEVIIPLYEKYGENFVDMLDGVFAFVLYDTRDRTYVAARDAIGVNPLYIGWGSDGSVWIASEMKALNEDCVRFEIFPPGHLYSSAGGGFRRWYTPHWFQEQVPRTPYQPLVLREAFEKAVIKRLMTDVPFGVLLSGGLDSSLVASVTKRHLVETEAAEKFGTELHSFVVGLEGSPDLKAAREVADYLGTIHHEFHFTVQDGIDAIEEVIYHDETYDVTTIRASTPMFLMARKIKSLGVKMVLSGEGSDELLGGYLYFHFAPNKEEFHRETCRKVKALHQYDCLRANKATSAWGLEVRVPFLDKEFINVAMGMDPEWKMYDKNLGRIEKWVMRKAFDDDEHPYLPKHILYRQKEQFSDGVGYNWIDGLKSFTEQQVTDEMMNNAAQMFPYNTPVNKEAYYYRMIFERLFPQDSARETVPWGPSIACSTPAAIEWVEQWKASNDPSGRFISSHDSAATDHTGGKPAVANGGGHGAANGTVNGKDVAVAIAV

SEQ ID NO: 3528 - protein, 414 aa, Zea mays
MAPSLPQQLNLALADLKALSVLGQGARGVVFHVVPVAAGGDSTAAGAGEPMALKAMSRAAARHKGAAGPAGGTCGGDGHRRIWFERDVLLALRHPLLPSLRGVVATDAVVGFVINRCPGGRPQLVLALEHLHGLGVVYRDLKPENVLIQESGHVMLVDFDLSTTLPPPLPPPPPDAAPARASSLLPSSHRHRRRNKNTKASTVFACFSRRHVASPQSPLFTSMTAPSASSSSCCSPPGVRTPAKSNSFVGTEDYVAPEIVAGSGHDYAVDWWGLGVVIYEMLYGCTPFRGRSRWETFHRVLTAPPELPGEATPLCDLITRLLEKDPGKRLGARGVKRHAFFRGVDWDRVLDVARPPFIPSPDENDANSGAVVEAEALDVEKVVHEVFGSSGAGETSLMDVCSDGGTDDDFSIFF

SEQ ID NO: 3529 - protein, 324 aa, Zea mays
  misc_feature (248)..(248): Xaa can be any naturally occurring amino acid
  misc_feature (290)..(290): Xaa can be any naturally occurring amino acid
  unsure (1)..(324): unsure at all Xaa locations
MAKSAASSVVRCLQLLTVAAVLAGAAAGGGLSTSFYSKKCPDVQSIVRAGVASAVAAEKRMGASILRMFFHDCFVNGCDASILLDDTATFTGEKNAGPNANSVRGYEVIDAIKARVEASCNATVSCADILALAARDAVNLLGGPSWTVYLGRRDARTASQSDANANLPGPGSSLATLVTMFGNKGLSARDMTALSGAHTVGQARCATFRNRIYNDGNINATFASLRQQTCPLAGGDAALAPIDVQTPXAFDNAYYKNLMARQGLFHSDQESFNGGSQDALVKKYSGNAAXCFTADFAKAMVRMGAISPLTATQGEVRLDCRKVN

SEQ ID NO: 3530 - protein, 167 aa, Zea mays
MYPATTPYDTASGVGVAPVAGLFPVAGEAREWSSRLLDCFDDFDICCMTFWCPCITFGRTAEIVDHGMTSCGTSAALFALIQWLSGSQCTWAFSCTYRTRLRAQHGLPEAPCADFLVHLCCLHCALCQEYRELKARGYEPVLGWDFNAQRAAAGVAMCPPASQGMGR

SEQ ID NO: 3531 - protein, 367 aa, Zea mays
MDMDMGMTMVGLDEDLDQVLAAISSAGSSATSAPAATGGSSEDDETTAATELRRGPWTVDEDILLVNYIAAHGEGRWNSLARSAGLRRTGKSCRLRWLNYLRPDVRRGNITVEEQLLILELHSRWGNRWSKIAQHLPGRTDNEIKNYWRTRVQKHARRLRCDANSAQFRHLWMPRLLERAQDLQQPAAATVPAAVAQAAPATTTTSAPPPACYYNYYYDDHHHLAHQQGALHQYYSEPAGQTAAAATALSPDDASSALRPPSSSLTADDGAARYAAAYETSANDLQVLHQCGADAGSGPTTTTEDDVFAGTTWSDLLATATATGPDGDDSSSSMIGLQMEDFGFGLGDLADDGLWSLDDLFCFQQLC

SEQ ID NO: 3532 - protein, 198 aa, Zea mays
MGHEGSCRCELCGAPAAVHCAADEAFLCAACDAKVHGANFLASRHRRTRLRLAAAGAPPPHDEAGYGSAASSCVSTADSAPRPRRGARAPAGSVRPEAVLEAWAKRMGLGAGGRRRVPPRVAVAAALWGEAAGRGGVGGHAQALRRLEAGAHVPARLVLAVAASLARARALLRRAAPDPVEGWDECAWAGPKSSPSRS

SEQ ID NO: 3533 - protein, 409 aa, Zea mays
MNGVGDAHAAVAAAAMVQQTLGMSLPMAAFVPEHCSANKLARPPGLPPLPQAFVAQQRGDVCMEAADPAAGPRKAHRRSRSDVPFGYFPPAGHHQLPPPKVEAGWGGHLPAGGGDDDLFNAYLNLEGLDGLNSSDDRLDDGDSRGSSMRTNGADSSENESEECAADSRAGIRLCAAAADRREGLKRAAAAPVPRHARSLSMDSLIGKLNFSAGATGAASGVIPGPNRFSLEFGSAEFSPVEMKKIMADEKLAEMALADPKRVKRVLANRQSAARSKERKMRYIGELEHKVQILQTEATTLSAQLTLLQRDSAGIATQNNELKFRLQAMEQQAQLRDALNEALTAEVQRLKLATAELGDSCSSSNLAQQIQISVQDQMFQLHQQQATPIPFYQLQQAQQNGAGKKHEPTE

SEQ ID NO: 3534 - protein, 210 aa, Zea mays
MASDRVLGTVKWFNGTKGFGFITPDDGSEDLFVHQSSIKSDGYRSLNDGDAVEYTVGSGNDGRAKALDVTAPGGGPLAGGERPDGGNGGGRGGYGGGDRGYGGGGDRGYGGGGDRGYGGGDRGYGGGGDRGYGGGGDRGYGGGGGYGGGYGGGGGGGGRGCFKCGEEGHMARDCSQGGGYGGGGGGGRGSECYNCGQEGHISRDCPNKRR

SEQ ID NO: 3535 - protein, 407 aa, Zea mays
  misc_feature (329)..(329): Xaa can be any naturally occurring amino acid
  unsure (1)..(407): unsure at all Xaa locations
PGHYGYGISIPSHRTNLAVPTHTASFVRPLPRCAAPSPDRRRLPPPSTPLRPSPSLNSRAERFPPSCSAPAPAPFPLHLLFPSARAREIWFRAAGLGTSERRASGMPGGEDVRKVSRQDIQLVQNLIERCLQLYMNQKEVVDTLSFQAKIEPSFTELVWQKLEEENRDFFKAYYVRLMLMNQITAFNKLLEQQYEIMTKDHPSGMPSVPPAAPNGSNSNTLNQNMPFLPDTIPSTALQDNSLRNGGSSSIVNGAPSDDQFMYTGKVVHGLPGGMDASSSLLTAHNPAVGQFNGHNGATIKTEFGYSSNSDFGFSNEAVFLEQSVGDVSXDSSSYGFLSQIPRNFSFSDLTEDFSQSAEILENYGRSPFIPSDANNFPESTAGEHTEIGNRRLDTISEGIHFEDFGSD

SEQ ID NO: 3536 - protein, 539 aa, Zea mays
  misc_feature (59)..(59): Xaa can be any naturally occurring amino acid
  unsure (1)..(539): unsure at all Xaa locations
TRPLQYISGSLCVRALTAAEPHSCSCAVYLSLVVLCRPSYCGREKGVCRPAAKHCYPAXAAMEVSSVEFGHHAAAASKCFDDDGRLKRTGTMWTASAHIITAVIGSGVLSLAWAIAQLGWVAGPTVMLLFSFVTYYTSALLADCYRSGDACTGKRNYTYMDAVNANLSGVKVWFCGFLQYANIVGVAIGYTIAASISMLAIQRANCFHVEGHGDPCNISSTPYMIIFGVVQIFFSQIPDFDQISWLSILAAVMSFTYSTIGLGLGIAQVVSNKGVQGSLTGISVGLVTPVDKMWRSLQAFGDIAFAYSYSLILIEIQDTIRAPPPSESKVMRRATVVSVAVTTFFYMLCGCMGYAAFGDNAPGNLLTGFGFYEPFWLLDVANAAIAVHLVGAYQVYCQPLFAFVEKWARQRWPKSRYITGEVDVPLPLGTAGGRCYKLSLFRLTWRTAFVVATTVVSMLLPFFNDVVGLLGALGFWPLTVYFPVEMYIVQKKVPRWSTRWVCLQLLSVACLVITVASAAGSVAGIVSDLKVYKPFVTTS

SEQ ID NO: 3537 - protein, 253 aa, Zea mays
GSDDEPAVRKGPWTLEEDLILVSYISQHGEGSWDNLARAAGLNRNGKSCRLRWLNYLRPGVRRGSITAGEDTVIRELHARWGNKWSKISKHLPGRTDNEIKNYWRTRIQQKKQQGAKTTQQREPSTTASSGAGDDYWCTKPDPNQQAHYCLQKAAMAAATATTSAVVVSSEDDAPSAALTSQDSSAAAGGDWYMHQQQQMCYPYCSELSFVAAGHDETVGLDAVTMQFLSSHFTASFWTNGVDDFWESKPIDY

SEQ ID NO: 3538 - protein, 451 aa, Zea mays
  misc_feature (231)..(231): Xaa can be any naturally occurring amino acid
  unsure (1)..(451): unsure at all Xaa locations
MAGAGAGGWKKRVGRYEVGRTIGRGTFAKVKFAVDADTGAAFAIKVLDKETIFTHRMLHQIKREISIMKIVRHPNIVRLNEVLAGKTKIYIVLELVTGGELFDRIVRHGKLRENEARKYFQQLIDAIDYCHNKGVYHRDLKPQNLLLDSRGNLKLSDFGLSTLSQNGVGLVHTTCGTPNYVAPEVLSSNGYDGSAADIWSCGVILYVLMAGYLPFEENDLPHLYEKITAAXYSCPYWFSPGAKSLIQRILDPNPRARITIEEIREDPWFKKNYVTIRCGEDENVSLDDVQAIFDNIEDKYVSDEVTHKDGGPLMMNAFEMIALSQGLDLSALFDRQQEFVKRQTRFVSRKPAKTVVATIEVVAESMGLKVHSRNYKVRLEGPASNRASQFAVVLEVFEVAPSLFMVDVRKVAGDTPEYHRFYENLCSKLGSIIWRPTEVSAKSTPLRTTTC

SEQ ID NO: 3539 - protein, 333 aa, Zea mays
MELALSLGETMADAGRDLMLGLGMGVGVRREEEAQRGRRDREVRRELEFTARSARSSPEPAVRLTLLHGLGLPWPPPPSSETNRHLEASARGFDVNRAPSLSAAGGAAEEDEEQDEAAAAAASSSPNNSASSFPTDFSAQGQVAPGADRACSRASDEDDGGSARKKLRLSKEQSAFLEDSFKEHATLNPKQKLALAKQLNLRPRQVEVWFQNRRARTKLKQTEVDCEYLKRCCETLTEENRRLQKELSELRALKTVHPFYMHLPATTLSMCPSCERVASNSAPAPASSPSPATGIAAPAPEQRPSSFAALFSSPLNRPLAAQAQPQPQAPANS

SEQ ID NO: 3540 - protein, 253 aa, Zea mays
KTRVKNFREMRQNGAVMMQFGHQMPDYDSPATQSTSETSHQEASGMSEGSLNEHNNDHSGNLDGYSKSDENKMMSALSLGNPETAYAHNPKPDRTQSFAISYPYADPYYGGAVAAAYGPHAIMHPQLVGMVPSSRVPLPIEPAAEEPIYVNAKQYHAILRRRQLRAKLEAENKLVKSRKPYLHESRHLHAMKRARGTGGRFLNTKQQPESPGSGGSSDAQRVPATASGGLFTKHEHSLPPGGRHHYHARGGGE

SEQ ID NO: 3541 - protein, 193 aa, Zea mays
MRRAKPPPQQPSPSPEIRYRGVRRRPSGRYAAEIRDPAKKTPIWLGTYDCAEAAAHAYDAAARSLRGPTARTNFPSAAVRAPRHRAPSASAAAPTAPAAAATSSHSSTVESWSGGAPRAAALPRSAVPMEEDDDEDCHSYCGSSSSVLCDDACGDDAVASRAPLPFDLNLPPPLDAAAETHQMGARYDTLLRL

SEQ ID NO: 3542 - protein, 170 aa, Zea mays
EWNLRSREALLDYLKERNIPTTASLEKIYSRDENAWHISTEGGVLESPWNAPNKDCWVWTVDPLEAPDQPENVTVSVEKGQVVAVNGEKLSPFQCLEKLNALGAKHGVGRIDIVENRLVGIKSRGCYETPGGTIMVNALRAVEQLVLDRDSFKWREQLGQEMSYVVYDGR

SEQ ID NO: 3543 - protein, 376 aa, Zea mays
  misc_feature (343)..(343): Xaa can be any naturally occurring amino acid
  unsure (1)..(376): unsure at all Xaa locations
MGRAPCCEKSGLKKGPWMPEEDEKLVAYIKKHGQGNWRTLPKNAGLARCGKSCRLRWTNYLRPDIKRGRFSFDEEETIIQLHSILGNKWSAIAARLPGRTDNEIKNYWNTHIRKRLLRMGIDPVTHAPRLDLLDLSALFKPAAAAAYYYPTQADLDTLRALEPLANYPDLLRLASALLSGPPAAPAIGDQQPRQLLPWILQAQMAQQAAAAVAQAQLQVAPQAEQFVQQRQAAGAACQMPDLVHTSPTVQQHQQVAAAQEQQHQPQGQDDMAAACHSMQPQPPTGGYAVDTLDIPALMQMVQADDASNLQQWSSMITSSTNNNNVGSGVSTPSSSPGAALESXTTATTTYGGASDADAAALFNMQLSELLDVTDYM

SEQ ID NO: 3544 - protein, 465 aa, Zea mays
MEVSSVEFGHAAAASKCFDDDGRLKRTGTMWTASAHIITAVIGSGVLSLAWAIAQLGWVAGPTVMLLFSFVTYYTSALLADCYRSGDACTGKRNYTYMDAVNANLSGVKVWFCGFLQYANIVGVAIGYTIAASISMLAIQRANCFHVEGHGDPCNISSTPYMIIFGVVQIFFSQIPDFDQISWLSILAAVMSFTYSTIGLGLGIAQVVSNKGVQGSLTGISVGAAFGDIAFAYSYSLILIEIQDTIRAPPPSESKVMRRATVVSVAVTTFFYMLCGCMGYAAFGDNAPGNLLTGFGFYEPFWLLDVANAAIAVHLVGAYQVYCQPLFAFVEKWARQRWPKSRYITGEVDVPLPLGTAAGRCYKLSLFRLTWRTAFVVATTVVSMLLPFFNDVVGLLGALGFWPLTVYFPVEMYIVQKKVPRWSTRWVCLQLLSVACLVITVASAAGSVAGIVSDLKVYKPFVTTS

SEQ ID NO: 3545 - protein, 476 aa, Zea mays
  misc_feature (15)..(15): Xaa can be any naturally occurring amino acid
  misc_feature (67)..(67): Xaa can be any naturally occurring amino acid
  misc_feature (126)..(126): Xaa can be any naturally occurring amino acid
  misc_feature (150)..(150): Xaa can be any naturally occurring amino acid
  misc_feature (164)..(164): Xaa can be any naturally occurring amino acid
  unsure (1)..(476): unsure at all Xaa locations
MCGGAILSGFIPPSXVAAAAAAAAKKKQQQRCRVTADLLWPGPGSKGAPQDKEEDFEADFREFERGXSARMTWNSAGEGGDPEVQELPPPEPTRFAFATAAKAAVDGVMTTTPKDVQGDRAVKKRXRKNQYRGIRQRPWGKWAAEIRDPXRGVRVWLGTYNTAXEEAARAYDAEARKIRGKKAKVNFPDDDATGTRHRPTNAANAARLVAPPPPPKACADEMFNNLKNDDGDNNNNDDLFAMFAFGDNKKEAVPAAKPAAAEGGSGSGSGSFLVPAPAMAAAVPGNKRRSSATNIMVSVSDDQSSNSYGSGSSDLVGSWSWDDAAAAAAMTSDYTSSVFAPASYSYMQGGAPKRMRSSYGGAPPSLAHDAAMPGFGLDKVSYHHYQALPPYYVGSSNASVGNLGLLQQADDAPAPQDGASAGDIWSLDELLMLAAGWCLLRTARKKNVLALLAGDETRARGSCIIRHPLSFCLSYI

SEQ ID NO: 3546 - protein, 329 aa, Zea mays
MATTQSRGGGGVVPVEVDEEHGRRRQGGAAPQEEEEEEAAEKPELRRGPWTVDEDHTLVNYIADNGEGRWNSLARAAGLKRTGKSCRLRWLNYLRPDVKRGNFTADEQLLILDLHTRWGNRWSKIAQHLPGRTDNEIKNYWRTRVQKHAKQLNCDASSKRFKDAMRYLWMPHLVDATATTADDEYHHHQHQHQAAAAGNIDGLLAGGDVDDVQNALAAGVAAAMASSSSDSLASEPYSYEDGGLLASVRAGEDMQLVMSGGGWAMAQEANDQGLWPSSSAGHGLSSSVQAAAGGAGQFEDPELSGWVQGFSDSIITGNLWALEEIWKMQ

SEQ ID NO: 3547 - protein, 356 aa, Zea mays
MATTQSCQSRSSACSKAAACFPAAVAVDEEHGHHSHQLKGGAQEEAENDNNKPELRRGPWTVDEDLTLVNYIADNGEGRWNNLARAAGLKRTGKSCRLRWLNYLRPDVKRGNFSADEQLLILDLHTRWGNRWSKIAQHLPGRTDNEIKNYWRTRVQKHAKQLNCDANSKRFKDAMRYLWMPHLADDVDTIAAANDDDEDHHHHLRLLVLHHHQAQHLQQAAAAAGGAANDLAAGAYDVRQLHALPSSGMAAVPTTATTSSSDSLASESYDDGGLLFANLRAGEMLMDGGDWAAQQEADQGLWPPPPPTSDLDQSVVQAAGAGAGQFQDMELSGWVQGFSESITDNFWALEEIWKMQ

SEQ ID NO: 3548 - protein, 392 aa, Zea mays
MVDWMDMVVVDMVEVEEVEEEYMSTVFMTQLPRTLRLMEGEQDQGLFPASTFHVAKDPPILFPFMITSPVHVDQLQGQSSYGDQHLGQHVLSESTQQFTDRTMISGSEVFPRRPSPFGQTIQSIDGDMIQPSAYDPYDIVENQRTEGLSGGGWTVSSSSSSPPAKMKIMRKATSEYPEGGAARKPRRRAQAHQDESQLLTMQQQAMGVVVRVCSDCNTTKTPLWRSGPRGPKSLCNACGIRQRKARRAMVAAAAAAAASNGGAPPQAVSGVATQQQPKPKPARKEKRSDAADRSLPFKKRCKMVVVDHAAGAAAATATPEAAAARSTKDQADHVSGDKQVVAPAAAMRSLDQSEIATPPPSAVSSFHAAFPADEITDAAMLLMTLSCGLVRS

SEQ ID NO: 3549 - protein, 161 aa, Zea mays
  misc_feature (9)..(9): Xaa can be any naturally occurring amino acid
  misc_feature (24)..(24): Xaa can be any naturally occurring amino acid
  misc_feature (43)..(43): Xaa can be any naturally occurring amino acid
  misc_feature (65)..(65): Xaa can be any naturally occurring amino acid
  misc_feature (98)..(98): Xaa can be any naturally occurring amino acid
  unsure (1)..(161): unsure at all Xaa locations
MSDSEEHHXKSKADTGAIKTYPQXGGTVRKNGFIGIKNRPCKXAEVFTSKTGKDGHAKCHFDDIXIFNGKKLEDIVTSSHNCDISDENRTEYQLIDIXSEDGFESLITSNGNTKDDLRLPTDETPVAQIKEGLESGKDLVETAQTEMGKEHNCSKKDVMPK

SEQ ID NO: 3550 - protein, 50 aa, Zea mays
FYRAAVHGALADILLRGSNLITDVQGMASLTGVLPPDVPFAQAFAAVLTA

SEQ ID NO: 3551 - protein, 131 aa, Zea mays
FFKSFLFVALDIALRRNDRDWVETLPSEIDDEISIKLYYGHFLCHVFHQDYIVRKGRDCLDLEHRMWRLLDARGAEYPAEHNVGHLYRAKPALAEFYRELDPCNCFNPGIGQMSKFANYREPEARHEAARP

SEQ ID NO: 3552 - protein, 350 aa, Zea mays
  misc_feature (273)..(273): Xaa can be any naturally occurring amino acid
  unsure (1)..(350): unsure at all Xaa locations
MAESSGSGSVSVDVERISFGGKDHLVRTRCGSVTVAVYGDEDKPALITYPDVALNYMSCFQGFFFCPEVASLLLHNFCVYHINPQGHEMGAAPMSSAVPVPSVDDLADQVADVLDFFSLGSVMCLGVTAGAYVLTLFATKYRERVIGLMLVSPLCKSPSWSEWLYNKVLLNLLYYYGNQGLVKECLLQRYFSKKLRGDAQCPESDIVRASRSLLDDKQGENIWRFLHSINERHDLTDSLKKLQCRTLIFVGESSQFHEDAIHMATKLDRRYCXALVEVQDCGSLVTEEQPHAMVMPMEYFLMGYGLYRPYQLSSSPRSPLSPCCISPELLSPESMGVKLKPIKTRVGISL

SEQ ID NO: 3553 - protein, 187 aa, Zea mays
MANDSLTRGHIIGDVLDPFTSSVSLSVLYDGRPVFDGMEFRASAVSVKPRVEIGGDDFRVAYTLVMVDPDAPNPSNPSLREYLHWMVTDIPASTDDSFGRELIPYESPSPTMGIHRLVLVLYQQLGRGTVFAPQVRQNFNLRNFARRFNLGKPVAATYFNCQRQTGTGGRRFTCVFDHVVQGEGRQA

SEQ ID NO: 3554 - protein, 224 aa, Zea mays
MVRGKTELKRIENATSRQVTFSKRRNGLLKKAFELSVLCDAEVGLVVFSPRGKLYEFASAASLQKTIDRYRTYTRENVNNKTVQQDIQQVKADAVSLASRLEALEKTKRMFLGENLEECSIEELHNLEVKLAKSLHVIRGKKTQLLEQQISKLKEKERTLLQDNKELRDKQRNLQSPPEAPPDLNRCVPPWPRSLPAPSNDMDVETELYIGLPGRERSSNRDSD

SEQ ID NO: 3555 - protein, 465 aa, Zea mays
MDDPGASADPAARHHLSPQQLGGQPPVPRSPTPLDLASAAAASGYRRLSPSLRPPAHPQARLPSPYGQIPSPGAGAHHARSLSQPLFFSLDSLPPPPYADLGAAPAVPPSPPPSTSDPPPLGLPPRRAGHRRSQSDIPFGFAQLSPPLPPPAPVKREVTAAADGCRSDGGGGDDAALYDLVNAYMDLDGLDPLNSSEDRHDDRDSRASGTRAGSAAESSENEAESQSTSADRKDGGKSRHCRSLSIDSFMGKLSFAAGEESPKLPLPSPGGSLTRSGSGSLEGGAVALFNMEFTNGEFTDSEKKKIMANERLAEIALTDPKRVKRILANRQSAARSKERKMRYIQELEHKVQVLQTEATTLSAQLTMLQRDSAGLATQNNELKIRLQAMEQQAQLRDALNEALTAEVQRLKLATGEVTDGRMPKGLQQQMNSQMLQIQQLQVQQQAPQAQQQGQRQQQQQPQKSA

SEQ ID NO: 3556 - protein, 181 aa, Zea mays
  misc_feature (39)..(39): Xaa can be any naturally occurring amino acid
  misc_feature (43)..(43): Xaa can be any naturally occurring amino acid
  misc_feature (50)..(50): Xaa can be any naturally occurring amino acid
  misc_feature (52)..(52): Xaa can be any naturally occurring amino acid
  misc_feature (64)..(64): Xaa can be any naturally occurring amino acid
  misc_feature (66)..(66): Xaa can be any naturally occurring amino acid
  misc_feature (68)..(68): Xaa can be any naturally occurring amino acid
  misc_feature (74)..(74): Xaa can be any naturally occurring amino acid
  misc_feature (81)..(81): Xaa can be any naturally occurring amino acid
  misc_feature (85)..(85): Xaa can be any naturally occurring amino acid
  misc_feature (87)..(87): Xaa can be any naturally occurring amino acid
  misc_feature (94)..(94): Xaa can be any naturally occurring amino acid
  misc_feature (104)..(106): Xaa can be any naturally occurring amino acid
  misc_feature (109)..(109): Xaa can be any naturally occurring amino acid
  misc_feature (116)..(116): Xaa can be any naturally occurring amino acid
  misc_feature (118)..(118): Xaa can be any naturally occurring amino acid
  misc_feature (120)..(121): Xaa can be any naturally occurring amino acid
  misc_feature (125)..(125): Xaa can be any naturally occurring amino acid
  misc_feature (141)..(141): Xaa can be any naturally occurring amino acid
  misc_feature (143)..(143): Xaa can be any naturally occurring amino acid
  misc_feature (155)..(155): Xaa can be any naturally occurring amino acid
  misc_feature (160)..(160): Xaa can be any naturally occurring amino acid
  misc_feature (167)..(167): Xaa can be any naturally occurring amino acid
  misc_feature (174)..(175): Xaa can be any naturally occurring amino acid
  unsure (1)..(181): unsure at all Xaa locations
ASPSAPLSISLLRLLLDPAKPGIRDSEEHHFESKADAGXSKTXPQQAGTXRXNGFIVIKNRPPXVXEXSTSKTXKHGHAKXHCVXIXIFNGKKXEEIVPSSHNXXXPHXNRTEYQXSXKXXDGFXSLLTSEGNTKDDLRLXTXETLVAHIKEGFXSCKDXVVTFQSXIGEEQNXXPKDVGP

SEQ ID NO: 3557 - protein, 408 aa, Zea mays
  misc_feature (104)..(104): Xaa can be any naturally occurring amino acid
  unsure (1)..(408): unsure at all Xaa locations
MGALCDFCGEQRSMVYCRSDAASLCLSCDRNVHSANALSRRHTRTLLCDRCASQPAMVRCLAENASLCQNCDWNGHIAGSSSAGHKRQTINCYSGCPSSAELSXIWSFVSDIPNVAPEPNCEQGISMMSISDSGVSNQDNAAGDSILLDIASATLVSDIGTCDKLLVGSSSGAGVNLLPLATGQTETAGSVDSTPDKVPYTPDKDMFSKDSIYEDFCVDDADLAFENYEELFGTSHIQTEQLFDDAGIDIYFEMKEAPAGNSTEQSKLKQPANSNAVSADSGMSNPGVKGDSSVCTPLRQARSSLSLSFAGLTGESSAGDHQDCVVSSLLLMGEPPWQPPGPEGSIAGGSRDSALTRYKEKKMRRKFDKKIRYASRKARADVRKRVKGRFVKAGEAYDYDPLCQTRSY

SEQ ID NO: 3558 - protein, 627 aa, Zea mays
MGQCYGKARGASSRADHDADPSGAGSVAPPSPLPANGAPLPATPRRHKSGSTTPVHHHQAATPGAAAWPSPYPAGGASPLPAGVSPSPARSTPRRFFKRPFPPPSPAKHIKATLAKRLGGGKPKEGTIPEEGGAGAGAGAGAGAGAGAAVGAADSAEADRPLDKTFGFAKNFGAKYDLGKEVGRGHFGHTCSAVVKKGEHKGHTVAVKIISKAKMTTAISIEDVRREVKILKALSGHDNLVRFYDACEDALNVYIVMELCEGGELLDRILARGGRYTEEDAKAIIVQILSVVAFCHLQGVVHRDLKPENFLFTTRDESAPMKLIDFGLSDFIRPDERLNDIVGSAYYVAPEVLHRSYSMEADIWSIGVITYILLCGSRPFWARTESGIFRSVLRADPNFDDSPWPSVSAEAKDFVKRFLNKDYRKRMTAVQALTHPWLRDEQRQIPLDILIFRLVKQYLRATPLKRLALKALSKALSEDELLYLRLQFKLLEPRDGFVSLDNFRTALTRYSTDAMRESRVLEFQHALEPLAYRKMDFEEFCAAAISPYQLEALERWEEIAGTAFQHFEQEGNRVISVEELAQELNLAPTHYSIVQDWIRKSDGKLNFLGFTKFLHGVTIRGSNTRRH

SEQ ID NO: 3559 - protein, 590 aa, Zea mays
TRPRPYTNQIRYNVSIVKTDTSTLPPIINADEIFIVISTTNVGTDSEDVSAMKAIKAKYQVKKNWMGDPCVAGTFRWDGLTCSYAISDPPKITALNMSFSGLTGDISSAFANLKAVQSLDLSHNNLTGSIPSSLSQLPSLTTLDLTGNQLSGPIPSSLLKRIQDGSLNLIYADNPDLCTNAGDSCQTAPQGKSKLVIYYVAVPMALIVVALAVLLCCLLRRRKTRGLADVSVKPRDKTPTSLASMAADEHRLSSLRLENRRFTYEDLEMITDSFKRVIGRGGFGYVYEGFLEDGTQVAVKMRSQSSNQGAKEFLTEAQILTRIHHKNLVSMVGYCKDGVYMALVYEYMSEGSLQEHIAGKRLTWGQRLRIALESAQGLEYLHRGCNPPLIHRDVKTSNILLNAKLEAKVADFGMSKALDRDTYASTNTLVGTPGYVDPEYLETMQPSTKSDVYSFGVVLLELVTGRPPILHSPQPTSVIQWARQHLARGDIEVVVDASMGGNHDVNSVWKAAEVALQCTEQASAQRPTMGDVVAQLLECLDLEKGRSANESFCDGDDSGSATASLSHSSAFVTGRIFGTVPMVETGPATR

SEQ ID NO: 3560 - protein, 343 aa, Zea mays
MDMAHERDASSEEEVVAGELRRGPWTVEEDLLLVNYVAAHGEGRWNSLARSAGLRRTGKSCRLRWLNYLRPDLRRGNITPQEQLLILELHSRWGNRWSKIAQHLPGRTDNEIKNYWRTRVQKHAKQLKCDVNSQQFKDVMRYLWMPRLVERIQNAAAAGTPQQHKAGAADTPLSSPSSWQPGGGGGLYASPDLPATDACCWPPADCYPAAAAAVGDGDHHHQLLMNNPAAVPELSASTTTAGSASPSSDSGAGAQPCWLAPVGGAEWFTTTCDATSSTAAVLLAGHQHQQQQQWSCLLGEATWASSSELPDLGCVADFEIGSFDVESIWSTDDSLWFTQAQGV

SEQ ID NO: 3561 - protein, 1002 aa, Zea mays
  misc_feature (510)..(510): Xaa can be any naturally occurring amino acid
  misc_feature (532)..(532): Xaa can be any naturally occurring amino acid
  unsure (1)..(1002): unsure at all Xaa locations
MAARSSAAAVAVLLLAAAGAAAAAGGAEGDGDGQALMAVKAGFRNAANALADWDGGRDHCAWRGVACDAASFAVVGLNLSNLNLGGEISPAIGQLKSLQFVDLKLNKLTGQIPDEIGDCVSLKYLDLSGNLLYGDIPFSISKLKQLEDLILKNNQLTGPIPSTLSQIPNLKTLDLAQNKLTGDIPRLIYWNEVLQYLGLRGNSLTGTLSPDMCQLTGLWYFDIRGNNLTGTIPEGIGNCTSFEILDISYNQISGEIPYNIGYLQVATLSLQGNRLIGKIPEVIGLMQALAVLDLSENELVGPIPPILGNLSYTGKLYLHGNKLTGHIPPELGNMSKLSYLQLNDNELVGTIPAELGKLTELFELNLANNNLEGHIPANISSCSALNKFNVYGNRLNGSIPAGFQKLESLTYLNLSSNSFKGQIPSELGHIVNLDTLNLSKNHLTGSVPAEFGNLRSVQVIDMSSNNLSGYLPEELGQLQNLDSLILNNNSLAGEIPAQLANCFSLVSLNXVIQQLLWARPVIEKLLKVPNGXFMGNLMLHVYCQDSSCGHSHGTKGFVILLCIVLLAIYKTNQPQLPEKASDKPVQVSQEDSSITFLDHIAGPPKLVVLQMDMAVHTYEDIMRLTENLSEKYIIGYGASSTVYRCDLKSGKAIAVKRLYSQYNHSLREFETELETIGSIRHRNLVSLHGFSLSPHGNLLFYDYMENGSLWDLLHGEAGFLSSLSFFFLNSCRFVLPITHGPRPFPGPSKKVKLDWDTRLRIAVGAAQGLAYLHHDCNPRIVHRDVKSSNILLDGSFEAHLSDFGIAKCVPAAKSHASTYVLGTIGYIDPEYARTSRLNEKSDVYSFGVVLLELLTGRKAVDNESNLHQLILSKADDDTVMEAVDPEVSVTCTDMNLVRKAFQLALLCTKRHPADRPTMHEVARVLLSLLPPAAKPPASKAAAASAAAGDYTRFLATAADLRRGGVADDDTGDNSSSDEQWFVRFGEVISKHTLSCSSVRPSP

SEQ ID NO: 3562 - protein, 502 aa, Zea mays
IPDLSGSSNLSIIHLENNQLTGNVPSYFGSLPKLSELYLENNRLSGPIPKALLSRSIIFNYSGNVYLGTAGKQKKKHVIIIISALLGASLLLAAALCCYMLTRKAMNSSSSPQAQEKALPAEQNKLQKYPSTQQLQSIATETAHPYSLCELEEATNKFASRIGSGGFGIVYYGKLSDGKEIAVKVPSNDSYQGKKQFSNEVVLLSRIHHRNLVAFLGYCHEDGRNILVYEFMHNGTLKEQLHRRDKHISWIKRLEIAEDAAKGIEYLHTGCTPSIIHRDIKTSNILLDKHMRAKVSDFGLSKLLAAEGKDSHASTNVRGTMGYLDPQYYVSQQLTEKSDMYSFGIILLELISGCPPISTIAFGDNFRNIGPWAKFYYESGDIEAIIDPSISTAAEYQDVQSVWKIAEAAVRCIDAEPRKRPCMPEVVKEIQDALALERAAAETTTSDRALACPFSPAAASVRSGGTMRSHDMVMDNLLLLDDDDDSTFSGSTVTKLKYPELR

SEQ ID NO: 3563 - protein, 337 aa, Zea mays
MEAFAAQHQGDVCMEAVGVDTAAQQGPRPRTAHRRSRSDVPSGYYFGGEGHQLPPPKVEAGWGGHLHGGGGDDDLFNAYLNLEGLDGLNSSDDRRQYYDGDSRGSSVRTNGADSSENDSEECAAAGPPVAHHVRSLSMDSSLIGKLNFSAGAAAANGGVIPGPNRFSLEFGSGEFTPVEMNKIMADEKLAEMALADPKRAKRVLANRQSAARSKERKMRYIAELEQKVQILQTEATALSAHLTLLQRDSAGIATQNNELQFRLQAMAQQAQLRDALNEALTAEVQRLKLATAELGDSCSSNSLAQQMQIQLSAHDQTFELHQQQAMPIAFYQLRQAQ

SEQ ID NO: 3564 - protein, 398 aa, Zea mays
  misc_feature (240)..(240): Xaa can be any naturally occurring amino acid
  unsure (1)..(398): unsure at all Xaa locations
MNTTNGHGLMHHHHVQASMAPAQHQKQRPGLPPPAPAPAGAGSHSLHADMCVDDSSAPGRAQALGGLPPRKAHRRSRSDVVPYGYFQPLPPPSPSPKVEAGGWGLASGGGGGAGDDLLNAYMSMEGMDGLNHSDGDSRGSSGMRTNGADSSENESEDYGAGADSQFFLWGDGGKRRRNASGEPAAPPAAAAAAARHARSHSMDSLMGKLSFSANGEPGKFSLDFGGGEFTPAEMKRIMAXDEKLAEMALADPKRVKRVLANRQSAARSKERRMRYIAELVRWVQILQTEATTLSAQLTLLQRDSAGLATQNNELKFRLQAMEQQAQLRDALNEALTGEVQRLKLGDTASSGNNLPQQVQLRCQNHVAGLHKQQQQQGGEQIPFYQLEQNGAPRNDAPK

SEQ ID NO: 3565 - protein, 174 aa, Zea mays
MSRDPLVVGHVVGDILDPFIKTASLKVLYNNKELTNGSDLKPSQVASEPRVEIGGRDMRNLYTLVMVDPDSPSPSNPTNREYLRWLVTDIPESANASYRNEIVSYENPKPSAGIHRFVFVLFRQSVQQTVYAPGWRQNFNTRDFSALYNLGPPVAAVFFNCQRENGCGGRRYIR

SEQ ID NO: 3566 - protein, 473 aa, Zea mays
MGRSGGGDGDGDGDRLLLGKPLESSSSCSSSDESLVKRTGTVWTAMAHIITAVIGSGVLSLAWSVAQLGWVGGPAAMVFFAGVTAVQSTLIADCYICHHPERGGVVRNRSYVDAVRIYLGDKSHLFCGFFLNLSLFGTGVVYTLTSATSMRAIRKANCYHREGHDAPCSVGGDGYYMLLFGLAQVLLSQIPNFHEMAGLSIFAAVMSCFYAFVGVGLGVAKVIANGVIMGGIGGIPLVSTTQKVWRVSQALGDILFAYPFSLVLLEIEDTLRSPPPESETMKKATRASIAITTLFYLCCGCFGYASFGDGTPGNLLTGFGFYEPYWLIDLANLAIVLHLLGGYQVYTQPVFAFADRKFGGGATVVEAPLLPVPGARRVNANVFRLCFRTAYVAATTALAVWFPYFNQIIGLLGSFTFWPLAVYFPVEMYLTRNKVAPWTNQWLAIHAFSLVCLLISAFASVGSAVGVFGSETS

SEQ ID NO: 3567 - protein, 133 aa, Zea mays
VPFAQTFAAVITAALTGTLYYVATTPKDPTYVVTPAMRSRTGRENLKKLFAAWYERRQMRKIYSPLLEGILAFYLGFEWIQTDNILAPMITHGIYSTVVLGHGLWKIHDHRRRLRQRIQKVRSEGSSSADDTL

SEQ ID NO: 3568 - protein, 454 aa, Zea mays
  misc_feature (443)..(443): Xaa can be any naturally occurring amino acid
  unsure (1)..(454): unsure at all Xaa locations
MEVAGNHVQSCRTELPEPQKPLVDDDGRPLRTGTLWTASAHIITAVIGSGVLSLAWGVAQLGWAGGPAAMVLFAAVIYYTSTLLAECYRCGDPTFGPRNRTYIDAVRATLGDSKERLCGAIQLSNLFGIGIGVSIAASVSMQAIRRAGCFHYRGHEDPCHASTSPYIAVFGVMQIVFSQIPDLDKVWWLSTVAAIMSFSYSTIGILLGVVQIVEHGGPRGSLAGVIGAGARVTMMQKDTIKSPPPSEAKVMKKATAVSVAVTTVIYLLCGCVGYAAFGGAAPDNLLTGFGFYEPFWLLDVANAFVVVHLVGTYQVMSQPVFAYVERRAAAAWPGSALVRDRHVRVGRAVAFSVSPARLAWRTAYVCVTTAVAMLLPFFGSVVGLIGAASFWPLTVYFPVEMYIAQHRVARGSMRWLLLQGLSAGCLVVSVAAAAGSIAGVVEXLKAHNPFCWSC

SEQ ID NO: 3569 - protein, 467 aa, Zea mays
  misc_feature (205)..(205): Xaa can be any naturally occurring amino acid
  misc_feature (259)..(259): Xaa can be any naturally occurring amino acid
  unsure (1)..(467): unsure at all Xaa locations
MGDPSASADPAAARHHLSPQLAGQPPVPRSPAPLDLASAAAASGHRRLSPSLRPPAHPQARLPSPYGQISSPGAAAHHALSLSQPLFFSLDSLPPPPPPYADLGAAPAVPAPSPPPSTSDPPPPLGLPPRRSGHRRSQSDIPFGLAQLSPPLPPPAPVKREVATAAEGGDGDDAAFFDLVNAYMDLDGLDPLNSSEDRHDDRDSXRASGTTRAGSAAESSENEAESQSTSADRKDGGKSRHCRSLSMDSFMGKLNFAAXDESPKLPLPSPRASGSLTRSGSGSLEGGAVALFDMEFSNGEFTESEKKKIMANERLAEIALTDPKRVKRILANRQSAARSKERKMRYIQELEHKVQVLQTEATTLSAQLTMLQRDSAGLATQNNELKIRLQAMEQQAQLRDALNEALTGEVQRLKLATGEMTDGPMPKGLQQQMNSQMLQLQQLQIQQQAPPQQTQQQGQRQQPQKSA

SEQ ID NO: 3570 - protein, 697 aa, Zea mays
MASGSRATPTRSPSSARPEAPRHAHHHHHSQSSGGSTSRAGGGAAATESVSKAVAQYTLDARLHAVFEQSGASGRSFDYSQSLRAPPTPSSEQQIAAYLSRIQRGGHIQPLGCTLAVADDSSFRLLAFSENSADLLDLSPHHSVPSLDSFALPPVSLGADARLFFSPSSAVLLERAFAAREISLLNPLWIHSRASSKPFYAILHRIDVGVVIDLEPARTEDPALSIAGAVQSQKLAVRAISRLQALPGGDVKLLCDTVVEHVRELTGYDRVMVYKFHEDEHGEVVAESRRDNLEPYLGLHYPATDIPQASRFLFQQNRVRMIADCHAIPVRVIQDPGLSQPLCLVGSTLRAPHGCHAQYMANMGSIASLVMAVIISSGGDDERTGRGGISSSMKLWGLVAFGLQLNMELQLAHQLSEKHILRTQTLLCDMLLRDSPAGIITQSPSVMDLVKCDGAALYYRGKYYPLGVTPTESQIKDIIEWLTVCHGDSTGLSTDSLADAGYLGAVALGDAVCGMAVAYITPSDYLFWFRSHTAKEIKWGGAKHHPEDKDDGQRMHPRSSFKAFLEVVKSRSLSWENAEMDAIHSLQLILRDSFRDAAEGTSNSKAIVNGQRQLGELELRGINELSSVAREMVRLIETATVPIFAVDTDGCINGWNAKIAELTGLSVEEAMGKSLVNDLIFKECDDIVEKLLSRALR

SEQ ID NO: 3571 - protein, 333 aa, Zea mays
MAPAAPASATKCSSGIVISVLLPLALLMAAAGTSSAQLSTGFYSSSCPGVYDAVKSVVQSAVASEQRMGASIVRLFFHDCFVQGCDASLLLDDTPSFQGEKMANPNNGSVRGFEVIDAVKSAVEKVCPGVVSCADILAIAARDSVVILGGPTWDVKVGRRDSTTASFSGANNNIPPPTSGLANLTSLFAAQGLSQKDMVALSGAHTIGQARCTNFRAHVYNDTNIDGSFARTRQSGCPRSSGSSGDNNLAPLDLQTPTVFENNYYKNLVCKKGLLHSDQELFNGGATDALVQSYASGQSEFFSDFVTGMVKMGDITPLTGSGGQIRKNCRRVN

SEQ ID NO: 3572 - protein, 607 aa, Zea mays
MGQCYGKAGGASSRRADHDDHAHAVAPPSPLPANGAPPPQPATPGRRMSGSATPVHHQAATTAWPSPYPAGGASPLPAGVSPSPARSTPRRFFKRPFPPPSPAKHIKATLAKRLGGGKPKEGTIPEEGGAGVAADSAEAERPLDKTFGFANNFGAKYDLGKEVGRGHFGHTCSALVKKGEYKGHAVAVKIISKAKMTTAISIEDVRREVKILKALSGHNNLVKFYDACEDALNVYIVMELCEGGELLDRILARGGRYTEEDAKAIVVQILSVVSFCHLQGVVHRDLKPENFLFATRDESAPMKLIDFGLSDFIRPDERLNDIVGSAYYVAPEVLHRSYSMEADIWSIGVITYILLCGSRPFWARTESGIFRSVLRADPNFDDSPWPSVSAEAKDFVKRFLNKDYRKRMTAVQALTHPWLRDEQRQIPLDILVFRLVKQYLRATPLKRLALKALSKALREDELLYLRLQFKLLEPRDGLVSLDNFRTALTRYVTDAMRESRVLEFLHALDPLAYRKMDLEEFCAAAISPYQLEALDSWEEIAGTAFQHFEQEGNRVISVEELAQELSLAPTHYIVQDWIRKSDGKLNFLGFTKFLHGVTIRGSNTRRH

SEQ ID NO: 3573 - protein, 536 aa, Zea mays
MCRRTSKGPLPRAVQCQQAMVDTVAGATDYRGQPASRAATGGWKPSVFVMAMEIAERFAYKGVAANLITYLTGPLGQPMARAAASIDAWKGVSQMLPLPLACVADAWLGRYRAIVLASLIFAVSMGALSLSSALPALRGGHVAIFYVALYLVALGEGAHKPCAQAFAADQFDEKDPRESVARSSFFNWWYFGMCAGTAVTTMVSSYVQDNVGWGLGFGIPCIVIVASLVLFLLGTRSYRFYTTAAASPFSRVGKALLALVQSWAPKHRTRKLGDSDGDAVAVEEVKSVLRLLPIWASCIIYAIIFSQTSTFFTKQAATLDRRIGARFKVPAAALQTFISVSIVVFIPVYDRLFVPLARRYTGRPTGITMLQRVGAGLALALVAVALSALVEMKRLRVAAEAGLVNTPKAQLPMALWWMVPQYVLIGVADVFAMIGLQEFFYDQVPNAVRSLGLALFLSIFGIGHLLSSFLISVIDKTTAKSGTSWFSNNLNRAHLDYFYWLLTGLCAVELVAFVIFSRVYVYKRKVGNDGGNGDFV

SEQ ID NO: 3574 - protein, 482 aa, Zea mays
MAASVTVENLNPKVLKCEYAVRGEIVIHAQRLQQQLQTQPGSLPFDEILYCNIGNPQSLGQQPVTFFREVLALCDHPCLLEKEETKSLFSADAISRAKQILATIPGRATGAYSHSQGIKGLRDAIAAGIMSRDGFPANADDIFITDGASPGVHMMMQLLIRNEKDGILCPIPQYPLYSASIALHGGALVPYYLNEKTGWGLEISDLKTQLENARSKGIDVRALVVINPGNPTGQVLAEDNQYDIVKFCKNEGLVLLADEVYQENIYVDNKKFNSFKKIVRSMGYGEDDLPLVSLQSVSKGYYGECGKRGGYMEITGFSAPVREQIYKIASVNLCSNITGQILASLVMNPPKAGDESYASYKAEKDGILESLARRAKALEDAFNKLEGFSCNKAEGAMYLFPQIHLPQKAIEAAKAAKKAPDAFYALRLLESTGIVVVPGSGFGQVPGTWHIRCTILPQEDKIPAVISRFRAFHEAFLAEYRD

SEQ ID NO: 3575 - protein, 387 aa, Zea mays
MADQANQPTVLHKLGGQFHLSSSFSEGVRARNICPSVSSYERSFATRNYMTQSLFSPSMSVTGGINVPVMRTPLFANAPAEKGGKNFMIDFMMGGVSAAVSKTAAAPIERVKLLIQNQDEMIKSGRLSEPYKGIGDCFKRTIKDEGFSSLWRGNTANVIRYFPTQALNFAFKDYFKRLFNFKKDKDGYWKWFAGNLASGGAAGASSLFFVYSLDYARTRLANDAKAAKGGGDRQFNGLVDVYRKTLKSDGIAGLYRGFNISCVGIIVYRGLYFGLYDSIKPVVLTGNLQDNFFASFALGWLITNGAGLASYPIDTVRRRMMMTSGEAVKYKSSLDAFQQILKKEGPKSLFKGAGANILRAIAGAGVLSGYDQLQILFFGKKYGSGGA

SEQ ID NO: 3576 - protein, 605 aa, Zea mays
MCGILAVLGCADEAKGSSKRSRVLELSRRLKHRGPDWSGLRQVGDCYLSHQRLAIIDPASGDQPLYNEDQSVVVAVNGEIYNHLDLRSRLAGAGHSFRTGSDCEVIAHLYEERGEEFVDMLDGVFSFVLLDTRHGDRAGSSFFMAARDAIGVTPLYIGWGVDGSVWISSEMKALHDECEHFEIFPPGHLYSSNTGGFSRWYNPPWYDDDDEAVVTPSVPYDPLALRKAFEKAVVKRLMTDVPFGVLLSGGLDSSLVAAVAVRHLAGTEAARRWGTKLHSFCVGLEGSPDLKAAREVAEYLGTLHHEFHFTVQDGIDAIEDVIYHTETYDVTTIRASTPMFLMSRKIKSLGVKMVISGEGSDELFGGYLYFHKAPNKEGLHRETCRKVKALHQYDCLRANKATSAWGLEARVPFLDKEFINAAMSIDPQWKMVRPDLRRIEKWVLRKAFDDEEQPFLPKVHILYRQKEQFSDGVGYSWIDGLKTHAASNVTDKMLSNAKFIFPHNTPTTKEAYYYRMVFERFFPQKSAILTVPGGPSVACSTAKAIEWDTQWSGNLDPSGRAALGVHLAAYEHQHDPEHVPAAIATGSGKKPRTIRVAPPGVAIEG

SEQ ID NO: 3577 - protein, 362 aa, Zea mays
MSQRKGAMAAAVTASKHREDQEAMMVELRRGPWTLEEDNLLMNYIACHGEGRWNLLARCSGLKRTGKSCRLRWLNYLKPDIKRGNLTPEEQLLILELHSKWGNRWSRIAQHLPGRTDNEIKNYWRTRVQKQARQLRVDANSAVFRDAVRCYWMPRLLEKMAAHHHGDGELPPPLHPSHNIAGTASSRSPPAHGSQQEDPSSSAPAASGHYLQQVDPSPSTSTTSGSTTSAALPPVPCFSESELRWVVDQYGAAYGYTDDLDLDGGAGVVDDDSAAAAALDSLGLDGLDLGPADGGVYSDATLLDYLNATCAGGTTVMTMMGGVHGAAGGGDGHYGPAPWRTDELGQAARKLGDPQHQWRGGI

SEQ ID NO: 3578 - protein, 384 aa, Zea mays
  misc_feature (238)..(238): Xaa can be any naturally occurring amino acid
  unsure (1)..(384): unsure at all Xaa locations
MDVERKVVEADDDGRVRTGPRDVVVCGLAQYAILWGTMVGYTITTATSIMAVARTDCRHHRGHDAACASSGTVYMVAFGVVEVVLSQFPSLEKLTIISVVAAVMSCTYSFVGLFLSAAKLASNHGARGSLLGVKIAAGVSASTKTWHSLQALGNVAFAYTYSMLLIEIQDTVKAPPSENVTMKRASFYGISVTTIFYVSLGCIGYAAFGNAAPGNVLTGFDEPFWLVDVANIAVVVHXLVGAYQVYAQPIFACYEKWLGSRWPDSAFFHHEYAVRLPGCAVRFTMCKLVLRTAFVAATTVVSLMLPFFNAVLGLLGAIAFWPLTVYFPVTMYIAQAKVAPGSRKWVALQALNVGALLVSLLAAVGSVADMVQRLGHVTIFQTQF

SEQ ID NO: 3579 - protein, 461 aa, Zea mays
MDVERKVVEADDDGRVRTGTVWTATTHAITAVIGSGVLALPWSVAQMGWVLGPVALVGCAYITYFTAVLLSDCYRTPDPVHGKRNRTYMDVVRSCLGPRDVVVCGLAQYAILWGTMVGYTITTATSIMAVARTDCRHHRGHDAACASSGTVYMVAFGVVEVVLSQFPSLEKLTIISVVAAVMSCTYSFVGLFLSAAKLASNHGARGSLLGVKIAAGVSASTKTWHSLQALGNVAFAYTYSMLLIEIQDTVKAPPSENVTMKRASFYGISVTTIFYVSLGCIGYAAFGNAAPGNVLTGFDEPFWLVDVANIAVVVHLVGAYQVYAQPIFACYEKWLGSRWPDSAFFHHEYAVRLPGCAVRFTMCKLVLRTAFVAATTVVSLMLPFFNAVLGLLGAIAFWPLTVYFPVTMYIAQAKVAPGSRKWVALQALNVGALLVSLLAAVGSVADMVQRLGHVTIFQTQL

SEQ ID NO: 3580 - protein, 136 aa, Zea mays
  misc_feature (75)..(75): Xaa can be any naturally occurring amino acid
  unsure (1)..(136): unsure at all Xaa locations
MDARMFGLENPLVAALHHLLDARAMAATPADVKELAGAYAFVVDMPGLSTGDIRVQVEDERVLVISGERRREERXDAKYLRMERRMGKFMRKFVLPDNADVDKVAAVCRDGVLTVTVEKLPPPEPKKPKTIEIKVA

SEQ ID NO: 3581 - protein, 469 aa, Zea mays
MRDGGGAMDVDMQARGGGASHGGELDDDGKEKRTGTVWTASAHIITAVIGSGVLSLAWAMAQLGWVAGPVILLLFAAITYYTSCLLTDCYRFGDPVTGKRNYTYTEAVESYLGGRYVWFCGFCQYANMFGTGIGYTITASASAAAILKSNCFHWHGHDADCTQNTGSYIVGFGVVQVIFSQLSNFHELWWLSVLAAAMSFCYSTIAVGLALGQTISGPTGKTTLYGTQVGVDVGSAEEKIWLTFQALGNIAFAYSYTIVLIEIQDTLRSPPAENKTMRQASVLGVATTTAFYMLCGCLGYSAFGNAAPGDILSGFYEPYWLVDFANVCIVIHLVGGFQVFLQPLFAAVEADVAARWPACSARERRGGVDVFRLLWRTAFVALITLCAVLLPFFNSILGILGSIGFWPLTVFFPVEMYIRQQQIPRFSATWLALQALSIFCFVITVAAGAASVQGVRDSLKTYVPFQTRS

SEQ ID NO: 3582 - protein, 342 aa, Zea mays
  misc_feature (99)..(99): Xaa can be any naturally occurring amino acid
  misc_feature (142)..(142): Xaa can be any naturally occurring amino acid
  misc_feature (271)..(271): Xaa can be any naturally occurring amino acid
  misc_feature (311)..(311): Xaa can be any naturally occurring amino acid
  misc_feature (330)..(330): Xaa can be any naturally occurring amino acid
  unsure (1)..(342): unsure at all Xaa locations
AYSPATPTPILVQEISCYLGLELRQIKIERVVDGGIYVQLEESVHGCHVFQVQSTCPPSNENLMELLIMIDACRKASAKNINAGIPYFGYARADKKVRXEKKKKAKLVANLIMEVGAHRVLACELHSGQSIDYFDIPVDHVXHSQPIILDYLASKTICPEDVVVVSPDMGGVARPRAFAKKLSDAPLAIVDKRRPGHNQAEVVHLIDDVRGKVVVMLSDAPLAIVDKRRPGHNQAEVVHLIHDVRGKVVVMVDGMINTTENISKGAELLHXGARVVYTCSTHAVLNSPPALQRLFSDLFQEVIITNTVPVXQLTVLSVANLLGETIWRGXVHDDCSVSSIFQ

SEQ ID NO: 3583 - protein, 172 aa, Zea mays
MAASATAARPLAGTAVPLPLSTRTRPARVALLSLIPPAPAQRLALRRGAWLSPPERSRSVRCLAAMSPEMRATLDKVVGSSKVVLFMKGTKDFPQCGFSHTVVQILRSLDVPFETLDVLANEALRQGLKEYSSWPTFPQLYIDGEFFGGCDITVEAYKSGELQETLEKAMCS

SEQ ID NO: 3584 - protein, 213 aa, Zea mays
  misc_feature (133)..(133): Xaa can be any naturally occurring amino acid
  misc_feature (143)..(143): Xaa can be any naturally occurring amino acid
  misc_feature (147)..(147): Xaa can be any naturally occurring amino acid
  misc_feature (150)..(150): Xaa can be any naturally occurring amino acid
  misc_feature (157)..(157): Xaa can be any naturally occurring amino acid
  unsure (1)..(213): unsure at all Xaa locations
MASARGPCAIRCAMATGKEQGAISTASSGDQTKGGLRGKLNKVVLAYSGGLDTSVIVPWLRENYGCEVVCFTADVGQGAIELEGLEKKAKASGACQLVVKDLKEEFVSEYIYPCLRADAVYERKYLLGTSMAXRPVFAKGMVXFSKXFGXDAISPGXPGKKEAPFLGFKPRKIKGAPGGGGPGKFFFFFKKKKGPPFKKKPPPFGAPRGGGGK

SEQ ID NO: 3585 - protein, 161 aa, Zea mays
MADNDAQHEHTFDSADAGASKTYPMQCSALRKNGFVCIKNRPCKIVDMSTSKTGKHGHAKVHLVAIDLFTGKKLEELCPSTHNMDVPNVTRREYQLLDVTDDGFLSLMTDDGATKDDVKIPDGEVGDKITKLFTEEGKDTNVIVLTAMGEEAAIDAKEAPK

SEQ ID NO: 3586 - protein, 488 aa, Zea mays
MATCATTLAPLLGPAANATEYLCNQFADTTSAVDSTYLLFSAYLVFAMQLGFAMLCAGSVRAKNTMNIMLTNVLDAAAGALFYYLFGFAFAYGTPSNGFIGKHFFGLKRLPQVGFDYDFFLFQWAFAIAAAGITSGSIAERTQFVAYLIYSAFLTGFVYPVVSHWVWSADGWASPSRTSGKLLFGSGIIDFAGSSVVHMVGGIAGLWGALIEGPRIGRFDHAGRSVALRGHSASLVVLGTFLLWFGWFGFNPGSFLTILKSYGPAGSIHGQWSAVGRTAVTTTLAGSTAALTTLFGKRLQTGHWNVVDVCNGLLGGFAAITAGCSVVDPWAAIICGFVSAWVLIGLNALAARLRFDDPLEAAQLHGGCGAWGVLFTGLFARREYVEQIYGTPGRPYGLFMGGGGRLLAANVVMILVIAAWVSVTMAPLFLALNKMGLLRVSAEDEMAGMDQTRHGGFAYAYHDDDLSLSSRPKGMQSTQIADAASGEF

SEQ ID NO: 3587 - protein, 294 aa, Zea mays
MSSLGGQQQHGRGDEARARLRWTRQLHGRFVLAVAQLGGADKATPKSVMRAMAVSGLTLYHLKSHLQRYRLAVSQGTASPVGEGDNGGGANERSSSSESQLDEYDDGSVADLHGDSSGSMAARVQREAKRKRHEQMQIEVQRHLQLRIEAQGRYMQSVLRRAQEALADHILGSPATGAEAELSELASAVETGTGCLSSTSCCSTSPSPMRHRSADSCVTSSSSSSSSEAESQAPAGANTCAGTRDCSVERPVQGEESTFLQRHEDEDEAEEADVGAAAAAEDEDGTSSEIDLNR

SEQ ID NO: 3588 - protein, 192 aa, Zea mays
WEPRGRPGVHRVIFLQYLSATDPLVMARVLQDVLDTFTPTIPLRITYNNSQVLAGAELKPSAVISKPRVDIGGNDMRTFYTLVLIDPDAPSPSHPSLREYLHWMVTDIPETTSVNFGQELVFYERPDPRSGIHRLVFVLFRQLGRGTVFAPEMRQNFNCRSFARQYHLSIASATHFNCQREGGSGGRRFREE

SEQ ID NO: 3589 - protein, 171 aa, Zea mays
  misc_feature (47)..(47): Xaa can be any naturally occurring amino acid
  unsure (1)..(171): unsure at all Xaa locations
QGGADGKNGFVSIRNRPCKVEEVSTSKTGDDGHGKCHFVDRDIFDGXKLEYIVPSSHNCVFLYANRTEYQLIDISEEGFVSLLTSHGNSKDDLILPTDETLVAQIKERFDSDKDLDVTVQSAMGEDHSCAVKDVHPHQLPWLCGRNPTVSQLRSENKRITTCIATETFTLT

SEQ ID NO: 3590 - protein, 387 aa, Zea mays
MADQANQPTVLHKLGGQFHLRSIISEGVRARNICPSVSSYERRFATRNYMTQSLWGPSMSVSGGINVPVMQTPLCANAPAEKGGKNFMIDFMMGGVSAAVSKTAAAPIERVKLLIQNQDEMIKSGRLSEPYKGIVDCFKRTIKDEGFSSLWRGNTANVIRYFPTQALNFAFKDYFKRLFNFKKDRDGYWKWFAGNLASGGAAGASSLFFVYSLDYARTRLANDAKAAKGGGERQFNGLVDVYRKTLKSDGIAGLYRGFNISCVGIIVYRGLYFGLYDSIKPVVLTGNLQDNFFASFALGWLITNGAGLASYPIDTVRRRMMMTSGEAVKYKSSLDAFQQILKKEGPKSLFKGAGANILRAIAGAGVLSGYDQLQILFFGKKYGSGGA

SEQ ID NO: 3591 - protein, 248 aa, Zea mays
MSGGNAWSPLPSHGFESDSGGMGSRAGEPVARTNSSGGGGSSKDSGSFECNICLDLAQDPVVTLCGHLFCWPCLYEWLHVHAHSQECPVCKAVVEEGKLVPLYGRGGNSTSPRARSVAGVEIPSRPTGQRPSTAPQPDHSNHYPPQNLWFMGAGAPPVAGGRWGNYTFSAAIGGLFPLLSFQVHGFPQVSAYGPAAGFPYGYGHSFHGWHGHGYGFPRQAPQGQQVDGYLKVLLLVVGVLVIASLIAF

SEQ ID NO: 3592 - protein, 144 aa, Zea mays
  misc_feature (108)..(108): Xaa can be any naturally occurring amino acid
  unsure (1)..(144): unsure at all Xaa locations
PPPGRHARSPPTQSRPRGLSLAYAGIKMVHRDLVGKGPGSVKLVPREEDNLGNAYNLIAIGDSLKAVTVRKVLKEGVFGGRDAERVKFKLKIVVEFVNYDKGGFVLRXAGKNITGKDHVKMGQFHTLELGLKKLFVLRREIWDG

SEQ ID NO: 3593 - protein, 169 aa, Zea mays
  misc_feature (93)..(93): Xaa can be any naturally occurring amino acid
  unsure (1)..(169): unsure at all Xaa locations
MTHNFKEAAGAVHARRQATILSEMEGAMTTRSKHRRDEEDQEMTMVELRRGPWTLEEDNLLMNYIACHGEGRWNLLARCSGLKMTGKSCRLRXLNYLKPDIKRGNLAPEEQLLILELHSKWGNRWSRIAQHLPGRTDNEIKNYWRTRVQKQARQLPVDANSAVFRDAVR

SEQ ID NO: 3594 - protein, 160 aa, Zea mays
  misc_feature (72)..(72): Xaa can be any naturally occurring amino acid
  misc_feature (154)..(154): Xaa can be any naturally occurring amino acid
  unsure (1)..(160): unsure at all Xaa locations
MSDSEEHHFQSKGDAGGCKTYPQQGGTVRENGVIVIKNRACEGGGGSTSKTGEHGHAKCHFVAIDIFNGKKXEDIVPLSHNCDIPHVNRTEDQLSEISEEGGVRLLTSYGDTKEELILPTEETLVGQIKEGVESGKDLVVTVHSAMGEEEICAXKDVGPK

SEQ ID NO: 3595 - protein, 388 aa, Zea mays
MPAMTTTAADPGSQTPQCSMPAKTWTTTPGGPSSPARCCSMLARTTKPGPSSQSRAGGGGNAGAGSSRLTRSAALHAGKDNGAGSKPAIQVVPRLHAGGKDNNAGSFKAARPSAADSGESNAKEGKSNVAGEQRAREAGVGCGGGKGNAAAVEDVDHDLHIFTERERRKKMKNMFSTLHALLPQLPDKADKATIVGEAVTYIKTLEGTVQKLEKLKLERKRALAAQQQLMAGAGSNRASSARHPAPAPSSPSSSSREANVADMVHGWHAQQAAANKALAAEAGAGGSSSAAASLPRGAVPFPAPAAGFQTWSGQNVVVSVASNEAYINLHSPRQPAGTLTKALFVLERHRIDVVTTTISTQDGFHMYGIHARVQAGGVGDAAADQHLS

SEQ ID NO: 3596 - protein, 337 aa, Zea mays
MTIPGGVQRILPVPAVLFIRRPGAPFGNAMHERFRVLELPSPASGEQAAAFLAAAAAEPDPPRAAVVMGGGAVRADAAFLDAVPSVRCLVSTAAGVDHIDLAECARRGVAVANSGTVYSADVADHAVGMLIDVLRRVSAAGRFVRRGLWPLQEGEYPLGSKLGGKRVGIIGLGNIGSLVAKRLEAFGCVICYNSRRRMDSVSYRYFSNVQRLASESDVLVVACALNKETRHIVNEDVLEALGKDGVVINIGRGASIDEAALVSALKEGRIAGAGLEVFENEPKVPPELMSMDSVVLTPHSAVFTTESRADLCQHLICNLEAFFAGKPLITPVLRLTE

SEQ ID NO: 3597 - protein, 175 aa, Zea mays
MYPAKPAASSSQPAAEMAQPVVGIPISSPGAVAVGPVVGKWSSGLCACSDDCGLCCLTCWCPCITFGRIAEIVDRGATSCGVAGTIYTLLACFTGCHWIYSCTYRSRMRAQLGLPEACCCDCCVHFCCEPCALSQQYRELKARGFDPDLGWDVNAQKAAAAAAMYPPPAEGMMIR

SEQ ID NO: 3598 - protein, 402 aa, Zea mays
  misc_feature (245)..(245): Xaa can be any naturally occurring amino acid
  unsure (1)..(402): unsure at all Xaa locations
SHDQQQSASRTPLHRPQPQAQIPSHPTPPSRSLQPSPRPHSPATASTGCIQPPRRVTAGHLWPESKKPRRAAAGRRRAPVEQEQEEDFEADFEEFEVESGESELESEDEPKPKSFAAPSSALARGGLNTGAAGVDGPAANSVKRKRKNQFRGIRRRPWGKWAAEIRDPRKGVRVWLGTFNSPEEAARAYDAEARRIRGKKAKVNFPDEVPTAVSQKRRAAGLASLKAPKMDVEEEKPIIKLGSEXMTNSNAYHYPAVVGHHNIIPEPFMQTQNMPFAPLVNYAALVNLSSDQGSNSFGCSDFSLENDSRTPDITSVPAPVATLAAVGESAFVQNTAGHAVAPPATGNTGVDLAELEPYMDFLMDGGSDDSISTLLSCDGSQDVVSNMDLWSFDDMPMSAGFY

SEQ ID NO: 3599 - protein, 330 aa, Zea mays
MESGRLIFNAPGSGAGQMLFLDCGAGGGPGGGLFHRGGRPMLGLEEGRGVKRPFFTSPDELLEEEYYDEQLPEKKRRLTPEQVLLLERSFEEENKLEPERKTELARKLGLQPRQVAVWFQNRRARWKTKQLERDFDRLKASFDALRADHDALLQDNNRRFIKVVSLTEKLQEKEDATEGGATADTAAPAVDVEASLADDVEEPAEPAATFEVLQEVKSEDRLSTGSGGSAVVDADALLYGRFAAAVDSSVESYFPGGEDHYHDCGTMGPVNHGAGGGIQSDDDGAGSDEGCSYYADEAAAAAAAFFAGHATHHHADEDEDAGQISWWMWN

SEQ ID NO: 3600 - protein, 161 aa, Zea mays
  misc_feature (11)..(11): Xaa can be any naturally occurring amino acid
  misc_feature (110)..(110): Xaa can be any naturally occurring amino acid
  misc_feature (150)..(150): Xaa can be any naturally occurring amino acid
  unsure (1)..(161): unsure at all Xaa locations
ILPRDSQEHHXHYKADPRTRKTYPETTTTRRQNGLMVINNRTYTTVEGGTCTTAHHRHPKRHLHALDIFNEKKLEDTDHSTHITDTPYVNPTEYQTTEIADDGTVSHYTXDGNTNHDLRLPTDETFVAQIKEGLQSNKDLVVTVQYGMGXEQISTLNDAAP

SEQ ID NO: 3601 - protein, 277 aa, Zea mays
MLLNPASMLDTIRQHLLEEPPAAADESFGILVADQWSDSLPFRTDDADDMVVFGALQDAFAYGWLPDGSFAHVKPEPVRSPDSSYYSYDGSCFGGLPYPEQPLTPGSEGEAAATPSPRREEAAAAVARGKHYRGVRQRPWGKFAAEIRDPAKNGARVWLGTYDTAEDAALAYDRAAYRMRGSRALLNFPLRIASEIAAAAAGDKRPLALPEPATSSDSSSTGGSPKRRKRGEAAAANMAMALVPPPSQLSRPAQPWFPAAAPVEQAAMPPRVEQLVI

SEQ ID NO: 3602 - protein, 85 aa, Zea mays
QARGPRGKGPPEEEFRQGRANENPFPPPWLGIGTITLFGGFALPPPGFLPREYARFFVKALFPWFPPPVFLFLAGPVGYGAPKTF

SEQ ID NO: 3603 - protein, 263 aa, Zea mays
MVPRDRGAQRRCCHRAPDGEARSRNNKCEKKAPKKVHKSEREKRKRDKQNDLFGELGNMLEPDRQNNGKACILSDTTRILKDLLSQVESLRKENNTLKNESHYVALERNELLDETNMIRGEISDLQNEMRMRLEDNSIWSHDTSRPNLTAPHPATTVFTLQHSPHPQVIATMTLPLQQPAVVEQSYAAPRRELQLFPEAAPTEDTEPPQNEGTSNHVMRPQARYPPAMTTLPGHVYPVLPRVEDEQRSSGTTGSREEGGVGNR

SEQ ID NO: 3604 - protein, 163 aa, Zea mays
  misc_feature (31)..(31): Xaa can be any naturally occurring amino acid
  misc_feature (64)..(64): Xaa can be any naturally occurring amino acid
  misc_feature (88)..(88): Xaa can be any naturally occurring amino acid
  misc_feature (102)..(102): Xaa can be any naturally occurring amino acid
  unsure (1)..(163): unsure at all Xaa locations
SIQERDRHVRTRQEHHFRSIADAGACKTYPXQGGTVRKNGSMRHQETVRARLTEGCTCKTGKHXHTPRCQFVDIDIFDGKKLENIVPXSHTWDIPHVNRTEXKLIEISEDGYVSLLTSDGNTKDDLRLTTDETVVAQIKEGLKSGNDIDETVQPRTVEEQICT

SEQ ID NO: 3605 - protein, 177 aa, Zea mays
  misc_feature (32)..(32): Xaa can be any naturally occurring amino acid
  misc_feature (51)..(51): Xaa can be any naturally occurring amino acid
  misc_feature (60)..(60): Xaa can be any naturally occurring amino acid
  misc_feature (83)..(83): Xaa can be any naturally occurring amino acid
  misc_feature (97)..(97): Xaa can be any naturally occurring amino acid
  misc_feature (157)..(157): Xaa can be any naturally occurring amino acid
  unsure (1)..(177): unsure at all Xaa locations
KDSIGPPVANARSRPPVACQAYYPLQAVTARXNGFIGIKNRPCKVVEGATXRTGHHGHAXCHFAAIDSDSTARKAPQILVLGXHNCNILHGNRTEYXSLNDISEDGLASLLTSDGNTNDDLTLPTDETVAAQIKEGVESGKDLVVTVQTAMAEEQIXALKDVGPKQLACLEILYLRN

SEQ ID NO: 3606 - protein, 218 aa, Zea mays
MARRASLLLAAALLVAVAAAAVPPTCERIECPAYEVVDSANGFEIRRYTDAMWITTAPIEDISFVAATRTGFLQLFDYIQGKNAYNQTIEMTAPVLTRVSPSDGPFCASAFAVSFYVPAKNQADPPPAEGLRVDRWAGARYAAVRRFGGFVADADVGEQAARLEASLQGTRWAAAVNDARRADPASPYTVAQYNSPFEFTGRVNEIWMLFDADDDASM

SEQ ID NO: 3607 - protein, 445 aa, Zea mays
  misc_feature (112)..(112): Xaa can be any naturally occurring amino acid
  unsure (1)..(445): unsure at all Xaa locations
MVASKAAPFDEVSSVEAGAYGGRDDDGRPRRTGTVWTASAHIITAVIGSGVLSLAWAIAQLGWAAGPAVMLLFAVVIYYTSTLLAECYRSGDPVAGKRNYTYMDAVRASLGXAPSAIKRADCFHAKGHKHACRSSSNPYMILFGVAEVVFSQIPDFDQIWWLSIVAAVMSFTYATIGLVLGIMQTVANGGFQGSLTGISIGAGVTPTEKVWRSLQAFGNIAFAYSYSIILIEIQDTVKAPPPSEAKVMKRATMVSVATTTVFYMLCGCMGYAAFGDAAPDNLLTGFGFYEPFWLLDIANVAIVVHLVGAYQVFCQPLFAFVEKWAAATWPDSAFIAREFRVGPFALSLFRLTWRTAFVCLTTVAAMLLPFFGDVVGLLGAVSFWPLTVYFPIEMYVVQRAVRRWSTHWICLQMLSAACLLVSVAAAAGSIADVIGALKVYRPFSG

SEQ ID NO: 3608 - protein, 186 aa, Zea mays
  misc_feature (136)..(136): Xaa can be any naturally occurring amino acid
  misc_feature (154)..(154): Xaa can be any naturally occurring amino acid
  unsure (1)..(186): unsure at all Xaa locations
MPDSHEHHFQSNADAVAINTYPHHAGTGRKNDFIFIENRPCKVVEVSTSNTVKHGHAKCHFDVIHIFNAKKLEHIVPSSHNCDIPHANRTEHQLIDITEDGFVSLLTSDGKTNDDLILPTDETLVAHIKEGVESGXKDLVETVHSAMAEDQICXAMNDAGPKQLPWLWRRNSTVSQLKSEKKCITI

SEQ ID NO: 3609 - protein, 160 aa, Zea mays
MSDSEEHHFESNADAGASKTYPQQAGTVRKNGFIVIKNRPCKVVEVSTSKTGKHGHAKCHFVAIDIFNGKKLEDIVPSSHNCDIPHVNRTEYQLIDISEDGFVSLLTSDGNTKDDLRLPTDETLVAQIKEGFESGKDLVVTVQSAMGEEQICALKDVGPK

SEQ ID NO: 3610 - protein, 114 aa, Zea mays
  misc_feature (33)..(33): Xaa can be any naturally occurring amino acid
  misc_feature (44)..(44): Xaa can be any naturally occurring amino acid
  misc_feature (53)..(53): Xaa can be any naturally occurring amino acid
  unsure (1)..(114): unsure at all Xaa locations
KKPEDIVPLSHNCDIPHVNRTEYQPIDISEDGXASPLTSDGNTXDDLRLPTEXTFVAQNNECVGSGNDLDVTVQAWMGEEQICALKDIGPKKLLGFGDGPLLYLNLNRTRSVSP

SEQ ID NO: 3611 - protein, 189 aa, Zea mays
  misc_feature (146)..(146): Xaa can be any naturally occurring amino acid
  unsure (1)..(189): unsure at all Xaa locations
MSRLGRSTTYKSKADAGASNTYPQHAGTVRKNGFIDINNRPCKVCGGTLPPHTGKHDHAKCHFVAIHIFDGKKLEDIDPSSHQTVTFLYVNRTEYQLIDISEDGFERLLTSDDSTKDDLILPTDETLVVHIKDTCSIADKDLVCTXVHSAMGEEHICTLNDVGPNELPWLYRLNPTVSQLISEHNCITE

SEQ ID NO: 3612 - protein, 164 aa, Zea mays
MSAPNDNEHEMTFDSADAGASLTYPMQCSALRKNGFVVIKNRPCKIVDMSTSKTGKHGHAKVHLVATDIFTGKKYEDLSPSTHNMDVPNVSRREYQLLDISDDGFLSLMTDDGDTKDDVPLPDNEVGQKITKLFKEEEKDTNVIVLTSMGEECAMEAKEAPNQG

SEQ ID NO: 3613 - protein, 126 aa, Zea mays
MVAAAAAAFIALVAFGSASSSPKSFVKSTVSAHDVVIFSKSYCPYCKRAKAVFKELELKKEPYVVELDQREDGSEIQDALLEIVGRRTVPQVFVHGKHLGGSDDTVDSYDRGKLARLLNIGVKDDL

SEQ ID NO: 3614 - protein, 580 aa, Zea mays
MGEVEDMYTQDGTVDMKGNPAVKKGTGNWRACPYILANECCERLAYYGMSTNLVNYMKTRLGQVNSVASNNVTNWQGTCYITPLIGAFFADAYMGRFWTIAIFMIIYIFGLALLTMASSVKGLVPTSCGDKDVCHPTDAQAAVVFVALYLIALGTGGIKPCVSSFGADQFDENDEREKKSKSSFFNWFYFSINIGALVASTVLVYVQTHVGWGWGFGIPAVVMAIAVGSFFVGTPLYRHQKPGGSPLTRIAQVLVACARKWNVAVPADKSRLHETVDGESGIEGSRKLEHSEQLACLDRAAVVTAEDGAEASPWRLCSVTQVEELKSVIRLLPIWASGIVFAAVYSQMSTMFVLQGNTLDQSMGPRFKIPSATLSMVDTISVIVWVPVYDRAIVPLVRSYTGRPRGFTQLQRMGIGLVVSIFSMVAAGVLDIVRLRAIARHGLYGENDIVPISIFWQIPQYFIIGCAEVFTFVGQLEFFYDQAPDAMRSMCSALSLTTVALGNYLSTVLVTIVTHITTRHGRIGWIPENLNRGHLDYFFWLLAVLSLLNFLAYLVIASWYKYKKTADDYPGAKGEHGTEH

SEQ ID NO: 3615 - protein, 480 aa, Zea mays
MAVSHNVGSKHGVAPLEVSVEAGNGGAAEWLDDDGRPRRTGTFWTASAHIVTAVIGSGVLSLAWAIAQLGWVAGPAAMLLFAFVTYYTATLLAECYRTGDPDTGKRNYTYMDAVRSNLGGAKVAFCGAIQYANLVGVAIGYTIASSISMQAVSRAGCFHKRGHAVPCKSSSNPYMILFGAVQILFSQIPDFDQIWWLSIVAAVMSFTYSAIGLSLGIAQTVANGGFKGSLTGISIGADVTSTQKVWHSLQAFGDIAFAYSFSNILIEIQDTIKAPPPSESKVMQKATRLSVATTTIFYMLCGCMGYAAFGDKAPDNLLTGFGFFEPFWLIDVANVAIVVHLVGAYQVFCQPIFAFVERRAAAAWPDSAFVSQELRVGPFAVSVFRLTWRSSFVCVTTVVAMLLPFFGNVVGFLGAVSFWPLTVYFPVEMYIKQRRVPRGSTKWICLQTLSVACLLVSVAAAAGSIADVIEALKVYHPFSS

SEQ ID NO: 3616 - protein, 347 aa, Zea mays
MGDSSDSVSVDVERIFFGGKGHRVRTRHGPLSVSVYGDEDKPALVTYPDLALNHMSCFQGLFFCPEAASLLLHNFCVYHITPQGHELGAAPISADVHVPSVDDLADQVADVLDFFSLGSVMCLGVTAGAYVLTLFATKYRERVLGLMLVSPVCKAPSWSEWLYNKVLLNLLYYYGTRGIVKESLLQRYFSMDVLGNGQDPESEIVQACRSLLDERQGTNVWRFLQAINRRHDLTESLEKLQCQTLIFVGENSQFHADTVHMTTKLDRRYCALVEVQACGSLVTEEQPHAMVIPMEYFLMGYGLYRPSQQESSPRSTLSPFCISPELLSPESMGVKLKPIKTRISRNV

SEQ ID NO: 3617 - protein, 391 aa, Zea mays
  misc_feature (238)..(238): Xaa can be any naturally occurring amino acid
  unsure (1)..(391): unsure at all Xaa locations
MRGLSRYLPFCGGGCCCGDGAGRAGGVADGLVWDVALKAHASGDYSIAVAQANEALEDQAQVVAAPAATLVGVFDGHGGPEAARFVNRRLFSHIQAFAAENGGLSAEVFQKAFGATEEEFIGLVQKSWPSQPRIVSVGSCCLVGAVDIENGTLYVANLGDSRAVLGRRRGKGRRVVAERLSQDHNVADEGVRREVAEMHPDDSHIVLNSHGVWRIKGIIQVSRSIGDVYLKKPDICRXNPVLQQSICPFPLRRPVMTAVPSITTRELRPGDRFIIFASDGLWEQLSDDAAVDVVASSPRKGVAMRLVRAAQLEAARKKEVKYDKIRTIEKGQRRHFHDDITVVVLFLDKCRGAARSGPEDIDGTYAPVDVFSCSPAAGGDHEDPTKPVLRR

SEQ ID NO: 3618 - protein, 154 aa, Zea mays
  misc_feature (35)..(35): Xaa can be any naturally occurring amino acid
  misc_feature (52)..(52): Xaa can be any naturally occurring amino acid
  misc_feature (76)..(76): Xaa can be any naturally occurring amino acid
  unsure (1)..(154): unsure at all Xaa locations
YHFQSNDDDGAPNTYPYHVGTARKNVFIVIKNRPXNVVEVSTSKTGNIGHAXCHFVHIHIFNGKKLEYIDPSSHNXDIPHGNRTEYRLIDMSDDGFVILLTSDGNSKDDLRLPTDDTLACHINEGFESWNDLVVTAQSAMRDEDICAMNDDGPE

SEQ ID NO: 3619 - protein, 158 aa, Zea mays
FDLGGGRWVGGWLTKVVSVSALQKQKAALASRLGLRARQVEVWFQNRRARTKLKQTEVDCEYLRRWCEQLAEENRRLGKEVAELRALSAAPAPAAPLTALTMCLSCRRVSSSSCSSSPPNTHAHAAAAGTGRSVAAAAATTLPAHRQFLCGFRDGGAA

SEQ ID NO: 3620 - protein, 197 aa, Zea mays
MRRAKPQQPSPSPEIRYRGVRRRPSGRYAAEIRDPAKKTPIWLGTFDSAEAAARAYDAAARSLRGPTARTNFPGAAASAPRHRARSASASAAAAAPAAVPATSSHSSTVESWSGGAPRVAAPPRSAAAPMEEDDDEDCHSYCGSSSSVLCEDARGDDDDDAAASHAPLPFDLNLPPPIDAAAEADQMGARYDTLLHL

SEQ ID NO: 3621 - protein, 369 aa, Zea mays
MATGEEHVAAPAPAVEETPEKKQASTTELPAPSGWTKKLAPTRGGRGGRFEVIFVSPTGEEIKSKRQLTQYLKAHPGGPASSEFDWGTSDTPRRSARLSEKVKATESPEGEKTPKRARSSSKRGKKEEKVDAEDANEAGEDGAAAEGKGTDVEMKDAENAEDEKKDVPSAEKTEEVDDKKDAENVEMKDAAEKTEEVDDKKEEAPAVDAAEKNEEGDDKKEEEPPAEKTVEKEVVPAVDAAENTEQSTGGQAQPNDVGAPESENKGDGKPAESELAPTAFVDEAVPLVIVGEEKTEDSQAAEPTVTSLASSEGEKKENGGATEPAAPPPADADKGAENSGQVNTAPQEPTAANCDKGQIQPGASAVRCT

SEQ ID NO: 3622 - protein, 130 aa, Zea mays
  misc_feature (82)..(82): Xaa can be any naturally occurring amino acid
  unsure (1)..(130): unsure at all Xaa locations
MPHLDDHQLESKVDTQASKTYSQNAGSARMNSLIVIKNRPCKVEEVSTSITGNHGHAKCHFAVIHIFNAKKIEYIVPSSHNXDITHVKRTQYRLIDISEDGFASLLTSDGNTKDDLRLPTDETLVAQIKE

SEQ ID NO: 3623 - protein, 550 aa, Zea mays
MAADDAARSSRRMDLNLYLGLPRAPRARRPDLGFDLALGTPMLSSSSPSSSAASADAPPLETDPLHPPYSPSRADLMRPPTPAHEPYNPFAPEAHPPYVPPPPLPVAGALPVLADELEFGFSDAHLGLVERLDRPSSSTASSSFRPDLAERYRHLMSLGGSRFFRPRRFRSDLPPLSSELPSLENDAAVQPPEPEEPVHDTVEENKVVANGAVVGVSEDDGTEHGKSAPMFECNICFEMADEPVVTSCGHLFCWPCLYQWLHVHSSHKECPVCKGEVTEGNITPIYGRGNSGSEMEKKVAEDGKASGPKIPPRPHGNRLESFRQQFHHLRPISRRLGEAHGFLSTWRRILDRHLANSMSRFEGPPEPSVSETAQHASSLGRMTTRLRARRWQREAENPTSIDSSAPDSGQPVNNTFDLPRRSSNPFPSEGMDLLRHIAFTGLEDSERFATAVSELRRIARASPYGASTSSNPPNPEPFGETQIATALAADQASNSSTMAVIQEDAAFTGSAGEPSNAGSSRPLRRRGSDALGSLDVDGGDLHQNKRRRLN

SEQ ID NO: 3624 - protein, 164 aa, Zea mays
MAAARADGERRIGVAIDYSESAKKALDWAIDNLLHHGDTLVVVHVLHHGAEETKHTLWAKSGSPLIPLSEFREPEVMQGYGVRPDAEVLDAIDTAARQKQLKVVAKLYWGDAREKLCDAVEDLRIDSLVMGSRGLGPIQRILLGSVTNYVLSNASCPVTVVKGK

SEQ ID NO: 3625 - protein, 364 aa, Zea mays
MCGGAILANLREPAPRRLTERDIWQQKKKLKRGGGGGRRSFAAEDDEDFEADFEVFEADSSDSDLELREGTDDDVVEIKPFTAKRTFSSDGLSTMTSDVARSAKRKRKNLYRGIRQRPWGKWAAEIRDPQKGVRVWLGTFNSPEEAARAYDAEARRIRGKKAKVNFPDAPAVGQKHRSSGSASAKASKSSFGQKPIVKVAMNNLANTNASFFQSASYPSNLFVQHGNMPFVPAMNSTASVEDPIMNLHSDQGSNSFGCSDLGWENDTKTPDITSIAPISTIAEGDESAFVDSNSNNSFVLPALENSAVDLTDGLTDLESYMRFVLDGGPSDSVDSLLNLDGSQDVGSDMDLWSFDDMPIVGDFF

SEQ ID NO: 3626 - protein, 189 aa, Zea mays
  misc_feature (10)..(10): Xaa can be any naturally occurring amino acid
  misc_feature (23)..(23): Xaa can be any naturally occurring amino acid
  misc_feature (58)..(58): Xaa can be any naturally occurring amino acid
  misc_feature (65)..(65): Xaa can be any naturally occurring amino acid
  misc_feature (82)..(82): Xaa can be any naturally occurring amino acid
  unsure (1)..(189): unsure at all Xaa locations
MAKSEEHHLXSKADAGATKTYPXEAGTARNNGFLVIKNRPCKVVEASTSKTGNHDHAXKCHLCRXIHIFHGKKLEDIVPASXHSVTLPYVNRTDYHLTDIAEDGYRTLLTSHGNTSDDLILPADETLEDHIKERVKSVKDLVVTVQTAMDEEHICSLKDVTPRNFLGFADGTLLYLYLNRNTSVSPKDC

SEQ ID NO: 3627 - protein, 165 aa, Zea mays
MDGRMFGLETPLMVALQHLLDVPDGDAGAGGDKASGAAAGGGPTRTYVRDARAMAATPADVKELPGAYAFVVDMPGLGTGDIKVQVEDERVLVISGERRREEREDAKYLRMERRMGKFMRKFVLPDNADMDKISAVCRDGVLTVTVEKLPPPEPKKPKTIEVKVA

SEQ ID NO: 3628 - protein, 136 aa, Zea mays
  misc_feature (92)..(92): Xaa can be any naturally occurring amino acid
  unsure (1)..(136): unsure at all Xaa locations
MTMFRSISMVMLLVALVTFISMVSSAASSPEADFVKKTISSHKIVIFSKSYCPYCNKAKSVFRELDQVPYVVELDEREDGWSIQTALGEIVXGRRTVPQVFINGKHLGGSDDTVYAYESGELAKLLGVSGNKEAEL

SEQ ID NO: 3629 - protein, 296 aa, Zea mays
  misc_feature (121)..(121): Xaa can be any naturally occurring amino acid
  misc_feature (233)..(233): Xaa can be any naturally occurring amino acid
  misc_feature (267)..(267): Xaa can be any naturally occurring amino acid
  misc_feature (272)..(272): Xaa can be any naturally occurring amino acid
  misc_feature (279)..(281): Xaa can be any naturally occurring amino acid
  misc_feature (288)..(289): Xaa can be any naturally occurring amino acid
  misc_feature (291)..(292): Xaa can be any naturally occurring amino acid
  misc_feature (294)..(294): Xaa can be any naturally occurring amino acid
  unsure (1)..(296): unsure at all Xaa locations
MASARGPCGISVRSDFSSACLIHKAGAPSNSVSGVMAVQVHRHRNKVRNGQAIRCAMATGKEQGAISTASSGDQTKGGLRGKLNKVVLAYSGGLDTSVIVPWLRENYGCEVVCFTADVGQXAKAMVDVAKEVGADAVAHGCTGKGNDQVRFELTFYALNPELKVVAPWREWDITGREDAIEYAKKHNVPVPVSKKSIYSRDRNLWHLSHEGDILEDPANEPKEDMYMMSIAPXNAPSKPEYLEIGIIAGVSVSINGRDLSPASLLAXLNEIXGKHGIGXXXMEENRLXXMXXRXGL

SEQ ID NO: 3630 - protein, 524 aa, Zea mays
SWVRVSLGPSRDTLERPPPVSTPPSQIHSPAPGRSPLHAMASPLRAVASPLRAMATPLANAWADAWAGVRECLEEVGHITRLADPRDAWLPITESRSGNAYYAAFHNLSSGIGFQALVLPTAFASLGWTWAIICLTLAFGWQLYTLWLLVRLHEPVAGATRYSRYMHLATTVFGERWAKILALLPVMYLSAGICTALIIVGGGSMKLLFGIACGEPCPARPPTTVEWYLVFVCAAVLLSQLPNLNSIAGVSLVGATAAVAYCTMIWTVSVAKGRVPAVSYDPVKAPSDVDGALAILNGLGIIAFAFRGHNVVLEIQGTMPSTLKHPSHVPMWKGVKVAYAIIALCLYPVAIGGFWAYGNQIPPNGILSALYKFHSRDTSRLVLGVTTTLVIVNCLTTFQIYAMPVYDNMEAGYVHKKNRPCPWWMRSGFRAFFGAVNFLIAVALPFLSQLAGLLGGISLPVTLAYPCFMWVAIKKPRKGTATWNVNWALGILGMSISLVLIVGNLWGLVEKGLRVKFFKPADSQ

SEQ ID NO: 3631 - protein, 152 aa, Zea mays
  misc_feature (20)..(20): Xaa can be any naturally occurring amino acid
  misc_feature (29)..(29): Xaa can be any naturally occurring amino acid
  misc_feature (61)..(61): Xaa can be any naturally occurring amino acid
  misc_feature (74)..(74): Xaa can be any naturally occurring amino acid
  unsure (1)..(152): unsure at all Xaa locations
PQNAGTARNNGFIVIKNRPXKGVEVSTSXTGKNGHAKCHFVGIDIFNGQELEDIDPSSHNXDIPHAHRTEYQLXIDISHDGLDILLTSNGNTKEDLRLPTDDTLGCQIDERFASVHDPGENVQTAMEEEHICALNDEVPDQLPCLGILYLLT

SEQ ID NO: 3632 - protein, 141 aa, Zea mays
  misc_feature (39)..(39): Xaa can be any naturally occurring amino acid
  misc_feature (49)..(49): Xaa can be any naturally occurring amino acid
  misc_feature (61)..(61): Xaa can be any naturally occurring amino acid
  misc_feature (66)..(66): Xaa can be any naturally occurring amino acid
  misc_feature (96)..(96): Xaa can be any naturally occurring amino acid
  misc_feature (116)..(116): Xaa can be any naturally occurring amino acid
  unsure (1)..(141): unsure at all Xaa locations
PQRVGPARLNGFSVLQNRPCHDEDDATSETEKDGRDTCXFDRVDIFNGXKLEDIARSSCNXGVPHXNQSCYKLTAISEYGFVKLLTSDGHSKEDLXLPCSKRTLVGPTLCGGFRSXKDVDQTVQSAKRQQPICSLNDVDPR

SEQ ID NO: 3633 - protein, 160 aa, Zea mays
  misc_feature (10)..(10): Xaa can be any naturally occurring amino acid
  misc_feature (61)..(61): Xaa can be any naturally occurring amino acid
  misc_feature (83)..(83): Xaa can be any naturally occurring amino acid
  misc_feature (92)..(92): Xaa can be any naturally occurring amino acid
  misc_feature (96)..(96): Xaa can be any naturally occurring amino acid
  misc_feature (148)..(148): Xaa can be any naturally occurring amino acid
  unsure (1)..(160): unsure at all Xaa locations
MADSEEHHFXSKADVGEYKIYPHEGGPDRKNGFLGIKNRPCKAVEASTSKTDKHAHAKCHXVVIYIYTGKKLENIVASSHNCXTFSHVNRTXHQLXDISEDGFVSLLTSDGNSMDDLTPPTDDTLVAHIIDTCERAKDLLVTVQSAMXHGHICALKDVRP

SEQ ID NO: 3634 - protein, 357 aa, Zea mays
EFPGRPTRPRTRGVQVSLTLAASLAYVCLRALLHRAGGLRRLLHLDSLRRDSEDVQAGYAAQLARSFRVLACFVLPCALAEAAYKAYWYRAAAACAVEVASWVYRVALFFMVCVLFRVICYLQILRMVGFAREFGRFADVATVLQHHRRIREQLRKISHRYRKFIVCSLVLVSASQFAALLATTRPHAIVNLATAGELALCSVSLVAGLLMCLYSAAKITHKTQAMTSVAAAWHADATVHAFDNDQENPDPDLPPTAGYLAPANAYRVAAGDESGSGGDDDDDSRSECSSLDDPKYVPFQANNISFQKRQALVTYLENNRAGITVYGFVVDRAWLHALFMIEFSLVMWLLGKTVGIS

SEQ ID NO: 3635 - protein, 148 aa, Zea mays
MSDSDVLHFESKADAGASKTYPQHAGTVRKNGFIVIKNRPCKVVEVSTSNTGKHVHGICHFVVIDIFNGKMLEDIVPSSHNCDIPHVNRTEYQLIDVPADGFASLLSSNGNTKVDLRLPIDETLVVQIKERIESVKDLVATVPSAMRH

SEQ ID NO: 3636 - protein, 232 aa, Zea mays
  misc_feature (210)..(210): Xaa can be any naturally occurring amino acid
  unsure (1)..(232): unsure at all Xaa locations
MAQDLRSQDIKNPIDVAEYLFRRLQQVGVESVHGVPGDYNLVALDYIPKVGLKWVGNCNELNAGYAADGYARVKGISALVTTFGVGELSAVNAIAGAYSEYVPIVHIVGYPSTASQKNGALLHHTLGNGDFTVFSRMSKEISCAVSMLNSQHEAAMLIDNAIRECYLKSRPVYISLPSDMVTKKVDGDRLNTPLDLEYPQNDQEAEDYVXVDVVFEYLHAAKTLSSFVDACA

SEQ ID NO: 3637 - protein, 102 aa, Zea mays
  misc_feature (93)..(93): Xaa can be any naturally occurring amino acid
  unsure (1)..(102): unsure at all Xaa locations
MSATKTKGQSIIDENPVAVFSKSYCPYCNQGKQLLSASGAKFYAIELDQVNDGSAIQSVLADITGQRTVPNIFIAQQHIGVNSDLQAKMGKLXPLLKGAGAL

SEQ ID NO: 3638 - protein, 509 aa, Zea mays
  misc_feature (245)..(245): Xaa can be any naturally occurring amino acid
  unsure (1)..(509): unsure at all Xaa locations
ARDHYLEHPNRKIESRPNQILHPGALPHHPSRCAHAPNPTPFLTAIHRPSSFAQWRPSRRRRRHRRRQLSLEDLKVVSVLGRGAKGVVFHVVHAPGEPDGEGEGAAAAAAMALKAVSREAARHKKAASGDGDGHRRIWFERDVLLALRHPLLPSLRGILATDAIVGFAMDRCGGGDLNSLRRRQTEKMFSDSVIRFYAAELVLALEYLHSLGVVYRDLKPENVLIQDSGHIMLVDFDLSTRLPAXPQEPDAPATSPKPAPPVAAPSPSRGRARKPAGAALCFPFRTTGSAAKPAADSPSPLSTSRTASSSSSSSTATTASSSAASAGTRTPAKSNSFVGTEDYVAPEIIAGRGHDFAVDWWGLGVVLYEMLYGRTPFRGQNRKETFYRVLAKQPELVGEQTPLRDLIARLLEKDPERRIGARGVKAHPFFGGVDWERILQVARPPFIPAPPQDEDGDEALDVEKVVREVFASKEGEGGKASPVADGGPVGGDGDGRRDHSKDGDFSVFF

SEQ ID NO: 3639 - protein, 161 aa, Zea mays
  misc_feature (83)..(83): Xaa can be any naturally occurring amino acid
  misc_feature (133)..(133): Xaa can be any naturally occurring amino acid
  unsure (1)..(161): unsure at all Xaa locations
MADSEEHHFQSKADAEKYRTYPHEGGTDRNNGFIVIQNRPCKAVEASTSKTDKHAHAKCHFVAVYIFPGKRLENIVPSSHHCXDIPHENRNDHHVIDISEDGFVSLLSSYGNTKDDLKLPTDETLAAHINEGXESAKDLVVTVQTAMREEQMCALNDAGPQ

SEQ ID NO: 3640 - protein, 548 aa, Zea mays
  misc_feature (412)..(412): Xaa can be any naturally occurring amino acid
  unsure (1)..(548): unsure at all Xaa locations
MWLWTRQKSPPVGRRPPKVSSIRPLRATQSASPTQGWIASADELYSLLTVLVTRLATRHELRALRFPNAGCWPMAQHHGSHSLEVGGVGAGGVELDDDGHAARTGNLWTCFAHIITAVIGCGVLALSWSVAQLGWVGGPVAMLCFAFVTYLSAFLLSHCYRSPASDDGSLKRQRNYTYMDAVRTHLGEKRTWLCGLFQYLNMYGTAIAYTITTATCLRAIVRANCYHSQGHSAPCGAGGDHLYMLLFGAAQAVLSLIPNFHSMAWLSAVAAVMSFTYATIGLGLGLAKTIENGAIKGSVAGVPMSTAPQKVWRVAQAIGDIAFAYPYTIVLLEIQDTLKSPPPESETMQKGNVLAVLATTFFYLAVGCFGYAAFGNAAPGNLLTGFGFYEPYWLIDFANACIVLHLLGGYQXMFSQQIFTFADRSLAARFPNSAFVNKSYAVKVPGAPASWSYSLNLQRLCFRTAYVASTTGLALLFPYFNEVLGVLGAVVFWPLAIYLPVEMYCVQRGVLPWTRTWVALQAFSVVCFVVGTFAFVGSVEGVIRKRLG

SEQ ID NO: 3641 - protein, 347 aa, Zea mays
MGDSSGSVSVDVERIFFGGKEHRVRTRHGSLSVSVYGDEDKPALVTYPDVALNHMSCFQGLFFCPEAASLLLHSFCVYHITPQGHELGAAPISADVPVPSVDDLADQVADVLDFFSLGSVMCLGVTAGAYVLTLFATKYRERVLGLMLVSPVCKAPSWSEWLYNKVLSNLLYYYGTRGLVKESLLQRYFSMDVRGNGQDPESEIVQACRSLLDERQGANVWRFLQAISRRHDLTESLKKLKCRTLIFVGENSQFHADAVHMTTKLDRRYCALVEVQACGSLVTEEQPHAMVIPMEYFLMGYGLYRPSQQESSPRSTLSPFCISPELLSPESMGVKLKPIKTRISLNV

SEQ ID NO: 3642 - protein, 357 aa, Zea mays
MASLTDLVNLDLSDCTDRIIAEYIWIGGTGIDLRSKARTVKGPITDPIQLPKWNYDGSSTGQAPGEDSEVILYPQAIFKDPFRKGNHILVMCDCYTPQGEPIPTNKRYSAAKVFSHPDVAAEVPWYGIEQEYTLLQKDVSWPLGWPVGGYPGPQGPYYCAAGADKAFGRDVVDAHYKACLYAGINISGINGEVMPGQWEFQVGPSVGISAGDEIWVARYILERITEMAGIVLSLDPKPIKGDWNGAGAHTNYSTKSMREAGGYEVIKAAIDKLGKRHKEHIAAYGEGNERRLTGRHETADINTFKWGVANRGASIRVGRDTEREGKGYFEDRRPASNMDPYVVTGMIAETTILWNGN

SEQ ID NO: 3643 - protein, 252 aa, Zea mays
  misc_feature (219)..(219): Xaa can be any naturally occurring amino acid
  unsure (1)..(252): unsure at all Xaa locations
PSTSRLPALPQKKTARLLLLLRRAGITCGILAVLGCSDWSQAKRARILACSRRLKHRGPDWSGLYQHEGNFLAQQRLAVTKRHLVETEAAEKFGTELHSFVVGLEGSPDLKAAREVADYLGTIHHEFHFTVQDGIDAIEEVIYHDETYDVTTIRASTPMFLMARKIKSLGVKMVLSGEGSDELLGGYLYFHFAPNKEEFHRETCRKVKALHQYDCLRAXKATSAWGLEVRVPFLDKEFINVAMGMDPEWKMY

SEQ ID NO: 3644 - protein, 589 aa, Zea mays
  misc_feature (176)..(176): Xaa can be any naturally occurring amino acid
  unsure (1)..(589): unsure at all Xaa locations
MCGILAVLGCSDWSQAKRARILACSRRLKHRGPDWSGLYQHEGNFLAQQRLAVVSPLSGDQPLFNEDRTVVVVANGEIYNHKNVRKQFTGTHNFSTGSDCEVIMPLYEKYGENFVDMLDGVFAFVLYDTRDRTYVAARDAIGVNPLYIGWGSDGSVWIASEMKALNEDCVRFEIFXPPGHLYSSAGGGFRRWYTPHWFQEQVPRTPYQPLVLREAFEKAVIKRLMTDVPFGVLLSGGLDSSLVASVTKRHLVETEAAEKFGTELHSFVVGLEGSPDLKAAREVADYLGTIHHEFHFTVQDGIDAIEEVIYHDETYDVTTIRASTPMFLMARKIKSLGVKMVLSGEGSDELLGGYLYFHFAPNKEEFHRETCRKVKALHQYDCLRANKATSAWGLEVRVPFLDKEFINVAMGMDPEWKMYDKNLGRIEKWVMRKAFDDDEHPYLPKHILYRQKEQFSDGVGYNWIDGLKSFTEQQVTDEMMNNAAQMFPYNTPVNKEAYYYRMIFERLFPQDSARETVPWGPSIACSTPAAIEWVEQWKASNDPSGRFISSHDSAATDHTGGKPAVANGGGHGAANGTVNGKDVAVAIAV

SEQ ID NO: 3645 - protein, 586 aa, Zea mays
MCGILAVLGVVEVSLAKRSRIIELSRRLRHRGPDWSGLHCHEDCYLAHQRLAIIDPTSGDQPLYNEDKTVVVTVNGEIYNHEELKAKLKTHEFQTGSDCEVIAHLYEEYGEEFVDMLDGMFSFVLLDTRDKSFIAARDAIGICPLYMGWGLDGSVWFSSEMKALSDDCERFITFPPGHLYSSKTGGLRRWYNPPWFSETVPSTPYNALFLREMFEKAVIKRLMTDVPFGVLLSGGLDSSLVASVASRHLNETKVDRQWGNKLHTFCIGLKGSPDLKAAREVADYLSTVHHEFHFTVQEGIDALEEVIYHIETYDVTTIRASTPMFLMSRKIKSLGVKMVISGEGSDEIFGGYLYFHKAPNKKEFLEETCRKIKALHLYDCLRANKATSAWGVEARVPFLDKSFISVAMDIDPEWNMIKRDLGRIEKWVMRKAFDDDEHPYLPKHILYRQKEQFSDGVGYNWIDGLKSFTEQQVTDEMMNNAAQMFPYNTPVNKEAYYYRMIFERLFPQDSARETVPWGPSIACSTPAAIEWVEQWKASNDPSGRFISSHDSAATDHTAVSRRWPTAAARPANGTVNGKDVPVPIAV

SEQ ID NO: 3646 - protein, 111 aa, Zea mays
MAMQKAKEIVNSESVVVFSKTYCPYCVRVKELLQQLGAKFKAVELDTESDGSQIQSGLAEWTGQRTVPNVVIGGNHIGGCDATSNLHKDGKLVPLLTEAGAIAGKTATTSA

SEQ ID NO: 3647 - protein, 601 aa, Zea mays
  misc_feature (87)..(87): Xaa can be any naturally occurring amino acid
  misc_feature (94)..(94): Xaa can be any naturally occurring amino acid
  unsure (1)..(601): unsure at all Xaa locations
MAASGDGDVDIDGCCGGTLFPEKSFRSWSAYGQALLETGPRLRDRVTTRSMDDTEVNEVRGRSGADMRRTLTWWDLIWFGIGAVIGXGIFVLTXGQEAKNAAGPAVVVSYAISGVCAMLAVFCYTEFAVEIPVAGGSFAYLRVELGDFMAFIAAGNILLEYCIGGAAVARSWTSYFATLLNHHPDDFRVHAAALAEGYSQLDPIAVAVTAVICALAVFSTKGSSRFNYVLSILHLAVLVFVVVAGLTKANAANLTADFAPFGARGVFAAAAVLFFAYIGFDAVSTMAEETRNPAKDIPVGLMGAMTLTTIIYCLLALVLCLMQPYTEMDPDAPFSVAFTAVGMDWAKYIVAFGALKGMTSVLLVSAVGQARYLTHIARTHMVPPCLAQVHPRFGTPVYATIVMMVATAVIALFTNLTILSNLLSISTLFIFSLVAIALLVRRYYVSGETAASDRNRLVACLAVIVASSTATAAYWGMTTSGGGGWVVYVVTCAAWLAATAYLQWGVPKARAPKMWGVPLVPWLPSASIFINIFLLGSIDGASFTRFWIWTAALLVYYFFVGLHASYDTAKALAVETEAARVEEGARKPTAANTADGGCRFG

SEQ ID NO: 3648 - protein, 237 aa, Zea mays
MCGGAILAGFIPPSAAAAAAKAAAAKKQQQQQQQQQRSVTADSLWPGLRKKAAEEEDFEADFRDFERDSSDDDAVVEEVPPPPASAGFAFAAAVEVAPPAPARLDAVQHDGPAAKSVKRVRKNQYRGIRQRPWGKWAAEIRDPSKGVRVWLGTYDTAEEAARAYDAEARKIRGKKAKVNFPEEAPTVQKSTLKPTAVKSAKLAPPPKTCEDEPFNHLSRGDNDLFAMFALHDKKGSA

SEQ ID NO: 3649 - protein, 99 aa, Zea mays
MALVRSLLGAKKILGRSLTAAASSTSKTTASAAPKGFLAVYVGESQKKRYVVPISYLSQPSFQALLSKSEEEFGFDHPMGGLTIPCPEDIFINLTSRLQ

SEQ ID NO: 3650 - protein, 136 aa, Zea mays
  misc_feature (43)..(43): Xaa can be any naturally occurring amino acid
  misc_feature (83)..(83): Xaa can be any naturally occurring amino acid
  misc_feature (87)..(87): Xaa can be any naturally occurring amino acid
  unsure (1)..(136): unsure at all Xaa locations
MSDSEEHHFESKADAGASKTYPQQAGTVRKNGFIVIKNRPCKXVEVSTSKTGKHGHAKCHFVAIDIFNGKKLEDIVPSSHNCXIPHXNRTEYQLIDISEDGFVSLLTSDGNTKDDLRLPTDETLVALETEPYCIST

SEQ ID NO: 3651 - protein, 191 aa, Zea mays
  misc_feature (52)..(52): Xaa can be any naturally occurring amino acid
  misc_feature (65)..(65): Xaa can be any naturally occurring amino acid
  misc_feature (103)..(103): Xaa can be any naturally occurring amino acid
  misc_feature (147)..(147): Xaa can be any naturally occurring amino acid
  misc_feature (159)..(159): Xaa can be any naturally occurring amino acid
  misc_feature (176)..(176): Xaa can be any naturally occurring amino acid
  unsure (1)..(191): unsure at all Xaa locations
LCTSTLLLSLILRLRLIHPRQGSTCSDSQEHHFESKADAAACKTYPQQAGTXRKNGFIAIENRPXRLMRVIRTSKTDRHDHAICHFVAIHIFHAKKLEDIVPXSSHNWDLPHVNRTEYQLIDISEDGFASHLTSDDNTKDDLRLPTXDGDLLTCPTSIXEGFESEKDLVVTVQSRXMHEEHICAWNDDGPQ

SEQ ID NO: 3652 - protein, 583 aa, Zea mays
MDADEAVGSSGRMDLNLYLGPPRAPRPRRSDLGSDLALSTPMPSSPSSSAASVDAPPPPPESMHPPYTHSRADLSPPPLPLEVYFPYNPEDSPVPDAHMSYMQPPELLIPGPRNMPPPDSLISGLREGIRELRYAFHPPPPPPPPPPLVRANELLGWEERPSSSTASSSFFPDTAARCGLLLEQTGSRWLRTRRFRSDLPPLSSEARPSGQDATEPVPQHEPAADANELNKVAPNGLELGAPENSSEERSKTATAFECNICFEMASEPVVTSCGHLFCWSCLYQWLNVYSSHKECPVCKGEVTEANITPIYGRGNSDAEKTVEDWKSPGPTIPPRPHGHRLESFWQQFHHIRPISRRLGEAHGILSSWRRLLDQQILGSVSRLEGPSESATQEINDIRQHDHLSGLALASRMRARRFQIEALSRPDGSSTSPPDNGLTGNNPSEILTGNNALLERLAGSNSRRLELLERLAFGIANTAGAMSDDFRRIASPNQYRGSASSSNLQNNEPAVDGARIAGAPSADQASNSSTVAVIQGDGGISESAGEPSNAGSSGSLRRRGRSNASGSLDVDGGSLQQNKRHRMN

SEQ ID NO: 3653 - protein, 134 aa, Zea mays
  misc_feature (45)..(45): Xaa can be any naturally occurring amino acid
  misc_feature (98)..(98): Xaa can be any naturally occurring amino acid
  unsure (1)..(134): unsure at all Xaa locations
HAGTVRKNGFIVVKNRPCKGVEVSTSKTGKDGRAQCHFVAIDIFXIKKLEDSVPSSHNCGIPHGYRTEYQLIDISEDGFVMLLTSYGDTKDDRRLPSXDTLAAQMKEGFESAKDLVVTDQSAMIEEQICALRDV

SEQ ID NO: 3654 - protein, 155 aa, Zea mays
  misc_feature (135)..(135): Xaa can be any naturally occurring amino acid
  misc_feature (145)..(145): Xaa can be any naturally occurring amino acid
  unsure (1)..(155): unsure at all Xaa locations
EHHFESKADAGACKTYPQQAGTVRNNGFIDIKNRPCKAVEVSTSNTDTNGHIKCHFVAIHIFNVKKLEDIVPSSHNCDIPHVNRTEYQLIDISEDAFASLLTSNGNTRDDLRLPTDETLVDHIKEGFESGKDLVXTVQTAMSDEXICALDDDGPK

SEQ ID NO: 3655 - protein, 340 aa, Zea mays
  misc_feature (30)..(30): Xaa can be any naturally occurring amino acid
  misc_feature (106)..(106): Xaa can be any naturally occurring amino acid
  misc_feature (125)..(125): Xaa can be any naturally occurring amino acid
  misc_feature (243)..(243): Xaa can be any naturally occurring amino acid
  misc_feature (303)..(303): Xaa can be any naturally occurring amino acid
  unsure (1)..(340): unsure at all Xaa locations
MNFPAGSGRRQQHPGPEHLSPMTPLPLARXGSVYSLTFDEFQSSLGGATKDFGSMNMDELLRNIWSAEETHSVTAADHAARAPYVQCQGSLTLPCTLSQKTVDEVXRDLVCNGGGPSDEAVAPPXPAQRQPTLGEIMLEEFLVRAGVVREDMMAAAPVPPAPGCPPPHLQPPMLFPHGNVFAPLVPPLQFGNGFVSGALSQQQGGVLEAPAVSPRPVTASGFGKMEGDDLSHLSPSPVSYVFXAGLRGRKPPAVEKVVERRQRRMIKNRELAARSRGRKQAYMMELEAEVAKLKELNDELQKXQVEMLEKQKNEVLERMRRQVGPTIKRICLRRTLAGLW

SEQ ID NO: 3656 - protein, 189 aa, Zea mays
MAHPRSVAAAAPLLLLLAAAAAAAAGLVSAASPAASDFVRKSCRTTQYPSVCEQSLASYGGSPPPRSPRELARAALSVSADRARAASAYVGRLCGASNGKGAKKGSGSASASASAGPVRDCLDNLADSVGHLRDAAQEMGGAGMGRAGTPAFRWHLSNVQTWCSAALTDEVAQVTSNALALVNKVGLGY

SEQ ID NO: 3657 - protein, 212 aa, Zea mays
  misc_feature (82)..(82): Xaa can be any naturally occurring amino acid
  misc_feature (142)..(142): Xaa can be any naturally occurring amino acid
  unsure (1)..(212): unsure at all Xaa locations
MARPRSVAAAAPLLLLLAAAAAGLVSAASPAASDFVRKSCRTTQYPSVCEQSLASYGGSPPPRSPRELARAALSVSADRARXASAYVGRLCGRQQRQRREEGVGIRRPASAGPVRDCLDNLADSVGHLRDAAQEMGGAGMGXRAGTPAFRWHLSNVQTWCSAALTDEDTCLDGLSSRAVDAGTRAAIRGKVVEVAQVTSNALALVNKVGPGY

SEQ ID NO: 3658 - protein, 214 aa, Zea mays
MARPRSVAAAAAAPLLLLLAAAAAGLVSAASPAASDFVRKSCRTTQYPSVCEQSLASYGGSPPPRSPRELARAALSVSADRARAASAYVGRLCGASNGKGAKKGSGSGSGSASAGPVRDCLDNLADSVGHLRDAAQEMGGAGMGRAGTPAFRWHLSNVQTWCSAALTDEDTCLDGLSSRAVDAGTRAAIRGKVVEVAQVTSNALALVNKVGPGY

SEQ ID NO: 3659 - protein, 323 aa, Zea mays
MAARDHRELSGDEDSVVAAGDLRRGPWTVEEDMLLVNYVAAHGEGRWNALARCAGLRRTGKSCRLRWLNYLRPDLRRGNITAQEQLLILELHSRWGNRWSKIAQHLPGRTDNEIKNYWRTRVQKHARQLNCDVNSQRFKDLMRYIWMPRLLERIGSDDSGDGAFVIDAATPTPTPTLLTAATWCVDDVELSCTTAVSSSSSVSTDSMHQQQQQLVAVSPPPQPAAFGESNNDASHYGVHNSNAAMSMWGDTLCQPPHSATPHLAGAGTCSWSDESLLVPDAGLSGGGGVYADMGLPDLCDTDTMWAAGASADDDLWYTQIMGL

SEQ ID NO: 3660 - protein, 547 aa, Zea mays
MWLWTRQKSPPVGRRPPKVSSIRPLRATQSASPTQGWIASADELYSLLTVLVTRLATRHELRALRFPNAGCWPMAQHHGSHSLEVGGVGAGGVELDDDGHAARTGNLWTCFAHIITAVIGCGVLALSWSVAQLGWVGGPVAMLCFAFVTYLSAFLLSHCYRSPASDDGSLKRQRNYTYMDAVRTHLGEKRTWLCGLFQYLNMYGTAIAYTITTATCLRAIVRANCYHSQGHSAPCGAGGDHLYMLLFGAAQAVLSLIPNFHSMAWLSAVAAVMSFTYATIGLGLGLAKTIENGAIKGSVAGVPMSTAPQKVWRVAQAIGDIAFAYPYTIVLLEIQDTLKSPPPESETMQKGNVLAVLATTFFYLAVGCFGYAAFGNAAPGNLLTGFGFYEPYWLIDFANACIVLHLLGGYQMFSQQIFTFADRSLAARFPNSAFVNKSYAVKVPGAPASWSYSLNLQRLCFRTAYVASTTGLALLFPYFNEVLGVLGAVVFWPLAIYLPVEMYCVQRGVLPWTRTWVALQAFSVVCFVVGTFAFVGSVEGVIRKRLG

SEQ ID NO: 3661 - protein, 102 aa, Zea mays
MAAKQAAEKLISEHLVAVFSKSYCPYCSQAKSVIDKLGLDKSKIGILELDTMGSEGSDIQAYLQEKTSQRTVPNIFINQKHLGGCSDLLDAQKSGKLQQLVK

SEQ ID NO: 3662 - protein, 265 aa, Zea mays
GCCSLPSLSWLSLRAPPPRIQAARQRGTVKWFNDTKGFGFISPEDGSEDLFVHQSSIKSEGFRSLAEGEEVEFSVSEGDDGRTKAVDVTGPDGSFVRGGGGGGGGGGGYGSRGGGGSGGGGRSYGGSWGGGRRSGGGGGPGACYKCGEPGHMARDCPSADGGGGYGGGGYGGGGYGGGGGGGGCFKCGEPGHMARDCSSGGGGYGGGGGGGGGGCYNCGQAGHMARDCPSGGGGGGGRFGGGGGGGDRSCYNCGEAGHIARDCPT

SEQ ID NO: 3663 - protein, 508 aa, Zea mays
  misc_feature (242)..(242): Xaa can be any naturally occurring amino acid
  unsure (1)..(508): unsure at all Xaa locations
MVSERQQAAGKVAAFNLTEAGFGDGSDLLDDDGRERRTGTLVTASAHIITAVIGSGVLSLAWAIAQLGWVIGPVVLLAFSAITWFCSSLLADCYRAPPGPGQGKRNYTYGQAVRSYLGESKYRLCSLAQYVNLVGVTIGYTITTAISMGAIKRSNCFHSRGHGADCEASNTTNMIIFAGIQILLSQLPNFHKLWWLSIVAAVMSLAYSSIGLGLSIAKIAGKLMHGSYCTYVLSLILSRDFXLTAGGVHVKTSLTGAAVGVDVTAAEKVWKTFQSLGDIAFAYTYSNVLIEIQDTLRSSPPENVVMKKASFIGVSTTTAFYMLCGVLGYAAFGSDAPGNFLTGFGFYDPFWLIDVGNVCIAVHLVGAYQVFCQPIYQFVEAWARGRWPDCAFLHAELAVVAGSSFTASPFRLVWRTAYVVLTALVATVFPFFNDFLGLIGAVSFWPLTVYFPIQMYMAQAKTRRFSPAWTWMNVLSYACLFVSLLAAAGSVQGLVKDLKGYKPLFKVS

SEQ ID NO: 3664 - protein, 190 aa, Zea mays
  misc_feature (26)..(26): Xaa can be any naturally occurring amino acid
  misc_feature (62)..(62): Xaa can be any naturally occurring amino acid
  misc_feature (150)..(150): Xaa can be any naturally occurring amino acid
  misc_feature (156)..(156): Xaa can be any naturally occurring amino acid
  unsure (1)..(190): unsure at all Xaa locations
SRILHVRLIHHLQGSPCSDSEEHRFXSKADSGTTETYPLQDVTVRIIDFVDLKNRPCTLWRXTTSKTGKDDRAKCHFVAIDIFHGKQLEDIVPSLHLCDIAHVNRTDYQMIHISEDAFGMLLASYGNTNDDLILPTDETLEVHIIERFEXAKDLVXTVQTDMDKDQSCSMKDVEPNILHCVFRRNPTVSR

SEQ ID NO: 3665 - protein, 277 aa, Zea mays
GADKESACIRARSVSTPATGGRRGGAQMLLFGGGGSANSNGFFRGVPMAVLAMDDATRVGKRPFFTTHEELLEEEYYDEQAPEKKRRLTAEQVQLLERSFEEENKLEPERKTELARRLGMAPRQVAVWFQNRRARWKTKQLETDYDRLKAAYNALAADHQGLLADNDSLRAQVICLTEKLQGKETSLSATIAAQEVDQPNEHTTGTEKLLAQQLKDDLHSSCGCTGHGALSSEEEDGGVVSDEGCNFDLPDAMFAVGVTNHGAEEAQLANWTSWFWN

SEQ ID NO: 3666 - protein, 178 aa, Zea mays
MPPPPPPPQQQQQQSGMTLCRLPTATLGLPLSLPCLLPRSRPRLCFAARHARAVAARASSSSPSPDSSFGSRMEESVKKTVADNPVVIYSKSWCSYCMEVKALFKRIGVQPHVIELDHLGAQGPQIQKVLERLTGQSTVPNVFIGGKHVGGCTDTVKLYRKGELASMLSGLDININNS

SEQ ID NO: 3667 - protein, 186 aa, Zea mays
  misc_feature (28)..(28): Xaa can be any naturally occurring amino acid
  misc_feature (34)..(34): Xaa can be any naturally occurring amino acid
  misc_feature (42)..(42): Xaa can be any naturally occurring amino acid
  misc_feature (66)..(66): Xaa can be any naturally occurring amino acid
  misc_feature (105)..(105): Xaa can be any naturally occurring amino acid
  misc_feature (131)..(131): Xaa can be any naturally occurring amino acid
  unsure (1)..(186): unsure at all Xaa locations
MSHHFQSNADAASSKTYPQNGGSVRKNXGFIVIXKRPCNVVXVSTSKTGKNVHSKWHFVVIHIFNXTSLEILLLHRINCDIPHVNRTEDQLIDISEDGYDDLLYXQIGITNDDLKLPTDETLVVHIKEDFXSGKDLVVTVHSAMLHAYICALNDVGPKQLSWIWRRNPTLSQLTSDKKCITRGLLP

SEQ ID NO: 3668 - protein, 268 aa, Zea mays
MAPQSLDLGLSLGLGVAAFQPSFCHPAGNAAAERETSPTAADERERRCSPAGSPTSSGSGSGKRVATERSAGSGSGDEDDDGGARKKLRLSKDQAAVLEECFKTHHTLTPKQKAALASRLGLRARQVEVWFQNRRARTKLKQTEVDCEYLRRWCEQLAEENRRLGKEVAELRALSAAPAPAAPLTALTMCLSCRRVSSSSCSSSPPNTHAHAHAAAAGTGTGGSVASPAAATLPAHRQFLCGFRDGGAAAAAVYGTSSALAKALRAAR

SEQ ID NO: 3669 - protein, 248 aa, Zea mays
GLCLLLLSPSSSPFPCSCFRIGLSPVMGATSPSGLELTMAVPGLSSSSGSEGFVCNNNISNNGGGNMRDLDMNQPASGGEEEDFLMGGVEEDEEERGAGGPHRPKKLRLSKEQSRLLEESFRLNHTLSPKQKEALAIKLKLRPRQVEVWFQNRRARTKLKHTEMECEYLKRCFGSLTEENRRLQREVEELRAMRMAPPTVLSPHTRQPLPASALTMCPRCERVTAATCPRITRPAASPFHPRRPSAAF

SEQ ID NO: 3670 - protein, 387 aa, Zea mays
  misc_feature (288)..(288): Xaa can be any naturally occurring amino acid
  unsure (1)..(387): unsure at all Xaa locations
MAKPVSIQVWNPSGKYRVVSTKSMPGTRWIRLLTDNDCRLEICTEHKTILSVDDILALIGDRCDGVIGQLTEDWGDVLFSALKRAGGTVFSNMAVGYNNVDVEAANRNGIAIGNTPGVLTETTAELAASLSLAAARRIVEADQFMRAGLYDGWLPHLFVGNLLKGQTVGVIGAGRIGSAYARMMIEGFKMNLIYYDLYQATRLENFVTAYGQFLKANGEEPVTWKRAATMEDVLREADVISLHPVLDKTTYHLINPERLAIMKKEAVLVNASRGPVIDEAALVEHLKXANPMFRVGLDVFEDEPYMKPGLADMKNAVVVPHIASASKWTREGMATLSALNVLGKIKGYPVWGNPNQVEPFLQENLTPPPACPSIVNAKQIGLPSAKL

SEQ ID NO: 3671 - protein, 160 aa, Zea mays
MSDSEDHHFESKADAGASKTYPMQAGAIRKGGFLVIKNRPCKVVEVSTSKTGKHGHAKCHFVALDIFNGKKLEDIVPSSHNCDVPHVDRTEYQLIDISEDGFVSLLTDNGSTKDDLKLPTDDAILTQLKDGFAEGKDLALTVMSAMGEEQICAVKDVGPR

SEQ ID NO: 3672 - protein, 146 aa, Zea mays
  misc_feature (49)..(49): Xaa can be any naturally occurring amino acid
  misc_feature (58)..(58): Xaa can be any naturally occurring amino acid
  misc_feature (135)..(135): Xaa can be any naturally occurring amino acid
  unsure (1)..(146): unsure at all Xaa locations
MWDSEEHQFESKDDGAEGKTYSKNTGTARMNEFIIIINRTCKVEEGSTXKTGTNVHAXCHFVCIDIYNGKNVEDMVPSSYNCEIPNANRTDDQMIDISEDVFVSLLTSDGKTNDDRKLPNDDTLVAQIMEGLESXKDLGVTVQTAM

SEQ ID NO: 3673 - protein, 334 aa, Zea mays
MAASVAAATRLSGGGGGVALLLLVLLAAGTSSSSAQLSTGFYSHSCPGVHDAVKSVLQAAIAREQRMGASILRLFFHDCFVQGCDASLLLDDTPSFQGEKMAKPNNGSVRGFEVIDAIKSAVDKACPGVVSCADILAIAARDSVVTLGGPNWDVKLGRRDSRTASFSGANNNIPPPTSGLANLTSLFAAQGLSQKDMVALSGAHTTGQARCTNFRAHVYNDTNIDGAFARARRSVCPAAASSGSGGDNNLAPLDLQTPTVFENDYYRNLVCRKGLLHSDQELFNGAATDAQVQAYVSSQSAFFADFVAGMVKMGDISPLTGSSGEIRKNCRRIN

SEQ ID NO: 3674 - protein, 246 aa, Zea mays
MSGGNAWSPLPSHGFGSESSGMANRAGEPVARTNSDGGGGGSKDSGSFECNICLDLAQDPVVTLCGHLFCWPCLYEWLHVHAHSQECPVCKAVVEEGKLVPLYGRGGSSAVPRARSVAGVEIPSRPTGQRPSTAPQPDHNNHYPHQNPWFNGAGAPPVANGRWGSYTFSAAIGGLFPLLSFQVHGFPQATAYGPAAGFPYGYGHSFHGWHGHGFPRQAPQGQQVDAYLKVLLLAVGVLVIASLIAF

SEQ ID NO: 3675 - protein, 319 aa, Zea mays
  misc_feature (244)..(244): Xaa can be any naturally occurring amino acid
  unsure (1)..(319): unsure at all Xaa locations
MALLTDLLNLDLTDSTEKIIAEYIWIGGSGMDLRSKARTLPGPVTDPSKLPKWNYDGSSTGQAPGEDSEVILYPQAIFKDPFRKGNNILVMCDCYTPAGVPIPTNKRYNAAKIFSNPDVAKEEPWYGIEQEYTLLQKDINWPLGWPVGGFPGPQGPYYCSIGADKSFGRDIVDSHYKACLFAGVNISGINGEVMPGQWEFQVGPTVGISAGDQVWVARYLLERITEIAGVVVTFDPKPIPGDWXNGAGAHTNYSTESMRKDGGFKVIVDRVEKLKLKQKEHIAAYGEGNERRLTGKHETADINTFSWGVANRGASVRVG

SEQ ID NO: 3676 - protein, 225 aa, Zea mays
  misc_feature (69)..(69): Xaa can be any naturally occurring amino acid
  misc_feature (121)..(121): Xaa can be any naturally occurring amino acid
  misc_feature (178)..(178): Xaa can be any naturally occurring amino acid
  unsure (1)..(225): unsure at all Xaa locations
MPVDQPALSLCLYFLLSLSPPAPPDPSYTGIVMSGSEEHHFKSKADAAASINYPQHAGTVRNNGFIDIXTVPCKVVPGSLLSNTGKHDHAKCHFVAIHIFDGKKLEDISLPSSHYCDIPYXVTCTDYQLVDISEDVFESLLTSDDSTKDDLILPTDETLVFHITERFYSRKDLVVTVXSAMGNEPICALKDVAPKKLPCLWRPNPTASQLKSANIWITKPLLPTH

SEQ ID NO: 3677 - protein, 581 aa, Zea mays
  misc_feature (388)..(388): Xaa can be any naturally occurring amino acid
  unsure (1)..(581): unsure at all Xaa locations
MGEVEDMYTQDGTVDMKGNPAVKKGTGNWRACPYILANECCERLAYYGMSTNLVNYMKTRLGQVNSVASNNVTNWQGTCYITPLIGAFFADAYMGRFWTIAIFMIIYIFGLALLTMASSVKGLVPTSCGDKDVCHPTDAQAAVVFVALYLIALGTGGIKPCVSSFGADQFDENDEREKKSKSSFFNWFYFSINIGALVASTVLVYVQTHVGWGWGFGIPAVVMAIAVGSFFVGTPLYRHQKPGGSPLTRIAQVLVACARKWNVAVPADKSRLHETVDGESGIEGSRKLEHSEQLACLDRAAVVTAEDGAEASPWRLCSVTQVEELKSVIRLLPIWASGIVFAAVYSQMSTMFVLQGNTLDQSMGPRFKIPSATLSMVDTISVIVWVPXVYDRAIVPLVRSYTGRPRGFTQLQRMGIGLVVSIFSMVAAGVLDIVRLRAIARHGLYGEDDIVPISIFWQIPQYFIIGCAEVFTFVGQLEFFYDQAPDAMRSMCSALSLTTVALGNYLSTVLVTIVTHITTRHGRIGWIPENLNRGHLDYFFWLLAVLSLLNFLAYLVIASWYKYKKTADDYPGAKGEHGTEH

SEQ ID NO: 3678 - protein, 580 aa, Zea mays
MGEVEDMYTQDGTVDMKGNPAVKKGTGNWRACPYILANECCERLAYYGMSTNLVNYMKTRLGQVNSVASNNVTNWQGTCYITPLIGAFFADAYMGRFWTIAIFMIIYIFGLALLTMASSVKGLVPTSCGDKDVCHPTDAQAAVVFVALYLIALGTGGIKPCVSSFGADQFDENDEREKKSKSSFFNWFYFSINIGALVASTVLVYVQTHVGWGWGFGIPAVVMAIAVGSFFVGTPLYRHQKPGGSPLTRIAQVLVACARKWNVAVPADKSRLHETVDGESGIEGSRKLEHSEQLACLDRAAVVTAEDGAEASPWRLCSVTQVEELKSVIRLLPIWASGIVFAAVYSQMSTMFVLQGNTLDQSMGPRFKIPSATLSMVDTISVIVWVPVYDRAIVPLVRSYTGRPRGFTQLQRMGIGLVVSIFSMVAAGVLDIVRLRAIARHGLYGEDDIVPISIFWQIPQYFIIGCAEVFTFVGQLEFFYDQAPDAMRSMCSALSLTTVALGNYLSTVLVTIVTHITTRHGRIGWIPENLNRGHLDYFFWLLAVLSLLNFLAYLVIASWYKYKKTADDYPGAKGEHGTEH

SEQ ID NO: 3679 - protein, 304 aa, Zea mays
MCGGAILAELIPTTPARRGGAAWPAGKCKRRKADDFEAAFREFDEDSEEEEEEDEGVVESKPAFVVRASSAATQPRARQEQRSRRRAPDQQYRGVRRRPWGKWAAEIRDPVKGVRVWLGTFPSAEAAARAYDHAARHIRGPRAKLNFPSSSASAAGAPASRKRARAADAVIDLEEQEQRPAAAALKHEAAECSGSDALPDFSWQGVSAAYDEPPAPRPAFDFEARPESAADEASPRASDSESDALFDSLLFGDQFAFFDAGAYESLDSLFSADAVQSNAAAAADQDMPLWSFDDGCLVEDNLSF

SEQ ID NO: 3680 - protein, 589 aa, Zea mays
  misc_feature (423)..(423): Xaa can be any naturally occurring amino acid
  misc_feature (467)..(467): Xaa can be any naturally occurring amino acid
  unsure (1)..(589): unsure at all Xaa locations
MDATTVDSKWISPATEDGSMDRRGNPAVKTTTGRWRSAILLLANYGLATCAFFGVGVNLVVFLRRVLHQGNAEAANSISKWTGTVYIFSLIGAFLSDSYWGRYVTCAVFQIIYVMGLVVLSLASWLLLVKPSGCGGVKAHCDGPSAPGVALFYLSTYMIAFGNGGYQPSIATFGSDQFDETDPEEARSKVAFFSYFYLALNVGSLLSNTVLVYYEDSGRWVMGFWVSAAAAALALVLFLLGTPGYRHFKPSGNPLTRVAQVFVAALRKWRAEVPRGELLHEVVEAGEDPKVSGIRKILHSDGLRFLDKAATITEEEEEEGPWRLCTVTQVEEVKCILRMLPIWLCTIVYSVVFTQMASLFVEQGATMDTNIGSFHFPAASMSLFDVLSVLAFIAIYRRVLVPVMARLSGNPQGLTELQRMGVXVGLVIGMAAMVVAGVVEVERLKRVALAVPDQPSSLSVLWQVPQXVQYALIGASEVFMYVGQLEFFNGQAPDGVKSFGSALCMASISLGNYVSIMLVSVVISLTAGEKRPGWIPGNLNSGHLDRFYFLLAALSLVDLAVYVACAMWYKGIKLDGGDGDNRRKVSAHV

SEQ ID NO: 3681 - protein, 477 aa, Zea mays
MASHNGTKHLAPMEVSVEAGNGGGAEWLDDDGRPRRTGTFWTASAHIITAVIGSGVLSLAWAIAQLGWVAGPAAMLLFAFVTYYTATLLAECYRTGDPDTGKRNYTYMDAVRSNLGGAKVAFCGAIQYANLVGVAIGYTIASSISMQAVSRAGCFHKRGHAVPCKSSSNPYMILFGAVQILFSQIPDFDQIWWLSIVAAVMSFTYSAIGLSLGIAQTVANGGFKGSLTGISIGADVTSTQKVWHSLQAFGDIAFAYSFSNILIEIQDTIKAPPPSESKVMQKATRLSVATTTIFYMLCGCMGYAAFGDKAPDNLLTGFGFFEPFWLIDVANVAIVVHLVGAYQVFCQPIFAFVERRAAAAWPDSAFVSRELRVGPLALSVFRLTWRSAFVCVTTVVAMLLPFFGNVVGFLGAVSFWPLTVYFPVEMYIKQRRVPRGSTKWVCLQTLSVACLVVSIAAAAGSIADVIEALKVYHPFSS

SEQ ID NO: 3682 - protein, 232 aa, Zea mays
MVRGKTQMKRIENPTSRQVTFSKRRNGLLKKAFELSVLCDAEVALVVFSPRGKLYEFASGSAQKTIERYRTYTKDNVSNKTVQQDIERVKADADGLSKRLEALEAYKRKLLGERLEDCSIEELHSLEVKLEKSLHCIRGRKTELLEEQVRKLKQKEMSLRKSNEDLREKCKKQPPVPMASAPPRAPAVDNVEDGHREPKDDGMDVETELYIGLPGRDYRSSKDKAAVAVRSG

SEQ ID NO: 3683 - protein, 369 aa, Zea mays
MALLSDLINLDLSGRTGKIIAEYIWVGGSGMDVRSKARTLSGPVDDPSKLPKWNFDGSSTGQAPGDDSEVILCPRAIFRDPFRKGQNILVMCDCYEPNGEPIPSNKRHGAAKIFSHPDVKAEEPWFGIEQEYTLLQKDTKWPLGWPLGGYPGPQGPYYCAVGADKSYGRDIVDAHYKACLYAGIDISGINGEVMPGQWEFQVGPAVGVSAGDQLWVARYILERITEIAGVVVSFDPKPIPGDWNGAGAHTNYSTKSMRSDGGYEVIKKAIGKLGLRHREHIAAYGDGNERRLTGRHETADINTFVWGVANRGASVRVGRDTEKEGKGYFEDRRPASNMDPYVVTSLIAETTMLWEPSHSNGDGKGAAAP

SEQ ID NO: 3684 - protein, 368 aa, Zea mays
MALLSDLINLDLSGRTGKIIAEYIWVGGSGMDVRSKARTLSGPVDDPSKLPKWNFDGSSTGQAPGDDSEVILCPRAIFRDPFRKGQNILVMCDCYEPNGEPIPSNKRHGAAKIFSHPDVKAEEPWFGIEQEYTLLQKDTKWPLGWPLAYPGPQGPYYCAAGADKSYGRDIVDCAYKACLYAGIDISGINGEVMPGQWEFQVAPAVGVSAGDQLWVARYILERITEIAGVVVSFDPKPIPGDWNGAGAHTNYSTKSMRSDGGYEVIKKAIGKLGLRHREHIAAYGDGNERPLTGRHETADINTFVWGVPNRGASVRVGRDTEKEGKGYFEDRRPASNMDPYVVTCLIAETTMLWEPSHSNGDGKGAAAP

SEQ ID NO: 3685 - protein, 180 aa, Zea mays
  misc_feature (44)..(44): Xaa can be any naturally occurring amino acid
  misc_feature (63)..(63): Xaa can be any naturally occurring amino acid
  misc_feature (153)..(153): Xaa can be any naturally occurring amino acid
  unsure (1)..(180): unsure at all Xaa locations
FLLSLLLRLRLIHPRQGIASVATLEEDHFESKDDAGASKTYPQXAGTARKNGFIDIKNRPCRXVEVSTSNTGKHGHGICHFVAINIFNGKNLEDIVPSSHNCDIPHVNHTEYHLTDISEDGFVSPLTSDWHTKDDLTLPTDDTLVAQINEGFXSGKDLAATVPSAMGEEQICALKECGPK

SEQ ID NO: 3686 - protein, 160 aa, Zea mays
  misc_feature (50)..(50): Xaa can be any naturally occurring amino acid
  unsure (1)..(160): unsure at all Xaa locations
MSDSEGHHFESRVDAGGSTTYPQQAGTARKNGFIDIKNRPCKVVEVSTSXTGKHGHAKCHFVAIHIFNGKKLEDIGPSSHNCDIPHVNRTEYQLIDISDDGFVSLLTSDANTKDDLTLATDETLVDHIKEGIESENDLVVTVQSAMFERQICTLKDADHK

SEQ ID NO: 3687 - protein, 161 aa, Zea mays
  misc_feature (13)..(13): Xaa can be any naturally occurring amino acid
  misc_feature (50)..(50): Xaa can be any naturally occurring amino acid
  unsure (1)..(161): unsure at all Xaa locations
MTDGEEHHLGNEXATRGTSNTYHKKGATARRNGSIVMKNRTCKGAEASTXKTGKHGHAKCHFVVIDIFNGKKLEDIVPSSHNCDIPHVNRTEYQLIDILEDGFVSLLTSDGNTKDDLRLPTDETLAAQIKEGHESGKDLVATVQSAMEEEQICALKDVAPK

SEQ ID NO: 3688 - protein, 150 aa, Zea mays
  misc_feature (14)..(14): Xaa can be any naturally occurring amino acid
  misc_feature (112)..(112): Xaa can be any naturally occurring amino acid
  misc_feature (119)..(119): Xaa can be any naturally occurring amino acid
  misc_feature (134)..(134): Xaa can be any naturally occurring amino acid
  unsure (1)..(150): unsure at all Xaa locations
SKADVGSLKTYPYXVGTVRKNGFIIINNRPCEVVEVSTSKTGKHGHAKCHFVAIDIFNGKKLEDIVPSSHNCDIPHESRTDYHVIDISKDGLVILLTSHGNTKDDLRLPSDXTLVVQIXEGFESGKDLDVTVAXAMGEEQICALNDDAPK

SEQ ID NO: 3689 - protein, 149 aa, Zea mays
  misc_feature (17)..(17): Xaa can be any naturally occurring amino acid
  misc_feature (22)..(22): Xaa can be any naturally occurring amino acid
  unsure (1)..(149): unsure at all Xaa locations
GRHCCASETYPQDGVTXRKNGXVDMKNRPCKVGEDSTCETGKHGHSKCHFVDIHLFHGKRLEYIVTSSRKCDIPYVNRTEYHVIDISEDGFVNLLTSDGDTKDDLRLPTDETLVAHIREGFESGKDLVVTVQTAMTQEHICAMKDVGPK

SEQ ID NO: 3690 - protein, 186 aa, Zea mays
  misc_feature (72)..(72): Xaa can be any naturally occurring amino acid
  unsure (1)..(186): unsure at all Xaa locations
SPSAPLSISLLLRLLLEPTKPGDRHVWTQEEHHFESKADAGASKTYPQQGGTGRKNGFIVIKNRPCKVVEVXSTSKTGKHGHDKCHFVAVDIFHGKWLEDIVPSSHDCDIPHVNRTEYQLIEISEDGFVSLLTSHGDTMDDLRLPTDETLVDQIEEGFESVKDLAVTVQSAMRQEHICALKDVVPK

SEQ ID NO: 3691 - protein, 160 aa, Zea mays
  misc_feature (133)..(133): Xaa can be any naturally occurring amino acid
  unsure (1)..(160): unsure at all Xaa locations
MSDSEEHDFESKADAGASRTYPQQGATVRKNGFIVIKNRPCKDAEDSTSKTGKHGHPKCHFVTIDLCTGKKLEDIVPSSHNCDIPHVNRTEHQLIDISEDGFVSLLTSDGNTNDELKVPTDETLVAQIKEGFXAIKDLVVTVQSAMGEDQICAMKDVDPK

SEQ ID NO: 3692 - protein, 161 aa, Zea mays
  misc_feature (50)..(50): Xaa can be any naturally occurring amino acid
  misc_feature (137)..(137): Xaa can be any naturally occurring amino acid
  unsure (1)..(161): unsure at all Xaa locations
MSDSEEHDFESKADAGASKSYPQHDDTGRNNGFIVINNRPCKGVEVSTSXTAKHAHAECHFVPIQIFNVKKLEYIVPSSHHCDIPHVNRTDYQLIDISEDGFESLLTSDGNTNDDRRLPTDETLVDQIKEGVKSGQXILAETAQSAMSQEHICALKDVGPK

SEQ ID NO: 3693 - protein, 161 aa, Zea mays
  misc_feature (32)..(32): Xaa can be any naturally occurring amino acid
  misc_feature (50)..(50): Xaa can be any naturally occurring amino acid
  misc_feature (54)..(54): Xaa can be any naturally occurring amino acid
  misc_feature (109)..(109): Xaa can be any naturally occurring amino acid
  unsure (1)..(161): unsure at all Xaa locations
MSDSEEHHLESKADAGASKTYPQQAGTVRKNXGSIGIKNRPCKAAEGPTXKDWXHGHAKCHFAAIDISNGKKLEDIVPSRHNCDIPHENRTEYQVIDISEDGCVSLLTXDGNTKDDLRLPTEETLVAQIKEGIESGKDPVGTVQSAMGEEQICALKDDGPK

SEQ ID NO: 3694 - protein, 160 aa, Zea mays
  misc_feature (81)..(81): Xaa can be any naturally occurring amino acid
  unsure (1)..(160): unsure at all Xaa locations
MAESEEHHLESKAEAAAPKTYPQQADTVRKNGFIVINNRPCKDVEVSTSKTGKDGHAKCHFAIIDIFNGKKRADIVPSSHXCDIPHANRTDYQLIDISEDGFVSLLTSHGNTNDDLRLPTDETLGAQINEGIKSGKDLVVTVQSAMGEEHICALKDVGPK

SEQ ID NO: 3695 - protein, 162 aa, Zea mays
  misc_feature (36)..(36): Xaa can be any naturally occurring amino acid
  misc_feature (52)..(52): Xaa can be any naturally occurring amino acid
  misc_feature (55)..(55): Xaa can be any naturally occurring amino acid
  misc_feature (100)..(100): Xaa can be any naturally occurring amino acid
  misc_feature (110)..(110): Xaa can be any naturally occurring amino acid
  unsure (1)..(162): unsure at all Xaa locations
MGMGDSEEHHLESEGRRSGANMNYLKKAGTGRMNGXVGIKNQSLADVEETTXKTXDLGHDKAVSRILHIERKKHEHIGPVRHICDIAHVNRTEHHLIDIXDDGFVSLVTXDGNTKEDLKLPTGETLVAQIKEGFESGKDLVVTVQSAMGEEQICALKDVGPK

SEQ ID NO: 3696 - protein, 87 aa, Zea mays
MSASRSSSPNSMSQWSQKENKMFEEALAYYGEGTPNRWDKVSSAMGGIKSAEEVRCHYENLDYDVKMIESGNVPYPKYKTQGFWTRG

SEQ ID NO: 3697 - protein, 244 aa, Zea mays
VIAFRPSRRPFDAVVQVSLSAASGASFHCLSSSFRRIGLRRLLYLDKLRTNSDRVRLNYTARLAFSFRLLASLVAPCFAAEAAYKAWWYATSADRLPFFANDVLSDVLACSLEMASWMYRSAIYLLTCVLFRLICHLQGLRLEDFAGSLLVEVEEGRMGVERVLREHLDIRKQLKVISHRFRRFIVAALLIGTASQFASVLLTTRHDSIDDLLHTGELALCSVVLMSGLIIILSSAAKITHQAQ

SEQ ID NO: 3698 - protein, 335 aa, Zea mays
MSWSVPFRPSLCRAIRKANCYHREGHDAPCSVGGDGYYMLLFGLAQVLLSQIPNFHEMAGLSIFAAVMSCFYAFVGVGLGVAKVIANGVIMGGIGGIPLVSTTQKVWRVSQALGDILFAYPFSLVLLEIEDTLRSPPPESETMKKATRASIAITTLFYLCCGCFGYASFGDGTPGNLLTGFGFYEPYWLIDLANLAIVLHLLGGYQVYTQPVFAFADRKFGGGATVVEAPLLPVPGARRVNANVFRLCFRTAYVAATTALAVWFPYFNQIIGLFGSFTFWPLAVYFPVEMYLTRNKVAPWTNQWLAIHAFSLVCLLISAFASVGFAVGVFGSETS

SEQ ID NO: 3699 - protein, 491 aa, Zea mays
MVSERQQAAGKVAAFNLTEAGFGDGSDLLDDDGRERRTGTLVTASAHIITAVIGSGVLSLAWAIAQLGWVIGPVVLLAFSAITWFCSSLLADCYRAPPGPGQGKRNYTYGQAVRSYLGESKYRLCSLAQYVNLVGVTIGYTITTAISMGAIKRSNCFHSRGHGADCEASNTTNMIIFAGIQILLSQLPNFHKLWWLSIVAAVMSLAYSSIGLGLSIAKIAGKLMHGSYCGVHVKTSLTGAAVGVDVTAAEKVWKTFQSLGDIAFAYTYSNVLIEIQDTLRSSPPENVVMKKASFIGVSTTTAFYMLCGVLGYAAFGSDAPGNFLTGFGFYDPFWLIDVGNVCIAVHLVGAYQVFCQPIYQFVEAWARGRWPDCAFLHAELAVVAGSSFTASPFRLVWRTAYVVLTALVATVFPFFNDFLGLIGAVSFWPLTVYFPIQMYMAQAKTRRFSPAWTWMNVLSYACLFVSLLAAAGSVQGLVKDLKGYKPLFKVS

SEQ ID NO: 3700 - protein, 200 aa, Zea mays
  misc_feature (46)..(46): Xaa can be any naturally occurring amino acid
  misc_feature (136)..(136): Xaa can be any naturally occurring amino acid
  misc_feature (159)..(159): Xaa can be any naturally occurring amino acid
  misc_feature (178)..(178): Xaa can be any naturally occurring amino acid
  unsure (1)..(200): unsure at all Xaa locations
FILKFPPPSLISLLLRLLLSPVKTGICHVRTLEEHHLRTPRHDAGXSNIYPRQGGPVRKNGFIVFKNRPCQVVWVSTSETDEHGHAKCHFVAIDIFKGEKLEYTAASSHNCDIAHVNRTEDHLIDISHDGSVSLLXTSDVLTNDDLILPADDTLVGQIXRGTRTVKDLVVTVQSVYAXECICALIDAGPKLLTCLEILYL

SEQ ID NO: 3701 - protein, 425 aa, Zea mays
FSKILSLCVSYFTSVYVMKWKDFFPNKELKEPPYFDARAVCYPNLKTIRDYLAWRQVDCHINNQYNTCFWMLVKSGKSEQEAQLALKGTFAKDKNELLAKQFQINYDDELAMFRKGSSVYREKVETIVKIDDYGEPIKRPRLKVTVAHVDIIGTEFWENHPHILREGKFMHGFVKKFGINHIFSPCNWIIVRIIACQFDQFSRIHSFDKPNDETALRLMNESATLMMEQYPDIVFGYGFSNEYSFVFHEKSELYQRRESLILSSCSSYFTSLYMTKWKEFFPYTELMQTPHFEADALCYPKLKIICEYLSWRQAECHAGNQYNTCFWMLVKSGKSEKEAHEILKGTLSKDKNELLFQQFQMNYNNEPAMFRKGSCVYRRKVEELAGAEDGGNVTSRERWHVKVDHVDLGPGFWRKHPGLMTDRTQ

SEQ ID NO: 3702 - protein, 161 aa, Zea mays
MSDTDEHHFESKADSGASKTYPQQAGAIRKGGHIVIKARPCKVVEVSTSKTGKHGHAKCHFVAIDIFNGKKLEDIVPSSHNCDVPHVDRQDYQLIDITDDGYVSLLTESGNTKDDLKLPTDDVLLGQIKTGFADGKDLILSVMSAMGEEQICAVKEIGGGK

SEQ ID NO: 3703 - protein, 432 aa, Zea mays
  misc_feature (20)..(20): Xaa can be any naturally occurring amino acid
  unsure (1)..(432): unsure at all Xaa locations
MGFGMGNNNNGASSSSSRLXPRAPLLPRHGSSGGREGGGLSSQPKTFANVFIAVVGAGVLGLPYTFSRTGWAVGSLLLFSVAALTFYCMMLLVACRRRLADEHPKIASFGDLGDTVFGAHGRFAVDVMLVLSQFSFCVGYLIFISNTMAHLYPITAAASSSSALLSPKALVIWAMLPFQLGLNSIKTLTLLAPLSIFADVVDLGAMGVVLGQDVAAWLAKPVPVVAFGGAGALLYGLGVSVYAFEGIGMVLPLEAEAANKSKFGVTLGLSMAFIAVMYGLFGVMGYVAFGDATRDIITTNLGAGWLSAAVQLGLCINLFFTMPVMMNPVYEVAERLLHGKRYCWWLRWLLVVVVGLAAMYVPNFTDFLALVGSSVCVLLGFVLPASFHLKVFGAEMEWPGVLSDVLLVVIGLALAVFGTYTSLLQIFQSSSA

SEQ ID NO: 3704 - protein, 230 aa, Zea mays
MSANVGESTSGGSSNDAAGGSFECNICFELPQEPIVTLCGHLFCWPCLYRWLHIHAHSPECPVCKALVEEDKLVPLYGRGKDRVDPRSKNMPEGEIPHRPTGQRPAPAPQADANNNFANANPNANPWFMGTGVPLANARWGNYAFSAAFGGLFPMLSFQVHGFPDAAAYAQPAGFHYGYGHGHGFHGGHMGHAHGVHRQAPLGQQQQADIYLKALLFMIGILVIASLIAF

SEQ ID NO: 3705 - protein, 172 aa, Zea mays
MAASAPAVRPLARAAIPIPLSARPRTARVSSLPLASPAPAQRLALGRTGQARLPARSRSVRCLAALSPEMRETLDKVVGSSKVLLFMKGTKDFPQCGFSHTVVQILRSLDVPFETLDVLANEALRQGLKEYSSWPTFPQLYIDGEFFGGCDITVEAYKSGELQETLEKAMCS

SEQ ID NO: 3706 - protein, 169 aa, Zea mays
  misc_feature (26)..(26): Xaa can be any naturally occurring amino acid
  misc_feature (53)..(53): Xaa can be any naturally occurring amino acid
  misc_feature (60)..(60): Xaa can be any naturally occurring amino acid
  misc_feature (99)..(99): Xaa can be any naturally occurring amino acid
  misc_feature (104)..(104): Xaa can be any naturally occurring amino acid
  misc_feature (130)..(130): Xaa can be any naturally occurring amino acid
  unsure (1)..(169): unsure at all Xaa locations
MTREEHHCLNQMPTPPPSKTYPHDAXAARNNGFFGIKNRPCKAAKAPTSNSAXHGHAKCXLLSIDIFHVKKLEHIVPSSLNCDIPPENRTEHQLIVYIXDGVVXLLTSDDNTKDDLMTPPCMYTLVTLIXEGVESGQDLAATVQPAMTDQQICALKDVFPSNFPALEYC

SEQ ID NO: 3707 - protein, 189 aa, Zea mays
MAEAEGQLAACWGKQDDEWRKGPWTTQEDKLLLDHVAQHGEGRWNSVSKLTGLKRSGKSCRLRWVNYLRPDLKRGKMTPQEESTIVQLHSLWGNRWSTIARSLPGRTDNEIKNYWRTHYKKGKPSKNIERARARFLMQRREMQQQQQQQQQKLLLGQGKDAELASATAEDDVDEKMTGNVGPAATALAD

SEQ ID NO: 3708 - protein, 581 aa, Zea mays
MCGILAVLGCGDESQGKRVHVLELSRRLKHRGPDWSGLHQVADNYLCHQRLAIIDPASGDQPLYNEDKSIAVAVNGEVYNHEELRARLSGHRFRTGSDCEVIAHLYEEYGESFIDMLDGVFSFVLLDARDNSFIAARDAIGVTPLYIGWGIDGSVWISSEMKGLNDDCEHFEIFPPGNLYSSKEKSFKRWYNPPWFSEVIPSVPYDPLRLRSAFEKAVIKRLMTDVPFGVLLSGGLDSSLVAAVAARHFAGTKAAKRWGTRLHSFCVGLEGSPDLKAAKEVADHLGTVHHEFNFTVQDGIDAIEDVIYHIETYDVTTIRASTLMFQMSRKIKALGVKMVISGEGADEIFGGYLYFHKAPNKEEFHQETCRKIKALHQYDCLRANKATSAWGLEVRVPFLDKEFINEAMSIDPEWKMIRPDLGRIEKWILRKAFDDEERPFLPKHILYRQKEQFSDGVGYSWIDGLKDHAASNVSDKMMSNAKFIYPHNTPTTKEAYYYRMIFERYFPQSSAILTVPGGPSVACSTAKAIEWDAQWSGNLDPSGRAALGVHLSAYEQDTVAVGGSNKPGVMNTVVPGVAIET

SEQ ID NO: 3709 - protein, 173 aa, Zea mays
MSFFIEDSGLIVTQLLYQMAVLITLLRWIFTWILRYRSRSTSSSSSSTPPISSQTIKESLAVTTFRDAADRSPELISDTCAVCLGDLEDGDEVRELRNCSHVFHRECIDRWLDYECCGGDDNDGEEDNHRTCPLCRTPLLAANTSSCADWPVKNEPSWAVERLLYLFGDDLLV

SEQ ID NO: 3710 - protein, 232 aa, Zea mays
MGERVKGTVKWFNVTKGFGFISPDDGGEDLFVHQSSIKSDGYRSLNENDAVEFEIITGDDGRTKANDVTAPGGGALSGGSRPVEGGGDRGGRGGYGGGGGGYGGGGGGYGGGGGGYGGGGGGYGGGGYGGGGGGGRGCYKCGEEGHISRDCPQGGGGGYGGGGYGGGGGGGGGRECYKCGEEGHISRDCPQGGGGGGGYGGGGGRGGGGGGGGCFSCGESGHFSRECPNKTN

SEQ ID NO: 3711 - protein, 288 aa, Zea mays
MEEHCYSVSAEEVVGTHLSLGIGGGGGGGDKRMLTTLPPSRTVVQLFGEVLSVQDGDEAQALRHHHTGRPTAASRKKKRRDAAAGGASATDAAANGHHHQSKKTKTTAARRDDGGGGGGGGRKKLRLTAAQATLLEDSFRAHNILSHVCRFMHAPHAPFIHTYVILHSSSLPLMGRIYQGEKQELARQAGLSARQVEVWFQNRRARTKLKQTEVDCDLLRRWCARLSDDNDRLRRDLADLRRAAAASAGLGAVVCCASCGADRQLALAAAADNVLPSVASPSHSPHLT

SEQ ID NO: 3712 - protein, 122 aa, Zea mays
  misc_feature (77)..(77): Xaa can be any naturally occurring amino acid
  unsure (1)..(122): unsure at all Xaa locations
MAANVGESAAVGGSSSDAAGGSFECNICFELPQEPIVTLCGHLFCWPCLYRWLHMHANTPECPVCKAIVEEDKLVPXYGRGKDRVDPRSKNTPGVDIPQRPAGQRPATAQQADPNNNFGNAH

SEQ ID NO: 3713 - protein, 165 aa, Zea mays
  misc_feature (24)..(24): Xaa can be any naturally occurring amino acid
  misc_feature (42)..(42): Xaa can be any naturally occurring amino acid
  misc_feature (83)..(83): Xaa can be any naturally occurring amino acid
  misc_feature (100)..(100): Xaa can be any naturally occurring amino acid
  misc_feature (114)..(114): Xaa can be any naturally occurring amino acid
  misc_feature (120)..(120): Xaa can be any naturally occurring amino acid
  misc_feature (134)..(134): Xaa can be any naturally occurring amino acid
  misc_feature (145)..(145): Xaa can be any naturally occurring amino acid
  unsure (1)..(165): unsure at all Xaa locations
MTQSKEKHCQLKADAGSRPRPTRXGSSPVRKNGFIVITNRPXQVVQVPTSETGKHEHVKCHFVAIQIFLGNKLQHIAPSSHNXGIPHVKRNDYHLIDISXDAFVSLLTSDSNSXDDLILXTDETLAGQIQEGFXESDKDLAVTVXSAMGEEHICALNDGAPKKLR

SEQ ID NO: 3714 - protein, 159 aa, Zea mays
  misc_feature (15)..(15): Xaa can be any naturally occurring amino acid
  unsure (1)..(159): unsure at all Xaa locations
MSDSEEHHFKSRPFXGSKTYRRGGWTGPKNGVIFIKNRPCKGGGVSTSKTGKHGHPKCHFVAIDIFNGKRVEDIVPSSHNCDIPHVNRTEDQLIDISEEGFVSLLTSHGNTKEELRLPTDETFVAQIKEGFESGKDLVVTVQFPMGEDQICALKDVGPK

SEQ ID NO: 3715 - protein, 451 aa, Zea mays
MAGAYAAGRKKRVGRYEVGRTIGQGTFAKVKFAVDADTGAPVAMKVLDKETIFAHRMLHQIKREISIMKIVRHPNIVRLNEVLAGKTKIYIILELVNGGELFDKIARYGKLRENEARKYFQQLIDAIDYCHSKGVYHRDLKPENMLLDSRGNLKVSDFGLSTLSQNGAGLLHTTCGTPNYVAPEVLGSNGYDGSAADIWSCGVILYVLMAGYLPFEENDLPSLYEKITAAKYSCPYWFSPGAKSLIQRILDPNPRTRITIEEIRADPWFEKNYVAIRCGEDENVSLDDVQAIFDNIEDKYVSDEVTHKDGGPLMMNAFEMIALSQGLDLSALFDRQQEFVKRQTRFVSRKPAKTVVATIEVVAESMGLKVHSRNYKVRLEGPASNRASQFAVVLEVFEVAPSLFMVDVRKVAGDTPEYHRFYENLCSKLCSIIWRPTEVSAKSTPLRTTTC

SEQ ID NO: 3716 - protein, 470 aa, Zea mays
  misc_feature (435)..(435): Xaa can be any naturally occurring amino acid
  misc_feature (449)..(449): Xaa can be any naturally occurring amino acid
  unsure (1)..(470): unsure at all Xaa locations
MALGEGGDHGAALPLIADQAKHAAAGGIVRSGSMWTAAAHVITAVIGSGVLSLAWSIAQLGWVAGPAAMLVFAAVTALQSTLFADCYRSPDPEHGPHRNRTYAKAVDRNLGSSSSWVCMLLQHTALFGYGIAYTITASISCRAILKANCYHEHGHDAHCDYDGNYYMLIFGGVQLLLSFIPDFHDMAWLSVVAAAMSFSYAFIGLGLGLARTIANGTIKGSITGVRMRTPMQKVWRVSQAIGDIAFAYPYSLILLEIQDTLKSPPAENKTMKRASMISILVTTFFYLCCGCLGYAAFGSDAPGNLLTGFGLYGPYWLIDFANACIILHLLGGYQVYSQPIFQFAERLLAERFPDSGFVNGGSYTVRFACLRACRVNPLRVCLRTLYVASTTAVAVALPYFNEVLALLGALSFWPLAIYFPVEMYFIQRNVRRWSXPRWVVLQTFSVVCXLLVSAFALVGSIEGLISKKLG

SEQ ID NO: 3717 - protein, 175 aa, Zea mays
MAMEARMKGTVKWFNDTKGFGFISPDDGSEDLFVHQSSIKADGFRSLAEGEVVEFAVSEGDDGRTKAVDVTGPDGSFVQGGAGGGGGGGGFGSRGGGGSRGGGGFGGRGGDGSGGYGGGYVVAVAEAGAKTTTSNENATSEGIYIHLPLYRLHINTYSISFTIDRYGYEKSKANT

SEQ ID NO: 3718 - protein, 177 aa, Zea mays
GPSRPAGKEEKNGLALGNIVALPLSNLKPSLKLSSSSSSCCITKLFPISRINVSPTSVLVRASSSSSFGSRLEDTIKKTVAENPVVVYSKTWCTYSSEVKILFKKLGVDPLVFELDEMGPQGPQLQKVLERITGQHTVPNVFIGGKHIGGCTDTLKLYRKGELEPLLSEANAKKTES

SEQ ID NO: 3719 - protein, 368 aa, Zea mays
LGFWVLCPPPDRGSRRLPSSSPPPQPSWSWRPETPGSCCAGIPSLVFLPLPLSLGSGLREIWLGQGTSERRASGMPGGEDVRKVSRQDIQLVQNLIERCLQLYMNQKEVVDTLSFQAKIEPSFTELVWQKLEEENRDFFKAYYVRLMLMNQITAFNKLLEQQYEIMTKDHPSGMPSVPSTAPNGSNSNMLNQAVPFLPDTIPSTAMQDNLWSNGSSSSIVNGAPSDDQCGYSGKVAHGLPGVMDASSSLLAAHKSTVGQFNGHDGTTTKTESDYSSNSDFGFGNETVFLEQSVGDISGGSFSSSELNGQPVGSSSYGFLSQIPCNFSLSDWTDCFSQSSEIFENYGGSPFIPSDANNIPESSARENTG

SEQ ID NO: 3720 - protein, 206 aa, Zea mays
MGERVKGTVKWFNVTKGFGFISPEDGSEDLFVHQSAIKADGYRSLNENDVVEFEVITGDDGRTKAADVTAPGGGALAGGSRPGDGGGDRGGRGGGGYGGGGYGGGGGGGYGGGGGGYGSGGGSYGGGGGYGGGGGGGRYGGGGGGGRECYKCGEEGHISRDCPQGGGGGGGGYGGGGGRGGGGGGGGCFSCGESGHFSRECPNKTN

SEQ ID NO: 3721 - protein, 763 aa, Zea mays
MSIRDVCPKESKEPPKAQDQPSSSTQASPPTQNEDEAQVDEGEDQRDEPPQDDGNDQGEMQMIKTRRMKNRGHHTQESTKQSNEITPSTPSSATFIRGVEEALQDSDWVVAMQEELNNFTRNEDAKPIKTPMGTNEHLDLDTEGGGNTQAANSGSVTVQSRLSLSGTHLGISLTLAKPRPPPQGMAARSLLLYALLLLALATAAPSHGLTQADVAKRLKEVLSERNRGHEMLDSWNGDGDPCSPSTWEGFSCEPKDGAQVVVKLNFSSKKLQGPIPAEIANLTELNEIHLQYNNFTGFIPASFSAFRHLLKLSVICNPLLNNKQPDGFSSGVNFSYGGCATQEYYSSPAEEYQSPPAVASQKVYVIGGVAGGSLACTVALGSFFVCFNKRERRSPKKDCSSTTNPVFQECSIHNTTNPAVQQLSLKAIQTATSNYKTMIGEGGFGAVYRGALANGQEVAVKVRSSSSTQGTREFNNELRLLSAVWHENLVPLIGYCCEKDQQILVYPFMSNGSLQDRLYGEASKRKVLDWPTRLSVCIGAARGLVYLHNFAGRCIIHRDIKSSNILLDHSMCGKVADFGFSKYAPQEGDSNPSMEVRGTAGYLDPEYYSTQVLSTRSDVFSFGVVLLEIVTGREPLDVKRPRHEWSLVEWAKPYIREYKIEEMVDPGIKGQYCSEAMWRVLEVASVCTEPFSTFRPTMEDVLRELEDALIIENNASEYMRSIESTGTLGSNRYLSIDRKMFASGSARIESMKGNLQAMPSLPR

SEQ ID NO: 3722 - protein, 365 aa, Zea mays
MGSIMEQRCNNDPQALLDAQLELWHSTFAFIKSMAFKSALELGIADAIHCHGGTATLTQIATKAALHPSKTPCLRRLMRALTVAGIFSVAKNSSDDDSDQHVYGLTPASRLLVGSSQNLAPTLSLILNNVFVAPFLDLGTWFESALAATDLPLFELSHRKNVWDVVGHDPSVSQLFNAGMVADTRFLMDIAVRECGDVFQGIRSLVDVGGGHGAAAQAISAAFPAIQCTVLDLAHVVATAPACAGLSFVAGDMFEAIPPANAVFLKWIMHDWGDTECVTILKNCKKAIPPRDAGGKVIIVDTVVGAGPPNLKNKETQVMSDLFFMIVNGLERDEQEWRNIIFEAGFSDYIIIPVLGVRSIIELYP

SEQ ID NO: 3723 - protein, 550 aa, Zea mays
MASSASLQRFLLPSPHAAATAASPSSRLRRTGRARAAVSVPPPAAAGEQVPTERLEPRVEERAGGYWVLKDKYRAGLNPQEKVKLEKEPMALFMEGGIQDLARVPMEQIDAAKLTKDDVDVRLKWLGLFHRRKHQYGRFMMRLKLPNGVTTSEQTRYLASVIEAYGADGCADVTTRQNWQIRGVTLPDVPAILDGLRAVGLTSLQSGMDNVRNPVGNPLAGVDPHEIVDTRPYTNLLSSYVTNNSQGNPTITNLPRKWNVCVIGSHDLYEHPHINDLAYMPAVKDGEFGFNLLVGGFISPKRWAEALPLDAWVAGDDVVPVCKAILEAYRDLGSRGNRQKTRMMWLIDELGMEVFRSEVEKRMPNGVLERAAPEDLVDKRWERRDYLGVHPQKQEGLSYVGLHVPVGRLQAADMFELARLADEYGTGELRLTVEQNIVLPNVSNERLDALLAEPLLQEQRLSPRPSMLLRGLVACTGNQFCGQAIIETKARALQVAREVEKRVAVPRPVRMHWTGCPNSCGQVQVADIGFMGCLTKDSDGKIVEAADIFV

SEQ ID NO: 3724 - protein, 161 aa, Zea mays
MSDSEEHHFESKADAGASKTYPQQAGTIRKNGYIVIKNRPCKVVEVSTSKTGKHGHAKCHFVGIDIFTGKKLEDIVPSSHNCDVPHVNRVEYQLIDISEDGFVSLLTESGNTKDDTKLPSDEALQAQIKSGYDEGKDILLTVMSAMGEEQICAVKEIGGKN

SEQ ID NO: 3725 - protein, 585 aa, Zea mays
MCGILAVLGCADDTQGKRVRVLELSRRLKHRGPDWSGMHQVGDCYLSHQRLAIIDPASGDQPLYNEDKSIVVTVNGEIYNHEQLRAQLSSHTFRTGSDCEVIAHLYEEHGENFIDMLDGVFSFVLLDTRDNSFIAARDAIGVTPLYIGWGIDGSVWISSEMKGLNDDCEHFEIFPPGHLYSSKQGGFKRWYNPPWFSEVIPSVPYDPLALRKAFEKAVIKRLMTDVPFGVLLSGGLDSSLVAAVTVRHLAGTKAAKRWGTKLHSFCVGLEGSPDLKAAKEVANYLGTMHHEFTFTVQDGIDAIEDVIYHTETYDVTTIRASTPMFLMSSKIKSLGVKMVISGEGSDEIFGGYLYFHKAPNKEELHRETCQKIKALHQYDCLRANKATSAWGLEARVPFLDKEFINEAMSIDPEWKMIRPDLGRIEKWVLRKAFDDEEQPFLPKHILYRQKEQFSDGVGYSWIDGLKAHAESNVTDKMMSNAKFIYPHNTPTTKEAYCYRMIFERFFPQNSAILTVPGGPSVACSTAKAVEWDAQWSGNLDPSGRAALGVHLSAYEQEHLPATILTGTSKKPRMIEVAAPGVAIES

SEQ ID NO: 3726 - protein, 390 aa, Zea mays
  misc_feature (172)..(172): Xaa can be any naturally occurring amino acid
  misc_feature (195)..(195): Xaa can be any naturally occurring amino acid
  unsure (1)..(390): unsure at all Xaa locations
MLRAHLAASELQVDGNRPLHKKTTFQLKEVRGPNHSQTLNNYARLPLPPPAGTMASGGEPGAPKVVLLLVPHVDESFHAALRARFRVLDFFASPSSGEPLPAFLAAAAAAPEPPRAAVVVGAGPARVDAAFLDAVPSLRCVLSLAAGVDFIDLGECARRGVAVANSGSVFSXDVADHAVGLLIDVLRRVSAAERXVRRGLWPVQGDHPLGSKVGGRRVGVVGLGNIGSQIAKRLQALGCTVCYHSRTPRDSVPYRYFANVRDLAADSDVLVVACALNEATRHIVGRDVLEALGTDGVVVNISRGANVDEAELVRALKEGRIAGAGLDVFESEPGARREFFSMDNVVMTPHVAVFTAESMSDLRDHAIANLEAFFSGQPLLTPVPPYSPVK

SEQ ID NO: 3727 - protein, 177 aa, Zea mays
MAGRDREPLVVGRVVGDVLDPFVRTTNLRVSYGARTVSNGCELKPSMVVHQPRVEVGGPDMRTFYTLVMVDPDAPSPSDPNLREYLHWLVTDIPGTTGAAFGQEVICYESPRPTMGIHRFVLVLFQQLGRQTVYAPGWRQNFNTRDFAELYNLGPPVAAVYFNCQREAGSGGRRMYS

SEQ ID NO: 3728 - protein, 181 aa, Zea mays
MANDSLTRGHIIGDVLDPFTSSVSLSVLYDGRPVFDGMEFRASAVSVKPRVEIEGDDFRVAYTLVMVDPDAPNPSNPSLREYLHWMVTDIPASTDDSFGRELIPYESPSPTMGIHRLVLVLYQQLGRGTVFAPQVRQNFNLRNFARRFNLGKPVAATYFNCQRQTGTGWEKVHLSNGPTYP

SEQ ID NO: 3729 - protein, 162 aa, Zea mays
  misc_feature (10)..(10): Xaa can be any naturally occurring amino acid
  misc_feature (71)..(71): Xaa can be any naturally occurring amino acid
  misc_feature (100)..(100): Xaa can be any naturally occurring amino acid
  misc_feature (150)..(150): Xaa can be any naturally occurring amino acid
  unsure (1)..(162): unsure at all Xaa locations
MSDSEEHHFXSKADSAGCNTYPHDAGTVRKNGFISIKKRPCKDVEVSTSQTGKHDHARCHFGAVDIFNGKXKLEDIVPSSHKCVIPHVKRTEHLLIDISXEDGFVSLLTSHGNTKDDLRLPTDETLVAQINERFESGKDLGVTGQSAKGXEHICAVKDAGPK

SEQ ID NO: 3730 - protein, 608 aa, Zea mays
MGQCYGKAGGASSRRADHDDHAHAVAPPSPLPANGAPPPQPATPGRRKSGSATPVHHQAATTAWPSPYPAGGASPLPAGVSPSPARSTPRRFFKRPFPPPSPAKHIKATLAKRLGGGKPKEGTIPEEGGAGVAADSAEAERPLDKTFGFANNFGAKYDLGKEVGRGHFGHTCSALVKKGEYKGHAVAVKIISKAKMTTAISIEDVRREVKILKALSGHNNLVKFYDACEDALNVYIVMELCEGGELLDRILARGGRYTEEDAKAIVVQILSVVSFCHLQGVVHRDLKPENFLFATRDESAPMKLIDFGLSDFIRPDERLNDIVGSAYYVAPEVLHRSYSMEADIWSIGVITYILLCGSRPFWARTESGIFRSVLRADPNFDDSPWPSVSAEAKDFVKRFLNKDYRKRMTAVQALTHPWLRDEQRQIPLDILVFRLVKQYLRATPLKRLALKALSKALREDELLYLRLQFKLLEPRDGLVSLDNFRTALTRYVTDAMRESRVLEFLHALDPLAYRKMDLEEFCAAAISPYQLEALESWEEIAGTAFQHFEQEGNRVISVEELAQELSLAPTHYSIVQDWIRKSDGKLNFLGFTKFLHGVTIRGSNTRRH

SEQ ID NO: 3731 - protein, 160 aa, Zea mays
MYPPKASGDPAAGAAPVTGFPVGGPAASSQWSSGLLDCFDDCGLCCLTCWCPCITFGRVAEIVDRGATSCGTAGALYAVLAYFTGCQWIYSCTYRAKMRAQLGLPETPCCDCLVHFCCEPCALCQQYKELKARGFDPDLGWDRNAAAATMLPPSAQGMGR

SEQ ID NO: 3732 - protein, 148 aa, Zea mays
  misc_feature (9)..(9): Xaa can be any naturally occurring amino acid
  misc_feature (18)..(18): Xaa can be any naturally occurring amino acid
  misc_feature (44)..(44): Xaa can be any naturally occurring amino acid
  misc_feature (61)..(61): Xaa can be any naturally occurring amino acid
  misc_feature (85)..(85): Xaa can be any naturally occurring amino acid
  misc_feature (90)..(90): Xaa can be any naturally occurring amino acid
  misc_feature (108)..(108): Xaa can be any naturally occurring amino acid
  misc_feature (135)..(135): Xaa can be any naturally occurring amino acid
  unsure (1)..(148): unsure at all Xaa locations
SDSEEHHFXLSADAGASXTYPQQDETAHKNGFFIIKNRPCMDEXDTTSITAKHVHGQCHFXAFIHIFNGKKLEHSAPSSHNWDVXHVNRXTEYHLIDISDDASVSLLXTSNANTIDDLKLPTDETLEAHIKEGFXSRNDLDVTVHTAM

SEQ ID NO: 3733 - protein, 176 aa, Zea mays
  misc_feature (57)..(57): Xaa can be any naturally occurring amino acid
  unsure (1)..(176): unsure at all Xaa locations
MSRDPLVVGSIVGDVVDYFSASALLRVMYGGREMTCGSELRPSQVASEPTVHITGGXRDGRPVLYTLVMLDPDAPSPSNPSKREYLHWLVTDIPEGAGANHGNEVVAYESPRPSAGIHRFVFIVFRQAVRQAIYAPGWRANFNTRDFAACYSLGPPVAATYFNCQREGGCGGRRYR

SEQ ID NO: 3734 - protein, 363 aa, Zea mays
MCGGAILANLREPAPRRLTERDIWQQKKKLKRGGGGGRRSFAAEDDEDFEADFEVFEADSSDSDLELREGTDDDVVEIKPFTAKRTFSSDGLSTMTSAVARSAKRKRKNLYRGIRQRPWGKWAAEIRDPQKGVRVWLGTFNSPEEAARAYDAEARRIRGKKAKVNFPDAPEVGQKRRSGSASAKASKSSFGQKPIVKVTMNSLANTNASFFQSVSYPSNSFVQHGNIPFVPAMNSTGSVEDPIMNLHSDQGSNSFGCSDLGWENDTKTPDITSIAPISTIAEGDESAFVDSNSNNSFVLPALENSAVDLTDGLTDLESYMRFVLDGGPSDSVDSLLNLDGSQDVGSNMDLWSFDDMPIAGDFF

SEQ ID NO: 3735 - protein, 175 aa, Zea mays
VNFLRFSSFFSSRFLKFISIVDLSLSLSNQSMKGGKSKADTKSSKLAVNKKPAKASKAAAAAKDPNKPKRPSSAFFVFMEDFRQTYKKDHPNNKSVAAVGKAGGHKWKSLSDTEKAPYVAKADTRKVDYEKNMKAYNKKLEEGPKEDEEESDKSVSEVNDEDDADDGSDEEEDDD

SEQ ID NO: 3736 - protein, 473 aa, Zea mays
FAAVVLKCEYAVRGEIVIHAQRLQQQLQTQPGSLPFDEILFCNIGNPQSLGQQPVTFFREVLALCDHPCLLEKEETKSLFSADAISRAKQILATIPGRATGAYSHSQGIKGLRDAIAAGITSRDGFPANADDIFITDGASPGVHMMMQLLIRNEKDGILCPIPQYPLYSASIALHGGALVPYYLDEKTGWGLEISDLKKQLEDARSKGIDVRALVVINPGNPTGQVLAEDNQYDIVKFCKNEGLVLLADEVYQENIYVDNKKFNSFKKIARSMGYGEDDLPLVSFQSVSKGYYGECGKRGGYMEITGFSAPVREQIYKVASVNLCSNITGQILASLVMNPPKVGDESYASYKAEKDGILQSLARRAKALEDAFNTLEGFSCNKAEGAMYLFPQIHLPHKAIEAAKAAKKAPDAFYALRLLESTGIVVVPGSGFGQVPGTWHVRCTILPQEDKIPAVITRFKAFHEAFMAEYRD

SEQ ID NO: 3737 - protein, 124 aa, Zea mays
MLPAAMAVGLAWSRPMLAHGQGMTAREVGAMHDCVEELSDAVVELRKSLGEMKQLRGKDFDLKMNDIQTWVSAALTDEDTCTEGFAGKVMNGKVKTVVRGRILEVAHMTSNALALINSLAALHG

SEQ ID NO: 3738 - protein, 146 aa, Zea mays
  misc_feature (50)..(50): Xaa can be any naturally occurring amino acid
  misc_feature (63)..(63): Xaa can be any naturally occurring amino acid
  misc_feature (80)..(80): Xaa can be any naturally occurring amino acid
  misc_feature (130)..(130): Xaa can be any naturally occurring amino acid
  unsure (1)..(146): unsure at all Xaa locations
MVDSEEHQFQSKEGPARPNSYPKKAGPGRKNRFIIINNRPCTVMLRFSTXKTAKYDHGKMSLXAIDIINGKEIEHIVPSXNNCDVILLTSDVNSTDDLRLPADDTLGAHIKEGFESSKDLVVTVQTAMGXEQICALHDRAPQKLPD

SEQ ID NO: 3739 - protein, 133 aa, Zea mays
MGTAFSSSSSSSSSTPESRAMALAKAKEIVASAPVVVFSKSYCPFCVQVKKLFTQLGASFKAIELDTESDGTEIQSALAEWTGQRTVPNVFINGKHIGGCDDTIALNKGGKLVALLTEAGAISGSSSKTTVTA

SEQ ID NO: 3740 - protein, 235 aa, Zea mays
  misc_feature (193)..(193): Xaa can be any naturally occurring amino acid
  misc_feature (211)..(211): Xaa can be any naturally occurring amino acid
  misc_feature (226)..(226): Xaa can be any naturally occurring amino acid
  unsure (1)..(235): unsure at all Xaa locations
MGDSSGSVSIDVERIYFGGKEHPVRTRYGPVSVSVYGDEDKPALITYPDVALNYMSCFQGLFFCPEAASLLLHSFCIYHITPQGHELGAAPIPSDVPELSVDNLADQVADVLDFFGLGSVMCMGVTAGAYVLTLFAAKYRERVLGLMLVSPLCKAPSWSEWLYNKVLLNLLYYCGTSGLVNECFLQRYFSTEXVRGSGQEPESEIVQPCRXLLDQRQGVNVCRFPXAINERHGLD

SEQ ID NO: 3741 - protein, 252 aa, Zea mays
  misc_feature (193)..(193): Xaa can be any naturally occurring amino acid
  unsure (1)..(252): unsure at all Xaa locations
MVRGKTQMKRIENPASRQVTFSKRRNGLLKKAFELSVLCDAEVALVVFSPRGKLYEFASGSAQKTIERYRTYTKDNVSNKTAHQDIEQVKADAEGLAKKLEALEAYKRKLLGERLEECSFEELHSLEVKLEKSLHCIRGRKTQLLEEQLHKLKEKEMNLRKSNEDLREKVMGAKTFCRRCTAASGMPTTQENXCKKQPPPPPPMLMAPPPPPAPAAIDHTGPKDVGMDVETELYIGLPGRDYRSNNKDMTAQ

SEQ ID NO: 3742 - protein, 244 aa, Zea mays
MAAAARQRGTVKWFNDTKGFGFISPEDGSEDLFVHQSSIKSEGFRSLAEGEEVEFSVSEGDDGRTKAVDVTGPDGSFVRGGGGGGGGGGGYGSRGGGGSGGGGRSYGGSWGGGRRSGGGGGPGACYKCGEPGHMARDCPSADGGGGYGGGGYGGGGGGGGGCFKCGEPGHMARDCSSGGGGYGGGGGGGGGGCYNCGQAGHMARDCPSGGGGGGGRFGGGGGGGGDRSCYNCGEAGHIARDCPT

SEQ ID NO: 3743 - protein, 228 aa, Zea mays
  misc_feature (210)..(210): Xaa can be any naturally occurring amino acid
  unsure (1)..(228): unsure at all Xaa locations
MACLTDLVNLNLSDTTEKIIAEYIWIGGSGMDLRSKARTLPGPVTDPSKLPKWNYDGSSTGQAPGEDSEVILYPQAIFKDPFRRGNNILVMCDCYIPERITEIAGVVVTFDPKPIPGDWNGAGAHTNYSTESMRKEGGYEVIKAAIEKLKLRHKEHIAAYGEGNERRLTGRHETADINTFSWGVANRGASVRVGRETEQNGKGYFEDRRXASKWNPYVVTSMIAETTI

SEQ ID NO: 3744 - protein, 355 aa, Zea mays
MACLTDLVNLNLSDTTEKIIAEYIWIGGSGMDLRSKARTLPGPVTDPSKLPKWNYDGSSTGQAPGEDSEVILYPQAIFKDPFRRGNNILVMCDCYTPAGEPIPTNKRYSAAKIFSSPEVAAEEPWYGIEQEYTLLQKDTNWPLGWPIGGFPGPQGPYYCGIGAEKSFGRDIVDAHYKACLYAGINISGINGEVMPGQWEFQVGPSVGISSGDQVWVARYILERITEIAGVVVTFDPKPIPGDWNGAGAHTNYSTESMRKEGGYEVIKAAIEKLKLRHKEHIAAYGEGNERRLTGRHETADINTFSWGVANRGASVAVGQTEQNGKGYFEDRRPASNMDPYVVTSMIAETTIVWKP

SEQ ID NO: 3745 - protein, 356 aa, Zea mays
MACLTDLVNLNLSDTTEKIIAEYIWIGGSGMDLRSKARTLPGPVTDPSKLPKWNYDGSSTGQAPGEDSEVILYPQAIFKDPFRRGNNILVMCDCYTPAGEPIPTNKRYSAAKIFSSPEVAAEEPWYGIEQEYTLLQKDTNWPLGWPIGGFPGPQGPYYCGIGAEKSFGRDIVDAHYKACLYAGINISGINGEVMPGQWEFQVGPSVGISSGDQVWVARYILERITEIAGVVVTFDPKPIPGDWNGAGAHTNYSTESMRKEGGYEVIKAAIEKLKLRHKEHIAAYGEGNERRLTGRHETADINTFSWGVANRGASVRVGRETEQNGKGYFEDRRPASNMDPYVVTSMIAETTIVWKP

SEQ ID NO: 3746 - protein, 238 aa, Zea mays
MASLTDLVNLDLSDCTDRIIAEYIWVGGSGIDLRSKARVMCDCYTPQGEPIPSNKRYKAATVFSHPDVAAEVPWYGIEQEYTLLQKDVSWPLGWPVGGYPGPQGPYYCAAGADKAFGRDVVDAHYKACLYAGINISGINGEVMPGQWEFQVGPSVGISAGDEIWVARYILERITEMAGIVLSLDPKPIKGDWNGAGAHTNYSTKSMREAGGYEVIKEAIEKLGKRHREHIAAYGEGNE

SEQ ID NO: 3747 - protein, 183 aa, Zea mays
SLGLSLESPHNTRTIPFLCSPLSLSLYKPCDPLPQDSSMKGGKSKTETRSSKLSVAKKPAKAAGRSKAAAKDPNKPKRPASAFFVFMEDFRQTYKKDHPNNKSVAAVGKAGGEKWKSLSDSEKAPFVAKADKRKVEYEKTMKAYNKKLEEGPKEDEEESDKSVSEVNDEDDADDGSDEEEDDD

SEQ ID NO: 3748 - protein, 435 aa, Zea mays
MCGGAILSGFIPPSGVAAAAAAAKKKQQQRCRVTADLLWPGPGSKEAPQDQEEDFEADFREFERGLGEDDVDSAGEGGDPEVQELPPPEPTRFAFATAAKAAVDGVMTTTPKDVKGDRPVKRGRKNQYRGIRQRPWGKWAAEIRDPNKGVRVWLGTYNTAEEAARAYDAEARKIRGKKAKVNFPDDDAPGTGHRPANAAPRLVAPPPPPKACADEIFNNLKNDDDDNNNNNDDLFAMFAFGDNKKKVPAAKPAAAEGGSGSGSFLVPAPAVAVVPGNKRRSSATNTMLSVSDDQRSNSYGSGSSDLVGSWSWDDDAAAAAMTSDYTSSVFAPDNAVLPAASYTQGGAPKRMRSSYGGAPPSLAHDAAMPGFGLDKVSYHHYQALPPYYVGSSNASVGNLGLLQQADDAPAPQDGASAGDIWSLDELLMLAAAGAY

SEQ ID NO: 3749 - protein, 418 aa, Zea mays
MCGGAILSGFIPPSGVAAAAAAAKKQQQQQQRCRVTADLLWPGPGSKGAPQDKEEDFEADFREFERGLGEDDVDSAGEGGDPEVQELPPPEPTRFAFATAAKAAVDGVMTPPPKDVQGDRAVKKRGRKNQYRGIRQRPWGKWAAEIRDPNKGVRVWLGTYNTAEEAARAYDAEARKIRGKKAKVNFPDDATGTRHRPTTDEIFNNLKNDDNNNNDDLFAMFAFGDNKKKVPAAKPAAAEGGSGSGSFLVPAPAVAVVPGNKRRSSATNTMLSVSDDQRSNSYGSGSSDLVGSWSWDDDAAAAAMTSDYTSSVFAPDNAVLPAASYTQGGAPKRMRSSYGGAPPSLAHDAAMPGFGLDKVSYHHYQALPPYYVGSSNASVGNLGLLQQADDAPAPQDGASAGDIWSLDELLMLAAAGAY

SEQ ID NO: 3750 - protein, 407 aa, Zea mays; identical to SEQ ID NO: 388

SEQ ID NO: 3751 - protein, 155 aa, Zea mays
  misc_feature (3)..(3): Xaa can be any naturally occurring amino acid
  unsure (1)..(155): unsure at all Xaa locations
EEXHNETKADDGAAKTNPKEAGTERKNGIIVIKNRPCKGVEGTTSKTGKNGHAKGHWAAIDIVKGKKLEEIAPSSHNGDIPHVNRTEYQLRDISEDGFESRLTSEGNTKDERRLPTEETLEAQIKEGIERGKDLDVTDQSAMGEEQICALKDGGP

SEQ ID NO: 3752 - protein, 562 aa, Zea mays
MANALLGGLWAIVVVAVVVGVVATVTHSGKKAGDDFTVPGEASIATSGKSVESLCAPTLYKESCEKTLSQATNGTENPKEVFHSVAKVALESVKTAVEQSKTIGEANASDSMTESAREDCKKLLEDAVDDLRGMLEMAGGDIKVLISRSDDLETWLTGVMTFMDTCIDGFVDEKLKADMHTVLRNATELSSNALAITNSLGGILKKLDLGMFKKDSRRRLLSEQDEKGWPVWMRSPERKLLAAGNQPKANAVVAKDGSGQFKTIQQAVDAMPKGQQGRYVIYVKAGLYDEIVMVPKDKVNIFMYGDGPKQSRVTGRKSFADGITTMKTATFSVEASGFICKNMGFHNTAGAERHQAVALRVQGDLAAFYNCRFDAFQDTLYVHARRQFFRNCVISGTIDFIFGNSAAVFQNCLIVTRRPMDNQQNSVTAHGRTDPNMKSGLVIQNCRLVPDQKLFPDRFKIPSYLGRPWKEFSRLVIMESTIADFIKPEGYMPWNGDFGIKTLYYAEYNNRGPGAGTSKRVTWPGFHVIGRKDAEQFTAGPFIDGALWLKFTGTPHILGFKF

SEQ ID NO: 3753 - protein, 261 aa, Zea mays
MAAASTSTSLPLGFSHHRPTPRIRPQPQSQSQPLKAKPPTPLCLSLTLTPATAKPRLAAMPDDVAVANFVEKDWSFLESAGANLQRALASGALSPASRVLALTPTASFVRSLLASSPCELLVAAHESMYVLAGVKEAHDEVRCFHLEGGGGGRGGGVVEAVPERFDDFDVVFVCYFPGMGVSAGALLKSLAKRCSKGARVVMFLDQGRQNFEQQRREHPDVVTSDLPSIAFLEKAASGNKYEITEFVDEPSFYLAVLQFQG

SEQ ID NO: 3754 - protein, 758 aa, Zea mays
MRFDLDGLPVHFPYAAIYPEQHAYMGELKRALDARGHALLEMPTGTGKTAALISLITSYSLANPARPLRLIYCTRTVHEMEKTLAELRLLFAHLPPAASRSLLALGLSSRKNLCIHPQASAAAARDSVDTACRRLTASWVREKASSDPDSTPLCEFYETFDRAAAAGDLASFMPPGVYTLADLRALGRERRVCPYFLARQMVKYANVVVYSYQYLLDPKVASIVSREMQKECVVVFDEAHNIDNVCIEALSVSIRKQTLEGAERNLRRISQEIDRFKATDANRLRAEYNRLVDGLAQRGNLPISDAWLANPSLPDDILKEAVPGNIRRAEHFLAVLRRLVRFLDGRLETENVENEMPVSFVASIHSQAGIDQKMLRFCYDRLHSLMMTLEITDTDEFMHIQTICDFATLIGTYTRGFSIIIEPYDDRMPDIRDPVIQLSCHDASLAIRPVFDRFETVVITSGTLSPIDLYPRLLNFNPVISRSFTMSLTRDCICPMVLTRGSDQLPVSTKFDMRSDPGVVRNYGRLLLEMASAVPDGIVCFFVSYSYMDGIVNSWHEMGILQDIMQHKLVFIETPDVVETTLALDNYRKACDCGRGAIFFSVARGKVAEGIDFDRHYGRLVIMFGVPFQYTLSRILLARLEYLRETFQIKEGDFLTFDALRQAAQCVGRVIRSKADYGMMIFADKRYSRHDKRSKLPGWILSHLHDAHLNLSTDMALHIAREFLRRMAQPYDKAGSGGKKTLLTEEDLENLAQDGMAM

SEQ ID NO: 3755 - protein, 171 aa, Zea mays
MTELFDTAVTSLLHLPEVLDRLSAADGDRRSAGNHAAHGHGHGRVHGLGGGGGAPVDIVESPREYAFVLDVPGLSKSDIQVTLEEDRVLVMKGGSGKRKRDEEEDMNGEGCRYIRLERGAAPRSFVRKFRLPEDADTGGVAARCENGVLTVTVKKLPPPEKKAKTVQVTIA

SEQ ID NO: 3756 - protein, 156 aa, Zea mays
MAEEEHQTFETADAGASLTFPMQCSALRKNGHVVIKGRPCKIIDMSTSKTGKHGHAKVNLVAIDIFTGKKYEDLSPSTHNMDVPNINRQEYQLINIDDGYLNLMTQDGSTKDDVKLPEGDLGEKIQEEFDEGKDLLVTVVTAMGEEHALTYKEAPK

SEQ ID NO: 3757 - protein, 157 aa, Zea mays
  misc_feature (42)..(42): Xaa can be any naturally occurring amino acid
  unsure (1)..(157): unsure at all Xaa locations
MGFVSFAGRVLFASVFLLSAYQEFTEFGTDGGPAAKNLQPKXNSFTKNISVHLGVVVPHVELKHVIAATIGLKGLGGLLFIVSSSFGAYLLALYLAFITPVVYDFYNYDMEKAEFVQIFMKFTQNLALFGALLFFLGMKNSVPKRQAKKKAAKSKTT

SEQ ID NO: 3758 - protein, 487 aa, Zea mays
  misc_feature (59)..(59): Xaa can be any naturally occurring amino acid
  unsure (1)..(487): unsure at all Xaa locations
SLTIVHYSSDDNSNNVSPTAAKAEPPDPQQLAAASSSGPSSFTLAKPASSGPNSVCFIXASGRTKHAARTRMAIVREEAVDTSISPRVSALRPSKTMAITDQAMALRQAGVPVIGLAAGEPDFDTPPAIAEAGMDAIRNGYTRYTPNAGTLELRKAICTKLQEENGVSYLPDEVLVSNGAKQCITQAVLAVCSPGDEVLIPAPYWVSYPEMARLADATPVILPTNISENFLLRPELLTDEINEKSRLLILCSPSNPTGSVYPKELLEKIADIVKKHPRLLVLSDEIYEHIIYQPAKHISFASLPGMWERTLTVNGFSKAFAMTGWRLGYLAAPKHFVAACGKIQSQFTSGASSISQKAGVAALNLGYAGGEAVSTMVKAFQERRDYLVKNFKELPGVKISEPQGAFYLFIDFSAYYGSEVEGFGTIKNSESLCIFLLEKAQVALVPGDAFGDDKCIRISYAASLTTLQTAMSKLKEAVALLKPCVAA

SEQ ID NO: 3759 - protein, 184 aa, Zea mays
  misc_feature (159)..(159): Xaa can be any naturally occurring amino acid
  unsure (1)..(184): unsure at all Xaa locations
MYPKAADEGAQPLATGIPFSGGGGYYQAGGAMAAAFAVQAQAPVAAWSTGLCNCFDDCHNCCVTCVCPCITFGQTAEIIDRGSTSCGTSGALYALVMLLTGCQCVYSCFYRAKMRAQYGLQVSPCSDCCVHCCCQCCALCQEYRELKKRGFDMSIGTVXWHANMERQGRAAAAVPPHMHPGMTR

SEQ ID NO: 3760 - protein, 581 aa, Zea mays
TDDSTDKAPTRHPPATMPSRSDSDSLLVRAEGMRDAALDYHGRPADRGATGGWRSALFIIAVEIAERFTFYGVSANLINYLTGPLGQGTAAAAAAINAWNGVAQLLPLLGGALADKWLGRYRTIVIASLLYILGLGMLAFSTFLSSGSGHQCTAAGGQICAPSGLKVTFFYVSLYIVAVAQGGHKPCVQAFGADQFDQTDPKETVSRSSFFNWWYFGMCAGTAVTLVLLSYVQDNIGWGLGFGIPCAVMAAALAVFLLGTRTYRYYVTAGQGLFARAGEAFAEWRSRRKAGQLVQDSQELDPPAADAPRFSAGVDVEEQAAVRNNGGLVKEAKAIIRLFPIWAACLLYAVAYSQSSTFFTKQAATLDRRIGRHVQVPPAALQSFISVTIVVIIPIYDRVLVPVSRRYSGKPSGITMLQRIGTGMFLSLLSMVIAALVEKHRLRVAGDAGLVDKPKVPVPMSLWWMVPQYVLFGAADVFTMVGLQEFFYDQVPDKLRSLGLALYLSIFGVGSFISSALVSVIDRVTTDRGGSWFSNNLNRGHVDYFYWLLAALSAVELLAYVFFAVTYKYKNRGAVHATVDG

SEQ ID NO: 3761 - protein, 121 aa, Zea mays
MSGENDNGGAKRRGSVKWFAAEKGFGFITPEDGGEDLFVHQSSIRSEGYRSLAEGESVEFLVEVDNSSGRTKAIEVTGPDGAPVQGTSRGSAGGRGGFGGDGYGGRGGGRGSYGGRGGGGG

SEQ ID NO: 3762 - protein, 161 aa, Zea mays
MDGRMFGLETPLMVALQHLLDVPDGDAGAGGDKAGGGGPTRTYVRDARAMAVTPADVKELPGAYAFVVDMPGLGTGDIKVQVEDERVLVISGERRREEREDAKYLRMERRMGKFMRKFVLPDNADMDKISAVCRDGVLTVTVEKLPPPEPKKPKTIEVKVA

SEQ ID NO: 3763 - protein, 625 aa, Zea mays
MGQCYGKARGASSRADHDADPSGAGSVAPPSPLPANGAPLPATPRRHKSGSTTPVHHHQAATPGAAAWPSPYPAGGASPLPAGVSPSPARSTPRRFFKRPFPPPSPAKHIKATLAKRLGGGKPKEGTIPEEGGAGAGAGAGAGAGAAVGAADSAEADRPLDKTFGFAKNFGAKYDLGKEVGRGHFGHTCSAVVKKGEHKGHTVAVKIISKAKMTTAISIEDVRREVKILKALSGHDNLVRFYDACEDALNVYIVMELCEGGELLDRILARGGRYTEEDAKAIIVQILSVVAFCHLQGVVHRDLKPENFLFTTRDESAPMKLIDFGLSDFIRPDERLNDIVGSAYYVAPEVLHRSYSMEADIWSIGVITYILLCGSRPFWARTESGIFRSVLRADPNFDDSPWPSVSAEAKDFVKRFLNKDYRKRMTAVQALTHPWLRDEQRQIPLDILIFRLVKQYLRATPLKRLALKALSKALSEDELLYLRLQFKLLEPRDGFVSLDNFRTALTRYSTDAMRESRVLEFQHALEPLAYRKMDFEEFCAAAISPYQLEALERWEEIAGTAFQHFEQEGNRVISVEELAQELNLAPTHYSIVQDWIRKSDGKLNFLGFTKFLHGVTIRGSNTRRH

SEQ ID NO: 3764 - protein, 648 aa, Zea mays
MGKNMRIKTAPKANRVPLLGDGETSRALSDLEEGSDVQPANVGFCRVIKLAKHDAGKLVLATAALLVASLSNLLVPKYGGKIIDIVSRDVRRPEDKAQALEDVKGTILYIVTIVLVGSVCTALRAWLFNSASERVVARLRKDLFSHLINQEIAFFDVTRTGELLSRLSEDTQIIKNAATTNLSEALRNVTTTAIGLGFMFSTSWKLTLLALVIVPVISVAVRRFGRFLRELSHQTQAAAAVASSIAEESFGAIRTVRSFAQEYHEISRYGEKVEETLKLGLKQAKVVGLFSGGLNAASTMSVVIVVIYGANLTINGYMTTGSLTSFILYSLTVGSSVSALSGLYTTVMKASGASRRVFQLLDRVSSMTNSGDKCPINEKDGEVELDDVWFAYPSRPSHMILKGITLKLAPGSKVALVGPSGGGKTTIANLIERFYDPLKGRILLNGVPLAEISHQYLHSKVSIVSQEPTLFNCTIEENIAYGLEGTTNFADVESAAKMANAHNFICGFPDQYKTVVGERGIRLSGGQKQRIAIARALLMNPRVLLLDEATSALDAESEYLVQDAMDSLMKGRTVLVIAHRLSTVKSADTVAVISDGLIVESGTHDELLDRDGIYTALVKRQLQGPKFEATSSISEASEIEAEPSSNGQ

SEQ ID NO: 3765 - protein, 155 aa, Zea mays
  misc_feature (32)..(32): Xaa can be any naturally occurring amino acid
  unsure (1)..(155): unsure at all Xaa locations
APGRHGRGISSGRPGRRAYYIRCHILIAFLIXGAFTSCSFMKSSVSAARPAAGDTNTEFIRTSCKSTTYPNLCFSSLTSRSAAIGVSPQLLAHESLTVSLETAQSTSAMMLKLAHVQGLTPREVGAMHDCVEELSDTVDELRKSLGEMKQLMRKD

SEQ ID NO: 3766 - protein, 254 aa, Zea mays
  misc_feature (228)..(228): Xaa can be any naturally occurring amino acid
  unsure (1)..(254): unsure at all Xaa locations
MASLADLVNLDLSDCTDKIIVEYLWIGGSGIDIRSKARTVNGPITDASQLPKWNYDGSSTGQAPGEDSEVILYPQAIFKDPFRRGDNLLVMCDCYTPQGVPIPTNKRHNAAKIFNTPKVAAEETWYGIEQEYTLLQKDVNWPLGWPIGGYPGPQGPYYCAAGADKAFGRDIVDAHYKACLYAGINISGINGEVMPGQWEFQVGPSVGIAASDQLWVARYILERITEVXPGVVLSLDPKPIPGDWDGAGAHTTTA

SEQ ID NO: 3767 - protein, 205 aa, Zea mays
IRLEEDGAATRKKLRLKRERDLSCEEVVDAKEIDQRDLSCEGIIRATEEEEDGAATRKKLRLTKEQSALLEESFKQHSTLNPKQKQALSKQLNLRPRQVEVWFQNRRARTKLKQTEVDCEFLKKCCETLTDENRRLQKELQELKALKLAQPLYMPMPAATLAMCPSCERLGGSAVNGAGGSPKTSFSMAPKPHFFNPFANPSAAC

SEQ ID NO: 3768 - protein, 102 aa, Zea mays
MSATKTKVQSIIDENPVAVFSKSYCPYCRQAKQLLSDSGAKFYAIELDQVDDGSAIQSTLGEMTGQTTVPNIFIAQKHIGGNSDLQSKKGQLNNLLKEAGAV

SEQ ID NO: 3769 - protein, 111 aa, Zea mays
MAMQKAKEIVSGNAVVVFSKSFCPYCVRVKELLQQLGAKFIAVELDKESDGSQVQSALAEWTGQRTVPNVFIGEKHIGGCDSVTNLHRDGKLVPMLTEAGAIAATAGTTSA

SEQ ID NO: 3770 - protein, 356 aa, Zea mays
MACLTDLVNLNLSDNTEKIIAEYIWIGGSGMDLRSKARTLSGPVTDPSKLPKWNYDGSSTGQAPGEDSEVILYPQAIFKDPFRRGNNILVMCDCYTPAGEPIPTNKRYNAAKIFSSPEVAAEEPWYGIEQEYTLLQKDTNWPLGWPIGGFPGPQGPYYCGIGAEKSFGRDIVDAHYKACLYAGINISGINGEVMPGQWEFQVGPSVGISSGDQVWVARYILERITEIAGVVVTFDPKPIPGDWNGAGAHTNYSTESMRKEGGYEVIKAAIEKLKLRHREHIAAYGEGNERRLTGRHETADINTFSWGVANRGASVRVGRETEQNGKGYFEDRRPASNMDPYVVTSMIAETTIIWKP

SEQ ID NO: 3771 - protein, 301 aa, Zea mays
  misc_feature (255)..(255): Xaa can be any naturally occurring amino acid
  unsure (1)..(301): unsure at all Xaa locations
MMLRPPALACCKLYISEARNSGALRAIEHAAAALRPLAVLVNTFADDAYNRVGYTLVSPLAGGAASPPLRCAAFRVVAAAIEAVDLDAHAGAHPRLGVVDHIAFHPLASARLEDVTALARAVAADIGDRLQVPTYLYGAAHRDGRTLASIRRQLGYFTPTSPGGEQWHGAPDSLLPVAPDAGPRTSSASNGVVVVGATPWVDNYNVPLATTDVSVARRIARAVSERGGGLACVQAMGLAHGDGATEVACNLLHPXRWGADQVQERVSRLAAGLGVGVGQGYFTDFSREKVVELYLQAAQAA

SEQ ID NO: 3772 - protein, 150 aa, Zea mays
  misc_feature (50)..(50): Xaa can be any naturally occurring amino acid
  misc_feature (130)..(130): Xaa can be any naturally occurring amino acid
  unsure (1)..(150): unsure at all Xaa locations
MADSEEHQFLWKGDVEKYRIYPHEGVTDRNNGFLVIQKRACKRCGRLTTXKNGKRGLAKCQFVAVCIFPGKKLVNIVASSHHCDISHENRNDHHLIAISEDGILNRLSSYGNTKDGLKLPTDDTLCGPYXNRFARSKDILVNVQNAMGEG

SEQ ID NO: 3773 - protein, 135 aa, Zea mays
LIRFKNRPCKVEEVSTSQTGNHEHALWHFVDIYIFHVKKIGHIAPSSNYCDIPHANRIEHQVIDISEDGFVSLLTSDGNTRDDLRLPTDETLVAHIKEGFESGKDLVVTVQSAMGDEQICPLKDGAPSHLPAVEY

SEQ ID NO: 3774 - protein, 242 aa, Zea mays
KNGFVQDLDDESGGMRGSGGRGTKRSRTAEVHNLSERRRRDRINEKMRALQELIPNCNKIDKASMLDEAIEYLKTLQLQVQMMAMGSGLCIPPMLLPRAMQLQIPSIAHFHHLGMGLGYGMGVLDMNSTAAVPFQPIPGAHYTCPMIPGTPPQGLGIGMPGTNTMPVFGVPGQAIHPSASSVQPFPSLAGLPVRPNLAPQVPAVMANMVQEQQQGVATQQQQSLNNEAQQKANTGDPQILQK

SEQ ID NO: 3775 - protein, 165 aa, Zea mays
  misc_feature (21)..(21): Xaa can be any naturally occurring amino acid
  misc_feature (76)..(76): Xaa can be any naturally occurring amino acid
  misc_feature (81)..(81): Xaa can be any naturally occurring amino acid
  misc_feature (95)..(95): Xaa can be any naturally occurring amino acid
  misc_feature (111)..(111): Xaa can be any naturally occurring amino acid
  unsure (1)..(165): unsure at all Xaa locations
RTTKEHHFESNAYAVASKNYXANRLATCPIRTVSPRHQKLDPCILRHGTTSTSVTFDHCIRHFGFIDILPVKKLEXLTPSXINCEIPHSNRTDLXLIDISEYGFSILSTSXWNTNDDLRLPTDDTLVCLIKELLKNINNLDVTVQSAMLDEHICAIDDDDPQQLP

SEQ ID NO: 3776 - protein, 269 aa, Zea mays
MAPQSLDLGLSLGLGVAAFQPSFCHPAGNDAAEREASPTADERERRCSPAGSPTSSGSGKRVAAERSAGSGSGDEDDDGGARKKLRLSKDQAAVLEECFKTHHTLTPVLSVSALQKQKAALASRLGLRARQVEVWFQNRRARTKLKQTEVDCEYLRRWCEQLAEENRRLGKEVAELRALSAAPAPAAPLTALTMCLSCRRVSSSSCSSSPPNTHAHAAAAGTGRSVAAAAATTLPAHRQFLCGFRDGGAAAAAVYGTSSALAKALRAAR

SEQ ID NO: 3777 - protein, 166 aa, Zea mays
  misc_feature (18)..(18): Xaa can be any naturally occurring amino acid
  misc_feature (29)..(29): Xaa can be any naturally occurring amino acid
  misc_feature (88)..(88): Xaa can be any naturally occurring amino acid
  misc_feature (145)..(145): Xaa can be any naturally occurring amino acid
  unsure (1)..(166): unsure at all Xaa locations
DEDHFESTADLQETSSSXQRAGTASKNGXICVNNRHVQVTRVSTSKTGTNAKGTCHFDAIDVFTGRQIVDIATSPCNCAMPHVNRTEXPLIDISEDGFVRLLTSQGNTKDAVRLPTDETLVCQNDGGAESGKDLAVTDQPAMGDXQICAVNDGGPKELPWLGIMDL

SEQ ID NO: 3778 - protein, 355 aa, Zea mays
MDFPGPAGSGRRPQQQEPEHLPPMTPLPLARQGSVYSLTFDEFQSSLGGAAKDFGSMNMDELLRSIWSAEEVHSVAAASASAADHAHAHAAARGPVSIQHQGSLTLPRTLSQKTVDEVWRDLTCVGGGPSSGSAAPAAPPPPAQRHPTLGEITLEEFLVRAGVVREDMTAPPPVPPAPVCPAPAPRPPVLFPHGNVLAPLVPPLQFGNGFVSGAVGQQRGGPVPPAVSPRPVTASAFGKMEGDDLSSLSPSPVPYIFGGGLRGRKPPAMEKVVERRQRRMIKNRESAARSRQRKQAYMMELEAEVAKLKELNDELQKKQVEMLEKQKNEVLERMRRQVGPTAKRICLRRTLTGPW

SEQ ID NO: 3779 - protein, 160 aa, Zea mays
  misc_feature (55)..(55): Xaa can be any naturally occurring amino acid
  misc_feature (80)..(80): Xaa can be any naturally occurring amino acid
  misc_feature (133)..(133): Xaa can be any naturally occurring amino acid
  unsure (1)..(160): unsure at all Xaa locations
MSDSEEHHFESKAEAAASITYPQNAGTVRNNDFIYIYNRPCKGVQVSTSPTGKHXHAKYLFVAIHIFDGKKLEDIVPSSXDCDIPYVNRTDYQLIDISEDAFVSLLTSDDSTKDDLILPTDETLVVHIKDRFXSDKDLAVTVLSAMKNEQICALKDVHPE

SEQ ID NO: 3780 - protein, 161 aa, Zea mays
  misc_feature (24)..(24): Xaa can be any naturally occurring amino acid
  misc_feature (47)..(47): Xaa can be any naturally occurring amino acid
  misc_feature (59)..(59): Xaa can be any naturally occurring amino acid
  misc_feature (114)..(114): Xaa can be any naturally occurring amino acid
  misc_feature (134)..(134): Xaa can be any naturally occurring amino acid
  unsure (1)..(161): unsure at all Xaa locations
MTDSGDDHFESKADAVASKTYPKXGGTGRKNGFFVINNRPCKVVEVXSTSKTANNEHDXCHFVAIDIFNGKWLEHIVPSSHNCDIPHANRTEYHMIDISDDGSVRLLTSHGDTXDDLRLPTDETLVAHIREGIXSVKDLVETVQTAMWEEQICAMKDGGPQ

SEQ ID NO: 3781 - protein, 157 aa, Zea mays
  misc_feature (88)..(88): Xaa can be any naturally occurring amino acid
  misc_feature (125)..(125): Xaa can be any naturally occurring amino acid
  misc_feature (127)..(127): Xaa can be any naturally occurring amino acid
  misc_feature (145)..(145): Xaa can be any naturally occurring amino acid
  unsure (1)..(157): unsure at all Xaa locations
MSNLIATKRVDLLAPYLALDQGSRVQAEYIWIDGDGGLRSKTMTLDKAPAAVSELKEWNFDGSSTNQAPGDNSDVFLRPVAIFKDPFXRGGANILVLCECYDNDGSPNVSNYRAHANKVMKAAEXRXPWFGLEQEYTLFDADGQXVFGWPKNGFPGP

SEQ ID NO: 3782 - protein, 132 aa, Zea mays
  misc_feature (40)..(40): Xaa can be any naturally occurring amino acid
  misc_feature (48)..(48): Xaa can be any naturally occurring amino acid
  misc_feature (57)..(57): Xaa can be any naturally occurring amino acid
  misc_feature (108)..(108): Xaa can be any naturally occurring amino acid
  misc_feature (119)..(119): Xaa can be any naturally occurring amino acid
  unsure (1)..(132): unsure at all Xaa locations
SKGDVGANNTYPKHDGTVRKKGFFAIRKRPCTAAEASSAXTAKYGHAXWHFVVVDVXNGKKLENIVASTHNCDVSLLTSDGNSKDDLRLPTDETLVRQIKEGVESGKXILVVTVQSAMXEEQICALKDDDLK

SEQ ID NO: 3783 - protein, 295 aa, Zea mays
  misc_feature (220)..(220): Xaa can be any naturally occurring amino acid
  unsure (1)..(295): unsure at all Xaa locations
MVRGKTQMKRIENPASRQVTFSKRRNGLLKKAFELSVLCDAEVALVVFSPRGKLYEFASGSAQKTIERYRTYTKDNVSNKTAHQDIEQVKADAEGLAKKLEALEAYKRKLLGERLEECSFDVLLCLEVKLEKSLHCIRGRKTQLLEEQLHKLKEKVSQLRPCVQCKKQPPPPPPMLMAPPPPPAPAAIDHTGPKDVGMDVETELYIGLPGRDYRSNNKDXCTVAVRSGQVRLASSAENNLRSVVRRTGDASQAQANQHDKDHECRVVFYKPVHRPSKAHAPERPSENTYPLISLY

SEQ ID NO: 3784 - protein, 432 aa, Zea mays
MGFGMGNNNNGASSSSSRLDPAAPLLPRHGSSGGREGGGLSSQPKTFANVFIAVVGAGVLGLPYTFSRTGWAAGSLLLFSVAALTFYCMMLLVACRRRLADEHPKIASFGDLGDAVFGAHGRFAVDVMLVLSQFSFCVGYLIFISNTMAHLYPITAAASSSSALLSPKALVIWAMLPFQLGLNSIKTLTLLAPLSIFADVVDLGAMGVVLGQDVAAWLAKPVPVVAFGGAGALLYGLGVSVYAFEGIGMVLPLEAEAANKSKFGVTLGLSMAFIAVMYGLFGVMGYVAFGDATRDIITTNLGAGWLSAAVQLGLCINLFFTMPVMMNPVYEVAERLLHGKRYCWWLRWLLVVVVGLAAMYVPNFTDFLALVGSSVCVLLGFVLPASFHLKVFGAEMEWPGVLSDVLLVVIGLALAVFGTYTSLLQIFQSSSA

SEQ ID NO: 3785 - protein, 221 aa, Zea mays
  misc_feature (178)..(178): Xaa can be any naturally occurring amino acid
  misc_feature (190)..(190): Xaa can be any naturally occurring amino acid
  misc_feature (203)..(203): Xaa can be any naturally occurring amino acid
  misc_feature (211)..(211): Xaa can be any naturally occurring amino acid
  unsure (1)..(221): unsure at all Xaa locations
MAAPITSRTETLQKYLKLDQKGMIMAEYVWVDAEGGTRSKSRTLPEKDYKPEDLPVWNFDGSSTKQAPGENSDVYLRPCAVYPDPFRGSPNIIVLAECYDSDGTPNKYNFRHDCVKVMKTYADEEPWFGLEQEYTLLGSDDRPYGWPAGGFPAPQGEYYCGVGTGKVVQRDIVEAHYXACLYAGIQISGXQCRGLPAQWKYQXGPALASRXGDQLWVLASS

SEQ ID NO: 3786 - protein, 202 aa, Zea mays
MARPCRSSSAAARLLLLLAAVAAALQAAAAAPPVASGFIRKSCRATQYPSVCEQSLAAYGGSPPPRSPRELARAALAVSADRARAASAYVGRLCGSRGRRPRGPVRDCLENLADSVGHLRDAAQEIGGAGMARAGTRAFRWHLSNVQTWCSAALTDENTCLDGLSSRAVDAATRAAVRGRVVEVAQVTSNALALVNKVGPGY

SEQ ID NO: 3787 - protein, 204 aa, Zea mays
MAKIGLKPDPVNNNAKEIRYRGVRKRPWGRYAAEIRDPGKKTRVWLGTFDTAEEAARAYDAAARDFRGAKAKTNFPNFLELSEKMPAAGGGFERSPSQSSTLDCDSPPAAVTPASAGIVPPQLELRLGGYQIPMARPIYFLDVMGVGNGGRAQPPVASAFRSPVACVAQSDSDSSSVVDFEGVMEKRSQLFDLDLNLSPPSEQA

SEQ ID NO: 3788 - protein, 302 aa, Zea mays
KGIGTARALAQTEHGIAGASHGAPSFLFCNGAGAATADSASLETSSGVLDTSPRGGGADSGGRKARTKPREDSASASASFSSAHSKDSSSKGSTKNRGGKRGRSSKEVDDDEEPKGYIHVRARRGQATDSHSLAERVRRERISERMRVLQALVPGCDKVTGKALVLDEIINYVQSLQNQVEFLSMKIASLSPVLLYGFGMDTTDAFSTDDHTTQKIEGMLQLHHEALGMPPSSALSRPPFEAIADSTHATASSPRSYELHGGGASISFPQEDGGGYMAQTVGGPRPELLNQVVFSNHMCSFQ

SEQ ID NO: 3789 - protein, 590 aa, Zea mays
ASRHLSTDGRHGEVEDMYTQDGTVDMKGNPAVKKGTGNWRACPYILANECCERLAYYGMSTNLVNYMKTRLGQVNSVASNNVTNWQGTCYITPLIGAFFADAYMGRFWTIAIFMIIYIFGLALLTMASSVKGLVPTSCGDKDVCHPTDAQAAVVFVALYLIALGTGGIKPCVSSFGADQFDENDEREKKSKSSFFNWFYFSINIGALVASTVLVYVQTHVGWGWGFGIPAVVMAIAVGSFFVGTPLYRHQKPGGSPLTRIAQVLVACARKWNVAVPADKSRLHETVDGESVIEGSRKLEHSEQLACLDRAAVVTAEDGAEASPWRLCSVTQVEELKSVIRLLPIWASGIVFAAVYSQMSTMFVLQGNTLDQSMGPRFKIPSATLSMVDTISVIVWVPVYDRAIVPLVRSYTGRPRGFTQLQRMGIGLVVSIFSMVAAGVLDIVRLRAIARHGLYGEDDIVPISIFWQIPQYFIIGCAEVFTFVGQLEFFYDQAPDAMRSMCSALSLTTVALGNYLSTVLVTIVTHITTRHGRIGWIPENLNRGHLDYFFWLLAVLSLLNFLAYLVIASWYKYKKTADDYPGAKGEHGTEH

SEQ ID NO: 3790 - protein, 658 aa, Zea mays
MRLLLRRRRRFPASETAAATMATAAAASTALTGATTAAPKARRRAHLLATRRALAAPIRCSAASPAMPMAPPATPLRPWGPTEPRKGADILVESLERCGVRDVFAYPGGASMEIHQALTRSPVIANHLFRHEQGEAFAASGYARSSGRVGVCIATSGPGATNLVSALADALLDSVPMVAITGQVPRRMIGTDAFQETPIVEVTRSITKHNYLVLDVDDIPRVVQEAFFLASSGRPGPVLVDIPKDIQQQMAVPVWDKPMSLPGYIARLPKPPATELLEQVLRLVGESRRPVLYVGGGCAASGEELRRFVELTGIPVTTTLMGLGNFPSDDPLSLRMLGMHGTVYANYAVDKADLLLALGVRFDDRVTGKIEAFASRAKIVHVDIDPAEIGKNKQPHVSICADVKLALQGMNALLEGSTSKKSFDFGSWNDELDQQKREFPLGYKTSNEEIQPQYAIQVLDELTKGEAIIGTGVGQHQMWAAQYYTYKRPRQWLSSAGLGAMGFGLPAAAGASVANPGVTVVDIDGDGSFLMNVQELAMIRIENLPVKVFVLNNQHLGMVVQWEDRFYKANRAHTYLGNPENESEIYPDFVTIAKGFNIPAVRVTKKNEVRAAIKKMLETPGPYLLDIIVPHQEHVLPMIPSGGAFKDMILDGDGRTVY

SEQ ID NO: 3791 - protein, 177 aa, Zea mays
MFNMSRDPLVVGNVVGDIVDPFITTASLRVFYNNKEMTNGSELKPSQVMNEPRVHVGGRDMRTLYTLVMVDPDAPSPSNPTKRENLHWLVTDIPETTDASFGNEIVPYESPRPIAGIHRFAFVLFRQSVRQTTYAPGWRSNFNTRDFAAIYGLGSPVAAVYFNCQRENGCGGRRYIR

SEQ ID NO: 3792 - protein, 172 aa, Zea mays
  misc_feature (37)..(37): Xaa can be any naturally occurring amino acid
  misc_feature (70)..(70): Xaa can be any naturally occurring amino acid
  misc_feature (79)..(79): Xaa can be any naturally occurring amino acid
  misc_feature (83)..(83): Xaa can be any naturally occurring amino acid
  misc_feature (150)..(150): Xaa can be any naturally occurring amino acid
  unsure (1)..(172): unsure at all Xaa locations
MSDSKEHHFQSKVDAGASKIYPQQAGTVRKNGFIDIXTAPARLPQVSTSKTGMYDHAKCHFVAIDIFNEXKLEDIVPSXHNCXIPHVNRTEYHLIDISEDGFVSLLTSDGNTKDDLTLPNDDTREAQIKESFESDKDLAVTVQSAMSNEXICTLKDGVPKQLPCLGILHLTI

SEQ ID NO: 3793 - protein, 484 aa, Zea mays
  misc_feature (377)..(377): Xaa can be any naturally occurring amino acid
  misc_feature (439)..(439): Xaa can be any naturally occurring amino acid
  misc_feature (460)..(460): Xaa can be any naturally occurring amino acid
  misc_feature (463)..(463): Xaa can be any naturally occurring amino acid
  misc_feature (470)..(470): Xaa can be any naturally occurring amino acid
  unsure (1)..(484): unsure at all Xaa locations
MAATVAVDNLNPKVLKCEYAVRGEIVIHAQRLQQQLQTQPGSLPFDEILYCNIGNPQSLGQQPVTFFREVLALCDHPDLLKKEEIKTLFSADSISRAKQILALIPGRATGAYSHSQGIKGLRDAIASGIASRDGFPANADDIFLTDGASPGVHLMMQLLIRNEKDGILVPIPQYPLYSASIALHGGSLVPYYLNESTGWGLEISDVKKQLEDARSRGIDVRALVVINPGNPTGQVLAEENQYDIVKFCKNEGLVLLADEVYQENIYVDNKKFHSFKKIVRSLGYGEEDLPLVSYQSVSKGYYGECGKRGGYMEITGFSAPVREQIYKIASVNLCSNITGQILASLVMNPPKASDESYASYKAEKDGILASLARRAKXALEAAFSKLEGITCNKAEGAMYLFPQICLPQKAIEAAKAANKAPDAFYALRLLESTGIVVVXPGSGFGQVPGTWHFRCTILPXEEXIPAIISXFTVFHEAFMAEYRD

SEQ ID NO: 3794 - protein, 155 aa, Zea mays
  misc_feature (9)..(9): Xaa can be any naturally occurring amino acid
  misc_feature (56)..(56): Xaa can be any naturally occurring amino acid
  misc_feature (83)..(83): Xaa can be any naturally occurring amino acid
  misc_feature (101)..(101): Xaa can be any naturally occurring amino acid
  misc_feature (139)..(139): Xaa can be any naturally occurring amino acid
  unsure (1)..(155): unsure at all Xaa locations
RTLEEHHFXESKADAARGTTYPQNDGTARNNGFLDINNRPCQAVEGSTSPTATHGXHAKCHFALIDIFHGKERENIVPSSHQXCTVPHANSVTEYQMIDIXSDDGFATLLTSNVNAKGDLKLPTDETLAGQINERSDQXYDLVATAQTALIDEQI

SEQ ID NO: 3795 - protein, 163 aa, Zea mays
MDAVMFGLETPLMAALQHLLDVPDGDAGAGGDNKTGGGGATRTYVRDARAMAATPADVKELPGAYAFVVDMPGLGTGDIRVQVEDERVLVVSGERRREEREDDAKYLRMERRMGKFMRKFVLPDNADVDKVAAVCRDGVLTVTVEKLPPPEPKKPKTIEVKVA

SEQ ID NO: 3796 - protein, 1616 aa, Zea mays
MATLPRAAPPTPAALLPLPRAAPPLLLAGRAAAARRSRLRARGPSAAARRSWVVASAASSSSRAVVGGVARREAPPAPQKPTQQAADLNHILSERGACGVGFVANLKNMSSFDIVRDALMALGCMEHRGGCGADSDSGDGAGLMSAVPWDLFDDWASKQGLALFDRRNTGVGMVFLPQDEKSMEEAKAATEKVFVDEGLEVLGWRPVPFNVSVVGRNAKETMPNIQQIFVKVAKEDNADDIERELYISRKLIERAAKSFSWADELYFCSLSSRTIVYKGMLRSEVLGQFYLDLQNELYKSPFAIYHRRFSTNTSPRWPLAQPMRLLGHNGEINTIQGNLNWMRSRETTLKSPVWRGREHEICPFGDPKASDSANLDSTAELLLRSGRSPAEALMILVPEAYKNHPTLSIKYPEVTDFYDYYKGQMEAWDGPALLLFSDGRTVGATLDRNGLRPARYWRTSDDFVYVASEVGVIPMDESKVVMKGRLGPGMMITVDLQTGQVLENTEVKKTVASASPYGTWLQECTRLIKPVNFLSSTIMDNETVLRHQQAFGYSSEDVQMVIESMASQGKEPTFCMGDDIPLAVLSQRPHLLYDYFKQRFAQVTNPAIDPLREGLVMSLEVNIGKRGNILEVGPENADQVALSSPVLNEGELETLLNDSKLKPKVLSTYFDIRKGLDGSLDKTIQALCEEADAAVRSGSQLLVLSDRSEAPEPTRPAIPILLAVGAIHQHLIQNGLRMSASIVADTAQCFSTHHFACLIGYGASAVCPYLALETCRQWRLSNKTLNLMRNGKMPTVTIEQAQRNFIKAVKSGLLKILSKMGISLLSSYCGAQIFEIYGLGQEVVDLAFCGSVSKIGGLTLDELGRETLSFWVKAFSEDTAKRLENFGFIQSRPGGEYHANNPEMSKLLHKAIREKRDNAYTVYQQHLASRPVNVLRDLLELKSDRAPIPIGKVESATSIVERFCTGGMSLGAISRETHEAIAIAMNRIGGKSNSGEGGEDPIRWNPLTDVVDGYSPTLPHLKGLQNGDTATSAIKQVASGRFGVTPTFLVNADQIEIKIAQGAKPGEGGQLPGKKVSAYIARLRNSKPGVPLISPPPHHDIYSIEDLAQLIYDLHQINPKAKVSVKLVSEAGIGTVASGVSKANADIIQISGHDGGTGASPISSIKHAGGPWELGLTETNQTLIQNGLRERVVLRVDGGFRSGQDVLIAAAMGADEYGFGSVAMIATGCVMARICHTNNCPVGVASQREELRARFPGVPGDLVNYFLFVAEEVRAALAQLGYEKLDDIIGRTDLLKPKHISLVKTQHIDLGYLLSNAGLPEWSSSQIRSQDVHTNGPVLDETILADPEIADAIENEKEVSKAFQIYNVDRAVCGRVAGVIAKKYGDTGFAGQLNITFNGSAGQSFGCFLTPGMNIRLVGEANDYVGKGMAGGELVVVPVDKTGFVPEDATIVGNTCLYGATGGQVFVRGKAGERFAVRNSLCQAVVEGTGDHCCEYMTGGCVVVLGKAGRNVAAGMTGGLAYILDEDDTLVPKVNKEIVKMQRVNAPAGQMQLKGLIEAYVEKTGSEKGIAILREWEAYLPLFWQLVPPSEEDSPEACAEFERVLAKQATTQLSAK

SEQ ID NO: 3797 - protein, 171 aa, Zea mays
  misc_feature (33)..(33): Xaa can be any naturally occurring amino acid
  misc_feature (72)..(72): Xaa can be any naturally occurring amino acid
  misc_feature (110)..(110): Xaa can be any naturally occurring amino acid
  misc_feature (116)..(116): Xaa can be any naturally occurring amino acid
  misc_feature (133)..(133): Xaa can be any naturally occurring amino acid
  misc_feature (137)..(137): Xaa can be any naturally occurring amino acid
  unsure (1)..(171): unsure at all Xaa locations
MSDDEHHFESSDAGASKTYPQQAGNIRKGGHIXIKGRPCKVVEVSTSKTGKHGHAKCHFVAIDIFTSKKLEXIRPSSHNCDVPHVNRVDYQLIDISEDGFGSLLTDNGSXTKDDLXLPTDELLLTQLKNGFEXGKDXVVSVMLHGKEQMCALKEVGPSNNPSLCFSSLTEQ

SEQ ID NO: 3798 - protein, 160 aa, Zea mays
  misc_feature (17)..(17): Xaa can be any naturally occurring amino acid
  misc_feature (49)..(49): Xaa can be any naturally occurring amino acid
  unsure (1)..(160): unsure at all Xaa locations
MSDSEENHFKSKADAGXCKTYPEHDGTVRNNGFISIENRPCKDGEVSTXKTGKHGHAECHFVAIDILHGKKLEDIGPSAHNCDIPHVNRTEHQLIDISEDGFVSLLTSDGNTNDDLTLPTDETLVVQIKEGFESGKDLVVTVQSAMGEEHICALKDVGPK

SEQ ID NO: 3799 - protein, 189 aa, Zea mays
  misc_feature (35)..(35): Xaa can be any naturally occurring amino acid
  misc_feature (142)..(142): Xaa can be any naturally occurring amino acid
  unsure (1)..(189): unsure at all Xaa locations
MAGSEEHELESEGDAGGANSDPQEGGTVRKNGFIXIDNRPCKGGEVSTSETGSGGHGRCHFVGIDIFKRRKLGHIVPSAHNWDIPHGDRTGDQVSGRSGDGFVERLTSDGNTKDELALPSERRLGGHIEEGVERGKDRAVSXRGVVWGEEQICALKDVGAQVTSLPWNSVSAKRWVRKKKGIKDCYGDV

SEQ ID NO: 3800 - protein, 101 aa, Zea mays
GLSVATSKTGEHGHAKCQGVAIDIYNGKKLEDIGPSSHNWDIPHVNRTEYQLIDISEDGFASLLTSDGNTKDDLRLPTDETLGAQIKGGYESGKDLCVTVQ

SEQ ID NO: 3801 - protein, 191 aa, Zea mays
  misc_feature (84)..(84): Xaa can be any naturally occurring amino acid
  misc_feature (129)..(129): Xaa can be any naturally occurring amino acid
  unsure (1)..(191): unsure at all Xaa locations
MSDSEEHDCESKDDAGPTNTYPQQVGTARKSGFIVFKNRPCKAAEGSTSNTVNHGHAKCHFVAVHIFTAKKLEDIGPSSHNCDXPHANRTEYQLIDISEDGFAILLTSHADSKEDLRLPTDETLVAQIXRRSKAVKDLDVTVQTAPYEEQICALKDVGPKQLPCLWTLYPTVSSTCIGKEVHLLKDWYRYI

SEQ ID NO: 3802 - protein, 147 aa, Zea mays
  misc_feature (98)..(98): Xaa can be any naturally occurring amino acid
  misc_feature (136)..(136): Xaa can be any naturally occurring amino acid
  unsure (1)..(147): unsure at all Xaa locations
MSCSEEDDFQCEADAGAMNTYPEEDGTARNNGFLAIQNRPCKAVEGATSKTAKCGRATCRFADLDIFDGKKLEDIVPSSHNCDIPHVNRTEYQLIDIXEDGFVSLLTSHGNTKDDLRLPTDETLVCQIKEGIESGXYLAVTVHPAMA

SEQ ID NO: 3803 - protein, 318 aa, Zea mays
NKFVQKSRLVPVRNSRDHTPVSAHSLLLQFRQLIIIINRTQSSRFHSRMLLNPASEASVLDTIRQHLLEEPADESFGSLVADQWSGSLPFRTDDADDMVVFGALQDAFAYGWLPDGSFVHVKPEPVRSPDSSSYPCSYDGSPCFGLLDPEPPLTPGTTTPSSRGQEEAAAAMARGKHYRGVRQRPWGKFAAEIRDPARNGARVWLGTYDTAEDAALAYDRAAYRMRGSRALLNFPLRIGSGDKRPSPAPPEPATSSDSSSSSASGSHKRRKRGEAAAANMAMALVPPPSQLNRPAQPWFPAAPVEQAAMAPRVEQIVV

SEQ ID NO: 3804 - protein, 429 aa, Zea mays
MARTRRGDGSRTNQLSSSPACINYTSYLDEAVVEEEAEDGGPHALLPGDGGLHHRLDGAVHAGARVGVEARGQLRRRGAGEREEQIKDALHVLLFIFHCCFALLCLPATMASTRAAATLLLLLALAGTSSAQLSTGFYSYSCPGVYGAVKSVMQSAIAREKRMGASILRLFFHDCFVQGCDASLLLDDTPSFQGEKMANPNNGSVRGFEVIDAVKSAVEKLCPGVVSCADILAIAARDSVVILGGPTWDVKVGRRDSTTASFSGANNNIPPPTSGLANLTSLFAAQGLSQKDMVALSGAHTIGQARCTNFRAHIYNDTDIDAAFARTRQSGCPSTSGAGGDNNLAPLDLQTPTVFENNYYRNLLAKKGLLHSDQELFNGGATDALVQSYVGSQSAFFADFVAGMIKMGDITPLTGSNNGQIRKNCRRVN

SEQ ID NO: 3805 - protein, 344 aa, Zea mays
MATSSTGCLVLLCLASPLLLLLPSAVVLGHPWGVGGGGGGLSPQFYDHSCPMAEKIVQSVVAQAVAKETRMAASLVRLHFHDCFVKGCDASVLLDNSSSIVSEKGSNPNRNSIRGFEVVDQIKAALEAACPGTVSCADILALAARDSTALVGGPYWDVALGRRDSLGASIQGSNNDIPAPNNTLPTIITKFKRQGLNVADVVALSGGHTIGMSRCTSFRQRLYNQTGNGMADSTLDVSYAARLRQSCPRSGADSTLFPLDVVAPAKFDNFYYKNLLAGRGLLSSDEVLLTKSAETASLVKAYAADAGLFFRHFAQSMVSMGNISPLTGSQGEIRKNCRRLNSGH

SEQ ID NO: 3806 - protein, 339 aa, Zea mays
  misc_feature (210)..(210): Xaa can be any naturally occurring amino acid
  unsure (1)..(339): unsure at all Xaa locations
MCGGAILAELIPPTRRVASKPVTEGHLWSASSKKAGSGRDKRHQHEYADDDFEAAFEDFDDDFDVHEDDEDGHFVFSSKSALSPALHDGRAASQKKQRGRQFRGIRQRPWGKWAAEIRDPHKGTRVWLGTFSTAEDAARAYDVEARRLRGSKAKVNFPAASGRARGRARPRRGDDGNPRTAPETQHPAQPALLPRGEIVWRRGRKGSPPXKPEATQSFDVGGLFFDMAFPTFPASPPPQAVEASFTGSTATSETGSPAKRPRCDDNSSEGSGGSGSALELADELAFDPFMLLQMPYSGGYDSLDGLFAAEAVQQDVGNGMDGVSLWSFDEFPAVDGCVF

SEQ ID NO: 3807 - protein, 340 aa, Zea mays
MCGGAILAELIPPTRRVASKPVTEGHLWSASSKKAGSGRDKRHQHEYADDDFEAAFEDFDDDFDVHEDDEDGHFVFSSKSALSPALHDGRAASQKKQRGRQFRGIRQRPWGKWAAEIRDPHKGTRVWLGTFSTAEDAARAYDVEARRLRGSKAKVNFPAASGRARGRARPRRGDDGNPRTAPETQHPAQPALLPRGERETQRKEGIAAVKPEATESFDVGGGLFFDMAFPTFPASPPPQAVDTSFAGSTATSETGSPAKRPRCDEDSSEGGSGSALELADELAFDPFVLLQMPYSGGYDDDSLDGLFAADEAVQQDVGNGMDGVRLWSFDEFPAVDGSVF

SEQ ID NO: 3808 - protein, 160 aa, Zea mays
MESKHTDQANVKAKLSTMHSKVICCKLYISESQNAAVVDAISRIGQKDPEVVLLNKFEDEYYNRVRYTLVSYITNESSTGGAVFSPIRKVLLAMIEAAFSAINLEVHCGTHPRIGVVDDISFHPLNQADTIEDAAQLAKLVASDIGNGLQGVSSDKIFYN

SEQ ID NO: 3809 - protein, 607 aa, Zea mays
MGQCYGKAGGASSRRADHDDAVAPPSPLPANGAPTPPQQPATPGRRKSGSATPVHHQAATTAWPSPYPAGGASPLPAGVSPSPARSTPRRFFKRPFPPPSPAKHIKATLAKRLGGGKPKEGTIPEEGGAGVAADSAEAERPLDKTFGFANNFGAKYDLGKEVGRGHFGHTCSALVKKGEYKGHAVAVKIISKAKMTTAISIEDVRREVKILKALSGHNNLVKFYDACEDALNVYIVMELCEGGELLDRILARGGRYTEEDAKAIVVQILSVVSFCHLQGVVHRDLKPENFLFATRDESAPMKLIDFGLSDFIRPDERLNDIVGSAYYVAPEVLHRSYSMEADIWSIGVITYILLCGSRPFWARTESGIFRSVLRADPNFDDSPWPSVSAEAKDFVKRFLNKDYRKRMTAVQALTHPWLRDEQRQIPLDILVFRLVKQYLRATPLKRLALKALSKALREDELLYLRLQFKLLEPRDGLVSLDNFRTALTRYVTDAMRESRVLEFLHALDPLAYRKMDLEEFCAAAISPYQLEALESWEEIAGTAFQHFEQEGNRVISVEELAQELSLAPTHYSIVQDWIRKSDGKLNFLGFTKFLHGVTIRGSNTRRH

SEQ ID NO: 3810 - protein, 165 aa, Zea mays
  misc_feature (15)..(15): Xaa can be any naturally occurring amino acid
  misc_feature (50)..(50): Xaa can be any naturally occurring amino acid
  misc_feature (103)..(103): Xaa can be any naturally occurring amino acid
  unsure (1)..(165): unsure at all Xaa locations
MTGIAMSESEEHHFXRTSTHGASNTYPQQDGTVRKNGFIDIKNRPCKVVXILPPRLERIGHAASHFADIDIFKGKKVEDIVPSSHNCDIPHGKRSEYHLIDIXRDGFVSLLTSYGNTKDDLTLPTDETLVGQIKEGCESGKDLVVTDHAETGDDQICAVDDDGPA

SEQ ID NO: 3811 - protein, 189 aa, Zea mays
  misc_feature (164)..(164): Xaa can be any naturally occurring amino acid
  misc_feature (171)..(171): Xaa can be any naturally occurring amino acid
  unsure (1)..(189): unsure at all Xaa locations
MAAAARQRGTVKWFNDTKGFGFISPEDGSEDLFVHQSSIKSEGFRSLAEGEEVEFSVSEGDDGRTKAVDVTGPDGSFVRGGGGGGGGGGGYGSRGGGGSGGGGRSYGGSWGGGRRSGGGGGPGACYKCGEPGHMARDCPSADGGGYGGGGYGGGGGGGGRFGGXGGGGGGXRSCYNCGEAGHIARDCPT

SEQ ID NO: 3812 - protein, 164 aa, Zea mays
  misc_feature (109)..(109): Xaa can be any naturally occurring amino acid
  unsure (1)..(164): unsure at all Xaa locations
MFYSEEHHSRSKADAGAPRTHPQQAGTVRNNGYIASKNRPCKVGEDSTTKTGKQGHAKRHVAAIDIFNGKKLEDIVPPAHNRDIFYATPPEHQVNDISEDGAVSQRTTXGNTKEDLRHPTEETLVTQIKEGFESGKELVETVQAAMGEEQNGAREDDGPKKLTC

SEQ ID NO: 3813 - protein, 194 aa, Zea mays
  misc_feature (37)..(37): Xaa can be any naturally occurring amino acid
  misc_feature (83)..(83): Xaa can be any naturally occurring amino acid
  misc_feature (134)..(134): Xaa can be any naturally occurring amino acid
  unsure (1)..(194): unsure at all Xaa locations
MSDSEEHDFKSKDDAATSKTYPQQADTARKNGFIVIXNRPCKVEEVSTSKTGKYGHALCHFAAIHIFNARQLEDIGPSSHNCXDIPYANRTEYQLIDISEDGSVSLLTSDGSTKDDLRLPTDETLAAHIREGIXSVKDHVETVQTAMWEEQICAMKDVGPQELPWIWILNPTVSQLKSEKNVYTKGLLPRHSLA

SEQ ID NO: 3814 - protein, 345 aa, Zea mays
MPAAAFFSAALPPPSRTLSRRLVVSRAAAAAASASASSSSGWQGGGGVEFQGKVGFLGLGIMGAPMASNLIKAGCDVTVWNRTKSKCDPLLSLGAKYEPTPAQVASSCDVTFAMLADPQSAAEVACGSSGAAEGLAPGKGYVDVSTVDGATSKLIGERITSTGASFLEAPVSGSKKPAEDGLLIFLTAGDESLYKRVAPLLDVMGKSRFYLGDVGNGAAMKLVVNMVMGSMMVSFSEGLLLSEKVGLDPNTLVEVISQGAISAPMFSLKGPSMVKAAYPPAFPLKHQQKDLRLALALAESVSQSIPTVAAANELYKAAKSLGLSDHDFSAVIEALKAKVQSQSSQ

SEQ ID NO: 3815 - protein, 466 aa, Zea mays
MAGWTDSTGSGGRGSGGRGFTTPRYTTNSTNDMIHGGTSGGGGGSGRWRGGRSRGWPPPQPHHRYRRVDAVHRDSAPVSLSELQAASSTSSRHRYLTRSISADKSSASGTAGSTDTREPDDKANRSAANFECNVCFDMAAEPVVTRCGHLFCWECLYQWLHVHSHHRECPVCKGQVADDAIIPIYGRGGSAASVDNAPPRPTGARVESTRQQQQQLPIFHPPNVFEFIGLGLAAAARGEHSTEQLLLPTFSHPTVFDDDDGHEWDMDLVNNGIDPLDLITPGTQDLDMDDYDGTIDFDDDDYEYDYHLAGATLFASAGTEASNPSSSQAHAGMINIRDNILGTATSIYHQQEFGYSGVRPHNNRGRRRHRNRARASANHSGADEMVIEDTSHFYLQNGGSSNISAGAAFRPNGGWTGRRGRSNLNSNSGGGSNLNSNSGGGSNMNSNSGGGRGGIQGTRRQRTNYN

SEQ ID NO: 3816 - protein, 223 aa, Zea mays
DFKWATFLASQRKKIDPLLYRPTTFVSRAGHPPLPPRSGRLIFNAPGSGAGQMLFLDCGAGGGPGGGLFHRGGRPMLGLEEGRGVKRPFFTSPDELLEEEYYDEQLPEKKRRLTPEQVLLLERSFEEENKLEPERKTELARKLGLQPRQVAVWFQNRRARWKTKQLERDFDRLKASFDALRADHDALLQDNNRLRSQVVSLTEKLQEKEDATDGGATADTPAA

SEQ ID NO: 3817 - protein, 613 aa, Zea mays
MSANDGAGDTKMRAIVVVEEGEMSAPAATPKQGKCCEYTLDGSVDMKGRPAVKGKSGGWLAGALILVNQGLATLAFFGVNVNLVLFLTRVLGQSNGDAANNVSKWTGTVYMFSLIGAFLSDSYWGRYKTCAIFQAIFVLGLALLSVSSHLYLIRPDGCGMEHAPCGPHSGKELGIFYIALYMIAFGNGGYQPNIATLGADQFDEEDPAEAHSKVSFFSYFYLALNLGSLFSNTFLSYLEDKGSWALGFWASTAAAATALLLFLSGTLRYRYFQPGGNPIGRIGQVAIAACRNWKAGVSTEVVSLYEGDEKADAGGRKLLHTQGFSFLDRAAHADTDSKLGARDPWKLCSVTQVEEVKSILRLLPIWLCTILYSVVFTQMASLFVVQGAAMRRTTPFSGFSVPPSSMSAFDILTVAATIFLYRRTICPFLARLSGRPAGPTELQRMGLGLVVGALAMTTAGTVEHFRKARATAAMSSDLHIMWQVPQYALIGVSEVMMYVGQLEFFNGQMPDGLKSFGSALCMMSMSLGNYFSDIIVSAVTRLTTTRGRSGWIPADLNEGHLDKFYFLLAVLAVADFAVYLVCASRYGSGKVDGRSSDDEEEGAAGQVTSPAYA

SEQ ID NO: 3818 - protein, 606 aa, Zea mays
MDTHIGSVNGAASNQTVGCPASAPGCPMASTPAQPAATLSAGEASLGRHLARRLVQVGVNDVFAVPGDFNLTLLDHLIAEPGLRLVGCCNELNAGYAADGYARARGVGACAVTFTVGGLSVLNAIAGAYSENLPVICIAGGPNSNDYGTNRILHHTIGLPDFSQELRCFQTVTCHQAVVNNLDDAHEQIDTAIATALRESKPVYLSISCNLPGLPHPTFSRDPVPFFLTPRTSNKMGLEAAVEATVEFLNKAVKPVLVAGPKLRVAKAGKAFVDMVDASGYAYAVMPSAKGLVPETHPHFIGTYWGAVSTAFCAEIVESADAYLFAGPIFNDYSSVGYSFLLKKEKAIIVQPERVIVGNGPAFGCVMMKEFLSELAKRVNKNTTAYENYKRIFVPEGQPLESEPNEPLRVNVLFKHVQKMLTGDSAVIAETGDSWFNCQKLKLPEGCGYEFQMQYGSIGWSVGALLGYAQGANHKRVIAFIGDGSFQVTAQDVSTMLRCEQNSIIFLINNGGYTIEVEIHDGPYNVIKNWNYTGFVDAIHNGLGKCWTSKVKSEEELTAAIETALGEKKDCLCFIEVIAHKDDTSKELLEWGSRVSAANSRPPNPQ

SEQ ID NO: 3819 - protein, 424 aa, Zea mays
MGFDKEASSSSSRLDAAPLLPQHGGGAGGHLSSQPKTFANVFIAVVGSGVLGLPYTFSRTGWAAGTLLLLAVAALTFHCMMLLVAARRRIADAHPKIASFGDLGHAIYGAPGRHAVDAMLVLSQASFCVGYLIFISNTMAHLYPIAIGAQSPASPLLTAKALFIWAMLPFQLGLNSIRTLTLLAPLSIFADVVDLGAMGVVLGQDASVWLADRPPVFAFAGPAQLLYGLGVAVYAFEGIGMVLPLEAEAADKRRFGATLALSMAFIAVMYGLFGAMGYLAFGAATRDIITTNLGTGWLSVLVQLGLCINLFFTMPVMMNPVYEVAERLLCGKRYAWWLRWILVVLVGLLAMLVPNFADFLSLVGSSVCVVLGFVLPAVFHLKVFGTEIGWAGLVADVAVIVIGIALAVSGTWTSLVQIFSSSDL

SEQ ID NO: 3820 - protein, 912 aa, Zea mays
MNPDNFTHKTNEAIVGAHEIAVEAGHAQLTPLHLAAVLAADKGGILRQAITGASGGDGAAGDSFERVLNNSLKKLPSQSPPPDSVPASTALIKVIRRAQSAQKKRGDSHLAVDQLLLGLLEDSQISDCLKEAGVSAARVRAELEKLRGGEGRRVESASGDTNFQALKTYGRDLVEQAGKLDPVIGRDEEIRRVVRILSRRTKNNPVLIGEPGVGKTAVVEGLAQRIVRGDVPSNLLDVRLIALDMGALVAGAKYRGEFEERLKAVLKEVEEAEGKVILFIDEIHLVLGAGRTEGSMDAANLFKPMLARGQLRCIGATTLEEYRKYVEKDAAFERRFQQVFVAEPSVPDTVSILRGLKEKYEGHHGVRIQDRALVVAAQLSARYIMGRHLPDKAIDLVDEACANVRVQLDSQPEEIDNLERKRIQLEVELHALEKEKDKASKARLIEVRKELDDLRDKLQPLTMKYRKEKERIDEIRKLKQRREELQFTLQEAERRMDLARVADLKYGALQEIDAAISKLESETGENLMLTETVGPEQIAEVVSRWTGIPVTRLGQNDKERLVGLADRLHQRVVGQTEAVSAVAEAVLRSRAGLGRPQQPTGSFLFLGPTGVGKTELAKALAEQLFDDENLLVRIDMSEYMEQHSVARLIGAPPGYVGHEEGGQLTEQVRRRPYSVILFDEVEKAHVAVFNTLLQVLDDGRLTDGQGRTVDFRNTVIIMTSNLGAEHLLAGMVGKNSMKVARDLVMQEVRRHFRPELLNRLDEIVIFDPLSHEQLRKVARLQMKDVAVRLAERGIALAVTDAALDIILSLSYDPVYGARPIRRWIEKRVVTQLSKMLIQEEIDENCTVYIDAAPGKDELVYRVDRSGGLVNAETGMKSDILIQVPNSSTRSDAAQAVKKMRIMEEDEDGMDEE

SEQ ID NO: 3821 - protein, 203 aa, Zea mays
MAMAPQGQAEHGQVHVHDHQLGHRPEPNSRHPDPGAAATSSIATNRWGPYSGAGDFASNMAVILAALLTALALALALNAAVRYLLSRSRRARRGRAGSSSGERDRDSDANISDPEKLAVEAPPPPPPPALVYSAAGTKLAGAAAECAICLAEFADGDTVRVMPVCGHGFHARCIELWLAGGRRSSCPTCRAPAGAAAATPSSS

SEQ ID NO: 3822 - protein, 764 aa, Zea mays
IDLTFHIYHFSPFYIGRDLSYNRFTGPIPFNIGFLQVATLSLQGNKFTGPIPSVIGLMQALAVLDLSYNQLSGPIPSILGNLTYTEKLYMQGNRLTGSIPPELGNMSTLHYLELNDNQLTGSIPPELGRLTGLFDLNLANNHLEGPIPDNLSSCVNLNSFNAYGNKLNGTIPRSLRKLESMTYLNLSSNFISGSIPIELSRINNLDTLDLSCNMMTGPIPSSIGNLEHLLRLNLSKNDLVGFIPAEFGNLRSVMEIDLSYNHLGGLIPQELGMLQNLMLLKLENNNITGDVSSLMNCFSLNILNVSYNNLAGAVPTDNNFTRFSHDSFLGNPGLCGYWLGSSCRSTGHRDKPPISKAAIIGVAVGGLVILLMILVAVCRPHHPPAFKDATVSKPVSNGPPKLVILHMNMALHVFDDIMRMTENLSEKYIIGYGASSTVYKCVLKNCKPVAIKKLYAHYPQSLKEFETELETVGSIKHRNLVSLQGYSLSPVGNLLFYDYMESGSLWDVLHEGSSKKNKLDWVTRLRIALGAAQGLAYLHHDCSPRIIHRDVKSKNILLDKDYEAHLTDFGIAKSLCVSKTHTSTYVMGTIGYIDPEYARTSRLNEKSDVYSYGIVLLELLTGKKPVDNECNLHHLILSKTASNEVMETVDPDVGDTCKDLGEVKKLFQLALLCTKRQPSDRPTMHEVVRVLDCLVNPEPPPQPQQQQQKAHAHHQLPPQPSPPAYVDEYVSLRGTGALSCANSSSTSDAELFLKFGEAISQNMV

SEQ ID NO: 3823 - protein, 320 aa, Zea mays
  misc_feature (218)..(218): Xaa can be any naturally occurring amino acid
  unsure (1)..(320): unsure at all Xaa locations
MESLGVLLLHPLDTYLEQELDRRCRLLRLWEVPHDRRGEFLRAHASSIRAVVIGGGSGFGGNPALIDDLPRLEIIACYAVGYDCVDLTRCREPRVPVTNTPDVLTDDVADLAVGLAIAALRRIPHADSYVRAGLWKANDGHYGLTTRFSGKRVGIIGLGRIGLAIAKRVEGFGCPVCYYQRTRQDAYPNYTYLPTVLQLAANSDVLVVACSLNEQSRXIVSREVIEALGPTGVLVNVGRGAHVDEPELVAALADGRLGGAGLDVFQAEPDVPQALMALDNVVLAPHMGSGTRETRKAMADLVLANLEAHALNMPLLTPVV

SEQ ID NO: 3824 - protein, 542 aa, Zea mays
  misc_feature (60)..(60): Xaa can be any naturally occurring amino acid
  misc_feature (104)..(104): Xaa can be any naturally occurring amino acid
  unsure (1)..(542): unsure at all Xaa locations
MARCVAGSCPPVTFACCPRRTGRSAVVQCGTASSTPAISGTGPSSSGSSGLVQDCTAPLXCALQLTARQDVSCFHFPGHNRGKAAPSSLSKLIGSGAFLHDLPXSLPELDDLFSPKGVILDAQRRAAQLFGSSKTWFLVNGTTCGIQASVMATCSPGDYLIVPRNCHLSVISALVLSGVVPKYIIPEYNSGWDIAGGITPLKLDEAVKELEEDGKRVGAVLVTSPTYHGVCSNVQGIVSVCHPRGIPVIVDEAHGAHFRFHDSLPSTAIEQGADLAVQSTHKVLCSLTQSSMLHMSGDLVDVDKVSQCLQLLQSSSPSYLLLSSLDAARDQLSQNTNIFDEPLAIASETKDKLARIPGISVLGLPCFASDFPAIDPLRITLSASDLQLSGYEADDILYEGHQIVSELVGTRAVTFAVNLGTRVQDAEKLVQSAKHLSEKHFFANSLKPVKENRVHGPLENISVHLSPREAFFTEKRRVKIEDSLGEICGELICPYPPGIPVLIPGEVVTHDSLSYLMSVRHQGITISGAADAELNSILVCDL

SEQ ID NO: 3825 - protein, 226 aa, Zea mays
  misc_feature (154)..(154): Xaa can be any naturally occurring amino acid
  unsure (1)..(226): unsure at all Xaa locations
MANRAGEPVARTNSDGGGGGSKDSGSFECNICLDLAQDPVVTLCGHLFCWPCLYEWLHVHAHSQECPVCKAVVEEGKLVPLYGRGGSSAVPRARSVAGVEIPSRPTGQRPSTAPQPDHNNHYPHQNPWFNGAGAPPVANGRWGSYTFSAAIGGXLFPLLSFQVHGFPQATAYGPAAGFPYGYGHSFHGWHGHGFPRQAPQGQQVDAYLKVLLLAVGVLVIASLIAF

SEQ ID NO: 3826 - protein, 450 aa, Zea mays
LDDDGRPRRKGTFWTASAHIITAVIGSGVLSLAWAIAQLGWVAGPAALLLFAFVTYYTATLLAECYRTGDPDTGKRNYTYMDAVRSNLGGTKVLLCGVIQYANLVGVAIGYTIASSISMKAVRRAGCFHVHGHGDPCRSSSTPYMILFGLVQILFSQIPDFDEIWWLSIVAAVMSFTYSSIGLSLGIVQTISNGGFMGSLTSISFGAGVSSTQKVWHTLQAFGDIAFAYSFSNILIEIQDTIKAPPPSESKVMQKATCVSVATTTIFYMLCGCMGYAAFGDNAPDNLLTGFGFYEPFWLLDVANVAIVVHLVGAYQVFCQPIFAFVERRAAAAWPDSAFISRELRVGPFALSLFRLTWRSSFVCVTTVVAMLLPFFGDVVGLLGAVSFWPLTVYFPVEMYIKHRRVPRGSTRWICLQTLSVTCLLVSIAAAAGSIADVIDALKVYRPFSG

SEQ ID NO: 3827 - protein, 387 aa, Zea mays
MADQANQPTVLHKLGGQFHLRSIISEGVRARNICPSVSSYERRFATRNYMTQSLLGPSMSVSGGINVPVMRTPLCANAPAEKGGKNFMIDFMMGGVSAAVSKTAAAPIERVKLLIQNQDEMIKSGRLSEPYKGIVDCFKRTIKDEGFSSLWRGNTANVIRYFPTQALNFAFKDYFKRLFNFKKDRDGYWKWFAGNLASGGAAGASSLFFVYSLDYARTRLANDAKAAKGGGERQFNGLVDVYRKTLKSDGIAGLYRGFNISCVGIIVYRGLYFGLYDSIKPVVLTGNLQDNFFASFALGWLITNGAGLASYPIDTVRRRMMMTSGEAVKYKSSLDAFQQILKKEGPKSLFKGAGANILRAIAGAGVLSGYDQLQILFFGKKYGSGGA

SEQ ID NO: 3828 - protein, 434 aa, Zea mays
VRVSYGPLEGYSRAAAAMALKAVSREAARHKKAGSGDGDGHRRIWFERDVLLSLRHPLLPSLRGILATEAVVGFAIDRCGGGDLNSLRRRQTEKMFSDSVIRFFAAELVLALEYLHSLGIVYRDLKPENVLIQDSGHIMLVDFDLSTRLPAPPQEPDAPVTSPNAKPALPVAAPSPSRGSARKPAGAALCFPFRTAIATKPAAPATDSRSPLSTSRTASSSSSSSSSTATTASSAASAGGRTPAKSNSFVGTEDYVAPEIIAGRGHDFTVDWWGLGVVLYEMLYGRTPFRGQSRKETFYRVLTKQPELVGEQTPLRDLIARLLEKDPEKRIGARGVRAHPFFRGVDWDRILQVARPPFIPTPPPQDEGEDGDGDEALDVEKVVREVFASNDAEAAKAGEGGKAWPVADGGRVGGDGDCDGRGDQSKDGDFSVFF

SEQ ID NO: 3829 - protein, 369 aa, Zea mays
MALLSDLINLDLSDRTGKIIAEYIWVGGSGMDVRSKARTLSGPVDDPSKLPKWNFDGSSTGQAPGDDSEVILCPRAIFRDPFRKGQNILVMCDCYEPNGEPIPSNKRHGAAKIFSHPDVKAEEPWFGIEQEYTLLQKDTKWPLGWPLGGYPGPQGPYYCAVGADKSYGRDIVDAHYKACLYAGIDISGINGEVMPGQWEFQVGPAVGVSAGDQLWVARYILERITEIAGVVVSFDPKPIPGDWNGAGAHTNYSTKSMRSDGGYEVIKKAIGKLGLRHREHIAAYGDGNERRLTGRHETADINTFVWGVANRGASVRVGRDTEKEGKGYFEDRRPASNMDPYVVTSLIAETTMLWEPSHSNGDGKGAAAP

SEQ ID NO: 3830 - protein, 390 aa, Zea mays
MLVKLMNLLRACWRPSSNRHARTGSDVTGRQDGLLWYNDAGQHVNGEFSMAVVQANNLLEDQCQIESGPLSFLDFGPYGTFVGVYDGHGGPETACYINDHLFQNLKRFASEQNAMSADVLKKAYEATEDGFFSIVTKQWPVKPQIAAVGSCCLVGVICGGMLYVANVGDSRVVLGKHVKATGEVLAVQLSAEHNVSIASVRKELQSMHPEDRHIVVLKHNVWRVKGLIQVCRSIGDAYLKKQEFNREPLYAKFRLREPFHKPILSSEPSISVQPLQPHDQFLIFASDGLWEQLTNQEAVDIVRSSPRSGCARRLIRAALQEAAKKREMRYSDLKKIDRGVRRHFHDDITVIVVFLDSGLVSQASTHRGPTLSLRGGGGSAGLRSNTLAPT

SEQ ID NO: 3831 - protein, 589 aa, Zea mays
  misc_feature (351)..(351): Xaa can be any naturally occurring amino acid
  unsure (1)..(589): unsure at all Xaa locations
MCGILAVLGCSDCSQARRARILACSRRLKHRGPDWSGLYQHEGNFLAQQRLAIVSPLSGDQPLFNEDRTVVVVANGEIYNHKNVRKQFTGAHSFSTGSDCEVIIPLYEKYGENFVDMLDGVFAFVLYDTRDRTYVAARDAIGVNPLYIGWGSDGSVWMSSEMKALNEDCVRFEIFPPGHLYSSAAGGFRRWYTPHWFQEQVPRTPYQPLVLREAFEKAVIKRLMTDVPFGVLLSGGLDSSLVASVTKRHLVKTDAAGKFGTELHSFVVGLEGSPDLKAAREVADYLGTTHHEFHFTVQDGIDAIEEVIYHDETYDVTTIRASTPMFLMARKIKSLGVKMVLSGEGSDELLXGGYLYFHFAPNREELHRETCRKVKALHQYDCLRANKATSAWGLEVRVPFLDKEFVDVAMGMDPEWKMYDKNLGRIEKWVLRKAFDDEEHPYLPEHILYRQKEQFSDGVGYNWIDGLKAFTEQQVTDEMMNSAAQMFPYNTPVNKEAYYYRMIFERLFPQDSARETVPWGPSIACSTPAAIEWVEQWKASNDPSGRFISSHDSAATDRTGDKLAVVNGDGHGAANGTVNGNDVAVAIAV

SEQ ID NO: 3832 - protein, 207 aa, Zea mays
  misc_feature (43)..(43): Xaa can be any naturally occurring amino acid
  unsure (1)..(207): unsure at all Xaa locations
FYVLRPSRAPCHAATPCCGCCFSRSTAGGGFIRSWCAGTDYPXLCNATLAPYAAEVGASPARLSLAALTVTLDGARRATAAMKAMAAGGASSHHLVPVAAEAAADCVGMLEDAVDLLRQSVEAMERLGKEPASASASASGQAGRSVRFQVNSVQTWASAALTNDGMCMEGFKGQPAVVREAVRRNVAGAMHLTAIALAIINAMAKQM

SEQ ID NO: 3833 - protein, 326 aa, Zea mays
MASSSFTSLSVMVLLCLAAAAVASAQLSPTFYSRSCPRALATIKAAVTAAVAQEARMGASLLRLHFHDCFVQASPSQGCDGSVLLNDTATFTGEQTANPNVGSIRGFGVVDNIKAQVEAVCPGVVSCADILAVAARDSVVALGGPSWRVLLGRRDSTTASLTLANSDLPAPSLDLANLTAAFAKKRLSRTDLVALSGAHTIGLAQCKNFRAHIYNDTNVNAAFATLRRANCPAAAGNGDGNLAPLDTATPTAFDNAYYTNLLAQRGLLHSDQQLFNGGATDGLVRTYASTPRRFSGDFAAAMIRMGNISPLTGTQGQIRRACSRVN

SEQ ID NO: 3834 - protein, 299 aa, Zea mays
  misc_feature (80)..(80): Xaa can be any naturally occurring amino acid
  misc_feature (89)..(89): Xaa can be any naturally occurring amino acid
  unsure (1)..(299): unsure at all Xaa locations
MAAQEQEQEQEKQQAKTSTTSSLPSSSERSSSSARNNLTEGGAESDEEIRRVPEMGGASASASSGAGADERPKGEDGKQXAGGGGGAAXAGGKKRGRTAGDKEQNRLKRLLRNRVSAQQARERKKAYLTELEAKAKGLELRNAELEQRVSTLQNENNTLRQVPASPRLASVHHPPFVCFASAIRSELQSERSSRSDRLTPTPPWCRRADSEEHDGAREQEVRRRRRRWRQGRKRRQKAPPPQELVRNEKGSWFVPCSRSPDLTIAGVLLFLTTPSLFLLFSHCYPWVSSPPSLMHCFNC

SEQ ID NO: 3835 - protein, 302 aa, Zea mays
MASVTYIDDSHAEVIDPPKNEEMLDATELVGDHIQNSPKPNVASYGNVRELLECPVCLSAMYPPIHQCSNGHTLCSGCKPRVHNRCPTCRHELGNIRCLALEKVAASLELPCKYQNFGCLGIYPYYCKLKHESQCQYRPYTCPYAGSECTVAGDIPYLVNHLKDDHKVDMHNGSTFNHRYVKSNPHEVENATWMLTVFSCFGQYFCLHFEAFQLGMAPVYIAFLRFMGDDAEAKNYSYSLEVGGSGRKMTWQGVPRSIRDSHRKVRDSYDGLIIQRNMALFFSGGDRKELKLRVTGRIWKEQ

SEQ ID NO: 3836 - protein, 713 aa, Zea mays
MDACSPRRSRSGTREQAVRNKDRSRSFQKARRKREKGARARSVQVVLVSAMDRVRGSAFLLGVLLAGSLFAFSVAKEETKKLGTVIGIDLGTTYSCVGVYKNGHVEIIANDQGNRITPSWVAFTDSERLIGEAAKNQAAVNPERTIFDVKRLIGRKFQDKEVQRDMKLVPYKIINKDGKPYIQVKIKDGENKVFSPEEISAMILGKMKDTAEAYLGKKINDAVVTVPAYFNDAQRQATKDAGVIAGLNVARIINEPTAAAIAYGLDKKGGEKNILVFDLGGGTFDVSILTIDNGVFEVLATNGDTHLGGEDFDQRIMEYFIKLIKKKYSKDISKDNRALGKLRREAERAKRALSNQHQVRVEIESLFDGTDFSEPLTRARFEELNNDLFRKTMGPAKKAMEDAGLEKSQIHEIVLVGGSTRIPKVQQLLKDYFNGKEPNKGVNHDEVVAFGAAVQGSILSGEGGDETKDILLLDVAPLTLGIETVGGVMTKLIPRNTVIPTKKSQVFTTYQDQQTTVSIQVFEGERSMTKDCRLLGKFDLNGIPSAPRGTPQIEVTFEVDANGILNVKAEDKGTGKSEKITITNEKGRLSQEEIDRMVREAEEFAEEDKKVKERIDARNQLETYVYNMKNTVGDKDKLADKLEAEEKEKVEEALKEALEWLDDNQSAEKEDYEEKLKEVEAVCNPIVSAVYQRSGGAPGGDADGGVDDDHDEL

SEQ ID NO: 3837 - protein, 315 aa, Zea mays
MESLGVLLLHPFNAYLEQELDRRFRLYRFWETPREEFLRAHAGAVRAVVGNASYGADAALIDALPALEIVASFSVGIDRVDLAKCRDRGIRVTNTPDVLTDDVADLAVGLAIAVLRRIPQADRYVRAGLWKSRGDYTLTTRFSGKRVGIIGLGRIGQAVAKRVEAFDCPVSYHQRTEQRATYPSYTYYPSVVELAANSDVLVVACPLNAQTRHIVSREVMEALGPSGVLINVGRGPHVDEREMVAALADGRLGGAGLDVFEDEPNVPEALLGMDNVVLLPHVGSGTNETRKAMADLVLGNLEAHVLSKPLLTPVV

SEQ ID NO: 3838 - protein, 473 aa, Zea mays
  misc_feature (53)..(53): Xaa can be any naturally occurring amino acid
  misc_feature (69)..(69): Xaa can be any naturally occurring amino acid
  unsure (1)..(473): unsure at all Xaa locations
MVGAMRGGAMELEDRLATLPRFRGDHDDDGKERRTGTVWTATAHIITAVIGSXGVLSLAWAMAQLGWVXPGPLTLVLFAAITFYTCGLLADCYRVGDPVTGKRNYTYTEAVKSNLGGWYVWFCGFCQYVNMFGTGIGYTITASISAAAINKSNCFHWHGHDADCSQNTSAYIIGFGVVQVIFSQLHNFHKLWWLSIIAAIMSFSYSAIAVGLSLAQIVMGPTGKTTMTGTLVGVDVDAAQKVWMTFQALGNVAFAYSYAIILIEIQDTLRSPPAENKTMRRATMMGISTTTGFYMLCGCLGYAAFGNAASGNILTGFGFYEPFWLVDFANACIVVHLVGGFQVFCQPLFAAVEGAVAARYPGSTREYGAAGLNVFRLVWRTAFVAVITLLAILMPFFNSILGILGSIAFWPLTVFFPVEMYIRQRQVRRFSTKWIALQSLSFVCFLVTAASCAASVQGVVDSLKTYVPFKTRS

SEQ ID NO: 3839 - protein, 220 aa, Zea mays
  misc_feature (180)..(180): Xaa can be any naturally occurring amino acid
  unsure (1)..(220): unsure at all Xaa locations
MSRSNALMWLLLLALSCWSWCGAVTARPTPSASTSTTTAGGGFIRSWCAGTDYPALCNATLAPYAAEVGASPARLSLAALTVTLDGARRATAAMKAMAAGGASSHHLVPVAAEAAADCVGMLEDAVDLLRQSVEAMERLGKEPASASASASGQAGRSVRFQVNSVQTWASAALTNDGMCXMEGFKGQPAVVREAVRRNVAGAMHLTAIALAIINAMAKQM

SEQ ID NO: 3840 - protein, 162 aa, Zea mays
MSAAEGAVVFSEEKEALVLKSWAIMKKDSANLGLRFFLKIFEIAPSARQMFPFLRDSDVPLETNPKLKTHAVSVFVMTCEAAAQLRKAGKITVRETTLKRLGGTHLKYGVADGHFEVTRFALLETIKEALPADMWGPEMRNAWGEAYDQLVAAIKQEMKPSE

SEQ ID NO: 3841 - protein, 557 aa, Zea mays
  misc_feature (210)..(212): Xaa can be any naturally occurring amino acid
  unsure (1)..(557): unsure at all Xaa locations
MAIPVRSAAAPRRLVPSIPPASSGHVRGLACFGTRTGPRGARGLSMVVADSTSRRAKQADGGDGVLGAPVLGGLGMEGLGDQLSVVMKFGGSSVSSAARMAEVAGLILTFPEERPVVVLSAMGKTTNNLLLAGEKAVGCGVIHVSEIEEWNMVKSLHIKTVDELGLPRSVIQDMLDELEQLLKGIAMMKELTPRTSDYLVSFGECMSTRXXXAYLNKIRVKARQYDAFDIGFITTDEFGNADILEATYPAVAKRLHGDWIQDPAIPVVTGFLGKGWKSGAVTTLGRGGSDLTATTIGKALGLREIQVWKDVDGVLTCDPNIYPHAKTVPYLTFEEATELAYFGAQVLHPQSMRPAREGDIPVRVKNSYNPKAPGTLITRQRDMDKVVLTSIVLKSNVTMLDIVSTRMLGQYGFLARVFAIFEDLCISVDCVATSEVSVSVSLDPSKIWSRELIQQASELDHVVEELEKIAIVRLLQQRAIISLIGNVEQSSLILEKTGRVLRKSGVNVQMISQGASKVNMSLIVHDSDAKALVEALHQAFFEDDVLSQVEAENLLVG

SEQ ID NO: 3842 - protein, 378 aa, Zea mays
MPACSQTARNQIRPPPDISPRRGISSNAPLTAPMGSLPVPASTECTPQGRATVSASDLAPLFSAQRRHLDHFFDRLDMSQAAAFAQVLLDAPGAVFFTGVGKSGIVARKTAQTLASLGFARAGFLAPVDALHGDIGALFPGDVLVLLSKSGASDELLALVPCARAKGGYLVSVTSAASGADCPLAAACDLNVHLPLQGEVCPFGLAPVTSTAIQMVFGDTVIAAIMEARRLSRDQYASNHPAGKIGKTLIFKVKDVMKKQNELPLCKEGDMIMDQLTELTSKGCGCLLVVDEEHHLIGTFTDGDLRRTLKASGPAIFSLTVGEMCNRNPRTITADAMAVEAMEKMESPPSPVQFLPVVNDNNVVCGIITLHGLVSAGL

SEQ ID NO: 3843 - protein, 353 aa, Zea mays
  misc_feature (100)..(100): Xaa can be any naturally occurring amino acid
  misc_feature (161)..(161): Xaa can be any naturally occurring amino acid
  unsure (1)..(353): unsure at all Xaa locations
METALQQSAAATAGGGMRPAGAATTGKKARQELELEQERELRFPQAAAAADQGGLDEELRRGPWTVDEDLTLINYIADHGEGRWNALARAAGLMRTGKSXRLRWLNYLRPDVKRGDFTADEQLLILDLHSRWGNRWSKIAAHFPGRTDNEIKNYWRTRVQXHAKQLNCDVNSKRFKDAMRFLWMPRLAERAATAAHQPQPQHVAAACNNVLVAAAAAANSSSCCWSSPRSSAVTTAACSGSSSCSSLTSESAHNDDDGARPHAAAVLAAAAAATGDDDYWGAVTTTMQQNHHQQQQQNEQFDFWSTASALQHLTTAAADQDLTGWVQGFSDDGILSGSSSDSLWSLDDIWRMQ

SEQ ID NO: 3844 - protein, 173 aa, Zea mays
MQRGDPLVVGRIIGDVVDPFVRRVPLRVAYAAREVSNGCELRPSAIADQPRVEVGGPDMRTFYTLVMVDPDAPSPSDPNLREYLHWLVTDIPATTGVSFGTEVVCYESPRPVLGIHRVVFLLFQQLGRQTVYAPGWRQNFSTRDFAELYNLGLPVAAVYFNCQRESGTGGRRM

SEQ ID NO: 3845 - protein, 350 aa, Zea mays
MGDSGGSVVSVDVERISFGGKEHHIQTNHGPVSVAVYGDHDKPALVTYPDIALNYMSCFQGLLFCPEAASLLLHNFCIYHISPPGHELGAAPISPNAPIPSVDDLADQVADVLDFFGLGSVMCFGVTAGAYILTLFAAKYRERVLGLILVSPLCKGPTWTEWLYSKVTSNLLYYYGMCGLVKECLLQRYFSKEVRGFSEVPESDIVQACKSLLDQRQSMNVWRFVQTMNERYDLSEHIKRLQCRTLIFVGDNSQFHTEAVHLTSKLDRRYCALVEVQACGSLVTEEQPHAMLIPMEYFLMGYGLYRPPSQVVECSPRSPLSPFCISPDLLSPESMGVKLKPIRTRVRLEV

SEQ ID NO: 3846 - protein, 490 aa, Zea mays
MASSTGSLEHGGFTFTPPPFITSFTELLSGAAADMVGAAGADHQERSPRGLFHRGATRGGGVGVPKFKSAQPPSLPISPPPMSPSSYFSIPPGLSPAELLDSPVLLHSSSNFFASPTTGAIPAQRFDWKQAADLIASQSQQDDSRAAVGSAFNDFSFHAPTMPAQTTSFPSFKEQQQQQVEAATKSAVPSSNKVSGGSGGSTKLEDGYNWRKYGQKQVKGSENPRSYYKCTYHSCSMKKKVERSLADGRVTQIVYKGAHNHPKPLSTRRNSSGGVAAAEEQAANNSSLSGCGGPEHSGGATAENSSVTFGDDEAENGSQRSGGDEPDAKRWKAEDGENEGSSGAGGGKPVREPRLVVQTLSDIDILDDGFRWRKYGQKVVKGNPNPRSYYKCTTAGCPVRKHVERACHDARAVITTYEGKHNHDVPVGRGAASRAAAAAPLLGSGGGQMDHRHQQPYTLEMLSGGGGGYGGGYAAKDEPRDDLFVDSLLC

SEQ ID NO: 3847 - protein, 364 aa, Zea mays
  misc_feature (38)..(38): Xaa can be any naturally occurring amino acid
  misc_feature (67)..(67): Xaa can be any naturally occurring amino acid
  misc_feature (235)..(235): Xaa can be any naturally occurring amino acid
  unsure (1)..(364): unsure at all Xaa locations
HVYRIFAALLNKIGVKARQYDAFDLGFITTDDFTNADXEATYPAVARRLHVEWINDPAIPIVTGFLXGWRSGAITTLGRGGSDLTATTIGKALGLREIQVWKDVDGVLTCDPNIHPKAKPVPYLTFDEAAELAYFGAQVLHPQSMRPAREGDVPVRVKNSYNRRAPGTLITKARDMSKTVLTSIVLKSNITMLDIVSTRMLGQYGFLAKVFSIFEDLGISVDCVATSEVSISLTXMDPSKLWSCELVQHKNELDDVIEELEKIAVVHLLQNRSIISLIGNVQRSSLILEKAFNVLRRNGVNVQMISQGASKVNISLVVHDSEAKQCVQALHSAFFENGFLLEADELDVLHDGFTSHSNGTIHSH

SEQ ID NO: 3848 - protein, 610 aa, Zea mays
MCGILAVLGCADEAKGSSKRSRVLELSRRLKHRGPDWSGLRQVGDCYLSHQRLAIIDPASGDQPLYNEDQSVVVAVNGEIYNHLDLRSRLAGAGHSFRTGSDCEVIAHLYEEHGEEFVDMLDGVFSFVLLDTRHGDRAGSSFFMAARDAIGVTPLYIGWGVDGSVWISSEMKALHDECEHFEIFPPGHLYSSNTGGFSRWYNPPWYDDDDDEEAVVTPSVPYDPLALRKAFEKAVVKRLMTDVPFGVLLSGGLDSSLVATVAVRHLARTEAARRWGTKLHSFCVGLEGSPDLKAAREVAEYLGTLHHEFHFTVQDGIDAIEDVIYHTETYDVTTIRASTPMFLMSRKIKSLGVKMVISGEGSDELFGGYLYFHKAPNKEELHRETCRKVKALHQYDCLRANKATSAWGLEARVPFLDKEFINAAMSIDPEWKMMSLQVQPDLGRIEKWVLRKAFDDEEQPFLPKHILYRQKEQFSDGVGYSWIDGLKAHATSNVTDKMLSNAKFIFPHNTPTTKEAYYYRMVFERFFPQKSAILTVPGGPSVACSTAKAIEWDAQWSGNLDPSGRAALGVHLAAYEHQHDPEHVPAAIAAGSGKKPRTIRVAPPGVAIEG

SEQ ID NO: 3849 - protein, 270 aa, Zea mays
MVPSEMGSVATAVSTPAADKLLHGPISGKKCKKPGPRKIHKAEREKLKRDHLNDLFVELGNMLEADRQNNGKACILTDTTRILRDLLVQVDSLRKEHSDLQNESHYVTMERDEMQDENGVLRKEISELQNELTMRVSGSPAGWGHGTARSDPPLPHSTAVFSSEQAMQPPTIASVVFPLQQPLAPSAMTKPPHAAPPLELKLFPEVASAEGHEPCEDHKAPNHVARPQARYPTQSASWPVNLFSGLPRMEDEQCSSSTSGSSKEDNTDIE

SEQ ID NO: 3850 - protein, 249 aa, Zea mays
KARVRVSFGPLEGYSRAAARHGHEMPFLRGVDVNRAPAGDTRRGSCSEDDEEPGGASSSPNSTLSSSLSGKRAAPARSGGEVADHTPRAGGGSDDEDSGGGSRKKLRLSKDQAAVLEESFKEHNTLNPKQKAALAKQLNLKPRQVEVWFQNRRARTKLKQTEVDCEFLKRCCETLTEENRRLQREVAELRVLKLVAPHHYARMPPPTTLTMCPSCERLASASASADQAGRAGPCWGPLPVFVDGPARRP

SEQ ID NO: 3851 - protein, 399 aa, Zea mays
MPPCCSPTTSAVTAAAASPGASRSGGLLRRSRPAPAAVNCKKIDSLRSINGAPPCIPVSNRSLLTPVTLPVFRDPNMRNDTRLRIFSGTANPSLSQEIASYLGLELGKITIKRFADGEIYVQLQESVRGCDVFLVQPSCPPANENLMELLIMIDACRRASAKNITAVIPYFGYARADRKSQGRESIAAKLVANMITEAGANRVLVCDLHSSQAMGYFDIPVDHVYGQPVILDYLASKTICSDDLVVVSPDVGGVARARAFAKKLSDAPLAIVDKRRQGHNVAEVMNLIGDVRGKVAVMMDDMIDTAGTISKGAELLHQEGAREVYACCTHGVFSPPAIERLSSGLFQEVIITNTIPLKEEKSFPQLTILSVANLLGETIWRVHDDCSVGHEPYSSLDID

SEQ ID NO: 3852 - protein, 421 aa, Zea mays
MASSSSAATTSGDSQGLKARDACIVGVARTPIGALLGSLSSLPATKLGSIAIQGALKRAKVDPALVQEVFMGNVLSANLGQAPARQAALGAGLPNSVPCTTVNKVCSSGMKAVMFAAQSIQLGINDVVVAGGMESMSNAPKYVAEARRGSRFGHDVLVDGMLKDGLWDVYNDFPMGMCAELCSDQHSISREEQDSYAILSNERGIAARDSGAFSWEIVPVEISSGRGKPPVVVDKDESLAKFDPVKLKKLGPTFKTNGSVTAGNSSSISDGAAAIVLVSGEKAKNLGLEVIARITGYADAAQAPELFTTAPALAIPKAISNAALQTSQIDYYEVNEAFSVVAIANQRLLGIPSGKLNLSGGAVSLGHPIGCSGARIIVTLLGILRQKNGKFGVAGVCNGGGGASALVLELMQPSSHIHSSL

SEQ ID NO: 3853 - protein, 160 aa, Zea mays
MDARMFGLENPLVAALHHLLDVPDGDAGAGGDKAGGGATRTYVRDARAMAATPADVKELAGAYAFVVDMPGLSTGDIRVQVEDERVLMISGERRREEREDAKYLRMERRMGKFMRKFVLPDNADVDKVAAVCRDGVLTVTVEKLPPPEPKKPKTIEIKVA

SEQ ID NO: 3854 - protein, 140 aa, Zea mays
QPGSRNPRTLIWSYICFCQLHCCRRQHVSKCLWTKGYLGGKKILGSSLTARASSTSKTTASARPTGVIALHLGESRKKRDEKPIAYLRQPSFRALLDKSQEDLAISHASGGSTIPCPEDIFINLTSRLRGIRSIQNFASS

SEQ ID NO: 3855 - protein, 450 aa, Zea mays
MASSSSAATTSGDSQGLKARDACIVGVARTPIGALLGSLSSLPATKLGSIAIQGTYLSRHSLGSDVFGRISNNPSTNCRNTCGPSQIPGALKRAKVDPALVQEVFMGNVLSANLGQAPARQAALGAGLPNSVPCTTVNKVCSSGMKAVMFAAQSIQLGINDVVVAGGMESMSNAPKYVAEARRGSRFGHDVLVDGMLKDGLWDVYNDFPMGMCAELCSDQHSISREEQDSYAILSNERGIAAQDSGAFSWEIVPVEISSGRGKPPVVVDKDESLAKFDPVKLKKLGPTFKTNGSVTAGNSSSISDGAAAIVLVSGEKAKNLGLEVIARITGYADAAQAPELFTTAPALAIPKAISNAALQTSQIDYYEGKLNLSGGAVSLGHPIGCSGARIIVTLLGQILRQKNGKFGVAGVCNGGGGASALVLELIGSDMMQATLFAYPFIIVKLVRAN

SEQ ID NO: 3856 - protein, 141 aa, Zea mays
MSDSEEHHFESKADAGASKTYPQQAGTVRKNGFIVIKNRPCKVVEVSTSKTGKHGHAKCHFVAIDIFNGKKLEDIVPSSHNCDVSLLTSDGNTKDDLRLPTDETLVAQIKEGFESGKDLVVTVQSAMGEEQICALKDVGPK

SEQ ID NO: 3857 - protein, 128 aa, Zea mays
QGNSPGPLKQLTHPLYTDSSSGANVGLIIIFRARTKLKQTEVDCEFLKRCCETLTEENRRLQREVAELRALKLVAPHHYARMPPPTTLTMCPSCERLASASASADQAGRAGPCWGPLPVFVDGPARRP

SEQ ID NO: 3858 - protein, 428 aa, Zea mays
MYGVGGGFNAPSTAASRRRNPGDEEEDEEDEGGEGRVLEAWERAYADERSWESLQEDESGLLRPVDTKTLVHAQYRRRLLLRFAAAAAARIQKGLIRYLYIVIDLSRAASEMDYRPSRMAVVAKHAEAFIREFFDQNPLSHVGLVTIKDGIAHRLTEIGGSPESQIKALMGKLECSGDSSLQNALDLVHGYLDQVPSYGHKEVLILYSALNTFDPGDITETIAKCKKSKIRCSVIGPFAEIFICKHLCEDTGGSYTVALDESHFKELLLEHAPPPPAIAEYAAANLIKMGFPQRGAEELISICSCHKKIKSGAEGYICPRCKVNVCELPTECRTCGLTLVSSPHLARSYHHLFPVPPFDEVTPVPNRIQRGGQICFSCQQSLYNPDGQSNLHVRCPKCNQHFCLDCDIYIHESLHNCPGCESQRSIAS

SEQ ID NO: 3859 - protein, 219 aa, Zea mays
MTPRESGRRPTAALPRACAGAEDDDDDGSTRKKLRLTKEQSALLEDRFKEHSTLNPKQKVALAKQLKLRPRQVEVWFQNRRARTKLKQTEVDCELLKRCCESLTEENRRLQRELQELRALKFAPHPQAPPSSATQAGAAAGVVPAPPPPLYMQMQMPAAATLSLCPSCDRLAGPGRRRQGRAQAQGPRPPPTTSSTPSPTPPPADDEGRAARSHATQRQ

SEQ ID NO: 3860 - protein, 364 aa, Zea mays
  misc_feature (175)..(175): Xaa can be any naturally occurring amino acid
  unsure (1)..(364): unsure at all Xaa locations
MCGGAILSDIIPPPPPRRVTAGHLWPESKKPRRAAAGRRRAPVEQEQEEDFEADFEEFEVESGESELESEDEPKPKPFAAPSSALARGGLNTGAAGVDGPAANSVKRKRKNQFRGIRRRPWGKWAAEIRDPRKGVRVWLGTFNSPEEAARAYDAEARRIRGKKAKVNFPDEVPYXVSQKRRAAGLASLKAPKMDVEEEKPIIKPAVNNMTNSNAYHYPAVVGHNIIPEPFMQTQNMPFAPLVNYAALVNLSSDQGSNSFGCSDFSLENDSRTPDITSVPAPVATLAAVGESAFVQNTAGHAVAPPATGNAGVDLAELEPYMNFLMDGGSDGSISTLLSCDGSQDVVSNMDLWSFDDMPMSAGFY

SEQ ID NO: 3861 - protein, 285 aa, Zea mays
MSTSEVWSLSDFEISKYIGEGRFGKVYLAREKQSGYVVALKVIFKAKLQKYHFHAHLRREIEIQQSLDHPNVLRLFTWFHDEERVVLVLEYAARGELYKVLRAAGRFTERTSATYVASLAGALAYCHKKQVIHRDIKPENLLIDIEGRLKIADFGWAARSNAKRHTLCGTIDYLAPEMVEKKAHDHAVDNWTLGILCYEFLYGSPPFEADEQDDTLRRIVRVDLAFPSPPCVSSEAKDLISKLLVKDSSKRLCLEDIMKHPWIKKNADPSGSCIKQKDVTRSKLL

SEQ ID NO: 3862 - protein, 264 aa, Zea mays
MSSMESRPGRTNLVEPIGHGAALPSGGQAVQPWWTSSGAVLGAVSPAVVAVAPGSGTGISLSSSPAGGSGGGGAAKGAASDESSEDSRRSGEPKDGSASQEKNHATSQIPALAPEYLAPYSQLELNQSIASAAYQYPDPYYAGMVAPYGSHAVAHFQLPGLTQSRMPLPLEVSEEPVYVNAKQYHGILRRRQSRAKAELEKKVVKARKPYLHESRHQHAMRRARGNGGRFLNTKKSDSGAPNGGENAEHLHVPPDLLQLRQNEA

SEQ ID NO: 3863 - protein, 123 aa, Zea mays
  misc_feature (23)..(23): Xaa can be any naturally occurring amino acid
  misc_feature (52)..(52): Xaa can be any naturally occurring amino acid
  misc_feature (69)..(69): Xaa can be any naturally occurring amino acid
  misc_feature (81)..(81): Xaa can be any naturally occurring amino acid
  unsure (1)..(123): unsure at all Xaa locations
FKEHNTVTPNQKPALAKQLNLNXRHVEVWLQIRRTVRKLKQGKVVCEFMKRXGGTVREENRRLQQEVAXLRALKVEASHRXELIPPFTSFSMCSSCEHLSKESASHRSGGQSRDLLGPSPSVR

SEQ ID NO: 3864 - protein, 593 aa, Zea mays
MDTAIGSVPAASDAARHPAPSASAPRDATLGRHLARRLAEVGARDVFTVPGDFNLTLLDELEAEPGGVRLVGCCNELNAAYAADGYARARAGGVGACAVTFTVGGLSAINGVAGAFSENLPVVCIVGGPNSNDYGSNRILHHTIGLPDFTQELRCFQNVTCYQAVVNNLEDAHEQIDTAISTAIKESKPVYISISCNLPSIPHPTFSRHPVPFFLSPRLSNQMNLEAAVEAAAAFLNKAVKPVLVGGPKMRVSKACEALAELADACGYPVAVMPSAKGLVPEHHSRFIGTYWGAVSTPFCAEIVESADAYLFAGPVFNDYSSVGYSLLLKKEKAIIVQPERVVVGHGPAFGCVLMKDFLHALATRLKKNTAAYENYRRIYVPLGEPLPSEPGEPLRVNVLFKHIQAMLSGDTAVIAETGDSWFNCQKLKLPEGCGYEFQMQYGSIGWSVGATLGYAQAAKDKRVIACIGDGSFQVTAQEVSTMLRWGHNSIIFLINNGGYTIEVEIHDGPYNVIKNWNYTGLVEAFHNGEGACYTAKVRTEEELTEALEAALGPKKDCLCFIEVIVHKDDTSKELLEWGSRVSAANSRPPNPQ

SEQ ID NO: 3865 - protein, 329 aa, Zea mays
  misc_feature (67)..(67): Xaa can be any naturally occurring amino acid
  unsure (1)..(329): unsure at all Xaa locations
MDIMALNARDEEQYGNNHLGLGLSLSLGLGVATAAPVEVEPPPPPAAAAAAAAASYQRRAHHLPPRXQWWKWNGPGLFFGTTMDPSLERNQQQQQPAAARHGHEMPFLRGVDVNRAPAGETRRGSCSEDDEEPGGASSSPNSTLSSSLSGKRAAPARSGGEVADHTPRAGGGSDDEDSGGGSRKKLRLSKDQAAVLEESFKEHNTLNPKQKAALAKQLNLKPRQVEVWFQNRRARTKLKQTEVDCEFLKRCCETLTEENRRLQREVAELRVLKLVAPHHYARMPPPTTLTMCPSCERLASASASADQAGRAGPCWGPLPVFVDGPARRP

SEQ ID NO: 3866 - protein, 300 aa, Zea mays
MPVILREMEDHSVHPMSKSNHGSLSGNGYEMKHSGHKVCDRHSSSESDRSHQEASAASESSPNEHTSTQSDNDEDHGKDNQDTMKPVLSLGKEGSAFLAPKLHYSPSFACIPYTADAYYSGVGVLTGYAPHAIVHPQQNDTTNTPGMLPVEPAEEPIYVNAKQYHAILRRRQTRAKLEAQNKMVKNRKPYLHESRHRHAMKRARGSGGRFLNTKQLQEQNQQYQASSGSLCSKIIGNSIISQSGPTCTPSSGTAGASTACQDRSCLPSVGFRPTTNFSDQGRGGLKLAVIGMQQRVSTIR

SEQ ID NO: 3867 - protein, 476 aa, Zea mays
  misc_feature (356)..(356): Xaa can be any naturally occurring amino acid
  unsure (1)..(476): unsure at all Xaa locations
MALGEGGDHGAALPLIADQAKHAAAGGIVRSGSMWTAAAHVITAVIGSGVLSLAWSIAQLGWVAGPAAMLVFAAVTALQSTLFADCYRSPDPEHGPHRNRTYAKAVDRNLGSSSSWVCMLLQHTALFGYGIAYTITASISCRQEAYLGLRLAAANCYHEHGHDAHCDYDGNYYMLIFGGVQLLLSFIPDFHDMAWLSVVAAAMSFSYAFIGLGLGLARTIANGTIKGSITGVRMRTPMQKVWRVSQAIGDIAFAYPYSLILLEIQDTLKSPPAENKTMKRASMISILVTTFFYLCCGCLGYAAFGSDAPGNLLTGFGLYGPYWLIDFANACIILHLLGGYQVYSQPIFQFAERLFXAERFPDSGFVNGGSYTVRFACLRACRVNPLRVCLRTLYVASTTAVAVALPYFNEVLALLGALSFWPLAIYFPVEMYFIQRNVRRWSARWVVLQTFSVVCLLVSAFALVGSIEGLISKKLG

SEQ ID NO: 3868 - protein, 347 aa, Zea mays
MALLSDLINLDLSGRTGKIIAEYIWVGGSGMDVRSKARVMCDCYEPNGEPIPSNKRHGAAKIFSHPDVKAEEPWFGIEQEYTLLQKDTKWPLGWPLGGYPGPQGPYYCAVGADKSYGRDIVDAHYKACLYAGIDISGINGEVMPGQWEFQVGPAVGVSAGDQLWVARYILEVDGRPLDLLPHAGCVQFFFFFFRPDMAWSRITEIAGVVVSFDPKPIPGDWNGAGAHTNYSTKSMRSDGGYEVIKKAIGKLGLRHREHIAAYGDGNERRLTGRHETADINTFVWGVANRGASVRVGRDTEKEGKGYFEDRRPASNMDPYVVTSLIAETTMLWEPSHSNGDGKGAAAP

SEQ ID NO: 3869 - protein, 519 aa, Zea mays
MANSEYEYVKREFEFDRCLPPSNWIVVRIDGCHFHRFSKVHAFEKPNDENALRLMNACATAVLEKFPDIAFAYGVSDEYRYDIRHYSHFHFQRGNRVLSPARKWKDFFPNKELKEPPYFDARAVCYPNLKTIRDYLAWRQVDCHINNQYNTCFWMLVKSGKSEQEAQLALKGTFAKDKNELLAKQFQINYDDELAMFRKGSSVYREKVETTVKIDDYGEPIKRPRLKVTVAHVDTIGTAFWENHPHILREGKFMHGFVKKFGINHIFSPCNWIIVRIIACQFDQFSTIHSFDKPNDETALRLMNESASLMMEQYPDIVFGYGFSNEYSFVFHEKSELYPETGKVVIIIMQNVFLILSSCSSYFTSLYMTKWKEFFPYTELMQTPHFEADALCYPKLKIICEYLSWRQAECHAGNQYNTCFWMLVKSGKSEKEAHEILKGTLSKDKNELLFQQFQMNYNNEPAMFRKGSCVYRRKVEELAGAEDGGNGTSRERWHVKVDHVDLGPGFWRKHPWLMTNCTQ

SEQ ID NO: 3870 - protein, 294 aa, Zea mays
MKRPTSRGSSMVSGQATTDLQEDSCRSMEPHGVDGDATAAAERDDVDAGAYDEEEDEEEELAGSRGGLGEKKRRLAADQVRALERSFEVDNKLDPERKARIARDLSLHPRQVAVWFQNRRARWKTKQIERDFAALRVRHDALRVECDALRRDKDALAAEIKELRGMVEKQMEVKLESAAEELLPVATRSAAAAAVYNKDGSTDSDSSAVFNEEASPYPYSGAALDHQQQQETSHPLGFTGFTSFLTSSFPSVYHGDSHLDQEADGFFSAAAAGDGFFAEEQSAGIGSWYGGEGW

SEQ ID NO: 3871 - protein, 347 aa, Zea mays
MGSLPAPASAEFAPRPQGRATVVASDLAPLFSAQRRHLDHFFDRLDMAQAAAFAQALLDAPGAVFFTGVGKSGIVARKTAQTLASLGLARAGFLAPVDALHGDIGALFPGDVLVLLSKSGASDELLALAPCARAKGAYLVSLTSAASGDDCPLAAACDLNVHLPLQGEVCPFGLAPVTSTAIQMVFGDTVIAAIMEARRLSRDQYASNHPAGKIGKTLIFKVKDVMKKQNELPLCKEGDMIMDQLTELTSKGCGCLLVVDEEHHLIGTFTDGDLRRTLKASGPAIFSLTVGEMCNRNPRTITAEAMAVEAMEKMEAPPSPVQFLPVVNENNVVCGIITLHGLVSAGL

SEQ ID NO: 3872 - protein, 327 aa, Zea mays
IGGRPARPLSSSSFSFSLSPSWTILSISFLSLHILRRAEAARDTIGKLLQQEIKLSPTQDQKKLCMEQEEVGLALGLSLGSGHHHQELKPQHPSHPCAALLEPSLSLSGPATKDDGPTAPVRRFAAVKRELQTMEGNDDEATGRVLVYSVASSAVVTADDDEGCNSSRKKLRLSKEQSALLEDHFKEHSTLNPKQKAALARQLNLSPRQVEVWFQNRRARTKLKQTEVDCEILKRCCETLTEENRRLHRELQQLRALSHPHPHPAAFFMPTAAAAALSICPSCQRLVATGASAAAATTAGADNKPKAGGPGGRAPHVFSPFTNSAAC

SEQ ID NO: 3873 - protein, 264 aa, Zea mays
MRSLLTRLFTSTHIVMASSSFSSSPSRRLVHLTRHLVSSSSGELSSVGAPAAAASDADPVKSPRSTASRVHAAVLVCLFEDPSSGPRVLLTKRASSLSSHSGEVSLPGGKVDDGDADPKATALREAKEEIGLDPALVSVVTVLEPFLSKNGLTVVPVIGMVPDKALYKPVLNKAEVEDIFDAPLEMFLKDDHRRTRQMNWMGIDIPVQFFDYEADGKKFVIWGLTAHILTRAAAVIFGRKPSFVELPRPKYAGAPVAGTGKSNL

SEQ ID NO: 3874 - protein, 247 aa, Zea mays
MSGGNAWSPLPSHGFESDSGGMGSRAGEPVARTNSGGGSSSKDSGSFECNICLDLAQDPVVTLCGHLFCWPCLYEWLHVHAHSQECPVCKAVVEEGKLVPLYGRGGNSTSPRARSVAGVEIPSRPTGQRPSTAPQPDHSNHYPPQNPWFMGAGAPPVAGGRWGNYTFSAAIGGLFPLLSFQVHGFPQVSAYGPAAGFPYGYGHSFHGWHGHGYGFPRQAPQGQQVDAYLKVLLLVVGVLVIASLIAF

SEQ ID NO: 3875 - protein, 129 aa, Zea mays
MLTGTAADPDTHQDFEPKSRSSDMPLHAAIAQDIKENPVLIYMKGFPESPMCGFSALAVKVFQQYGVPICGRDILGDLKLKESVKAHTNWPTFPQIFIKGEFVGGSDIILSMHQKGELKDLLGDIAQRD

SEQ ID NO: 3876 - protein, 149 aa, Zea mays
ITEQAGVVLTLDPKPIEGDWNGAGCHTNYSTKSMREEGGFEVIKKAILNLSLRHKEHISAYGEGNERRLTGKHETASIDQFSWGVANRGCSIRVGRDTEAKGKGYLEDRRPASNMDPYIVTSLLAETTLLWEPTLEAEALAAQKLSLNV

SEQ ID NO: 3877 - protein, 205 aa, Zea mays
MAPPQNLFLVAIAFAVIFTASIVHGRHNGAEDIVHSSCEHASYPSLCVRTLSSYSGPTITNRRDLAQAAIKISLSHAQSAAKKLAVVRDSVGKKKQEKAALVDCVEMIGDSVDELSRTLGVLKHLRVSGGSAKEFRWQMSNAQTWASAALTDDDTCLDGFQGMDDGEIKTEVKQWMTKVARVTSNALYMINQLDETRGKPHDVHL

SEQ ID NO: 3878 - protein, 1164 aa, Zea mays
MASGSRATPTRSPSSARPEAPRHAHHHHHSQSSGGSTSRAGGGAAATESVSKAVAQYTLDARLHAVFEQSGASGRSFDYSQSLRAPPTPSSEQQIAAYLSRIQRGGHIQPFGCTLAVADDSSFRLLAFSENSPDLLDLSPHHSVPSLDSSAPPHVSLGADARLLFSPSSAVLLERAFAAREISLLNPIWIHSRVSSKPFYAILHRIDVGVVIDLEPARTEDPALSIAGAVQSQKLAVRAISRLQALPGGDVKLLCDTVVEHVRELTGYDRVMVYRFHEDEHGEVVAESRRDNLEPYLGLHYPATDIPQASRFLFRQNRVRMIADCHATPVRVIQDPGLSQPLCLVGSTLRAPHGCHAQYMANMGSIASLVMAVIISSGGDDEQTGRGGISSAMKLWGLVVCHHTSPRCIPFPLRYACEFLMQAFGLQLNMELQLAHQLSEKHILRTQTLLCDMLLRDSPTGIVTQSPSIMDLVKCDGAALYYHGKYYPLGVTPTESQIKDIIEWLTVFHGDSTGLSTDSLADAGYLGAAALGEAVCGMAVAYITPSDYLFWFRSHTAKEIKWGGAKHHPEDKDDGQRMHPRSSFKAFLEVVKSRSLPWENAEMDAIHSLQLILRDSFRDAAEGTNNSKAIVNGQVQLRELELRGINELSSVAREMVRLIETATVPIFAVDTDGCINGWNAKIAELTGLSVEEAMGKSLVNDLIFKESEATVEKLLSRALRGEEDKNVEIKLKTFGSEQSKGPIFVVVNACSSRDYTQNIVGVCFVGQDVTGQKVVMDKFVNIQGDYKAIVHNPNPLIPPIFASDENTSCSEWNTAMEKLTGWSRGEVVGKFLIGEVFGNCCRLKGPDALTKFMVIIHNAIGGQDYEKFPFSFFDKNGKYVQALLTANTRSKMDGKSIGAFCFLQIASTEIQQAFEIQRQQEKKCYARMKELAYICQEIKNPLSGIRFTNSLLQMTDLNDDQRQFLETSSACEKQMSKIVKDASLQSIEDGSLVLEQSEFSLGDVMNAVVSQAMLLLRERDLQLIRDIPDEIKDASAYGDQCRIQQVLADFLLSMVRSAPSENGWVEIQVRPNVKQNSDGTNTELFIFRFACPGEGLPADVVQDMFSNSQWSTQEGVGLSTCRKILKLMGGEVQYIRESERSFFLIVLELPQPRLAAGRENQLIC

SEQ ID NO: 3879 - protein, 638 aa, Zea mays
FYKASAAATEAAIHSPPPSRLVGGFEFELNERRLAPAVSLLSVPELVHLQHLRPLLALSQQQYQKPRPPHPPATMPSGDDSDPLLAPADGIRFAALDYRDHPADRGATGGWRSALFIIAVEISERFTFYGVSSNLINYLTGPLGEGTAAAAAAINTWNGVAQLLPLLGGALADKWLGRYRTIVVASLLYVIGAGMLAFSTLLSSGSGHQCTTAGGQTCAPSTIKVTFFYVSLYIVAVAQGGHKPCVQAFGADQFDQSDPKETVSRSSFFNWWYFGMCAGTAVTLLFLNYVQDNIGWGLGFGIPCAVMAAALAVFLLGTRRYRYYVTAGERGLFARAGEAFVEWRSRRKALQHGDRPVAEGAPGFSAGVDEEEQAAVSHDAGLVKETKDILRLFPIWATCLLYAVAFSQSSTFFTKQAATLDRRVGRHLQVPPAALQSFISITIVVFIPLYDRVLVPVARRYSGNPSGITMLQRIGTGMFLSLLSMVIAALVEKHRLRVAVDAGLVDKPMVPLPMSLWWMVPQYVLFGAADVYTMVGLQEFFYDQVPDKLRSLGLALYLSIFGVGSFISSTLVSIIDSVTTARGGSWFSNNLNRGHVDYFYWLLAALSALELLAYVFFAVTYKYKNKATVHATVVGQSL

SEQ ID NO: 3880 - protein, 180 aa, Zea mays
MYPAKPAASSSQPAAEMAQPVVGIPISSPGAVAVGPVVGKWSSGLCACSDDCGLCCLTCWCPCITFGRIAEIVDRGATSCGVAGTIYTLLACFTGCHWIYSCTYRSRMRAQLGLPEACCCDCCVHFCCEPCALSQQYRELKARGFDPDLGWDVNAQKAAAAAAMYPPPAEGMMIRKAKLS

SEQ ID NO: 3881 - protein, 426 aa, Zea mays
  misc_feature (154)..(154): Xaa can be any naturally occurring amino acid
  misc_feature (167)..(167): Xaa can be any naturally occurring amino acid
  misc_feature (374)..(374): Xaa can be any naturally occurring amino acid
  misc_feature (380)..(380): Xaa can be any naturally occurring amino acid
  unsure (1)..(426): unsure at all Xaa locations
MGFDKEASSSSSRLDAAPLLPQHGAGAGAGGHLSSQPKTFANVFIAVVGSGVLGLPYTFSRTGWAAGTLLLLAVAALTFHCMMLLVAARRRIADAHPKIASFGDLGHAIYGRPGRHAVDAMLVLSQASSCIGYLIFISNTMAHLYPIAIEGPVXESPLLTAKGALHXAMLPFQLGLNSIRTLTLLAPLSIFADVVDLGAMGVVLGQDASVWLADRPTVFAFAGPAQLLYGLGVAVYAFEGIGMVLPLEAEAADKRRFGAKLALSMTFIAVMYGLFGAKGYLASAAATRDIITTNLGTGWLSVLVQLGLCINLFFTMPVMMNPVYEVAERLLCGKRYAWWLRWILVVLVGLLAMLVPNFADFLSLVGSSVCVVLXFVLPAXFHLKVFGPEIGWAGLVADVAVIVIGIALAVSGTWTSLVQIFSSSAL

SEQ ID NO: 3882 - protein, 247 aa, Zea mays
MASARGPCGISVRSDFSSACLIHKAGAPSNSVSGVMAVQVHRHRNKVRNGQAIRCAMATGKEQGAISTASSGDQTKGGLRGKLNKVVLAYSGGLDTSVIVPWLRENYGCEVVCFTADVGQGAIELEGLEKKAKASGACQLVVKDLKEEFVSEYIYPCLRAGAVYERKYLLGTSMARPVIAKAMVDVAKEVGADAVAHGCTGKGNDQGDILEDPANEPKEDMYMMSIAPENAPSKPEYLEIGIIAGVP

SEQ ID NO: 3883 - protein, 148 aa, Zea mays
  misc_feature (51)..(51): Xaa can be any naturally occurring amino acid
  misc_feature (133)..(133): Xaa can be any naturally occurring amino acid
  misc_feature (146)..(146): Xaa can be any naturally occurring amino acid
  unsure (1)..(148): unsure at all Xaa locations
SDRIIAEYIWIGGSGIDLRSKSRTIEKPVEDPSELPKWNYDGSSTGQAPGXEDSEVILYPQAIFRDPFRGGNNILVICDTWTPAGEPIPTNKRAKAAEIFSNKKVSGEVPWFGIEQEYTLLQQNVKWPLGWPXVGAFPGPQGPYYXGV

SEQ ID NO: 3884 - protein, 249 aa, Zea mays
MVRGKTQMKRIENPTSRQVTFSKRRNGLLKKAFELSVLCDAEVALVVFSPRGKLYEFASGSAQKTIERYRTYTKDNVSNKTVQQDIERVKADADGLSKRLEALEAYKRKLLGERLEDCSIEELHSLEVKLEKSLHCIRGRKTELLEEQVRKLKQKEMSLRKSNEDLREKCKKQPPVPMASAPPRAPAVDNVEDGHREPKDDGMDVETELYIGLPGRDYRSSKDKAAVAVRSGLAATSATHRPNQRKLAS

SEQ ID NO: 3885 - protein, 228 aa, Zea mays
  misc_feature (176)..(176): Xaa can be any naturally occurring amino acid
  misc_feature (192)..(192): Xaa can be any naturally occurring amino acid
  unsure (1)..(228): unsure at all Xaa locations
MVRGKTQMKRIENPASRQVTFSKRRNGLLKKAFELSVLCDAEVALVVFSPRGKLYEFASGSAQKTIERYRTYTKDNVSNKTAHQDIEQVKADAEGLAKKLEALEAYKRKLLGERLEECSFEELHSLEVKLEKSLHCIRGRKTQLLEEQLHKLKEKEMNLRKSNEDLREKCKKQPPXRRPMLMAPPPPPAAGXIDHTGPKDVGMDVETELYIGLPGRDYRSNNKDMTAQ

SEQ ID NO: 3886 - protein, 369 aa, Zea mays
MMMMSEGVGMPPWSHHVPVSGVDEGDEMTPYLLAALRQYLPCNDAGAEAEAEEDEAAAAMAAGVDGYGCDEFRMYEFKVRRCARARSHDWTECPFAHPGEKARRRDPRKYHYSGAACPDFRKGGCKRGDGCDMAHGVFECWLHPARYRTQPCKDGTACRRRVCFFAHTADQLRVLPPTQQQQSSPRGAACSSPLAESYDGSPLRRQAFESYLTKSIMCSSPTSTLLSPPKSPPSESPPLSPDFRRGCWPGAGSPVNDVLASLRQLRLSRANSSPSGGWCGYPASAVAYGSPTGGAIYGLSSTPRATAASGYMANLDPLDVSFGGDEEPVERVESGRALRAKVFERLSREGAVSGDAGGPDVGWVSDIIN

SEQ ID NO: 3887 - protein, 463 aa, Zea mays
  misc_feature (351)..(351): Xaa can be any naturally occurring amino acid
  misc_feature (392)..(392): Xaa can be any naturally occurring amino acid
  unsure (1)..(463): unsure at all Xaa locations
CAFRRIGLHACATGTMWTASAHIITAVIGSGVLSLGWAIAQLGWVAGPVVMLLFSLVTYYTSSLLADCYRSGDPSTGKRNYTYMDAVNANLSGIKVQICGFLQYANIVGVAIGYTIAASISMLAIRRANCFHQKGHGNPCKISSTPYMIIFGVAEIFFSQIPDFDQISWLSILAAVMSFTYSSIGLGLGVVQVIANRGVQGSLTGITIGVVTPMDKVWRSLQAFGDVAFAYSYSLILIEIQDTIRAPPPSESTVMKRATVVSVAVTTLFYMLCGCMGYAAFGDGAPGNLLTGFGFYEPFWLLDVANAAIVVHLVGAYQVYCQPLFAFVEKWAAQRWPDSAYITGEVEVPLXPGQAGGRCCKVNLFRATWRTAFVVATTVVSMLLPFFNDVVXGFLGALGFWPLTVYFPVEMYVVQKKVPRWSSRWVCLQMLSLGCLVISIAAAAGSIAGIASDLKVYRPFKSY

SEQ ID NO: 3888 - protein, 197 aa, Zea mays
  misc_feature (106)..(106): Xaa can be any naturally occurring amino acid
  misc_feature (118)..(118): Xaa can be any naturally occurring amino acid
  unsure (1)..(197): unsure at all Xaa locations
PDKPGIAVSDSEEHHFKSKADAGSSKTYPQQDGTVRKNGFIDIKNRPCKVVEVSTSKTGNHGHAKCHFVDIDIFDGKKLQDIVPSSRDCDIPHENRTEYQLIDISXDGFESLLTSDGXTNDDLRLPTDETLEAQIKEGVESAKDLVVTVQSAIAEEHICALNDVAPKELPCLAILLSRNLYRIKKRIKDCYRDIHLA

SEQ ID NO: 3889 - protein, 182 aa, Zea mays
  misc_feature (84)..(84): Xaa can be any naturally occurring amino acid
  unsure (1)..(182): unsure at all Xaa locations
PLSISLLLRLLLEPAKTEHRHVRSSEEHRFESKADAGASKTYPQQGGTGRKNGFIVIKNRPCKVVEVSTSKTGKHGHAKCHFVXAIDIFNGKRLEDIVPSSHNCDIPHANRTEYQLIDISEDGFVSLLTSHGDTRDDLTLPTDETLVDQIEEGFESGKDLAETVQSAMGEEHICALKDVGPQ

SEQ ID NO: 3890 - protein, 411 aa, Zea mays
  misc_feature (108)..(108): Xaa can be any naturally occurring amino acid
  unsure (1)..(411): unsure at all Xaa locations
MCGGAILSGFIPPSGVPAAAAKKKQQRRATADLLWPGPGKKGASREEDFEADFREFERGLGEDDVDGAGDEVQELALPEPARLAFAAAVGAPRTASLFFLSRHIWHAXPTTANNSAANKRRRKNQYRGIRRRPWGKWAAEIRDPSKGVRVWLGTYSTAEEAARAYDAEARRIRGKKAKVNFRDEAAAAGAQKPPAATTPTACASAARLAPPPPPPKFRADEVFGNMDGGSNDLFAMLAFSDSKVKVVRVEPEVLVDEPLLPGSKRSAANMLLLSDQSSDSYGSCDLGWEWDWDDDTMTSDYASVFAPAAPSNVVPAWYTQGGPVSKRTRSSYGYGAAMPGGFDPETNYQYQPLPYVVESSPSDGASTDDMDCLQMMRAGDVPQDGASSGGGGGDGGDIWSLDELLMAAGAY

SEQ ID NO: 3891 - protein, 354 aa, Zea mays
MELGLSLGDAAVPDAGRAAPELGLGLGVGIGSNAAGTGRGSKAAGTTGTTGWWAAPAAPPGRPTRPPTRPLGLQWPPPDGGICHVGRDEAPARGFDVNRAPSVAGSALALEDDEEEPGAAALSSSPNDSAGSFPLDLGGPRAHAEGAAARAGGERSSSRASDEDEGASARKKLRLSKEQSAFLEESFKEHSTLNPKQKAALAKQLNLRPRQVEVWFQNRRARTKLKQTEVDCEYLKRCCETLTEENRRLHKELAELRALKTAPPFFMRLPATTLSMCPSCERVASGPSPASTSAPASSTPPATAATTAISYAAAAAAPVRADHRPSSFAALFAATRSFPLASQPRPPAPASNCL

SEQ ID NO: 3892 - protein, 379 aa, Zea mays
MLGPLLRLLSACGGVWPTSPAPGAAASSSASSGDDSEGRDGLLWWRDLARCHAGDVSVAVAQANQVLEDQCRLDSAPSIGTVVGVFDGHGGPDAARFACDHLVPNLREASSGPRGVTADAIREAFLATEEGFLALVSSLWEAQPDIATAGTCCLVGVVHNRTLFVANLGDSRAVLGKKAGRAGQIAAEQLSSEHNANQEAVRQELMAQHPDDAQIVALKHGVWRVRGLIRVSRSIGDVYLKHAKYNTDQIKPKFRLPESFSKPLLSADPSIISRDLEPNDCFIIFASDGLWEHLSNQEAVEIVHSHQRAGSARRLIKAALQEAARKREMRYSDLTKIDKKVRRHFHDDITVIVLFINYDLLLKGAPQGQPLSIRCALDY

SEQ ID NO: 3893 - protein, 588 aa, Zea mays
MCGILAVLGCSDCSQARRARILACSRRLKHRGPDWSGLYQHEGNFLAQQRLAIVSPLSGDQPLFNEDRTVVVVANGEIYNHKNVRKQFTGAHSFSTGSDCEVIIPLYEKYGENFVDMLDGVFAFVLYDTRDRTYVAARDAIGVNPLYIGWGSDGSVWMSSEMKALNEDCVRFEIFPPGHLYSSAGGGFRRWYTPHWFQEQVPRTPYQSLVLREAFEKAVIKRLMTDVPFGVLLSGGLDSSLVASVTKRHLVETDAAEKFGTELHSFVVGLEGSPDLKAAREVADYLGTTHHEFHFTVQDGIDAIEEVIYHDETYDVTTIRASTPMFLMARKIKSLGVKMVLSGEGSDELLGGYLYFHFAPNREELHRETCRKVKALHQYDCLRANKATSAWGLEVRVPFLDKEFVDVAMGMDPEWKMYDKNLGRIEKWVLRKAFDDEEHPYLPEHILYRQKEQFSDGVGYNWIDGLKSFTEQQVTDEMMNSAAQMFPYNTPVNKEAYYYRMIFERLFPQDSARETVPWGPSIACSTPAAIEWVEQWKASNDPSGRFISSHDSAATDRTGDKLAVANGGGHGAANGTVNGNDVAVAIAV

SEQ ID NO: 3894 - protein, 445 aa, Zea mays
  misc_feature (51)..(51): Xaa can be any naturally occurring amino acid
  unsure (1)..(445): unsure at all Xaa locations
MGRRLSATAAAAAASAEPLLPPALKRGVLIERCASHADDELQWFRSCLRWXCMDHSGPGQAALSWLLFLVLAAIVPAAAHFLLAFRASRRPFSAVVQLSLSAASAAGFLCLSSSFRRVGLRRLLHLDKLRSKSDRVRASYTARLAFSFRLLASLVAPCFAAEAAYKAWWYATSADRVPFFANDVLSDVLVCSLEMASWMYRSAIYLLTCVLFRLICHLQGLRLEDFAGSLLEEVEEGRAGVDAVLREHLDIRKQLKVISHRFRKFIVAALLIATASQFASVLLTTRRDSVDDLLNTGELALCSVVLMSGLIIILSSAAKITHQAQALTGHTTKWHACCTIEPVLEEGEPGSNQNSMIDQEPESDSDTEDSEETGDEDLLENTKIHMPHAHVISFQKRQALVTYLENNRAGITVFGFTLDRSYLHTIFMLEWTLFLWLLGKTIGFS

SEQ ID NO: 3895 - protein, 541 aa, Zea mays
  misc_feature (238)..(238): Xaa can be any naturally occurring amino acid
  misc_feature (256)..(256): Xaa can be any naturally occurring amino acid
  misc_feature (337)..(337): Xaa can be any naturally occurring amino acid
  unsure (1)..(541): unsure at all Xaa locations
MASDPSTFSPIGVDAMGGGYFMAGSSSYGGGGIMSAEVPHFHHPGVLLDQGGFGFGGLGNAAVVGGAATAADLGAHYAANNIVLASFASQLLANAPAPPRDDRAGGRTPPDEMDEELYGVAGCDSRVAASLRCPSQSGAMAVWSSPSSSKKPYGIWTSAGGPAHEPYHLAAAGLSDAGGLRYPLAACSGGNASAAAASELSLTLCSNSIASSDSALNATEQCSSGASRSALTELPRAXPGWPLHFAAVVARSRYAXAVVQDLLNDVVGHMLDGVADVTDDSCSGIGSVGAPSAVSSNRFMASTEDAGARWGQAQRVRSNLLKTLQLVTILFIHAINXNQNTTARVQPPDALRPRGGGGGGGGICAPFAHRAVSTMYRGLRRRLAGEIMAAASRASCWGESSSSVTVAAGGDVERSWESAFIQKHWSAQQLRRTEQQCWRPQRGLPEKSVAVLKAWMFENFLHPYPKDHEKDVLAARSGLTRNQVSNWFINARVRLWKPMIEEMYQDLKRSSGAGGGGHGPAMEPQQHLSKRRICELEDGGQ

SEQ ID NO: 3896 - protein, 242 aa, Zea mays
MDTRPHLTPLPPHPAIHQKQCKHMARRASLLLAAALLVAVAAAAVPPTCERIECPAYEVVDSANGFEIRRYTDAMWITTAPIEDISFVAATRTGFLQLFDYIQGKNAYNQTIEMTAPVLTRVSPSDGPFCASAFAVSFYVPAKNQADPPPAEGLRVDRWAGARYAAVRRFGGFVADADVGEQAARLEASLQGTRWAAAVNDARRADPASPYTVAQYNSPFEFTGRVNEIWMLFDADDDASTS

SEQ ID NO: 3897 - protein, 319 aa, Zea mays
DAWVCKQIHGSCTQCYRCSTYYHAICASRAGYRMELHCLEKNGRQTTKKISYCAQHRSPNPDNVLIIQTPAGTFSSKKLVHSNGKVAASRLIRKDIPLDLPSEVKISENLSAARCRVYVRKDLKRSREGTIVHHVRGPCQHRWEEIDNLNPPREERDPESFCTFKERLCYLQKTEHGRVCFGRSGIHRWGLFARRDIQEGEMVLEYRGEQVRRSVADLREEKYRVQGKDCYLFKISEEVVVDATDKGNVARLINHSCTPNCYARIMSVGHDESRIVLIAKKKVCAGDELTYDYLFDPDEADERKVPCLCQTANCRKFMN

SEQ ID NO: 3898 - protein, 379 aa, Zea mays
MAPQTATRVASGRLVFGAPTTTDGKLQVKGGSRLRVRSLDNNGRRVAVEAVNGAARPNGAAAVADVRRQVPAPPPPEGDGDGVAFRLGKFAEGRLVYRQQFVVRSYEIGPDRTATMETLMNLLQETALNHVMCSGLAGDGFGATRQMSLRKLIWVVTRINIQVDEYSRWGDVVEIDTWVASSGKNGMRRDWIIRDRNTKNMIARATSNWVMMNRETRRLSKIPDEVRQEVLPFYLDRSIIAAATGGGRKIEKLTDSTAEHIRSGLAPRWSDMDVNQHVNNVKYIGWILESVPLDVLEDYHLTSITLDYRRECRQSQLLESLTSMTTSSSAPAEPSLTSSLCGSDLHSTHLIRQQDDRAEIVRACAEWRRKEHPRSIEQL

SEQ ID NO: 3899 - protein, 389 aa, Zea mays
MAAPPRATAVLAWGSGEDGQLGMGGNEEKDWAHCVEALGSYAVTAVVAGSRNSLAICEDGRLFTWGWNQRGTLGHPPKTKTESSPGPVHALAGLKIVQAAIGGWHCLAVDDKGRAYAWGGNEYGQCGEEPERKEDGTRALRRDIPIPQRCALKLKVRQVAAGGTHSVVLTQEGHVWTWGQPWPPGDIKQISTPVRVQGLEKVRVIAVGAFHNLALTEDGILWAWGNNEYGQLGTGDTQPRSHPIRVEGLSDLSLVDIAAGGWHSTALTIQGEVYAWGRGEHGRLGFGDDKSSRMVPLKVELLAGEDIVQVSCGGTHSVALARDGRMFSYGRGDHGRLGYGRKVTTGHPMELPINLPPLSSSRDGRWQAKYVACGGRHTLAIAEWTEATD

SEQ ID NO: 3900 - protein, 378 aa, Zea mays
MKIVHRDLVRNGPGSVKLVPEEEDDLWHAYNLIAIGDSLQAVTVRKVLREVASGGRDAERVKLKLEIVVESVDYDKEGSVLRVRGKNITENDHVKIGQFHTLELELKRPFVLRKEIWDWLALETIQQACDPAASADLAVILMQEGLAHLFLIGKSITATRARIETSIPRKHGPAIAGYETALKKFFEYVLQAFLKHIDFEVVQCTVIASPGFTKDQFRDYLFLEAARRDLRVIIENKQRLVLAHATSGYKHSLKEVLDTPGVMALIKDTKAAQEVRALQDFFNMLTNESARACYGPKHVEFALQQFAIQTLLITDTLFRNADIATRQRYVKLVEDVKKNSGTVHIFSSMHVSGEQLAQLTGIAAILRFPLPELEDMEL

SEQ ID NO: 3901 - protein, 376 aa, Zea mays
MAMWRAAARQLVDRALGSRAAHTSTGSKKIVGVFYKAGEYADKNPNFVGCVEGALGIRGWLESQGHQYIVTDDKEGPNCELEKHIEDMHVLITTPFHPAYVTAERIKKAKNLELLLTAGIGSDHIDLPAAAAAGLTVAEVTGSNTVSVAEDELLRILILLRNFLPGYQQVVQGEWNVAGIAHRAYDLEGKTVGTVGAGRIGRLLLQRLKPFNCNLLYHDRLQIDPELEKEIGAKFEEDLDAMLPKCDVIVINTPLTEKTRGMFNKERIAKMKKGVIVVNNARGAIMDAQAVADACSSGHIAGYGGDVWFPQPAPKDHPWRYMPNHAMTPHISGTTIDAQLRYADGVRDMLNRYFKGEDFPVQNYIVKEGQLASQYQ

SEQ ID NO: 3902 - protein, 777 aa, Zea mays
MLLVMGNPGRSRQLSALVASAAILLSLSALPICRPYTYEQDVFAINGLYTALGAPQLPNWTSNGGDPCNEGWQGVSCVASNITSIILSGANLGGQLGNTLGNFTSLITLDLSNNNIGGTIPDGLPLTMQRFFLSANQLSGSLPSTLSSLTLLTSMSLNSNHLTGAIPDVFSALTGLANLDFSDNNLTGPLPPSMGNLTSLTSLHIQNNQISGTLNVLQDLPFQDLNVENNLFSGPVPVKLLNLPNFKKDGNPFNTSIAPSAQPPIAPTPLPSIPPSSGHVPLKEPAHSSSVPGGSTSGSGKHTTLKLVGYILIGVVLAVVLVLIAMYCLSKYKEKRSRDDIYMKNKIGRVPQKLGEPKIKEPPLKLKNDAEKAPNVVSDGREEHKLKVPTSETSNVVYDPSPRDGQNLDSSPTAVPLAVTMNKKEHVIDMEKADNFVEDQLHPPQPMALRTEKVTVNPSVRTRRGRVPSVEKVESTTTVKSFSIASLQQYTNSFSEENIIRDSRFGKVYLAKLPDGELLEILKIDSSNSKVPVDAFLELVVRISELRHPNILGLVGYCAEFEQRLLVYEYCSKMTLHDELRHVDDSSKPLSWNARLQVASEAAKALQHLHDGCQPPVVHQNFEPSVVLLNSTLVVHISECGLASLASKSVSQLSGHTLFHYEAPEVHESGSVSDRSDVYSFGVVMLELLTGRKPYDSSYPRAEQHLVRWATSQLYDIDAITKMVDPSIRGQCSDKALSRFADIISRCIQHEPEFRPPMSEVVQDLTRMVSNVSRASM

SEQ ID NO: 3903 - protein, 250 aa, Zea mays
MAGEDCRSGAEMDALVRRLKLHRPSPSPYDPDPAAAPVPATAGDGELFRPRRAAVLVCLFRGDGGELRVILTKRSSSLSTHSGEVSLPGGKVEEGDADDVATALRESKEEIGLDPALVTVVASLEHFLSKHLLVVVPVVGILLDRQAFKPALNIAEVDEIFDVPLEMFLKDENRTSEEREKMGQTFTVHYFTYENGIQKYLIWGLTARILIHAASVVYERPPDFTERRAHFKLPMFTKDCSSMLAGPAKH

SEQ ID NO: 3904 - protein, 193 aa, Zea mays
MGTMKRLLSIALAARGLPRSRGLPSTTSVMYRPAFQQFMNYSSPHGGDPNANMNSTATRIAADPDTHQDFEPKSRSSDMPLHAAIAQDIKENPVLIYMKGFPESPMCGFSALAVKVFQQYGVPICGRDILGDLKLKESVKAHTNWPTFPQIFIKGEFVGGSDIILSMHQKGELKDLLGDIAQRDEQKVHAHDS

SEQ ID NO: 3905 - protein, 166 aa, Zea mays
MDAVMFGLETPLMAALQHLLDVPDGDAGAGGDSDNKTGSGGSATRTYVRDARAMAATPADVKELPGAYAFVVDMPGLGTGDIRVQVEDERVLVVSGERRREEREDDAKYLRMERRMGKFMRKFVLPDNADVDKVAAVCRDGVLTVTVEKLPPPEPKKPKTIEVKVA

SEQ ID NO: 3906 - protein, 408 aa, Zea mays
MASAPGEVPSHFLCPISLQLMREPVTLPTGISYDRAAISRWLATPAPAGGRTCPVTRVPLPPQPQLTPNHTLRRLIHAWLASLSPEAEVNEDVAALRGPVPGAEVVVALLSDAAGAQVEALKRLRELVAECEDSRAVLESQDGVFDALSRVVSSADACSTAREEAVGLLASLRIPEPELAGVVARHSNLGDALTAVLRSSNLKSRANAALLVRSLSEASWPAWVIGLSQELLAEVVRVVRDRVSTQATKAALHALAALCPYGRTRVKIVGVGAVPAIVDLLLDDPERRVNELALVALDRLCTCAEGRAELVAHAAGLAVVGKKALRVSETASERAVRVLRSVARHAATPAVLQEMVESGVVAKLCAALWSQQCGLRTKQKAHEVLKLHSRTWRSSPCLSPKFLGLYPS

SEQ ID NO: 3907 - protein, 668 aa, Zea mays
PAMAPPAVAASAFPFRLFSAEARRNTKSGRGKRSAARPLKSSPPPRPPSSSSVIGGGVAATTFTRLPLRDAPESTEVTLDRFPTAPANPGAPALTLGSVQRLENEEFDVGWRPNSVARIPLRDSSDGVELTIGQFEARAAGRKSTGGRGFTRQTVERLGDDGEGEELVVTSLDVFEVKNGRRDRGLVPEVLDDGDDVVVFDPDYGVDSDDEEEEFEMFPFDKSHHEEADAVPRAEIGEVEYGDENDDNDGDEVVVFYADYDEEEDSEEDGYEVENAEEGEGDVKEKGVPAVMRCFDTAKIFAKAGDGGNGVVAFRREKYVPYGGPSGGDGGRGGDVYVQVDGEMNSLLPFRKSVHFRAGRGAHGMGQQQAGAKGEDVVVKVPPGTVVRTSDGGVELLELMKPGQRALLLPGGRGGRGNAAFKSGTNKVPRIAEKGEKGPEISSQRAESIELNYLNDYNNYPQIIQLYVSLTYNFLGMLVFGRWLELELKLVADVGIVGAPNAGKSTLLSVISAAKPAIANYPFTTLLPNLGVVSLDFDATMVVADLPGLLEGAHRGYGLGHEFLRHIRLELELFSPSLVDKPYVVVYNKMDLPEASERWNTFKERLQSEGIEPFCISAINRQGTQDVIHAAYKLLQKERQRMKETEALHLETTYFCRMERDRKSEPRV

SEQ ID NO: 3908 - protein, 279 aa, Zea mays
  misc_feature (233)..(233): Xaa can be any naturally occurring amino acid
  unsure (1)..(279): unsure at all Xaa locations
MRPVFCGNLDYDVRISEVERLFGKYGRVERVDLKTGFAFVYMEDERDAEDAISRLDGIDFGRKGRRIRVEWTKEDRTVGRKSSSRRSPTNTKPTKTLFVINFDPINTRIRDLERHFDKYGRVANVRIKKNFAFIQFEIQEDATRALEGTNGSHFMDRVISVEYALRDDDEKGERGNGYSPDRRGRERSPGRRRSPSPYGRGRERGSPDYGRSKERGSPDYGRGGRSPDNGRGXSPAGGGRGDHARGGGRSPDYDRQRREASPPGYDRSPSRSPGREARE

SEQ ID NO: 3909 - protein, 233 aa, Zea mays
  misc_feature (210)..(210): Xaa can be any naturally occurring amino acid
  unsure (1)..(233): unsure at all Xaa locations
MARILMRLLLLAAAAAVAAGDGCLNSGCVALGSYLVARNQNLTYIASLFGIGDYHALARYNPGTTNLDYIQAGQSVNISFTCGCHKFPNSDATYLGGSFPHKVVTGDTYGGIAQNYNNLTSAAWVVFFYPYPTNNIPDTNTVVNVTVNCTCGDPPPPPPHGFFLTYPLMGQTLAAVAANYSFNSSSQLDLLRKYNPGMDTATSGLVFIPXVKDGNGSYHPLKPPGNGGSIGAI

SEQ ID NO: 3910 - protein, 486 aa, Zea mays
MTQQDVEMAARHGTGADGAGFYPQPRNGAGGETLDDDGKKKRTGTVWTASAHIITAVIGSGVLSLAWSTAQLGWVVGPLTLMIFALITYYTSSLLADCYRSGDQLTGKRNYTYMDAVAAYLGRWQVLSCGVFQYVNLVGTAVGYTITASISAAAVHKANCFHNKGHAADCSTYDTMYMVVFGIVQIFFSQLPNFSDLSWLSIVAAIMSFSYSSIAVGLSLARTISGRSGTTTLTGTEIGVDVDSAQKVWLALQALGNIAFAYSYSMILIEIQDTVKSPPAENKTMKKATLMGVTTTTAFYMLAGCLGYSAFGNAAPGNILTGFGFYEPYWLIDFANVCIVVHLVGAYQVFSQPIFAALETAAAKRWPNARFVTREHPLVAGRFHVNLLRLTWRTAFVVVSTVLAIVLPFFNDILGFLGAIGFWPLTVYYPVEMYIRQRRIQKYTSRWVALQLLSFLCFLVSLASAVASIEGVTESLKHYVPFKTKS

SEQ ID NO: 3911 - protein, 357 aa, Zea mays
MASLTDLVNLDLSDCTDRIIAEYIWIGGTGIDLRSKARTVKGPITDPSQLPKWNYDGSSTGQAPGEDSEVILYPQAIFKDPFRKGNHILVMCDCYTPQGEPIPTNKRYSAAKVFSHPDVAAEVPWYGIEQEYTLLQKDVSWPLGWPVGGYPGPQGPYYCAAGADKAFGRDVVDAHYKACLYAGINISGINGEVMPGQWEFQVGPSVGISAGDEIWVARYILERITEMAGIVLSLDPKPIKGDWNGAGAHTNYSTKSMREAGGYEVIKAAIDKLGKRHKEHIAAYGEGNERRLTGRHETADINTFKWGVANRGASIRVGRDTEREGKGYFEDRRPASNMDPYVVTGMIAETTILWNGN

SEQ ID NO: 3912 - protein, 441 aa, Zea mays
  misc_feature (128)..(128): Xaa can be any naturally occurring amino acid
  unsure (1)..(441): unsure at all Xaa locations
MALLLHPRLPSHPFRAAAHHHHAISDASCFLTLHGPGRKRRMLLAAVTCRAARVKEPAPSAGASPPPPPQALTKEAHKYFDHAVVTVRAGDGGHGAVLAMPPAPSADAAKPRGRFNRGEKKSKKVSYXHYDGSVALPTGGHGGDVVVYADEAEETLLRFHEKARYCAKRGGNVGAAGGTLSSRMHSGFAGKTLRIPVPVGTVVKRKKGAVLADLAHHCDEVLVARGGQGGISLIDVPEYKRRKAMALSPNIMRDTSDKVLTHGQPGEEVSLELILRVVADVGLVGLPNAGKSTLLSAITLARPDIADYPFTTLMPNLGRLGGDPALGALQFSSEATLADLPGLIEGAHLGKGLGRNFLRHLRRTRVIVHVVDAAADDPVNDYKIVREELRMYNPQYLERPYVVVLNKIDLPKAQDRLSALVLEISSIGCEEGMSKVAAKIT

SEQ ID NO: 3913 - protein, 171 aa, Zea mays
MASLSPALLPGAGVTLLRAPPVFRVTASSSSSGSKKGKKPKSGSKGKDTKALEPPAPVVRRAPPGSASIFQQQKNEAASRAGGAGGKGPTEEELRQRQANENAFLLAWLGLGIIILVEGIALAASGFLPEEYDSFFVKYLYPSFTPTVVLFLAGTVGYGVLKYFESEKSKS

SEQ ID NO: 3914 - protein, 191 aa, Zea mays
  misc_feature (139)..(139): Xaa can be any naturally occurring amino acid
  unsure (1)..(191): unsure at all Xaa locations
MQRGDPLVVGRIIGDVVDPFVRRVPLRVAYAAREVSNGCELRPSAIADQPRVEVGGPDMRTFYTLVMVDPDAPSPSDPNLREYLHCMLQHTYCQDLVYILHLVRLVTDIPATTGVSFGTEVVCYESPRPVLGIHRVVFXLFQQLGRQTVYAPGWRQNFSTRDFAGLYNLGLPVAAVYFNCQRESGTGGRRM

SEQ ID NO: 3915 - protein, 435 aa, Zea mays
  misc_feature (335)..(335): Xaa can be any naturally occurring amino acid
  unsure (1)..(435): unsure at all Xaa locations
RRAGAAIRSVFVGRFAGDSIFQVGWFWHFGPAAMASDGIGPRDVCVVGVARTPMGGFLGALSPLPATKLGSIVIQAALERANVDPALVQEVYFGNVLSANLGQAPARQAALGAGIPNSVVCTTVNKVCASGMKATMFAAQSIQLGINDIVVAGGMESMSNAPKYIAEARKGSRFGHDTLVDAMLKDGLWDVYNDCAMGMCAELCADNHALTREDQDAFAIQSNERGIAARDSGAFAWEIIPVQVPVGRGKPPTLIERDESLDKFDPVKLKKLRPSFKENGGTVTAGNASSISDGAAALVLVSGQKAQELGLQVLARIKGYADAAQAPELFTTTPXALAIPKAIANAGLESSRVDFYEINEAFSAVALANQKLLGIPSEKINVHGGAVSLGHPLGCSGARILVTLIGVLRAKSGKIGVAGVCNGGGGASALVLELA

SEQ ID NO: 3916 - protein, 118 aa, Zea mays
AHFQLPGLTQSRMPLPLEVSEEPVYVNAKQYHGILRRRQSRAKAELEKKVVKARKPYLHESRHQHAMRRARGNGGRFLNTKKSDSGAPNGKAEPEKASENAEHLHVPPDLLQLRQNEA

SEQ ID NO: 3917 - protein, 204 aa, Zea mays
  misc_feature (139)..(139): Xaa can be any naturally occurring amino acid
  unsure (1)..(204): unsure at all Xaa locations
MSLPRRRHLVLLACLLVFLVFAASASTSSAEVAPSVAVDFVRRSCRSTEYPRVCESTLVPCAAGVGRSPRLLARAALVVGADRARNCSSYIRGGGGGAMKDCAELARDAEERLRQSAAEMERMGRAGTPRFAWSLSNVXQTWASAALTDTSTCLDSLAQQSRGGKDSDDAVRVKRRVVAVAQATSNALGLVNRLQPAPHRRRLL

SEQ ID NO: 3918 - protein, 589 aa, Zea mays
MALATPLRLRRHLLLPAGPSPATHRALSLRRGRLLPASLSAAAGGRPTVLVTETLGSAGLDLLRAFANVDCSYELTAEELRAKVSLVDALVVRSGTQVTREVFEAARGRLRVVGRAGVGIDNVDLQAATEAGCLVVNAPTANTVAAAEHAVALLAAVARNIAPADASLKAGKWQRGKYVGVTLVGKTLAVMGFGKVGPEVARRARGLGMDVVAHDPYAAADRARAVGVDLVSFDEAISTADFISLHMPLTPSTAKLFNDETFARMRKGVRIINVSRGGVVDEEALLRALDNGTVSQAALDVFTEEPPPRDSKLVQHENVTVTPHLGASTIEAQEGVALEIAEAVIGALRGDLAATAVNAPMVPAEVLSELSPYIVLAEKLGRLVVQLVAVGSGIKGVRVVYSSARDPDDLDTRLLRAMVTKGIVEPISSAFVNIVNADYVAKQRGLRIVEERVFLDGPPEVPLDSIQVHLANVESKFAGALSDAGHICVEGKVRDGGASHLTLVGSLSVDVSLEGNLILCGQLDHPGIIGRVGSILGKMNVNVSFMSVSRTAPGKQAIMAIGVDEEPGKEALKLIGDTPSVEEFVFLKL

SEQ ID NO: 3919 - protein, 136 aa, Zea mays
  misc_feature (78)..(78): Xaa can be any naturally occurring amino acid
  unsure (1)..(136): unsure at all Xaa locations
LPFLLLPREHLVRTRCGSVTVAVYGDEDKPALITYPDVALNYMSCFQGFFFCPEVASLLLHNFCVYHTNPQGHEESYXMGAASMFADVPVPSVADLADQVASVADLADQVADVLHFFRWREEVLLKSPLSVVEIGK

SEQ ID NO: 3920 - protein, 475 aa, Zea mays
MALGEGGDHGAALPLIADQAKHAAAGGIVRSGSMWTAAAHVITAVIGSGVLSLAWSIAQLGWVAGPAAMLVFAAVTALQSTLFADCYRSPDPEHGPHRNRTYAKAVDRNLGSNSSWVCMLLQHTALFGYGIAYTITASISCRQEAYLGLRLAAANCYHEHGHDAHCDYDGNYYMLIFGGVQLLLSFIPDFHDMAWLSVVAAAMSFSYAFIGLGLGLARTIANGTIKGSITGVRMRTPMQKVWRVSQAIGDIAFAYPYSLILLEIQDTLKSPPAENKTMKRASMISILVTTFFYLCCGCLGYAAFGSDAPGNLLTGFGLYGPYWLIDFANACIILHLLGGYQVYSQPIFQFAERLLAERFPDSGFVNGGSYTVRFACLRACRVNPLRVCLRTLYVASTTAVAVALPYFNEVLALLGALSFWPLAIYFPVEMYFIQRNVRRWSARWVVLQTFSVVCLLVSAFALVGSIEGLISKKLG

SEQ ID NO: 3921 - protein, 720 aa, Zea mays
MDFGDDVMDGGSDAQRRKKRYHRHTPRQIQQLEAMFKECPHPDENQRMQLSRELGLEPRQIKFWFQNRRTQMKAQHERQDNCFLRAENDKIRCENIAMREALRSVICPTCGGPPVADDYFDEQKLRMENARLKEEASRFAFTLDRVSSLTSKYLGRPITQLPPAQAALSMSSLDLSVGGLGSPSLDLDLLSGGSSGYPPFHLPMPVSEMERPMMAEMATRAMDELIRMAQAGEHLWVKAGGREVLNVDTYDSVFAKPGAASFRGPDVHVEGSRDSGLVFMSAVGLVDMFMDSSKWTEFFPAIVSKARTVDVLVNGMAGRSESLVLMYEELHVMSPVVPTREFCFLRYCRQIERGLWAIADISVDLQQHDARFGAPPSRSCRLPSGCLIADMADGSSKVLSLKVTWVEHMEIEDRVPIHLLYRDLILSGAAFGAHRWLAALQRACERCACLVPAGMPHRDIAVAGVNLMRKLLTAVTPEGKRSMMKLSQRMVSSFCASLSASQLHRWTTLSGPSDVGVRVTVHRSTDPGQPSGVVLSAATSIWLPVPCDRVFAFVRDEHTRSQWDVLSHGNPVQEVSRIPNGSHPGNCISLLRGLNASQNSMLILQESCTDGTGSLVVYAPIDIPAANVVMSGEDPSAIPLLPSGFTILPDGRPGAPSSSSAGGPLVGSPAAAGSLVTVAFQILVSNLPSSRLNAESVATVNSLIGTTVQQIKAALNCAGP

SEQ ID NO: 3922 - protein, 255 aa, Zea mays
MARVYVGNLDPRVTAREIEDEFRMFGVLRSVWVARKPPGFAFIDFDDRRDAQDAIRELDGKNGWRVELSTKVGGGRGRDRNGSDMKCYECGEAGHFARECRLRIGSGGLGSGRRRSRSPRYRSRSRSRSRSPRYRRSPSYSRSPRDRSPRRRSYSRSPLGSPARSLSRSPPLPPPPPRNNSRSPPGAREVSRSPPPPPPRNNSRSPPAARDVSRSPPAARDVSRSPPPPPDARRSYSGSPGQQPQRDESPYANDA

SEQ ID NO: 3923 - protein, 566 aa, Zea mays
MKGAVIGASTVLVVAVVATICVVSFKGSGDGGRAEEGEMSTSVKSIKSFCQPVDYRETCEKALEAAAGNATSPTELAKAIFKVTSDRIAKAVRESALLNELKHDRRTSGALHNCGELLDYAIDDLRTTFDRLGGFEMTNFKSAVDDLRTWLSSALTYQETCLDGFENTTTPAAGKMRKALNSSQELTENILALVDEFSETLANLGLPSFHRRLLAEHARGAPSWMPDAKRRLLLVSPGEKGFRPDVTVAKDGSGDFRTINAALAKVPLKSATTYVMYVKAGKYREYVSVARNVTNLVMVGDGATKTVITGHKSFMMNITTKDTATMEAIGNGFLMRGIGVKNTAGAKNHQAVALRVQSDMSAFYECRFDGYQDTLYTHTSRQYYRDCVITGTIDFIFGNAQVVFQNCLIQVRKCMDNQQNIVTAQGRKERRSVGGTVIHNCTVAPHPEFEKSVGRFRTFLGRPWKEHSRTLYIQSEIGGFIDPQGWLPWLGDFGLSTCYYAEVENHGPGANMTRRVKWRGIKNITYQHALQKYTVESFIQGQHWLPQLGVPFIPGLLPQQQSGRIH

SEQ ID NO: 3924 - protein, 450 aa, Zea mays
  misc_feature (57)..(57): Xaa can be any naturally occurring amino acid
  misc_feature (432)..(432): Xaa can be any naturally occurring amino acid
  unsure (1)..(450): unsure at all Xaa locations
MPFRSIVRDVRDGFGSLSRRGFEVRFLSHRRGKSHGAVHELHDPVLVVQSSCWASLXPPELLRDVIERLETSEDTWPSRKHVVACAAVCRTWREMCREIVKSPEFSGKITFPVSLKQPGPRDGTIQCFIKRDKSTQIYSLYLSFSSAVPVENGKFLLSAKRNCRATYTEYIISINSGDTSRCTSNNTYIGKLRSNFLGTKFVIYDTHPPYNGTSQTVAGKTSQRFYSKKGSTKVSCRWYSIAQISYELNVLGTRGPRRMNCVMHSIPASCLEAGGSVPCQPDSIAAHSVGGSFSSVSLSKSSTMDHSMHFTSSRLSDAITGDGIVNRGQALNDADDEECKDMPLILRNKAPRWHEQLQCWCLNFRGRVTVASVKNFQLVAATQPAAGALTPSQAAPQPAPPPPPDQEKVILQFGKVGKDIFTMDYCYPLSAXFQAFAICLSSFDTKLACE

SEQ ID NO: 3925 - protein, 566 aa, Zea mays
MSKGAIIGASTVLVVAVVAAVCVVSFKGNSGKGDGDENLSMSVKSVKAFCQPADYKETCEAELSKAAGNASSPSDLAKVIFKVTSDKIHKAISESATLEELKNDPRTSGALHDCKEMLGYAIDELKSSFDKLGGFEMTNFNKAVDDLKTWLSAALTYQDTCLDGFANATTTEASAKMQKALNASQELTEDILAVVDQFSDTLGGLSIGRRLLLTPSWVSEPADPARQRLLAADSPAGSPDFKPNVTVAADGSGDVKTIMEALEKVPVKNADLYVVYVKAGTYKEYVTVGRPQTNVAFIGDGAEKTIITGNKNFKMNLTTKDTATMQAIGNGFFMRDIRVENTAGPENHQAVALRVQSDLAVFYQCTFDGYQDTLYTHAQRQFFRDCRVTGTIDFIFGNSQVVLQNCLIQPRKPMENQANIITAQGRRDKRSVGGTVLHNCTIEPHPDFKEEAGGKIRTYLARPWKEYSRTIYIQNDIGGFIDPKGWLEWNGDFGLETLFYAEVDNRGDGADMSKRAKWGGIKTVTYEEAQKEFTVETFIQGQQFIPKFGVPFIPGLLPQEQKGRTH

SEQ ID NO: 3926 - protein, 343 aa, Zea mays
  misc_feature (285)..(285): Xaa can be any naturally occurring amino acid
  misc_feature (292)..(292): Xaa can be any naturally occurring amino acid
  unsure (1)..(343): unsure at all Xaa locations
MERYEVIRDIGSGNFGVTKLVRDVSTKELFAVKFIERGQKIDEHVQREIMNHRSLKHPNIIRFKEVVLTPTHLAIVMEYAAGGELFERICSAGRFSEDEARFFFQQLISGVSYCHSMQVCHRDLKLENTLLDGSVAPRLKICDFGYSKSSVLHSQPKSTVGTPAYIAPEVLSRKEYDGKVADVWSCGVTLYVMLVGAYPFEDPDDPKNFRKTITRILSVQYSIPDYVRVTMECGHLLSRIFVGNPEQRITIPEIKKHPWFLKNLPIEMTDEYQQSMQLADMNTPXQSLEEVXMAIIQEARKPGDAMNLAGQLPCLGSVDLDDIDFDDIDDIDTENSGDFVCAV

SEQ ID NO: 3927 - protein, 198 aa, Zea mays
  misc_feature (12)..(12): Xaa can be any naturally occurring amino acid
  unsure (1)..(198): unsure at all Xaa locations
FGTRGEERRGGXMAAQEQEHEKQQAKTSTTSSLPSSSERSSSSAPNNLREGGVESDEEIRRVPELGGASASASASSGAGKEDGARAVAAGAQGHPPAAGKKRGRAPGDKEQNRLKRLLRNRVSAQQARERKKAYLTELEARAKDLELRNAELEQRVSTLQNENNTLRQILKNTTAHASKRSGGGKGGDGGKKHHFAKS

SEQ ID NO: 3928 - protein, 482 aa, Zea mays
MAASVTVENLNPKVLKCEYAVRGEIVIHAQRLQQQLQTQPGSLPFDEILYCNIGNPQSLGQQPVTFFREVLALCDYPCLLEKEETKSLFSADAISRAKQILATIPGRATGAYSHSQGIKGLRDAIAAGIMSRDGFPANADDIFITDGASPGVHMMMQLLIRNEKDGILCPIPQYPLYSASIALHGGALVPYYLNEKTGWGLEISDLKMQLENARSKGIDVRALVVINPGNPTGQVLAEDNQYDIVKFCKNEGLVLLADEVYQENIYVDNKKFNSFKKIVRSMGYGEDDLPLVSLQSVSKGYYGECGKRGGYMEITGFSAPVREQIYKIASVNLCSNITGQILASLVMNPPKVGDESYASYKAEKDGILESLARRAKALEDAFNKLEGFSCNKAEGAMYLFPQILLPQKAIEAAKAAKKAPDAFYALRLLESTGIVVVPGSGFGQVPGTWHIRCTILPQEDKIPAVISRFRAFHEAFLAEYRD

SEQ ID NO: 3929 - protein, 192 aa, Zea mays
MAPPQKLFLAAIVSAVIVAATTGHGPNSTAEDIVHSSCVHASYPSLCVRTLSTYSGPTITNQRELAQAAVKISLSHAQAAAKKLAAVRETVGKKRVKAAVVDCVEMIGDSVADLSRTLGVLKHLHVSGGSANEFRWQMSNAQTWASAALTDDDTCLDGFKGVEGKVKTDVKQWMTKVARVTSNALYMINQLD

SEQ ID NO: 3930 - protein, 427 aa, Zea mays
  misc_feature (245)..(245): Xaa can be any naturally occurring amino acid
  unsure (1)..(427): unsure at all Xaa locations
MPCGPTTTTFQPPVPAAPPVEEAYRGQQQPWAYQQQQAAGMDAGSSQAAYGGPFHQAASSDAAAMAPHVPASGGYSHQAQQSQRRSSDDGYNWRKYGQKQVKGSENPRSYYKCTFPSCPTKKKVERSLDGQITEIVYKGTHNHAKPQNTRRNSSSAAAAQLLQGGDASEHSFGGMSGTPAATPENSSASFGDDEVGVGSPRAGNAGGDEFDEDEPDSKRWRKDGGDGEGISMAGNRTVREPRVVXVQTMSDIDILDDGYRWRKYGQKVVKGNPNPRSYYKCTTVGCPVRKHVERASHDLRAVITTYEGKHNHDVPAARGSAALYRPAPPTADTAGHHYLAAARPGVAYQTGQQYGFGDQLGSFGLSGAPAQSGGGGFAFSSGFDNPMGSYMSQHQQQQRQNDAMHASRAKEEPREDMFFPTSLLYTD

SEQ ID NO: 3931 - protein, 326 aa, Zea mays
MDIMALNARDEEQYGNNHLGLGLSLSLGLGVATAAPVEVEPPPPPRQQQQRAISVAPITSLPAPQWWKWNSPGLFFGTTMDPSLERNQQQQQPAAARHGHEMPFLRGVDVNRAPAGETRRGSCSEDDEEPGGASSSPNSTLSSSLSGKRAAPARSGGEVADHTPRAGGGSDDEDSGGGSRKKLRLSKDQAAVLEESFKEHNTLNPKQKAALAKQLNLKPRQVEVWFQNRRARTKLKQTEVDCEFLKRCCETLTEENRRLQQEVAELRALKLVAPHHYARMPPPTTLTMCPSCERLASASASADQAGRAGPCWGPLPVFVDGPARRP

SEQ ID NO: 3932 - protein, 320 aa, Zea mays
MASSSVSSCLLLLLCLAAVASAQLSPTFYDSSCPNALSTIKSAVNAAVQKENRMGASLLRLHFHDCFVQGCDASVLLADNAATGFTGEQGAAPNAGSLRGFDVIANIKAQVEAVCKQTVSCADILAVAARDSVVALGGPSWTVPLGRRDSTTASLSLANSDLPPPFFNLGQLITAFGNKGFTATEMATLSGAHTIGQAQCKNFRDHIYNDTNINQGFASSLKANCPRPTGSGDGNLAPLDTTTPYSFDNAYYSNLLSQKGLLHSDQELFNGGSTDNTVRNFASNSAAFSSAFAAAMVKMGNLSPLTGSQGQIRLTCSTVN

SEQ ID NO: 3933 - protein, 178 aa, Zea mays
  misc_feature (146)..(146): Xaa can be any naturally occurring amino acid
  unsure (1)..(178): unsure at all Xaa locations
MAKMGLKPDPVTPNPTHNNAKEIRYRGVRKRPWGRYAAEIRDPGKKTRVWLGTFDTAEEAARAYDKAARDFRGAKAKTNFLELNEKVLSGGGGFARSPSQSSTLDYASPPAVTDGIVPPQLELSLGGGGGACYQIPMARPLYFLDXLMGVGNGGRGQLPVSPGDACLLRRNGLCGAQE

SEQ ID NO: 3934 - protein, 295 aa, Zea mays
  misc_feature (28)..(28): Xaa can be any naturally occurring amino acid
  unsure (1)..(295): unsure at all Xaa locations
RPNPAPPELRDAGRDILDPAPGEPDFDXPEHIKQAAYAAIAAGATKYTPTPGVKALRVAVQRKLAEENHLDYSLPNIVIANGAKQIIFNAFAATLDDGDQVLVPTPYWPSFPDSVRFNGGEPVFIECGLEQGCKLLPAQLEQHINQRTRWLILNGPGNPSGAVYSEVELQALAEVLRRHPQVLVLLDELYEHIRFDGRPAQSLLNVAPDLQDRCLLVGGVSKTYAMTGWRIGFGAGPQTLTNAMAVVQSQSTSGASSVGQAAALAAFTGGLGFLAEQVAAYQLRRDLLMMALGTG

SEQ ID NO: 3935 - protein, 186 aa, Zea mays
MALCSIFCPRIPVRFRPKPISPLLSKPLFPLSYRVYSSLQPTPSTKDELGSVSIGFLGMGIMGSPMAQNLLKAGCDVTVWNRTKSKCDPLVGLGAKYKSSPEEVTATCDLTFAMLADPESAIDVACGKNGAVSGISSGKGYVDVSTVDAASSILISKQIKDTGALFLEAPVSGSKKPAEDGQLIFL

SEQ ID NO: 3936 - protein, 168 aa, Zea mays
  misc_feature (43)..(43): Xaa can be any naturally occurring amino acid
  misc_feature (147)..(147): Xaa can be any naturally occurring amino acid
  unsure (1)..(168): unsure at all Xaa locations
MPPPQSGMTLCRLPKATLGLPLSLPSLLYRPSLSLAARRTKAXAARASSSSPSPDSSFGSRMEDSVKKTVADNPVVIYSKSWCSYSMEVKSLFKRIGVQPHVIELDNLGAQGPQLQKVLERLTGQSTVPNVFIGGKHVGGCTDTVKXLYRKGELASMLSDLDINIDNS

SEQ ID NO: 3937 - protein, 169 aa, Zea mays
  misc_feature (36)..(36): Xaa can be any naturally occurring amino acid
  misc_feature (104)..(104): Xaa can be any naturally occurring amino acid
  unsure (1)..(169): unsure at all Xaa locations
MCGGAILANLFDPAQRRLTERDIWPPIKKLKSGGGXRRPSFAAEDDEDFEADFEDFKADSSESHLELTEGTDDHAVEINPFTAKRTFSSDGLSTMTSAAARAAXRNRKNLYRGIRQRPWGQWAAEIRDAQKVVRVWPGTFHTPEEAARAYDAEPCRIRGQNAKVNSPDA

SEQ ID NO: 3938 - protein, 172 aa, Zea mays
  misc_feature (141)..(141): Xaa can be any naturally occurring amino acid
  unsure (1)..(172): unsure at all Xaa locations
EHHFKSKADAGVSDTYPQQAATVRKNGFIAIKNRPCKGVQVSTSKTDKHGHAKCHFVSHYTYSYWKKLEDIVPSSHDCDIPHVNRTEYQLIDISEDGSLLSLLTSDGNTKDDLRLPTDETLVSQISEGIESVKDLAVTVQXAMGEEHICAMKDVAPKNTSLALETEPYSIST

SEQ ID NO: 3939 - protein, 323 aa, Zea mays
MAAAARQRGTVKWFNDTKGFGFISPEDGSEDLFVHQSSIKSEGFRSLAEGEEVEFSVSEGDDGRTKAVDVTGPDGSFVRGGGGGGGGGGGGYGSRGGGGSGGGGRSYGGSWGGGRRSAPDAAFGSVLSGTAGDAAPSDQWFVDALNAPAPHPIERVRSESSSIVSDVPDYLFSLDSPSDDPSPGPSAARAKSDATETPHHHGDDVPPSARQIPHVAGGASSWPAPPPPYMAQPMYYFPVPPPVHYLDQSAQSGYMPRPIYHIVGGGGSEAPGGDLHAAGGVYGVSHHMQGFPPMMYAPPRAVIYNYKSEGMPSLPPEGGAHSS

SEQ ID NO: 3940 - protein, 304 aa, Zea mays
  misc_feature (192)..(192): Xaa can be any naturally occurring amino acid
  unsure (1)..(304): unsure at all Xaa locations
MEQQFIHFGSNSSFYSTPTPPPPPPPHEAPPPLCSSPMPSAFDMGDTDDMHLLNTLLLHMSGGTASSSHMEAAHYSFDLDMDMDMEPSSSSTSSSSSYSSSEQQQQQQGMPTTTAATAGQSPSKRRASQQTQQLHPAATKGLIGVRKRPWGKFAAEIRDSTRKGARVWLGTFNTPEAAAMAYDQAAFSVRGXAAVLNYPVDRVQESLRTLALRPDVPGGSPVLALKRRHSIRKRSPNKAKKAALEPTKMMKESTSSAGVVELEDLGADYLEELLRGVRQAVRIIPHASLCRPPTSNHADVIPSC

SEQ ID NO: 3941 - protein, 295 aa, Zea mays
  misc_feature (84)..(84): Xaa can be any naturally occurring amino acid
  unsure (1)..(295): unsure at all Xaa locations
MYSNFKEQAIEYVKQAVQEDNAGNYVKAFPLYMNALEYFKTHLKYEKNPKIKEAITAKFTEYLRRAEEIRAVLDEGGAGPGANXGGDGTRATRPKTKGKDGDGGNGGDDSEQSKLRAGLNSAIITEKPNIKWNDVAGLESAKQALQEAVILPVKFPQFFTGKRRPWRAFLLYGPPGTGKSYLAKAVATEADSTFFSISSSDLVSKWMGESEKLVANLFQMARENAPSIIFIDEIDSLCGQRGEGNESEASRRIKTELLVQMQGVGHNDDKVLVLAATNTPYALDQVTKNLPNTPS

SEQ ID NO: 3942 - protein, 154 aa, Zea mays
MDARMFGLETPRVAALHHLLDVPDGDKAGGGATRTYVRDARAMAATPADVKELAGAYAFVVDMPGLSTGDIRVQVEDERVLVISGERRREEREDAKYLRMERRMGKFMRKFVLPDNADVDKVAAVCRDGVLTVTVEKLPPPEPKKPKTIEIKVA

SEQ ID NO: 3943 - protein, 357 aa, Zea mays
MASLTDLVNLDLSDCTDRIIAEYIWVGGSGIDLRSKARTVKGPITDPSQLPKWNYDGSSTGQAPGEDSEVILYPQVIFKDPFRKCNNILVMCDCYTPQGEPIPSNKRYKAATVFSHPDVAAEVPWYGIEQEYTLLQKDVSWPLGWPVGGYPGPQGPYYCAAGADKAFGRDVVDAHYKACLYAGINISGINGEVMPGQWEFQVGPSVGISAGDEIWVARYILERITEMAGIVLSLDPKPIKGDWNGAGAHTNYSTKSMREAGGYEVIKEAIEKLGRRHREHIAAYGEGNERRLTGRHETADINTFKWGVANRGASIRVGRDTEKEGKGYFEDRRPASNMDPYVVTGMIADTTILWKGN

SEQ ID NO: 3944 - protein, 361 aa, Zea mays
MCGGAILAELREPAPRRLTERDIWQQKKKPKRGGAGGRRSFAAEDDEDFEADFEDFEADSGDSDLELGEGADDDVIEIKPFAAKSTFSRDGLSTMTTAGYDAPAARLAKRKRKNQYRGIRQRPWGKWAAEIRDPQKGVRVWLGTFNSPEEAARAYDAEARRIRGKKAKVNFPDAPAVGQKCRSSSASAKALKSCVEQKPIVKTDMNILANTNAPFYQSVNYASNNPFVPAMNSTVSFEDPIMNLHSDQGSNSLGCSDLGWENDTKTPDITSIAPIPTIAEGDESVFVNSNSNSSMVPPVLENNAVDLTDGLTDLESYMRFLMDGGASDSIDSLLNLDGSQDLGSNMDLWTFDDMPIAGDFF

SEQ ID NO: 3945 - protein, 208 aa, Zea mays
  misc_feature (200)..(200): Xaa can be any naturally occurring amino acid
  unsure (1)..(208): unsure at all Xaa locations
MSALADLINLDLSDSSEKIIAEYIWIGGSGLDMRSKARTLPGPVKDPSELPKWNYDGSSTGQAPGDDSEVIIYPQAIFKDPFRRGNNILVMCDAYTPAGEPIPTNKRHAAAKIFSDPTVAAEETWYGIEQEYTLLQKDTKWPVGWPVGGFPGPQGPYYCGVGADKAFGRDIVDAHYKACLYAGINVSGTNGEVMPGPWEXFHAGPTVG

SEQ ID NO: 3946 - protein, 197 aa, Zea mays
MSLPRRRHLVLLACLLVFLVFAASASTSSAEVAPSVAVDFVRRSCRSTEYPRVCESTLVPCAAGVGRSPRLLARAALVVGADRARNCSSYIRGGGGGAMKDCAELARDAEERLRQSAAEMERMGRAGTPRFAWSLSNVQTWASAALTDTSTCLDSLAQQSRGGKDSDDAVRVKRRVVAVAQATSNAPGTVLTYFMRS

SEQ ID NO: 3947 - protein, 129 aa, Zea mays
  misc_feature (26)..(26): Xaa can be any naturally occurring amino acid
  misc_feature (54)..(54): Xaa can be any naturally occurring amino acid
  unsure (1)..(129): unsure at all Xaa locations
HILLLDHTNAYIPHVNRTEYQLIDIXSEDGFESLLTSNGSTKDDLNLPTDETLXCQINDMTQKAGRMLDETDQPAMGEEQICSLKDAGPKKLPWLWRRNPTVSQLKSEKKCFTKGLLPRHSPVLSCLLL

SEQ ID NO: 3948 - protein, 75 aa, Zea mays
  misc_feature (48)..(48): Xaa can be any naturally occurring amino acid
  unsure (1)..(75): unsure at all Xaa locations
NGPPGRYQFIFISKDGFVSLFSSDGNPKDGFCLPTDETFVGPIKEGFXNGKVFVVAVQFFMGEEQICALKNVGPK

SEQ ID NO: 3949 - protein, 249 aa, Zea mays
  misc_feature (184)..(184): Xaa can be any naturally occurring amino acid
  unsure (1)..(249): unsure at all Xaa locations
MAAAARQRGTVKWFNDTKGFGFISPEDGSEDLFVHQSSIKSEGFRSLAEGEEVEFSVSEGDDGRTKAVDVTGPDGSFVRGGGGGGGGGGGGYGSRGGGGSGGGGRSYGGSWGGGRRSGGGGGPGACYKCGEPGHMARDCPSADGGGYGGGGYGGGGYGGGGGGGGGGCFKCGEPGHMARDCSSXGGGYGGGGGGGGGGCYNCGQAGHMARDCPSGGGGGGGRFGGGGGGGDRSCYNCGEAGHIARDCPT

SEQ ID NO: 3950 - protein, 287 aa, Zea mays
  misc_feature (212)..(212): Xaa can be any naturally occurring amino acid
  unsure (1)..(287): unsure at all Xaa locations
MAQDDQSAARSTGTVNWFSDAKGYGFIAPDDGGDELFVHQSSIVSDGFRTLTVDEPVEYAIAVGNDGKTKAVDVTAPGGGSLNKKEMSSRGNGGSCFSCGEVGHMAKDCAGGKRYGGGGRRSGGEGSCYVCGNVGHFARDCRQNAGGNSGGGGGGECYNCGVVGHMAKDCRGGNRYGGRGSGGEGCYTCGDVGHFARDCRANGGGNVGGGWXGNTCYTCGGVGHMARVCTSRRPSGTGTGGGGPCYECGGIGHLARDCDRRGSGRSGGTCFTCGEEGHFARDCSSLA

SEQ ID NO: 3951 - protein, 224 aa, Zea mays
MSDTILVINAGSSSIKFYLYDIDDKQALAPRLGGQLEGIGTSHPRLRVRDAAGQTLVERDIAPSHAPDVPNGQEVVGTWLSGHLGGAPLAVGHRVVHGGPDLSEPVLIDDDILARLEAFTPLAPLHQPNNLAPIRVIRERRPWIPQVACFDTAFHRSHSDVADRYALPESLYQQGVRRYGFHGLSYEYIAQRLRQALPEIAMGKIIAAHLGSGVSACAMHQGKS

SEQ ID NO: 3952 - protein, 110 aa, Zea mays
  misc_feature (34)..(34): Xaa can be any naturally occurring amino acid
  unsure (1)..(110): unsure at all Xaa locations
DAYVSLLTSYAITKNDIRLAPDQTLVAQIKEGFXSWKDPVVSVQSAMGEDQICALKHVGPKYLPWLWIRTRAVSQHKSEKKCITKRIATKTFTWLELAFAIACKGLLVVV

SEQ ID NO: 3953 - protein, 296 aa, Zea mays
  misc_feature (30)..(30): Xaa can be any naturally occurring amino acid
  unsure (1)..(296): unsure at all Xaa locations
QLKSLVGITGVISEIHQERKGRDVYILGSXNVGKSAFISAMLRTMAYKDPVAAAAQKYKPIQSAVPGTTLGPIQIEAFLGGGKLYDTPGVHLHHRQAAVIHADDLPSLAPQSRLKGRCFPANDTDVELSGNSLFWAGLVRIDVIKALPRSRLTFYGPKKLKINMVPTTEADQFYETEVGVTLTPPTGKERAEGWTGLQGVRELKIKYEERDRPACDIAISGLGWISVEPSGVPSNSADDHAEEVYDGGELHLVVHVPKPVEVFMRPPLPVGKAASQWYRYQELTEEEEELRPKWHY

SEQ ID NO: 3954 - protein, 171 aa, Zea mays
  misc_feature (46)..(46): Xaa can be any naturally occurring amino acid
  misc_feature (72)..(72): Xaa can be any naturally occurring amino acid
  misc_feature (88)..(88): Xaa can be any naturally occurring amino acid
  unsure (1)..(171): unsure at all Xaa locations
ITYQAHGRLSPCPCASASFLSQPSAGIAHGDSEGHHFESKAEAGAXKTYPQEAGTGRKNGFIGIKNRPCEGXEGSTSKSWKDGHAKCXHFGAHRKVEDIGPSAHNWDIPHGNRTEYQVIDISEDGFGSLLTSEGNTKEDLRLPTDETLGAQIKEGFESGKDLGGTGQAAMG

SEQ ID NO: 3955 - protein, 459 aa, Zea mays
MAKALLYSSLLPGLPRAVGSSRSAAARLLLLPPLRLRRGRRAASACAVRAGLHGLDSVGGPHLQAALERAEAALYTLADAAVAAADAAAGAGDDAGQAAAAVQKNGGWFGFISEALEVVLKVLKDGLSAVHVPYSYGFAIILLTIIVKAATLPLTKKQVESTMAMQNLQPQLKAIQQRYAGNQERIQLETARLYRQAGVNPLAGCFPTLATIPVWIGLYQALSNVANEGLLTEGFFWIPSLGGPTTIAARQSGAGISWLFPFVDGHPPLGWYDTICYLVLPVLLVASQYVSMEIMKPPQSDDPSQKNTLLVLKFLPFMIGYFSLSVPSGLSIYWFTNNVLSTAQQVWLRKMGGAKPVVSEGDRRIITAGRAKRSNAQPAGERFRQLKEEESMRKVNKALAAGDSNASSSTYDMEDEESDDETTEEGGPVEEASSTGSDKKPPSYSGKKGKRSKRKRMVQ

SEQ ID NO: 3956 - protein, 489 aa, Zea mays
RGAAPQSLTRHEVAGNHVQSRRTELPEPQKPLVDDDGRPLRTGTLWTASAHIITAVIGSGVLSLAWGVAQLGWAGGPAAMVLFAAVIYYTSTLLAECYRCGDPTFGPRNRTYIDAVRATLGDSKERLCGAIQLSNLFGIGIGVSIAASVSMQAIRRAGCFHYRGHEDPCHASTSPYIAVFGVMQIVFSQIPDLDKVWWLSTVAAIMSFSYSTIGILLGVVQIVEHGGPRGSLAGVIGAGARVTMMQKVWRSLQAFGNIAFAYGFSIILLEIQDTIKSPPPSEAKVMKKATAVSVAVTTVIYLLCGCVGYAAFGGAAPDNLLTGFGFYEPFWLLDVANAFVVVHLVGTYQVMSQPVFAYVERRAAAAWPGSALVRDRHVRVGRAVAFSVSPARLAWRTAYVCVTTAVAMLLPFFGSVVGVIGAASFWALTVYLPVEMYIAHPRVARGIMRWLLLQGLSAGCLVVSVAAAAGSIAGVVEDLKAHNPFCWSC

SEQ ID NO: 3957 - protein, 632 aa, Zea mays
PLTPKRRRDLLRWPLPAPSIPTAHTASTTPPTPPLAPPSPRRPNATMRHLLLSRFLRRGGGSGIPNGHYHHLPLLRALSSSPSPVSSDAELRKYAGYALLLLGCGAATYYSFPFPADALHKKAVPFRYAPLPEDLHAVSNWSGTHEVHARVLLQPDSLPALEGALAAAHKERRKLRPLGSGLSPNGIALSRAGMVNLALMDKVLDVDAKKKTVTVQAGIRVAELVDALREHGLTLQNFASIREQQVGGFTQVGAHGTGATLPPVDEQVISMKLVTPAKGTIELSREKDPELFYLARCGLGGLGVVAEVTLQCVERHQLVEHTFVSNADEVKKNHKKWLSENKHIKYLWIPYTDTVVVVQCNPPSKWITPKLASKYGKDEALQHVRDLYRESLKKYRTETESKDPEIDTLSFTELRDKLLALDPLDKDHVVKINKAEAEYWKKSEGYRMGWSDEILGFDCGGQQWVSENCFPTGTLAKPSMKDLDYIDKLLQLIEKEEIPAPGPMEQRWTARSKSPMSPASSSEEDDVFSWVGIIMYLPTSDARQRKEITEEFFSYRSLARSLWDDYSAYEHWAKIEVPKDKDELAELQARLRKRFPVDAYNKARMELDPNKVLSNAKLEKMFPVLEPPHQTK

SEQ ID NO: 3958 - protein, 118 aa, Zea mays
MANRAGEPVARTNSDGGGGGSKDSGSFECNICLDLAQDPVVTLCGHLFCWPCLYEWLHVHAHSQECPVCKAVVEEGKLVPLYGRGGSSAVPRARSGGRWGSYTFSAAIGGLFPLLSFQ

SEQ ID NO: 3959 - protein, 343 aa, Zea mays
  misc_feature (319)..(319): Xaa can be any naturally occurring amino acid
  unsure (1)..(343): unsure at all Xaa locations
MLPLVLATLTSVLLAGPAADHGALGSPPPDPVQCSSGGGTADCTVSSAYGVFPDRSTCRASAAVYPASEDELVRAVAGAAAAGTKMKVATRYSHSIPPLACPGSGRGEGLVISTRRLDRVVSVDPAAGRVTVESGVTLRDLVEEAAKAGLALPYEPYWWGLTVGGMLGTGAHGSSLWGNGSAVHEYVVGMRIVTPAAAAEGYAKVRVLTAADPDLDAAKVSLGVLGVISQVTLALQPLFKRSVTFSERDDDDLAEQVGTFGYRHEFADIAWFPGHGRAVYRIDDRLPLSAPGDGAMDFIGFRATPTLVIQATRLAEDLXFERADNGSGKCLTSRVTHATLSAA

SEQ ID NO: 3960 - protein, 169 aa, Zea mays
GEGDPWSWESPFRRTGVFFFVTYTHCSIGWCPRVVRTSWIRAAAEGGDGGADRRRRGASFAADGPRGVEGAAAPVATSGGAAGAAGSAGFGARDAELAMWDKLGAVVRLSYGIGIYGAMALAGRFICQMAGIDCTGGFHPSLTALVEGLGYAAPPIMALLFILDDEVVK

SEQ ID NO: 3961 - protein, 202 aa, Zea mays
  misc_feature (34)..(34): Xaa can be any naturally occurring amino acid
  unsure (1)..(202): unsure at all Xaa locations
MVVGASSVSGAAASGGTSGTAPPRKGKSCKGCLXYSSVLKSRGYNPICVGIPRSIPQVPNYVVDEPKEDATAQGHDLRRFRYGCAGYSIFVNRDGQGGEGEGKTLLPYCRGLELLVDSRLVERKPSAAEQAPAHVTKDAATTRSHQQGQQRPANLSRQEFLERFKKSAGLVASGVAKNLNKTANYIKENIHDILYHDRRPPK

SEQ ID NO: 3962 - protein, 253 aa, Zea mays
MTFQVIAKGEAQGMVSKFVGIGLGIALANHIGSSVPLALISFAGITAVHMYCNLKSYQSIQLRTLNPYRASLVFSEYLLSGQVPSVKEVNDEEPLFFNLSLGASRQSKILSAEAKDAADRICRRLQMGSKLSEIIESKEDACALFDLYKNEQYLLMDYKGKFCIVLKEGSSPEDMLKSLFHVNYLYWLERYMGFKPSNVASECRPGGRLEVSLDYAQREFSHVKHDGSDGGWVMDGLIARPLPVRIRIGDGTS

SEQ ID NO: 3963 - protein, 413 aa, Zea mays
MAGMSCVVHFLSTHVRFLSLSGFQLPIDATRQKSDGEHAAPLGSALLYSALLCGLWWDKTRSRCTSRPLLATPAQSSQQSTPPMASAAPAPKPGVLLLRRTDADFAAALRARFRVHDLHASGAPLGAFLATAAAEPEPPRAALVMAGGDVLVDAAFLDAVPSLGCVVTTSAGVDHVDLAQCARRGVAVAGAGEAFSVDVADHAVGLLVAVLRRVAAADRYVRAGLWPAQGDYPLTTKLSGKRVGILGLGSVGSLVAKRLQAFGCAVSYHSRARKASVAYRYFPDARALAAGSDALVVACALNDATRRVVGRHVLDALGPGGVLVNVARGGVVDEQELVAALRDGRIAGAGLDVFQDEPHLPPGLGGMDNVVLTAHQAAFTEESSADLRELMIGNLEAFFSGKPLLTPVMTRPQ

SEQ ID NO: 3964 - protein, 171 aa, Zea mays
MTELFDTAVTSLLHLPEVLDRLAAADGDRRSAGHHAAHGHGHGRVHGLGGGGGAPVDIVESPREYAFVLDVPGLSKSDIQVTLEEDRVLVMKGGSGKRKRDEEEDMNGEGCRYIRLERGAAPRSFVRKFRLPEDADTGGVAARCENGVLTVTVKKLPPPEKKAKIVQVTIA

SEQ ID NO: 3965 - protein, 437 aa, Zea mays
MTPPTINVYTRIIKTSSLAVLIGVVDVIKVGQQIIERTYESVLIYGVLFLFFFFICYPLSAASKVLKGIDLSVQSGEVVVILGPSGCGKSTLLRCLNGLEVAHSGSLRFAGKELLGKQTDWRQVRQDVGMVFQSYHLFPHMSVLDNILLGPLKVQKRDPREAREQAEKLLERVGLADKRDAFPRQLSGGQQQRIAIVRSLCMNPQVMLFDEVTAALDPEMVKEVLEVIQGLARDGMTLLIVTHEMAFARAVADRVLLLPLFAVALLVGCDKKAEEPVKPAAVSYIDKIKARDKLIVGVFTDKPPFGFVNEAGRYVGFDTDIGRQFAKDLLGDENKVEFVAVEPASRIPFLQSDKVDLILANMTVTPERKEAVDFTNPNLKVAVQALVANDSAVKSLNDLATRTTIVTTGTTADIWLTKNHPDWKLLKFEKNSESLQA

SEQ ID NO: 3966 - protein, 815 aa, Zea mays
GHVFLSPCHLQYMENMNSIASLVMAVVVNENEDDDEPESEQPPQQQKRKKLWGLIVCHHESPRYVPFPLRYACEFLAQVFAVHVNKEFELEKQIREKSILRMQTMLSDMLFKESSPLSIVSGSPNIMDLVKCDGAALLYGDKVWRLQTAPTESQIRDIAFWLSEVHGDSTGLSTDSLQDAGYPGAASLGDMICGMAVAKITSKDILFWFRSHTAAEIKWGGAKHDPSDEDDSRRMHPRLSFKAFLEVVKMKSLPWSDYEMDAIHSLQLILRGTLNDALKPAQSSGLDNQIGDLKLDGLAELQAVTSEMVRLMETATVPILAVDGNGLVNGWNQKVADLSGLRVDEAIGRHILTLVEDSSVPIVQRMLYLALQGREEKEVRFELKTHGSKRDDGPVILVVNACASRDMHDHVVGVCFVAQDMTVHKLVMDKFTRVEGDYRAIIHNPNPLIPPIFGADQFGWCSEWNAAMTKLTGWHRDEVIDRMLLGEVFDSSNASCLLKSKDAFVRLCIIINSALAGEEAEKAPIGFFDRDGKYIECLLSVNRKVNADGVVTGVFCFIHVPSDDLQHALHVQQASEQTALRRLKAFSYMRHAIDKPLSGMLYSRETLKGTGLDEEQMRQVRVADNCHRQLNKILADLDQDNITDKSSCLDLDMAEFVLQDVVVSAVSQVLIGCQGKGIRVACNLPERSMKQKVYGDGIRLQQILSDFLFVSVKFSPAGGSVDISSKLTKNSIGENLHLIDFELRIKHQGAGVPAEILSQMYGEDNREQSEEGLSLLVSRNLLRLMNGDIRHLREAGMSTFILTAELAAAPSAAGH

SEQ ID NO: 3967 - protein, 1077 aa, Zea mays
PAQSSSSSSRTRQSSQARILAQTTLDAELNAEYEESGDSFDYSKLVEAQRSTPPEQQGRSGKVIAYLQHIQRGKLIQPFGCLLALDEKSFRVIAFSENAPEMLTTVSHAVPNVDDPPKLGIGTNVRSLFTDPGATALQKALGFADVSLLNPILVQCKTSGKPFYAIVHRATGCLVVDFEPVKPTEFPATAAGALQSYKLAAKAISKIQSLPGGSMQALCNTVVKEVFDLTGYDRVMAYKFHEDEHGEVFAEITKPGIEPYLGLHYPATDIPQAARFLFMKNKVRMICDCRARSVKIIEDEALSIDISLCGSTLRAPHSCHLQYMENMNSIASLVMAVVVNENEDDDEPESEQPPQQQKRKKLWGLIVCHHESPRYVPFPLRYACEFLAQVFAVHVNKEFELEKQIREKSILRMQTMLSDMLFKESSPLSIVSGSPNIMDLVKCDEVHGDSTGLSTDSLQDAGYPGAASLGDMICGMAVAKITSKDILFWFRSHTAAEIKWGGAKHDPSDEDDSRRMHPRLSFKAFLEVVKMKSLPWSDYEMDAIHSLQLILRGTLNDALKPAQSSGLDNQIGDLKLDGLAELQAVTSEMVRLMETATVPILAVDGNGLVNGWNQKVADLSGLRVDEAIGRHILTLVEDSSVPIVQRMLYLALQGREEKEVRFELKTHGSKRDDGPVILVVNACASRDMHDHVVGVCFVAQDMTVHKLVMDKFTRVEGDYRAIIHNPNPLIPPIFGADQFGWCSEWNAAMTKLTGWHRDEVIDRMLLGEVFDSSNASCLLKSKDAFVRLCIIINSALAGEEAEKAPIGFFDRDGKYIECLLSVNRKVNADGVVTGVFCFIHVPSDDLQHALHVQQASEQTALRRLKAFSYMRHAIDKPLSGMLYSRETLKGTDLDEEQMRQVRVADNCHRQLNKILADLDQDNITDKSSCLDLDMAEFVLQDVVVSAVSQVLIGCQGKGIRVACNLPERSMKQKVYGDGIRLQQILSDFLFVSVKFSPAGGSVDISSKLTKNSIGENLHLIDFELRIKHQGAGVPAEILSQMYGEDNREQSEEGLSLLVSRNLLRLMNGDIRHLREAG

SEQ ID NO: 3968 - protein, 185 aa, Zea mays
MARSLSTALVRGLMRSSRASTSAAVSRPAIQQFMNYSSGLSGTPNANGDSVTTRVAADHDTHQDFQPTSKSSDMSFSDIVAQDVKEHPVVIYMKGYPDAPRCGFSALAVKVLQQYGVPISARDILSDLKLKESVKAYSNWPTFPQIFIKGEFVGGSDIILTMHQKGELKELLGDIAQKAEQSGSS

SEQ ID NO: 3969 - protein, 227 aa, Zea mays
  misc_feature (90)..(90): Xaa can be any naturally occurring amino acid
  unsure (1)..(227): unsure at all Xaa locations
MEKGESTSTSYSDTNGSNEPDHDFECNICFELAQDPIVTLCGHLFCWPCLYRWLHHHSHSQECPVCKALVQDDKLVPLYGRGKNQTDPRXKRYPGMRIPNRPAGQRPETASPPPQQPQNDAASNFFNYGIGLMGGFMPMATTRIGNFSFGVGGLLPSLFNFQFHGFPDAALYGTAPGYPFGGYHNGFRGVPGGNNEPTAPGGGHPSDAALKNILIVVGICVFFFLLL

SEQ ID NO: 3970 - protein, 285 aa, Zea mays
  misc_feature (198)..(198): Xaa can be any naturally occurring amino acid
  unsure (1)..(285): unsure at all Xaa locations
MVSSTSHSQNSNSSPSPLHLSTGIVGFLARRAAMTRQPSSFQFHQPRVAVPPLDSPGSSVDSSAPTWVQQQQRAPPAPVLAFDGNDTDEMALLDMITRQVQGQGQEGATSKQEEAERSLGAGGGRPYRGVRKRPWGKFAAEIRDSTRNGVRVWLGTFDSAEAAALAYDQAAFAMRGEAAVLNFPVERVRQSLEGMGMXMGMPIPGSGSASASPVVALKRRHSMRMRRPASRNRKAKTATRSEVMELEDLGADYLEELLGATATEAEEQTMSHSSLSSWHRSHHSI

SEQ ID NO: 3971 - protein, 493 aa, Zea mays
MRALAPRPSQSRSLQQPRNLCRALHTGVQAAPGPALMNLAAFSSTLATLPWYEMPSINSSATFSSSLLRRSLCASLRTISHMASAAAPTSAPVATTENGAAKAIEQRPVQVAERLEKFKTTIFTQMSMLAIKHGAINLGQGFPNFDGPDFVKEAAIQAINAGKNQYARGFGVPELNSAIAERFLKDSGLQVDPDKEVTVTSGCTEAIAATILGLINPGDEVILFAPFYDSYEATLSMAGANVKAITLRAPDFAVPLEELEAAVSKDTKAIMINTPHNPTGKMFTREELESIAALCKENDVLLFSDEVYDKLVFEADHISMASIPGMYERTVTMNSLGKTFSLTGWKIGWAIAPPHLTWGLRQAHSFLTFATCTPMQAAAAAALRAPDSYYDELKRDYSAKKAILLEGLEAAGFIVYPSSGTYYIMVDHTPFGFDSDVEFCEYLIREVGVCAIPPSVFYLDPEEGKKLVRFTFSKDEGTLRAAVERLKAKLRRK

SEQ ID NO: 3972 - protein, 231 aa, Zea mays
MARVYVGNLDPRVTAREIEDEFRMFGVLRSVWVARKPPGFAFIDFDDRRDAQDAIRELDGKNGWRVELSTKVGGGRGRDRNGSDMKCYECGEAGHFARECRLRIGSGGLGSGRRRSRSPRYRSRSRSRSPRYRRSPSYSRSPRDRSPRRRSYSRSPLGSPARSLSRSPPLPPPPPRNNSRSPPAARDVSRSPPAARDVSRSPPPPPDARRSYSGSPGQQPQRDESPYANDA

SEQ ID NO: 3973 - protein, 226 aa, Zea mays
MGAARDSTAAGQKRGTGTRCELCGGAAAVHCAADSAFLCLRCDAKVHGANFLASRHVRRRLVPRRAADPEASSAASSGSSCVSTADSAESAATAPAPCPSRTAGRRAPARARRPRAEAVLEGWAKRMGFAAGPARRRAAAAAAALRALGRGVAAARVPLRVGMAGALWSEVAAGCRGNGGEEASLLQRLEAAAHVPARLVLTAASWMARRPDARQEDHEEGWAECS

SEQ ID NO: 3974 - protein, 366 aa, Zea mays
MAILKMDFQKNFDKIEHDVIYKILQHKSFGPKWLKWMEMIMKSGTSAMLLNGVPDPVFQECSIHNTTNPAVQQLSLKAIQTATSNYKTMIGEGGFGAVYRGALANGQEVAVKVRSSSSTQGTREASKRKVLDWPTRLSVCIGAARGLVYLHNFAGRCIIHRDIKSSNILLDHSMCGKVADFGFSKYAPQEGDSNPSMEVRGTAGYLDPEYYSTQVLSTRSDVFSFGVVLLEIVTGREPLDVKRPRHEWSLVEWAKPYIREYKIEEMVDPGIKGQYCSEAMWRVLEVASVCTEPFSTFRPTMEDVLRELEDALIIENNASEYMRSIESTGTLGSNRYLSIDRKMFASGSARIESMKGNLQAMPSLPR

SEQ ID NO: 3975 - protein, 302 aa, Zea mays
MMATTAYIDDSCSEVIDPPKTEVLDVAELPGDHTQNPPKPNVVVSSSVRELLECPVCLSAMYPPIHQCSNGHTLCSGCKPRVHNRCPTCRHELGNIRCLALEKVAASLELPCKYQCFGCPGIYPYYSKLKHESQCQYRPYSCPYAGSECTVAGDIPYLVNHLKDDHKVDMHNGCTFNHRYVKPNPHEVENATWMLTVFSCFGQYFCLHFEAFQLGMSPVYIAFLRFMGDDAEAKNYSYSLEVGGTGRKMVWQGVPRSIRDSHRKVRDSYDGLIIQRNMALFFSGGDRKELKLRVTGRIWKEQ

SEQ ID NO: 3976 - protein, 135 aa, Zea mays
MVALLGRRIGVAAAAAAFIALVAFGSASSSPKSFVKSTVSAHDVVIFSKSYCPYCKRAKAVFKELELKKEPYVVELDQREDGSEIQDALLEIVGRRTVPQVFVHGKHLGGSDDTVDSYESGKLARLLNIGVKDDL

SEQ ID NO: 3977 - protein, 226 aa, Zea mays
MGAARDSAAAGQKHGTGTRCELCGGAAAVHCAADSAFLCLRCDAKVHGANFLASRHVRRRLVPRRAADPEASSAASSGSSCVSTADSAESAATAPAPCPSRTAGRRAPARARRPRAEAVLEGWAKRMGFAAGPARRRAAAAAAALRALGRGVAAARVPLRVGMAGALWSEVAAGCRGNGGEEASLLQRLEAAAHVPARLVLTAASWMARRPDARQEDHEEGWAECS

SEQ ID NO: 3978 - protein, 214 aa, Zea mays
MGAAGDAAAAGTRCELCGGAAAVHCAADSAFLCPRCDAKVHGANFLASRHVRRRLPRGGADSGVSASASSGSCLSTADSVQSRAAPPPGRGRRAPARRRPSAEAVLEGWARRKGVAAGPACRRRVPIRVAMAAARWSEVSAGGGAEAAMLRRLEAAAHVPARLVLAVAAWMTRAARARPPAAGAPDLEEGWAECSPEFVVRQGPHPSATTCGRR

SEQ ID NO: 3979 - protein, 535 aa, Zea mays
MALRDVLLSIAQTPHRLRRRALVTWTPTQELNEVRDRSGARMKRRLEWYDLVGLGVGGMLGAGVFVTTGRVARDTAGPAVFASYVVAGVSALLSSLCYAEFSVRVPVAGGAFSYLRVTFGEFVGFFGGANILMEYVLSNAAVARSFTDYLASTFGVTERNAWRIVVDGIADGYNELDVPAVALILLITVCLCYSTKESSMLNMVLTVFHLLFFAFIVAAGLWNGSARNLVRPHGLAPYGVRGVLDGAAVVYFSYIGYDSACTMAEEIRDPSRALPVGIAGSVLVVSGLYCLMSVALCVMLPYTEISEAAPFSSAFREKVGWRWASSVVGAGASIGIVASLMVAMLGQARYLCVIARARLVPLWFAKVHPSTGTPMNATIFLGFCTASLALFTELQIVFEMISIGTLLVFYLVANALIYHRYVKVGTNRPLHVLLFLLLLTLSSLGFSLSRKIDGWCQWGMTLFGAVSIAITTIFHCTARQDIAGPSLEWSVPLMPWPAAASVFLNVFLITTLKVRSYQRFGIWSLVTIVFYVCYG

SEQ ID NO: 3980 - protein, 187 aa, Zea mays
MAPAANDSLVTAHVIGDVLDPFYTAVDMMILFGGAPIISGMELRAQAVSDRPRVEIGGEDYRDAYTLVMVDPDAPNPSNPTLREYLHWMVTDIPASTDNTHGREMMCYEPPAPSTGIHRMVLVLFQQLGRDTVFAAPSRRHNFSTRGFARRYNLGAPVAAMYFNCQRQTGSGGPRFTGPYTSRRRAG

SEQ ID NO: 3981 - protein, 137 aa, Zea mays
NTIIAWKITEAYIIFLTSLLLSTFFFQVMNLIGDVKGKVAILIDDMIDTAGTITSAAALLKQEGAEAVYACCTHAVFSPPAIERLSGGVFEEVIVTNSILLPEDKCFPQLTVLSMANLVGETIWHVHRDGSVSSIFQ

SEQ ID NO: 3982 - protein, 92 aa, Zea mays
EAGRFGIFSKTYCPYSMRAKHIFRDLKEDPYVVELDTRVDGRDIQSVLLDLVGRRTVPQVFVNGQHIGGSDDTVNALSNGQLQKLLGKSQSQ

SEQ ID NO: 3983 - protein, 316 aa, Zea mays
MATPAAASKMSKKLQGGGDRSSGSSSRGSGNSDKQQVPAAAMRKGPWTEEEDAQLVWFVRLFGERRWDFLAKVSGLRRTGKSCRLRWVNYLHPGLRRGRITADEERLILQLHAQWGSRWSRIARSLPGRTDNEIKNFWRTRARKQKAAAQQQQQQQDSRSSKTATASAFSGSASSVTTTTSSCSGSPSPTSRGCGTATSSSALTESALRQSGGEDEDAELDEASTTTTTTASQRQHQDDDHQQQHQECYASDHFWNDIAAAEAAIYMLIDGGWTGSGPGHPAADPPSSPAWEYCSDYSLWRIDDDEYYEKMLDSSS

SEQ ID NO: 3984 - protein, 342 aa, Zea mays
  misc_feature (309)..(309): Xaa can be any naturally occurring amino acid
  unsure (1)..(342): unsure at all Xaa locations
MAATQSCQAAACFPAAVAVDEEHGHHSHQLKGGAQEEAENDNKPELRRGPWTVDEDLTLVNYIADNGEGRWNNLARAAGLKRTGKSCRLRWLNYLRPDVKRGNFSADEQLLILDLHTRWGNRWSKIAQHLPGRTDNEIKNYWRTRVQKHAKQLNCDANSKRFKDAMRYLWMPHLADDVDTIAAANDDDEDHHHHLRLLVLHHHQAQHLQQAAAAAGGAANDLAAGAYDVRQLHALPSSGMAATSSSDSLASESYDDGGLLFANLRAGEMLMDGGDWAAQQEADQGLWPPPPPSRLILISRWCRLLVPAXGQFQDMELSGWVQGFSESITDNFWALEEIWKMQ

SEQ ID NO: 3985 - protein, 180 aa, Zea mays
MSLLSDLVNLNLSDSTKQIIAEYIWIGGSGMDIRSKARTLPGPVSDPSKLPKWNYDGSSTGQASGDNSEVILYPQAIFRDPFRRGDNILVMCDAYTPAGDPIPTNKRHKAAKIFSHPNVAKEVPWYGIEQEYTLMQKGMNWPIGWPVGGFPGPQGPYYCGVGADKAIGRDIVDAHYKACL

SEQ ID NO: 3986 - protein, 160 aa, Zea mays
MNDSEEHHFKLKADAGAFKTYPQQAGTVRKNGSIVIKNRPCEVEEVSTSQTGQHGHAKCHFVAIDILNGKKLEDIGASSHNWDIPHANRTDADLIDISHDGLVSLLTSDGNTKDDLILPTDETLVAQIKEGFESGEALAATVQSAMEEEQICALKDVGTQ

SEQ ID NO: 3987 - protein, 160 aa, Zea mays
  misc_feature (74)..(74): Xaa can be any naturally occurring amino acid
  misc_feature (82)..(82): Xaa can be any naturally occurring amino acid
  misc_feature (94)..(94): Xaa can be any naturally occurring amino acid
  misc_feature (99)..(99): Xaa can be any naturally occurring amino acid
  unsure (1)..(160): unsure at all Xaa locations
MSDSEEHHFESKADAVASKTYPQQDGTARKNGFIGIRNRPCKGAEVSTSRSGKHGHAKCHFAAIYIFNGRKLEXIVPSSHNXDIPHVNRTEHQXIDISXDGFVSLLTSDGNTKDDRTLPTDDTLVAQIKEGFDSGKDLVETVQSAMGEEQICALNDAAPK

SEQ ID NO: 3988 - protein, 160 aa, Zea mays
MSDSEEHHFESKADAGASKTYPQQAGTVRKNGFIVIKSRPCKVVEVSTSKTGKHGHAKCHFVAIDIFNGKKLEDIVPSSHNCDIPHVNRTEYQLIDISEDGFVSLLTSDGNTKDDLRLPTDETLVAQIKEGFESGKDLVVTVQSAMGEEQICALKDVGPK

SEQ ID NO: 3989 - protein, 193 aa, Zea mays
  misc_feature (42)..(42): Xaa can be any naturally occurring amino acid
  misc_feature (86)..(86): Xaa can be any naturally occurring amino acid
  unsure (1)..(193): unsure at all Xaa locations
MAAGFPMAYHLRLYFLLSLLLRLRLIHPRQGSPCSDSEEHHXESKDDAEAPKTYPHKAATVRKNGFIVIKNRPCKDVEASTSKTGXHGHIKCHFGAIDIFNGKEIEDIVPSSHNCDIPHVNRTEYQLIDISEDGFASLLTSYGNTEDDLRLPTDETLVAQIKEGFESVKDLGETVQSAMGEEQICAMKDGGPK

SEQ ID NO: 3990 - protein, 606 aa, Zea mays
MDTHIGSVNGAASNQTVGCPASAPGCPMASTPAQPAATLSAGEASLGRHLARRLVQVGVNDVFAVPGDFNLTLLDHLIAEPGLRLVGCCNELNAGYAADGYARARGVGACAVTFTVGGLSVLNAIAGAYSENLPVICIAGGPNSNDYGTNRILHHTIGLPDFSQELRCFQTVTCHQAVVNNLDDAHEQIDTAIATALRESKPVYLSISCNLPGLPHPTFSRDPVPFFLTPRTSNKMGLEAAVEATVEFLNKAVKPVLVAGPKLRVAKAGKAFVDMVDASGYAYAVMPSAKGLVPETHPHFIGTYWGAVSTAFCAEIVESADAYLFTGPIFNDYSSVGYSFLLKKEKAIIVQPERVIVGNGPAFGCVMMKEFLSELAKRVNKNTTAYENYKRIFVPEGQPLESEPNEPLRVNVLFKHVQKMLTGDSAVIAETGDSWFNCQKLKLPEGCGYEFQMQYGSIGWSVGALLGYAQGANHKRVIAFIGDGSFQVTAQDVSTMLRCEQNSIIFLINNGGYTIEVEIHDGPYNVIKNWNYTGFVDAIHNGEGKCWTSKVKSEEELTAAIETALGEKKDCLCFIEVIAHKDDTSKELLEWGSRVSAANSRPPNPQ

SEQ ID NO: 3991 - protein, 610 aa, Zea mays
METLLAGNPANGVAKPTCNGVGALPVANSHAIIATPAAAAATLAPAGATLGRHLARRLVQIGASDVFAVPGDFNLTLLDYLIAEPGLTLVGCCNELNAGYAADGYARSRGVGACAVTFTVGGLSVLNAIAGAYSENLPVVCIVGGPNSNDYGTNRILHHTIGLPDFSQELRCFQTITCYQAIINNLDDAHEQIDTAIATALRESKPVYISVSCNLAGLSHPTFSRDPVPMFISPRLSNKANLEYAVEAAADFLNKAVKPVMVGGPKIRVAKAREAFAAVADASGYPFAVMPAAKGLVPEHHPRFIGTYWGAVSTTFCAEIVESADAYLFAGPIFNDYSSVGYSLLLKREKAVIVQPDRMVVGDGPAFGCILMPEFLRALAKRLRRNTTAYDNYRRIFVPDREPPNGKPNEPLRVNVLFKHIKGMLSGDSAVVAETGDSWFNCQKLRLPEGCGYEFQMQYGSIGWSVGATLGYAQAAKDKRVIACIGDGSFQVTAQDVSTMLRCGQKSIIFLINNGGYTIEVEIHDGPYNVIKNWDYTGLVNAIHNSEGNCWTMKVRTEEQLKEAIATVTGAKKDCLCFIEVIVHKDDTSKELLEWGSRVSAANSRPPNPQ

SEQ ID NO: 3992 - protein, 350 aa, Zea mays
MYAMPMTPLGCECDMAPAASRQSWPLPRCGLLVLALALATTAAVGSAQLSSESYYDASCPAALLTIRTAVSTAVLLEPRMGASLLRLHFHDCFVQGCDASVLLDDTASFTGEKGAGPNAGSLRGFDVIDNIKMLLELLCPQTVSCADILAVAARDSVAQLGGPSWAVPLGRRDATTASASLANSDLPGPTSSLNGLLNAFSNKGLSSTDMVALSGAHTVGRAQCKNCRARIYNDTDIDASFAASLRASCPAQAGAGDGALEPLDGSTPDAFDNAYFGDLLSQRGLLHSDQALFGGGGGGGGGATDGLVSAYASNAGQWGADFAAAMVKMGSISPLTGTDGEIRVNCRRVN

SEQ ID NO: 3993 - protein, 342 aa, Zea mays
MPMTPLECDMAPAASRQSWPLPRCGLLVLALALATTAAVGSAQLSSESYYDASCPAALLTIRTAVSTAVLLEPRMGASLLRLHFHDCFVQGCDASVLLDDTASFTGEKGAGPNAGSLRGFDVIDNIKMLLELLCPQTVSCADILAVAARDSVAQLGGPSWAVPLGRRDATTASASLANSDLPGPTSSLNGLLNAFSNKGLSSTDMVALSGAHTVGRAQCKNCRARIYNDTDIDASFAASLRASCPAQAGAGDGALEPLDGSTPDAFDNAYFGNLLSQRGLLHSDQALFGGGGGGATDGLVSAYASNAGQWGADFAAAMVKMGSISPLTGTDGEIRVNCRRVN

SEQ ID NO: 3994 - protein, 156 aa, Zea mays
PVGPAVGISAGDEIWVARFILERITEIAGVVVSFDPKPIPGDWNGAGAHCNYSTKSMREDGGYEIIKKAIDKLGLRHKEHIAAYGEGNERRLTGHHETADINTFLWGVANRGASIRVGRDTEKEGKGYFEDRRPASNMDPYIVTSMIAETTILWKP

SEQ ID NO: 3995 - protein, 450 aa, Zea mays
  misc_feature (301)..(301): Xaa can be any naturally occurring amino acid
  misc_feature (325)..(325): Xaa can be any naturally occurring amino acid
  unsure (1)..(450): unsure at all Xaa locations
MCGILAVLGCSDWSQAKRARILACSRRLKHRGPDWSGLYQHEGNFLAQQRLAVVSPLSGDQPLFNEDRTVVVVANGEIYNHKNVRKQFTGTHNFSTGSDCEVIIPLYEKYGENFVDMLDGVFAFVLYDTRDRTYVAARDAIGVNPLYIGWGSDGSVWIASEMKALNEDCVRFEIFPPGHLYSSAGGGFRRWYTPHWFQEQVPRTPYQPLVLREAFEKAVIKRLMTDVPFGVLLSGGLDSSLVASVTKRHLVETEAAEKFGTELHSFVVGLEGSPDLKAAREVADYLGTIHHEFHFTVQDGXIDAIEEVIYHDETYDVTTIRASTXPMFLMARKIKSLGVKMVLSGEGSDELLGGYLYFHFAPNKEEFHRETCRKVKALHQYDCLRANKATSAWGLEVRVPFLDKEFINVAMGMDPEWKMYDKNLGRIEKWVMRKAFDDDEHPYLPKVKTA

SEQ ID NO: 3996 - protein, 468 aa, Zea mays
MDKSAVAAYDVERGDYEEEHERRGTVWTATAHIVTAVIGSGVLALAWSVAQLGWVAGTLALAGFACVTYYTSTLLANAYRAPHPVTGDRNRTYMDAVRSYLSPREVFMCGIAQYVNLWGTMVGYTITATISMAAIRQSNCFRRSGAGAQCDAPGTVLMLAFGVVQVVLSQFPGLEHITWLSVVAAVMSFAYSFIGLGLSVGQWVSHGGGLGGRIAGAAAASPTRKLWNVLLALGNIAFAYTFAEVLIEIQDTLKSPPPENRTMKKAAMYGIGATTIFYISVGCAGYAAFGSDAPGNILTAGGLGPFWLVDIANMCLILHLIGAYQVYAQPIFASVERWAASRWPEAKFISSAYTVSIPLMQRGSVTVAPYKLVLRTVLVAATTVVALMIPFFNAVLGLLGAFSFWPLTVYFPISMHIAQDKITRGTKWYLLQALSMVCLMISVAVGIGSVTDIVDSLKVSSNPLKTVS

SEQ ID NO: 3997 - protein, 181 aa, Zea mays
MALRSVKTPPFVTPTAVVSSSIINKPQSFRFVSKPSASLAVHNLHQPISIIRSNLIPKLKPASSAAKFRCSASALTPQLRDTLEKLVNSEKVVLFMKGTRDFPMCGFSNTVVQILKNLNVPFEDVNILENEMLRQGLKEYSNWPTFPQLYIGGEFFGGCDITLEAFQSGELQEVVERAICS

SEQ ID NO: 3998 - protein, 508 aa, Zea mays
MGWLTKFFRGSTHNISEEQYHSRPAEDTAWNEPSSSPVVTDILSEFNNEDIDRAIALSLSEEEQRKEKAIDKDMHLEEDEQLARAIQESLNVESPPRRNGSANGGTMYHPPRETGNAYQPPRENGSANGGNAYHPLPFMFSSGFRACAGCHREIGHGRFLSCMGAVWHPECFRCHACSQPIYDYEFSMSGNHPYHKTCYKEQFHPKCVVCKQFIPTNMNGLIEYRAHPFWVQKYCPSHEMDGTPRCCSCERMEPRESKYVLLDDGRKLCLECLDSAVMDTNDCQPLYLEIQEFYEGLNMKVEQQVPLLLVERQALNEAMEGEKAGHHHLPETRGLCLSEEQTVSTILRPRMAGNKIMGMITEPYRLTRRCEVTAILILYGLPRLLTGSILAHEMMHAWLRLKGYRTLSPDVEEGICQVLAHMWIESEIMAGSGSSAASSSSGSSSSTSSKKGGRSQFEHRLGDFFKHQIETDTSMAYGDGFRTGNRAVLHYGLKRTLEHIRLTGTFPF

SEQ ID NO: 3999 - protein, 178 aa, Zea mays
  misc_feature (85)..(85): Xaa can be any naturally occurring amino acid
  misc_feature (90)..(90): Xaa can be any naturally occurring amino acid
  misc_feature (102)..(102): Xaa can be any naturally occurring amino acid
  unsure (1)..(178): unsure at all Xaa locations
MSLSNRDPLVVGRVVGDVLECFTRSIDLRVTYGQREVTNGLDLRPSQVLNKPRVEIGGEDLRNFYTLVMVDPDVPSPSNPHLREXYLHWXLVTDIPATTGNXFGNEIVSYESPRPNSGIHRIVLVLFRQLGRQTVYEPGWRQQFNTREFASLYNLGLPVAAVFYNCQRESGCGGRKVR

SEQ ID NO: 4000 - protein, 390 aa, Zea mays
MLVKLMNLLRACWRPSSNRHARTGSDVTGRQDGLLWYKDAGQHVNGEFSMAVVQANNLLEDQCQIESGPLSFLDSGPYGTFVGVYDGHGGPETACYINDHLFQNLKRFASEQNAMSADVLKKAYEATEDGFFSIVTKQWPVKPQIAAVGSCCLVGVICGGMLYVANVGDSRVVLGKHVKATGEVLAVQLSAEHNVSIASVRKELQSMHPEDRHIVVLKHNVWRVKGLIQVCRSIGDAYLKKQEFNREPLYAKFRLREPFHKPILSSEPSISVQPLQPHDQFLIFASDGLWEQLTNQEAVDIVRSSPRSGCARRLIRAALQEAAKKREMRYSDLKKIDRGVRRHFHDDITVIVVFLDSGLVSQASTHRGPTLSLRGGGGSAGLRSNTLAPT

SEQ ID NO: 4001 - protein, 201 aa, Zea mays
MAKVLDLSLVLCVLCVSTAAIAMARNLGEESSDDTEFIKSSCETATYPELCFQSLSSYASEIKKRPLQLAETALAVSMAQAKSAKTYISDMTDYKGITKRQHEAVLDCVEEMGDTVDRLSKSLKELKNLEEGESKEDFWFCLSNVRTWTSAALTDETTCLDGFGGKGMDGELKSLVRAHIVRVAQDTSNALALINVYASKH

SEQ ID NO: 4002 - protein, 339 aa, Zea mays
MESGRLIFNAPGSGAGQMLFLDCGAGGGPGGGLLHRGGRPMLGLEEGRGVKRPFYTSPDELLEEEYYDEQLPEKKRRLTPEQVHLLERSFEEENKLEPERKTELARKLGLQPRQVAVWFQNRRARWKTKQLERDFDRLKASFDALRADHDALLQDNHRLRSQVVSLTEKLREKEATEGDANGAAAALPAVGVVRASVADDVEEPEPEPEPEAEAAAFEERQVKSEDRLSTGSGGSAVVDAADALLYNGRIGGAAVDSSVESYFPGAEVQDQYHGCGTMGPVTHGAGGIQSDDDDGAGSDEGCSYYADEEAAAAFLSEHTHHADGDDEDAGQVSWWWMWN

SEQ ID NO: 4003 - protein, 555 aa, Zea mays
MAIPVRSAAAPRRLVPSIPPASSGHVRGLACFGTRTGPRGARGLSMVVADSTSRRAKQADGGDGVLGAPVLGGLGMEGLGDQLSVVMKFGGSSVSSAARMAEVAGLILTFPEERPVVVLSAMGKTTNNLLLAGEKAVGCGVIHVSEIEEWNMVKSLHIKTVDELGLPRSVIQDMLDELEQLLKGIAMMKELTPRTSDYLVSFGECMSTRIFSAYLNKIRVKARQYDAFDIGFITTDEFGNADILEATYPAVAKRLHGDWIQDPAIPVVTGFLGKGWKSGAVTTLGRGGSDLTATTIGKALGLREIQVWKDVDGVLTCDPNIYPHAKTVPYLTFEEATELAYFGAQVLHPQSMRPAREGDIPVRVKNSYNPKAPGTLITRQRDMDKVVLTSIVLKSNVTMLDIVSTRMLGQYGFLARVFAIFEDLCISVDCVATSEVSVSVSLDPSKIWSRELIQQELDHVVEELEKIAIVRLLQQRAIISLIGNVEQSSLILEKTGRVLRKSGVNVQMISQGASKVNMSLIVHDSDAKALVEALHQAFFEDDVLSQVEAENLLVG

SEQ ID NO: 4004 - protein, 485 aa, Zea mays
MASPLRAVASPLRAMATPLASPVRKAVAGVRECLEEVGHITRLADPRDAWLPITESRSGNAYYAAFHNLSSGIGFQALVLPTAFASLGWTWAIICLTLAFGWQLYTLWLLVRLHEPVAGATRYSRYMHLATTVFGERWAKILALLPVMYLSAGICTALIIVGGGSMKLLFGIACGEPCPARPPTTVEWYLVFVCAAVLLSQLPNLNSIAGVSLVGATAAVAYCTMIWTVSVAKGRVPAVSYDPVKAPSDVDGALAILNGLGIIAFAFRGHNVVLEIQGTMPSTLKHPSHVPMWKGVKVAYAIIALCLYPVAIGGFWAYGNQIPPNGILSALYKFHSRDTSRLVLGVTTTLVIVNCLTTFQIYAMPVYDNMEAGYVHKKNRPCPWWMRSGFRAFFGAVNFLIAVALPFLSQLAGLLGGISLPVTLAYPCFMWVAIKKPRKGTATWNVNWALGILGMSISLVLIVGNLWGLVEKGLRVKFFKPADSQ

SEQ ID NO: 4005 - protein, 461 aa, Zea mays
MASFSSLSASSSTSTPSFNLPAKTSAGTGSLSFHRARESQKSRARMVTVRAEAVDTTISPRVNALRPSKTMAITDQATALRQAGVPVIGLAAGEPDFDTPAVIAEAGINAIRDGATRYTPNAGTLELRKAICKKLEEENGLSYSADQVLVSNGAKQCITQAVLAVCSPGDEVLIPAPYWVSYPEMARLAGATPVILPTSISDNYLLRPESLASVINENSRILILCSPSNPTGSVYPKELLEEIAAIVRKHPRLLVLSDEIYEHIIYQPAKHTSFASLPGMWERTLTVNGFSKAFAMTGWRLGYLAAPKHFVAACGKIQSQYTSGASSISQKAGLAALNLGYAGGEAVSTMVKAFQERRDYLVRSFRELPGVKISEPQGAFYLFIDFSSYYGSEVEGFGTIKDSESLCLFLLEKAQVALVPGDAFGDDKGVRISYAAAMSTLQTAMGKIKEAMALLRPPVAV

SEQ ID NO: 4006 - protein, 423 aa, Zea mays
MCGGAILSGFIPPSGVPAAAAAAKKKQQRRATADLLWPGPGKKGAPREEDFEADFREFERGLGEDDDVDGAGDEVQELPLPEPARLAFAAAVGAPRTAVDGVMTPKDGEGDMPTTATNSAANKRRRKNQYRGIRRRPWGKWAAEIRDPSKGVRVWLGTYSTAEEAARAYDAEARRIRGKKAKVNFRDEAAAAAGAQKAPAATTPTACGNAARLGPPPPPPKFRADEVFGNMNGGTGSNDLFAIMFAFSDSSSRVVRVEPGEGAAGFLPADLLPGSKRSAANMLLLSDQSSDSYGSCDLGWEWDWDDDTMTSDYASVFAPAAPSNVVPAWYTQGGPVSKRTRSSYGYGAAMPGGFDPETNYQYQPLPYVVESSPSDGASTDDMDCLQMMRAGDVPQDGASSGGGGGDGGDIWSLDELLMAAGAY

SEQ ID NO: 4007 - protein, 411 aa, Zea mays
MTQQDVEMAARHGTGADGAGFYPQPRNGAGGETLDDDGKKKRTGTVWTASAHIITAVIGSGVLSLAWSTAQLGWVVGPLTLMIFALITYYTSSLLADCYRSGDQLTGKRNYTYMDAVAAYLGRWQVLSCGVFQYVNLVGTAVGYTITASISAAAVHKANCFHNKGHAADCSTYDTMYMVVFGIVQIFFSQLPNFSDLSWLSIVAAIMSFSYSSIAVGLSLARTISGRSGTTTLTGTEIGVDVDSAQKVWLALQALGNIAFAYSYSMILIEIQDTVKSPPAENKTMKKATLMGVTTTTAFYMLAGCLGYSAFGNAAPGNILTGFGFYEPYWLIDFANVCIVVHLVGAYQVFSQPIFAALETAAALEYPSRGPKLTRTQLSCNWELTEQALSKKVAQNFGGIDGMWRTPFAES

SEQ ID NO: 4008 - protein, 612 aa, Zea mays
MAAPPATTATTHHRALLPPTRTHAAATHSALRLPLRAHPHAHAQRARLTAAAAPAPAASTASLESSAAGKPTVLVAEKLGAAGLALLREFANVDCSYGLSPEDLRAKISLCDALIVRSGTKVGRDVFEASGGRLRVVGRAGVGIDNVDLAAATEHGCLVVNAPTANTVAAAEHGIALLTAMARNIAQADASLKAGKWQRNKYVGVSLVGKTLAILGFGKVGSEVARRAKGLGMHVIAHDPYASADRARAIGVELVSMEEAMTTADFISLHMPLTPATDKMLNDEAFAKMKKGVRIINVARGGVIDEEALVRALDSGVVAQAALDVFTKEPPAADNKLVLHGNVTVTPHLGASTVEAQEGVAIEIAEAVIGALKGELAASAVNAPMVPAEVLSELAPFVVLAEKLGRLAVQLVAGGGGIKSVKVTYASARAPDDLDTRLLRAMITKGLIEPISSVFVNLVNADFTAKQRGVRITEERILLDGSPETPIDYIQVQIANVESKFPSAISETGEITVEGRVKDGVPHLTKVGAFQVDVSLEGSLILCRQVDQPGMIGSVGSVLGEENINVSFMSVGRIAPRKHAVMAIGVDEEPSKVTLRKIGEIPAIEEFVFLKL

SEQ ID NO: 4009 - protein, 469 aa, Zea mays
DRPLDKTFGFAKNFGAKYDLGKDVGRGHFGHTCSAVVKKGEHKGHTVAVKIISKAKMTTAISIEDVRREVKILKALSGHDNLVRFYDACEDALNVYIVMELCEGGELLDRILARGGRYTEEDAKAIIVQILSVVAFCHLQGVVHRDWKPENFLFTTRDESAPMKLIDFGLSDFIRPDERLNDIVGSAYYVAPEVLHRSYSMEADIWSIGVITYILLCGSRPFWARTESGIFRSVLRADPNFDDSPWPSVSAEAKDFVKRFLNKDYRKRMTVVQALTHPWLRDEPRQIPLDILIFRLVKQYLRATPLKRLALKALSKALSEDELLYLRLQFKLLEPRDGFVSLDNFRAALTRYSTDAMRESRVLEFQHALEPLAYRKMDFEEFCAAAISPYQLEALERWEEIAGTAFQHFEQEGNRVISVEELAQELNLAPTHYSIVQDWIRKSDGKLNFLGFTKFLHGVTIRGSNTRRH

SEQ ID NO: 4010 - protein, 211 aa, Zea mays
MRSLLTRLFTSTHIVMASSSFSSSPSRRLVHLTRHLVSSSSGELSSVGAPAAAASDADPVKSPRSTASRVHAAVLVCLFEDPSSGPRVLLTKRASSLSSHSGEVSLPGGKVDDGDADPKATALREAKEEIGLDPALVSVVTVLEPFLSKNGLTVVPVIGMVPDKALYKPVLNKAEVEDIFDAPLEMFLKDDHRRTRQMNWMGIDIPVQFFD

SEQ ID NO: 4011 - protein, 295 aa, Zea mays
MEVGFLGLGIMGKAMATNLLRHGFRVTVWNRTLAKCQELAALGATVGETPASVVSKCRYTIAMLSDPSAALSVVFDKDGVLEQIGSGKGYVDMSTVDAATSTKISEAVKQKGGAFLEAPVSGSKKPAEDGQLVILAAGDKPLYDGMIPAFDVLGKKSFFLGEIGNGAKMKLVVNMVMGSMMNSLSEGLCLADKSGLSPQTLLDVLDLGAIANPMFKLKGPTMLQGSYSPAFPLKHQQKDMRLALALGDENAVAMPVSAAANEAFKKARSLGLGDQDFSAVYEVVKGAGGSGSGQP

SEQ ID NO: 4012 - protein, 182 aa, Zea mays
  misc_feature (88)..(88): Xaa can be any naturally occurring amino acid
  unsure (1)..(182): unsure at all Xaa locations
MYPKAADEGAQPLATGIPFSGGGGYYQAGGAMAAAFAVQAQAPVAAWSTGLCNCFDDCHNCCVTCVCPCITFGQTAEIIDRGSTSCGXTSGALYALVMLLTGCQCVYSCFYRAKMRAQYGLQVSPCSDCCVHCCCQCCALCQEYRELKKRGFDMSIGWHANMERQGRAAAAVPPHMHPGMTR

SEQ ID NO: 4013 - protein, 472 aa, Zea mays
  misc_feature (434)..(434): Xaa can be any naturally occurring amino acid
  unsure (1)..(472): unsure at all Xaa locations
MGDPSASADPAAARHHLSPQLAGQPPVPRSPAPLDLASAAAASGHRRLSPSLRPPAHPQARLPSPYGQISSPGDDAHHALSLSQPLFFSIDSIPPPPQPYADMGAAPAVPAPSPPPSTSDPPPPLGLPPRMSGHRRSQSDIPFGFAQLSPPLPPPAPVKREVTAAADGCRSDGGGGDDAALYDLVNAYMDLDGLDPLNSSEDRHDDRDSRASGTRAGSAAESSENEAESQSTSADRKDGGKSRHCRSLSIDSFMGKLSFAAGEESPKLPLPSPRASGSLTRSGSGSLEGGAVALFNMEFTNGEFTDSEKKKILANERLAEIALTDPKRVKRILANRQSAARSKERKMRYIQELEHKVQVLQTEATTLSAQLTMLQRDSAGLATQNNELKIRLQAMEQQAQLRDALNEALTAEVQRLKLATGEVTDGRMPKGLQXQQMNSQMLQIQQLQVQQQAPQAQQQGQRQQQQQPQKSA

SEQ ID NO: 4014 - protein, 381 aa, Zea mays
MVEQTQQQPSILQKASSGQLMRSGVSQDIHGYASGFQRRATYGNYSNAAFQYPLAASSRIVATTTTSPVFVQAPSEKGFSSFAIDFLMGGVSAAVSKTAAAPIERVKLLIQNQDEMLKAGRLSEPYKGIGDCFGRTIKDEGFGSLWRGNTANVIRYFPTQALNFAFKDYFKRLFNFKKDRDGYWKWFAGNLGSGGAAGASSLLFVYSLDYARTRLANDSKAAKKGGERQFNGLVDVYKKTLKSDGIAGLYRGFNISCVGIIVYRGLYFGLYDSLKPLLPADLQDSFFASFALGWLITNGAGLASYPIDTVRRRMMMTSGEAVKYKSSMDAFQQILKKEGPKSLFKGAGANILRAIAGAGVLSGYDKLQLLLLGKKYGSGSG

SEQ ID NO: 4015 - protein, 290 aa, Zea mays
  misc_feature (81)..(81): Xaa can be any naturally occurring amino acid
  unsure (1)..(290): unsure at all Xaa locations
EGTNILGMVADTESSDSLPGSSNAASEMPANGSIHRKSQEKPPKKTHKAEREKLKRDQLNDLFVELGKLLISLQNSSKLIXDRQNTGKATVLGDAARVLRDLITQVESLRQEQSALVSERQYVSSEKNELQEENSSLKSQISELQTELCARMRSSSLSQTSIGMSDPATHQQMQMWSSIPHLSSVAMAARPASAASPLHGQEGYSADAGQAGYAPQPQPRELQLFPGSSASSSPERERSSRLGSGQATRPSLTDSLPGQLCLSLLQPSQEASGGGGGGVMSRSREERRDG

SEQ ID NO: 4016 - protein, 161 aa, Zea mays
  misc_feature (136)..(136): Xaa can be any naturally occurring amino acid
  unsure (1)..(161): unsure at all Xaa locations
MSDSEEHHFKSKADAGASKTYPQHDGTGRTNGFIVIKNRPCKGVEVSTSKTAKHAHAECHFVAIQIFNVKKLEYIVPSSHNCDIPHVNRTDYQLIDISEDGFESLLTSDGNTKDDRRLPTDETLVDQIKEGVESGXKDLAVTAQSAMSQEHICALTDVGPK

SEQ ID NO: 4017 - protein, 164 aa, Zea mays
  misc_feature (17)..(17): Xaa can be any naturally occurring amino acid
  misc_feature (59)..(59): Xaa can be any naturally occurring amino acid
  unsure (1)..(164): unsure at all Xaa locations
MSDSEEHHFKSNADAGXASKTYPQQAATGRKNGFIDIKNRPCKVVEVSTSNTGKHGHAXCHFAAIDVFNDKKLEDIVPSSHDCDIPDVNRTEHQVIDISDDGCVSLLTSHGNTTDDLILPTDETRVVQIKEWCESGKDLVVTVQPAMGEEPICAMNDVGPKKLP

SEQ ID NO: 4018 - protein, 161 aa, Zea mays
  misc_feature (62)..(62): Xaa can be any naturally occurring amino acid
  misc_feature (110)..(110): Xaa can be any naturally occurring amino acid
  misc_feature (136)..(136): Xaa can be any naturally occurring amino acid
  unsure (1)..(161): unsure at all Xaa locations
MSDSEEHHFESKADAGAPKTYPHKAGTVRKNGFIVIMNRPCHDVEASTSKTAKHGHAKCHFXVAIDIFNGNELEQIVPSSHNWDIPHVNRTEYQLIDISEDGFASLLTSXGSTKDDLRLPTDETLVAQIREGFQSXKDLVETVQTAMGEEHICAMKDVGPK

SEQ ID NO: 4019 - protein, 187 aa, Zea mays
MAARIVVLILRLLTLGLLAASLVLIATDKLNIDGSDDSSENYIDAGDSDLSVKYTFRDIHAYRYVLAVAVIGCAYTLLQLPFAAVSIARGKSANVGGGGGVAAALVLVLADVVLVLLLATGAAAGFGFTSDVKRLLDGLFDDTNGLDQVQLKVDRFFDLASASAGLMLAAAVSMALVVMLSVYSLAK

SEQ ID NO: 4020 - protein, 136 aa, Zea mays
MTMVGQRPRRVEVTAVPILLILVVVLSDLSISVGAEKSVSAFVQNAILSNKIVIFSKSYCPYCLRSKRIFRELKEQPFVVELDLREDGDQIQYELLEFVGRRTVPQVFVNGKHIGGSDDLADAVENGQLQKLLAAS

SEQ ID NO: 4021 - protein, 444 aa, Zea mays
LAASASRSVVVAAAVRQPAMEEEPPHLFLCPISMELMDDPVTVSTGVTYDRRSIERWIFGCGRTTCPATMQSLANLDLTPNHTLKRVIGSWLDRGSPSTSASASPSASSLSSPAHELATPLSRILEAERLRSALAGLDETPFKVTALKNMRACMAGDVAMQCEFVSSGGIQAAGRVMAQALAESGAGGDFSAFTACEEAAAVLALLPLADAASVGLLLAPEHMRPLMALLQRGSAEARLHAMDIVTKISNAGAGDWTARVEVDDVLKSLLELLADEVSARLSSRALDVLLDVVELSRVGPTKAVEVGAVHVLVELLANADDRHDAERILLLLKRLCKCPEGRTAFAEHDLSVAAVAKTMLRVSELATQLAVKVLWLVSVVAPSEKVLEDMVLTGAVAKLLGLLHVESPPATKQKTVRMVRINGVFWRQYPCFPTDLRDYLRLLD

SEQ ID NO: 4022 - protein, 155 aa, Zea mays
  misc_feature (39)..(39): Xaa can be any naturally occurring amino acid
  misc_feature (45)..(45): Xaa can be any naturally occurring amino acid
  misc_feature (112)..(112): Xaa can be any naturally occurring amino acid
  unsure (1)..(155): unsure at all Xaa locations
MEKIGGISSGGTGSSGEAEVRKGPWTMEEDLILINYIAXNHGDGXVWNSLAKSAGLKRTGKSCRLRWLNYLRPDVRRGNITPEEQLTIMELHAKWGNRWSKIAKHLPGRTPXEIKIFWRKKPQNPLTPGWEKNTPPPVILPPPKKIERGGRPPKN

SEQ ID NO: 4023 - protein, 316 aa, Zea mays
APRDSRMKIFSGTANRPLAQEIAAYLGIELGKILIKRFADGEIYVQLQESVRGCDVFLIQPTCSPVNENLMELFIMIDACRRASARSITVVIPYFGYARADRKAQGREPITAKLAANLLTEAGSDRVIVCDIHSTQALGYFDIPVDHIYGQPVILDYLASKTISEDLVVVSPDVGGVVRARAFAKKLLNARLAIVDKRRQGHNMSEVMNLIGDVKGKVAILIDDMIDTAGTITSAAALLKQEGAEAVYACCTHAVFSPPAIERLSGGVFEEVIVTNSILLPEDKCFPQLTVLSMANLVGETIWHVHRDGSVSSIFQ

SEQ ID NO: 4024 - protein, 247 aa, Zea mays
MSANVGESTSGGSSNDAAGGSFECNICFELPQEPIVTLCGHLFCWPCLYRWLHIHAHSPECPVCKALVEEDKLVPLYGRGKDRVDPRSKNMPEGEIPHRPTGQRPAPAPQADANNNFANANPNANPWFMGTGVPLANARWGNYAFSAAFGGLFPMLSFQVHGFPDAAAYAQPAGFHYGYGHGHGHGFHHGGHMGQAQAHGVHRQAPLGQQQQQADIYLKALLFMIVILVLASLLAFKTCWVSRHGGN

SEQ ID NO: 4025 - protein, 101 aa, Zea mays
  misc_feature (36)..(36): Xaa can be any naturally occurring amino acid
  misc_feature (42)..(42): Xaa can be any naturally occurring amino acid
  misc_feature (52)..(52): Xaa can be any naturally occurring amino acid
  misc_feature (58)..(58): Xaa can be any naturally occurring amino acid
  misc_feature (63)..(63): Xaa can be any naturally occurring amino acid
  misc_feature (65)..(65): Xaa can be any naturally occurring amino acid
  unsure (1)..(101): unsure at all Xaa locations
TGASSSFNELAPCKGLWRVSTLKDLVSIGHAKCHFXVAIDIXQLGKKLEDIXVPSSHXNCDIXAXVTRTEYQLIDISEDGFVSLLTSDGNTKDDLRLPTDE

SEQ ID NO: 4026 - protein, 275 aa, Zea mays
  misc_feature (245)..(245): Xaa can be any naturally occurring amino acid
  unsure (1)..(275): unsure at all Xaa locations
MENRHSPAAPPNAKGGSGSGCPENKDVAAPNLSSAAEEVAATVATSDDDGLCKGNKNVAADSKKLKPHIVAERKRRDRMRDYFGELLALIPQIPAKSDKGTIVGHAVDYIQSLEKTKAMLEKRKQELAHARQAAAAAEGAASSSSAPPQSVRAMAAVSSDIPQPQLLQLPLSIAVPAPPPQVPTAARRQVGFQTWSWPNLVLNVSDDKAYISVCAPRHLGMQNMVTVLSVLNKHGIDVATAQVDXDAVRSMFNIYAHAIRTHSTLNFYSKRNILS

SEQ ID NO: 4027 - protein, 221 aa, Zea mays
SESFSTLQGDILEDPANEPKEDMYMMSIAPENAPSKPEYLEIGIIAGVPVSINGRDLSPASLLAELNEIGGKHGIGRIDMVENRLVGMKSRGVYETPGGTIMAAAVRELESLTLDREPMQWKDIIALKYAELVYAGRWFDPLRQSFDAFMEKVTATTTGSVTLKLYKGSVNVASRKSPYSLYREDISSFENGEIYNQADAEGFIRLYGLPTRVRAMLEKGI

SEQ ID NO: 4028 - protein, 94 aa, Zea mays
APGDKEQNRLKRLLGNRVLGQQGRERKKGSLTELEGGAKDLELPNGELEQGGSPLQKEKNTLRQILKNTTGHGSKRRGGGKGGDGGKKPPFAKS

SEQ ID NO: 4029 - protein, 391 aa, Zea mays
  misc_feature (318)..(318): Xaa can be any naturally occurring amino acid
  unsure (1)..(391): unsure at all Xaa locations
MCLGVLENDSTTIKKQEKKSQKPPKLAAFYVLLARTRAKRSKTSDVEAPAPRASFLSGAKAKQRYLSSQPIPSRTNGGRAPDLISLRYPLILPSTSSSASRRRGSRPASRAPGGPPPSTTRAGPTRPRPTPSRSTTRPSSSPAGSTRSGCSSTRTTTPVSDALPSVLWGHCSVHGRARMLLSTAVLLAVAAAAVPPTCERIECPAYEVVDSANGFEIRRYTDAMWITTAPIEDISFVAATRTGFLQLFDYIQGKNAYNQTIEMTAPVLTRVSPSDGPFCASAFAVSFYVPAKNQADPPPAEGLRVDRWAGARYAAVRXRFGGFVADADVGEQAARLEASLQGTRWAAAVNDARRADPASPYTVAQYNSPFEFTGRVNEIWMLFDADDDASM

SEQ ID NO: 4030 - protein, 178 aa, Zea mays
MCGILAVLGVAEVSLAKRSRIIELSRRLRHRGPDWSGLHCHEDCYLAHQRLAIIDPTSGDQPLYNEDKTVVVTVNGEIYNHEELKAKLKTHEFQTGSDCEVIAHLYEEYGEEFVDMLDGMFSFVLLDTRDKSFIAARDAIGICPLYMGWGLDEMKALSDDCERFITFPPGHLYSSKTG

SEQ ID NO: 4031 - protein, 127 aa, Zea mays
MSAAWEGGKEKGAATPAPGGACELCGAMARVYCGADEATLCWGCDAQVHGANFLVARHARALLCRGCARPTSWRAAGPRLGPSASLCDRCVRQRREWWRVRKRKHAVLHIPDGPAVPQLVVCAPRRP

SEQ ID NO: 4032 - protein, 318 aa, Zea mays
MGASLARSVALLTLLLCLFLPCHGKLSTKFYAKSCPSVAAIVRSVMEQAVAKEPRMGASIIRLFFHDCFVNGCDASILLDDTSTFTGEKNAGANANSVRGYEVIDAIKTQVEAACKGTVSCADIVALASRDAVDLLGGPTWNVQLGRKDSRAASQSAANANLPGPGSGAASLVATFAAKGLSARDMTALSGAHTVGRARCLFFRGRIYTDQNVNATFAAARQQTCPQSGGDGNLAPFDDQTPDAFDNAYYTNLMAQRGLLHSDQELFNGGPQDALVRKYSGNARMFATDFAKAMVKMGGLAPAAGTPTEVRFNCRKVN

SEQ ID NO: 4033 - protein, 611 aa, Zea mays
  misc_feature (606)..(606): Xaa can be any naturally occurring amino acid
  unsure (1)..(611): unsure at all Xaa locations
METLLAGNPANGVAKPTCNGVGALPVANSHAIIATPAAAAATLAPAGATLGRHLARRLVQIGASDVFAVPGDFNLTLLDYLIAEPGLTLVGCCNELNAGYAADGYARSRGVGACAVTFTVGGLSVLNAIAGAYSENLPVVCIVGGPNSNDYGTNRILHHTIGLPDFSQELRCFQTITCYQAIINNLDDAHEQIDTAIATALRESKPVYISVSCNLAGLSHPTFSRDPVPMFISPRLSNKANLEYAVEAAADFLNKAVKPVMVGGPKIRVAKAREAFAAVADASGYPFAVMPAAKGLVPEHHPRFIGTYWGAVSTTFCAEIVESADAYLFAGPIFNDYSSVGYSLLLKREKAVIVQPDRMVVGDGPAFGCILMPEFLRALAKRLRRNTTAYDNYRRIFVPDREPPNGKPNEPLRVNVLFKHIKGMLSGDSAVVAETGDSWFNCQKLRLPEGCGYEFQMQYGSIGWSVGATLGYAQAAKDKRVIACIGDGSFQVTAQDVSTMLRCGQKSIIFLINNGGYTIEVEIHDGPYNVIKNWDYTGLVNAIHNSEGNCWTMKVRTEEQLKEAIAMATGDKKDCLCFIEVIVHKDDTSKELLEWGSRVSAANSRXPPNPQ

SEQ ID NO: 4034 - protein, 481 aa, Zea mays
MASSTGSLEHGGFTFTPPPFITSFTELLSGAGDMLGAGADQERSSPRGLFHRGARGVPKFKSAQPPSLPISPPPMSPSSYFAIPPGLSPAELLDSPVLLHSSSNILASPTTGAIPAQRFDWKKAADLIASQSQQDGDSRAAAGGFDDFSFHTATSNAVHARTTTTSFPSFEEEQQQQVEKAAVPSSNRASGGGNGNTKLEDGYNWRKYGQKQVKGSENPRSYYKCTYHSCSMKKKVERALADGRITQIVYKGAHNHPKPLSTRRNSSGGGAAAEELQAGNSSLSAAAAAGCTGPEHSGATAENSSVTFGDDEAENGSQRSDGDEPDAKRWKQEDGENEGSSAGAGGKPVREPRLVVQTLSDIDILDDGFRWRKYGQKVVKGNPNPRSYYKCTTAGCPVRKHVERASHDTRAVITTYEGKHNHDVPVGRGAASRAAAAAAAGSGALMATGGGQLGYQQQQQQQPYTLEMLSSGSYGGGGGGY

SEQ ID NO: 4035 - protein, 159 aa, Zea mays
MSDEEHHFESSDAGASKTYPQQAGNIRKGGHIVIKGRPCKVVEVSTSKTGKHGHAKCHFVAIDIFTAKKLEDIVPSSHNCDVPHVNRIDYQLIDISEDGFVSLLTDSGGTKDDLKLPTDDSLSALMKSGFEEGKDVVVSVMSSMGEEQICAVKEVGGGK

SEQ ID NO: 4036 - protein, 247 aa, Zea mays
MEKEEGFGKSWLGLGIGGGGRDLNLMKRSRPLRPVRLDLLFPPSVEGGEAAARSRKAGAGALRNMSLKQVAGDDDGGQSSHGGPSPSDDDDGAGARKKLRLTTEQSKLLEDTFRAHNILSHAQKHEVARQVDLSARQVEVWFQNRRARTKLKQTEVDCETLRRWRESLADENLRLRLELEQLQRWATAAAGQSSASPSPATATASVCPSCDKVVVVTVTSCGETSGKSSTSSYSSSPPLDMLDRSVQ

SEQ ID NO: 4037 - protein, 278 aa, Zea mays
RKDNVAGEQRAREAGVGCGGTRGNAAAVEDVDHDLHIFTERERRKKMKNMFSTLHALLPQLPDKADKATIVGEAVTYSKTLEGTVQKLEKLKLERKRALAAQQQLMAGAGSNRASSARHPAPAPSSPSSSSREADMVHGWHAQQAAANKALAAEAGAGGSSSAAASLPRGAVPFPAPAAGFQTWSGQNVVVSVASNEAYINLHSPRQPAGTLTKALFVLERHRIDVVTTTISTQDGFHMYGIHARVNSASASARFPENLCAEDRFKLAVSEMLQLINI

SEQ ID NO: 4038 - protein, 282 aa, Zea mays
MEETIDDSEMSLSNMVLGFLEDFERDERRPENDDDNNEEEGSSGGDTAESKAFWQTQHLQLREALAKGSPAESRIRADTEEAVKSMRAAACSCSCTGRPAARDCRPCMLRHVADRLRDAGYDSALCKSKWTRSPDIPSGEHSYVEVAVQTRSGKSVRVVVELSFRAEFEVARASAGYRALVTALPEVFVGRADRLRGVVKVMCAAAKQCMKDNNMHMGPWRKHKYMQAKWLGTPERGAAAVAAAETPVVAVPSVTVGSPEKQTKFRASMLTFDFGRTALEVA

SEQ ID NO: 4039 - protein, 236 aa, Zea mays
MCGGAILSGFIPPSGVAAAAAAAKKQQQQQQRCRVTADLLWPGPGSKGAPPKDVQGDRAVKKRGRKNQYRGIRQRPWGKWAAEIRDPNKGVRVWLGTYNTAEEAARAYDAEARKIRGKKAKVNFPDDATGTRHRPTTDEIFNNLKNDDNNNNDDLFAMFAFGDNKKKVPAAKPAAAEGGSGSGSFLVPAPAVAVVPGNKRRSSATNTMLSVSDDQRSNSYGSGSSDLVGSWSWDDD

SEQ ID NO: 4040 - protein, 69 aa, Zea mays
MATRETGNVKWFNDAKGYGFIQREDGKDVFVHYRAIRGDGHRSLAEGQQVEYAVVTGEKGLQAEDVVGL

SEQ ID NO: 4041 - protein, 303 aa, Zea mays
  misc_feature (225)..(225): Xaa can be any naturally occurring amino acid
  unsure (1)..(303): unsure at all Xaa locations
LNWFEPQVMCDCYTPAGEPIPTNKRYSAAKIFSSPEVAAEEPWYGIEQEYTLLQKDTNWPLGWPIGGFPGPQGPYYCGIGAEKSFGRDIVDAHYKACLYAGINISGINGEVMPGQWEFQVGPSVGISSGDQVWVARYILERITEIAGVVVTFDPKPIPGDWNGAGAHTNYSTESMRKEGGYEVIKAAIEKLKLRHKEHIAAYGEGNERRLTGRHETADINTFSWXTLLIVQLLYRGGSAKPVCLPTVVALCRCRESPTVASVRVGRETEQNGKGYFEDRRPASNMDPYVVTSMIAETTIVWKP

SEQ ID NO: 4042 - protein, 347 aa, Zea mays
MASLTDLVNLDLSDCTDRIIAEYIWIGGTGIDLRSKARTVKGPITDPSQLPKWNYDGSSTGQAPGEDSEVILYPQAIFKDPFRKGNHILVMCDCYTPQGEPIPTNKRYSAAKVFSHPDVAAEDDLRLDWNRYGIEQEYTLLQKDGPYYCAAGADKAFGRDVVDAHYKACLYAGINISGINGEVMPGQWEFQVGPSVGISAGDEIWVARYILERITEMAGIVLSLDPKPIKGDWNGAGAHTNYSTKSMREAGGYEVIKEAIEKLGRRHREHIAAYGEGNERRLTGRHETADINTFKWSVANRGASIRVGRDTEKEGKGYFEDRRPASNMDPYVVTGMIAETTILWNGN

SEQ ID NO: 4043 - protein, 358 aa, Zea mays
  misc_feature (340)..(340): Xaa can be any naturally occurring amino acid
  unsure (1)..(358): unsure at all Xaa locations
MASLTDLVNLDLSDCTDRIIAEYIWIGGSGIDLRSKARTVKGPITDPSQLPKWNYDGSSTGQAPGEDSEVILYPQAIFKDPFRKGNHILVMCDCYTPQGEPIPTNKRYSAAKVFSHPDVAAEVPWYGIEQEYTLLQKDVSWPLGWPVGGYPGPQGPYYCAAGADKAFGRDVVDAHYKACLYAGINISGINGEVMPGQWEFQVGPSVGISAGDEIWVARYILERITEMAGIVLSLDPKPIKGDWNGAGAHTNYSTKSMREAGGYEVIKAAIDKLGKRHKEHIAAYGEGNERRLTGRHETADINTFKWGVANRGASIRVGRDTEREGKGYFEDRRPASNMDXPYVVTGMIAETTILWNGN

SEQ ID NO: 4044 - protein, 303 aa, Zea mays
MVMEETIDDSEMSLSNMVLGFLEDFERDERRPENDDDNNEEEGSSGGDTAESKAFWQTQHLQLREALAKGSPAESRIRADTEEAVKSMRAAACSCSCTGRPAARDCRPCMLRHVADRLRDAGYDSALCKSKWTRSPDIPSGWFVRLLTCSLPIRRNACAGEHSYVEVAVQTRSGKSVRVVVELSFRAEFEVARASAGYRALVTALPEVFVGRADRLRGVVKVMCAAAKQCMKDNNMHMGPWRKHKYMQAKWLGTPERGAAAVAAAETPVVAVPSVTVGSPEKQTKFRASMLTFDFGRTALEVA

SEQ ID NO: 4045 - protein, 488 aa, Zea mays
WAQVIEAFISGQVNVIHLLSPMTVWARYGSKVPAKVVAWNHVGGSGLTVAPGITDVKQLGGKSVAIPFWYSIHNVVVQQLFRDNGLTPVARAAGSAIAANEVNLIVLPPSDMPPALASQRIDGYIVAEPFNALAENLKVGRVQRFTGDVWRNHACCVVFMHEHDLINRPEWSQKVVNAIVKAQVWTRDNREEAVKLLSKDGPNRYTPHAEPVLSKVLAPAAADRAAYLADGAIQHGNWDEHRIDFQPYPFPSYTEELVRRLKDTLIEGDKKFLADLDPAFVAKDLVDDRFVFGATDGLSARFSLAATFGSLWELLGRGELYVHIAVSLKRIFVGLFLALLVGVPLGLLVGRSRTLEAATTPAFQFLRMISPLSWMPIVVMLMGVGDQPIYFLLAFAAVWPIMLNTAAGVRQLDPRWLQLSSLSATRWETLRRVIIPGVVGHVLTGVRLAIGILWIVLVPCEMLGVSAGLGYYILDTRDRLAYSELMAM

SEQ ID NO: 4046 - protein, 141 aa, Zea mays
  misc_feature (52)..(52): Xaa can be any naturally occurring amino acid
  unsure (1)..(141): unsure at all Xaa locations
MALAEADDGAVVFGEEQEALVLKSWAVMKKDAANLGLRFFLKVFEIAPSAKXMFSFLRDSDVPLEKNPKLKTHAMSVFVMTCEAAAQLRKAGKVTVTGFALLETIKEALPADMWSLEMKKAWAEAYSQLVAAIKREMKPDA

SEQ ID NO: 4047 - protein, 680 aa, Zea mays
MVFQKRSSSSEMESCGGGQVPEMPRVPKSARGKRSVRKKEAQSPAQMSAFDLLATVAGKLFDEGAGSLGNTSAGAPALAACAKDALVKQEQCDEQMKLFKHEATDQDSCNESAILPHIVLQRVVNNARNEDPKAKSEVQDKESSMISYTKAELGCNFGVIADRWSPESVESGACTGDAVARLMMTAPAGFHKNAPEMYSLLDSMDVDVKPPPLVSSDSTGEMPLHGDKIHRSTSLPRGPKGVGFFAVDRDDDDDKSSGCTHPSTATNKDFTSNCKAEYNRVRKLLTSKHRKVAPARIHKSDLSYSDVERKPSFRYKKMHTRQRTQRSTFKRRKLFDRHLALASEFGTANGKGNTKVAGRNSNAVSLEANKGTNSMPFQKSCGSNDCYVKLRIKSFNVPELLVEIPDSATVGSLKKTVLEAVTAILGGGLRVGVLHHGKKVRDDSKTLIQAGIGQDDMLDNLGFSLEPNCTQNPQVQAPEDVNFLENIDTTEPLARITPADSSSKLGEVDVSQELALTPLAMNYQGSDHDSVHSPGAVSSRDKDSRALFLVPAADPNAGAVVPANKTKRSPEQGHRRIRRPFSVAEVEALVLAVEKLGTGRWRDVKLRAFDNAKHRTYVDLKDKWKTLVHTASISPQQRRGEPVPQELLDRVLAAQAYWSQQQAKLQPKTPSLAEARLLTQ

SEQ ID NO: 4048 - protein, 164 aa, Zea mays
  misc_feature (37)..(37): Xaa can be any naturally occurring amino acid
  unsure (1)..(164): unsure at all Xaa locations
VAGMESDDEIRRVPELGLELPGASTSGREAGPGRCGXADRALAQSSTAQASARRRVRSHADKEHKRLKRLGGGDMHAIARHGPGCKWVRLLRNRVSAQQARERKKAYLTDLEVKVRDLEKKNSEMEERLSTLQNENQMLRQILKNTAVNRRGSGSTASGEGHGQ

SEQ ID NO: 4049 - protein, 266 aa, Zea mays
MVPRDRAHSAAAATAPPTEKPVQGPIQNNKCEKKAPKKVHKSEREKRKRDKQNDLFGELGNMLEPDRQNNGKACILSDTTRILKDLLSQVESLRKENNTLKNESHYVALERNELLDETNMIRGEISDLQNEMRMRLEDNSIWSHDTSRPNLTAPHPATTVFTLQHSPHPQVIATMTLPLQQPAVVEQSYAAPRRELQLFPEAAPTEDTEPPQNEGTSNHVMRPQARYPPAMTTLPGHVYPVLPRVEDEQRSSGTTGSREEGGVGNR

SEQ ID NO: 4050 - protein, 440 aa, Zea mays
TLDLATQTSAAEGFQMISGGCRGNVQSQIDIFQMRPERNMKLPSSSKFSSRSLEEKQNQCTAACSNDATQNKGGLRESLWVTRLLPKASVELMEATPCNVENAVSPQAVGDKLCCPPLQNFNLEKELNNIQYFTGRGSSDGVTSSKCPATPPEEPKQSETMASVFAKRLDALRHANTSAVSLAIACEHGSPKLRNHKTNSFVVSYSSHDKVEAGHENHKSSSGNGRIVLWVGDKGKEPMCLNNEELRGNFISEREHQHHGGNTAGKLATQHNLELNILAEDTDRSQVELKGGVLDFMAGPSDNKQIVPYGTMSNDESSVIFGALHRLRLSRSDILRWLRSPIMHTTLDGFFVRLRFGKWEEALGGTGYHVARLNGALDRSRLSVTIRNSTCQVDSRFVSNHDFHEDELKAWWSAAMKGEWKLPSKEELGVKLREKELLRA

SEQ ID NO: 4051 - protein, 484 aa, Zea mays
MADSRRSVVYDAEGGDDHERQGTAWTATSHIVAAVVGSGVLALAWTVAQLGWVVGPLVLVGFSCVTYYTSALLADCYRYPDPVHGAVNREYIDAVRCYLDRKNVVLCGCAQYVNLWGTLVGYTITASASMIAIKRVNCFHRDGYGAAGCNPSGSTYMVVFGLFQLLLSQLPSLHNIAWLSVVAVATSLGYSFISLGLCSAKWASHGGHVRGTLAGAAAVAGRVDDDKQAAFNVLLALGNIAFSYTFADVLIEIQDTLRSPPAENRTMKRASAYGLAITTVFYLALGCTGYAAFGDHAPGNILTGFAFYEPFWLVDAANVCVVLHLVGAYQVFAQPIFARLESCVACRWPDAKLINATYYVRVPPCLLLLRTSSSSSPPPTLAVAPLKLVLRTIVIMFTTLVAMLVPFFNAVLGLIGALGFWPLSVYFPVSMHMARLNIRRGEIRWWMLQAMSFVCLLISVAASIGSVHDIVHNLKAAAPFNTAN

SEQ ID NO: 4052 - protein, 423 aa, Zea mays
MAQAVVPAMQCRVGVKAAAGRVWSAGRTRTGRGGASPGFKVMAVSTGSTGVVPRLEQLLNMDTTPYTDKVIAEYIWVGGSGIDIRSKSRTISKPVEDPSELPKWNYDGSSTGQAPGEDSEVILYPQAIFKDPFRGGNNVLVICDTYTPQGEPLPTNKRHRAAQIFSDPKVAEQVPWFGIEQEYTLLQKDVNWPLGWPVGGFPGPQGPYYCAVGADKSFGRDISDAHYKACLYAGINISGTNGEVMPGQWEYQVGPSVGIEAGDHIWISRYILERITEQAGVVLTLDPKPIQGDWNGAGCHTNYSTKTMREDGGFEEIKRAILNLSLRHDLHISAYGEGNERRLTGKHETASIGTFSWGVANRGCSIRVGRDTEAKGKGYLEDRRPASNMDPYIVTGLLAETTILWQPSLEAEALAAKKLALKV

SEQ ID NO: 4053 - protein, 333 aa, Zea mays
MQILAYRRTTQPKRHTRSKRMPPPPPLVLLAKPLFPNFAAALEGRYRLVLAGDADAATAAEARVLLVPGLVAVTAELVDRLPALELVAATSVGLDHVDLRACRRRGLAVTNAGAAFSVDSADYAVGLVVAVLRRVAAAEAHLRRGGWATDGEYPLTTKVSGKRVGIVGLGSIGSLVARRLAAMGCRVAYHSRAPKPSCSCPYAFFPTARALALASDVLVLSCALTEETRRVVGREVLEALGQGGVLVNVGRGGLVDEPELVRCLREGVIGGAGLDVFEDEPDVPAELLAMDNVVLSPHRAVLTPESMRGLLDVVAGNLDAFFAGRPLLSPVSL

SEQ ID NO: 4054 - protein, 334 aa, Zea mays
MEGVMTTRSKHRCHEEDQEMTMVELRRGPWTLEEDNLLMNYTACHGEGRWNLLARCSGLKRTGKSCRLRWLNYLKPDIKRGNLAPEEQLLILELHSKWGNRWSRIAQHLPGRTDNEIKNYWRTRLLEKTMAAAAASTSGEVLLPPLPPPPQLHPSRVAGLLASSSSSPVQRDTSDSDYLPQRYHHHPVDPSPSASSTVSSSAALAPVPCFSELSWVDQYGYGPYYSYGANLDDGAGVFDDSAALEEGLGLDALDLGPADDSDVAHSDATLLDYLNSACAGGGTMMMAVTGGGGGVQSSGCGATGGADADYRPSPCTWRTDELGDPRQHQWGGGI

SEQ ID NO: 4055 - protein, 282 aa, Zea mays
  misc_feature (106)..(106): Xaa can be any naturally occurring amino acid
  unsure (1)..(282): unsure at all Xaa locations
MVKGEEDTIRALRCHLFRLHLLHWNCRFCAARYRYGWKTTVDFKPYIGPIYNAILGRLANHDQDQVWQNSLFSLPFLGACRALSFFIKYGMPAMLSWVLGGNSLKXQKGRPLSCRLSDKAHDELYRWFDDDDALEQAMGGEWYLFATSEANNNSLQQPIRLIRDEQRSLSVGSRSDANDSASSLSLPFPQISERHATITCKNKAFYLTDLGSEHGTWITDNEGRRYRVPPNFPVRFHPSDVIEFGSDKKAMFRVKVLNTLPYESARSGKQQGLQQEQVLQAA

SEQ ID NO: 4056 - protein, 498 aa, Zea mays
MSTCAADLAPLLGPAAANATDYLCGQFADTASAVDATYLLFSAYLVFAMQLGFAMLCAGSVRAKNTMNIMLTNVLDAAAGALFYYLFGFAFAFGTPSNGFIGKQFFGLKHLPRTGFDYDFFLYQWAFAIAAAGITSGSIAERTQFVAYLIYSAFLTGFVYPVVSHWFWSADGWAGASRTSGPLLFGSGVIDFAGSGVVHMVGGIAGLWGALIEGPRIGRFDHAGRSVALKGHSASLVVLGTFLLWFGWYGFNPGSFTTILKSYGPAGTVHGQWSAVGRTAVTTTLAGSVAALTTLFGKRLQTGHWNVVDVCNGLLGGFAAITAGCSVVEPWAAVICGFVSAWVLIGANALAARFRFDDPLEAAQLHGGCGAWGVLFTGLFARRKYVEEIYGAGRPYGLFMGGGGKLLAAQIIQILVIAGWVSCTMGPLFYALKKLGLLRISADDEMSGMDLTRHGGFAYVYHDEDPGDKAGVGGFMLKSAQNRVEPAAAVAAATSSQV

SEQ ID NO: 4057 - protein, 339 aa, Zea mays
MDMAHERSDASSEEEVMAGELRRGPWTVEEDLQLVNYVDAHGEGRWNSLARSAGLKRTGKSCRLRWLNYLRPDLRRGNITPQEQLMILELHSRWGNRWSKIAQHLPGRTDNEIKNYWRTRVQKHAKQLKCDVNSQQFKDVMRYLWMPRLVERIQAAAANNNASGAGVPPAGAAADDTPLSSSWQHGGGADDDGGLYASPELPTDACWPPADCYYYPAAADHQLLNNPAAAAVFPDLSSTTAGSSSPSSDSGAGTAQPWPAPLGGAEWLTTGACCDASSAAAAAVVLGGQQQQSCLVGETSWASSELPELGVADFEIGSFDVESIWSMDDSLWFTQAQGV

SEQ ID NO: 4058 - protein, 158 aa, Zea mays
MGFVSFVGRVLFVAAFLLSAYQEFNEFGADGGPAAKALRPKFNVFVKNVSAHLGVAVPHIELKHVIAATIGLKGLGSLLFILSSSLGAYLLLLYLALITPIIHDFYNYDMEKAEFAGLFAKFTQDLALIGALLFFLGMKNSIPKRQGGKKKAPKAKTN

SEQ ID NO: 4059 - protein, 914 aa, Zea mays
MAAAFSAAILFHLLLLLFSPSAAQPGFISLDCGGARDHTDAIGIQWTSDASFVSGGQAAQLLVQNGLQQTQQQLTTVRYFPADNRKHCYTMNVRNRTRYLVRATFLYGNFDNSNVYPKFDISLGASPWSTIVVDDATTPVVEEAIILAAAPTLSVCLSNASTGQPFISTLELRQFNGSLYYTTDETRFFLGLSARINFGAGSNDSVRYPDDPFDRIWESDSVRRANYLVDVAPGTERISTTKPIFVGTNEEPPEKVMQTAVVGQDGSLNYRLDLEGFPANAWGVSYFAEIEDLAPNETRKFKLEVPGMPALSKPTVDVEENAQGKYRLYEPGYTNLSLPFVFSFGFRKTNDSSKGPILNALEIYKYVQITMGSQDANIMASMVSRYPQEGWAQEGGDPCLPASWSWVQCSSETSPRIFSITLSGKNITGSIPVELTKLSGLVELRLDGNSFSGQIPDFRECGNLQYIHLENNQLTGELPSSLGDLPNLKELYVQNNKLSGQVPKALFKRSIILNFSGNSGLHIVSNGISHTIIVICLVIGAVVLLGVAIGCYFITCRRKKKSHEDTVVIAAAPAKKLGSYFSEVATESAHRFSLSEIENATGKFERRIGSGGFGIVYYGKLADGREIAVKLLTNDSYQGIREFLNEVTLLSRIHHRHLVTFLGYSQQDGKNILVYEFMHNGTLKEHLRGADNEKITSWLKRLEIAEDSAKGIEYLHTGCSPTIIHRDLKSSNILLDKNMRAKVADFGLSKPAVDGSHVSSIVRGTVGYLDPEYYISQQLTEKSDIYSFGVILLELISGHEPISNDNFGLNCRNIVAWARSHIESGNIHAIIDESLDRGCYDLQSVWKIAEVAIMCVKPKGAQRPPISEVLKEIQDAIAMERVLVSNCSNRMGSGSVEQNGGASFDELLMQPGLR

SEQ ID NO: 4060 - protein, 232 aa, Zea mays
  misc_feature (116)..(116): Xaa can be any naturally occurring amino acid
  misc_feature (125)..(125): Xaa can be any naturally occurring amino acid
  unsure (1)..(232): unsure at all Xaa locations
FFFFLGEEPESEQEWRREGGDPDLLSQRGGEDRRRKMAAQEQEQEQEKQQAKTSTTSSLPSSSERSSSSARNNLTEGGAESDEEIRRVPEMGGASASASSGAGADERPKGEDGKQXAGGGGGAAXAGGKKRGRTAGDKEQNRLKRLLRNRVSAQQARERKKAYLTELEAKAKGLELRNAELEQRVSTLQNENNTLRQILKNTTAHASKRSGGGGGGGGKGGDGGKKHHLAKS

(The sequence listing continues in the following parts.)

What is claimed is:

1. A recombinant DNA construct comprising a polynucleotide encoding a protein having a CCT Pfam domain scoring above the Pfam gathering cutoff value of 25.000.

2. The recombinant DNA construct of claim 1 wherein said protein has an amino acid sequence having at least 90% identity over at least 90% of the length of a reference sequence having the amino acid sequence of SEQ ID NO: 374 when said amino acid sequence is aligned with said reference sequence.

3. A recombinant DNA construct comprising a promoter that is functional in a plant cell and that is operably linked to a polynucleotide that, when expressed in a plant cell:
(a) encodes a protein:
i) having an amino acid sequence selected from the group consisting of SEQ ID NO: 308, 310, 312-315, 317-323, 325-343, 345, 347-349, 352-354, 356, 358-359, 366-372, 374-383, 389-392, 394, 396, 401-403, 405-412, 414, 417-424, 427-453, 455-473, 475, 488-501, 503-517, 519-531, 533-540, 542-543, and 546-614;
ii) having an amino acid sequence having at least 90% identity over at least 90% of a reference sequence selected from the group consisting of SEQ ID NO: 308, 310, 312-315, 317-323, 325-343, 345, 347-349, 352-354, 356, 358-359, 366-372, 374-383, 389-392, 394, 396, 401-403, 405-412, 414, 417-424, 427-453, 455-473, 475, 488-501, 503-517, 519-531, 533-540, 542-543, and 546-614 when said amino acid sequence is aligned to said reference sequence; or
iii) that is a homolog of a protein with an amino acid sequence selected from the group consisting of SEQ ID NO: 308, 310, 312-315, 317-323, 325-343, 345, 347-349, 352-354, 356, 358-359, 366-372, 374-383, 389-392, 394, 396, 401-403, 405-412, 414, 417-424, 427-453, 455-473, 475, 488-501, 503-517, 519-531, 533-540, 542-543, and 546-614;
or
(b) is transcribed into an RNA molecule that suppresses the level of an endogenous protein in said plant cell wherein said endogenous protein has an amino acid sequence selected from the group consisting of SEQ ID NO: 309, 311, 316, 324, 344, 346, 350-351, 355, 357, 360-365, 373, 384-388, 393, 395, 397-400, 404, 413, 415-416, 425-426, 454, 474, 476-487, 502, 518, 532, 541, or 544-545 or is a homolog thereof;
wherein said construct is stably integrated into plant chromosomal DNA.

4. A transgenic plant cell comprising the recombinant DNA construct of claim 3 wherein said plant cell is in a plant selected by screening a population of transgenic plants that have been transformed with said construct for an enhanced trait as compared to control plants; and wherein said enhanced trait is enhanced water use efficiency, enhanced cold tolerance, increased yield, enhanced nitrogen use efficiency, enhanced seed protein or enhanced seed oil.

5. The plant cell of claim 4 further comprising DNA expressing a protein that provides tolerance from exposure to an herbicide comprising an agent applied at levels that are lethal to a wild type of said plant cell.

6. The plant cell of claim 5 wherein the agent of said herbicide is a glyphosate, dicamba, or glufosinate compound.

7. A transgenic plant comprising a plurality of plant cells of claim 4.

8. The transgenic plant of claim 7 which is homozygous for said recombinant DNA.

9. A transgenic seed comprising a plurality of plant cells of claim 4.

10. The transgenic seed of claim 9 from a corn, soybean, cotton, canola, alfalfa, wheat, rice, sugarcane, or sugar beet plant.

11. Grain comprising transgenic seed identifiable by the recombinant DNA construct of claim 3.

12. Seed meal produced from transgenic seed identifiable by the recombinant DNA construct of claim 3.

13. A transgenic pollen grain comprising a haploid derivative of a plant cell nucleus having a chromosome comprising the recombinant DNA construct of claim 3.

14. A method for manufacturing non-natural, transgenic seed that can be used to produce a crop of transgenic plants with an enhanced trait resulting from expression of the stably-integrated, recombinant DNA construct of claim 3, said method comprising:
(a) screening a population of plants for said enhanced trait and said recombinant DNA, wherein individual plants in said population exhibit said trait at a level less than, essentially the same as or greater than the level that said trait is exhibited in control plants which do not contain said recombinant DNA, wherein said enhanced trait is selected from the group of enhanced traits consisting of enhanced water use efficiency, enhanced cold tolerance, increased yield, enhanced nitrogen use efficiency, enhanced seed protein and enhanced seed oil;
(b) selecting from said population one or more plants that exhibit said trait at a level greater than the level that said trait is exhibited in control plants, and
(c) collecting seed from selected plant from step b.

15. The method of claim 14 wherein said method for manufacturing said transgenic seed further comprises:
(a) verifying that said recombinant DNA is stably integrated in said selected plants, and
(b) analyzing tissue of said selected plant to determine the expression or suppression of a protein having the function of a protein having an amino acid sequence selected from the group consisting of one of SEQ ID NOs:308-614.

16. The method of claim 15 wherein said seed is corn, soybean, cotton, canola, alfalfa, wheat, rice, sugarcane, or sugar beet seed.

17. A method of producing hybrid corn seed comprising:
(a) acquiring hybrid corn seed from an herbicide tolerant corn plant which also has the stably-integrated, recombinant DNA construct of claim 3;
(b) producing corn plants from said hybrid corn seed, wherein a fraction of the plants produced from said hybrid corn seed is homozygous for said recombinant DNA, a fraction of the plants produced from said hybrid corn seed is hemizygous for said recombinant DNA, and a fraction of the plants produced from said hybrid corn seed has none of said recombinant DNA;
(c) selecting corn plants which are homozygous and hemizygous for said recombinant DNA by treating with an herbicide;
(d) collecting seed from herbicide-treated-surviving corn plants and planting said seed to produce further progeny corn plants;
(e) repeating steps (c) and (d) at least once to produce an inbred corn line; and
(f) crossing said inbred corn line with a second corn line to produce hybrid seed.
